United States Patent Application Publication US 2013/0332133 A1 - sequence listing, part 6

SEQ ID NO: 96095 - protein, 294 aa, Unknown
  Bacterial polypetide isolated from the Sargasso Sea
IPSNFNVHKTLKKIFDLRLNVIKEGKAIDWSTAESLAFGTLLTEGFSVRLSGQDSGRGTFSQRHAVLRNQDNHERYIPLNNISQTQKNFEIIDSLLSELAVLGFEFGYSLSEPETLVLWEAQFGDFANGAQVIIDQFISSGESKWGRASGLVMLLPHGYEGQGPEHSSARLERFLQLCAGENIQVVNCTTPSNYFHVLRRQMHREFRKPLIIMTPKSLLRHKKCTSNILEFIKKSTFHRVLEDDAYSNIGNLLELKKKDDQINKVVICSGKIYYDLIEAREKYKNNKVTFVRIE

SEQ ID NO: 96096 - protein, 275 aa, Unknown
  Bacterial polypetide isolated from the Sargasso Sea
KKIRSHPTTLNIYTKKISSEGLLNESQINKKKLDFKKFLETQFNDSKNYKSELKWFDGVWSRFKPGLGKDKRGVSGVDKKLLIETGKKISEIPKNFSIHKTLKKVLEQKQKMFSENAPIDWSTAESLAFATLLIDGFSVRLSGQDSARGTFSQRHSVLRNQENHDRYIPLNNLGKKQKKFEIIDSLLSELAVLGFEFGYSLSEPETLVLWEAQFGDFANGAQIIIDQFITSGESKWGRASGLVLLLPHGYEGQGPEHSSARLERFLQMCAGEIYK

SEQ ID NO: 96097 - protein, 315 aa, Unknown
  Bacterial polypetide isolated from the Sargasso Sea
NDGFSVRLSGQDSGRGTFSQRHSVLRNQDNHERYIPLQHVSKKQKNFEVIDSLLSELGVLGFEFGYSLSEPETLVLWEAQFGDFVNGAQVVIDQFISSGESKWSRASGLVMLLPHGYEGQGPEHSSGRLERFLQLCAQDNLQVVNCTTPANYFHVLRRQMHRDFRKPLIVMTPKSLLRHKKCISNLEDFTKKNSFHRILEDSAYLKGSKLISLKKDKKIKKVVMCSGKIYFDLIEQREKVKNDSIVLLRIEQLYPFPVKQVGKQLKRYKNAKFFWCQEEPKNMGAWNTARHYIDRTLDIIQVKGEKVKYVGRNAA

SEQ ID NO: 96098 - protein, 300 aa, Unknown
  Bacterial polypetide isolated from the Sargasso Sea
LYENRLKMVTEDKQLDWAMAENMAYATLLNQNCKIRLSGQDSGRGTFAQRHAIITAEDNTKYVPLNHLSKDQATFEVYNSFLSEYGVLGFEYGYAYASPNSLTIWEAQFGDFANGAQIVIDQFVASSETKWQRMNGVVLLLPHGHEGQGPEHTSARIERFLTLCADNNMQIINCTTPANFFHVLRRQMIFPFRKPLVIFTPKSLLRHPKCFSHLEEFLEGTRFLEVIKDYNTDPQSVQKVLLCCGKVYYDLLAHQQKNQIKDIAIIRLEQLYPFPKKQLLTVLKLYSNIRNICWVQEEPE

SEQ ID NO: 96099 - protein, 271 aa, Unknown
  Bacterial polypetide isolated from the Sargasso Sea
KLDWSSAESLAIGTLLTEGFSVRLSGQDSGRGTFSQRHAILRNQENHERFIPVNNIEKGQMKFEVIDSLLSELAVLGFEFGYSLSEPETLVLWEAQFGDFANGGQVIIDQFITSSESKWGRASGLVMLLPHGYEGQGPEHSSARLERFLQLCAGENIQIVNCTTPSNYFHVLRRQMHREFRKPLIIMTPKSLLRHKRCISNISEFTSKSSFHRVLEDDAYFEENKLISLEKDKKIKKVVMCSGKIYYDLIEAREKSKKNDIVFIRLEQLYP

SEQ ID NO: 96100 - protein, 290 aa, Unknown
  Bacterial polypetide isolated from the Sargasso Sea
MYKKIKSHPSTLTLYGQKLSNEGLTSDKELQKNKVNFKKWLETEFEKSKNYKSDLKWFDGVWSRFKPGLGKDKRGASGVNSKLLKAVGKKISTIPAGFSVHKTLKKIFDLRNQSIEKESGIDWSTAESLAFGTLLAEGFSVRLSGQDSCRGTFSQRHAILRNQENHQRYIPLNNIKEGQKNFEAIDSLLSEFAVLGFEFGYSLSEPETLVLWEAQFGDFANGAQIIIDQFISSGESKWGRASGLVMLLPHGYEGQGPEHSSARLERFLQLCAGENMQVVNCTTPANYFHV

SEQ ID NO: 96101 - protein, 250 aa, Unknown
  Bacterial polypetide isolated from the Sargasso Sea
IDQFIASGERKWSRASGLVMLLPHGYEGQGPEHSSARLERFLQLCSNDNMQVMNCTTPANYFHALRRQMHRDFRKPLIIMTPKSLLRHKRCVSNIDDFSKKNSFHRILWDHAIDPTIKGFIKLKKAKKIKKVILCSGKIYFDLLEAREKLEKDDVVFFRIEQLYPFPVKSLVKELRPYAKNAKFYWCQEEPKNMGAWFSVRDYIQWTLDNIKANNNIVSYIGRSPDASPATGYAKRHISQQKEIIKEVLE

SEQ ID NO: 96102 - protein, 288 aa, Unknown
  Bacterial polypetide isolated from the Sargasso Sea
GEKLVHEGSISKDHLNNSIKRFKDLLDDQFKNAKNYKPKIEWFEGTWSRYKPERGKDKRGVTGFDIKKLIEISNKINTIPSDINIHKTISKIMANRKTTVINGKAIDWSTAEALAFGSLLEEGYPVRLVGQDSGRGTFSQRHSVLRNQIDNSRYVPLNNISTKQKKFEIVDSFLSELAVLGFEYGYSLVEPNTLTLWEAQFGDFANGAQVVIDQFIASGERKWSRASGLVMLLPHGYEGQGPEHSSARLERFLQLCSNDNMQVMNCTTPANYFHALRRQMHRDFRKPL

SEQ ID NO: 96103 - protein, 265 aa, Unknown
  Bacterial polypetide isolated from the Sargasso Sea
MYKKIRSHPSTLYIYAKKLIDQGTINVSDFESEKNEFNILLDDQFKSAKNHKPKLDWFEGTWSRYRPQKGKDKRGKTGVNLGILNKISEKINVLNENLNVHKTIKRIFSNRREAVNKKNNIDWSTAESLAFGTLLDEGFPVRLVGQDSGRGTFSQRHSVLRNQENNSRYIPLNNISDKQKKFEIVDSFLSELAVLGFEYGYSLSEPETLTLWEAQFGDFANGAQVVIDQFIASGERKWRRASGIVLLLPHGYEGQGPEHSSARLE

SEQ ID NO: 96104 - protein, 227 aa, Unknown
  Bacterial polypetide isolated from the Sargasso Sea
TWSRYRPERGKDKRGKSSVTEKKLIEISEKINLIPESAKIHKTIKRIFDNRYQTIKNKKNIDWSTAESLAFGTLLEEGFPVRLVGQDSGRGTFSQRHSVLRNQLDNSRYIPLNNISKKQKRFEIVDSLLSEMAVLGFEYGYSLVEPNTLTIWEAQFGDFANGAQIIIDQFISSGERKWSRASGLVMLLPHGYEGQGPEHSSARLERFLQLCAKENLQIMNCTTPANY

SEQ ID NO: 96105 - protein, 286 aa, Unknown
  Bacterial polypetide isolated from the Sargasso Sea
ENSLKDEGLLSEEKIKIIKKEYRKSLEGGKSVAKNLAKKPNDSLWFDWEPFMDVLWWPKVDTTFNKKKFNKLAKDICKIPNSFNLGSQASKIFEERLKMNNGEVELNWGFAENMAYATLLSEGYPIRITGQDVRRGTFSHRHACLFDSETGMGFIPLSEIAEKNNTRFDIYDSLLSEEAVLGFEYGYSATWPSGLAIWEAQFGDFANGAQVVIDQFIVSAQHKWERLSGLVMLLPHGYEGQGPEHSSARIERFLQLCASENIQVCVPSSPKQIFHLLRRQAIRKMR

SEQ ID NO: 96106 - protein, 258 aa, Unknown
  Bacterial polypetide isolated from the Sargasso Sea
RGTFSQRHSVLKDQLNGSKYTPLNNISKNQKRFEVIDSLLSEMAVLGFEYGYALSEPSTLVIWEAQFGDFANGAQVIIDQFIASAERKWARANGLVMLLPHGYEGQGPEHSSARLERFLQLCAQENIQVMNCTTPANYFHALRRQIHRDFRKPLIIMTPKSLLRNKMCTSNIDDFTKKNTFHRVLNDHADSKKNDFIKLVEDKKIKKVAICSGKIYFDLLQAREKNKNKNVYIIRIEQLYPFPVKTLAKELKRFRKNS

SEQ ID NO: 96107 - protein, 313 aa, Unknown
  Bacterial polypetide isolated from the Sargasso Sea
MLLSGKLDWSSAESLAIGTLLTEGFSVRLSGQDSGRGTFSQRHAILRNQENHDRYIPANNISNGQMKFEVIDSLLSELAVLGFEFGYSLSEPETLVLWEAQFGDFANGGQVIIDQFITSSESKWGRASGLVMLLPHGYEGQGPEHSSARLERFLQLCAGENIQVVNCTTPSNYFHVLRRQMHREFRKPLIVMTPKSLLRHKRCISKISEFTSNSSFHRILEDDAFTKGNELISLKKDKKIKKVVMCSGKIYYDLVDAREKRKKDDVVFIRLEQLYPFPAKTLANILKRFTNAKFLWCPEEPKTWVRGILSETT

SEQ ID NO: 96108 - protein, 256 aa, Unknown
  Bacterial polypetide isolated from the Sargasso Sea
VPSNFNAHKTLKRVFELKNQMFIKGQIDWSSAESLAIGTLLTEGFSVRLSGQDSGRGTFSQRHAVLRNQDNHDRYIPLNNIQTGQKKFEIIDSLLSELAVLGFEYGYSLSEPETLVLWEAQFGDFANGAQVIIDQFITSSEAKWGRASGLVMLLPHGYEGQGPEHSSARLERFLQLCAGENIQVVNCTTPSNYFHVLRRQMHREFRKPLIVMTPKSLLRHKRCISKISEFASKSSFHRVLEDDAYDREKKLISLKK

SEQ ID NO: 96109 - protein, 286 aa, Unknown
  Bacterial polypetide isolated from the Sargasso Sea
VGKNYKPNKADWLEGSWTGFESKGIVKPNIITGLPLKTLKEYGVKLAKIPEGFEVNRKVQRVLQKRLKTISDGKDIDWACAESLAFASLLYEGVNVRLSGQDCGRGTFSQRHAILVDQKSEQKFSTLNNFLQNGSRVEIVDSPLSEAAVLGFEYGYTLADPNTLVLWEAQFGDFANGAQLIIDQFIVSGESKWLRMSGVTILLPHGYEGQGPEHSSARIERYLQMAAEDNIQVVNCTTPANYFHVLRRQMLRKFRKPLIIFTPKSLLRKKEAVSKLDDMGENKKFK

SEQ ID NO: 96110 - protein, 231 aa, Unknown
  Bacterial polypetide isolated from the Sargasso Sea
MLLPHGYEGQGPEHSSAILERFLQLCSNDNMQIMNCTTPANYFHALRRQMHRDFRKPLIIMTPKSLLRHKFCVSNIEDFSKKNSFHRVLWDHAIDPKSKGFIKLKKSNKIKKVILCSGKIYFDLLEAREKQKKDDVVFYRIEQLYPFPAKSLAKELKPYAKKAKFYWCQEEPKNMGAWFSVRDYIQWTLDNIKANNNQISYIGRSPDASPATGYVKRHISQQQEIIKKVFE

SEQ ID NO: 96111 - protein, 276 aa, Unknown
  Bacterial polypetide isolated from the Sargasso Sea
SDKSEFKKYLEEEFESSKNYKSELKWFDGVWSRFKPGLGKDKRGISGVDKDKIIQIGKKMSTLPKNFNVHKTLKRVFELRSQIFSKTHKVDWSTAESLAFATLLTEGFSVRLSGQDSGRGTFSQRHAVLRNQDNHDRYIPLNNIKKGQKNFEIIDSLLSELAVLGFEFGYSLSEPETLVLWEAQFGDFANGAQIIIDQFITSGESKWGRASGLVMLLPHGYEGQGPEHSSARLERFLQLCAGENIQVVNCTTPSNYFHVLRRQMQREFRKPLIVMT

SEQ ID NO: 96112 - protein, 242 aa, Unknown
  Bacterial polypetide isolated from the Sargasso Sea
ERKWSRASGLVMLLPHGYEGQGPEHSSARLERFLQLCSNDNMQVMNCTTPANYFHALRRQMHRDFRKPLIIMTPKSLLRHKFCVSDLVDFSKENSFHRVLWDHAIDPKIKGFIKLKKLKKIKKVILCSGKIYFDLIEAREKLKRNDVVFYRIEQLYPFPAKALANELKPYAKTAQFYWCQEEPKNMGAWFSVRDYIQWTLDNIKANNKNVSYIGRSPDASPATGYAKRHISQQKEIIKKVFE

SEQ ID NO: 96113 - protein, 287 aa, Unknown
  Bacterial polypetide isolated from the Sargasso Sea
SVLNQYENNLMKEGILDAEQSKKIKSNYRKSLEGGESVAKNLAKKPNDSLWFDWEPYLGVKWWPKVDTKYSKKELKKLGKEIISVPKEFNMGSQASKIFADRHEMNQGNIPINWGYAEVMAYATLLKDGYPIRLTGQDVRRGTFSHRHACIFDSKTGMGHISLSELAEKNKTSFDIYDSLLSEEAVLGFEYGYSATWPSGLTIWEAQFGDFANGAQVVIDQFIVSAQHKWERLSGLIMLLPHGYEGQGPEHSSARIERFLQLCASENIQVCVPSSPKQIFHLLRRQA

SEQ ID NO: 96114 - protein, 311 aa, Unknown
  Bacterial polypetide isolated from the Sargasso Sea
QDSKRGTFSHRHSVLYDTETRERYTNLLDLSEDQAQFCVHNSLLSEAAVLGFDFGYSLDYPQMLCIWEAQFGDFVNGAQVIIDQFITSSESKWGRLSGIVMLLPHGYEGQGPEHSSARLERFLQSCADNNIQVCNLTTPAQLFHVLRRQMKREFKKPLVIMTPKSLLRHKECVSKVSDFTEGHFHNMIDDDSVNKNRIKKIILCSGKIYYDLESHRKTRGYEHIAIVRVEQFYPLDRELFSSILKSYPDEAEIIWCQEEPKNMGGWTFILSYILELTGKMPKYVGRKCSASPAVGSLAIHKYEQSTLVSEA

SEQ ID NO: 96115 - protein, 274 aa, Unknown
  Bacterial polypetide isolated from the Sargasso Sea
EGYPVRLVGQDSGRGTFSQRHSVLRNQIDNSRYVPLNNISNKQKKFEIVDSFLSELAVLGFEYGYSLVEPNTLTLWEAQFGDFANGAQVVIDQFIASGERKWSRASGLVMLLPHGYEGQGPEHSSARLERFLQLCSNDNMQVMNCTTPANYFHALRRQMHRDFRKPLIIMTPKSLLRHKHCISQIEDFSKKNSFHRILWDHAMDPKTKGFIELKKPKKIKKVILCSGKIYFDLLEAREKMKRNDVVFYRIEQLYPFPAKTLVKELKPYAKNAYF

SEQ ID NO: 96116 - protein, 267 aa, Unknown
  Bacterial polypetide isolated from the Sargasso Sea
IISKEEFNNMNTEFKNLLEEQYKTAKNYKPKIEWYEGTWSRYKPEKGKDRRGKSGVDLNKILKISEKINSIPLKINIHKTISKILESRRQSILKKKDIDWSTAESLAFATLLEEGYPVRLVGQDSGRGTFSQRHSVLRNQIDNSRYIPLNNISDKQKKFEIVDSFLSELAVLGFEYGYSLVEPSTLTIWEAQFGDFANGAQVIIDQFIASGERKWSRASGLVMLLPHGYEGQGPEHSSGRLERFLQLCAQDNLQVMNCTTPANYFHA

SEQ ID NO: 96117 - protein, 293 aa, Unknown
  Bacterial polypetide isolated from the Sargasso Sea
DEVNIHKTISKILHVRKNSVDKGFDIDWSTAEALAFGSLLEEGFPVRLVGQDSGRGTFSQRHSVLRDQNDNSRYIPLNNISNKQKKFEVVDSFLSELAVLGFEYGYSLVEPNTLTLWEAQFGDFANGAQVVIDQFISSGERKWNRASGLVMLLPHGYEGQGPEHSSARLERFLQLCSNDNMQVLNCTTPANYFHALRRQMHRDFRKPLIIMTPKSLLRNKFCVSNLKDFNKKNTFHRVLWDHAIDPKSSGFIKLKESSKIKKVILCSGKVYFDLLDAREKLKKDDVVIFRIEQ

SEQ ID NO: 96118 - protein, 289 aa, Unknown
  Bacterial polypetide isolated from the Sargasso Sea
MGKKITEIPKNFKMHKTLIKLFEAKKKIFTGDQPVDWSTAESLAFATLVNEGFSVRLSGQDSGRGTFSQRHSVLRNQDNHDRYVPLNHISKKQKRFEIIDSLLSELGVLGFEFGYSLSEPETLVLWEAQFGDFSNGAQVVIDQFIASGESKWSRASGLVMLLPHGYEGQGPEHSSARLERFLQLCAQDNLQVVNCTTPANYFHVLRRQMHRDFRKPLIVMTPKSLLRNKMCVSNLDDFTKKNSFHRILEDHAYLNGTKLIKLKKDKEIKKVAICSGKIYFDLIEARERA

SEQ ID NO: 96119 - protein, 231 aa, Unknown
  Bacterial polypetide isolated from the Sargasso Sea
AQHKWERLSGLVMLLPHGYEGQGPEHSSARIERFLQLCASENIQVCVPSSPKQIFHLLRRQAIRKMRTPLVVISPKSLLRNPMAVSNLDELTNGNFDCVIDDDIKKPEAVKRLILCSGKVFYDLIEKKKEEHREDIAVVRIEQLYPFPYDDLEEILTKYQNVQEFIWCQEEPLNQGAWFSHRHRIQRVLDRLGDGLEVSLVSRPAAAAPAVGLMKLHLQQQKDLVNEAIDK

SEQ ID NO: 96120 - protein, 215 aa, Unknown
  Bacterial polypetide isolated from the Sargasso Sea
FLSLDSIAKEGKTLVDIYDSLLSEEAVLGFEYGYSATWPSGLVIWEAQFGDFANGAQVVIDQFIVSAEHKWERLSGLVMLLPHGFEGMGPEHSSARLERFLQLCAANNIQVCMPSSPSQIFHLLRRQAIRKMRRPLIVITPKSLLRLPEAASDLSELTNGSFNCIIGDDLPTEKIKRVVLCSGKVYYDLKKVRDEKGISDVALLRLEQLYPFPYF

SEQ ID NO: 96121 - protein, 301 aa, Unknown
  Bacterial polypetide isolated from the Sargasso Sea
RERSQEADYRNALDDGRVVYPPAYDADKSRFLVDWTPYLGAKWADPAETAIGRERIMRLNERLVTLPEGFEPHRRVKRLLEDRTRMAQGEIAMDWGFAETMAYASLIEDGYSVRLSGQDSGRGTFSHRHAVLKNQARRQPYVPLRSISDDPSKFLVIDSLLSEEAVLGFEYGYATTEPRTLAIWEAQFGDFANGAQVVIDQFISSGEAKWQRLCGLTLFLPHGMEGQGPEHSSARLERFLQLCGDNNMQVCVPTTPAQFFHLLRRQMIRPLRRPLVVMTPKSLLRHRHSVSSLNDLTEGHF

SEQ ID NO: 96122 - protein, 285 aa, Unknown
  Bacterial polypetide isolated from the Sargasso Sea
DEPSFTQPLMYKKIKSHQTSLSIYGKKLINENTITIEEFEKQKSDFKNLLDQQFQTAKNYNPKIEWFEGTWSRYKPQKGKDIRGVSGFDTKELIKISEKIHKIDEKYNIHKTITKIFNNRHKSVLEGKNIDWSTAEVLAFGSLLAKGNPIRLVGQDTGRGTFSQRHSVLRNQVDNTRYIPLNNISKSQSQFEVVDSLLSEFAVLGFEYGYSLVEPETLVLWEAQFGDFANGAQVIIDQFIASGERKWSRASGLVLLLPHGYEGQGPEHSSARLERFLQLCAKDNL

SEQ ID NO: 96123 - protein, 314 aa, Unknown
  Bacterial polypetide isolated from the Sargasso Sea
SAKDYKPKIEWFEGTWSRYKPERGKDKRGITGFDKNKLKIISDKINDIPDEKNIHKTISKIFNARKESVERGTGIDWSSAEALAFGSLLEEGYPVRLVGQDSGRGTFSQRHSVLRNQIDNSRYIPLNNISKNQKQFEVVDSFLSELAVLGFEYGYSLVEPNTLTLWEAQFGDFANGAQVVIDQFIASGERKWNRASGIVMLLPHGYEGQGPEHSSARLERFLQLCSNDNMQVMNCTTPANYFHALRRQMHRSFRKPLIIMTPKSLLRNKYCVSNLEDFNKKNTFHRVLWDHAIDPKSKGFIKLKESSKIRKVIL

SEQ ID NO: 96124 - protein, 230 aa, Unknown
  Bacterial polypetide isolated from the Sargasso Sea
MLPHGYEGQGPEHSSARLERFLQLCSNDNMQVMNCTTPANYFHALRRQMHRDFRKPLIIMTPKSLLRHKYCVSNLEDFSKKNTFHRVLWDHAIDPDTKSFIKLKKAKEITKVILCSGKVYFDLLEAREKLKVDDIVLYRIEQLYPFPAKALVKELKPYAKNATFHWCQEEPKNMGAWFSVRDYIQWTLDNIKAKYNYISYIGRSPDATPATGFAKRHISQQQEIINKVFN

SEQ ID NO: 96125 - protein, 310 aa, Unknown
  Bacterial polypetide isolated from the Sargasso Sea
EWKGLSSAKRKEMLKTFSTKVDKNVLEKVAKNIFKLDNPDLYLKKVVRLMNDRNNMFFKHDKIDWAISELLAYGTLLDQNYNIRISGQDVERGTFSHRHAILKTEKTEKEFTPLNNISKDQGSFQIYNSSLSEYGVMGFEYGYALAYPNTLTVWEAQFGDFSNGAQIMIDQYLSSAEDKWKLQNGLVLMLPHGYEGQGAEHSSARLERYLQLCAKDNMYVANCTTPANLFHILRRQLVTKFRKPLILLTPKSLLRHPKVISKTSDLINGEFLPVIDDSDKQKNVKSLVFCSGKFYYDLLYYKRLNKISNV

SEQ ID NO: 96126 - protein, 248 aa, Unknown
  Bacterial polypetide isolated from the Sargasso Sea
ISSGERKWQRASGLVMLLPHGYEGQGPEHSSARLERFLQLCANDNLQVMNCTTPANYFHALRRQIHRDFRKPLVLMTPKSLLRNKYCVSSIEDFNKQTSFHRILWDHALNKDSKNFIKLKKTAEIKKVILCSGKVYFDLLAAREKIKRDDVILFRIEQLYPFPVKSLVKELNPYANNAKFYWCQEEPKNMGAWFSVRDYIQWTLETIKAKNNNISYIGRNPDASPATGYAKRHMVEQEEIINKVFDNE

SEQ ID NO: 96127 - protein, 254 aa, Unknown
  Bacterial polypetide isolated from the Sargasso Sea
SVRLSGQDSARGTFSQRHAVLRHQNSHDRYVPLHNISKKQKSFEVIDSLLSELGVLGFEFGYSLSEPETLVLWEAQFGDFSNGAQVVIDQFISSGESKWSRASGLVMLLPHGYEGQGPEHSSARLERFLQLCAQENLQVVNCTTPANYFHVLRRQMRRDFRKPLIVMTPKSLLRHKKCISYLEDFTKKTRFHRILEDHAYLKKIKLIKLKTNKQIKKVIMCSGKIYFDLLEAREKSKNDEIVFIRIEQLYPFPV

SEQ ID NO: 96128 - protein, 310 aa, Unknown
  Bacterial polypetide isolated from the Sargasso Sea
KITEIPKNFNVHKTLLKIFETKRKIFIDNNPIDWSTAEALAFGTLLSDGFSVRLSGQDSGRGTFSQRHSVLRNQDNHERYIPLQHVSKRQKKFEVIDSLLSELGVLGFEFGYSLSEPETLVLWEAQFGDFANGAQVVIDQFIASGESKWSRASGLVMLLPHGYEGQGPEHSSARLERFLQLCSQENLQVVNCTTPANYFHVLRRQMHRDFRKPLIVMTPKSLLRHKRCISNLEDFTKKNSFHRILEDHAYLKGSKLIELKQDKKIKKVVMCSGKIYFDLIEAREKAGDDKVVFIRIEQIYPFPVKQLGKQ

SEQ ID NO: 96129 - protein, 241 aa, Unknown
  Bacterial polypetide isolated from the Sargasso Sea
VTGADIDILLNISKKINIVPSEFNIHKTIGKILETRQNKVDQGHGIDWATAEALAFGTLLEEGYPVRLVGQDSGRGTFSQRHSVLRNQVDNSRYIPLNRISKNQKNFEVVDSFLSELAVLGFEYGYSLVEPNTLTIWEAQFGDFANGAQVIIDQFIASGERKWKRASGLVMLLPHGYEGQGPEHSSARLERFLQLCANDNMQVMNCTTPANYFHALRRQLHRDFRKPLIMMTPKSLLRNKY

SEQ ID NO: 96130 - protein, 235 aa, Unknown
  Bacterial polypetide isolated from the Sargasso Sea
NPINWGYAEVMAYATLLKDGYPIRLTGQDVRRGTFSHRHACIFDSQTGMGHISLSELAEKNKTSFDIYDSLLSEEAVLGFEYGYSATWPSGLTIWEAQFGDFANGAQVVIDQFIVSAQHKWERLSGLIMLLPHGYEGQGPEHSSARIERFLQLCASENIQVCVPSSPKQIFHLLRRQAIRKMRTPLIVISPKSLLRNPQAVSTLDDLSDGSFECVIDDELDNKNDVKKIIMCSGK

SEQ ID NO: 96131 - protein, 276 aa, Unknown
  Bacterial polypetide isolated from the Sargasso Sea
KDLLNEQYKSAKDYKPKIEWFEGTWSRYKPERGKDKRGITGYDENKLKIISDKINVIPEEKNIHKTISKIFNAKKESIEKGTGIDWSSAESLAFGSLLEEGYPVRLVGQDSGRGTFSQRHSVLRNQIDNSRYIPLNNISKNQKQFEVVDSFLSELAVLGFEYGYSLVEPNTLTLWEAQFGDFANGAQVVIDQFIASGERKWNRASGIVMLLPHGYEGQGPEHSSARLERFLQLCSNDNMQVMNCTTPANYFHALRRQMHRSFRKPLIIMTPKSLLR

SEQ ID NO: 96132 - protein, 275 aa, Unknown
  Bacterial polypetide isolated from the Sargasso Sea
YALSEPTTLVVWEAQFGDFVNGAQVIIDQFIASGERKWSRASGLVMLLPHGYEGQGPEHSSARLERFLQLCAQENIQVMNCTTPANYFHALRRQMHREFRKPLIIMTPKSLLRNKRCVSNIEDFTKKNSFHRVLPDQSEIKEYDLIELKKDKKIKKVVICSGKIYFDLLEAREKLKNDSVYLVRIEQLYPFPVKSLAVQLKRFRKNANFFWCQEEPQNMGAWNTTRNYIEWVLNHIDSENREVRYIGRKPAASPATGYIKRHIDQQKQIVEKVLN

SEQ ID NO: 96133 - protein, 314 aa, Unknown
  Bacterial polypetide isolated from the Sargasso Sea
MKKDFKNLLDEQFKTAKNYKPKLDWYEGVWSRFKPEKGKDKRGITGVSSEKIKKIGEKITKIPENFVVHSTIKKIFENKKKMLHTGKGFDWATAEQLAFATLLDEGFPVRLAGQDSGRGTFSQRHSVLRDQTNNKYYTPLNNISQTQKRFEVIDSLLSEFAVLGFEHGYALSEPTSLVVWEAQFGDFANGAQVIIDQFVASGERKWSRASGLVMLLPHGYEGQGPEHSSARLERFLQLCAQENIQVMNCTTPANYFHALRRQMHREFRKPLIIMTPKSLLRNKRCVSNIEDFTKKNYFHRVLPDHAQFKKYGLY

SEQ ID NO: 96134 - protein, 321 aa, Unknown
  Bacterial polypetide isolated from the Sargasso Sea
NIYERLNSAEGLAKYLSAKYPGMKRFGIDGAEALVPLVESVIQNCGSMGAKQICFGMAHRGRLNLLVNVLGKLPSELFSAFDEDTELEGASTGDVKYHLGFSSNFETPGGEVHVSLFNNPSHLEIVDPVVIGSVRARQDRIGDKDRSQVVPILLHGDASFSGQGVVMESLQMSQTRGFNVGGTIHIIVNNQIGFTTSNINDSRSTDYSSDVAKIIQAPVIHVNGDDPEMVVNAAKIACKYRNKFKKDIVIDLFCYRRRGHNEADDPSATQPLMYNKISKHPSVLNQYETNLIDHGILTSDESKKIKNEYRKSLEGGESVAK

SEQ ID NO: 96135 - protein, 270 aa, Unknown
  Bacterial polypetide isolated from the Sargasso Sea
QGYGIDWATAESLAFGSLLEEGYPVRLVGQDSGRGTFSQRHSVLRNQLDNSRYIPLNNISQNQKNYEIVDSFLSELAVLGFEYGYSLVAPNTLTIWEAQFGDFANGAQVIIDQFISSGERKWKRASGLVMLLPHGYEGQGPEHSSARLERFLQLCANDNLQVMNCTTPANYFHALRRQLLRDFRKPLIMMTPKSLLRNKYCKSNLRDFSKENSFHRVMWDHSMDPKNKGFIKLKKNSEIKKVILCSGKLYFDLLEAREKIKKDDIIIFRN

SEQ ID NO: 96136 - protein, 267 aa, Unknown
  Bacterial polypetide isolated from the Sargasso Sea
LEDGCIEEERLKDMTDRYRSRIERGKGVALSLVHEPNSELFVDWRPYLGHDWDEPGDTRFDKKEFQTVADKLGDIPNGFVLHRQVEKIVDDRHRMAAGAKPSNWGMGEVMAYATLLSEGHAVRLTGQDVGVGTFSHRHAIFHNQKDGSRVIPLKSINEQARFDVFDSLLSEEAVLAFEYGYSATAPNSLVIWEAQFGDFANGAQVVVDQFISSGETKWARLSGLTLLLPHGYEGQGPEHSSARLERYLQMCAEHNMQICIPSTPAQV

SEQ ID NO: 96137 - protein, 333 aa, Unknown
  Bacterial polypetide isolated from the Sargasso Sea
DEPSFTQPLMYKKIKSHPSVYKIYGSKLVNENSITQDLLDQNVKGFKDLLDEQYKSAKDYKPKIEWFEGSWSRYKPAKGKDKRGVSGFDEYKLKEISNKINTIPPEINIHKTISKILNIRKNSVDKGFDIDWSTAEALAFGSLLEEGYPVRLVGQDSGRGTFSQRHSVLRDQIDNSRYIPLNNISNNQKKFEVVDSFLSELAVLGFEYGYSLVEPNTLTLWEAQFGDFANGAQVVIDQFIASGERKWNRASGLVMLLPHAYEGQGPEHSSARLERFLQLCSNDNMQVLNCTTPANYFHALRRQMHRDFRKPLIIMTPKSLLRNRFCVSNLKRF

SEQ ID NO: 96138 - protein, 318 aa, Unknown
  Bacterial polypetide isolated from the Sargasso Sea
VCYRRFGHNEGDEPSFTQPLMYKKIRSHQSTANIYGSKLINENLISKEGLNDQIKNFKDLLDEQFKTAKDYSPKIEWFEGAWSSYKPKKGKDKRGVTGADKKTLKNISDKINVVPSEISIHKTISKILQIRKKSVDDGVNIDWSTAESLAFGSLLDEGFPVRFVGQDSGRGTFSQRHSVLRDQTNNSRYIPLNNISKHQKKFEIVDSFLSELAVLGFEYGYSLVEPNTLTLWEAQFGDFANGAQVIIDQFISSGERKWQRASGLVMLLPHGYEGQGPEHSSARLERFLQLCANDNLQVMNCTTPANYFHALRRQIHRG

SEQ ID NO: 96139 - protein, 256 aa, Unknown
  Bacterial polypetide isolated from the Sargasso Sea
HAEMLSLASLVKNNISIRFSGQDSQRGTFSQRNAIIWDREGKGNINLLDKFTDKNIYADVINSPLSEIAALAFEFGYSIIENKSLVIWEAQFGDFVNNAQSVIDEFIVSSQPKWGLDSNLVLLLPHGYEGMGPNHSSGWIERFLESADNNNIAIANCTTSAQYFHLLRAHTQMQKQSNPLIIFTPKSLLRHPISSSSVKELTSSKFKNVIKNRNVKNANKIIIGSGKIIVDIMNDPDYKQLSPKAELLSIEMLYPF

SEQ ID NO: 96140 - protein, 303 aa, Unknown
  Bacterial polypetide isolated from the Sargasso Sea
ELQQTFRLKFNRDVVIDLICYRRFGHNEGDEPSFTQPLMYKKIRSHPSTIKVYGKKLVNEGSITNDYLNSSIKKFKDLLDDQFKNAKNYKPKIEWFEGTWSRYRPELGKDKRGVTGSNTKKLKNISDKINTIPAEINIHKTIRKIIDNRKLTVSKGKGIDWSTAESLAFGSLLDEGYPVRLVGQDSGRGTFSQRHSVLRNQIDNSRYIPLNNISNKQKNFEIVDSFLSELAVLGFEYGYSLVEPNTLTIWEAQFGDFANGAQVVIDQFIASGERKWSRASGLVMLLPHGYEGQGPEHSSARLE

SEQ ID NO: 96141 - protein, 263 aa, Unknown
  Bacterial polypetide isolated from the Sargasso Sea
QFGDFANGAQVVIDQFIASGESKWSRASGLVMLLPHGYEGQGPEHSSARLERFLQLCAQENLQVVNCTTPANYFHALRRQMRRDFRKPLVVMTPKSLLRHKKCVSYLDDFTKKTRFHRILEDHAYLVGSKLIKLKKDKKIKKVVMCSGKIYFDLIEAREKNKDDSTVFIRIEQLYPFPVKHLGRELKKYENAKFFWCQEEPMNMGAWNTVKYYIDRTLEIIRVKGEKVNFIGRNAAASPATGNLNKHLAEQKKILEKVVGKFN

SEQ ID NO: 96142 - protein, 294 aa, Unknown
  Bacterial polypetide isolated from the Sargasso Sea
IIIETGKKISEIPNNFSIHKTLKKILEQKQKMFTENAPIDWSTAESLAFATLLMDGFSVRLSGQDSARGTFSQRHSVLRNQESHERYIPLNNLGKKQKKFEIIDSLLSELAVLGFEFGYSLSEPETLVLWEAQFGDFANGAQVIIDQFITSSESKWGRASGLVLLLPHGYEGQGPEHSSARLERFLQMCAGENIQVVNCTTPANYFHALRRQMHREFRKPLIVMTPKSLLRNKRCISSIEDFTKKNSFHRVLEDHAYIKGSKTIELKKDKKIEKAVMCSGKIYFDLLDAREKSK

SEQ ID NO: 96143 - protein, 262 aa, Unknown
  Bacterial polypetide isolated from the Sargasso Sea
KTIGSHDSISKIYASKLINEGILTDQEAKDEVNNHNIFLEKEFQAGTNYKPNKADWLEGQWSSLRAAHGDDRRGETSVSKDDLKLIGNAITIIPENLQVNKKLIRIVEARKKAIQTGEGIDWSTAEHLAFGSLLLEGHPVRLSGQDSCRGTFSQRHSVFIDQMSEERYTPLNNITPGQQNFEVIDSPLSEASVLGFEYGYSLTEPTALVMWEAQFGDFANGAQVIVDQFISSGEAKWLRMSGPRMLLPHGYEGQGPEHSSAR

SEQ ID NO: 96144 - protein, 277 aa, Unknown
  Bacterial polypetide isolated from the Sargasso Sea
CYRRFGHNEGDEPSFTQPMMYKKIRQHPTTLNVYGEKLIKEGTITTEEFNKNKKEFKNLLNEQLKTAKEYKPKIEWFEGVWSRFKPQKGKDQRGVTGVTIDIINKIGKRITYIPKDFNVHPTIKKIFENKKKMFETGKGFDWATAEQLAFATLLEEGTPVRLSGQDSGRGTFSQRHSVLRDQKDNNYYTPLNNISNKQKKIEVIDSLLSEYAVLGFEHGYALSEPTTLVVWEAQFGDFANGAQVIIDQFITTSERKWSRASGLTMLLPHGYEGQGPE

SEQ ID NO: 96145 - protein, 269 aa, Unknown
  Bacterial polypetide isolated from the Sargasso Sea
AEINVHKTITKIMDLRKQSIVSKKGIDWSTAESLAFGTLLEEGFPVRLVGQDTGRGTFSQRHSVLRNQIDNSRYIPLNNIKKNQKKFEVVDSFLSELAVLGFEYGYSLVEPSTLTIWEAQFGDFANGAQVIIDQFISSGERKWSRASGLVMLLPHGYEGQGPEHSSGRLERFLQMCAQDNLQVINCTTPANYFHALRRQIHRDFRKPLIIMTPKSLLRNKLCVSNLEDFSKKNSFHRVLWDHAIDPKESKFIKLEKNSKINKVIFCSGK

SEQ ID NO: 96146 - protein, 282 aa, Unknown
  Bacterial polypetide isolated from the Sargasso Sea
KDYKPKIEWFEGTWSRYKPERGKDKRGITGFDENKLKIISDKINDIPDEKNIHKTISKIFNARKESVERGTGIDWSSAEALAFGSLLEEGYPVRLVGQDSGRGTFSQRHSVLRNQIDNSRYIPLNNISKNQKQFEVVDSFLSELAVLGFEYGYSLVEPNTLTLWEAQFGDFANGAQVVIDQFIASGERKWNRASGIVMLLPHGYEGQGPEHSSARLERFLQLCSNDNMQVMNCTTPANYFHALRRQMHRSFRKPLIIMTPKSLLRNKYCVSNLEDFNKKNTF

SEQ ID NO: 96147 - protein, 410 aa, Unknown
  Bacterial polypetide isolated from the Sargasso Sea
PSHLEAVNPVVLGQTRAKQFFHKDRQRNKVIPILIHGDAAFAGQGVVAECFAMSGLPGHNTGGTIHIIVNNQIGFTTSPRFARSSPYPSDVAKMVEAPILHVNGDDPEAVVYATRIASEFRIKFNRDVVVDLICYRRFGHNEGDEPSFTQPLMYKKIRSHPSVYKIYGNKLVNEKSITQELLNQNVKSFKDLLDEQYKSAKNYKPKIEWFEGSWSRYKPERGKDKRGVTGYDENKLKIISDKINVIPEEKNIHKTISKIFNARKESIKKGTGIDWSSAEALAFGSLLEEGYPVRLVGQDSGRGTFSQRHSVLRNQIDNSRYIPLNNISDNQNQFEVVDSFLSELAVLGFEYGYSLVEPNTLTLWEAQFGDFANGAQVVIDQFIASGERKWNRASGIVMLLPHGYEGQGPE

SEQ ID NO: 96148 - protein, 281 aa, Unknown
  Bacterial polypetide isolated from the Sargasso Sea
MGFEYGFATAEPNALVMWEAQFGDFANGAQVVIDQFISSGESKWLRMNGLVLLLPHGFEGQGPEHSSARLERYLQLCAEDNMQVINCTTPANYFHALRRQLNRDFRKPLIVMTPKSLLRHKECVSNLSEMAENTSFHRVLYENDLKIDEKSIERVVICSGKVFYDLKEEKKLNKINNVKILRLEQLYPFPKKALTEILSLTPKVDLVWCQEEPKNMGSWFFVKEHLEEIACDLSLPKTDILYAGRAEAASPATGSASRHKTEQKNLIEKALIKDRNFVAAE

SEQ ID NO: 96149 - protein, 318 aa, Unknown
  Bacterial polypetide isolated from the Sargasso Sea
LRHFQEKQGYFEIVDSFLSELGVLGFEYGYSQADPKTLVIWEAQFGDFANGAQVMIDQFITSGERKWLRMSGITLLLPHGHEGQGPEHTSARIERFLQMCAEDNIQVVNCTSPANYFHVLRRQLHRNFRKPLVVLTPKSTLRHKKNVSPVSHFINGSSFHRILTEKLSIEEKKSKKRLIICTGKIYFELIEQIEKLKLEAISIIRLEQIYPFPYENFKEELQNFQNAEIIWCQEEPKNMGAWGFVRSRIKNVMNDAAIKQSEIYYVGRSPSAPPATGISDRHQINQKSILRLALEANIKEISEAWAGVSQIRGKLPIE

SEQ ID NO: 96150 - protein, 760 aa, Unknown
  Bacterial polypetide isolated from the Sargasso Sea
MQRMLRSSHLGGQNAAYIEALYEEYLADPSNVPEVWRSYFDTLPTVESAIGPDTPRSQVVQHFERLGRNRLKARPEKVATEISSVHETQQMRVQDLVSAYRHRGHKRANIDPLGMMERPHMPVLDLSYHSLSPANLDETYQTGTFHYGDGAAKLRELIDALESTYCGSIGAEYMHIVDAREQLWVQQRLESARGKPQFDADLKQRILERLIAAEGLEKYLHRRYPGTKRFGLEGGESLIPMLHELFQRLGTHGIRESVIAMAHRGRLNVLVNVLGKNPGDLFDEFDGRVLSESGSGDVKYHQGFSSNMMTPGGEMHLALSFNPSHLEIVAPVAEGSVRARQDRRKDYAGDMVAPIIIHGDAAFAGQGVVMETFQMSQTRGFKTGGSVHIIVNNQIGFTTHKQIDARSTEYCTEVAKMIQAPIFHVNGDDPEAVIFATQLAADYRIEFRKDVVIDLVCYRRRGHNEAEEPAKTQPLMYQKIRTQNTVCARYGEKMVQEGSVQAETVESMTEQYRSRLEGGESVALEMVHEPHSELFVDWTPYIGSSLDAPADTSFDNAAFQELSARMEAVPDGFVLHRQVTKILEDRHRMAAGAMLVNWGMAEVMAYATLVQQGFPVRLTGQDVGVGTFSHRHAALHNQKDGSRLIPLNLLREDITFDLYDSLLSEEAVLAFEYGYATTAPNTLVVWEAQFGDFANGAQVVIDQFISSGETKWARLCGLTMLLPHGFEGAGPEHSSARLERFLQLCAERNMQICVPSTPAQ

SEQ ID NO: 96151 - protein, 949 aa, Unknown
  Bacterial polypetide isolated from the Sargasso Sea
MRSYNSFLTTNNAPQVIAIYRDYIKDPSLVDKSWHEFFKALAPEEISILADYQKINWSETSRDIDFNQISLDQAITDSLRLVMMIRAYREIGHLIADLDPLGLMAKNNPSGLDPEYYGFQKKDYDRKIFLFGYLGFQKATVREVFEKLQSIYSGTLAIEYKHIQSAEEYKWLKDRIEEKKDMQLTSKGKRTILERLITAEYFEKFLDTKYRGTKRFGLEGAESTIPALEQILKRSSEYGVEDFSFACAHRGRLNILANIVKKPHVQIFGEFIHGGENALSDQGSGDVKYHLGASSDRSFGGKIIHVSMAANPSHLEAVNPVVAGKIRAKQTIIQDKNNTKVSGLLIHGDAAIAGQGIVAETFTMSQLNGYRIGGLIHFIINNQIGFTTSPQYSRSAPYSSEIGKIVQSPIFHVNGDDPEAVVLASRAATEFRNTFKKDTLVDMFCYRKHGHNEGDEPSFTQPLMYQTIKKKKTVASIYADKLISQEVVNTKQVDFIKDRIWSDLEKKFEKAKNYKLKTKSWMGGQWSGLSLAPKDPLRRGRTAESEKSLKEIGTKISQIPKGFNLHPKLEKFNKSRLTSIKSGKNIDWSFAEALAFGALLKEGYRVRLAGQDSGRGTFSQRHSVFYDQKSEERYIPLNHIAKNQKQFEVIDSFLSELGVLGFEYGYSLADPNTLVLWEAQFGDFANGAQIIIDQFIASSERKWMQMSGLVMLLPHGHEGMGPEHSSARIERFLQMAAEDNVQIVNCTTPASYFHALRRQIHRNFRKPLIVFTPKSTLRHPNNVSSISEFTGRSSFHRLIEDEIKNPKRIIFCSGKIFYELDDFRTKNNIKDVKIVRIEQIYPFPFDAIGDVILKHKESEILWVQEEPKNMGAWSFVKSRIRHVLVKNNLTKKVHYVGRRSAAAPATGISKRHSTNQQLIKELALKSSLKRVIKERRGVSFMKFKNLPKE

SEQ ID NO: 96152 - protein, 918 aa, Unknown
  Bacterial polypetide isolated from the Sargasso Sea
MDKFSFLNSAHTSHFAEMYDQYLQSPDSLEPSWKAFFQGFDFGMETSSVTFEEKKFQVPENIKKEFQVVNLIDAYRKRGHLFTITNPVRERRKYSPTLAIENFGLNETDLELVFSAGEIVGLGPDKLKNIIKHLNDIYCSSIGVEYMYIRDPNRVKWIQNRLNINANHPNFSKTQKLSILNKLSQAYLFENFLQKKYVGQKRFSLEGGESLIPAIDFLIQLAADKGVSEVVMGMSHRGRLNTLANIFEKSTNEIFAEFEGKDYEEDIFDGDVKYHLGWTSERISDKGNKINLNLAPNPSHLESVFPIVQGISRAKIENDLDNDPNSLIPIIVHGDAAIAAQGVVYEVVQMSKLKGYSTGGTIHIIVNNQIGFTTNYLDGRSSTYCSDIGKVTLSPVLHVNSDDVEAVVHAISFALDYRMEYGMDIFIDLLGYRKYGHNEGDEPRFTQPRLYKLISSHPNARAIYSNELISKGIISEEYTDGIEKEYLESLESELIETKKKSKTKITPFMQKVWEDYKRVDEKIMSKDFKTNYSKKRLLEVAKSVTDLPENSGFLKKIYKLFENRKKMLFDENKVDWAISELLAYATILSDGFNVRISGQDVERGTFSHRHAVLKSEDFEEEYLPLNSIDTKNKGKFKIFNSLLSEYGVLGFDYGYALASPKSLTIWEAQFGDFSNGAQIVIDQYISSAEDKWKLQNGIVLYLPHGYEGQGAEHSSARIERYLQLCAKDNMYAANCTTPSNLFHILRRQMVTNFRKPLILFTPKSLLRHPEVVSDIDDLITGKFETVISDNDVNPKDVSSIVFCSGKFYYDLLKFRREKKIKNVALIRLEQLFPLPIQEIDLELNKFSKATDFVWAQEEPRNMGVWSHFLMHYPHANKFRPATRRPYGSTASGSHARFERRHNQVIEYVFDKQKDNFRK

SEQ ID NO: 96153 - protein, 569 aa, Unknown
  Bacterial polypetide isolated from the Sargasso Sea
EFEGKDYEEKIFDGDVKYHLGWTSQRVTDNNKQINLNIAPNPSHLETVGSVVQGISRSKLDKYFNNDSDKVLPIIVHGDAAIAGQGLVYELVQMARLEGYETGGTIHIVVNNQIGFTTNYLDGRSSTYCTDVGKVTLSPVLHVNADDVEAVVHAVLFALDFRLEFKRDVFIDLLGYRKYGHNEGDEPRFTQPKLYKLISKHPNPKNIYASKLIAESLMSEEEVKNIELEYRSKLENQLEDSKKSEKTRITDFMSDEWTDYERVNNLQMNWGDIMVKPVDTTYPRLKLDKIAEVISNLPSDKKFINKIKKLVNNRQVMYDNDMLDWSMAEHLAYGSLLEEGYSVRISGQDVERGTFSHRHAIVKVEESEEEISLLNNINDKQGKFTIYNSLLSEYGVLGFEYGYAMADPKSLTIWEAQFGDFSNGAQIIIDQYLFSGEAKWKTQNGLVLFLPHGYEGQGAEHSSARMERYLQLCAKDNVFVANCTTPANMFHILRRQLKANYRKPLIIFTPKSLLRHPKVHSTVNEFVNGEFNLLIDDDIVDSENVKSLVFVTGKFYYDILEEKGNTWKK

SEQ ID NO: 96154 - protein, 494 aa, Unknown
  Bacterial polypetide isolated from the Sargasso Sea
TDMNLKKDIILDFVCYRRRGHNETDEPFATQPLMYKEITSKDSVTDLYFKKLLSNGIVEEDKYKEFKKNYRSHMEKGETVSESLATDPDESIHFDWTPYIEPDMTKSYPTAVSNESLKETMKTVLAFDKDFLMQKQVGKLYEERNHMLSGDLPLNWGFAEMAAYATLLKDGFPVRVTGQDSRRGTFSHRHLVVKDQNTGEGFVPLSKLNKGNKKFEIFDSLLSEEAVLGFEYGYASTWPEGLVIWEAQFGDFVNVAQVIIDQFIVSAETKWNRLSGLTLFLPHGYEGQGPEHSSCRLERFLQLCAHDNIQICIPTLPAQIFHLLRKQAINPSRKPLVVLTPKSLLRNPQATSKIEDLSNGTFRNIIINKSKNLPKRVVFCSGKVFFDLQDEINKLKVKNIELVRLEQLYPFPESELKSYTRDLKCKDFLWVQEEPKNMGAWFMIRHRLEEILNETKKGFKLNVVARNSSAAPAGGYQKYHFKRQKEIVTKALEL

SEQ ID NO: 96155 - protein, 475 aa, Unknown
  Bacterial polypetide isolated from the Sargasso Sea
TTSPRFARSSPYPSDVQKMVEAPILHVNGDDPEAVVYATRIATEFRLKFNRDVVVDLICYRRFGHNEGDEPSFTQPLMYKKIRSHPSVYKIYGNKLVNEKSITEGLLNQNVKSFKDLLDEQYKSAKDYKPKIEWFEGTWSRYKPERGKDKRGITGFDENKLKIISGKINGIPEEKNIHKTISKIFNARKESIEKGTGIDWSSAESLAFGSLLEEGYPVRLVGQDSGRGTFSQRHSVLRNQIDNSRYIPLNNISKNQKQFEVVDSFLSELAVLGFEYGYSLVEPNTLTLWEAQFGDFANGAQVVIDQFIASGERKWNRASGIVMLLPHGYEGQGPEHSSARLERFLQLCSNDNMQVMNCTTPANYFHALRRQMHRSFRKPLIIMTPKSLLRNKYCVSNLEDFNKKNTFHRVLWDHAIDPKSKGFIKLKESSKIRKVILCSGKVYFDLLDAREKLKRDDVVMYRIEQLYPFPAKALV

SEQ ID NO: 96156 - protein, 233 aa, Unknown
  Bacterial polypetide isolated from the Sargasso Sea
GLVLLLPHGYEGQGPEHSSARLERFLQLCAKDNLQVMNVTTPANYFHALRRQITRDFRKPLVIMTPKSLLRHKHCVSNLEDFSKKNSFHRILWDHARDKKYGFIKLKSAKEINKVIICSGKVYFDLLEEREKNKRNDVLLLRVEQLYPFPARSLAKELKPYIKNAKFYWCQEEPKNMGAWSFVRDYIDWTLEYIKAKNNKISYIGREFASTPATGYAKRHLAQQKEIIDEVFR

SEQ ID NO: 96157 - protein, 287 aa, Unknown
  Bacterial polypetide isolated from the Sargasso Sea
RIYNSLLSEYGVLGYDYGYSMASPNALTIWEAQFGDFSNGAQIIIDQYITSAEDKWKLQNGIVLLLPHGYEGQGAEHSSARVERYLQMCAKDNMFVVNCTTPANLFHVLRRQLKAKYRKPLIIFSPKSLLRHPDAVSKISDFTNSSFKTIIDDFEVDINNIKTVVFCSGKFYYDLLKERKIKKREHDVALIRVEQLFPLPEKEIKNIMIKYKSSDDFVWAQEEPRNMGAWSHLLLHLPEATKMRVASRRMYGAPAAGSSTRFNKRHQEVIEYVFDSSKDNQKRKNKN

SEQ ID NO: 96158 - protein, 354 aa, Unknown
  Bacterial polypetide isolated from the Sargasso Sea
MHEGVMKAWLESSHLGGGNMAYVDELYESYLAESTSVSDEWREFFASLPKIDGVELESRHSDIRQQFAELAKNKHREVIKVNAGGSDQRQVKVLQLINAFRFRGHQQANLDPLNLWKQPRVRDLELSFHDLTQADFDTEFNVGSFAGGETSMKLGDLYKALESTYCGSIGAEYMHIVSTDEKRWIQQRLEGQQASRALGKEEKTKLLQGLVAADGLEKYLASKFPGAKRFGLEGGDAMVPMLKAMIHRAGEQGAKDCIIGMAHRGRLNTLINVLGKNPSKLFDEFAGKYEVVGAGDVKYHMGFSSDFETKGGNVHLALAFNPSHLEIVNPVVMGSVRARLDRRGSTDGTLALPI

SEQ ID NO: 96159 - protein, 461 aa, Unknown
  Bacterial polypetide isolated from the Sargasso Sea
LLVMFLGKSPKELFNEFEEDYELEGASTGDVKYHLGSSTNILTPNGEVHVSLANNPSHLEIVDPVVLGSVRGRQDRIKDENKELVIPILIHGDASFSGQGVVMETLQMSQTRGYGVGGTVHVIVNNQIGFTTSNEEDSRSTQYATDVAKMIEAPVLHVNGDDPEMVVFAAKLACEYRYNFKKDIVIDMFCYRRRGHNEADEPSSTQPIMYQKIAKQISVKSAYQEKLISSGIISQSECDELEKNYRSAIEKGDSVVHNLATKPNESMWFDWTPYMDQKGDVKIKSSFSKKRFKDLADQVFTPPKDFILQKQVDKIFSDRRQMAEGKIPVNWGFAENMAYATLLDQGYPIRFSGQDIRRGTFSHRHAVVLNQQDGRGCIPLVDIAKNADTTFDVYDSLLSEEAVLGFEYGYSATSPKGLVMWEAQFGDFVNGAQVVIDQFIVSAEHKWERLSGLVMLLPPWL

SEQ ID NO: 96160 - protein, 748 aa, Unknown
  Bacterial polypetide isolated from the Sargasso Sea
MSSSKNLDFKKTSFLNKSNSAFIEEMYLKFVNKDVDLPESWANYFEGIGEELNVIANEINGPSWGPTKKKINIDELQKKIEEQDKSNFDNVKFDTSEKFNFQLLADSNKDSISAVALIRAYRLRGHLLADLDPLEMRESEYLDELHPDFYGFKKENYDKKIFLNGVINRKYANIREILKFMKKTYCGKIGYEFMHISNPDERMWFRDRIEQDKNALQFTKNGKEAILNKLVQAEGFEKFLATKYVGTKRFGLDGGESLIPALEQIIKIGGQNNIKEVKIGMSHRGRLNVLANVLQKSYKKIFNEFAGEFSSDAEDSAGDVKYHLGASSDREFDGNSVHVSLTDNPSHLEAVNPVVLGQTRAKQFFHKDRERNKVIPILIHGDAAFAGQGVVAECFAMSGLPGHNTGGTIHIIVNNQIGFTTSPRFARSSPYPSDVAKMVEAPILHVNGDDPEAVVYATRIATEFRLKFNRDVVVDLICYRRFGHNEGDEPSFTQPLMYKKIRSHPSVYKIYGNKLVSENSITQELLNQNVKSFKDLLDEQYKSAKDYKPKIEWFEGTWSRYKPERGKDKRGITGYEEDKLKFISKKINTIPEEKNIHKTITKIFNTRKENIEKGTRIDWSSAEALAFGSLLDEGYPVRLVGQDSGRGTFSQRHSVLRNQTNNSRYVPLNNISDSQKQFEIVDSFLSELAVLGFEYGYSLVEPNTLTLWEAQFGDFANGAQVVIDQFIASGERKWNRASGIVMLLPPWV

SEQ ID NO: 96161 - protein, 253 aa, Unknown
  Bacterial polypetide isolated from the Sargasso Sea
AQVIIDQFITSSESKWGRASGLVMLLPHGYEGQGPEHSSARLERFLQLCAGENIQVVNCTTPSNYFHVLRRQMHREFRKPLIIMTPKSLLRYKRCVSDISEFITKSSFHRVLQDDAYFKNNNLISLKKDNKIKKVVMCSGKIYYDLLEEREKTKTDDVIFIRLEQLYPFPAKTLAKVLKNYKKAQFIWCQEEPKNMGAWNTVRNYIERTLEMINFKDINLKYVGRSASSTTATGNANKHLAQQKEILEKILKH

SEQ ID NO: 96162 - protein, 390 aa, Unknown
  Bacterial polypetide isolated from the Sargasso Sea
LINQRSISNDYLNNSIKKFKDLLNEQFKNAKDYKPKIEWFEGTWSRYKPERGKDKRGVTGFDTKKLKEISIKINTIPQEMNIHKTILKIFDNRKLTVSKEKEIDWSTAESLAFGSLLEEGYPVRLVGQDSGRGTFSQRHSVLRNQLDNSRFIPLNNISKKQKNFEVVDSFLSELAVLGFEYGYSLVEPNTLTIWEAQFGDFANGAQVVIDQFIASGERKWSRASGLVMLLPHGYEGQGPEHSSARLERFLQLCSNDNMQIMNCTTPANYFHALRRQMHRDFRKPLVIMTPKSLLRHKYCISNLEDFNKKNSFHRVLWDHAIDPKIKGFIKLQKPEKIKKVILCSGKIYFDLLKSREEQKRDDIVFFRIEQLYPFPAKSLVKELKPYAKKA

SEQ ID NO: 96163 - protein, 618 aa, Unknown
  Bacterial polypetide isolated from the Sargasso Sea
MKELWGSSHISAGHAAYLESLYETFINNPDDLSKEWLDFFTNLPKHPNSNGEISHKDIINEFKSLSRSKSVQKISIDERQGKVIRLIKSYRNRGHLQATLDPLGMMEHKTVEDLSIEFHGLAQDDLDEEFYTDTFTDKDKLTLREIVDQLKASYCGNIAVECNHIFDSKERRWFQRKFESRLKEYSFNKEEKINIYERLNSAEGLAKYLSAKYPGMKRFGIDGAESLVPLVESVIQNCGSLGANQICFGMAHRGRLNLLVNVLGKLPSELFSAFDEEDKLDGVNTGDVKYHLGFSSNFNTPGGEVHVSLFNNPSHLEIVDPVVLGSVRARQDRIKDEDRSKVVPVLLHGDASFSGQGVVMESLQMSQTRGFGVGGTIHIIVNNQIGFTTSNIDDSRSTDYSSDVAKIIQAPVIHVNGDDPEMVLNASKIACKYRNKFKKDIVIDLFCYRRRGHNEADDPSATQPLMYQKISKHPSVLTQYESYLKDVEIISDEESKKIKKNYRNSLEGGKSVAKNLADKPNDSMWFDWEPYLDTKWWPKVKTNFNRDKFKEIGNSINIVPKTFKLGTQASKIFEDRTAMSNEDILINWGYAEIMAYGTLLSEGYPIRISGQDVRRGTF

SEQ ID NO: 96164 - protein, 456 aa, Unknown
  Bacterial polypetide isolated from the Sargasso Sea
NENSITQNLLDQNVKRFKDLLDEQYKSAKDYKPKIEWFEGSWSRYKPSKGKDKRGVTGFDEDKLKEISDRINTIPAEINIHKTISKILNIRKNSVDKGFDMDWSTAEALAFGSLLEEGYPVRLVGQDSGRGTFSQRHSVLRDQIDNSRYIPLNNISSKQKKFEVVDSFLSELAVLGFEYGYSLVEPNTLTLWEAQFGDFANGAQVVIDQFIASGERKWNRASGLVMLLPHAYEGQGPEHSSARLERFLQLCSNDNMQVLNCTTPANYFHALRRQMHRDFRKPLIIMTPKSLLRNKFCVSNLKDFNKENTFHRILWDHAIDPNVDGFIELKDSSKIKKVILCSGKIYFDLLDAREKLKKDDVIIFRIEQLYPFPAKALVNELKPYAKNAKFFWCQEEPKNMGAWFSVRDYIQWTLDSLKANNNKISYIGRSPDASPATGYAKRHNSQQQEIINKVFE

SEQ ID NO: 96165 - protein, 231 aa, Unknown
  Bacterial polypetide isolated from the Sargasso Sea
MHNIKWERLSGLVMLLPHGYEGQGPEHSSARIERFLQLCASENIQVCVPSSPKQIFHLLRRQAIRKMRTPLIVISPKSLLRNPEAVSSIKELTDGQFECVIDDEIKDTKKVSKIIMCSGKVFYDLLKKRNDKKFKNIAIIRIEQLYPFPYDDLEEILTKYQNVKEFIWCQEEPLNQGAWFSHRHRIQRVLDRLGEGNEVSLVSRPAAAAPAVGLMKLHLQQQEDLINEAIF

SEQ ID NO: 96166 - protein, 406 aa, Unknown
  Bacterial polypetide isolated from the Sargasso Sea
MKELWGSSHVSAGHAAYLESLYETFINNPENLSKEWLDFFTNLPKNSNSNGEISHQEIIKEFRNFSRSKVEVSDNSKKTIDERQGKVIRLIQSYRNRGHLKANLDPLGMMERRVIEDLSIEFHGLSHDDLDEEFYTDTFTDSNKLSLREILKRLEEVYCGNIGIECNHILDSEERRWFQKKFESKLTEYSFNPDEKLNIYERLNSAEGLAKYLSAKYPGMKRFGIDGAEALVPLVESVIQNCGSMGATQLCFGMAHRGRLNLLVNVLGKLPSELFSAFDEDTELEGASTGDVKYHLGFSSNFETPGGEVHVSLFNNPSHLEIVDPVVIGSVRARQDRIGDKDRSQVVPILLHGDASFSGQGVVMESLQMSQTRGFNVGGTIHIIVNNQIGFTTSNINDSRSTDYSS

SEQ ID NO: 96167 - protein, 607 aa, Unknown
  Bacterial polypetide isolated from the Sargasso Sea
RNGKIVHLSLTPNPSHLEAVNPVVEGISRAKIDQYHEGNAKKLVPILIHGDHSMAGQGIVYEVLQMSKLPGYGTGGTVHLVINNQVGFTADFIEGRSSTYCTDVGKTTLSPVFHVNADDIEAVVYVTKLALEFRQEFHRDVFVDILGYRRQGHNESDEPRFTQPDLYRRIAKHPNVREVYSSKLVESGSLKKEEILQIESEFKQFLNDRLEEAKQQETASVTSFLEGVWSGVRRSESKDFEESPQTGVAIKKFIDLSKRSTDLHKPGSPGEKLKFFAKIEKLYENRLKMVTENKSLDWAMAENMAYATLLSQNCNVRLSGQDSGRGTFSQRHAIITAEDNTKYVPLNHISEDQATFEVYNSFLSEYGVLGFEYGYAYASPNSLTIWEAQFGDFANGAQIVIDQFVSSSETKWQRMNGVVLMLPHGHEGQGPEHTSARIERFLTLCADNNMQIINCTTPANLFHVLRRQMTFPFRKPLVIFTPKSLLRHPKCISPLDSFLEGTRFIEVIKDEYSHSQSVRKVLLCCGKIYYDLLEHQQKNKIKDIAIIRLEQLYPFPEKQLRSALNLYSNAKNICWVQEEPENMGAWSFMLRTFLQEKRLLLVAREAD

SEQ ID NO: 96168 - protein, 400 aa, Unknown
  Bacterial polypetide isolated from the Sargasso Sea
PGHNTGGTIHIIVNNQIGFTTSPRFARSSPHPSDIAKMVEAPIIHVNGDDPEAVVYGSRIATEFRLKFNRDVVLDLVCYRRFGHNEGDEPSFTQPLMYKKIRSHPSTAKIYGSKLIDEDLLSENDLNNQINKFKTLLDDQFKTAKDYKPKIEWFEGAWSSYKPKKGKDKKGITGADPDLLRNISDKINIIPNETTVHKTISKIFQNRKKTIDQGFNIDWSSAEALAFGSLLEEGFPVRFVGQDSGRGTFSQRHSVLRNQLDNTRYIPLNSISKNQKKFEIVDSFLSELAVLGFEYGYSLVEPNTLTIWEAQFGDFANGAQVIIDQFISSGERKWQRASGLVLLLPHGYEGQGPEHSSARLERFLQLCANDNLQVMNCTTPANYFHALRRQIHRDFRKPLV

SEQ ID NO: 96169 - protein, 383 aa, Unknown
  Bacterial polypetide isolated from the Sargasso Sea
VTKIYADKLIKEKKITGEQAKRVYDNRNQFLEEEFQAGSNYLPNKADWLEGKWTGLKKAPGLEERRGITGVTLDKIKKIGEILTSIPRDFEIHKKLQRVLDNRKKALKDGTNIDWSTAEQLAFGTLLLEGNPVRLSGQDCGRGTFSQRHAVFIDQNTEERYIPLSNINENQGSFEVIDSPLSEAGVLGFEYGFSQAEPNALVMWEAQFGDFANGAQVIVDQFISSGEAKWLRMSGLVMLLPHGYEGQGPEHSSARLERYLRLCAEDNLQVVNCSTPANYFHVLRRQLCRDFRKPLIIMTPKSLLRNKLCVSNLNDMLEEKSFHRVMDDKNKSIKDKDIKRLVICSGKVFYDLFEAREKNKLFNIKILRLEQIYPFPIKSLQEF

SEQ ID NO: 96170 - protein, 719 aa, Unknown
  Bacterial polypetide isolated from the Sargasso Sea
MNKSNSAFIEEMYLKFVNNDPDLPNGWREYFSDIGEEFEVVVNEINGPSWSPSKKVSINRNQIQSNEDKKINPIDSIRSNADSIKAVAMIRSYRQRGHLIAKLDPLELLKSDYLEELHPESYGFKKEDYHKKIFLDGVTNKQHSTIKEILEFLREKYCDTIGYEYMHISNPTERKWFRDRVEIADDFQFTKNGKEAILNKLIQAEGFEKYLHTKYVGTKRFGLDGGESLIPALEQIIKIGGQSKIKEVKIGMSHRGRLNVLANVLQKSYKRIFNEFAGEINSTSEDGAGDVKYHLGASSNREFDGNSVHVSLTDNPSHLEAVNPVVLGQTRAKQFFHQDKERKKVIPILIHGDAAFAGQGVVAECFAMSGLPGHNTGGTIHIIVNNQIGFTTSPRFARSSPYPSDIAKMVDAPIIHVNGDDPEAVVYAARIATDFRLKFNRDVVIDLICYRRFGHNEGDEPSFTQPLMYKKIRSHPSPVKVYGEKLVNEGSISKDYLNNSIKKFKDLLDDQFKNAKNYKPKIEWFEGTWSRYKPERGKDKRGVTGFDIKKLIEISNKINSIPSDINIHKTISKIMGNRKTTVINGKAIDWSTAEALAFGSLLEEGYPVRLVGQDSGRGTFSQRHSVLRNQIDNSRYVPLNNISNKQKKFEIVDSFLSELAVLGFEYGYSLVEPNTLTLWEAQFGDFANGAQVVIDQFIASGERKWSRASGLVMLLPHGY

SEQ ID NO: 96171 - protein, 492 aa, Unknown
  Bacterial polypetide isolated from the Sargasso Sea
MPYKKILSKFQGSLNDPNEVLGSGDVKYHLGVSADREFENKKIHLSLTSNPSHLEAVNPVVAGKVRAKQTLSKDKTTDKVIGLLIHGDAAIAGQGVVAETFAMSQLRGFKTGGTIHFVINNQIGFTTMPQYGRSAPYCTEIAKMVQAPIFHVNGDDPEAVVHVCRLATEFRNKFKVDVVVDMFCYRRSGHNEADEPSFTQPLMYKAIKKQITTRKKYEKKLIENNTLSEEESKDMVDSFKSFLDKEFESTKNYKPNKVDWLEGTWTGLSTATFDARRGKTSVKEKTLINIAKKIHEIPSDFNAHRRIKKIYGDRLTSVINGKGIDWATSESLALGTLLDEGYGVRISGQDVGRGTFSHRHGVLYDQENENRFVPLRHFQNKQGYFEIIDSFLSEFGVLGFEYGYSQVDPKTLVIWEAQFGDFANGAQIMIDQFISSGERKWLRMSGLTMLLPHGHEGQGPEHTSGRLERFLQMCAEDNMQIVNCTSPANYFH

SEQ ID NO: 96172 - protein, 438 aa, Unknown
  Bacterial polypetide isolated from the Sargasso Sea
LQQIPLFSRSSPYSTDVAKMVMAPIFHVNADDPEAVIHATRIATEFRQEFGVDVIVDIIGYRRFGHNEGDEPMFTQPKMYKKIKTHPTTRQIYADQLEQEGIILKGGGDQLVAEENERLKEEFDAGISYKPNKADTLDGIWSGIKLAQGGPRRGETGVDLEILRKIGESLCKIPDEFNINSKLRRILLQKETMLGLGEGVDWATAEALAFGSLLVQGNSVRLSGQDSGRGTFSQRHSVWTDQVSEERYTPLNNLRENQKTFEIIDSPLSEAAVLGFEYGFSQAEPKALILWEAQFGDFANGAQVIVDQFISSGEDKWLRMSGLVMLLPHGYEGQGPDHSSARLERYLQLCGDDNLQVVNCTTPANYFHVLRRQLQRDFRKPLIVMTPKSLLRHKLCVSALSAMGPGTTFHRVMHDVKPLCADKSVKRVIICSGKIYYD

SEQ ID NO: 96173 - protein, 738 aa, Unknown
  Bacterial polypetide isolated from the Sargasso Sea
HILLKIFFKKNMVGQKRFSLEGGESLIPAIDFLINIAADKGVEDVVIGMSHRGRLNTLVNILGKSSKDIFGEFDGKDYEEDIFDGDVKYHLGWTSERLTKSGNKITMNLAPNPSHLESVDPVVQGIARAKLENDLNNKTNKILPILVHGDAAIAGQGVVYEVIQMSRLKGYSTGGTIHLVVNNQVGFTTNYLDARSSTYCSDVGKVTLSPVLHVNSDDVEAVIHAVTFAFEFRNQFNRDVFIDLLGYRKYGHNEGDEPRFTQPKLYKFISSHPNPRDIYAEKLIEQGLINKDYISKIESDYFESLEEELDDSKKKDKTKITPFMQKVWEGFKRVDENKMLKEYDTNSNEEAILIVGRSITKLPNKQFLRKVIKLFNSREKMLFESKKVDWALAEQLAYGTLMLEGFNVRISGQDVERGTFSHRHAVLKSEDSEEEYLPLNSIDSNKKGVLKIYNSLLSEYGVLGFDYGYALASPNSLTIWEAQFGDFSNGAQIIIDQYISSAEDKWKLQNGIVLYLPHGYEGQGAEHSSARMERYLQLCAKDNMYAANCTTPANLFHLLRRQMITNFRKPLILFTPKSLLRHPKVISDIEELTSSKFMPVISDSEIDPDKAESLVFCSGKFYFDLTEYREKNKIKNVAIVRIEQLFPLPVKLIISEIKKFSNAKDIVWAQEEPRNMGAWNHIQTYHLIAKNMRPATRRFYGSTASGSYVRFERRHNQVIEYVFDKSKNNFKKYHISNI

SEQ ID NO: 96174 - protein, 361 aa, Unknown
  Bacterial polypetide isolated from the Sargasso Sea
VVVDLVCYRRFGHNEGDEPSFTQPLMYKKIRSHPSAVKVYGNKLINEKIISSEDLSNHVKKFKDLLDDQYKNAKNYKPKIEWFEGTWSRYKPRRGQDKRGDTGYSTIKLLEISDKIHSLSPELNIHKTIVKIFESRKNSMLNGNGIDWSTAEALAFGSLLEEGYPVRLVGQDSGRGTFSQRHSVLRNQVDNSRYIPLNNISKKQKKFEIVDSFLSELAVLGFEYGYSLVEPNTLTIWEAQFGDFANGAQVIIDQFISSGERKWLRASGLVLLLPHGFEGQGPEHSSARLERFLQLCSNDNMQVMNCTTPANYFHALRRQMHRDFRKPLIMMTPKSLLRNKYCVSNIEDFSKQNSFHRVLWD

SEQ ID NO: 96175 - protein, 346 aa, Unknown
  Bacterial polypetide isolated from the Sargasso Sea
KHDEEWDHLKKSKSEQFLESPDTSLDLVKINKIAKSLTSLPSGFKPLKQIAKLINDRKENFFNKKMVNWSDAELLAYGSLLIDKKIIRISGQDVIRGTFSHRHAYFFDSYTNKPYCPLNNISKNQNELFIYNSLLSEFAVLGFEYGYAMATPNALVIWEAQFGDFVNGAQVIIDQYISSAETKWDKMNGLVVLLPHGYEGQGPEHSSARPERILSLCSDDNIIVSNLTTPANFFHLLRRQLSWNFRKPCFVLSPKSLLRHPDLHSPISDFTKSKFQEVIDDELIKKTKVKKLILCTGKVYYDLKQYRIQKNIVNIAIVRIEQIYPFPINQITKIIKKYKCDKICWV

SEQ ID NO: 96176 - protein, 328 aa, Unknown
  Bacterial polypetide isolated from the Sargasso Sea
SGRGTFTHRHAVLHDQNRERWNDGTYVPLQNIAEGQAKFTVIDSVLSEEAVLGFEYGYSTAEPNTFVAWEAQFGDFVNGAQVVIDQFISSGEVKWGRVSGLTMLLPHGYEGQGPEHSSARIERFLQLCADHNMQVVQPTTPAQIFHLLRRQMIRLFRKPLIVATPKSLLRHKEAVSDLSELAKGSFQPVLGEIDEAIDAKKVKRVVVCSGRVYYDLLAHRRESKSNDVAIIRIEQLYPFAHKQFEAEMKKYDNATEVVWVQDEPQNQGPWFYIEHHLKEGMKDGQKLAYSGRPASASPAVGYYAKHYEQQKALVEGAFGRLKSASIAK

SEQ ID NO: 96177 - protein, 429 aa, Unknown
  Bacterial polypetide isolated from the Sargasso Sea
MKKTMSDYMSDSHTSGGHLSYLEDLYESYLQDPNSISEEWKTYFNDLPFQNGSKKDSSHLDVIKHFQNTPRRSATKFKASSQNKNPLEAKVQTLIKAYRDYGHTAADLDPLGIAEKVIHSDLHKTEGLFNGDELSSTINCNFPIGSNAEYEVNNLIDELKETYCKNIGIEFQHISNKRERSWIIEKFENSNHKVSDVERKKEILKRLISARGLAQFLSSKYPGMKRFGIDGCESLIPLVDTLIKTTSKNGAEQICFGMAHRGRLNLLVNVLGKVSKELFEAFEEDFDLKGTSTGDVKYHLGYSSNIRTDHGDVHVSLTNNPSHLEIVNPVVVGSVRARQDRLGDTFRNRVVPILIHGDAAFSGQGVVMETLQMSQTRAYGVGGTIHVVINNQIGFTTSHTRDARSTRYSTDISKFIEAPIIHVNADDPE

SEQ ID NO: 96178 - protein, 496 aa, Unknown
  Bacterial polypetide isolated from the Sargasso Sea
MKKTMSDYMSDSHTSGGHLSYLEDLYESYLQDPDSISEEWKAFFNDLPFQNGSKKDSSHLKVIKHFQNAPRRSASKVKATSQNKNPLEAKVQTLIKAYRDFGHTAADLDPLGIAEKVIHSDLHKTEGLFSVDELSNRVNCNFPIGSNAEYEVNNLINDLKKTYCKNIGIEFQHISNKRERSWIIEKFENSDHKISDVERKKEILKRLISARGLAQFLSSKYPGMKRFGIDGCESLIPLVDTLIKTTSKNGAEQICFGMAHRGRLNLLVNVLGKVSKELFEAFEEDFDLKGSSTGDVKYHLGYSSNIRTDHGDVHVSLTNNPSHLEIVNPVVVGSVRARQDRLGDTFRNRVIPILIHGDAAFSGQGVVMETLQMSQTRAYGVGGTIHVVVNNQIGFTTSHIRDARSTRYSTDISKFIEAPIIHVNADDPEAVVYVSELACEYRENFKKDIVIDLVCYRRSGHNEADDPSSTQPLMYKAIKSHKTVLDIYEKLLTANS

SEQ ID NO: 96179 - protein, 261 aa, Unknown
  Bacterial polypetide isolated from the Sargasso Sea
EMKKNALSIVKTPTDFSLQKKVQKIFDERVKMSQGDIKLNWGFAEMMAYSSLLKEGYPIRFTGQDVRRGTFDHRHAVVFDQENGEGFISLDPIAKEGKTLVDIYDSLLSEEAVLGFEYGYSATWPSGLVIWEAQFGDFANGAQVVIDQFIVSAEHKWERLSGLVMLLPHGFEGMGPEHSSARLERFLQLCAANNIQVCMPSSPSQIFHLLRRQAIRKMRRPLIVITPKSLLRLPEAASDLSELTNGSFNCIIGGRSSKGKN

SEQ ID NO: 96180 - protein, 416 aa, Unknown
  Bacterial polypetide isolated from the Sargasso Sea
LSKIKNDDLWFEWDQFIDARWDENTDTTVKQDQLIDDARTIADIPSGFVLQKKVKNIIKQRIDMAEGKCEFNWGFAEIAAYSSLLREGYPIRFSGQDIRRGTFDHRHAVMFDQEDGKTYYPLNKFAEKGNTNIGIYDSILSEEAVLGFEYGYSATWPTGLVIWEAQFGDFSNGAQVVIDQFIASAQHKWERLSGLVLLLPHGYEGMGPEHSSARIERFLQLCAEQNIQICMPSTAAQMFHLLRRQAIRNNRTPLIVITPKSLLRNKYASSTIDKLTLGKFENIFDDESNLTKKLRKVILCSGKIYHDLKKQKDENNQSDIAIIRLEQLYPFPYEETEKILSKYKNASEFIWCQEEPRNQGAWYGQRHRLNRVLKNIGLKKEFRLMSRPPSSAPAVGQMKIHIEQQKKLIDLTLGKD

SEQ ID NO: 96181 - protein, 379 aa, Unknown
  Bacterial polypetide isolated from the Sargasso Sea
KFKDLLDEQFKTAKDYNPKIEWFEGAWSSYKPKKGKDKRGVTGADEKTLKNISDKINVVPSEISIHKTISKILQSRKKSIDDGLNIDWSTAESLAFGSLLDEGFPVRFVGQDSGRGTFSQRHSVLRDQTNNSRYIPLNNISKHQKKFEIVDSFLSELAVLGFEYGYSLVEPNTLTLWEAQFGDFANGAQVIIDQFISSGERKWQRASGLVMLLPHGYEGQGPEHSSARLERFLQLCANDNLQVMNCTTPANYFHALRRQIHRDFRKPLIIMTPKSLLRNKFCVSTIDDFSKQTSFHRIMWDHALSDQSKNFIKLKKSSEIKKVIICSGKVYFDLLNAREKLKRDDVVMFRIEQLYPFPAKSLIKELKPYAKNANFYWCQ

SEQ ID NO: 96182 - protein, 302 aa, Unknown
  Bacterial polypetide isolated from the Sargasso Sea
MVQRHFEKFLHKKYTGTKRFGLDGAESVVPALEQILKRGSQLGLKEVVIGMAHRGRLNVLYNILNKPFRAIISEFSGNQSNPEEAGGSGDVKYHMGASADREFDGEKVHLSLQANPSHLEVVAPVVVGRVRAKQYQHNDTDERLSVLGIVLHGDAAFAGQGIVAETFDFSDLKGYKTGGTIHVIVNNQIGFTTSPNYSRSSPYCTDVAKMVMAPIFHVNGDDPESVVHVARIATEFRQKFRCDVVLDVICYRRFGHNEGDEPAFTQPLMYQEIAQHKSISNIYAKKLISEGVISENDAEKGV

SEQ ID NO: 96183 - protein, 593 aa, Unknown
  Bacterial polypetide isolated from the Sargasso Sea
ISGTKRFGLDGGEAVIPAMEQIIKRGGNLGVKEIIIGMPHRGRLSILANVMGKPYRAIFNEFQGGSYKPEEVEGSGDVKYHLGASSDREFDGNKIHLSLTANPSHLEAVNPVVLGKVRAKQNQLNDSNRVQVLPVLLHGDAAFAGQGIISECFGLSGLKGHKTGGTIHIIVNNQIGFTTAPHNSRSSPYPTDIALMVEAPIFHVNGDDPEAVVHAAKVATEFRQKFHKDVVIDVFCYRRFGHNEGDEPMFTQPKMYAKIKKHKTTLQQYSEKLIMEGLVPEGEIEDLKINFQKFLSEEFENSKSYKPNKADWLDGKWSGLGQYTKEAVVKDGQYQRGKTSISIQKFNEIGKALTKIPSEINAHKTVKRMLDNKQKQLTSGKNIDWATAEALAFGSLLMEGYPVRLSGQDCTRGTFSHRHSAVIDQLTEERYYPLNNISKNQKHYEVIDSMLSEYAVLGYEYGYSLAEPNSLTIWEAQFGDFSNGAQIMIDQFISSGEKKWLRMSGLVMLLPHGYEGQGPEHSSARLERFLQACAEDNWIIANCTTPSNYFHILRRQLYRSFRKPLVIMSPKSLLRNKRAVSSKEGFCKRFYFS

SEQ ID NO: 96184 - protein, 422 aa, Unknown
  Bacterial polypetide isolated from the Sargasso Sea
MNYFQLFDEEEKLDGANTGDVKYHLGFSSNFITPGGEVHVSLFNNPSHLEIVDPVVLGSVRARQDRIKDEDRSQVVPVLLHGDASFSGQGVVMESLQMSQTRGFGVGGTIHIIVNNQIGFTTSNIDDSRSTDYSSDVAKIIQAPVIHVNGDDPEMVLNASKIACKYRNKFKKDIVIDLFCYRRRGHNEADDPSATQPLMYQKISEHPSVLTQYESYLKDEEIISDEKAKKIKKNYRNSLEGGKSVAKNLADKPNDSMWFDWDPYLDIKWWPKVQTNFNKDKLKEIGNSINIVPKTFNLGTQASKIFEDRIKMNNEDILLNWGYAETMAYGTLLSEGYPIRITGQDVRRGTFSHRHACVFDTKTGMGFIPLSEIAKTYSTRFDIYDSLLSEEAVLGFEYGYSATWPSGLTIWEAQFGDFANGA

SEQ ID NO: 96185 - protein, 789 aa, Unknown
  Bacterial polypetide isolated from the Sargasso Sea
MASSKNSEYQKTSFLSKSNSAFIEQMYLKFINRESDLPESWKKYFLEIGEEFEIIAKEINGPSWNPIKKKINLDMIQESFEKEKNSLKTTVNKEELSEENRRSIRAVSLIRSYRQRGHLIANLDPLELREIEYLDELHPESYGFNKEDYNKKIYLDGIANRNYSTIKDILSFLRKTYCGKIGYEYMHISNPTERKWFRDRVEKDENALQFTKNGKEAILNKIIQADGFEKFLHTKYVGTKRFGLDGAESLIPALEQVIKIGGQNNVKEVKIGMSHRGRLNVLANVLQKSYKRIFNEFAGEIDPSSKDDSAGDVKYHLGASSDRVFDNNSVHVSLTDNPSHLEAVNPVVLGQTRAKQFFHNDKERKKVIPILIHGDASFAGQGIVAECFAMSGLPGHNTGGTIHFIINNQIGFTTSPRFARSSPHPSDVAKMVDSPIIHANGDDPESVVYAARIAAEFRLKFNRDVVVDLVCYRRFGHNEGDEPSFTQPLMYKKIKSHSSTVKIYGDKLINEKTISPEDLNNHIKKFKDLLSDQYKNAKNYKPKIEWFEGTWSRYKPRRGQDKRGDTGYSTAKLLEISDKIHSFSPELNIHKTIVKIFEARKNSMKNGKEIDWSTAEALAFGSLLEEGYPVRLVGQDSGRGTFSQRHSVLRNQIDNSRYIPLNNISSKQKKFEIVDSFLSELAVLGFEYGYSLVEPNTLTIWEAQFGDFANGAQVIIDQFISSGERKWLRASGLVLLLPHGFEGQGPEHSSARLERFLQLCSNDNMQVMNCTTPANYFHALRRQMHRDFR

SEQ ID NO: 96186 - protein, 535 aa, Unknown
  Bacterial polypetide isolated from the Sargasso Sea
TYCSDVGKVTLSPVLHVNSDDVEAVIHAVTFALEYRNRFKRDVFIDLLGYRKYGHNEGDEPRFTQPKLYKFISGHPNPRDIYASKLMGQGIINDDHVSKIESKYFSNLEDELTDSKKKEKTKITPFMQEVWGGFKRVDENKMLEDYLTSSSKEDILNVAKSITSLPNKSFLRKIIKLFDSREKLIFENGKVDWAMAELLAYGTLLTEGFNVRVSGQDVERGTFSHRHAVLKSEDSEEEYLPLNNIDSKNKGLFSIYNSPLSEYGVLGFDYGYALASPNCLTIWEAQFGDFSNGAQIIIDQYISSAEDKWKLQNGIVLYLPHGYEGQGAEHSSARMERYLQLCAKDNMYAANCTTPSNLFHLLRRQMLTKFRKPLILFTPKSLLRHPKVISNVDDLTKSKFIPVITDSEIDPAKADSLVFCSGKFYFDLIEYREKNNIKNVAIVRIEQLFPLPVKLIISEIKKFSKAEDIVWAQEEPRNMGAWNHIQTYHPIAKNMRPATRRFYGSTASGSLTRFERRHNQVIEYVFDKTKNNFRK

SEQ ID NO: 96187 - protein, 287 aa, Unknown
  Bacterial polypetide isolated from the Sargasso Sea
MKDQGSFQIYNSSLSEYGVMGFEYGYALAYPNTLTVGEAQFGDFSNGAQIMIDQYLSSAEDKWKLQNGLVLMLPHGYEGQGAEHSSARLERYLQLCAKDNMYVANCTTPANLFHILRRQLVTKFRKPLVLLTPKSLLRHPKVISKTSDLINGKFLPVIDDRDKQKNVKSLVFCSGKFYYDLLHYKRQNKISHVAIVRIEQLFPLPKKEIESIIESYSFDEIVWAQEEPRNMGAWGHLLMHLDKAKEFRVASRRFYGAPASGSKARFDKRHNEVIEYVFDKSKNNFKK

SEQ ID NO: 96188 - protein, 449 aa, Unknown
  Bacterial polypetide isolated from the Sargasso Sea
GGTIHIIVNNQIGFTTAPRFARSSPYPSDLAKMVQAPIFHVNGDEPEAVVHCAKIATEFRQKFNRDVVIDMVCYRRFGHNEGDEPSFTQPLMYKKIRSHPTTLQIYAKKLLNEGLISNTYLDLKKKEFRNFLDKEFSGAKDYKIKMKWFDGVWSRFKPEIGQDRRGVTGVEKQELISIGKKITDIPKDFSVHKTLLKIFENKRKMFTENHPIDWSTAETLAFGTLLNDGFSVRLSGQDSGRGTFSQRHSVLRNQDNHDRYVPLHHISKRQKKFEVIDSLLSELGVLGFEFGYSLSEPETLVLWEAQFGDFANGAQVVIDQFIASGESKWSRASGLVMLLPHGYEGQGPEHSSARLERFLQLCSQENLQVVNCTTPANYFHVLRRQMHRDFRKPLVVMTPKSLLRHKRCVSNLGDFTKKNSFHRILEDHAYLNGSKLIELKKDKKIKKVV

SEQ ID NO: 96189 - protein, 517 aa, Unknown
  Bacterial polypetide isolated from the Sargasso Sea
EKVWFRNRMEKEENRINFTNTGKKAILNKIIQAEGFEKFLAKKYVGTKRFGLDGAESLIPAMEQIIKRGGQLGVKEIKIGMPHRGRLNVLANVLQKSYKRIFNEFAGEISTSSEDSAGDVKYHLGASSNRVFDSNSVHVSLTDNPSHLEAVDPVVLGQTRAKQFFHQDLNRKKVIPILIHGDAAFAGQGVVAECFAMSGLPGHNTGGTIHIIVNNQIGFTTSPRFARSSPYPSDLGKVVDAPILHCNGDDPEAVTHCAKVAIEFRQKFNKDVVIDMICYRRFGHNEGDEPSFTQPLMYKKIRNHPTTLNVYGNRLIQEGTINSDEFNKMKNDFKNLLEEQYKTAKDYKPKIEWYEGTWSRYKPEKGKDKRGKSGVDLSKIEKISDKINSIPSAVKVHKTISKILEQRKQSVISKKKIDWSTAEALAFGTLLEEGFPVRLVGQDSGRGTFSQRHSVLRNQDDNTRYIPLNNISKNQKKFEVVDSFLSELAVLGFEYGYSLVEPSTLSIWEAQFGDFAN

SEQ ID NO: 96190 - protein, 706 aa, Unknown
  Bacterial polypetide isolated from the Sargasso Sea
MHMSDPVERSWIRERIEGREKGIKFTENGKKAILNKLIEAEGFEKFLHVKFVGTKRFGLDGAESLIPALEQIIKRGGHLGVKEVKIGMPHRGRLNVLANMMQKSFKLIFKEFFGEKIDSKKDFEGDVKYHLGASANREFDGNLVHISLTDNPSHLEAVNPIVLGQVRAKQYFHKDKERRKVIPVLIHGDAAFAGQGVVAECFAMSGLPGHNTGGTIHIIVNNQIGFTTAPRFARSSPYPSDLAKMVEAPILHVNGDDPEAVVHCAKIATEFRQKFKSDVVIDMVCYRRFGHNEGDEPSFTQPLMYKKIRSHPTTLEIYGKKLISQGLISQKDFDEGKNKLKDFLNSEFKNAKSYKQKMTWFDGVWSRFKPEIGKDKRGKTGVEKKNLIEVGKKITEVPNNFNIHKTLLKILENKRKMFTEDKPIDWSTAELLAFGTLLNEGFSVRLSGQDSGRGTFSQRHAVLRNQDSHDRYVPLHNISKKQKSFEVIDSLLSELGVLGFEFGYSLSEPETLVLWEAQFGDFSNGAQVVIDQFISSGESKWSRASGLVMLLPHGYEGQGPEHSSARLERFLQLCAQENLQVVNCTTPANYFHVLRRQMRRDFRKPLIVMTPKSLLRHKRCISYLEDFTKKTRFHRILEDHAYLENSKLIKLKTNKKIKKVVMCSGKIYFDLLEAREKSKNDEIVFIRVEQLYPFPVKHLGRELQKY

SEQ ID NO: 96191 - protein, 546 aa, Unknown
  Bacterial polypetide isolated from the Sargasso Sea
LHKTEGLFNGDELSSKINCNFPIGSNAEYKVNNLIDELKETYCKNIGIEFQHISNKRERSWIIEKFENSDHKISDKVRKKEILKRLISARGLAQFLSSKYPGMKRFGIDGCESLIPLVDTLIKTTSKNGAEQICFGMAHRGRLNLLVNVLGKVSKELFEAFEEDFDLKGSSTGDVKYHLGYSSNIRTDHGDVHVSLTNNPSHLEIVNPVVVGSVRARQDRLGDTFRNRVVPILIHGDAAFSGQGVVMETLQMSQTRAYGVGGTIHVVVNNQIGFTTSHIRDARSTRYSTDISKFIEAPIIHVNADDPEAVVYVSELACEYRENFKKDIVIDLVCYRRSGHNEADDPSSTQPLMYKAIKSHKTVLDMYEKLLTADSIISDEEIKDFKKSYRKQIENGESVTPNLAPRSNDDQWFDWEPFMNRKWYEEVTTSVPQKEIEENALSIVKTPADFSLQKKVKKIFDERVKMSQGDIKLNWGFAEMMAYSSLLKEGYPIRFTGQDVRRGTFDHRHAVIFDQENGEGFLSLDSIAKEGKTLVDIYDSLLSEEA

SEQ ID NO: 96192 - protein, 682 aa, Unknown
  Bacterial polypetide isolated from the Sargasso Sea
MKELWGSSHISAGHAAYLEGLYETFLNNPEELSKEWFDFFTNLPKLPNSNGEISHQKIINEFRNFSRNSDVLKKSVDERQGKVIRLIQSYRNRGHLKAKLDPLGMMERRLVEDLNIEFHGLSHEDLNEEFYTDTFNTEAEKLPLRDIIQKLEDIYCGVIGIECNHIMDSSERRWFQNKFESKLKGYSFNEKEKLNIYERLNSAEGLAKYLSAKYPGMKRFGIDGAESLVPLVETVIQDCGSLGASQICFGMAHRGRLNLLVNVLGKLPSDLFTAFSEDFELDGASTGDVKYHLGFSSNFDTPGGEVHVSLFNNPSHLEIVDPVVIGSVRARQDRINDKDRSKVIPVLLHGDAAFSGQGVVMESLQMSQTRGFNVGGTIHIIVNNQIGFTTSNVNDSRSTDYSSDVAKIIQAPVIHVNGDDPEMVVNAAKIACKYRNKFKKDIVIDLFCYRRRGHNEADDPSATQPLMYEKISNHPSVLNQYENNLMKEGILDAEESKKIKSNYRKSLEGGESVAKNLAKKPNDSLWFDWEPYLGVKWWPKVDTKYSKKELKKLGKEIISVPKEFNMGSQASKIFADRHEMNQGNVPINWGYAEVMAYATLLKDGYPIRLTGQDVRRGTFSHRHACIFDSQTGMGHISLSELAEKNKTSFDIYDSLLSEEAVLGFEYGYSATWPSGLTIWEAQ

SEQ ID NO: 96193 - protein, 411 aa, Unknown
  Bacterial polypetide isolated from the Sargasso Sea
QTRAKQYFHKDKDRKKVIPILIHGDAAFAGQGVVAECFAMSGLPGHNTGGTIHIIVNNQIGFTTSPRFARSSPYPSDIAKMVEAPIIHVNGDDPEAVVYAARIATDFRLKFNRDVVIDLICYRRFGHNEGDEPSFTQPLMYKKIRSHPSPVKVYGERLINDNTISKDFLNESIKKFKNLLNEQFKTAKDYKPKIEWFEGTWSRYKPERGKDKRGVTGADTKKLLEISNKVNTIPEEINIHKTISKILENRKLNVKNGSGIDWSTAESLAFGSLLEEGYPVRLVGQDSGRGTFSQRHSVLRNQLDNSRYIPLNNISKKQKNFEVVDSFLSELAVLGFEYGYSLVEPNTLTLWEAQFGDFANGAQVVIDQFIASGERKWSRASGLVMLLPHGYEGQGPEHSSARLERFLQLCS

SEQ ID NO: 96194 - protein, 966 aa, Unknown
  Bacterial polypetide isolated from the Sargasso Sea
MNDSFLNSANAPYVAELFFKFKEDPNSIDKSWSNFFETFHEDDLAILSDFGGPEWKKRTSNVIDNVSFDKVIRSIGNIDENNFKSSTIDSIRALRLIRAFRINGHLIANLDPLNLHIKNYHPELDYRSYGFTDKDLDKEIFIDGSLGLEKTSLKNIIQIVKDTYSSSIGIEFLHIQSPEQKQWIQERIEEVQNKTNFTNQGKKAIFKRLAESELFEQYLDKKFLGTKRYGVEGGESMIPGIEQIVKQSCLADVENIFFGTAHRGRLTLLATVLGMPYRGILSKFQGNLNDPNEVLGSGDVKYHLGVSSDREFNGKKIHLSLTPNPSHLEAVDPVLVGKVRAKQTLLKDKLNNKVFGILIHGDAAMAGQGIVAETFAMSQLRGFRTGGTVHFVINNQIGFTTTPHYGRSAPYCTEIAKMVQAPIFHVNGDDPEAVVHVCRLAAEYRNLFKEDVVVDMFCYRRSGHNEADEPSFTQPLMYKAIDNHPTTLKIYEKKLIEENIISEEESKKIQTDFRKFLDEEFESAKSYKPNKADWLDGTWKGFKTASLDARKGKTSFIEKNLIEIGKQIHHIPDDFNAHKKIRKIYQERKQSIIDGKNIDWATAESLAFATLLKEGYGVRLSGQDVGRGTFSQRHGVLYDQENENRFVPLRHFTKEQGLYEIVDSFLSEFGVLGFEYGYSQADPKTLVLWEAQFGDFANGAQIIIDQFITTGERKWLRMSGLTILLPHGHEGQGPEHSSSRIERFLTMCAEDNIQVANCTSPANYFHILRRQLLRDFRKPLILMTPKSTLRHKKNTSSIDEFINGSTFHRVLSDPIQEGEQKNIKRLILCSGKIYFELQDYIEKLKKTGIHIVRIEQLYPFPYETLTESIKNFNNCEMIWCQEEPKNMGAWVFVKNRIENVLKTINAKQLDLHFIGRRAAASPATGVFDRHLANQQNILRLATEADLEEIKKENKGVSLVKYKLPIE

SEQ ID NO: 96195 - protein, 759 aa, Unknown
  Bacterial polypetide isolated from the Sargasso Sea
VLKDFGGPEWKERPSSIIDKNYITKVIKSNANYNSEEFRISTLDSIRALRLIRAFRINGHLIADLDPLGISEREYPQELDYKSYGFIESDLEKEIFIDGSLGLEKGKLKNIIKILKETYSASIGVEFLHIQQADQKQWVQERIEEVRNKTNFTNEGKKAIYKRLVESELFEQFLDKKFLGTKRYGIEGGEAMIPGIEQIVKQACLSGIEDIIIGTAHRGRLTLLSSVLEMPYKKILSKFQGSLNDPNEVLGSGDVKYHLGVSADREFEKKKIHLSLTSNPSHLEAVNPVVAGKVRAKQTLAKDKTTDKVIGLLIHGDAAIAGQGVVAETFAMSQLRGFKTGGTIHFVINNQIGFTTMPQYGRSAPYCTEIAKMVQAPIFHVNGDDPEAVVHVCRLATEFRNKFKVDVVVDMFCYRRSGHNEADEPSFTQPLMYKAIKKQITTRKKYEKKLIENNTLSEEESRDIVDSFKNFLDKEFESTKNYKPNKVDWLEGTWTGLSTATFDARRGKTSVKEKTLINVAKKIHEIPADFNAHRRIKKIYGDRLTSVINGKGIDWATSESLALATLLDEGYGVRISGQDVGRGTFSHRHGVLYDQENENRFVPLRHFQNKQGYFEIIDSFLSEFGVLGFEYGYSQVDPKTLVIWEAQFGDFANGAQIMIDQFISSGERKWLRMSGLTILLPHGHEGQGPEHTSGRLERFLQMCAEDNMQIVNCTSPANYFHVLRRQLHRNFRKPLIIFTPKSTLRHKSNVSNIKDYINE

SEQ ID NO: 96196 - protein, 660 aa, Unknown
  Bacterial polypetide isolated from the Sargasso Sea
QTSIDQAITDSMRLVMMIRAYREIGHLIADLDPLGLMIKNSPSGLDPEYYGFQEKDYDRKIFLFGYLGFQKATVREVFEKLQSIYSGTLAIEYKHIQSAEEYKWLKDRIEEKKDMLLTPKGKRTILERLINAEYFEKFLDTKYRGTKRFGLEGAESTIPALEQILKRSSEYGVEDFSFACAHRGRLNILANIVKKPHVQIFSEFIHGGENALSDQGSGDVKYHLGASSDRSFGGNIIHVSMAANPSHLEAVNPVVAGKIRAKQTIIQDKNNSKVSGLLIHGDAAIAGQGIVAETFTMSQLNGYRIGGIIHFIINNQIGFTTSPQYSRSAPYSSEIGKVVQSPIFHVNGDDPEAVVLASRAATEFRNTFKKDTLVDMFCYRKHGHNEGDEPSFTQPLMYQTIKKKKTVASIYADKLINQEIVNTKQVDFIKDRIWSDLEKKFEKAKNYKLKTKLWMGGQWSGLSRAPKDPLRRGRTAESEKSLKDIGLKISQTPKEFNLHPKLEKFNKSRLNSINSGKGIDWSFAEALAFGALLKEGYRVRLAGQDSGRGTFSQRHSVFYDQKTEERYIPLNHISKKQKEFEVIDSFLSELGVLGFEYGYTLADPNTLVLWEAQFGDFANGAQIIIDQFITSSERKWMQMSGLVLLLPHGHEGMGPEHSSA

SEQ ID NO: 96197 - protein, 238 aa, Unknown
  Bacterial polypetide isolated from the Sargasso Sea
VIDHLSYQHNINGERLSGLIMLLPHGYEGQGPEHSSARIERFLQLCASENIQVCVPSSPKQIFHLLRRQAIRKMRTPLIVISPKSLLRNPQAVSTLDDLSDGSFECVIDDELDNINDVKKIIMCSGKVFYELIEKRNKEKRHDIAIIRIEQLYPFPYDDLEEILLRYQNVHEYIWCQEEPLNQGAWFSHRHRIQRVLDRLGNNNEVKLVSRPPAAAPAVGLMKLHLKQQETLINEAIV

SEQ ID NO: 96198 - protein, 396 aa, Unknown
  Bacterial polypetide isolated from the Sargasso Sea
SSPHPSDIAKMVEAPIIHVNGDNPEAVVYGARIATEFRLKFNRDVVIDLVCYRRFGHNEGDEPSFTQPLMYKKIRSHPSTIKIYGEKLVNEGIISNNELEDQINKLKNLLDDQFKNAKDYNPKIEWFEGSWSRYKPEKGKDKRGVTGANINILSNISDKINTIPEEINIHKTIRKILENRKQRVHQGYDIDWSTAEALAFGSLLEEGYPVRLVGQDSGRGTFSQRHSILRNQIDNSRYIPLNSISKNQKSFEIVDSFLSEFAVLGFEYGYSLVEPNTLTLWEAQFGDFANGAQVIIDQFISSGERKWKRASGLVMLLPHGYEGQGPEHSSARLERYLQLCANDNLQIMNCTTPANYFHALRRQMHRDFRKPLIIMTPKSLLRNKYCVSNLEDFSKE

SEQ ID NO: 96199 - protein, 527 aa, Unknown
  Bacterial polypetide isolated from the Sargasso Sea
RGRLTLLSSVLEMPYKKILSKFQGSLNDPNEVLGSGDVKYHLGVSADREFEKKKIHLSLTSNPSHLEAVNPVVVGKVRAKQTISKDKTTDKVIGLLIHGDAAIAGQGVVAETFAMSQLRGFKTGGTIHFVINNQIGFTTMPQYGRSAPYCTEIAKMVQAPIFHVNGDDPEAVVHVCRLATEFRNKFKVDVVVDMFCYRRSGHNEADEPSFTQPLMYKAIKKQITTRKKYEKKLIENNTLSEEEYEEIVDSFKNFLDKEFESTKNYKPNKVDWLEGTWTGLSTATFDARRGKTSVKEKTLMNVAKKIHEIPANFNAHRRIKKIYRDRLTSVIKGKGIDWATSESLALATLLDEGYGVRISGQDVGRGTFSHRHGVLYDQENENRFVPLRHFQNKQGYFEIIDSFLSEFGVLGFEYGYSQVDPKTLVIWEAQFGDFANGAQIMIDQFISSGERKWLRMSGLTMLLPHGHEGQGPEHTSGRLERFLQMCAEDNMQIVNCTSPANYFHVLRRQLHRNFRKPLIIFTPKFYT

SEQ ID NO: 96200 - protein, 751 aa, Unknown
  Bacterial polypetide isolated from the Sargasso Sea
LEFEKTSFLNKSNSAFIEQMYLKFINKDPDLPKSWANYFEGIGEETKVIASELNGPSWGPSKLKIDIDELQKKIEIDENNKVNNKKLDTSEKFNFQLLADSNKDSISAVALIRAYRLRGHLLANLDPLEMRKSEYLDELHPEFYGFKKQNYDKKIFLNGVINKKYANIKEILKFLKKTYCGNIGYEFMHVSNPVERKWFRDRVEQDQNALNFTQNGKEAILNKLVQAEGFEKFLATKYVGTKRFGLDGGESLIPALEQIIKIGGQNQIKEVKIGMSHRGRLNVLANVLQKDYKRIFNEFAGEIVSDSEESAGDVKYHLGASSDRVFDGNSVHVGLTDNPSHLEAVNPVVLGQTRAKQFFHNDKQRNKVIPILIHGDAAFAGQGVVAECFAMSGLPGHNTGGTIHIIVNNQIGFTTSPRFARSSPYPSDVAKMVEAPILHVNGDDPEAVVYATRIATEFRLKFNRDVVVDLICYRRFGHNEGDEPSFTQPLMYKKIRSHPSVYKIYGSKLVNENSITQNLLDQNVKTFKDLLDEQYKSAKDYKPKIEWFEGSWSRYKPRKGKDKRGVTGFDEIKLKEISDRINTIPAEINIHKTISKILNVRKNSVDKGLDIDWSAAEALAFGSLLEEGFPVRLVGQDSGRGTFSQRHSVLRDQNDNSRYIPLNNISSKQKNFEVVDSFLSELAVLGFEYGYSLVEPNTLTLWEAQFGDFANGAQVVIDQFIASGERKWNRASGLVMLLHMAMKVKDQNILS

SEQ ID NO: 96201 - protein, 330 aa, Unknown
  Bacterial polypetide isolated from the Sargasso Sea
AFATLLEEYRPVRISGQDFGRGTFAHRHAIVTTEEDSKYVPLNHLSDKQAPFSVYNSLLSEYGVLGFEFGYAYATPRSLTIWEAQFGDFGNGAQIIFDQFISSAETKWHRMNGLVVLLPHGYEGQGPEHSSARIERYLELCADNNLMIINCTLPVNMFHALRRQVEQPFRKPLIVFTPKSLLRHPKCVSPLEDFLGGSRFREVLDNTKVEPEKVRKVLFCSGKIYYELESFREEKGQDHVAIVRLEQLHPLPVKQLEAVIEQYPNCQTWCWVQEEPENMGAWCFMNRKFKFIPKPLQLVSRKESSSPAGGFAKIHQQNQQALIERAFSIG

SEQ ID NO: 96202 - protein, 261 aa, Unknown
  Bacterial polypetide isolated from the Sargasso Sea
FGDFANGAQIIIDQFIASGERKWSRASGLVMLLPHGYEGQGPEHSSARLERFLQLCAQDNLQVMNCTTPANYFHALRRQIHRDFRKPLVIMTPKSLLRNKLCTSKLDDFGKKNSFHRVLWDHAIDPNETDFIKLKKSEKIKKVILCSGKVYFDLLEAREKNKKDDIVIFRIEQLYPFPVKPLVKEIARYAKNAKFYWCQEEPKNMGAWLLVRDYIQWTLNHIGAKHNQIMYIGRNPAASPATGYAKRHIKQQREIIEKVFE

SEQ ID NO: 96203 - protein, 311 aa, Unknown
  Bacterial polypetide isolated from the Sargasso Sea
IYARKESIEKGIGIDWSSAEALAFGSLLEEGYPVRLVGQDSGRGTFSQRHSVLRNQIDNSRYIPLNNISNNQKQFEVVDSFLSELAVLGFEYGYSLVEPNTLTLWEAQFGDFANGAQVVIDQFIASGERKWNRASGIVMLLPHGYEGQGPEHSSARLERFLQLCSNDNMQVMNCTTPANYFHALRRQMHRSFRKPLIIMTPKSLLRNKYCVSNLEDFNKNNTFHRVLWDHAIDPKSKGFIKLKESSKIKKVILCSGKVYFDLLDAREKLKRDDVVMFRIEQLYPFPAKALVNELKPYVKNAQFFWCQEEPK

SEQ ID NO: 96204 - protein, 319 aa, Unknown
  Bacterial polypetide isolated from the Sargasso Sea
FVLRNQIDNSRYIPLNNISKKQKNFEIVDSFLSELAVLGFEYGYSLVEPNTLTIWEAQFGDFANGAQVVIDQFIASGERKWSRASGLVMLLPHGYEGQGPEHSSARLERFLQLCSNDNMQVMNCTTPANYFHALRRQMHRDFRKPLIIMTPKSLLRHKHCVSNLDDFSKKNSFHRVLWDHAIDPKVKGFIKLKKPKDIEKVILCSGKVYFDLLEAREKIKKDNVVLYRIEQLYPFPAKALANELKPYAKKAKFYWCQEEPKNMGAWFSVRDYIQWTLDNIKAKNSMISYIGRSPDASPATGYAKRHVSQQQEIIKKVFE

SEQ ID NO: 96205 - protein, 266 aa, Unknown
  Bacterial polypetide isolated from the Sargasso Sea
IWEAQFGDFANGAQIIIDQFISSGERKWSRASGLVLLLPHGYEGQGPEHSSARLERFLQLCAQDNLQVMNCTTPANYFHALRRQIHRDFRKPLVIMTPKSLLRNKLCVSKLEDFSKNHSFHRVLWDHAIDPNEKGFVKLKSSEKIRKVILCSGKIYFDLLEARQKAKIDDVILFRIEQLYPFPVKPLVKEFKKYAKNAKFYWCQEEPKNMGAWFSVRDYIQWTLNYIRAKNSKIKYVGRNPAASPATGYAKRHINQQKKIIEEVFK

SEQ ID NO: 96206 - protein, 278 aa, Unknown
  Bacterial polypetide isolated from the Sargasso Sea
YGYSLVEPSTLTIWEAQFGDFANGAQVIIDQFIASGERKWSRASGLVMLLPHGYEGQGPEHSSARLERFLQLCALENLQVINCTTPANYFHALRRQIHRDFRKPLIIMTPKSLLRNKLCVSNLEDFSKENSFHRVLWDHAVDTTENGFIKLKKSKHIEKVILCSGKIYFDLLVAREKLKNDKVIIFRIEQLYPFPVKSLAKEIKKFAKNAEFFWCQEEPKNMGAWFSVRDYIQWTLKHIGAKNKEINYIGRDPAASPATGYAKRHLSQQKKIIETVFK

SEQ ID NO: 96207 - protein, 291 aa, Unknown
  Bacterial polypetide isolated from the Sargasso Sea
GRGTFSQRHSVLRNQTDNSRYVPLNNISKNQKNFEIVDSFLSELAVLGFEYGYSMVEPNTLTIWEAQFGDFANGAQVVIDQFIASGERKWSRASGLVLLLPHGYEGQGPEHSSARLERFLQLGAQENIQVMNCTTPANYFHALRRQIHRDFRKPLIIMTPKSLLRNKYCTSNLEDFGKENFFHRILNDHAFEKRNNFIKLKDNNLIKKVILCSGKIYFDLLEAREKNKKDDIVFYRIEQLYPFPVKNLVSELKKYSKNAKFFWCQEEPKNMGAWFAVRDYIQWTLGYIKAK

SEQ ID NO: 96208 - protein, 279 aa, Unknown
  Bacterial polypetide isolated from the Sargasso Sea
FEYGYSLVEPETLTIWEAQFGDFANGAQVVIDQFIASGERKWSRASGLVLLLPHGYEGQGPEHSSARLERFLQLCGQENLQVMNCTTPANYFHALRRQIHRDFRKPLVIMTPKSLLRNKYCVSNLDDFSKDNSFHRILGDHANESGYNFINLKKKDKIKKVILCSGKIYFDLLEAREKFKKDDVTLIRIEQLYPFPAKSLANELKPYKQIAKFYWCQEEPKNMGAWFSVRDYIQWTLDYIGANNNQISYIGRNPAASPATGYAKRHLSQQEEIIKEVFK

SEQ ID NO: 96209 - protein, 293 aa, Unknown
  Bacterial polypetide isolated from the Sargasso Sea
EGYPVRLVGQDSGRGTFSQRHSILRNQLDNSRYIPLNNISKNQKNFEIVDSFLSELAVLGFEYGYSLVEPNTLTIWEAQFGDFANGAQIIIDQFIASGERKWKRASGLVLLLPHGYEGQGPEHSSARLERFLQLCANDNLQVINCTTPANYFHALRRQMHRDFRKPMIIMTPKSLLRNNYCVSNIEDFSKENSFHRVMWDHAIDPKSKGFIKLKKSSEIKKVILCSGKVYFDLLAAREKLKKDDVVLFRIEQLYPFPAKSLVKEMKPYAENAKFYWCQEEPKNMGAWFSVRDY

SEQ ID NO: 96210 - protein, 305 aa, Unknown
  Bacterial polypetide isolated from the Sargasso Sea
YPVRLVGQDSGRGTFSQRHSVLRNQLDNSRYVPLNNISDNQQHFEVVDSFLSELAVLGFEYGYSLVEPNTLTLWEAQFGDFANGAQVVIDQFIASGERKWNRASGIVMLLPHGYEGQGPEHSSARLERFLQLCSNDNMQVMNCTTPANYFHALRRQMHRNFRKPLIIMTPKSLLRNKYCVSNLEDFNKKNTFHRVLWDHAIDPKSKGFIKLKESSKIRKVILCSGKVYFDLLDAREKLKRDDVVMYRIEQLYPFPAKALVKELKPYAKNAEFFWCQEEPKNMGAWFSVRDYIQWTLDTLKANNNK

SEQ ID NO: 96211 - protein, 278 aa, Unknown
  Bacterial polypetide isolated from the Sargasso Sea
YGYSLVEPNTLTIWEAQFGDFANGAQVIIDQFISSGERKWKRASGLVMLLPHGYEGQGPEHSSARLERFLQLCANDNLQVMNCTTPANYFHALRRQMHRDFRKPLIIMTPKSLLRNKYCVSNLEDFSKQNSFHRVLWDHARDTKQKGFIKLKEDKKIRKVILCSGKIYFDLLAAREKLKINDVILYRIEQLYPFPAKSLVKELKPFAKNAKFYWCQEEPKNMGAWFAVRDYIQWTLETIKAKNNVISYIGRSPDATPATGYARRHNSEQQEIINKVFE

SEQ ID NO: 96212 - protein, 300 aa, Unknown
  Bacterial polypetide isolated from the Sargasso Sea
MAYATLLSEGYPVRISGQDVRRGTFSHRHACVFDTNTGKGFIPLSKVAKKYNTRFDIYDTLLSEEAVLAFEYGYSATWPSGLTIWEAQFGDFANGAQVVIDQFIVSAQHKWERLSGLVMLLPHGYEGQGPEHSSARIERFLQLCASENIQVCIPSSPSQMFHLLRRQTIRKMRTPLIVITPKSLLRNPKAVSSIEGLCNGSFRTVIDDKIIDKDNVNNIVLCSGKVYYELEQRKKETKIENMAIIRIEQLYPFPYDDLEELLVSYKNVNKVKWCQEEPSNQGAWFSHRHRLQRVLDRLKN

SEQ ID NO: 96213 - protein, 331 aa, Unknown
  Bacterial polypetide isolated from the Sargasso Sea
ARHQSIKQQKNIDWSTAESLAFASLLEEGFPVRLVGQDSGRGTFSQRHSVLRDQKNNSRYIPLNNISKNQKRFEIVDSLLSELAVLGFEYGYSLVEPDTLTIWEAQFGDFANGAQVVIDQFIASGERKWSRASGLVMLLPHGYEGQGPEHSSGRLERFLQLCAKENLQVINCTTPANYFHALRRQIHRDFRKPLVVMTPKSLLRNKLCVSKLEDFSQENSFHRVLWDHAIDPKEKNFIKLKESKKIKKVILCSGKVYFDLLEAREKLKKNDVIVFRIEQLYPFPVKSLIKEIKPFAKNAKFYWCQEEPKNMGAWFSVRDYIQWTLDYINAN

SEQ ID NO: 96214 - protein, 302 aa, Unknown
  Bacterial polypetide isolated from the Sargasso Sea
KHKKKFEIVDSFLSELAVLGFEYGYSLVEPNTLTIWEAQFGDFANGAQVIIDQFISSGERKWQRASGLVMLLPHGYEGQGPEHSSARLERFLQLCANDNLQVMNCTTPANYFHALRRQIHLDFRKPLVLMTPKSLLRNKYCVSDIQDFNKQTSFHRILWDHALNNDNENFIKLKNPDEIEKVILCSGKVYFDLLAAREKIKRDDVILFRIEQLYPFPVKSLVKELKPYANNAKFYWCQEEPKNMGAWFSVRDYIQWTLETIKAKNNNISYIGRNPDASPATGYAKRHMVEQEEIIKKVFDNE

SEQ ID NO: 96215 - protein, 275 aa, Unknown
  Bacterial polypetide isolated from the Sargasso Sea
MSGQDSGRGTFSQRHAVLRNQDNHERYVPLNNISKNQKNFEIIDSLLSELAVLGFEFGYSLSEPETLVLWEAQFGDFANGAQIIIDQFISSGESKWGRASGLVMLLPHGYEGQGPEHSSARLERFLQLCAGENIQVVNCTTPSNYFHVLRRQMHREFRKPLILMTPKSLLRHKKCISNINEFTKKSTFHRVLEDDAYLKVNNLLELKKRDDKIKKVVMCSGKIYYDLIEAREKFKNDEVTFVRIEQLYPFPVKTLANILKRYTKAKFFWCQEEPK

SEQ ID NO: 96216 - protein, 312 aa, Unknown
  Bacterial polypetide isolated from the Sargasso Sea
AFGSLLEEGYPVRLVGQDSGRGTFSQRHSVLRNQIDNSRYIPLNNISGNQKKFEVVDSFLSELAVLGFEYGYSLVEPNTLTLWEAQFGDFANGAQVIIDQFIASGERKWSRASGLVMLLPHGYEGQGPEHSSARLERFLQLCSNDNMQVMNCTTPANYFHALRRQMHREFRKPLVIMTPKSLLRNKFCTSNIDDFSKNNSFHRVLWDHAIDPKSNGFIKLKKDSEIKKVILCSGKVYFDLLVAREKLKRDDVILFRIEQLYPFPVKSLVKEIKPFAKNAKFYWCQEEPKNMGAWFSVRDYIQWTLDNIKAKN

SEQ ID NO: 96217 - protein, 293 aa, Unknown
  Bacterial polypetide isolated from the Sargasso Sea
SRNQKKFEIVDSFLSELAVLGFEYGYSLVEPNTLTIWEAQFGDFANGAQVIIDQFISSGERKWLRASGLVLLLPHGYEGQGPEHSSARLERFLQLCSNDNMQVMNCTTPANYFHALRRQMHRDFRKPLVIMTPKSLLRNKFCVSNIGDFSKSNSFHRILWDHAIDPKSKGFIKLKKNNEIKKVILCSGKIYFDLLAAREKLKRDDVILFRIEQLYPFPAKSLVKEIKPFAKKAKFYWCQEEPKNMGAWFSVRDYIQWTLDYIKANNREISYIGRSPDATPATGYAKRHLAQQK

SEQ ID NO: 96218 - protein, 306 aa, Unknown
  Bacterial polypetide isolated from the Sargasso Sea
AESIALASLVDEGNGVRLVGQDTVRGTFSHRHAGINDQVTGERYYPIKNISTNQGKAEVIDSLLSEMGVLGFEYGYSLTDPDTLVLWEAQFGDFANGAQVIFDQFISSGEKKWTRASGLVMLLPHGYEGQGPEHSSARIERYLQACAQENIQVVNCTTPANYFHALRRQIHRPFRKPLVIFTPKSLLRNKKCVSELEDFTKENSFHRVLSDKAESPKYDMISLADDNSIDRVILCSGKIYYDLIDQREKQKADKVQIVRIEQLYPFPAKTLAKHLNRFTNVKKIIWCQEEPQNMGCWNHVERYINR

SEQ ID NO: 96219 - protein, 300 aa, Unknown
  Bacterial polypetide isolated from the Sargasso Sea
NQKRFEIIDSLLSEMAVLGFEYGYALSEPTTLVIWEAQFGDFANGAQVIIDQFIASAERKWARANGLVMLLPHGYEGQGPEHSSARLERFLQLCAQENIQVVNCTTPANYFHALRRQIHRDFRKPLIIMTPKSLLRNKMCTSNIEDFTKKNTFHRVLIDHADSQKNNLIKLAEDKKIKKVVICSGKIYFDLLQAREKNKNKNIFIIRIEQLYPFPVKTLANVLKRFRKKTEFFWCQEEPQNMGAWNTVRNYIQWSLNYIKADDKEIKYIGRKPAASPASGYLKKHLAEQNEILEKVVGKL

SEQ ID NO: 96220 - protein, 260 aa, Unknown
  Bacterial polypetide isolated from the Sargasso Sea
LKTTYCGSIGAEYMHITSTEEKRWLQQRLESVQSRPKFEKEEKLRILKGLTAADGLEKYLGAKFPGAKRFSLEGGDALVPMLKELIHRAGESGQQEAVIGMAHRGRLNVLVNVLGKNPSELFDEFAGKHKDTLSSGDVKYHMGYSSDFATKGGNVHMALAFNPSHLEIVNPVVMGSVRARLDRLGDTTGIKALPITIHGDSAVTGQGVVQETFNLSQTNAFSCGGSIRIVVNNQVGFTTSKQDDVRSTDYCTDIAKMVQS

SEQ ID NO: 96221 - protein, 308 aa, Unknown
  Bacterial polypetide isolated from the Sargasso Sea
LEEGYPVRLVGQDTGRGTFSQRHSVLRNQLDNSRYIPLNHISKNQKNAEIVDSFLSELAVLGFEYGYSLVEPNTLTIWEAQFGDFANGAQVIIDQFISSGERKWKRASGIVMLLPHGYEGQGPEHSSARLERFLQLCSNDNMQVMNCTTPANYFHALRRQMHRDFRKPLIIMTPKSLLRNKYCVSNLDDFSKDNSFHRIMWDHSMDPKSKGFIKLKKSSEIKKVILCSGKVYFDLLDAREKLKKNDIIFFRIEQLYPFPAKSLLKELKPYAKNAKFYWCQEEPKNMGAWFSVRDYIQWTLDTIKATNN

SEQ ID NO: 96222 - protein, 297 aa, Unknown
  Bacterial polypetide isolated from the Sargasso Sea
GHISLSELAEKNKTSFDIYDSLLSEEAVLGFEYGYSATWPSGLTIWEAQFGDFANGAQVVIDQFIVSAQHKWERLSGLIMLLPHGYEGQGPEHSSARIERFLQLCASENIQVCVPSSPKQIFHLLRRQAIRKMRTPLIVISPKSLLRNPQAVSTLDDLSDGNFECVIDDELDNKNDVKKIIMCSGKVFYELIEKRNKEKRYEIAIIRIEQLYPFPYDDLEEILLRYQNVHEYIWCQEEPLNQGAWFSHRHRIQRVLDRLGNNNEVKLVSRPPAAAPAVGLMKLHLKQQKTLINEAIV

SEQ ID NO: 96223 - protein, 266 aa, Unknown
  Bacterial polypetide isolated from the Sargasso Sea
MITQGSFHLTIFPEKQKNFEIVDSFLSELAVLGFEYGYSLVEPNTLTIWEAQFGDFANGAQVIIDQFISSGERKWSRASGLVLLLPHGYEGQGPEHSSARLERFLQLCSNDNMQVMNCTTPANYFHALRRQMHRDFRKPLIMMTPKSLLRNKFCVSNIEDFSKKNSFHRVLWDHAIDPETKGFIKLKEKNEIKKVILCSGKIYFDLIAAREKIKKNDVIIFRIEQLYPFPAKSLVKEMRPFAKKAKFYWCQEEPKNMGAWFSVRDI

SEQ ID NO: 96224 - protein, 249 aa, Unknown
  Bacterial polypetide isolated from the Sargasso Sea
EYGYSLVEPSTLTIWEAQFGDFANGAQVIIDQFISSGERKWSRASGLVMLLPHGYEGQGPEHSSGRLERFLQMCAQDNLQVINCTTPANYFHALRRQIHRDFRKPLVVMTPKSLLRNKLCVSNLEDFSKKNSFHRVLWDHAIDPKESKFIKLEKNSKISKVILCSGKIYFDLLEAREKIKRKDIIFLRIEQLYPFPVKSLVKEIKKYAKNAKFYWCQEEPKNMGAWFSVRDYIQWTLDYIGAKYNNISY

SEQ ID NO: 96225 - protein, 310 aa, Unknown
  Bacterial polypetide isolated from the Sargasso Sea
KKTIDQGFNIDWSSAEALAFGLLLEEGFPVRFVGQDSGRGTFSQRHSVLRNQLDNTRYIPLNSISKNQKKFEIVDSFLSELAVLGFEYGYSLVEPNTLTIWEAQFGDFANGAQVIIDQFISSGERKWQRASGLVMLLPHGYEGQGPEHSSARLERFLQLCANDNLQVMNCTTPANYFHALRRQIHRDFRKPLVLMTPKSLLRNKYCVSSIEDFNKQTSFHRILWDHALNKDSKNFIKLKKPAEIKKVILCSGKVYFDLLAAREKIKRDDVILFRIEQLYPFPVKSLVKELKPYANNTKFYWCQEEPKNMG

SEQ ID NO: 96226 - protein, 268 aa, Unknown
  Bacterial polypetide isolated from the Sargasso Sea
TLVLWEAQFGDFANGAQVVIDQFISSGESKWSRASGLVMLLPHGYEGQGPEHSSARLERFLQLCSQDNLQVVNCTTPANYFHALRRQMHRNFRKPLIVMTPKSLLRHKRCTSSIDDFTKQNSFHRILEDHAYLKDSKLVELKNDKKIKKVVICSGKIYFDLVEAREKAKDDNVVLIRVEQLYPFPVKQLGKQLKRYENAKFYWCQEEPMNMGAWNTARHYIDRTLDIIQAKGEKVRYVGRNAAASPATGNLNKHLAEQKEILEKVINK

SEQ ID NO: 96227 - protein, 285 aa, Unknown
  Bacterial polypetide isolated from the Sargasso Sea
NQKNFEIVDSLLSELAVLGFEYGYSLVEPETLTIWEAQFGDFANGAQVIIDQFISSGERKWSRASGLVLLLPHGYEGQGPEHSSARLERFLQLCGQENLQVLNCTTPANYFHALRRQIHRDFRKPLVIMTPKSLLRHKVCVSNLEDFSKKNSFHRILEDHAFDKKNGFLELKKSKKIRKVIICSGKIYFDLLEAREKLKGNDIVLLRIEQLYPFPAKSLVKSIKPYAKNAQFIWCQEEPKNMGAWSHVRDYIQWTLDFIKANNKKVSYIGRAPAASPATGYAKRH

SEQ ID NO: 96228 - protein, 277 aa, Unknown
  Bacterial polypetide isolated from the Sargasso Sea
GYSLVEPNTLQIWEAQFGDFANGAQVIIDQFISSGERKWLRASGLVLLLPHGYEGQGPEHSSARLERFLQLCSNDNLQVMNCTTPANYFHALRRQMHRDFRKPLVIMTPKSLLRNKFCVSNISDFSKSNSFHRVLWDHAVDPKSKGFIKLKKNNEIKKVILCSGKIYFDLLIAREKLKRDDVILFRIEQLYPFPAKSLVKEIKPFAKNAKFYWCQEEPKNMGAWFSVRDYIQWTLDYIKANNREISYIGRSPDATPATGYAKRHLAQQKEIIDKVFN

SEQ ID NO: 96229 - protein, 295 aa, Unknown
  Bacterial polypetide isolated from the Sargasso Sea
GVLGFEYGYSLAEPHSLVVWEAQFGDFANGAQVIIDQFISSGESKWLRMSGLVMLLPHGYEGQGPEHSSAKLERYLQLCAEDNMQVVNLTTPANYYHALRRQMRREFRKPLIVMTPKSLLRHKRCVSSLGEMEMGTTFHRVLWDARHWTKELAKDSDIRRVILCSGKVYYDLAEERDKRGLKEAFIMRVEQLYPFPMKALTEDLSRFKQAEFIWCQEEPRNMGAWSFARERVEEVLESIGAASPRISYVGRPEAASPASGSLRRHVVEQEELVDKALTLPPKRAPHKANARKSVT

SEQ ID NO: 96230 - protein, 312 aa, Unknown
  Bacterial polypetide isolated from the Sargasso Sea
GQDTGRGTFSQRHSVLRNQIDNSRYIPLNNISKTQKQFEIVDSLLSEFAVLGFEYGYSLVEPETLVLWEAQFGDFANGAQVIIDQFIASGERKWARASGLVLLLPHGYEGQGPEHSSARLERFLQLCAKDNLQVMNVTTPANYFHALRRQITRDFRKPLVIMTPKSLLRNKHCVSNLEDFSKKNSFHRILWDHSLDTKSNFIKLKSPKDINKVIICSGKVYFDLLEEREKNERNDILLLRIEQLYPFPARSLAKELKPYIKNAKFYWCQEEPKNMGAWFFVRDYIDWTLEYIKAKNNKISYIGRELLQHQQP

SEQ ID NO: 96231 - protein, 285 aa, Unknown
  Bacterial polypetide isolated from the Sargasso Sea
GYPVRLVGQDSGRGTFSQRHSVLRNQTDNSRYIPLNNISNNQKQFEVVDSFLSELAVLGFEYGYSLVEPNTLTLWEAQFGDFANGAQVVIDQFIASGERKWNRASGLVMLLPHGYEGQGPEHSSARLERFLQLCSNDNMQVMNCTTPANYFHALRRQMHRSFRKPLIIMTPKSLLRNKYCVSNLEDFNKKNSFHRVLWDHAIDPKSNGFIKLKESSKIKKVILCSGKVYFDLLDAREKLKRDDVVIFRIEQLYPFPAKTLVNELKPYAENAEFFWCQEEPKNMGA

SEQ ID NO: 96232 - protein, 283 aa, Unknown
  Bacterial polypetide isolated from the Sargasso Sea
LGFEYGYSLVEPNTLTLWEAQFGDFANGAQVIIDQFISSGERKWQRASGLVMLLPHGYEGQGPEHSSARLERFLQLCANDNLQVMNCTTPANYFHALRRQIHRDFRKPLVIMTPKSLLRNKFCVSNIDDFSKQTSFHRIMWDHALSDQSKNFIKLKKSSEIKKVIICSGKVYFDLLNAREKLKRDDVVMFRIEQLYPFPAKSLVKELKPYAKNANFYWCQEEPKNMGAWFSVRDYIQWTLDTIKAKNNVVSYIGRSPDASPATGYAKRHQIEQQEIINEVFDQ

SEQ ID NO: 96233 - protein, 307 aa, Unknown
  Bacterial polypetide isolated from the Sargasso Sea
SGRGTFSQRHSVLRDQITNKYYTPLNNISKKQKRFEVIDSLLSEFAVLGFEHGYALSEPTTLVVWEAQFGDFANGAQVIIDQFIASGERKWARASGLVMLLPHGYEGQGPEHSSARLERFLQLCAQENIQVVNCTTPANYFHALRRQMHREFRKPLIIMTPKSLLRNKRCVSNIEDFTKKNSFHRVLPDHAEIKSYGLIDLKKDKKIKKVVLCSGKIYFDLLESREKIKNDEVFFIRIEQLYPFPVKTLAVELKRFRKNAKFYWCQEEPQNMGAWNSARNYIEWTLKHIGAEDTEVRYIGRKPAASP

SEQ ID NO: 96234 - protein, 281 aa, Unknown
  Bacterial polypetide isolated from the Sargasso Sea
GFEYGYSLVEPNTLTIWEAQFGDFANGAQVVIDQFVASGERKWSRASGLVMLLPHGYEGQGPEHSSARLERFLQLCSNDNMQVMNCTTPANYFHALRRQMHRDFRKPLILMTPKSLLRHKHCISNLEDFSKHNSFHRVLWDHAIDPKIKGFIKLKKAKKIKKVILCSGKIYFDLLEEREKIKRDDVVFYRIEQLYPFPAKSLVKELKPYAKNAKFYWCQEEPKNMGAWFSVRDYIQWTLDNIKANNKDIFYIGRSPDASPATGYAKRHISQQKEIINKVFE

SEQ ID NO: 96235 - protein, 288 aa, Unknown
  Bacterial polypetide isolated from the Sargasso Sea
MSELAVLGFEYGYSLVAPNTLTIWEAQFGDFANGAQVIIDQFISSGERKWKRASGLVMLLPHGYEGQGPEHSSARLERFLQLCANDNLQVMNCTTPANYFHALRRQVLRDFRKPLIMMTPKSLLRNKYCKSNISDFSKNNSFHRVMWDHSMDPKNKGFIKLKKNSEIKKVILCSGKVYFDLLEAREKIKNNDVILFRIEQLYPFPAKSLVKELKPFAKNANFFWCQEEPKNMGAWLLVRDYIQWTLQTIKAKNIEISYIGRNPDASPATGYAKRHLSEQQEIINKVFE

SEQ ID NO: 96236 - protein, 885 aa, Unknown
  Bacterial polypetide isolated from the Sargasso Sea
MSSSKNLDYEKTSFLHKANTSFIEEMYVKFIEGDTTIPQSWKSYFEGLGEDLKDVIKEIEGPNWKPNKIKINLNQQNLKENQKVNQINIKDSIKAIALIRAYRINGHLIANLDPLGMMERKYMHELHPEDYGFNKDDFNRKIYLDNYLDRDFASLKEIIKFLKDKYCSSIGVEYMHMTEREEKIWFRERMEKEENKISFTNNGKKAILNKLIQAEGFEKYLALKFVGTKRFGLDGAESLIPALEQIIKRGGQLGVKEIKIGMPHRGRLNVLANLLQKSYKKIFNEFTGEFSETHDDSTGDVKYHLGASSDRTFDDIPVHISLTDNPSHLEAVDPVVLGQTRAKQFYHNDTKRNKVIPILIHGDAAFAGQGVVAECFAMSGLKGHNTGGTIHIIVNNQIGFTTSPRFARSSPYPSDLGKVVESPILHCNGDDPEAVVHCAKIAIEFRQKFNKDVVIDMICYRRFGHNEGDEPSFTQPLMYEKIKSHPSTLKVYGKKLIDEKIISEQEFNTQIKDFKSLLDEQYNSAKNYQPKLKWFEGTWSRYKPEKGKDRRGNSGVNAEKLRIISEKINKIPAEINIHKTIKKILELRRKFVESGQGIDWSSAEALAFGSLLEEGYPVRLVGQDSGRGTFSQRHSVLRNQIDNSRYVPLNNISKNQKNFEIVDSFLSELAVLGFEYGYSMVEPNTLTIWEAQFGDFANGAQVVIDQFIASGERKWSRASGLVLLLPHGYEGQGPEHSSARLERFLQLGAQENIQVMNCTTPANYFHALRRQIHRDFRKPLIIMTPKSLLRNKYCTSNLEDFGKENFFHRILNDHAFEKRNNFIKLKDNNLIKKVILCSGKIYFDLLEAREKNKKDDIVFYRIEQLYPFPNKNLVSELKKYSKNAK

SEQ ID NO: 96237 - protein, 592 aa, Unknown
  Bacterial polypetide isolated from the Sargasso Sea
RQDRIGDKDRSQVVPILLHGDASFSGQGVVMESLQMSQTRGFNVGGTIHIIVNNQIGFTTSNINDSRSTDYSSDVAKIIQAPVIHVNGDDPEMVVNAAKIACKYRNKFKKDIVIDLFCYRRRGHNEADDPSATQPLMYNKISKHPSVLNQYETNLIDNGILTSDEAKKIKSEYRKSLEGGESVAKNLAKNPNDQLWFDWEPYMDVKWWPKVDTKFNKDKFTKLGKAVCKVPKSFNLGSQAKKIFDDRLRMNNGEIPINWGYAETMAYATLLDEGYPIRLTGQDVRRGTFSHRHACVFDSNNGMGYIPLSDIAEKNKSKFDIYDSLLSEEAVLAFEYGYSATWPSGLTIWEAQFGDFANGAQVVIDQFIVSAQHKWERLSGLVMLLPHGYEGQGPEHSSARIERFLQLCASENIQVCVPSSPKQIFHLLRRQAIRKMRTPLVVISPKSLLRNPMAVSNLDELTNGSFDCVIDDDIKKPEAVKRLILCSGKVFYDLIEKKKEENREDIAVIRIEQLYPFPYDDLEEILTKYQNVQEFIWCQEEPLNQGAWFSHRHRIQRVLDRLGDGLEVSLVSRPAAAAPAVGLMKLHLQQQK

SEQ ID NO: 96238 - protein, 520 aa, Unknown
  Bacterial polypetide isolated from the Sargasso Sea
MFYCAQVATEFRQKFKRDVVIDIFCYRRFGHNEGDEPSFTQPIMYKKIKQQPSTLKLYSSQLINENILTVEQYKTQIENYNKYLDQEFQSSKNYISNEQDWFTGVWSKFTTEVGSDRRGVTGVDENIIRSLGHKLSEIPKDFNPHHTIKRIFDNKKQMIKTGENIDWATAESLAFATLLNEGYPVRLVGQDSVRGTFSQRHAGITDQLNGEKYFPLKNLTDSQAQAEIIDSLLSEMGVLGFEYGYSLSEPDSLVLWEAQFGDFANGAQVIFDQFISSGEKKWSRASGLVVLLPHGYEGQGPEHSSGRIERFLQLCAQENLQIVNCTTPANYFHVLRRQIHRTFRKPLIVFTPKSLLRSKKSFSKIEDFSKESSFHRVLPDHAELPKNNYIKLAEDKDIKRIVFCSGKIYYDLLEEREKLMENRVQLIRIEQLYPFPAKTLANHVKRFENVEKYFWCQEEPQNMGPWNTVERYLHWTLDFAGKKNNKIYYAGRNPSASTATGYLKKHLAQQKEIITKALTI

SEQ ID NO: 96239 - protein, 962 aa, Unknown
  Bacterial polypetide isolated from the Sargasso Sea
MSSSDNNITFKKTSFLSGINSEFINQFYSDYLNDPNSLPNSWIKFFDGLSEDEKLILDDLNGPSWSPEKKIQKSKSYLIDNEKNKEVNEDLNLSSVKEASKDSVRAIMLIRAYRIRGHLIANLDPLSIQKKEEHPELKPETYGFNKKDYKRKIFLDGVLGLQYADLNQILDILKRTYCSAIGYEFMHMGDPEEKAWIRNRIEGPEKDIVFTQNGKKAILNKIIQAEGFEKYLHVKFVGTKRFGLDGGESLIPALEQIIKRGGNLGAKEIKIGMPHRGRLNVLANVMGKPFRAIFSEFFGKSVNASKDFEGDVKYHLGASSNREFDGNSVHISLTDNPSHLEAVNPVVLGQVRAKQFFHKDKDRKKVIPVLMHGDAAFAGQGIVAECFAMSGLPGHNIGGTIHIIVNNQIGFTTAPRFARSSPYPSDVAKIAQAPIFHVNGDDPEAVVHCAKIATEYRQKFNRDVVIDMVCYRRFGHNEGDEPSFTQPIMYRKIKSHPTTLTLYGKRLSAEGLTSYEKLQKEKVEFKQYLEKEFDISKSYKSELKWFDGAWSRFKPGLGKDKRGVSGVERGKLEKIGKKIFTIPTNFNAHKTLKRVFELRKEMLNAGKLDWSSAESLAIGTLLTEGFSVRLSGQDSGRGTFSQRHAILRNQENHDRYIPVNNIEKGQMKFEVIDSLLSELAVLGFEFGYSLSEPETLVLWEAQFGDFANGGQVIIDQFITSSESKWGRASGLVLLLPHGYEGQGPEHSSARLERFLQLCAGENIQVVNCTTPSNYFHVLRRQMHREFRKPLIIMTPKSLLRHKRCISSISEFTSRSSFHRVLEDDAYKKENKLITLKKDSKIKKVVMCSGKIYYDLVEAREKNKKDKVIFVRLEQLYPFPAKTLANVLKRYKNAEFLWCQEEPKNMGAWNTVRNYIERTLEIINIKDINVKYVGRKASSSTATGNANKHLAQQKEILEKILKD

SEQ ID NO: 96240 - protein, 699 aa, Unknown
  Bacterial polypetide isolated from the Sargasso Sea
IKEVKIGMSHRGRLNVLANVLQKSYKKIFNEFTGEFTSDTEDSAGDVKYHLGASSDREFDGNSVHVSLTDNPSHLEAVNPVVLGQTRAKQFFHKDRERNKVIPILIHGDAAFAGQGVVAECFAMSGLPGHNTGGTIHIIVNNQIGFTTSPRFARSSPYPSDVAKMVEAPILHVNGDDPEAVVYATRIATEFRLKFNRDVVVDLICYRRFGHNEGDEPSFTQPLMYKKIRSHPSVYKIYGNKLVNEKSITQELLNQNVKSFKDLLDEQYKSAKDYKPKIEWFEGTWSRYKPEKGKDKRGITGFDENKLKIISDKINGIPEEKNIHKTISKIFNARKESIKKGTGIDWSSAESLAFGSLLEEGYPVRLVGQDSGRGTFSQRHSVLRNQIDNSRYIPLNNISKNQKQFEVVDSFLSELAVLGFEYGYSLVEPNTLTIWEAQFGDFANGAQVVIDQFIASGERKWNRASGIVMLLPHGYEGQGPEHSSARLERFLQLCSNDNMQVMNCTTPANYFHALRRQMHRSFRKPLIIMTPKSLLRNKYCISNLEDFNKKNSFHRVLWDHAIDPKSKGFIKLKESSKIKKVILCSGKVYFDLLDAREKLKRDDVVMYRIEQLYPFPAKALVNELKPYAKNAEFFWCQEEPKNMGAWFSVRDYIQWTLDNIKANNNNVSYIGRSPDATPATGYAKRHIFQQQEIIKKVFE

SEQ ID NO: 96241 - protein, 903 aa, Unknown
  Bacterial polypetide isolated from the Sargasso Sea
MSSSKNLEYKKTSFLNKSNSTFIEQMYLKFINKDSDLPESWKNYFLDIGDELDLIAKEINGPSWSPQKKRIDLDEIQKTIDNKETNIPKESQQNGIDKIDIKKSNRDSIRAVSLIRSYRQRGHLISKVDPLELREIEYLDELHPESYGFNKEDYKNKIYLDGITNKDYSNIKEILSFLKKTYCGSIGYEYMHISNPSERKWIRDRVEKDENALQFTKNGKNAILNKLIQAEGFEKFLNTKFVGTKRFGLDGAESLIPALEQIIKIGGQFKIKEVKIGMSHRGRLNVLANVLQKSYKKIFNEFAGEMNDDGEDTAGDVKYHLGASSDREFDGNSVHVSLTDNPSHLEAVNPVVLGQARAKQFFHKDKERNKVIPILIHGDAAFAGQGIVAECFAMSGLPGHNTGGTIHIIINNQIGFTTSPRFARSSPHPSDVAKMVDAPIIHANGDDPEAVVYATRIATEFRLKFNRDVVIDLVCYRRFGHNEGDEPSFTQPLMYKKIRSHPSTTNIYGKKLINENIIIEEDLNLKIKKFKDLLDQQFKTAKDYKPKIEWFEGTWSRYKPEKGKDKRGATGVESNILLNISNKINEVPSDSNIHKTIKKILETRKKSIEQGSGIDWATAEALAFGSLLEEGYPVRLVGQDSGRGTFSQRHSVLRNQIDNSRYIPLNNISKSQKNFEIVDSFLSELAVLGFEYGYSLVAPNTLTLWEAQFGDFANGAQVIIDQFIASGERKWKRASGLVMLLPHGYEGQGPEHSSARLERFLQLCANDNLQIMNCTTPANYFHALRRQVLRDFRKPLIIMTPKSLLRNKYCVSELKDFSKENSFHRVMWDHSMDPKSKGFIKLKNNSDIKKVILCSGKIYFDLLAAREKIKKNDVIIFRIEQLYPFPAKSLVKELKSFAKNANF

SEQ ID NO: 96242 - protein, 689 aa, Unknown
  Bacterial polypetide isolated from the Sargasso Sea
NNENNFKITQDLVKSNANSIKAVAMIRSYRQRGHLIAKLDPLGMLKSEYLDELHPESYGFKKEDYNKKIFLDGVINKEYSNINEILAFLREKYCGSLGYEYMHISNPTERKWFRDRVEKNDDFKFTQNGKEAILNKLIQAEGFEKFLHTKYVGTKRFGLDGGESLIPALEQIIKIGGQSNIKEVKIGMSHRGRLNVLANVLQKSYKRIFNEFAGEISSKSEDDTGDVKYHLGASSNREFDGNSVHVSLTDNPSHLEAVNPVVLGQTRAKQFFHKDKERKKVIPILIHGDAAFAGQGVVAECFAMSGLPGHNTGGTIHIIINNQIGFTTSPRFARSSPYPSDIAKMVEAPIIHVNGDDPEAVVYAARIATDFRLKFNRDVVIDLICYRRFGHNEGDEPSFTQPLMYKKIRSHPSAIRVYGEKLVNENSISKEFLDASIKKFKDLLDEQFKNAKNYKPKIEWFEGTWSRYKPDEGKDKRGVTGSDLKKLIEISEKINSIPKEINIHKTISKILDIRKNNVLKGAEIDWSTAESLAFGSLLEEGYPVRLVGQDSGRGTFSQRHSVLRNQLDNSRYIPLNNISERQKKFEVVDSFLSELAVLGFEYGYSLVEPNTLTIWEAQFGDFANGAQVVIDQFIASGERKWSRASGLVMLLPHGYEGQGPEHSSARLERFLQLCSNDNMQVMNCTTPAN

SEQ ID NO: 96243 - protein, 710 aa, Unknown
  Bacterial polypetide isolated from the Sargasso Sea
LEQIIKVGGQYAVKELKIGMPHRGRLNVLANLLQKSYKRIFNEFAGEYGDISKDSTGDVKYHLGASSDREFDGNSVHISLTDNPSHLEAVNPVVLGQTRAKQFFHKDLKRKKVIPILLHGDAAFAGQGIVAECFAMSGLPGHNTGGTIHIIVNNQIGFTTSPRFARSSPYPSDVAKMVEAPILHVNADDPEAVVYCARIATEFRIQFNRDVVIDLICYRRFGHNEGDEPSFTQPLMYKKIKSHKTSLSIYGEKLVAEQTISPEEFEKQKSNFKNLLDQQFQTAKDYKPKIEWFEGTWSRYRPQKGKDIRGVSGFDTKDLIKISEKIHKIDEKFNIHKTITKIFNNRHNSVAEGKNIDWSTAEALAFGSLLAKGNPVRLVGQDTGRGTFSQRHSILRSQIDNSRYIPLNNISKSQKQFEIVDSLLSEFAVLGFEYGYSLVEPETLVLWEAQFGDFANGAQVIIDQFIASGERKWARASGLVLLLPHGYEGQGPEHSSARLERFLQLCAKDNLQVMNITTPANYFHALRRQITRDFRKPLVIMTPKSLLRNKHCVSNLVDFSKKNTFHRILWDHALDEKYGFIKLKKPKNIEKVIICSGKVYFDILEERERLKRNDVLLLRIEQLYPFPAKSLAKELKPYAKNAKFYWCQEEPKNMGAWFFVRDYIDWTLEYIKAKKDKISYIGREFASTPATGFAKRHLTQQKEILEKVFK

SEQ ID NO: 96244 - protein, 308 aa, Unknown
  Bacterial polypetide isolated from the Sargasso Sea
TFLLIIFSDNQKHFEVVDSFLSELAVLGFEYGYSLVEPNTLTLWEAQFGDFANGAQVVIDQFIASGERKWNRASGIVMLLPHGYEGQGPEHSSARLERFLQLCSNDNMQVMNCTTPANYFHALRRQMHRSFRKPLIIMTPKSLLRNKYCVSNLEDFNKKNTFHRVLWDHAIDPKSKGFIKLKESYKIKKVILCSGKVYFDLLDAREKLKRDDVVMYRIEQLYPFPAKALVKELKPYAKNAEFFWCQEEPKNMGAWFSVRDYIQWTLDTIKANNSKISYIGRSPDATPATGYAKRHNSQQQEIINNVFD

SEQ ID NO: 96245 - protein, 967 aa, Unknown
  Bacterial polypetide isolated from the Sargasso Sea
MSVNKDNNIFEKTSFLGNNSSEFVETLYAEYLNNPSNLPIEWKKFFEGLNEKREKIIKNANGPSWSPKKKIKPLSKDTQSDFYKKNNDQYISVNSKNILDAAKDSVRANMLVRAYRIRGHLISNLDPLKLQKPEEHSELKPETYGFSEKDENKKIFLDGVLGIQTATLKEILTITKKTYCQNIGFEFMHMSDPEERQWIRDRIEGKEKEIKFTENGKKAILNKLVEAEGFEKFLHVKFVGTKRFGLDGAESLIPALEQIIKRGGHLGVKEVKIGMPHRGRLNVLANMMQKPFKAIFKEFFGQSITSKKDFEGDVKYHLGASANREFDKNLVHISLTDNPSHLEAVNPVVLGQVRAKQFFHKDKERKKVVPVLIHGDAAFAGQGVVAECFAMSGLPGHNTGGTIHIIVNNQIGFTTAPRFARSSPYPSDLAKMVQAPIFHVNGDDPEAVVHCAKIATEFRQKFNRDVVIDMVCYRRFGHNEGDEPSFTQPLMYKKIRQHPTTLQTYGKKLINEGLISLDDIEKRKKEFKDFLNTEFSEAKNYKVKMKWFDGVWSRFKPEIGQDRRGVTGVDKKDLILIGKKITEIPKNFNVHKTLLKLFENKRKMFESNQPIDWATSETLAFGTLLNEGFSVRLSGQDSGRGTFSQRHSVLRNQDNHDRYIPLNHISKNQKRFEIIDSLLSELGVLGFEFGYSLSEPETLVLWEAQFGDFSNGAQVVIDQFISSGESKWSRASGLVMLLPHGYEGQGPEHSSARLERFLQLCAQDNLQVVNCTTPANYFHALRRQMHRNFRKPLVVMTPKSLLRNKRCISYIEDFTKQNSFHRILKDSAYLDGSKLIELKKDKKIKKVVMCSGKIYYDLIDAREKVKDDKTVLIRIEQLYPFPVKHLGKELKKYKDAKFFWCQEEPMNMGGWNTARYYIDRTLEIIRVKGEKVNYIGRNAAASPATGNLNKHLAEQKEILEKVFDRKK

SEQ ID NO: 96246 - protein, 682 aa, Unknown
  Bacterial polypetide isolated from the Sargasso Sea
LMVLQKSYKRIFNEFAGEINNTEEDSAGDVKYHLGASSDREFDGNVVHVSLTDNPSHLEAVNPVVLGQTRAKQFFHKDAQRNKVIPILIHGDAAFAGQGVVAECFAMSGLPGHNTGGTIHIIVNNQIGFTTSPRFARSSPHPSDVAKMVEAPIIHVNGDDPEAVVYGSRIATEFRLKFNRDVVLDLVCYRRFGHNEGDEPSFTQPLMYKKIKSHPSTAKIYGSKLIDEDLLSEKDLNNQIKKFKSLLDDQFKTAKDYKPKIEWFEGAWSSYKPKKGKDKKGITGADPDLLRNISDKINIIPNEINVHKTISKIFENRKKTIDQGYDIDWSSAEALAFGSLLEEGFPVRFVGQDSGRGTFSQRHSVLRNQVNNSRYIPLNSISKIQKKFEIVDSFLSELAVLGFEYGYSLVEPNTLTIWEAQFGDFANGAQVIIDQFISSGERKWQRASGLVMLLPHGYEGQGPEHSSARLERFLQLCANDNLQVMNCTTPANYFHALRRQIHRDFRKPLVLMTPKSLLRNKYCVSNIEDFNKQTSFHRILWDHALNKDSKNFIKLKNSEEIKKVILCSGKVYFDLLVARERIKRDDVIFFRIEQLYPFPAKSLVKELKPYAKNAKFYWCQEEPKNMGAWFSVRDYIQWTLETIKAKNNKISYIGRNPDASPATGYAKRHSVEQQEIIKKVFE

SEQ ID NO: 96247 - protein, 944 aa, Unknown
  Bacterial polypetide isolated from the Sargasso Sea
MAEHYSDSHLSGGHLSYLDKLYDTFLSNPDVISKDWKDLFVSLSETDDFKDDIIYSEVVDSFKNKVRKHQNNKKEYKKVSNGYFQKTLPLTIHGKVNYYIDAYRSFGHTAANLDPLQLAQKDIHIDLIYAEKLLEGVSPEERVGNDYPKGSKNKIFLKELKESIRKKYSGNLGLEFSHISDERERNWIIDRFENNDYKKINSDEKIFILKRLISARGLAKYLSAKYPGMKRFGIDGCESLIPLIDTLIEQTSKNNAEQICFGMAHRGRLNLLINVLGKKPKDLFAEFEENYDLKGSNTGDVKYHLGFSSNIHTSNGDVHVSLMNNPSHLEIVDPVVIGSVRARQDRLNDKERNKVVPILIHGDASFSGQGVVMETLQMSQTRGYGVGGTIHVIINNQIGFTTHNPKDSRSTRYSTDIAKFIESPIFHVNADDPEAVIYISKLASDYREEFRKDVVIDLIGYRRSGHNEADDPSSTQPVMYKKIKQHPSVLKSYKDKLIQNNDVTLEEFDEFKKSYRSSIEKDKSVAHNLSKIKNDDLWFEWDQYIDAQWNKKTDTTVKQDQLIDDARTIADIPSGFVLQKKVKNIIKQRIDMAEGKCEFNWGFAEMAAYSSLLREGYPIRFSGQDIRRGTFDHRHAVMFDQEDGRTYYPLNKFAEKGNTNIGIYDSILSEEAVLGFEYGYSATWPTGLVIWEAQFGDFSNGAQVVIDQFITSAQHKWERLSGLVLLLPHGYEGMGPEHSSARIERFLQLCAEQNIQICMPSTAAQMFHLLRRQAIRNNRTPLIVITPKSLLRNKYASSNIDEAILGKFENIFDDESNLTKKLRKVILCSGKIYHDLKKQRDENNQSDIAIIRLEQLYPFPYEETEKTLSKYKNASEFIWCQEEPRNQGAWYGQRHRLNRVLKNIGLKKEFRLMSRPPSSAPAVGQMKIHIEQQKKLIDLTLGKD

SEQ ID NO: 96248 - protein, 931 aa, Unknown
  Bacterial polypetide isolated from the Sargasso Sea
MKELWGSSHISAGHAAYLESLYEIFINNPEDLSKEWFDFFTNLPSHPKSNGEISHLEIIKDFKNISRNNITSEVSVDERQGKVIRLIQSYRNRGHLKAKLDPLGMMERRFVEDLDIEFHGLSNEDLDQVFYTDTLDTGSEKSTLREIINRLEEIYCGNIGIECNHIMESQERRWFQRKFESKLQEYSFDDEEKLNIFERLNSAEGLAKYLSAKYPGMKRFGIDGAESLVPLVESIIQNCGSMGANQICFGMAHRGRLNLLVNVLGKLPSDLFAAFDEDSTLEGASTGDVKYHLGFSSNFDTKGGEVHVSLFNNPSHLEIVDPVVIGSVRARQDRIKDKDRSKVIPVLLHGDASFSGQGVVMESLQMSQTRGFYVGGTIHVIVNNQIGFTTSNVNDSRSTDYSSDVAKMIQAPVIHVNGDDPEMVVNATKIACKYRNKFKKDIVIDLFCYRRRGHNEADDPSATQPLMYKKISEHPSVLKQYEENLISKGILSKEKAKDIKVSYRKSLEGGKSVAKNLAKKPNDSLWFDWQPFMDIKWWPKVDTTFDKKEFIKLGKDICKVPKSFNLGNQARKIFEDRLSMTDEKTPINWGYAESMAYATLLKEGYPIRISGQDVRRGTFSHRHACVFDSRSGMGFIPLSEIAEQSDTRFDIYDSLLSEEAVLGFEYGYSATWPSGLAIWEAQFGDFANGAQVVIDQFIVSAQHKWERLSGLVMLLPHGYEGQGPEHSSARIERFLQLCASENIQVCVPSTPKQIFHLLRRQAIRKMRTPLVVISPKSLLRNPDAISNLNELVDGNFSCVIDDNLKNKKNVKRLIMCSGKVFYDLMKKRNNKKIRNTAIIRIEQLYPFPYDDLEEILTKYENVKEYIWCQEEPLNQGAWFSHRHRIQRVLDRFSKGYEVSLISRPAAAAPAVGLMKLHLQQQQDLINKAIFE

SEQ ID NO: 96249 - protein, 775 aa, Unknown
  Bacterial polypetide isolated from the Sargasso Sea
MKELWGSSHVSAGHAAYLESLYETFINNPENLSKEWLDFFTNLPKNSNSNGEISHQEIIKEFRNFSRSKVEVSDNSKKTIDERQGKVIRLIQSYRNRGHLKANLDPLGMMERRIIEDLSIEFHGLSHDDLDEEFYTDTFTNSNKLTLRDILLRLEEVYCGNIGIECNHILDSEERRWFQKKFESKLTEYSFNPDEKLNIYERLNSAEGLAKYLSAKYPGMKRFGIDGAEALVPLVESVIQNCGSMGATQLCFGMAHRGRLNLLVNVLGKLPSELFSAFDEDTELEGASTGDVKYHLGFSSNFETPGGEVHVSLFNNPSHLEIVDPVVIGSVRARQDRIGDKDRSQVVPILLHGDASFSGQGVVMESLQMSQTRGFNVGGTIHIIVNNQIGFTTSNINDSRSTDYSSDVAKIIQAPVIHVNGDDPEMVVNAAKIACKYRNKFKKDIVIDLFCYRRRGHNEADDPSATQPLMYNKISKHPSVLSQYETNLIDHGILTSDEAKKIKSEYRKSLEGGESVAKNLAKNPNDQLWFDWEPYMDVKWWPKVDTKFDKDKFMKLGKAICKVPKSFNLGSQAKKIFDDRLKMNNGEIPINWGYAETMAYATLLDEGYPIRLTGQDVRRGTFSHRHACVFDSKNGTGYIPLSDIAEKNKSKFDIYDSLLSEEAVLAFEYGYSATWPSGLAIWEAQFGDFANGAQVVIDQFIVSAQHKWERLSGLVMLLPHGYEGQGPEHSSARIERFLQLCASENIQVCVPSSPKQIFHLLRRQAIRKMRTPLVV

SEQ ID NO: 96250 - protein, 715 aa, Unknown
  Bacterial polypetide isolated from the Sargasso Sea
MIPALEQIIKIGGQSNIKEVKIGMSHRGRLNVLANVLQKSYKRIFNEFAGELNNTDEDSAGDVKYHLGASSDREFDGNSVHVSLTDNPSHLEAVNPVVLGQTRAKQFFHKDTERNKVIPILIHGDAAFAGQGVVAECFAMSGLPGHNTGGTIHIIVNNQIGFTTSPRFARSSPHPSDIAKMVDAPIIHVNGDDPEAVVYGSRIATEFRLKFNRDVVIDLVCYRRFGHNEGDEPSFTQPLMYKKIRSHQSTANIYGSKLINENLISKEGLNDQIKKFKDLLDDQFKTAKDYNPKIEWFEGAWSSYKPKKGKDKRGVTGADEKILKNISNKINVVPSEINIHKTISKILQTRKKSVDDGLNIDWSTAESLAFGSLLDEGFPVRFVGQDSGRGTFSQRHSVLRDQMDNSRYIPLNNISKNQKKFEIVDSFLSELAVLGFEYGYSLVEPNTLTIWEAQFGDFANGAQVIIDQFISSGERKWQRASGLVMLLPHGYEGQGPEHSSARLERFLQLCANDNLQVMNCTTPANYFHALRRQIHRDFRKPLVIMTPKSLLRNKFCVSTINDFGKQTSFHRIMWDHALSDQSKNFIKLKKSSEIKKVIICSGKVYFDLLNAREKLKRDDVVMFRIEQLYPFPVKSLVKELKPYAKNANFYWCQEEPKNMGAWFSVRDYIQWTLDTIKAKNNEVSYIGRSPDASPATGYAKRHQFEQQEIINEVFN

SEQ ID NO: 96251 - protein, 936 aa, Unknown
  Bacterial polypetide isolated from the Sargasso Sea
MHNGVMKAWLESSHLAGANASYIEDLYESFLEDPESVAEEWRSLFSSLPQVNGHAIEQPHSRVRDYFRRLAKDPSRYSAPVSDPQVDAKQVRVLQLINAFRFRGHQNANLDPLGLWARETVAELDPAFHNLQGADMEATFNVGSYAIGRETMVLSDLYASLKKTYCGSIGADYMHLTSTEEKRWLQQRLESIEGTGSYTLEEKTRFLESLTAAEGLEKYLGAKFPGAKRFSLEGGDAMVPMLKELIRRAGEQGCKEAVIGMAHRGRLNVLINVLGKRAQDLFDEFAGKHGESWGTGDVKYHMGFSSDFATPGGNVHLALAFNPSHLEIVNPVVIGSVRARMDRRGDKDGSTVLPITIHGDSAMAGQGVVAETFNMSQTRAYGVGGTVRIVINNQVGFTTSYIRDLRSTEYCTDIAKAVQAPVLHVNGDDPEAVVLVTQIALDYRNTFKRDVVIELVCYRRHGHNEADEPSATQPLMYQKIKQHPTPRKIYADQLVAEGSISQELATTLVNEYRETLDRGERVSKEWRPMELHSVDWTPYLGHDWAMAYDSTVPMDHLKSLGERISQYPATHVLQRQVEKIYEDRRLMAAGEKLLDWGFAETLAYATLVDKGSRIRFTGEDSGRGTFFHRHAVLHSQTDASTYTPLCNLHDEQGPFEVYDSVLTENAVLAFEYGYASAEPAGLTIWEAQFGDFANCAQVVVDQFLSSGEQKWGRMCGLTMLLPHGYEGQGPEHSSARLERYLQMCAQHNMQVCVPSTPAQVFHMLRRQVVRPMRRPLIVMTPKSLLRHPLAVSKLEELAEGTFQNAIGEIDALDPKGVKRVVFCSGKVYYDLLDARRKAEQQDVALVRIEQLYPFPEEEVRAILADYAHVTDFVWCQEEPQNQGAWYCTRHHYDSVLPSHARLRYAGRPASASPAVGYMSVHAKQQKALVEDALTLE

SEQ ID NO: 96252 - protein, 972 aa, Unknown
  Bacterial polypetide isolated from the Sargasso Sea
MSSSKNLEFEKTSFLNKSNSAFIEQMYLKFINKDPDLPESWANYFEGIGEEIKVIASEINGPSWGPSKLKIDIDEFQKKIEIDENNKVTNEKIDTSEKFNFQLLADSNKDSISAVALIRAYRLRGHLLANLDPLEMRKSEYLDELHPEFYGFKKQNYDKKIFLNGVINKKYANIKEILKFLKKTYCGNIGYEFMHVSNPVERKWFRDRVEQDQNALNFTKNGKEAILNKLVQAEGFEKFLATKYVGTKRFGLDGGESLIPALEQIIKIGGQNQIKEVKIGMSHRGRLNVLANVLQKDYKRIFNEFAGEIVSDSEESAGDVKYHLGASSDRVFDGNTVHVGLTDNPSHLEAVNPVVLGQTRAKQFFHKDKERNKVIPILIHGDAAFAGQGVVAECFAMSGLPGHNTGGTIHIIVNNQIGFTTSPRFARSSPYPSDVAKMVEAPILHVNGDDPEAVVYATRIATEFRLKFNRDVVVDLICYRRFGHNEGDEPSFTQPLMYKKIRSHPSVYKIYGSKLVNENSITQNLLDQNVKAFKDLLDEQYKSAKDYKPKIEWFEGSWSRYKPRKGKDKRGVTGFDEIKLKEISDKINTIPAEINIHKTISKILNVRKNSVDKGLDIDWSAAEALAFGSLLEEGFPVRLVGQDSGRGTFSQRHSVLRDQNDNSRYIPLNNISSKQKNFEVVDSFLSELAVLGFEYGYSLVEPNTLTLWEAQFGDFANGAQVVIDQFIASGERKWNRASGLVMLLPHGYEGQGPEHSSARLERFLQLCSNDNMQVLNCTTPANYFHALRRQMHRDFRKPLIIMTPKSLLRNKFCVSNLKDFNKENTFHRVLWDHAIDPKSSGFIKLKESSKIKKVILCSGKVYFDLLDAREKLKKDDVVIFRIEQLYPFPAKALVNELKPYAKNANFFWCQEEPKNMGAWFSVRDYIQWTLDSLKANNNKISYIGRSPDASPATGYAKRHNSQQQEIINKVFE

SEQ ID NO: 96253 - protein, 764 aa, Unknown
  Bacterial polypetide isolated from the Sargasso Sea
SPSVPSASVSDDRQVKVLQLINAFRFRGHQHANLDPLGLWKQERVRDLELSHHSLSEQDFDTVFNVGSYAIGKDSMPLGELFKSLNRTYCGSIGAEYMHITDTEQKRWLQQKIESVQAKPEISRDEKLGILKGLTAADGMEKYLGSKFPGAKRFSLEGGDALIPMLKGLITKAGTAGTKEVVIGMAHRGRLNVLVNVLGKNPSVLFDEFSGKHDDSLGAGDVKYHAGFSSDFATPGGNVHLALAFNPSHLEIVNPVVMGSVRARLARRNDDTNTVLPITIHGDSAIAGQGVVQETFNMSQTRGFAVGGTVRIVVNNQVGFTTSKTEDTRSTQYCTDIAKMVQAPIFHVNSDDPEAVAFVTQLALEYRNKFKKDVVIDLVCYRRHGHNEADEPNATQPLMYQKIKKHPVPRVLYADQLIAEGVIEQRDADRYLEEYREALDHGACVVEEWRPMTEHSVDWSPYLGHDWDTPYDGSLSVEKLKELGESITTIPEEHKLQSRVNKLYQDRKAMVAGEKMLDWGMAENLAYATIVDAGEDIRITGQDSGRGTFFHRHAVLHNQKDASTYMPLQHIREGQGEIEIYDSVLSEEAVMAFEYGYATAEPTCLTIWEAQFGDFANGAQVVFDQFLSSGEAKWGRLCGLTVLLPHGYEGQGPEHSSARLERFLQMCADHNWQVCVPSTPAQVYNMLRRQVVRPMRKPLIVMSPKSLLRHPMAVSSLEELAEGKFHNVIGEIDDIDPKNVKRVVMCSGKVYYDLLDQRRKNEQT

SEQ ID NO: 96254 - protein, 714 aa, Unknown
  Bacterial polypetide isolated from the Sargasso Sea
MHISNPTERKWFRDRVEKDENALKFTENGKSAILNKLIQAEGFEKFLHTKYVGSKRFGLDGGESLIPGLEQIIKIGGQSKIKEVKIGMSHRGRLNVLANVLQKSYKRIFNEFAGELNNTDEDSAGDVKYHLGASSDREFDGNSVHVSLTDNPSHLEAVNPVVLGQTRAKQFFHKDTERNKVIPILIHGDAAFAGQGVVAECFAMSGLPGHNTGGTIHIIVNNQIGFTTSPRFARSSPHPSDIAKMVDAPIIHVNGDDPEAVVYGSRIATEFRLKFNRDVVIDLVCYRRFGHNEGDEPSFTQPLMYKKIRSHQSTANIYGYKLVNENLISKEGLNDKIKKFKDLLDNQFKTAKDYNPKIEWFEGAWSSYKPKKGKDKRGITGADEKILKNISDKINVVPPEISIHKTISKILQTRKKSVDDGLNIDWSTAESLAFGSLLDEGFPVRFVGQDSGRGTFSQRHSVLRDQTNNSRYIPLNNISKHQKKFEIVDSFLSELAVLGFEYGYSLVEPNTLTIWEAQFGDFANGAQVIIDQFISSGERKWQRASGLVMLLPHGYEGQGPEHSSARLERFLQLCANDNLQVMNCTTPANYFHALRRQIHRDFRKPLIIMTPKSLLRNKFCVSTIDDFGKQTSFHRIMWDHALSDQSKNFIKLKKSSEIKKVIICSGKVYFDLLNAREKLKRDDVVMFRIEQLYPFPAKSLLKELKPYAKNANFY

SEQ ID NO: 96255 - protein, 350 aa, Unknown
  Bacterial polypetide isolated from the Sargasso Sea
RVVSFGSLLEEGYPVRLVGQDSGRGTFSQRHSVLRNQLDNSRYIPLNNISKTQKKFEIVDSFLSELAVLGFEYGYSLVEPNTLTLWEAQFGDFANGAQVVIDQFIASGERKWSRASGLVMLLPHGYEGQGPEHSSARLERFLQLCSNDNMQIMNCTTPANYFHALRRQMHRDFRKPLIIMTPKSLLRHKQCVSSLDDFSKKNTFHRILWDHAIDPKVKGLIKLKDPKKIEKVILCSGKVYFDLLEAREKLKKNDVILYRIEQLYPFPAKTLAKELKPYAKKAKFYWCQEEPKNMGAWFSVRDYIQWTLDNIKANNNKVSYIGRSPDASPATGYAKRHVSQQQEIIKEVFE

SEQ ID NO: 96256 - protein, 956 aa, Unknown
  Bacterial polypetide isolated from the Sargasso Sea
MSSSKNLEQKNTSFLTKSNSAFIENMYIRYIEKDPNLPLSWKDYFDTLNDDIKSVVKELEGPTWQPHKKRIKYESTKSTTKVTNNEDLETAKSESIKAIALIRAYRIRGHLIANLDPLNLMERKYLYELHPEDHGFKKEDYDKKIFLGSYLDTGYSSVNEILSKLRKIYCSTIGAEYMHITDPIEKVWFRDRMEKRENQLNFTENGKKAILNKIVQAEGFEKFLARKYVGTKRFGLDGGEALIPALEQIIKRGGQLGVKEVKIGMPHRGRLNVLANVLQKSYKRIFNEFAGEENYAKAEDSAGDVKYHLGASSDREFDGNSVHVSLTDNPSHLEAVNPVVLGQTRAKQFFHEDTTREKVIPILIHGDAAFAGQGVVAECFAMSGLKGHNTGGTIHIILNNQIGFTTSPRFARSSPYPSDLGKIVEAPILHCNGDDPEAVVHCAKIAIEFRQKFKKDVVIDLICYRRFGHNEGDEPSFTQPLMYKKIRSHPTTLSIYGKKLVDESTISKEYFEKNINDFKNLLDEQFKTAKDYKPKLNWFEGTWSRYQPKKGKDRRGQTGVDINKLIKISEKINHIQENQNIHKTIKKILLNRHKSVLEKKNIDWASAEALAFGSLLDEGFPVRLVGQDSGRGTFSQRHSVLRNQEDNSRYIPLNNISDKQKKFEIVDSFLSELAVLGFEYGYSLVEPETLTLWEAQFGDFANGAQVVIDQFIASGERKWSRASGLVLLLPHGYEGQGPEHSSARLERFLQLCGQENLQVLNCTTPANYFHALRRQIHRDFRKPLVIMTPKSLLRHKNCVSNLDDFSKKNSFHRILKDHAFDEKSGFIKLKKDKKIEKVVMCSGKIYFDLLEAREKAKNDKIIIFRIEQLYPFPAKSLAKALKPYAKNARFIWCQEEPKNMGAWFSVRDYIQWTLDNIKANNSTISYIGRDVAASPATGYAKRHLKQQKEIIEKVLN

SEQ ID NO: 96257 - protein, 924 aa, Unknown
  Bacterial polypetide isolated from the Sargasso Sea
MSSSKNLEFKKTAFLNKSNSAFIEEMYLKFVNNDPELPDSWIKYFKEVGDEDDIIVNEINGPSWSPSKKVSINKKQNFQNQITEENNGDIIKSNTNSIKAVAMIRSYRQRGHLIAKLDPLGLLKTDYLEELHPESYGFKKEDYQKKIFLDNVTNKQYSNINDILKFLKDKYCGSLGYEYMHISNPTERKWFRDRVEKADDFNFTQNGKEAILNKLIQAEGFEKFLHTKYVGTKRFGLDGGESLIPALEQIIKIGGQSNVKEVKIGMSHRGRLNVLANVLQKSYKRIFNEFAGEISSKSKDDTGDVKYHLGASSNREFDGNSVHVSLTDNPSHLEAVNPVVLGQTRAKQFFHKDKERKKVIPILIHGDAAFAGQGVVAECFAMSGLPGHNTGGTIHIIVNNQIGFTTSPRFARSSPYPSDIAKMVEAPIIHVNGDDPEAVVYAARIATDFRLKFNRDVVIDLICYRRFGHNEGDEPSFTQPLMYKKIRSHPSTIKVYGEKLVSEGSITNDYLNNSIKKFKDLLEDQFKNAKNYKPKIEWFEGTWSRYRPERGKDKRGVTGFDTKKLKNISDKINTIPTEINIHKTITKILDNRKISVSNSKGIDWSTAESLAFGSLLEEGYPVRLVGQDSGRGTFSQRHSVLRNQIDNSRYIPLNNISNKQKNFEIVDSFLSELAVLGFEYGYSLVEPNTLTIWEAQFGDFANGAQVVIDQFIASGERKWSRASGLVMLLPHGYEGQGPEHSSARLERFLQLCSNDNMQVMNCTTPANYFHALRRQMHRDFRKPLIIMTPKSLLRHKHCVSNLDDFSKKNSFHRVLWDHAIDPKVKGFIKLKKPKKIEKVILCSGKVYFDLLEAREKIKKNNVVLYRIEQLYPFPAKALANELKPYAKNAKFYWCQEEPKNMGAWFSVRDYIQWTLDNIKAKNNI

SEQ ID NO: 96258 - protein, 989 aa, Unknown
  Bacterial polypetide isolated from the Sargasso Sea
MNDQSPNSEFKASSFMQGHNAEYLEQLYAQYAHNPEALDETWQEFFKAMGDDEVSIKKDAAGPSWGRRDWPPTVNDDLIAALDGQWVQSEDTQQIVEKISQVAEEKNIEISNDAIQRAVLDSVRALMLIRAYRIRGHLAADLDPLGMRNTSEAKDSLDPKNYGFLETDLDRPIFIDNVLGLQIATMRQIVEIVKRTYCGTFALQYMHISDPEQSAWLKERIEGFGKEIKFTREGRKAILNKLVEAEGFEKFLHVKYMGTKRFGLDGGESLIPAMEQIIKRGGALGVKEIVIGMPHRGRLSVLANVMNKPYRAIFNEFQGGSFKPDAVDGSGDVKYHLGASSDREFDGNNVHLSLTANPSHLEAVNPVVIGKARAKQEQLKDNKRTSVMPVLLHGDAAFAGQGVVAECFGLSGLIGHKAGGTMHIVVNNQIGFTTAPHFSRSSPYPTDIALMVEAPIFHVNGDDPEAVVHAAKVATEYRQKFQKDVVLDIICYRRFGHNEGDEPMFTNPLMYKHIKKQKTSLSIYTERLVNDGLIPEGEIEDMKASFQAKMNEEFEAGRDYKPNKADWLDGRWSHLDRHKDDYQRGKTAISEETFFDIGKALSHPPKDYELHKTVARLLGTKGKMFDSGEGFDWATAEALAFGSLLTEGFPVRLSGQDSTRGTFSQRHSGLINQSTEERYYPLNNIRQGQAKYEVIDSMLSEYAVLGFEYGYSLAEPNALVLWEAQFGDFANGAQIMFDQFISSGESKWLRMSGLTMLLPHGFEGQGPEHSSARLERFLQMCGQDNWIVANCSTPANYFHILRRQVHRDFRKPLVLMTPKSLLRHKLCTSKVDDFTNGSSFHRVLWDDAEKGNSTTKLVKDKEIKRVVMCSGKVYFDLLEERDARGLNDIYLLRFEQFYPFPAKSAVKELERFQNAEMIWCQEEPKNQGAWSFMEPNIEWVLSRTNAKFNRPIFVGRPASASPATGLASQHKEQQKLLIDEALNLKETKK

SEQ ID NO: 96259 - protein, 383 aa, Unknown
  Bacterial polypetide isolated from the Sargasso Sea
MVINLIKKLIRIIEQRRKNIQEGHNLDWSTAEHLAFGSLLEEGHPVRLSGQDSCRGTFSQRHAVFVDQENENRYVPLNNLSNKQQQFEVIDSPLSEASVLAFEYGYTVTDPSALVMWEAQFGDFANGAQVIVDQFISSGEAKWLRMSGLVMLLPHGYEGQGPEHSSARLERYIQLCAEENMQVLNCTTPANYFHALRRQLKRDFRKPLIIMTPKSLLRHKLCVSKLEDMGPNTTFHRVMMDPNKNLKNNKIKRVVICTGKVFYNLLEEREKRKLDNIKLLRIEQIYPFPTSTLKNELEKTPDAEVVWCQEEPKNMGAWFFVDRKIEETLTLFKSKFKRPKYIGRDEAASPATGSYARHNEEQENIVKKSLEIENKKSKKQAAE

SEQ ID NO: 96260 - protein, 561 aa, Unknown
  Bacterial polypetide isolated from the Sargasso Sea
VNNQIGFTTSPKFARSSPYPSDLAKMVDAPILHVNADDPEAVTHCTKIATDYRQKFNKDVVVDMICYRRFGHNEGDEPSFTQPTMYRKIKKHPTTLNIYANKLIKEGVVAQEEFNSMKTKFKNLLEEQFKTAKEYKPKLEWYEGVWSRFKPEKGKDKRGVTGVSLDKLKKIGEKITLIPKDLNVHPTLKKIFENKKKMFETGKGFDWATAEHLAFGTLLDEGYPVRLSGQDSARGTFSQRHSVLKDQLNGSKYIPLNNISTNQKNFEVIDSLLSEMAVLGFEYGYALSEPSTLVIWEAQFGDFANGAQVIIDQFIASAERKWARANGLVMLLPHGYEGQGPEHSSARLERFLQLCAQENIQVVNCTTPANYFHALRRQIHRDFRKPLIIMTPKSLLRNKMCTSNIEDFTKKNTFHRVLNDHADFQKSNLIKLADDKKIQKVVLCSGKIYFDLLQAREKNKNRNVFIIRIEQLYPFPVKTLAKELKRFRKKSEFFWCQEEPQNMGAWNTVRNYIEWSLRSVKAENKEVNYIGRQPAASPASGYLKKHLAEQNEILEKVVGKF

SEQ ID NO: 96261 - protein, 759 aa, Unknown
  Bacterial polypetide isolated from the Sargasso Sea
GYEYMHISNPTERKWFRDRVEKDENALQFTKNGKEAILNKIIQADGFEKFLHKKYVGTKRFGLDGAESLIPALEQIIKIGGQSRVKEVKIGMSHRGRLNVLANVLQKSYKRIFNEFAGEIDASSKDDSAGDVKYHLGASSDRIFDNNSVHVSLTDNPSHLEAVNPVVLGQTRAKQFFHNDKERKKVIPILIHGDASFAGQGIVAECFAMSGLPGHNTGGTIHFIINNQIGFTTSPRFARSSPHPSDVAKMVDSPIIHANGDDPESVVYAARIAAEFRLKFNRDVVVDLVCYRRFGHNEGDEPSFTQPLMYKKIRSHLSTVKIYGDKLINEKIISSEDLNNHIKKFKDLLDDQYKNAKNYKPKIEWFEGTWSRYKPRRGQDKRGDTGYSTKKLLEISDKIHSLSTELNIHKTIVKIFEARKNSMNKGNEIDWSTAEALAFGSLLEEGYPVRLVGQDSGRGTFSQRHSVLRNQIDNSRYIPLNNISAKQKKFEIVDSFLSELAVLGFEYGYSLVEPNTLTIWEAQFGDFANGAQVIIDQFISSGERKWLRASGLVLLLPHGFEGQGPEHSSARLERFLQLCSNDNMQVMNCTTPANYFHALRRQMHRDFRKPLIIMTPKSLLRNKYCVSQIDDFSKKNSFHRVLWDHSMDPKTKGFIKLKKNNEIKKVILCSGKIYFDLLSAREKLKKNDVILFRIEQLYPFPAKSLVKEIKPFAQNAKFYWCQEEPKNMGAWLLVRDYIQWTLDYIKAKNRQISYIGRNP

SEQ ID NO: 96262 - protein, 600 aa, Unknown
  Bacterial polypetide isolated from the Sargasso Sea
KKVIPILIHGDAAFAGQGIVAECFAMSGLKGHNTGGTIHIIVNNQIGFTTSPRFARSSPYPSDLGKIVDAPILHCNGDDPEAVVHCAKIAIEFRQKFSKDVVIDMICYRRFGHNEGDEPSFTQPLMYKKIRSHPSTLKIYGEKLIKEKTISKSDFENQIISFRSLLDEQFKTAKDIKPKLDWFEGTWSRYQPKKGKDRRGATGVDIDKIIKISEKINKVSEKINIHKTIQKILTNRHKCILDKKNIDWASAESLAFATLLDEGYPVRLVGQDSGRGTFSQRHSVLRNQEDNTRFIPLNNISKKQKNFEVVDSLLSELAVLGFEYGYSLVEPETLTMWEAQFGDFANGAQVIIDQFISSGERKWSRASGLVLLLPHGYEGQGPEHSSARLERFLQLCGQENLQVMNCTTPANYFHALRRQIHRDFRKPLVIMTPKSLLRHKICVSNLDDFSKKNSFHRILEDHAFGKKNGFLELEKSKNINKVILCSGKIYFDLLEAREKYKRRDVVLLRIEQLYPFPAKSLVKSIKPYAKNAEFIWCQEEPKNMGAWSHVRDYIQWTLDFIKANNKNVSYIGRAPAASPATGYAKRHVAQQKEILEKVFN

SEQ ID NO: 96263 - protein, 413 aa, Unknown
  Bacterial polypetide isolated from the Sargasso Sea
RYKPEKGKDKRGATGIDLNILSNISNKINTVPSEVNIHKTINKILDNRKKTIEQGYGIDWATAESLAFGSLLEEGYPVRLVGQDTGRGTFSQRHSVLRNQLDNSRYVPLNNISQKQKNFEVVDSFLSELAVLGFEYGYSLVAPNTLTIWEAQFGDFANGAQVIIDQFISSGERKWKRASGLVMLLPHGYEGQGPEHSSARLERFLQLCANDNLQVMNCTTPANYFHALRRQLLRDFRKPLIMMTPKSLLRNKYCKSNLRDFSKNNSFHRVMWDHSMDPKNKGFIKLKQNSEIKKVILCSGKVYFDLLEAREKIKKDDVILLRIEQLYPFPAKSLVKELKPFAKNANFFWCQEEPKNMGAWLLVRDYIQWTLETIKAKNNEISYIGRNPDASPATGYAKRHVSEQQEIISKVFE

SEQ ID NO: 96264 - protein, 779 aa, Unknown
  Bacterial polypetide isolated from the Sargasso Sea
MHISNPTERKWFRDRVEKDENALKFTENGKSAILNKLIQAEGFEKFLHTKYVGSKRFGLDGGESLIPGLEQIIKIGGQSKIKEVKIGMSHRGRLNVLANVLQKSYKRIFNEFAGEINNTEEDSAGDVKYHLGASSDREFDGNSVHVSLTDNPSHLEAVNPVVLGQTRAKQFFHKDAERNKVIPILIHGDAAFAGQGIVAECFAMSGLPGHNTGGTIHIIVNNQIGFTTSPRFARSSPHPSDIAKMVDAPIIHVNGDDPEAVVYGSRIATEFRLKFNRDVVIDLVCYRRFGHNEGDEPSFTQPLMYKKIRSHQSTANIYGSKLINERLISKEGLDDQIKKFKDLLDDQFKTAKDYNPKIEWFEGAWSSYKPKKGKDKRGITGADKKILKNISDKINVVPTEINIHKTINKILQNRKKSVDDGINIDWSTAESLAFGSLLGEGFPVRFVGQDSGRGTFSQRHSVLRDQMDNSRYIPLNNISKNQKKFEIVDSFLSELAVLGFEYGYSLVEPNTLTLWEAQFGDFANGAQVIIDQFIASGERKWQRASGLVMLLPHGYEGQGPEHSSARLERFLQLCANDNLQVMNCTTPANYFHALRRQIHRDFRKPLIIMTPKSLLRNKFCVSTIDDFSKQTSFHRIMWDHALSDQSKNFIKLKKSSEIKKVIICSGKVYFDLLNAREKLKRDNVVMLRIEQLYPFPAKSLVKELKPYAKKANFYWCQEEPKNMGAWFSVRDYIQWTLNTIKAKNNEISYIGRSPDASPATGYAKRHQLEQQEIINEVFN

SEQ ID NO: 96265 - protein, 794 aa, Unknown
  Bacterial polypetide isolated from the Sargasso Sea
MKFLKKTYCGPIGYEYMHISNPTERMWFRDRVEKDENALKFTKNGKQAILNKLIQAEGFEKFLNTKYVGTKRFGLDGGESLIPALEQIIKIGGQSKIKEVKIGMSHRGRLNVLANVLQKSYKRIFNEFAGEMDGSEDGAGDVKYHLGASSDREFDGNPVHVSLTDNPSHLEAVNPVVLGQTRAKQFFHKDKQRNKVIPILIHGDAAFAGQGIVAECFAMSGLPGHNTGGTIHIIVNNQIGFTTSPRFARSSPYPSDVGKMVDAPIIHVNGDDPEAVVYATRIATEFRLKFNRDVVIDLICYRRFGHNEGDEPSFTQPLMYKKIRSHPSTIKIYGEKLVNEGLFTKQDLDQQIIDFKNLLDDQFKNAKDYKPKIRWFEGTWSRYKPERGKDKRGVTGSDLKILNNISDRIHVFPTDKNIHKTITKIMENRKKTINEGSGIDWATAESLAFGSLLVEGYPVRLVGQDSGRGTFSQRHSVLRNQIDNSRYIPLNNISSNQKNFEIVDSFLSELAVLGFEYGYSLVEPNTLTIWEAQFGDFANGAQVIIDQFISSGERKWKRASGLVMLLPHGYEGQGPEHSSARLERFLQLCANDNLQVMNCTTPANYFHALRRQMHRDFRKPLIIMTPKSLLRNKYCVSNLEDFSKKNSFHRVLWDHARDIKQKGFIKLKEDKKIRKVILCSGKIYFDLLAAREKLKINDVILYRIEQLYPFPAKSLVKELKPFAKNAKFYWCQEEPKNMGAWFAVRDYIQWTLETIKAKNSAISYIGRSPDATPATGYARRHNSEQQEIINKVFE

SEQ ID NO: 96266 - protein, 939 aa, Unknown
  Bacterial polypetide isolated from the Sargasso Sea
MHQGIMKAWLESSHLSGANSTYVEEMYEAYQEDPQSVSDDWRAVFDNLPPVNGASKDAPEAAHSKVRDYFRSLAMEGRHKSAARVTDPELDAKQVKVLQLINAHRFRGHQGANLDPLGLWKREPVADLDPAFHGLTKEDMEREFNTGSFAHGGETMKLADLVKALKATYCGSIGAEYMHITDTDEKRWIQQRLEPSLGKANYDKNVKTRILEGLNAAEGIEKYLGAKFPGAKRFSLEGGDALVPMMREIIYRAGEAGTKEIVVGMAHRGRLNVLVNVLGKRPAELFDEFAGKHADTHGSGDVKYHQGFSSDFETPGGNVHLALAFNPSHLEIVNPVVMGSVRARQDRRGCKDGLQVMPITIHGDSAITGQGIVQETFNMSQTRGFKVGGSIRIVVNNQVGFTTSNHHDVRSTEYCTDIAKMVQAPIFHVNSDDPEAVAFVAQLAVDYRNEFKRDVVIDLVCYRRHGHNEADEPSATQPLMYAKIKKHPTPRKIYADKLIAENTIAADDVTSMINTYRDALDQGDCVVKEWRPMTLHTVDWTPYIGREWDEAYDASLPIERLQKLADKLSYVPESHSLQSRVAKIYSDRVAMAKGEKLLDWGFAETLAYATILEDKQRVRITGQDSGRGTFFHRHAVLHNQNDATTYLPLRNIAENQGPIDITDSVLSEASVLAFEYGYATAEPGGLAIWEAQFGDFANCAQVVIDQFLSSGEQKWGRLCGLTMLLPHGYEGQGPEHSSARLERFLQLCANHNMQVCVPSTPAQVYHMLRRQVVRPMRRPLVVMSPKSLLRHPLAVSSMEELANGSFQNVIGEIDTLEASKVDRVVFCSGKVYFELLEKRRKENINNVAIIRVEQLYPFPHEEMVAALADYQHVKDFVWCQEEPQNQGAWYSSQHHFWAAIPAGAKLTYAGREASAAPACGYPELHAHQQESLVNSALKL

SEQ ID NO: 96267 - protein, 930 aa, Unknown
  Bacterial polypetide isolated from the Sargasso Sea
MKELWGSSHISAGHAAYLETLYETFINNPEDLSEEWVDFFTNLPKHPNSNGEISHQEIVREFKNISRSNTEHKISIDERQGKVIRLIKSYRNRGHLKANLDPLGMMEHKTVEDLSIEFHGLSTSDLDEEFYTDTFTDATKLTLREIVRQLEASYCGNIAIECNHIFDSKERRWFQRKFESRLKDYSFREDEKINIYERLNSAEGLAKYLSAKYPGMKRFGIDGAEALVPLVESVIQNCGSLGANQLCFGMAHRGRLNLLVNVLGKLPSELFSAFNEDLELDGANTGDVKYHLGFSSNFDTPGGEVHVSLFNNPSHLEIVDPVVLGSVRARQDRINDIDRSQVVPVLLHGDASFSGQGVVMESLQMSQTRGFNVGGTIHIIVNNQIGFTTSNINDSRSTDYSSDVAKVIQAPIIHVNGDDPEMVINAAKIACKYRNKFKKDIVIDLFCYRRRGHNEADDPSATQPLMYKKISKHPSVVSQYENTLKDEGLLSEEKIKIIKKEYRKSLEGGKSVAKNLAKKPNDSLWFDWKPFMDVLWWPKVDTTFNKKKLNKLAKDICKTPNSFNLGSQASKIFEERLKMNNGEVELNWGFAENMAYATLLSEGYPIRITGQDVRRGTFSHRHACLFDSETGMGFIPLSEIAEKNNTRFDIYDSLLSEEAVLGFEYGYSATWPSGLAIWEAQFGDFANGAQVVIDQFIVSAQHKWERLSGLVMLLPHGYEGQGPEHSSARIERFLQLCASENIQVCVPSSPKQIFHLLRRQAIRKMRTPLIVISPKSLLRNPMATSSLEELTDGSFSCVIDDDIKDKDKVKKLIMCSGKVFYDLIKKRNDEKRQDIGIVRIEQLYPFPYDDLEEILTKYQNVHEYIWCQEEPQNQGAWFSHRHRIQRVLDRLGKENEVNLVSREPAAAPAVGLMKLHIQQQEDLINEAISK

SEQ ID NO: 96268 - protein, 474 aa, Unknown
  Bacterial polypetide isolated from the Sargasso Sea
IFNEFTGEISSSSSEEDSSGDVKYHLGASSDRIFDNNSVHVSLTDNPSHLEAVNPVVLGQTRAKQFFHGDKERKKVIPILIHGDAAFAGQGIVAECFAMSGLPGHNTGGTIHFIINNQIGFTTSPRFARSSPHPSDVAKMVDSPIIHANGDDPEAVVYASRIAAEFRLKFNRDVVVDLVCYRRFGHNEGDEPSFTQPLMYKKIKSHQSTTQVYGKKLINEDTISSEDLNNYIKKFRDLLEDQYKNAKNYKPKIEWFEGTWSRYKPRKGQDKRGDTGFSEKKLLKISDKIHSISPELNIHKTIAKIFQSRKETVKKGYGIDWSSAEALAFGSLLEEGYPVRLVGQDTGRGTFSQRHSVLRNQIDNSRYIPLNNISINQKKFEIVDSFLSELAVLGFEYGYSLVEPNTLTIWEAQFGDFANGAQVIIDQFISSGERKWLRASGLVLLLPHGYEGQGPEHSSARLERFLQLCSNDNM

SEQ ID NO: 96269 - protein, 758 aa, Unknown
  Bacterial polypetide isolated from the Sargasso Sea
NQINFTNNGKKAILNTIIKAEGFEKFLAKKFIGTKRFGLDGGESLVPALEQIIKRGGQLGVKEIKIGMPHRGRLNVLANVLQKSYKRIFNEFAGELDSKSEDSAGDVKYHLGASSNREFDGNSVHVSLTDNPSHLEAVNPVVLGQVRAKQFFHGDKERKQVIPILIHGDAAFAGQGVVAECFAMSGLKGHNTGGTIHIIVNNQIGFTTSPRFARSSPYPSDLGKVVEAPILHCNGDDPEAVVHCAKIAIEFRQKFNRDVVIDIICYRRFGHNEGDEPSFTQPLMYKKIREHPTTLNIYANKLIEENSISNDEFEKNKTDFNLLLDNQFKSAKDDKPKLDWFEGTWSRYRPQKGKDKRGKTGVDENTLISISNKINSLEDQLKAHKTIKKIFSKRHESILAKKNIDWSTSEALAFGSLLNEGFPVRLVGQDSGRGTFSQRHSVLRNQEDNSRYIPLNNISENQKNFEIVDSFLSELAVLGFEYGYSLVEPETLTIWEAQFGDFANGAQVVIDQFIASGERKWNRASGLVLLLPHGYEGQGPEHSSARLERFLQLSGQENLQVVNCTTPANYFHVLRRQIHRDFRKPLIIMTPKSLLRNKFCVSKLEDFDKSNSFHRVLSDHSYLDDTNFIKLKPNADIKKVIICSGKVYFDLIKARENLKRDDVVFVRIEQLYPFPVKPLVKEIKKYSKNAHFYWCQEEPKNMGAWNSVRDYIQWTLDYIGANNNKISYIGRNAAASPATGYAKRHSAQQEEIINEVFK

SEQ ID NO: 96270 - protein, 969 aa, Unknown
  Bacterial polypetide isolated from the Sargasso Sea
MSTVKNNNIFEKTSFLGGNSSEFIEELYSQYVQNPKSISKEWKEFFDGLKDKKEEIINTANGPSWSRKKSKINLYKNGEELENNDKEFKDINIDIGASNIKQNSKDSIRASTLIRAYRIRGHLLANLDPLGLQKRLEHPELNAETYGFNDQYKNKKIFLDGILGFEFADINKLIHEAKNIYCGNIGYEFMHMSDPIERSWIRERIEGKEKGIKFTENGKKAILNKLVEAEGFEKFLHVKFVGTKRFGLDGAESLIPALEQIIKRGGHLGVKEVKIGMPHRGRLNVLANMMQKPFKLIFKEFFGEKIDSKKDFEGDVKYHLGASANREFDGNLVHISLTDNPSHLEAVNPIVLGQVRAKQFFHKDKERKKVIPVLIHGDAAFAGQGVVAECFAMSGLPGHNTGGTIHIIVNNQIGFTTAPRFARSSPYPSDLAKMVEAPILHVNGDDPEAVVHCAKIATEFRQKFKSDVVIDMVCYRRFGHNEGDEPSFTQPLMYKKIRSHPTTLQIYGKKLISQGLISQQDFDERKNKLKDFLNTEFKNAKSFKQKMTWFDGVWSRFKPEIGKDKRGKTGVEKKELINIGKKITEVPNNFNIHKTLIKILENKRKMFTDDKPIDWSTAELLAFGTLLNEGFSVRLSGQDSGRGTFSQRHAVLRDQDSHDRFVPLHNISKKQKSFEVIDSLLSELGVLGFEFGYSLSEPETLVLWEAQFGDFSNGAQVVIDQFISSGESKWSRASGLVMLLPHGYEGQGPEHSSARLERFLQLCAQENLQVVNCTTPANYFHVLRRQMRRDFRKPLIIMTPKSLLRHKRCISYLEDFTRKTRFHRILEDHAYLNQSKLIKLKKNNNIKKVIMCSGKIYFDLLEAREKNKNDEIVFIRIEQLYPFPVKHLGRELQKYKNAEFIWCQEEPMNMGAWNTVKYYIDRTLEIIKIKGEKVKYIGRNAAASPATGNLNKHLAEQKEILEKVVGRLN

SEQ ID NO: 96271 - protein, 383 aa, Unknown
  Bacterial polypetide isolated from the Sargasso Sea
MQNSALKAWLDSSYLSGSNQSWIEQLYEDFLTDPDSVDANWRSTFQQLPGTGVKPDQLHSKTRDYFRRQALITPRYSSSISDPDANVKQVKVLQLINAYRFRGHQHANLDPLGLWQQENVADLDPSFHDLTDADFQESFNVGSFAGGKDTMKLSDLVVALKQTYCGPIGAEYMHITSTEEKRWLQQRIESGRAAFSSEEKKRFLSELTAAEGLERYLGAKFPGAKRFSLEGGDALIPMLKEMIRHAGNSGTREVVLGMAHRGRLNVLVNVLGKRPQELFDEFAGKHKEHLGTGDVKYHMGFSSDIETEGGLVHLALAFNPSHLEIVSPVVIGSVRARLDRLDEPSSNKVLPITIHGDAAVTGQGVVQETLNMSKARGYEVGGT

SEQ ID NO: 96272 - protein, 325 aa, Unknown
  Bacterial polypetide isolated from the Sargasso Sea
FSQRHSVLRNQIDNSRYIPLNNISDKQKKIEIVDSLLSELAVLGFEYGYSLVEPSTLTIWEAQFGDFANGAQVVIDQFISSGERKWSRASGLVMLLPHGYEGQGPEHSSGRLERFLQLCAQDNLQVMNCTTPANYFHALRRQIHRDFRKPLVIMTPKSLLRNKLCVSNLEDFGKKNSFHRVLWDHAIDPNEKDFIELKKPEKIKKVILCSGKVYFDLLQAREKIGRDDIVIFRIEQLYPFPVKPLVKEIKAYAKNAKFYWCQEEPKNMGAWFSVRDYIQWTLDYIGANNNKLSYIGRGTAASPATGYAKRHISQQKEIIDKVFKK

SEQ ID NO: 96273 - protein, 781 aa, Unknown
  Bacterial polypetide isolated from the Sargasso Sea
MKRIYCDSIGIEYMYIRTPERIKWIQSKLNQNDNRPNFSKNQKKHILKKLVQATNFEQFLQKKYVGQKRFSLEGGESLIPALDSIFENAAIMGVKEFVVGMAHRGRLNTLSNIFGKPAKEIFNEFDGKDYEEQIFDGDVKYHLGWTSKRKSDSGIGIYMNLAPNPSHLESVGPVVQGISRAKQDKYHKKNPKNVLPVIIHGDAAIAAQGVVYEVVQMERLKGYKTSGTIHIVVNNQIGFTTNYVDGRSSTYCTDVGKANLCPILHVNADDVEAVVHAANFALEYRMKYERDVFIDLLGYRKYGHNEGDEPRFTQPKLYKSISSHPSVKKIYSNYLINQKVISEKELKKIEDKYSDELNEDLSDSKKDKNVIITPFMQHEWDGLKRVKKKEMLKTFSTVVNKADLKKVANGIFQVDDSNLYLKKVVRLMNDRYNMFFEQDKIDWAMAELLAYGTLINQNYNVRISGQDVERGTFSHRHAILKTEKTEKEYIPLNNISKAQGSFEIYNSSLSEYGVMGFEYGYALTSPNTLTIWEAQFGDFSNGAQIMIDQYLSSAEDKWKLQNGLVLMLPHGYEGQGAEHSSARLERYLQLCAKNNMYVANCTTPSNLFHILRRQQITSFRKPLVLLTPKSLLRHPKVISKTSDLINGEFLSVIDDKDDEKNLKSLVFCSGKFYYDLLHYKRVNKITNVAIVRIEQLFPLPKKEINDIIKSYSCDEIVWAQEEPRNMGAWGYLLMHLDIAKNFRVASRRFYGAPASGSKARFDKRHSEVIEYVFDKSKNNMR

SEQ ID NO: 96274 - protein, 939 aa, Unknown
  Bacterial polypetide isolated from the Sargasso Sea
MHQGIMKAWLESSHLSGANSTYVEEMYEAYQEDPQSVSDDWRAVFDNLPPVNGASKDAPEAAHSKVRDYFRSLAMDGRHKSAARVTDPELDAKQVKVLQLINAHRFRGHQGANLDPLELWKREPVADLDPAFHGLTKEDMEREFNTGSFAHGGETMKLADLVKALKATYCGSIGAEYMHITDTDEKRWIQQRLEPSLGKANYDKSVKTRILEGLNAAEGIEKYLGAKFPGAKRFSLEGGDALVPMMREIIYRAGEAGTKEIVVGMAHRGRLNVLVNVLGKRPAELFDEFAGKHADTHGSGDVKYHQGFSSDFETPGGNVHLALAFNPSHLEIVNPVVMGSVRARQDRRGCKDGLQVMPITIHGDSAIAGQGIVQETFNMSQTRGFKVGGSIRIVVNNQVGFTTSNHFDVRSTEYCTDIAKMVQAPIFHVNSDDPEAVAFVAQLAVDYRNEFKRDVVIDLVCYRRHGHNEADEPSATQPLMYAKIKKHPTPRKIYADKLIAENSIGADEVTSMINTYRDALDQGDCVVKEWRPMTLHTVDWSPYIGREWDEAYQASLPLERLQNLADKLSYVPESHPLHSRVAKIYGDRVAMAKGEKLLDWGFAETLAYATILEDNKRVRITGQDSGRGTFFHRHAVLHNQNDATTYMPLRNLSEDQGPIDITDSVLSEASVLAFEYGYTTAEPGGLAIWEAQFGDFANCAQVVIDQFLSSGEQKWGRLCGLTMLLPHGYEGQGPEHSSARLERFLQLCANHNMQVCVPSTPAQVYHMLRRQVVRPMRRPLVVMSPKSLLRHPLAVSSMEELANGTFQNVIGEIDTLEASKVDRVVFCSGKVYFELLEKRRKENINNIAIIRVEQLYPFPHEEMVAALADYQHVTDFVWCQEEPQNQGAWYSSQHHFWAAIPAGAKLTYAGREASAAPACGYPELHAHQQESLVNSALKL

SEQ ID NO: 96275 - protein, 351 aa, Unknown
  Bacterial polypetide isolated from the Sargasso Sea
TAESLAFATLLNEGFSVRLSVRDSGRGTFSQRHAILRNQDSHDRYVPLHNISKKQKNFEIIDSLLSELGVLGFEFGYSLSEPETLVLWEAQFGDFANGAQVVIDQFISSGESKWSRASGLVMLLPHGYEGQGPEHSSARLERFLQLCAQENLQVVNCTTPANYFHALRRQMHRAFRKPLIVMTPKSLLRHKRCISNIQDFTKKNSFHRILQDGSYLENSKLIKLKKDNKIKKVVMCSGKIYFDLIEAREKAENNEVVFIRIEQLYPFPVKHLGKVLKRYEKAKFYWCQEEPMNMGAWNTARYYIDRTLEIIQVKGEKVEYIGRNAAASPATGNLNKHLAEQKEILEKVLSD

SEQ ID NO: 96276 - protein, 708 aa, Unknown
  Bacterial polypetide isolated from the Sargasso Sea
MRESEYLDELHPDFYGFKKENYDKKIFLNGVINRKHANIREILKFMKKTYCEKIGYEFMHISNPVERKWFRDRIEQDKNALQFTKNGKEAILNKLVQAEGFEKFLATKYVGTKRFGLDGGESLIPALEQIIKIGGQNNIKEVKIGMSHRGRLNVLANVLQKSYKRIFNEFAGEFSSDTEDGAGDVKYHLGASSDREFDGNSVHVSLTDNPSHLEAVNPVVLGQTRAKQFFHKDRERNKVIPILIHGDAAFAGQGVVAECFAMSGLPGHNTGGTIHIIVNNQIGFTTSPRFARSSPYPSDVAKMVEAPILHVNGDDPEAVVYATRIATEFRLKFNRDVVVDLICYRRFGHNEGDEPSFTQPLMYKKIRSHPSVYKIYGSKLVNENSITQELLNQNVKSFKDLLDEQYKSAKDYKPKIEWFEGTWSRYKPERGKDKRGITGYEENKLKIISDKINVIPEKKNIHKTISKIFNSRKESIEKGAGIDWSSAEALAFGSLLEEGYPVRLVGQDSGRGTFSQRHSVLRNQIDNSRYVPLNNISVNQNQFEVVDSFLSELAVLGFEYGYSLVEPNTLTLWEAQFGDFANGAQVVIDQFIASGERKWNRASGIVMLLPHGYEGQGPEHSSARLERFLQLCSNDNMQVMNCTTPANYFHALRRQMHRSFRKPLIIMTPKSLLRNKYCVSNLEDFNKKNTFHRVLWDHAIDPKSKGFI

SEQ ID NO: 96277 - protein, 959 aa, Unknown
  Bacterial polypetide isolated from the Sargasso Sea
MSSSKNLEYEKSSFLSKSNSAFIEEMYIRFIEKDPSLPESWKKYFEILDDDIQSVIKEIEGPTWQPNKKKINIKSSSKNNSEKVLSADDSEHSKNQSIKAIALIRAYRIRGHLIANLDPLGMMDREYIHDLHPEDHGFKKEDYDKKIFLGSYMDTDGYSSINEILLKLRKIYCSSIGVEYMHISDPVEKVWFRNRMENKENELKFTDHGKKAILNKIIQAEGFEKFLAKKFVGTKRFGLDGAESLIPALEQIIKRGGQLGVKEIKIGMPHRGRLNVLANVLQKSYKRIFNEFAGEFTNTHEESAGDVKYHLGASSNREFDGKSVHVSLTDNPSHLEAVDPVVLGQTRAKQFFHKDLKRNKVIPILIHGDAAFAGQGIVAECFAMSGLPGHNTGGTIHIIVNNQIGFTTSPRFARSSPYPSDLGKVVDAPILHCNGDDPESVVHCAKIAIEFRQQFNKDVVIDMICYRRFGHNEGDEPSFTQPLMYKKIRQHPTTLNVYGAKLVKNGTLIEEEFNKMIKSFQSLLDEQYKTAKDYKPKIEWYEGTWSRYKPEKGKDKRGKSGVDLNKIQKISEKINNVPSEVSIHKTISKILELRKQSIIKKKGIDWSTAESLAFATLLEEGYPVRLVGQDSGRGTFSQRHSVLRNQIDNSRYVPLNNISNNQKKFEVVDSFLSELAVLGFEYGYSLVEPSTLTIWEAQFGDFANGAQIIIDQFIASGERKWSRASGLVMLLPHGYEGQGPEHSSGRLERFLQLCAQDNLQVMNCTTPANYFHALRRQIHRDFRKPLVIMTPKSLLRNKLCISNLEDFSKKNSFHRVLWDHAIDPNENSFIKLKKSEEIRKVILCSGKIYFDLLDAREKLKVNDIVIFRIEQLYPFPAKPLVKEIKKYAKNAKFYWCQEEPKNMGAWLLVRDYIQWSLNYIAAKNKEIMYIGRNPAASPATGYAKRHSAQQKEIIEKVFK

SEQ ID NO: 96278 - protein, 521 aa, Unknown
  Bacterial polypetide isolated from the Sargasso Sea
VNNQIGFTTSPRFARSSPHPSDIAKMVEAPIIHVNGDDPEAVVYGSRIATEFRLKFNRDVVLDLVCYRRFGHNEGDEPSFTQPLMYKKIRSHPSAAKIYGSKLIDEDLLSENDLNNQIKKFKALLDDQFKTAKDYKPKIEWFEGAWSSYKPKKGKDKKGITGADPDLLRNISDKINIIPNGINVHKTINKIFQNRKKTIDQGSNIDWSSAEALAFGSLLNEGFPVRFVGQDSGRGTFSQRHSVLRNQEDNSRYIPLNSISKTQKKFEIVDSFLSELAVLGFEYGYSLVEPNTLTIWEAQFGDFANGAQVIIDQFISSGERKWQRASGLVMLLPHGYEGQGPEHSSARLERFLQLCANDNLQVMNCTTPANYFHALRRQIHRDFRKPLVLMTPKSLLRNKYCVSDIKDFNKQTSFHRILWDHALNNDNENFIKLKNPDEIKKVILCSGKVYFDLLAAREKIKRDDVILFRIEQLYPFPVKSLVKELKPYANKAKFYWCQEEPKNMGAWFSVRDYIQWTLETI

SEQ ID NO: 96279 - protein, 532 aa, Unknown
  Bacterial polypetide isolated from the Sargasso Sea
DCGSLGASQICFGMAHRGRLNLLVNVLGKLPSDLFSAFSEDFELEGASTGDVKYHLGFSSNFDTPGGEVHVSLFNNPSHLEIVDPVVIGSVRARQDRINDKDRSKVIPVLLHGDAAFSGQGVVMESLQMSQTRGFNVGGTIHIIVNNQIGFTTSNVNDSRSTDYSSDVAKIIQAPVIHVNGDDPEMVVNAAKIACKYRNKFKKDIVIDLFCYRRRGHNEADDPSATQPLMYEKISNHPSVLNQYENNLMKEGILDAEQSKKIKSNYRKSLEGGESVAKNLAKKPNDSLWFDWEPYLDVKWWPKVDTKYSKKELKKLGKEIISVPKEFNMGSQASKIFADRHEMNQGNIPINWGYAEVMAYATLLKDGYPIRLTGQDVRRGTFSHRHACIFDSQTGMGHISLSELAEKNKTSFDIYDSLLSEEAVLGFEYGYSATWPSGLTIWEAQFGDFANGAQVVIDQFIVSAQHKWERLSGLIMLLPHGYEGQGPEHSSARIERFLQLCASENIQVCVPSSPKQIFHLLRRQAIRKMRTP

SEQ ID NO: 96280 - protein, 940 aa, Unknown
  Bacterial polypetide isolated from the Sargasso Sea
MKKTMSEYMSDSHTSGGHLSYLEDLYESYLQDPDSISEEWKTYFNDLPFQNGSQKDSSHLDVIKHFQNVSRRSAPREKIISQEKNPLEAKIQSLIKAYRDYGHTAADLDPLGIAEKVIHSDLYKTEGLFSSEDLSSKVNCNFPIGSNTEYEVNNLIDGLKETYCRNIGIEFQHISNKRERSWIIEKFENSDHKISDKERKKEILKRLISARGLAQFLSSKYPGMKRFGIDGCESLIPLVDTLIKTTSKNGAEQICFGMAHRGRLNLLVNVLGKVSKELFEAFEEDFDLKGSSTGDVKYHLGYSSNIRTDHGDVHVSLTNNPSHLEIVNPVVVGSVRARQDRLGDTFRNRVVPILIHGDAAFSGQGVVMETLQMSQTRAYGVGGTIHVVVNNQIGFTTSHIRDARSTRYSTDISKFIEAPIIHVNADDPEAVVYVSELACEYRENFKKDIVIDLVCYRRSGHNEADDPSSTQPLMYKAIKSHKTVLDMYEKLLTADSIISDDEIKDFKKSYRKQIENGESVTPNLATRSNDDQWFDWEPFMNRKWYEEVTTSIPQKEIEKNALSIVKTPSDFLVQKKVQKIFDERVKMSKGDLKLNWGFAEMMAYSSLLKEGYPIRFTGQDVRRGTFDHRHAVIFDQDNGEGFLSLDSIAKEGKTSVDIYDSLLSEEAVLGFEYGYAATWPSGLVIWEAQFGDFANGAQVVIDQFIVSAEHKWERLSGLVMLLPHGFEGMGPEHSSARLERFLQLCAANNIQVCMPSSPSQIFHLLRRQAIRKMRRPLIVITPKSLLRLPEAASDLSELTNGSFNCIIGDDLPMEKIKRVVLCSGKVYYDLKKARDEKGISDVALLRLEQLYPFPYFEVEEMLKDYSHVEEFVWAQEEPRNQGAWFSHRHRLERVLNKLNIENSFKPISRPPAAAPAVGLMKLHLQQQQELVDNVLKRDNK

SEQ ID NO: 96281 - protein, 950 aa, Unknown
  Bacterial polypetide isolated from the Sargasso Sea
MKQFQLNSYLFGGNASYVEELYDAYLNNPASVPENWREYFDALQNVPATDGSNANDVAHFPIVESFAERAKANAFIPRESTTNLAAARKQVHVQSLISAYRFLGSQWANLDPLKRRERPAIPELEPAFYDFSEGDLDQTYSASNLYFGFDQASLRDIVKGLRDTYCGTIGAEYMYISDPEQKRWWQERLESTRATPNFSADEKKHILNRLTAAEGLERYLHTKYVGQKRFSLEGGESFIAAMDEVVQHAGKRGVQEIIIGMAHRGRLNVLVNTLGKMPADLFAEFEGKHVDDLPAGDVKYHKGFSSDVSTEGGPVHLSLAFNPSHLEIVNPVVEGSAKARMDRRGDEDGLQVLPVQIHGDAAFAGQGVVMETLNLAQTRGYGTHGTLHIVINNQIGFTTSDPRDARSTLYCTDVVKMIEAPVLHVNGDDPEAVVLAIQIAIDYRMQFHKDVVIDIVCFRKLGHNEQDTPAVTQPLMYKKIAQHPGTRALYAEKLVQQGVITAEDADNYVKAYRKAMDDGHHTVDPVLSNYKSKYAVDWVPFLNRKWTDAADTAVPLAELKRLGERITTVPENFKVHPLVERVINDRRNMARGDQPLDWGMGEHLAFASLVASGYSVRLTGQDSGRGTFTHRHAVLHDQNRERWNDGTYVPLQNIAEGQAKFTVIDSVLSEEAVLGFEYGYSTAEPNTLVLWEAQFGDFVNGAQVVIDQFISSGEVKWGRVSGLTMLLPHGYEGQGPEHSSTRIERFLQLCADHNMQVVQPTTPAQIFHLLRRQMIRLFRKPLIVATPKSLLRHKEAVSDLSELAKGSFQPVLGETDGGIDAKKVKRVLACSGRVYYDLVAHRREAKANDVAIIRIEQLYPFAHKQFEAEMKKYENATEVVWVQDEPQNQGPWFYVEHHLKEGMKEGQKLAYSGRPASASPAVGYYAKHYEQQKALIEGAFGRLKSTSIAK

SEQ ID NO: 96282 - protein, 498 aa, Unknown
  Bacterial polypetide isolated from the Sargasso Sea
RDVFMTLICIERFGHNEGDEPSFTQPLMYKKIRSHPSPIKVYGEKLINEGSITDDYFRRSIKEFKELLDDQYKNAKNYKPKIEWFEGTWSRYKPARGKDKRGVTGYDVKKLKNISEKINTIPKEINIHKTIAKVLENRKSNVNNEEKIDWSTAEALAFGSLLEEGYPVRLVGQDSGRGTFSQRHSVLRNQIDNSRYVPLNKISKNQKNFEIVDSFLSELAVLGFEYGYSLVEPNTLTIWEAQFGDFANGAQVVIDQFIASGERKWSRASGLVMLLPHGYEGQGPEHSSARLERFLQLCSNDNMQVMNCTTPANYFHALRRQMHRDFRKPLIIMTPKSLLRHKHCVSSLSDFSKKNTFHRVLWDHAIDPKVKGFIKLKKKEKIKKVILCSGKIYFDLLEAREKFKRDDLIFYRIEQLYPFPAKALAKELKPYAKKAKFYWCQEEPKNMGAWFSARDYIQWTLDNIKANNKKISYIGRSPDASPATGYAKETHFTTTRNY

SEQ ID NO: 96283 - protein, 930 aa, Unknown
  Bacterial polypetide isolated from the Sargasso Sea
MKELWGSSHISAGHAAYLESLYETYITDPNSLSEEWINFFKNLPHHATSNGEISHQNIVREFKNVSRKNSVTKSSVDERQGKVIRLIQSYRNRGHQQANLDPLGLMIREKIEDLNIEFHGLSSSDLEEEFYTDTFMPGSEKMKLKEILASLEEIYCGNIGIECNHIMESNERRWFQRKFESKLKEYSFSEEEKLNIYERLNSAEGLAKYLSAKYPGMKRFGIDGAESLVPLIENVIQNFGSMGANQICFGMAHRGRLNLLVNVLGKLPSELFSAFDENFELEGASTGDVKYHLGFSSNFNTPGGEVHVSLFNNPSHLEIVDPVVIGSVRARQDRLKDKDRSKVVPILLHGDASFSGQGVVMESLQMSQTRGFSVGGTVHIIVNNQIGFTTSNKDDSRSTDYSSDVAKMIQAPIIHVNGDDPEMVINAAKIACKYRNKFKKDIVIDLFCYRRRGHNEADDPSATQPIMYNKISKHPSVLSQYEEKLIHEGLIDKVKAKKIKSDYRKSLEGGKSVAKNLAEKPNDSLWFDWQPYMDVKWWPKVNTKFPKQKFKKLGSEICKIPDSFNLGSQAKKIFSDRLEMTNSKLMTNWGYAEIMAYASLLSEGYPIRITGQDVRRGTFSHRHACIFDSKTGNGHIPLAKIAAENKTKFDIYDSLLSEEAVLAFEYGYSATWPSGLTIWEAQFGDFANGAQVVIDQFIVSAQHKWERLSGLVMLLPHGYEGQGPEHSSARIERFLQLCASENIQVCVPSTPSQIFHLLRRQAIRKMRTPLVVISPKSLLRNPEAVSSLEDLYNGSFSCVIDDDSDKKKVNKVIMCSGKVFYDLNKKKKENNIKDIALIRIEQLYPFPYDDLEEILTKYENVQEFVWCQEEPLNQGAWFSHRHRIQRVIDRIDTSKEVGLVSRPAAAAPAVGLMKLHLQQQEELVNKALIK

SEQ ID NO: 96284 - protein, 920 aa, Unknown
  Bacterial polypetide isolated from the Sargasso Sea
MKELWGSSHVSAGHAAYLESLYEAFINDPENLSKEWLDFFTNLPKNSNSNGEISHQEIIKEFRNFSRSKVKVSDSSKKTIDERQGKVIRLIQSYRNRGHLKANLDPLGMMERRVIEDLSIEFHGLSHDDLDEEFYTNTFTDSNKLTLREILKRLEEVYCGNIGIECNHILDSEERRWFQKKFESKLTEYGFDPDEKLNIYERLNSAEGLAKYLSAKYPGMKRFGIDGAEALVPLVESVIQNCGSMGAKQLCFGMAHRGRLNLLVNVLGKLPSELFSAFDEDTELEGASTGDVKYHLGFSSNFETPGGEVHVSLFNNPSHLEIVDPVVIGSVRARQDRIGDKDRSQVVPILLHGDASFSGQGVVMESLQMSQTRGFNVGGTIHIIVNNQIGFTTSNINDSRSTDYSSDVAKIIQAPVIHVNGDDPEMVVNAAKIACKYRNKFKKDIVIDLFCYRRRGHNEADDPSATQPLMYNKISKHPSVLSQYETDLKDHGILTSDKAKKIKSEYRKSLEGGESVAKNLAKNPNDQLWFDWEPYMDVKWWPKVDTKFNKDKFMKLGKAICKVPKSFNLGSQAKKIFDDRLKMNNGEIPINWGYAETMAYATLLDEGYPIRLTGQDVRRGTFSHRHACVFDSKNGMGYIPLSDIAEKNKSKFDIYDSLLSEEAVLAFEYGYSATWPSGLAIWEAQFGDFANGAQVVIDQFIVSAQHKWERLSGLVMLLPHGYEGQGPEHSSARIERFLQLCASENIQVCVPSSPKQIFHLLRRQAIRKMRTPLVVISPKSLLRNPMAVSNLGELTNGSFDCVIDDDIKKPEAVKRLILCSGKVFYDLIEKKKEENREDIAVVRIEQLYPFPYDDLEEILTKYQNVQEFIWCQEEPLNQGAWFSHRHRIQRVLDRLGDGFEVSLVSRPAAAAPAVGLMKLH

SEQ ID NO: 96285 - protein, 459 aa, Unknown
  Bacterial polypetide isolated from the Sargasso Sea
KLIKENIILKEDLNSQIKKFKELLDQQFKTAKDYKPKIEWFEGTWSRYKPEKGKDKRGATGIDLNILSNISNRINKIPSEINIHKTINKILDNRKKTIEQGYGIDWATAESLAFGSLLEEGYPVRLVGQDTGRGTFSQRHSVLRNQLDNSRYVPLNNISKKQKNFEVVDSFLSELAVLGFEYGYSLVAPNTLTIWEAQFGDFANGAQVIIDQFISSGERKWKRASGLVMLLPHGYEGQGPEHSSARLERFLQLCANDNMQVMNCTTPANYFHALRRQVLRDFRKPLIMMTPKSLLRNKYCKSNLRDFSKNNSFHRVMWDHCMDPKNKGFIKLKKNSEIKKVILCSGKVYFDLLEAREKIKNDDVIIFRIEQLYPFPAKSLVKELKPFAKNANFFWCQEEPKNMGAWLLVRDYIQWTLQTIKAKNTEISYIGRNPDASPATGYAKRHLSEQKEIVNKVFE

SEQ ID NO: 96286 - protein, 326 aa, Unknown
  Bacterial polypetide isolated from the Sargasso Sea
GTFSQRHSVLRNQIDNSRYVPLNKISKNQKNFEIVDSFLSELAVLGFEYGYSLVEPNTLTIWEAQFGDFANGAQVVIDQFIASGERKWSRASGLVMLLPHGYEGQGPEHSSARLERFLQLCSNDNMQVMNCTTPANYFHALRRQMHRDFRKPLIIMTPKSLLRHKNCVSNLSDFSKKNTFHRVLWDHAIDPKVKGFIKLKKKEKIKKVILCSGKIYFDLLEAREKLKRDDLIFYRIEQLYPFPAKALAKELKPYAKKAKFYWCQEEPKNMGAWFSARDYIQWTLDNIKANNKQISYIGRSPDASPATGYAKRHFSQQQEIIKKVFE

SEQ ID NO: 96287 - protein, 609 aa, Unknown
  Bacterial polypetide isolated from the Sargasso Sea
FFHKDLKRNKVIPILIHGDAALQGQGVVAECFAMSGLPGHNTGGTIHIIVNNQIGFTTSPRFARSSPYPSDLGKVVDAPILHCNGDDPESVVHCAKIAIEFRQKFNKDVVIDMICYRRFGHNEGDEPSFTQPLMYKKIRQHPSTLNVYGAKLIKDQIINKEEFDKMKKEFSNLLDEQYKTAKDYKPKIEWYEGTWSRYKPEKGKDKRGKSGVDLNKVIRISEKINNIPPEINIHKTISKILEARRQSVVKKKGIDWSTAEALAFGSLLEEGFPVRLVGQDSGRGTFSQRHSVLRNQIDNSRYIPLNNISNNQKKFEVVDSFLSELAVLGFEYGYSLVEPSTLTIWEAQFGDFANGAQIIIDQFIASGERKWSRASGLVMLLPHGYEGQGPEHSSGRLERFLQLCAQDNLQVMNCTTPANYFHALRRQIHRDFRKPLIIMTPKSLLRNKLCVSNLEDFGKKNSFHRVLWDHAIDPKESSFIKLKKAKEIRKVILCSGKIYFDLLAAREKLNKDDVVMFRIEQLYPFPAKPLVKEIKKYAQNAKFYWCQEEPKNMGAWLLVRDYIQWTLNYIGAKNKEIMYIGRNPAASPATGYSKRHLAQQNDIIDKVFK

SEQ ID NO: 96288 - protein, 751 aa, Unknown
  Bacterial polypetide isolated from the Sargasso Sea
VEKDENALQFTKNGKEAILNKIIQAEGFEKFLNTKYVGTKRFGLDGAESLIPALEQIIKIGGQNKIKEVKIGMSHRGRLNVLANVLQKSYKRIFNEFAGEIDSSSDDDSAGDVKYHLGASSDRVFDGNSVHVSLTDNPSHLEAVNPVVLGQTRAKQFFHNDKERNKVIPILIHGDASFAGQGIVAECFAMSGLPGHNTGGTIHFIINNQIGFTTSPRFARSSPHPSDVAKMVDSPIIHANGDDPESVVYAARIAAEFRLKFNRDVVVDLVCYRRFGHNEGDEPSFTQPLMYKKIKSHLSTVKIYGNKLVNEKTISSEDLNNQIKKFKDLLDDQYKNAKNYKPKIEWFEGTWSRYKPRRGQDKRGDTGYSTSKLLEISDKIHSLSAELNIHKTIVKIFEARKNSMNKGNEIDWSTAEALAFGSLLEEGYPVRLVGQDSGRGTFSQRHSVLRNQIDNSRYIPLNNISNKQKNFEIVDSFLSELAVLGFEYGYSLVEPNTLTIWEAQFGDFANGAQVIIDQFISSGERKWLRASGLVLLLPHGFEGQGPEHSSARLERFLQLCSNDNMQVMNCTTPANYFHALRRQMHRDFRKPLVIMTPKSLLRNKYCVSQIDDFSKKNSFHRVLWDHAMDPKTKGFIKLKKNNEIKKVILCSGKIYFDLLSAREKLKKDDVILFRIEQLYPFPAKSLVKEIKPFAQNAKFYWCQEEPKNMGAWLMVRDYIQWTLDYIKAKNRKISYIGRNPDATPATGYAKR

SEQ ID NO: 96289 - protein, 829 aa, Unknown
  Bacterial polypetide isolated from the Sargasso Sea
ELHPEFYGFKKENYERKIFLNGVINKKYANIKEILKFMKKTYCGKIGYEFMHISNPDERKWFRDRIEQDDKALQFTKNGKEAILNKLVQAEGFEKFLATKYVGTKRFGLDGGESLIPALEQIIKIGGQQQIKEVKIGMSHRGRLNVLANVLQKSYKRIFNEFAGEFSDETEDSAGDVKYHLGASSDRQFDGNSVHVSLTDNPSHLEAVNPVVLGQTRAKQFFHKDKERNKVIPILIHGDAAFAGQGVVAECFAMSGLPGHNTGGTIHIIVNNQIGFTTSPRFARSSPYPSDVAKMVEAPILHVNGDDPEAVVYATRIATEFRLKFNRDVVVDLICYRRFGHNEGDEPSFTQPLMYQKIKAHPSVYKIYGSKLVSENTITKELLDQNVKSFKDLLDDQYKSAKDYNPKIEWFEGTWSRYKPEKGKDKRGVSGFDEDNLKLISDKINSVPVEKNIHKTISKIFNVRKESVEKGTGIDWSSAEALAFGSLLVEGYPVRLVGQDSGRGTFSQRHSVLRNQVDNSRYIPLNNISKDQKQFEVVDSFLSELAVLGFEYGYSLVEPNTLTIWEAQFGDFANGAQVVIDQFIASGERKWNRASGIVMLLPHGYEGQGPEHSSARLERFLQLCSNDNMQVMNCTTPANYYHALRRQMHRDFRKPLIIMTPKSLLRNKYCVSNLEDFNKQNTFHRVLWDHAIDPKSNGFIKLKESSEIKKVILCSGKVYFDLLDAREKLKRDDVILFRIEQLYPFPAKALVNELKPYSKNAEFFWCQEEPKNMGAWFSVRDYIQWTLDTLKAKYNKISYIGRSPDATPATGYAKRHNSQQQEIINKVFG

SEQ ID NO: 96290 - protein, 563 aa, Unknown
  Bacterial polypetide isolated from the Sargasso Sea
HFIINNQIGFTTSPRFARSSPHPSDVSKMVDAPIIHVNGDDPEAVVYAARIAAEFRLKFNRDVVIDLVCYRRFGHNEGDEPSFTQPLMYKKIKTHPSTVKVYGNKLVNENFMSIEELNNQIKDFKELLEDQFKNAKNYKPKIEWFEGTWSRYKPKKGKDKRGVTGYSTKRLKEISDKVHSIPEKINAHKTIIKIFKSRKDIVNNGDGIDWSTAETLAFGSLLEEGYPVRLVGQDTGRGTFSQRHSVLRNQIDNTRYIPLNNITDNQKNFEVVDSFLSELAVLGFEYGYSLVEPNTLTLWEAQFGDFANGAQVIIDQFIASGERKWSRASGLVMLLPHGYEGQGPEHSSARLERFLQLCSNDNMQVMNCTTPANYFHALRRQMHREFRKPLIIMTPKSLLRNKFCTSKLDDFSKNNSFHRVLWDHAIDPKSNGFIKLKKSSEIKKVVLCSGKVYFDLLSAREKQKRNDVILLRIEQLYPFPVKSLVKEIKPFAKNAKFYWCQEEPKNMGAWFSVRDYIQWTLDHINAKNSKISYIGRSPDATPATGYARRHLAQQEEIINKIFN

SEQ ID NO: 96291 - protein, 490 aa, Unknown
  Bacterial polypetide isolated from the Sargasso Sea
FGHHEGDEPSYTQPLMYKKIKQHPTTVNVYGKKLINEKIISEEDFGNMKKEFRNLLDEQFRTAKNYKPKIEWYEGTWSRYKPEKGKDRRGKSGVDIKKLDKISEKVHNIPLNLNIHKTISKILDLRKKTIQNKKGIDWSTAETLAFGSLLEEGYPVRLVGQDTGRGTFSQRHSVLRNQIDNSRYIPLNNISSNQKKIEVVDSFLSELAVLGFEYGYSLVSPETLTIWEAQFGDFANGAQVVIDQFISSGERKWSRASGLVMLLPHGYEGQGPEHSSARLERFLQMCAQDNLQVMNCTTPANYFHALRRQIHRDFRKPLVIMTPKSLLRHKFCVSNLDDFGKKNSFHRVLWDHALEENNKFIELKKSEKINKVILCSGKIYFDLLEAREKIKKDDIVIFRIEQLYPFPVKSLVKEIKKYAKNSKFYWCQEEPKNMGAWFSVRDYIQWTLDYIGAKNNKISYIGRNPAASPATGYAKRHLSQQKEIIEKVLK

SEQ ID NO: 96292 - protein, 251 aa, Unknown
  Bacterial polypetide isolated from the Sargasso Sea
AQFGDFANGAQVVIDQFIVSAQHKWERLSGLVMLLPHGYEGQGPEHSSARIERFLQLCASENIQVCVPSSPKQIFHLLRRQAIRKMRTPLVVISPKSLLRNPMAVSNLDELTNGSFDCVIDDDIKKPEAVKRLILCSGKVFYDLIEKKKEENREDIAVIRIEQLYPFPYDDLEEILTKYQNVQEFIWCQEEPLNQGAWFSHRHRIQRVLDRLGDGLEVSLVSRPAAAAPAVGLMKLHLQQQKDLVNEAIGK

SEQ ID NO: 96293 - protein, 109 aa, Unknown
  Bacterial polypetide isolated from the Sargasso Sea
MNEVCEARPMIGNEAIARGAWEAGVKVAAAYPGTPSTEILEYMGSYPLEDLHAQWSTNEKVACDVAIGAFFEGVRAMTAMKHVGLNVASDALLSQSYIGVNGGLVLVVC

SEQ ID NO: 96294 - protein, 232 aa, Unknown
  Bacterial polypetide isolated from the Sargasso Sea
KNFKIVSLTESKIIKKRINGIKVDLNTGQAFKKADLIIDFTIPKCTFQVLKIASKLKKKVVIGTTGFTKKEENLIKRFSKNIPILKAGNMSLGINLLMYLTEIASSSLGGKFLSKVFEIHHKHKKDYPSGTALMLGKGIAKGKNKDFYNLIGKKYLNKKTFPYGNKINFNSLRKSEIIGEHEVKFSSGKEIITLNHEAFDRALYSEGALSAAKWLMKKRNGLYSMRDLMNFK

SEQ ID NO: 96295 - protein, 258 aa, Unknown
  Bacterial polypetide isolated from the Sargasso Sea
MKKINLAITGCMGRMGQQLIKSANKDNTFKITSLTESRRINKRIFGVNPEINSIDAFKKANVIIDFTVPKCTFEILKIAFKLKKKVVIGTTGFTKKEEKLIKKFSNKIPILKAGNMSLGVNLLMYLTEITSRSLGKTFLSKVYEVHHKYKKDYPSGTALMLGKGIAVGKNKEFYSIIGKKYLNKKSFPYGKKINFNSIRKGDVIGEHEVSFSSGKEIVKLNHESFDRALYSEGALAAAKWLSTKKSGLYSMRDLLNFK

SEQ ID NO: 96296 - protein, 179 aa, Unknown
  Bacterial polypetide isolated from the Sargasso Sea
MNEIAQNTVLISGGAGSMGQLVSDYINSRDDFTLTAIHDPNYEGQEYNIYKDLANIEEDVVLEFSPASVINENIDSILNSDADLIIGSSGVSSEMLLKLKTITDRKVIVIPNFSIGAAYQKLFSLALSNNFNSANITEKHHGEKQDAPSGTAIDLANAFTSEFKSHEKDEDFYEINNVN

SEQ ID NO: 96297 - protein, 257 aa, Unknown
  Bacterial polypetide isolated from the Sargasso Sea
MSKINLAITGCMGRMGQQLIKSANKDRTIKLVALTENRIINKKINGIKPELNTDKALSKANVIIDFTIPKCTFEVLKIATKLKKKVVIGTTGFTKKEEDLIKKFSKKIPILKAGNMSIGINLLMYLTEITSASLGNNYLSKVFEVHHKHKKDHPSGTALMLGKGIAIGKNKDFYKLMGKKFLNKKKFPYGKKINFNSIRKGEIIGEHEVTFSSGKEILTLNHEAFDRALYSDGAITAAKWLINKRPGLYSMRNLLNF

SEQ ID NO: 96298 - protein, 168 aa, Unknown
  Bacterial polypetide isolated from the Sargasso Sea
MKLIKIGISGCLGRMGKELVAQTKNKSRISFVGGFDLKDKKTSPNNIFSKADVVIDFSSPGAIKNNLEMAINKKTGLVIGTTGLKDKEVKMLKNASKKIPILMSSNMSLGVNLLFNLVQQAASTLKDKDYDIEIAETHHKHKIDAPSGTALSLGDMQQKEEKLIFKKL

SEQ ID NO: 96299 - protein, 258 aa, Unknown
  Bacterial polypetide isolated from the Sargasso Sea
MKKINLAITGCMGRMGQQLIKSSKKNKDFKLVTLTENRLINKKFNGVKPELNSDKAFKKTDVIIDFTVPNCTLEILKIASKLRKKVVIGTTGFSRSQENLIKKYSKKIPILKAGNMSLGVNLLMYLTEIASKSLNDEYLSKIFEVHHKHKKDYPSGTALMLGKGIADGKNKNLYNLIGKKFLNKKSFPYGKKINFNSIRKGEIIGEHEVKFSSGKEIITLNHEAFDRALYSDGALTASKWLMKKKPGLYSMRDLLNFS

SEQ ID NO: 96300 - protein, 187 aa, Unknown
  Bacterial polypetide isolated from the Sargasso Sea
LENVKIASQNKTAVIIGTTGMTESQKKKVRSYAKKIPILMSSNMSLGVNLLFNLVQQTSQALKDTDYDIEIAETHHKHKKDAPSGTALSLGEYAAEGRKTSLNKSKVLDRTKKLTNRKKGDIGFSVTRGGEIAGEHTVSFIGENDRVDLVHKANNRSIFVKGAIDAAIFISKKKSGFYSMNDLLFSN

SEQ ID NO: 96301 - protein, 215 aa, Unknown
  Bacterial polypetide isolated from the Sargasso Sea
MKKINLAITGCMGRMGQQFIRSAKSDKNFKLVSLTENRIINKKISGIKPELNTEKAFKNTNVIIDFTVPKCTIEVLKIASKLKKRVVIGTTGFTKKEENLIKKYSKKIPILKAGNMSLGINLLMYLTEIASKSLGNNFLSKVFEIHHKHKKDHPSGTALMLGKGIAVGKNKDFYKLLGKKFFNKKSFPYGKKINFNSIRKGEIIGEHEVTFSSVK

SEQ ID NO: 96302 - protein, 159 aa, Unknown
  Bacterial polypetide isolated from the Sargasso Sea
MSEKINITIVGAAGKMGCELIRQISNSSNYNLVAAIEGKDSKFIGEDAYKNAGCSITGIEINDDLISAVTKSDALIDFSSIDSTLYASELSAQARIVHVIGTTGFNNKQDEMIQAAARHATIIKSGNMSLGLNILLGIVQNASKLLTTIGVSKFQRFII

SEQ ID NO: 96303 - protein, 143 aa, Unknown
  Bacterial polypetide isolated from the Sargasso Sea
MKRINLTISGCMGRMGQQLIKSVKRNKNFKIVSLTENRHINKKISGIKPQFNSLEAFKKTNVIIDFTVPRCTFEILKIAAKQKKRVVIGTTGFTKKEEKLIKNFSKKIPILKAGNMSLGVNLLMYLTEIASRSLGNNFLSKIY

SEQ ID NO: 96304 - protein, 269 aa, Unknown
  Bacterial polypetide isolated from the Sargasso Sea
MAKIKIAVAGCLGRMGQELSKQIIKNNKLDFVGGFEHKKHKDINKQFKNVSDIHSSKIIESNPINSIKTANVIIDFTTPQSTLENVKIASQNKTAIIIGTTGMTESQKKKVKGYAKKIPILMSSNMSLGVNLLFNLVQQTAHALKSTDYDIEIAETHHKHKKDAPSGTALSLGEYAAEGRKISLNKSKVLDRTKKLTNRKKGDIGFSVTRGGEIAGEHTVSFIGENDRVDLVHKANNRSIFVKGAIDAAVFLSKKKSRLLFMNDLLFSK

SEQ ID NO: 96305 - protein, 114 aa, Unknown
  Bacterial polypetide isolated from the Sargasso Sea
MGKINIAITGCMGRMGQQLIKSANKDKSTKLVALTENKLINKKITGIKPELNTEKALSKANVIIDFTIPKCTLEVLRIAVKLKKKVVIGTTGFTKKEERLIKKFSKKIPILKAR

SEQ ID NO: 96306 - protein, 141 aa, Unknown
  Bacterial polypetide isolated from the Sargasso Sea
MNQTPLRLLIHGASGRMGQALLRLAAEHPETLQIAAAVTGRAPAQRVVDGVPFFAASELPGAPAFDVAIDFSLPEGFDPMLALCVERGAGLVSGTTGISSTQRQALEAAAARIPLVWASNFSLGVAVLDELVERAAQALAG

SEQ ID NO: 96307 - protein, 189 aa, Unknown
  Bacterial polypetide isolated from the Sargasso Sea
MKKINIGVTGCMGRMGQQIIKTIKSDKNFKLVTLTEDKKINKKINGIGIEQNTELAFKKTNLIIDFTTPKCTFQILRIAAKLRKRLVIGTTGFTKKEENLIKKFSKKIPILKAGNMSFGINLLMYLTEIAAGSLGKNFLSKIYEVHHKYKKDFPSGTALMLGKGIAVGKNKNFYSIVGKKYLNKKKFPY

SEQ ID NO: 96308 - protein, 124 aa, Unknown
  Bacterial polypetide isolated from the Sargasso Sea
RFVADLIKPYQTDYNANIKDIHHKHKLDAPSGTAISLAEDILNNSEYKEWQTEKANKGNLPIQSIREGDIAGTHTVSYISDIDEISIKHKAFKRDGFALGALIASEWIHGKQGVFSMEDVLKKV

SEQ ID NO: 96309 - protein, 94 aa, Unknown
  Bacterial polypetide isolated from the Sargasso Sea
MKKINLAISGCIGRMGQQLIKSSKKNKNFKLVTLTENRLINKKFNGIKPELNSEKAFKKTDVIIDFTVPNCTLEILKIASKLRKKVVIGTTGFT

SEQ ID NO: 96310 - protein, 146 aa, Unknown
  Bacterial polypetide isolated from the Sargasso Sea
MKKIKLAITGCMGRMGQQIIKSTKSNKNFVVTVITENILIKKKINGINISLNDEKAFKKADVIIDFTIPKCTFEVLKIASKLKKKVVIGTTGFTKKEENLIKKYSRKIPILKAGNMSLGINLLMYLTEIASASLGNSYLSKVFEIH

SEQ ID NO: 96311 - protein, 215 aa, Unknown
  Bacterial polypetide isolated from the Sargasso Sea
MQELNLSLNTAEAFKKANLIIDFTVPKCTFEVLKIASKLKKKVVIGTTGFSKKEENLIKKYSKKIPILRAGNMSLGINLLMYLTEITSKSLGSNFLTKVFEIHHKHKKDHPSGTALMLGKGIAVGKNKDFYKLIGKKYLNKKSFPYGKKINFNSLRKGEVVGEHEVTFSSGKEIITLNHEAFDRALYSEGAFTAAKWLMKKKPGLYSMRDVLNFK

SEQ ID NO: 96312 - protein, 170 aa, Unknown
  Bacterial polypetide isolated from the Sargasso Sea
MKKINLAITGCMGRMGQQFIKLAKSDKHFKLVALTENRIINKKISGIKPELNTEKAFKNTNVIIDFTVPKCTIEVLKIASKLKKRVVIGTTGFTKKEENLIKKYSKKIPILKAGNMSLGINLLMYLTEITSKSLGNNFLSKIFEVHHKHKKDHQSGTALMLGKRYSSRKK

SEQ ID NO: 96313 - protein, 232 aa, Unknown
  Bacterial polypetide isolated from the Sargasso Sea
KNFKIVSLTESRNISKKISGIKLELNTIDAFKKANVIIDFTVPKCTLQVLKIASKLRKRVVIGTTGFSKKEEIIIKKYSRKIPILKAGNMSLGVNLLMYLTEIASKSLNKNFLTKIYEVHHKHKKDHPSGTALMLGKGVANGKSKNFYSLIGKKYLNKKNFPYGKKINFNSIRKGSVIGEHEVKFSSGKEIVTLNHESFDRALYSEGALTASKWLMKKKPGLYSMRDLLNFK

SEQ ID NO: 96314 - protein, 238 aa, Unknown
  Bacterial polypetide isolated from the Sargasso Sea
KSSQKNSSFNLKTLTENRPINRKIFGISPEFNTENAFKKTDVIIDFTVPQCTFEVLKIASKLKKKVVIGTTGFSRSQENQIKKYSKKISILKAGNMSLGVNLLMYLTEITSKSLNDDYLSKIFEIHHKHKKDYPSGTALMLGKGIADGKGKNLYNLIGRKYLNKKSFPYGKKINFCSLRKGEIIGEHEVKFSSGKEIITLNHEAFDRALYSDGALTAAKWLMKKKPGLYSMRDLLNFS

SEQ ID NO: 96315 - protein, 267 aa, Unknown
  Bacterial polypetide isolated from the Sargasso Sea
MAKIKIAVAGCLGRMGQEISKQILKNKSLEFVGGFEHKEHKDINKPLNKVSEIQSSKTVTANSAQLIKEANVVIDFTTPESTLDNLKTASANKTAVVIGTTGMTNVQKKKVKFYSRKIPILMSSNMSLGVNLLFNLVEQTATTLKDTSYDIEIAETHHKHKKDAPSGTALSLGEYAAKGRKIKFNKSKVLDRTKKLKSRKKGDIGFSVTRGGEIAGEHTVSFIGTNDRIDLVHKANNRSIFVSGAIEAAIFISKKRPGLFNMNDLLF

SEQ ID NO: 96316 - protein, 256 aa, Unknown
  Bacterial polypetide isolated from the Sargasso Sea
KINIAVTGCLGRMGQQIIKSVNKDRNFNLVAITEIKKKNQKINGIKIDSNNERSLKNANVIIDFTIPKCTLEVLKIATKLRKRVVIGTTGFSRNEEGSIQKFSKKIPILKAGNMSLGINLLMYLTEIASSSLGRNFLSKINEIHHKHKKDYPSGTALMLAKGIAEGKKKNFHNLIGKKYLNKKKFPYGNKINFNSIRKGEIIGEHEVKFSSGKEIITLNHEAFDRALYSEGALSAARWLMNKKPGLYSMRDLMNFK

SEQ ID NO: 96317 - protein, 173 aa, Unknown
  Bacterial polypetide isolated from the Sargasso Sea
MKKINLAISGCMGRMGQQLIKSSKKNKNFKLVTLTENRLINKKFNGVKPELNSDKAYKKTDVIIDFTVPNCTLEILKIASKLKKKVVIGTTGFTKSQENQIKKYAKKIPILKAGNMSLGVNLLMYLTEIASKSLNDEYLSKIFEVHHKHKKDYPSGTALMLGKGIADGKNKNL

SEQ ID NO: 96318 - protein, 105 aa, Unknown
  Bacterial polypetide isolated from the Sargasso Sea
APSGTALSMGKVAAASREYQFEKIKKLSREGKVGQRSNEEIGFATLRGGSVVGDHTMILAHEDERIELTHKATNRKIYANGAVKAAIWCSDKQKGLFSMKQVLGL

SEQ ID NO: 96319 - protein, 186 aa, Unknown
  Bacterial polypetide isolated from the Sargasso Sea
MKKINLVITGCMGRMGQQLIKSIKTDRTTKLVGLTENILIKRKIGGIKPQLNNDNVFKKTDVIIDFTVPKCTFEVLKIASKLKKRVVIGTTGFTKSEEDKIKKISKKIPILKAGNMSLGINLLMYLTEITSKALGDKYLSKIFEIHHKHKKDFPSGTALMLGKGIAVGKNKDFYKLLGKKFLNKKK

SEQ ID NO: 96320 - protein, 179 aa, Unknown
  Bacterial polypetide isolated from the Sargasso Sea
MQKIKIAVAGCLGRMGQEISKQILQNKNLEFVGGFENKKHKDINKPLNKVSSIHSEKLVTANAAQLIKDSNVIIDFTTPESTLDNLKIASANKTAVVIGTTGMTDPQKKKVKSFSKKIPILMSSNMSLGVNLLFNLVQQTASALKDTDYDIEIAETHHKHKKDAPSGTALSLGEYAAEG

SEQ ID NO: 96321 - protein, 114 aa, Unknown
  Bacterial polypetide isolated from the Sargasso Sea
MKKLNLAITGCLGRMGQQIIKTSNKDKEVKLVTLTENKLVNKKINGIIPELNSEKALAKADVIIDFTIPKCTFEVLKIASKLKKKVVIGTTGFTKKEESIIKKFSKRTAILKDW

SEQ ID NO: 96322 - protein, 205 aa, Unknown
  Bacterial polypetide isolated from the Sargasso Sea
QCKQLDVKVSDFQSKAIDLNDISAVIDFSSPGGLKACISSCIENKLPLISGTTGLTDEHFKLVSSAKKSIPILLASNMSIGIANLKSSIETYLSSISIPLKCKIIEIHHTKKKDAPSGTAIEIQKFIENLPGSKIDSPIDVQSLRIGNIFGIHRIIFENAEGVTTFQHIANSRDVFARGAVQAVKWIHSQEIGEYSFTDFLNKKL

SEQ ID NO: 96323 - protein, 108 aa, Unknown
  Bacterial polypetide isolated from the Sargasso Sea
MKKINLAISGCLGRMGRQLIKSSKKNKNFKLVTLTENRLINKKFNGIKPELNSDKAFKKTDIIIDFTVPNCTLEILKIASKLKKKVVIGTTGFTRSQENQIKKYANKI

SEQ ID NO: 96324 - protein, 219 aa, Unknown
  Bacterial polypetide isolated from the Sargasso Sea
MNEIAQKTVLISGGAGSMGQLVSDYISTRNDFIMTAIHDPNYDGQEYKIYKDLTNIEEDIVVEFSPASVINKNIEKLLDSNADLIIGSSGVSPEMLSKLKKTIDRKIIVIPNFSIGAAYQKLFAASLSENFDSVNITEKHHGKKQDAPSGTAIDLANYLPSELISHEKNGDFYKTNKVNNKNIYSLRDDIFLAEQEVDFENEYESFNLDNKVNDRRAYL

SEQ ID NO: 96325 - protein, 175 aa, Unknown
  Bacterial polypetide isolated from the Sargasso Sea
MNEIAQNTVLISGGAGSMGQLVSDYINSRDDFTLTAIHDPNYEGQEYNIYKDLANIEEDVVLEFSPASVINENIDSILNSDADLIIGSSGVSSEMLLKLKTITDRKVIVIPNFSIGAAYQKLFSLALSNNFNSANITEKHHGEKQDAPSGTAIDLANALPSELKSHEKDEDFYEI

SEQ ID NO: 96326 - protein, 185 aa, Unknown
  Bacterial polypetide isolated from the Sargasso Sea
MKKKINLAITGCMGRMGQQLVKTSKANKNFKLVSLTESRIINKSVMGIRPNLNTENAFKKANVIIDFTIPKCTLEVLKIASKLKKKVVIGTTGFTKKEENIIKRYSRKIPILKAGNMSLGVNLLMYLTEIASKSLDSNFLTKVFEVHHKNKKDYPSGTALMLGKGIAVGKNKDLYKVMGKRYLNK

SEQ ID NO: 96327 - protein, 212 aa, Unknown
  Bacterial polypetide isolated from the Sargasso Sea
MGKINLAITGCMGRMGQQLIKSAIKDKSTKLVSLTENRSINKKISGIKPELNTERAFSKANVIIDFTIPKCTFDVLKIASKLKKKVVIGTTGFTKKEEDLIKKFSKKIPILKAGNMSLGINLLMYLTEITSASLGNNYLSKILEVHHKHKKDHPSGTALMLGKGIAVGRNKNFYRIVGKKYLNKSKFPYGKKINFNSIRKGEIIGEHEVTFS

SEQ ID NO: 96328 - protein, 151 aa, Unknown
  Bacterial polypetide isolated from the Sargasso Sea
MKKINLVITGCMGRMGQQLIKSTKSDRAIKLVGLTENILIKKKIGGIKPQLNNDNVFKKTDVIIDFTAPKCTFEVLKIASKLKKRVVIGTTGFTKAEEDKIKKISKKIPILKAGNMSLGINLLMYLTEIASRALRDRYLSKVFEVHHKHKK

SEQ ID NO: 96329 - protein, 160 aa, Unknown
  Bacterial polypetide isolated from the Sargasso Sea
MNEIAENTVLISGGAGSMGQLVSDYINSRDDFTLTAIHDPNYKGQEYKTYKDLENIEEGVVFEFSPASVINENIDSLLNSDADLIIGSSGVSSDMLLRLKTITDRKVIVIPNFSIGAAYQKLFSIVLSDNFKSVNITEKHHGKKQDAPSGTAIDLANSLP

SEQ ID NO: 96330 - protein, 231 aa, Unknown
  Bacterial polypetide isolated from the Sargasso Sea
MSKVNLAISGCMGRMGQQLVKSSRVDKNFKLTTLTENRLIKKKISGIKPSLNNENSFKNVDLIIDFTVPNCTFEILKIASKLKKRVVIGTTGFTKKEEGLIKNFSKKIPILKAGNMSLGINLLMYLTEIASKSLGNNFLSKVYEVHHKYKIDHPSGTALMLGKGIAIGKNKDFYNLLGKKYLNKKSFPFAKKINFNSIRKGKTVGEHEVKFSSGKEIITLNHEAFDRALYS

SEQ ID NO: 96331 - protein, 109 aa, Unknown
  Bacterial polypetide isolated from the Sargasso Sea
MKKINIAISGFMGRMGQQLIKSANKNKAFKIVSLTENKKLNKKIFGITPELNSKNAFKKASIIIDFTVPKCTLDILKIAAQQKKRVVIGTTGFTKREENLIKKFSKKIP

SEQ ID NO: 96332 - protein, 226 aa, Unknown
  Bacterial polypetide isolated from the Sargasso Sea
MAKIKIAVAGCLGRMGQEISKQILQNKNLEFVGGFEHKKHKDINKPLNKVSIIHSAKLVTANAAQLIKVSDVMIDFTTPESTLDNLKISSENKTAVVIGTTGMTDAQKKKVKSYSKKIPILMSSNMSLGVNLLFNLVKQTASALKDTDYDIEIAETHHKHKKDAPSGTALSLGEYAADGRKTKLNKSKVLDRTKKLSSRKKGDIGFSVTRGGEIAGEHTVSFIGTN

SEQ ID NO: 96333 - protein, 208 aa, Unknown
  Bacterial polypetide isolated from the Sargasso Sea
MNSENALKNVDLIIDFTTPKCTLEILRIVSKLKKKIVIGTTGFSKKEEMLIQKYSKKISILKAGNMSLGINLLMYLTEITSRSLDKKYLTKIFEVHHKYKKDYPSGTALMLGKGVAIGKNKDFYKLIGKKLLNKKSFPYGKKINFNSLRIGKIIGEHEVKFSNGKEVITLNHEAFDRTLYSEGALTAAKWLINKKPGLYSMRDLLNFE

SEQ ID NO: 96334 - protein, 212 aa, Unknown
  Bacterial polypetide isolated from the Sargasso Sea
IKPELNSNKAFKKTDVIIDFTIPQCTIEILKIASKLKKKVVIGTTGFTRSQENLIKKYSKKIPILKAGNMSLGVNLLMYLTEVASKSLNEEYLSKIFEVHHKHKKDYPSGTALMLGKGIANGKNKNLYKLIGKKFLNKKSFPYGKKINFNSIRKNEIIGEHEVKFSNGKEIISLNHEAFDRALYSDGALTASKWLMKKRPGLYSMRDLLDFS

SEQ ID NO: 96335 - protein, 267 aa, Unknown
  Bacterial polypetide isolated from the Sargasso Sea
MAKIKIAVAGCLGRMGQEISKQILQNKNLEFVGGFEHKKHKDINKPLNKVSSIRSAKLVTANAAQLIKDTNVIIDFTTPESTLDNLKIASANKTAVVIGTTGMTDAQKKKVKSYSKKIPILMSSNMSLGVNLLFNLVKQTASALKDSDYDIEIAETHHKHKKDAPSGTALSLGEYAAEGRKTKLNKSKVLDRTKKLSSRKKGDIGFSVTRGGEIAGEHTVSFIGTNDRVDLVHKANNRSIFVDGAIEAAIFISKKKTGLYNMNDLLC

SEQ ID NO: 96336 - protein, 45 aa, Unknown
  Bacterial polypetide isolated from the Sargasso Sea
FGGKSQTLTIRHDSIHRDSFMPGVCLACKKVMALDELVYGLEHVL

SEQ ID NO: 96337 - protein, 203 aa, Unknown
  Bacterial polypetide isolated from the Sargasso Sea
IQNASVIIDFTVPKCTLEVLKIASKLKKRVVIGTTGFNKKEENLIKKYSRKIPILKAGNMSVGINLLMYLTEIASKSLGNNFLSKVFEVHHKYKKDHPSGTALMLGKGIAEGKNKDFYKIAGKKYLNKKTFPYSKKINFNSIRKGKIVGNHKVYFSSAKETITLNHEAFDRALYSEGAFTAAKWLMNKKPGLYSMRDVLKLDA

SEQ ID NO: 96338 - protein, 258 aa, Unknown
  Bacterial polypetide isolated from the Sargasso Sea
MKKINLAITGCMGRMGKQIITSAKSDNNFKIVALTENKKSNKKINNIRISQNNLETFKKANVIIDFSIPKCTFEVLKIASKLNKKVVIGTTGFTKKEENLIKKFSKKISILKAGNMSLGINLLMYLTEIASKSLGKNFLSKIFEVHHKHKKDFPSGTALMLGKGIAVGRNKNFYSLLGKKYLNKKTFPYSNKINFNSLRKGEIIGEHEVKFSSGKEIITLNHEAFDRALYSEGALSAAKWIMRKKSGLYSMRDLMNFK

SEQ ID NO: 96339 - protein, 132 aa, Unknown
  Bacterial polypetide isolated from the Sargasso Sea
MSEKINITIVGAAGKMGCELIRQISNSSNYNLVAAIEGKDSKFIGEDAYKNAGCSITGIEINDDLISAVTKSDALIDFSSIDSTLYASELSAQARIVHVIGTTGFNNKQDEMIQAAARHATIIKSGNMSLGL

SEQ ID NO: 96340 - protein, 259 aa, Unknown
  Bacterial polypetide isolated from the Sargasso Sea
MKKINLAITGCMGRMGQQFIKSAKLDKSFKLVTLTENRIISKKISGIKPELNTEKAFKNTNVIIDFTVPKCTLEVLKIASKLRKKVVIGTTGFSKKEENIIKQYAKKIPILKAGNMSLGINLLMYLTEIASKSLGKRFLSKVFEIHHKHKKDYPSGTALMLGKGIAIGKNKNFYKLFGKKYLNKKSFPYGKKINFNSIRKGEIIGEHEVTFSSGKEIITLNHEAFDRALYSEGAFTAAKWLINKKPGLYSMRDVLKLYG

SEQ ID NO: 96341 - protein, 254 aa, Unknown
  Bacterial polypetide isolated from the Sargasso Sea
NLTITGCMGRMGQQLIKTAKASKNFKLVSLTENRIINKNIAGIRPDLNTEEAFKKANVIIDFTVPKCTLEVLKIASKLKKRVVIGTTGFTKKEENLIKKFSRKIPILKAGNMSLGVNLLIYLTEIASKSLNNNFLSKVFETHHKKKQDHPSGTALMIGEGIASGKNKDFYRLMGKKYLNKKSFPYGKKINFNSMRIGSVIGKHEVSFSSGKEIVSLYHEAFDRTLFSEGALTAARWIIRRKPGLYSMRNVLNFK

SEQ ID NO: 96342 - protein, 196 aa, Unknown
  Bacterial polypetide isolated from the Sargasso Sea
IIDFTIPECTFQVLKIATKLKKRVVIGTTGFSKKEENLIKKYSKKIPILKAGNMSLGINLMMYLTEIASSSLGKKFLSKIYEIHHKHKKDYPSGTALMLGKGIATGKNKNFYNLVGKKYLNKKKFPYGNKINFNSIRKGKIIGEHEVQFSSGKETITLNHEAFDRTLYSEGALSAAKWLMHKKPGLYSMRDLMNFK

SEQ ID NO: 96343 - protein, 172 aa, Unknown
  Bacterial polypetide isolated from the Sargasso Sea
MKKINLTITGYQGRMGKQLIKSIKKFKNFRLISITENKKISKKYLNLKPQLNSINAFKNTNVIIDFSVPKSTLEILKYASKLKKRVVIGTTGFSSKQEQLIKRYSKKIPILKAGNMSLGINLLVHLTKIASTSLNKKFLSKILEVHHNKKRDHPSGTALMLGKGIADGKNKS

SEQ ID NO: 96344 - protein, 182 aa, Unknown
  Bacterial polypetide isolated from the Sargasso Sea
MSKVNLAISGCMGRMGQQLVKSSRVDKNFKLTTLTESRLIKKKISGIKPSLNNENSFKNVDLIIDFTIPNCTFEILKIASKLKKRVVIGTTGFTKNEEGLIKKFSKKIPILKAGNMSLGINLLMYLTEIASKSLGNNFLSKVYEVHHKHKIDYPSGTAIMLGKGIAVGKNKDFYNLFGKKIS

SEQ ID NO: 96345 - protein, 187 aa, Unknown
  Bacterial polypetide isolated from the Sargasso Sea
TLEILKIASKLRKKVIIGTTGFTISQENQIKKLSKKIPILKAGNMSLGVNLLMYLTEITSKSLNDEYLSKIFEVHHKHKKDYPSGTALMLGKGIADGKNKNLYNLIGKKFLNKKSFPYGKKINFNSIRKGEIIGEHEVKFSSGKEIITLNHEAFDRALYSDGALTASKWLMKKKPGLYSMRDLLNFS

SEQ ID NO: 96346 - protein, 258 aa, Unknown
  Bacterial polypetide isolated from the Sargasso Sea
MKKINLSITGCLGRMGKQLIKSSKRSRDFKIVSITENRKINKRISGLRPSLNSKDAFKKAKVIIDFTVPKCTLEVLKIASKLKTRVVIGTTGFSKKEEILIKKYSKRIPILKAGNMSLGINLLVYLTEIASRSLGNKFLSKIHETHHKHKKDHPSGTALMLGKGIAVGKNIDLSKNMGTKYFNKKNFPYSKKINFNSRRKGKVVGEHEVKFSSGKEVITLNHEAFDRALYSEGALTAAKWLMNKKPGLYSMKNVLNFN

SEQ ID NO: 96347 - protein, 202 aa, Unknown
  Bacterial polypetide isolated from the Sargasso Sea
FKKANLIIDFTVPKCTFEVLKIAAKLQKRVVIGTTGFSKKEENLIKKFSRKIPILKAGNMSLGINLLMYLTEITSKSLGNNFLGKVFEIHHKHKKDHPSGTALMLGKGIAVGKNKDFYKLIGKKFLNKKSFPYGNKINFNSLRKGKVVGEHEVSFSSGKEIITLNHEAFDRALYSEGAFTAAKWLMNKKPGLYSMRDVLNFK

SEQ ID NO: 96348 - protein, 192 aa, Unknown
  Bacterial polypetide isolated from the Sargasso Sea
MKKINLAISGCMGRMGQQLIKSAKKNKNFKLVTLTENRLINKKFNGVKLELNSVKAFKKTDVIIDFTVPSCTLEILKIASKLRKKLVIGTTGFTRSQENQIKKYSKKIPILKAGNMSLGVNLLMYLTEIASKSLNDEYLSKIFEVHHKHKKDYPSGTALMLGKGIADGKNKNLYNLIGKKFLNKKSFPYGKK

SEQ ID NO: 96349 - protein, 258 aa, Unknown
  Bacterial polypetide isolated from the Sargasso Sea
MSKVKLAISGCMGRMGQQLIKSSRIDKSFKLTALTENRLIRKNIAGIKPSLNHENSFKNVDLIIDFTIPKCTFEILKIASKLKKRVVIGTTGFSKEEEIQIKKFSKKIPILKAGNMSLGINLLMYLTEIASKSLGNNFLSKVYEVHHKHKIDHPSGTALMLGKGIAIGKNRNFYNLIGKKYLNKKSFPYAKKINFNSIRKGKTVGEHEVKFSSGKEIITLNHEAFDRALYSEGALTAGKWLMNKKPGLYSMRDVLDFK

SEQ ID NO: 96350 - protein, 236 aa, Unknown
  Bacterial polypetide isolated from the Sargasso Sea
VKSDKNFNLVALTENRIINKKISGIKPQLNTEKAFKNTNIIIDFTVPKCTFEVLKIASKLKKRVVIGTTGFSKKDENLIKKYSKKIPILKAGNMSLGINLLMYLTEIASKSLGNNFLSKVFEIHHKHKKDHPSGTALMLGKGIAFGKNKDFYKLIGKKYLNKKSFPYGKKINFNSLRKGEIVGEHEVTFSSGKEIITLNHEAFDRALYSEGAFTAAQWLMNKKPGLYSMRDVLNFK

SEQ ID NO: 96351 - protein, 236 aa, Unknown
  Bacterial polypetide isolated from the Sargasso Sea
MSEEILIVDDNADIRNIINELIIDAGYKTRLAANYNQALAEIDKKLPDVAILDVKLDKGDNDGIELLSHIKSKNKDTPVIIISGHANIEMAVKSLQHGAFEFIEKPFDQERLLNFVKRAVENFNLKKQNREYESKLFSSYELIGNSKNIVNIIDQIKKISVTESRVFISGPSGSGKELIARKIHKASSRSKKPFIVLNGALLDINKYELELFGEEKENGSISYGALEKANKGTLLI

SEQ ID NO: 96352 - protein, 180 aa, Unknown
  Bacterial polypetide isolated from the Sargasso Sea
MGKISLAITGCMGRMGQQLIKSAVRDKSTKLVALTENRFIRKKIGGIKPELNNEKSLSKANVIIDFTTPKCTFEVLRIAVKLKKKVVIGTTGFTKKEEQLIKKFSRKIPILKAGNMSLGINLLMYLTEIASASLSNNYLSKVFEVHHKHKKDHPSGTALMLGKGIAIGKNKNFYKMIGKK

SEQ ID NO: 96353 - protein, 240 aa, Unknown
  Bacterial polypetide isolated from the Sargasso Sea
MSKINLTITGCMGRMGQQLIRSANKDKSLKIVSLTENFLINKRIGLIKPELNTERAFNKSNIIIDFTVPKCTFEVLKIASKLKKKVVIGTTGFTKKEENLIKKYSKKIAILKAGNMSLGINLLMYITEIASASLGDKFLSKVFEVHHKYKKDHPSGTALMLGKGIATGKKKDFYKIIGTKYLNKKKFPYGKKINFNSIRKGEIVGEHEVKFSSGKEIITLNHEAFDRALYSEGAIAAAKW

SEQ ID NO: 96354 - protein, 209 aa, Unknown
  Bacterial polypetide isolated from the Sargasso Sea
ITNSEKAYKKANVIIDFTVPKCTLEILKIALKQKKKVVIGTTGFTKKEEDLIKKISKKIPILKAGNMSLGINLLIYLTEITSKSLGKNFLSKIYEVHHKHKKDYPSGTALMLGSGVAKGKNKDFYSMIGKKYLNKKSFPYGKKINFNSIRRGDVIGEHEVTFSSGKEIITLNHESFDRALYSEGALLAAKWLFNKRPGLYSMRDLLKFK

SEQ ID NO: 96355 - protein, 254 aa, Unknown
  Bacterial polypetide isolated from the Sargasso Sea
NLAITGGLGRMGQQIIKSCKKDKNIRIISITENRIYKKKISGLKLQTNSKNSLKNAQVIIDFSVPKCTLEIIKIASELKKRVVIGTTGFSKSEEKIIEKYSRKVPILKAGNMSLGVNLLVYLTEIASRSLDNNFLSKVYEVHHRQKKDHPSGTALMLGKGIARGKNKDLNKIIGKKYLNKKSFPFSNKINFNSLRKGKIVGEHEVSFSSGKEIITLNHESFDRALYAEGALAAAKWLINKKPGLYSMRNVLNFK

SEQ ID NO: 96356 - protein, 202 aa, Unknown
  Bacterial polypetide isolated from the Sargasso Sea
MIENSQKPIPVLVSGALGRMGGEVVNTVLNSKDCKLVAAIDINEKNNGSNISELLKVKNCDVFVSNDFEGTLCSVSQNYRDKNIKPVLVDFTHPDSVYENTRSAIAYGISPVIGTTGLSPSQIKDLSVFAQKASVGCAIIPNFSVGMVLLQQAASVAARFYDNIELIEMHHNQKADSPSGTCIKTAEMIEEYPKKFNQNLVK

SEQ ID NO: 96357 - protein, 119 aa, Unknown
  Bacterial polypetide isolated from the Sargasso Sea
IEIAETHHKHKKDAPSGTALSLGEYAAEGRKISLKKSKVLDRTKKLTNRKKGDIGFSVTRGGEIAGEHTVSFIGENDRVDLVHKANNRSIFVQGAIDAAIFLSKKKSGFYSMNDLLFSN

SEQ ID NO: 96358 - protein, 254 aa, Unknown
  Bacterial polypetide isolated from the Sargasso Sea
RMGQEISKQILQNKNLEFVGGFEHKKHKDINKPLNKVSNIHSAKLVTANAAQLIKDSSVIIDFTTPESTLDNLKIASINKTAVVIGTTGMTDGQKKKVKSYSKKIPILMSSNMSLGVNLLFNLVKQTASALKDTDYDIEIAETHHKHKKDAPSGTALSLGEYAAEGRKTKLNKSKVLDRTKKLTSRKKGDIGFSVTRGGEIAGEHTVSFIGTNDRVDLVHKANNRSIFVDGAIEAAIYICRKKSGLYTMQDLLI

SEQ ID NO: 96359 - protein, 95 aa, Unknown
  Bacterial polypetide isolated from the Sargasso Sea
MKINLTITGCMGRMGQQLIKSSNKNKNFKLVSLTENFKINRKINNVLPEFNNVNSFKKTNVIIDFTVPKCTLEVLKIASKLKKRVVIGTTGFTKN

SEQ ID NO: 96360 - protein, 111 aa, Unknown
  Bacterial polypetide isolated from the Sargasso Sea
MGKINLAITGCMGRMGQQLIKSAIKDKSTKLVALTENMLINKKINGIKPELNTEKALCKANVIIDFTIPKCTFEVLKIAKKLKKKVVIGTTGFTKKEEDIIKKFSKEIPIL

SEQ ID NO: 96361 - protein, 208 aa, Unknown
  Bacterial polypetide isolated from the Sargasso Sea
LNTKDAFKKTDVIIDFTIPKCTFEVLKIASILKKRVVIGTTGFTKKEENLIKIYSKRIPILKAGNMSLGINLLMYLSEITSRALDDKYLSKIFEAHHKHKKDYPSGTALMLGKGIADGKNKDFFKMIGKKFLNKKIFPFGKKINFNSIRKGEIIGEHIVKFSSGKEIITLNHRAFDRELYSEGALSAAKWLINKRSGLYSMRDLMNFK

SEQ ID NO: 96362 - protein, 139 aa, Unknown
  Bacterial polypetide isolated from the Sargasso Sea
MVKKIKVAIAGCTGRMGKMIAKILPEYKNFELSGLLEKSGHPDLGTEFSKITDDSSYNLKISDSYRETLLKSDVLIDFTLPDATLNLLECSRDMEVRHVIGTTGFSVSQESDILRYAKEKVIVKAGNMSLGVNLITKLT

SEQ ID NO: 96363 - protein, 267 aa, Unknown
  Bacterial polypetide isolated from the Sargasso Sea
MAKIKIAVAGCLGRMGQEISKQILQNKKLEFVGGFEHKKHKDINKPLNKVSSIHSAKLVTANAAQLIKEANVIIDFTTPESTLDNLKIASANKTAVVIGTTGMTDAQKKKVKIYSKKIPILMSSNMSLGVNLLFNLVKQTAIALKDTDYDIEISETHHKHKKDAPSGTALSLGEYAAEGRKTKLNKSKVLDRTKKLTSRKKGDIGFSVTRGGEIAGEHTVSFIGTNDRVDLVHKANNRSIFVEGAIEAAIFIFKKKTGLFNMNDLLF

SEQ ID NO: 96364 - protein, 135 aa, Unknown
  Bacterial polypetide isolated from the Sargasso Sea
IFNLVNKQHQALKDTDYDIEIAETHHKHKKDAPSGTALSLGEYAAEGRKTKLNKSKVLDRTKKLSSRKKGDIGFSVTRGGEIAGEHTVSFIGINDRIDLVHKANNRSIFVSGAIDAAIFLFKKRNGLFSMNDLLF

SEQ ID NO: 96365 - protein, 238 aa, Unknown
  Bacterial polypetide isolated from the Sargasso Sea
MSKVNLAISGCMGRMGRQLVKSSRVDKNFKLTTLTENRLVNKKIYGIKPSLNNENSFKDVDLIIDFTVPKCTFEVLEIASKLKKRVVIGTTGFTKKEDNLIKKYSKKIPILKAGNMSLGINLLMYLTEIASKSLGSNFLSKVYDVHHKHKIDHPSGTALMLGRGIAIGKNKDFYNLVGQKYLNKKNFPYGKKINFNSIRKGETIGEHEVKFSSGKEIITLNHEAFDRALYSEGALTAA

SEQ ID NO: 96366 - protein, 142 aa, Unknown
  Bacterial polypetide isolated from the Sargasso Sea
MRKINLAITGCMGRMGQQFIKSAKSDKNFKLIALTENRIINKKISGIKPELNSEKAFQNTNVIIDFTIPKCTFEVLKIASKLKKRVVIGTTGFTKKEENLIKKYSKKIPILKAGNMSLGINLLMYLTEIASKSLGNNFLSKV

SEQ ID NO: 96367 - protein, 124 aa, Unknown
  Bacterial polypetide isolated from the Sargasso Sea
MKIKLSITGYKGRMGQQLIKSCKNNSSFKLVSITENQILKKKINGIKPELNSLSAFKKTDVIIDFSVPRCTFEVLKIATKLKKRVVIGTTGFTKKEEKLIERYSKKIPILKAGNMSLGINLLMY

SEQ ID NO: 96368 - protein, 227 aa, Unknown
  Bacterial polypetide isolated from the Sargasso Sea
MNKIKLAVTGCLGRMGQQIIKSSKLDKKFKLVTLTENRKIDRKIYKIKPELNNESAFKKANIIIDFTTPKCTFQVLKIASKLKKKVVIGTTGFTKKEEQLIKKYSRKIPILKAGNMSLGINLLMYLTEIASSSLGNNFLSKVYEVHHKHKKDHPSGTALMLGKSIAVGKKKDFYKMIGNKYFNKKTFPYGKKINFNSIRKGETVGEHEVKFSSGKEIITLNHEAFDR

SEQ ID NO: 96369 - protein, 186 aa, Unknown
  Bacterial polypetide isolated from the Sargasso Sea
MNKIKLGITGCMGRMGKQLIKSSKKDKSFKLTTLTENIEIAKKISGIKPELNSFNSLKKVDVIIDFSVPKCTLEILKIAAKLKKKVVIGTTGFTKKEEKLINNFSKKIPILKAGNMSLGINLLMYLTEITSRSLGNNFNSKILEIHHKYKKDHPSGTALMLGKGIAAGKNKKFYNIVGKKFLNKKN

SEQ ID NO: 96370 - protein, 193 aa, Unknown
  Bacterial polypetide isolated from the Sargasso Sea
FTVPNCTFEILKIASKLKKRVVIGTTGFNKKEESLILKFSKKIPILKAGNMSLGINLLMYLTEIASKSLGNNFLSKVYEVHHKHKIDYPSGTALMLGKGIAIGKNKDFYNLFGKKYLNKKSFPYGKKINFNSIRKGETVGEHEVKFSSGKEVITLNHEAFDRALYSEGALTAGKWLMKKKPGLYSMRDVLNFK

SEQ ID NO: 96371 - protein, 230 aa, Unknown
  Bacterial polypetide isolated from the Sargasso Sea
FKIVALTENRIVNKKVAGIKPSFNTEESFKKANLIIDFTVPKCTFEVLKIALKLKKRVVIGTTGFSKKEEKLIKKYSKKIPILRAGNMSLGINLLMYLTEIASKSLGSNFLSKVFEIHHKHKKDHPSGTALMLGKGIAVGKNKNFYKLIGKKYLNKKSFPYGNKINFNSLRKGEVVGEHEVTFSSGKEIITLNHEAFDRALYSEGAFTAAKWLMKKKPGLYSMRDVLNFK

SEQ ID NO: 96372 - protein, 258 aa, Unknown
  Bacterial polypetide isolated from the Sargasso Sea
MKKINLAISGCMGRMGQQLIKSSKKNKNFKLITLTENRLINKKFNGVKPELNSEKAFRKADVIIDFTVPKCTLEILKIASILKKKVVIGTTGFNRSQENQIKKYSKKISILKAGNMSLGVNLLMYLTEIASKSLNDEYFSKIFEVHHKHKKDYPSGTALMLGKGIADGKNKNLYNLIGKKFLNKKTFPYGKKINFNSIRKGEIIGEHEVKFSNGKEIITLNHEAFDRALYSDGALTASKWLMKKKPGLYSMRDLLNFS

SEQ ID NO: 96373 - protein, 107 aa, Unknown
  Bacterial polypetide isolated from the Sargasso Sea
MKPIKIIVTGASGRMGQTIIKKILINKSLKLIGATEGSKNKFLGSDISALIKSKKTGIIITDKIEPLFAKADAVIDFTIPIATLNYAEMAAKYKIVHVIGTTGFSPK

SEQ ID NO: 96374 - protein, 156 aa, Unknown
  Bacterial polypetide isolated from the Sargasso Sea
DFAAQHATIIKSGNMSLGINLLESIVKIASSKLDSSFDIKINETHHKHKIDAPSGTAIMLGKAAASGKNKKLENVMKINRTNTIGKNVKNKIVMSSFRKGEIIGDHEVIFSSNDETIRIQHIAENRGIFANGALQAVKWGMDKGPGLFSMTDVLNI

SEQ ID NO: 96375 - protein, 219 aa, Unknown
  Bacterial polypetide isolated from the Sargasso Sea
FKVTALTESRVVNKKINRIKIENNSEVSFKKSDLIIDFTVPKCTFEVLKIASKLKKRVVIGTTGFTKKEENLIKKFSKKIPILKAGNMSLGINLLMYLTEIASSSLGKNFKSKIFEIHHKHKKDYPSGTALMLGKGIAVGKNKSFYNLIGKKYLNKKNFPYGNKINFNSLRRGEIIGEHEVKFSSGKEIITLNHEAFDRALYSEGALSAAKWLMNKKPG

SEQ ID NO: 96376 - protein, 140 aa, Unknown
  Bacterial polypetide isolated from the Sargasso Sea
MSKKINITIVGAAGKMGCELIRQISNSSKYNLVAAIEGKDSKFIGEDAYKNAGCSITGIEINDDLISAVTKSDALIDFSSIDSTLYASELSAQARIVHVIGTTGFNNKQDEMIQAAARHATIIKSGNMSLGLNILLGIVQ

SEQ ID NO: 96377 - protein, 246 aa, Unknown
  Bacterial polypetide isolated from the Sargasso Sea
GRMGQQIIKSARSDKNFKLVALTENRIIKKKVSGIKPSLNNEEAFKKANLIIDFTVPKCTFEILKIAAKLKIRVVIGTTGFSKKEENLIKKFAKKIAILRAGNMSLGINLLMYLTEIASKSLGNNFLSKVFEIHHKYKKDHPSGTALMLGKGIAVGKNKDFYNLIGKKYLNRKSFPYGKKINFNSLRKGEVVGEHEVTFSSGKEIITLNHEAFDRALYSEGAFTAAKWLMKKKPGLYSMRDVLNFK

SEQ ID NO: 96378 - protein, 181 aa, Unknown
  Bacterial polypetide isolated from the Sargasso Sea
MKKINLAVTGCLGRMGQQIIKSSKNAQNFKLVSITENRIINRKISGLKPQLNSEEAFKNANIIIDFTIPKCTLEVLKIAFKLRKKVVIGTTGFTQNQEKLIKKYSKKIPILKAGNMSLGINLLMYLTEITSKSLGDNFLSKVFEIHHKHKKDHPSGTALMLGKGIAIGKKKDFYKLVGKKY

SEQ ID NO: 96379 - protein, 258 aa, Unknown
  Bacterial polypetide isolated from the Sargasso Sea
MKKINLAITGCMGRMGQQIIKSVKKDKSFKLKSLTENRKIRKKIYGLTVNLNSENVFKDIDLIIDFTIPQCTFQILKIASKLKKRVVIGTTGFSKKEEKLIHKYSKKIPILKAGNMSLGINLLMYLTEISSSSLGKKFLSKVFEIHHKHKKDYPSGTALMLGKGIAVGKNKNFYDLIGKKYLNKKKFPYGNKINFNSIRKGEIIGEHEVQFSSGKEIITLNHEAFDRSLYSEGALSAAKWLMAKKPGLYSMRDLMNFK

SEQ ID NO: 96380 - protein, 165 aa, Unknown
  Bacterial polypetide isolated from the Sargasso Sea
MSQLNIGISGCSGKMGKTLIKLISNHKECRLACGLEAENNPEIGKLINSEYSSEVIVSNRQIFFEKSDIIIDFSTPSSTIENIKFANKYEKSIVIGTTGLSPEVEQEIEKASNNIPIVYSANMSIGINIILELTNKLSNILEKEEFDIEILEMHHKHKVDAPSGT

SEQ ID NO: 96381 - protein, 194 aa, Unknown
  Bacterial polypetide isolated from the Sargasso Sea
DFTVPKCTFEILKIAFKLKKKVVIGTTGFTKREEKLIKKFSNKIPILKAGNMSLGVNLLMYLTEITSRSLGKTFLSKVYEVHHKYKKDYPSGTALMLGKGIAVGKNKEFYSIIGKKYLNKKSFPYGKKINFNSIRKGDVIGEHEVSFSSGKEIVKLNHESFDRALYSEGALAAAKWLSTKKSGLYSMRDLLNFK

SEQ ID NO: 96382 - protein, 268 aa, Unknown
  Bacterial polypetide isolated from the Sargasso Sea
MSKIKVAVAGCLGRMGQEITREILKNKKLLFVGGFEHKSHPDLNKIFNEVTSINSKLKISDNANQIIKNADVVIDFTSPNSTLSNVKIAAKNKTAIVIGTTGMTENQKKKVKNFSKKIPILMSSNMSLGVNLLFNLVNQTASILKDENYDIEISETHHKHKKDAPSGTAISLGEYAAIGRKTKLNKTKVTDRTRKITKRKKGQIGFSVTRGGEIAGEHTVSFIGTNDRVDLTHKANNRSIFVNGAIEATIFLSSKKNGFFDMSNLFIK

SEQ ID NO: 96383 - protein, 258 aa, Unknown
  Bacterial polypetide isolated from the Sargasso Sea
MKKINLAISGCMGRMGQQLIKSSKKNKNFKLVTLTENRLIKKKFNGVKPELNSEKAFRKADVIIDFTIPNCTLEILKIASKLKKKVIIGTTGFTRSQENQIKKFSKKIPILKAGNMSLGVNLLMYLTEIASKSLNDEYLSKIFEVHHKHKKDYPSGTALMLGKGIADGKNKNLYNLIGKKFLNKKSFPYGKKINFNSIRKGEIIGEHEVKFSSGKEIITLNHEAFDRALYSDGALTASKWLMKKKPGLYSMRDLLNFS

SEQ ID NO: 96384 - protein, 258 aa, Unknown
  Bacterial polypetide isolated from the Sargasso Sea
MKIIKLGISGCMGRMGQQLIRSSKKNKNFKLVTLTENRLVNKKFNGIKPELNSDKAFKRIDVIIDFTIPKCTFEILKIASKLRKKVVIGTTGFTRAQENQIKKYSKKIAILKAGNMSLGVNLLMYLTEIASKSLNEEYLSKIFEVHHKHKKDYPSGTALMLGKGIANGKNKNLYNLIGKKFLNKKTFPYGKKINFNSIRKSEVIGEHEVKFSNGKEIITLNHEAFDRALYSDGALTASKWLIKKKRGLYSMRDLLNFS

SEQ ID NO: 96385 - protein, 258 aa, Unknown
  Bacterial polypetide isolated from the Sargasso Sea
MKKINLSITGCMGRMGQHLVKTSKKDKRIKLYSLTEGKIISKRIYNIKPQLNTEDAFRNTDVIIDFTIPKCTFEVLKIASKLKKRVVIGTTGFSKKEERIIKSYSKKIPILKAGNMSLGINLMMYLTEIASKVLGDKYLNKIFEVHHKHKKDYPSGTALMLGRGIATGKGKDFYRLLGKKYLNVKSFPYGNKINFNSIRKGEIIGEHEVLFSSGKEVIKLNHEAFDRALYSEGAIEASKWLVNKKPGLYSMRDLMNFK

SEQ ID NO: 96386 - protein, 219 aa, Unknown
  Bacterial polypetide isolated from the Sargasso Sea
MSEKINITIVGAAGKMGCELIRQISNSSKYNLVAAIEGKDSKFIGEDAYKNAGCSITGIEINDDLISAVTKSDALIDFSSIDSTLYASELSAQARIVHVIGTTGFDNKQDEMIQAAARHATIIKSGNMSLGLNILLGIVHNTSKLLDNNWSIEISEVHHKEKKDHPSGTALALGSFVANGMNIDLENKKVIDDPIVIEDEINLTQVKEGLIRKKGDIGF

SEQ ID NO: 96387 - protein, 173 aa, Unknown
  Bacterial polypetide isolated from the Sargasso Sea
MSKVNLAISGCMGRMGQQLVKSSRVDKNFKLTTLTENRLIKKKISGIKPSLNNENSFKNVDLIIDFTVPYCTFEILKIASKLKKRVVIGTTGFTKKEENLIKKFSKKIPILKAGNMSLGINLLMYLTEIASKSLGNNFLSKVYEVHHKHKIDYPSGTALMLGKGMLLAKIKIL

SEQ ID NO: 96388 - protein, 258 aa, Unknown
  Bacterial polypetide isolated from the Sargasso Sea
MKKINLAITGCMGRMGQQIIKSAKSDKNFKIVTLTENRKINKKIHGIKPSLNTVEAFKKVNLIIDFTVPKCTFEVLKIASKLKKRVVIGTTGFSKKEENLIKKYSRKIPILRAGNMSLGINLLMYLTEIASRSLGNNFLSKIFEIHHKHKKDHPSGTALMLGKGVAIGKNKNFYKLLGKKYLNKKSFPYGKKINFNSLRKGEAIGEHEVTFSSGKEIITLNHEAFDRALYSEGAFTAAKWLMNKKPGLYSMRDVLNFK

SEQ ID NO: 96389 - protein, 258 aa, Unknown
  Bacterial polypetide isolated from the Sargasso Sea
MKKINLGISGCMGRMGQQLIKSSKKNKDFNLKALTEYITIDKKILGVKPELNSEDAFDKTDIIIDFTIPKCTLQILRIASKLKKKVVIGTTGFNKAQENQIRKYSKKIPILKAGNMSLGVNLLMYLTEITSKSLNDNYLSKIFEVHHKYKKDYPSGTALMLGKGIADGKGKNLYNLIGKKFLNKKSFPYGKKINFNSLRKGEIIGEHEVKFSSGKEIITLNHEAFDRALYSDGALTAAKWLMRKKPGLYSMRDLLNFS

SEQ ID NO: 96390 - protein, 258 aa, Unknown
  Bacterial polypetide isolated from the Sargasso Sea
MSKVKLAISGCMGRMGQQLVKSSRTDKNFKLTTLTENRLIEKKIAGIKPSLNHENSFKNVDLIIDFTIPKCTFEILKIASKLKKRVVIGTTGFSKMEELQIKKFSKKIPILKAGNMSLGINLLMYLTEITSKSLGNNFLSKVYEVHHKHKIDHPSGTALMLGKGIAVGKNRDFYNLIGKKYLNKKSFPYGKKINFNSIRKGKTVGEHEVKFSSGKEIITLNHEAFDRALYSEGALTAGKWLMNKKPGLYSMRDVLNFK

SEQ ID NO: 96391 - protein, 224 aa, Unknown
  Bacterial polypetide isolated from the Sargasso Sea
MSEKINITIVGAAGKMGCELIRQISNSSKYNLVAAIEGKDSKFIGEDAYKNAGCSITGIEINDDLISAVTKSDALIDFSSIDSTLYASELSAQARIVHVIGTTGFNNKQDEMIQAAARHATIIKSGNMSLGLNILLGIVQNASKLLDDNWNIEISEVHHKEKKDHPSGTALALGSFVANGMNIDLENKKVIDDPIVIEDEINLTQVKEGLIRKKGDIGFSSYRK

SEQ ID NO: 96392 - protein, 251 aa, Unknown
  Bacterial polypetide isolated from the Sargasso Sea
MIDNIKKIAISGGNGKMGKLLSEHIKGKDSFEVSGIYDPISNSKEYKNFKDYKEVKADFLFEFSPSNKINKNIEILCNEQLNFGIIIGSSGISEESIEKLKVLGERLLVIVIPNFSIGASYQKLMSVILSDVFVNKDIIEKHHSQKKDAPSGTAIDLANSINSINNEINERESENIINVINNIKIESIRSDEFLAEQTISMSNEYEIFNTEHIVNDRKAYLSGINLVLDSLEDLDGYYFGLESILKNRFKI

SEQ ID NO: 96393 - protein, 258 aa, Unknown
  Bacterial polypetide isolated from the Sargasso Sea
MKKVNLLITGCMGRMGQQIIKSVRSNKKFKIVALTENKLIKKKINGVNLSLNSVDTFKKANLIIDFTVPKCTIDVLRIASKLKKKVVIGTTGFNKRQEMQIKIYSKKIPILKAGNMSLGINLLMYLTEITSFSLGENFMSKIYEEHHKYKKDHPSGTALMLGEGIAIGKKKNFYKILGKKYLNKKTFPYGKKINFNSIRRGNTIGEHEVKFSNGKEILTLNHAAFDRALYSEGALAAASWLMSKKPGLYSMRDVLSFK

SEQ ID NO: 96394 - protein, 127 aa, Unknown
  Bacterial polypetide isolated from the Sargasso Sea
MKKINLAITGCMGRMGQQFIKSAKSDKNFKLVALTENRIIKKKISGIKPELNTEKAFKNTNVIIDFTVPKCTIEVLKIASKLKKRVVIGTTGFTKKEENLIKKYSKKIPILKAGNMSLGINLLNVFN

SEQ ID NO: 96395 - protein, 267 aa, Unknown
  Bacterial polypetide isolated from the Sargasso Sea
MAKIKIAVAGCLGRMGQEISKQILQNKNLEFVGGFEYKKHKDINKPLNKVSSIQSSKLVTANAAQLIKKANVIIDFTTPESTLDNLKIASANKTAVVIGTTGMTDGQKKKVKSYSKKIPILMSSNMSLGVNLLFNLVKQTASALKDNDYDIEIAETHHKHKKDAPSGTALSLGEYAAEGRKTKLNKSKVLDRTKKLTSRKKGDIGFSVTRGGEIAGEHTVSFIGTNDRVDLVHKANNRSIFVDGAIEAAIFISKKRTGLFNMNDLLF

SEQ ID NO: 96396 - protein, 351 aa, Unknown
  Bacterial polypetide isolated from the Sargasso Sea
MSEEILIVDDNVDIRNIINELIIDAGYKTRLAANYNQALAEIDKKLPDVAILDVKLDKGDNDGIELLTHIKSKNKDTPVIIISGHANIEMAVKSLQHGAFEFIEKPFDQERLLNFIKRAVENFNLKKQNKEYESKLFSSYELIGNSKNIVNIIDQIKKISVTESRVFINGPSGSGKELIARKIHKASSRSKNPFVILNGALLDINKYELELFGEEKENGSISYGALEKANKGTLLIDQVSEIPLDIQSKILRVLIDQKFKRVNGSNDVSVDVRLICSSSKDLKKEIEIGNFREDLFHRINVFEINIEPLNQRISDIPLLIKYFSKKISENYKIRELDIDENNSYILNHNWH

SEQ ID NO: 96397 - protein, 258 aa, Unknown
  Bacterial polypetide isolated from the Sargasso Sea
MKKINLAITGCMGRMGQQIIKSAKSDKNFKIVTLTENRIINKKIVGIKPSLNNEEAFKKANLIIDFTVPKCTFEILKIASKLKKRVVIGTTGFSKKEENLIKKYSRKIPILKAGNMSLGINLLMYLTEIASKSLGNNFLSKIFEIHHKHKKDHPSGTALMLGRGIAAGKNRDFYKLIGKKYLNKKSFPYGKKINFNSLRKGKVVGEHEVTFSSSKEIITLNHEAFDRALYSEGAFTAAKWLMNKKPGLYSMRDVLNFK

SEQ ID NO: 96398 - protein, 191 aa, Unknown
  Bacterial polypetide isolated from the Sargasso Sea
MKKIRLLVTGCMGRMGQQIIKSVKKDKNFKLTALTENRKINKKINGVKVELNNEKLFKNVDLIIDFTIPKCTFQVLKIATKLKKRVVIGTTGFTKKEENLIKNFSKKIPILKAGNMSLGINLLMYLTEIASSSLGKNFLSKIFEIHHKHKKDYPSGTALMLGKGIAVGKNKNFYGLLGKKYLNKKTFPYSK

SEQ ID NO: 96399 - protein, 258 aa, Unknown
  Bacterial polypetide isolated from the Sargasso Sea
MKKINLGISGCMGRMGQQLIKSSKNNKDFNLKALTEYITINKKIHGVKPELNSEDAFKKTDIIIDFTIPKCTLEVLKIASKLKKKVVIGTTGFNRFQENQIRKYSKKIPVLKAGNMSLGVNLLMYLTEIASKSLDEDYLSKIFEVHHKHKKDYPSGTALMLGKGIADGRGKNLYNLIGKKFLNKKSFPYGKKINFNSLRKGEIIGEHEVKFSSGKEIITLNHEAFDRALYSDGALTAAKWLMKKKPGLYSMRDLLNFS

SEQ ID NO: 96400 - protein, 143 aa, Unknown
  Bacterial polypetide isolated from the Sargasso Sea
MKKINLAITGCMGRMGQQLIKTSKVNKNFKLVSLTENRIINKNIMGIRPNLNTENAFKKANVIIDFTVPKCTLEVLKIASKLKKRVVIGTTGFTKKQENIIKKYSRKVPILKAGNMSLGVNLLMYLTEITSKSLNNDFLSKVL

SEQ ID NO: 96401 - protein, 223 aa, Unknown
  Bacterial polypetide isolated from the Sargasso Sea
MHILVNGFNGNMGQAIQAQCKQLDVKVSDFQSKAIDLNNISAVIDFSSPGGFKACISSCIENKLPLISGTTGLTDEHFKLVSSAKKSIPILLASNMSIGIANLKSSIEKYLLSISIPSKCKIFEIHHTKKKDAPSGTAIEIQKFIENLPKSKVVNSIDIESLRIGNIYGIHRIEFENAEGKTTFQHIANSRNIFARGALQAARWIKSKEIGEYSFADFLNKKL

SEQ ID NO: 96402 - protein, 258 aa, Unknown
  Bacterial polypetide isolated from the Sargasso Sea
MKKINLAITGCLGRMGQQLIKSSKNNKDFKIVALTESKIVSKKISGVKLKLNTVDAFKKANVIVDFTVPKCTLQVLKIASKLKKRVVIGTTGFSKREESLIKKFSKNIPILKAGNMSLGVNLLIYLTEIASKSLGNNFLTKVYEVHHKYKKDHPSGTALMLGRGIADGKSKDFYNLIGKKYLNKKNFPYGKKINFNSIRKGNFIGEHEVNFSNGKEIVTLNHKSFDRALYSEGALSASKWLMKKKPGLYSMRDLLNFK

SEQ ID NO: 96403 - protein, 109 aa, Unknown
  Bacterial polypetide isolated from the Sargasso Sea
MKKINIVITGFMGRMGQQIIKSAYKDSSIKIVSLTESKIIKKKIRGILPELNSEKAFKDSDVIIDFTIPKCTLEILKIAKKLRKRVVIGTTGFTKKEENLVKNYSKKIP

SEQ ID NO: 96404 - protein, 258 aa, Unknown
  Bacterial polypetide isolated from the Sargasso Sea
MKKINLSITGCLGRMGKQLIKSSKKSRDFKIVSITENKKINKRIFGLRPSLNSKDAFKKTKVIIDFTVPKCTMEVLKIASKLKKRVVIGTTGFSKKEEILIKKYSKKIPILKAGNMSLGINLLVYLTEIAARSLGDKFLSKINETHHKHKKDHPSGTAFMLGRGIAVGKGIDLSKNIGTKYLNKMSFPYSKKINFNSLRKGKVIGEHEVKFSSGKEIITLNHEAFDRALYSEGALSAAKWLINKKPGLYSMKNVLNFN

SEQ ID NO: 96405 - protein, 228 aa, Unknown
  Bacterial polypetide isolated from the Sargasso Sea
MKKINLAITGCMGRMGQQFIKSAKSDKNFKLVALTENRIINKKISGIKPELNTEKAFRNTNVIIDFTVPKCTFEVLKIASKLKKRMVIGTTGFTKKEENLIRKYSKKIPILKAGNMSLGINLLMYLTEIASKSLGNNFLSKVFEIHHKHKKDHPSGTALMLGKGIAVGKNKNFYNLLGKKYLNKKSFPYGKKINFNSLRKGEIIGEHEVTFSSGKEIITLNHEAFDRA

SEQ ID NO: 96406 - protein, 572 aa, Unknown
  Bacterial polypetide isolated from the Sargasso Sea
MRDSFLLRRRHAGGQTAPRRRRRVAASHRTCDPRTARRRGPASAPATRRTAATRNACRSYAHQTSGTHSMNRLADLEARLREDLRWLELPAPSWVPPRFAAAERVLDVAVIGGGMAGLAAAAELRWLGVDNLRVFDRAAPGREGPWVSFARMETLRSPKQLTGPALRMPALTFRAWYEAQFGEPAWEALYKIPRTQWMDYLRWYREVLDLPVQNDTALTSLRPRDDGLLELDLHDLRKAGARRTLLARHVVLATGRDGLGGPFVPVIANTVARRYWAHSAEPIDFAALAGKRVGVVGAGASAFDNAATALEAGAAGVDLFIRRDDIPRVNKLTGIGSPGLVHGFADLDDASKWRFLHYAQTEQTPPPRDSVLRVSRHANARFHVGSPVAALDELDGALVVTTPKGRYVVDFLIFATGFHSDIATRTEFAPFAGFVRRWKDRYRADPSLPSHELAESPDLGDAFAFQEREPGTCAALTQIHCFNHAASLSHGKLSGDIPAISEGAQRLARGIASRLFDADRERHYEALVAFDKAELQGDEWTDADAPSGTARAHLQAEHAANNPADDPAENTD

SEQ ID NO: 96407 - protein, 165 aa, Unknown
  Bacterial polypetide isolated from the Sargasso Sea
MTDVQKKKVKSYSKKIPILMSSNMSLGVNLLFNLVKQTASALKDTDYDIEIAETHHKHKKDAPSGTALSLGEYAAEGRKTKLNKSKVLDRTKKLSSRKKGDIGFSVTRGGEIAGEHTVSFIGTNDRVDLVHKANNRSIFVDGAIEAAIFISKKKKGLFNMNDLLF

SEQ ID NO: 96408 - protein, 238 aa, Unknown
  Bacterial polypetide isolated from the Sargasso Sea
MKKINLAISGCMGRMGQQLIKSSKKNKNFKLVTLTENRLVNKKFNGIKPELNSDKAFKKADVIIDFTVPNCTLEILKIASRLRKKVVIGTTGFTRNQENQIKKYSKKIPILKAGNMSLGVNLLMYLTEIASKSLNDEYLSKIFEVHHKHKKDYPSGTALMLGKGIADGKNKNLYNLIGKKFLNKKSFPYGKKINFNSIRKGEIIGEHEVKFSSGKEIITLNHEAFDRALYSDGALTAS

SEQ ID NO: 96409 - protein, 185 aa, Unknown
  Bacterial polypetide isolated from the Sargasso Sea
MEVLKFALKHKKRVVIGTTGFTKKQEKIIKNYSKKIPILKAGNMSLGVNLLIYLTEIASKSLGKKFLTKVYEVHHKHKKDYPSGTALMLGKGIAVGKNKNFNNLIGKKYLNKKTFPYSKRINFNSIRKGEVVGEHEVRFSSGKEIVTLNHESFDRALYSEGALAAAKWIMSKRPGLYSMRNLLNF

SEQ ID NO: 96410 - protein, 258 aa, Unknown
  Bacterial polypetide isolated from the Sargasso Sea
MKKIKLSITGCLGRMGKQLIKSSKRSRDFKIVSITENRKINKKIFGLRPSLNSKDAFKKTNVIIDFTVPRCTLEVLKIASKLKTKVVIGTTGFSKKEEILIKKYSKKIPILKAGNMSLGINLLVYLTEIAARSLGNKFLSKINETHHKHKKDHPSGTAFMLGKGIAVGKNIDLSKNIGTKYFNKKSFPYSKKINFNSLRKGKVIGEHEVKFSSGKEIITLNHEAFDRALYSEGALTAAKWLINKKPGLYSMKNVLNFN

SEQ ID NO: 96411 - protein, 201 aa, Unknown
  Bacterial polypetide isolated from the Sargasso Sea
MKRINLAITGCMGRMGQQLIKSSKKNKDFKLVALTENRLINKKFNKIKPEFNSNMAFKKTDVIIDFTVPVCTLEILKIASKLKKKVVIGTTGFTRSQENQIKKYSKKIPILKAGNMSLGINLLMYLTEIAAKALNDEYLSKIFEVHHKYKKDYPSGTALMLGKGIADGKNKNLYNLIGKKFLNKKSFPYGKKINFNSIRKG

SEQ ID NO: 96412 - protein, 226 aa, Unknown
  Bacterial polypetide isolated from the Sargasso Sea
MAKIKIAVAGCLGRMGQEISKQILQNKNLEFVGGFEHKKHKDINKPLNKVSSIHSAKLVTANAAQLIKEANVIIDFTTPESTLDNLKIASANKTAVVIGTTGMTDSQKKKVKIYSKKIPILMSSNMSLGVNLLFNLVKQTASALKDTDYDIEIAETHHKHKKDAPSGTALSLGEYVAEGRKTKLNKSKVLDRTKKLSSRKKGDIGFSVTRGGEIAGEHTVSFIGTN

SEQ ID NO: 96413 - protein, 258 aa, Unknown
  Bacterial polypetide isolated from the Sargasso Sea
MRKINLAITGCMGRMGKHIIKSARSDKNFKIVTLTENRIIKKSINGIKPSLNNAEAFKKANLIIDFSVPKCTLEVLKISSKLQKKVVIGTTGFSKKEENLIKKYSRKIPILKAGNMSLGINLLMYLTEIASESLGDKFLSKVFEVHHKYKKDHPSGTALMLGRGIAKGKKKEFYKLVGKKYLNKKSFPYGKKINFNSFRKGEIVGEHEVTFSSGKEIITLNHEAFDRALYSEGALAAAIWLNKKKPGLYSMRDVLNFS

SEQ ID NO: 96414 - protein, 258 aa, Unknown
  Bacterial polypetide isolated from the Sargasso Sea
MKKINLAITGCLGRMGQQLIKSARSDKTFKLITLTENQLIKKKISGIKPSLNNLDSFKKVSLIIDFTVPKCTFEVLKIAQKLNKRVVIGTTGFSKKEEELIKKYSKKIPILKAGNMSLGINLLMYLTEITSKSLGKNFLSKVFEVHHKHKKDHPSGTALMLGKGIADGKGKNLYKIMGKKYFNKKTFPYSKKINFNSLRRGEVVGEHEVKFSSGKEIITLNHEAFDRALYSEGALTAAKWLINKKPGLYSMRDVLNFK

SEQ ID NO: 96415 - protein, 247 aa, Unknown
  Bacterial polypetide isolated from the Sargasso Sea
MGRMGQHFIKSSKKNKDFKLVALTENRLINKKFNGIKPELNSNVAFKKTDIIIDFTIPVCTLEILKIASKLKKKVVIGTTGFTRIQENQIKKYSRKIPILKAGNMSLGVNLLMYLTEITSKALNDDYLSKIFEVHHKYKKDYPSGTALMLGKGIADGKNKNLYNLIGKKFLNKKSFPYGKKINFNSIRKGEIIGKHEVNFSSGKEIITLNHEAFDRALYSDGALTASKWLMKKRPGLYSMRDLLNFS

SEQ ID NO: 96416 - protein, 156 aa, Unknown
  Bacterial polypetide isolated from the Sargasso Sea
YSKKIPILMSSNMSLGVNLLFNLVKQTASALKDTDYDIEIAETHHKHKKDAPSGTALSLGDYAAEGRKTKLNKSKVLDRTKKLTSRKKGDIGFSVTRGGEIAGEHTVSFIGSNDRIDLVHKANNRSIFVTGAIDAAVFVSKKKMGFFSMNDLISLK

SEQ ID NO: 96417 - protein, 251 aa, Unknown
  Bacterial polypetide isolated from the Sargasso Sea
MIDNIKKIAISGGNGKMGNLLSEHIKSKDSFQVSGIYDPIAESKEYKNFKDIKEVEADYLFEFSPSNKINENIEILCKEQVNFGIIIGSSGISEESIEKLKGLGERLLVVVIPNFSIGASYQKLMSVILSDVFVNKNIIEKHHSQKKDAPSGTAIDLANNINSKNNEINEQKSENIINVINNIKIESIRSDEFLAEQIVNMSNEYEIFNTEHIVHDRKAYLSGINLVLDSLEDLDGYYFGLESILKNRFKI

SEQ ID NO: 96418 - protein, 166 aa, Unknown
  Bacterial polypetide isolated from the Sargasso Sea
FQKEEIESLKKAGNHAVLVQSGNMSLGINILSQMTEKIARALSDFDIEITEIHHNQKLDAPSGTALLLGESAAKGRSLNLNDNAVYERHGNTGRRDKNTIGFSSIRGGSIVGEHSVIFAGDSEVITLSHSALSRKIFVKGAMLAARWSLGKDPGYYSMDDVLNIEK

SEQ ID NO: 96419 - protein, 234 aa, Unknown
  Bacterial polypetide isolated from the Sargasso Sea
GSSLLGADAGTLAGLPEPLGVAITEDPLPLVAEADAIIDFTVPAATVEYAALAAQARIVHVIATTGFDAEQEAQIEAAARHATVIKAGNMSLGVNLLTALTRKVAETLDADWDIEILEMHHRHKIDAPSGTALMLGRAAADGRGIDHDVVADRSRDGITGERTPGDIGYAVLRGGSVIGEHSTIFAAENERIVLSHIAEDRGLFARGALAAARWGQGKGPGLFSMLDVLGLSDF

SEQ ID NO: 96420 - protein, 249 aa, Unknown
  Bacterial polypetide isolated from the Sargasso Sea
MAKIKVGIAGCLGRMGQELIKQILIDKKFIFIGGFEHKAHPKIGKKISDVTDINSSSLITSNALSIFKKANVVIDFTTPQSTLSNVKIASTTKTALVIGTTGITNAQKVKIKNFSKKIPILMSSNMSVGVNLLFDLVRQAASSLHADEYDIEIAETHHKHKVDAPSGTALSLGEYAAAGRKTKLDKTKVLDRTKSLKKRKSGDIGFSVTRGGEIAGEHTVSFISKDDRIDLYHKANNRSIFVSGALKAA

SEQ ID NO: 96421 - protein, 250 aa, Unknown
  Bacterial polypetide isolated from the Sargasso Sea
MKNQLKLTVLGASGRMGSTIIEEVLKSSEIKLHSVSEVTQHQWIGRDLGDILNGKKTGVFVTDDLSEAIKGSDAVIDFTQPNNTVECSKLCSHRGVAHIIGTTGFNKNQENEILDASKKTAIVKAGNMSLGINLLTTLIERVAASLDADFDVEILDIHHRNKLDAPSGTALMLGESVAKGRGEKLTEVMLPIREGITSVRERGKIGFAALRSGGVIGEHEVIFASETEKISIKHEALSRNIFANGALKAA

SEQ ID NO: 96422 - protein, 175 aa, Unknown
  Bacterial polypetide isolated from the Sargasso Sea
MTIKVGVLGASGRMGSEVCRAVIDDLDTSLVSAIDEMNVGENVAGSDVSITDDFSALEDADVIVDFTVADSARENLQRVAKAGIHAVVGTTGLTESDIATLDSLFQDSNCVVASNFAISAVLMMRFAEMAAPHFNNVEIIEYHHNSKIDAPSGTALTTAERISASSSEWDKSSTS

SEQ ID NO: 96423 - protein, 244 aa, Unknown
  Bacterial polypetide isolated from the Sargasso Sea
MIKNSKKTIPVLVSGALGKMGSEVVNSVLNSSDCELVAAIDTNKKNNGENISQLLNLKKSEVFVSNDLEGSLCSISQDYRNEKIKPVLVDFTHPDSVYENTRSAIAYGISPVVGTTGLTPSQINDLAIFAQKANIGCAIIPNFSVGMVLLQQAASVAAKFYDNIELIEMHHNQKADSPSGTCIKTAEMIEEYPKKYNQSLVKETESLKGVRGGLRDSGLNIHSIKIAWAFGSSSSYYGFSWRNL

SEQ ID NO: 96424 - protein, 258 aa, Unknown
  Bacterial polypetide isolated from the Sargasso Sea
MKKINLAISGCMGRMGQQLIKSSKSNKNFKLVALTENRLINKKFNGIKPELNSDKAFKKTDVIIDFTLPKCTLEILKIASKLRKKVVIGTTGFTRAQENQIEKYSKKIAILKAGNMSLGVNLLMYLTEIASKSLSDEYLSKIFEVHHKHKKDYPSGTALMLGKGIADGKNKNLYNLIGKKFLNKKSFPYGRKINFNSIRKGEIIGEHEVKFSSGKEIITLNHEAFDRALYSDGALTASKWLIKKKPGLYSMRDLLNFS

SEQ ID NO: 96425 - protein, 244 aa, Unknown
  Bacterial polypetide isolated from the Sargasso Sea
NNKLEFVGGFEHKKHKNINKEFNKVSEIQSSNLIHSNPTPSIKLANVLIDFTTPQSTLENIKIASLNKTAVVIGTTGISGAQKNKIKILSKKIPILMSSNMSLGVNLLFNLVKQTSSALKETDYDIEIAETHHKHKKDAPSGTALSLGDYAALGRKTSLNKSKILDRTKKLSSRKKGDIGFSVTRGGEIAGEHTVSFIGENDRVDLVHKANNRSIFVKGALDAAIFLSKKKSGFYTMNDLLFNK

SEQ ID NO: 96426 - protein, 138 aa, Unknown
  Bacterial polypetide isolated from the Sargasso Sea
VGMVLLQQAASVAARFYDNIELIEMHHNQKADSPSGTCIKTAEMIEEYPKKFNQNLVKESESLKGVRGGLRDSGINVHSVRLPGLLAHQLVIMGSPGETYTIKHDTIDRKAYMPGVLQAIKKIGNYETLVYGLEKLIF

SEQ ID NO: 96427 - protein, 212 aa, Unknown
  Bacterial polypetide isolated from the Sargasso Sea
CKVDLNSEALFKKVDLIIDFTIPKCTFQVLKIASKLKKKVVIGTTGFTKKEENLIKKFSKKIPILKAGNMSLGINLLMYLTEITSSSLGRNFLSKIFEIHHKHKKDYPSGTALMLGKGIALGKNKNFYNLLGKKYLNKKTFPYGKKINFNSVRKGEIIGEHEVKFSSGKEIITLNHEAFDRALYSEGALTAAKWLINKKPGLYSMRNLMNFK

SEQ ID NO: 96428 - protein, 217 aa, Unknown
  Bacterial polypetide isolated from the Sargasso Sea
KKINGVDLSLNSEKSLKKADLIIDFTTPKCTFEILKISAKLKKRIVIGTTGFTKKEENLIKTFSRKIPILKAGNMSLGINLLMYLTEITSKSLGNNFLSKVFEIHHKHKKDHPSGTALMLGKGIAVGKKKDFYKLMGKTYLNKKSFPYGKKINFNSLRKGEIIGEHEVSFSSGKEIITLNHEAFDRALYSEGALAAAKWLRNKKPGLYSMRDLLNFN

SEQ ID NO: 96429 - protein, 208 aa, Unknown
  Bacterial polypetide isolated from the Sargasso Sea
TDNAEDLFTRADAVIDFTALDATAQHAALAAEHGVILIAATSGLSPDHEAALATAGEKTPVVYAANTAVGVNMLIALVQEAAARLGGADWDAEVIDIHHRHKVDAPSGTSYALASAIKEGRDDPDATLTFERQGHTGQREDGSIGFSVQRGGDDTIENTVTFFGNGERLELTHRATNRAIFAKGAIRAALWAKDKPPALYSMRDVLDI

SEQ ID NO: 96430 - protein, 258 aa, Unknown
  Bacterial polypetide isolated from the Sargasso Sea
MINVSVNGALGRMGSTVCGAVLADPETDLVDSVDYNSKGNQTSNNKTIHSSYEYLSSENKPDVIVDFTNRDGLLDLAKKASPLGIHIVSGSTGLLDKDYQVLKNLADKNSSGILSASNFAIGAVLMMELASIAGKYFEYADLVESHHENKIDAPSGTAISIAEAAASKRQNDFKQNEVEKETIKNTRGGSLGGVQIHSARMPGRVARHELVFGGLGQTFTMLHDSIDRQSFMPGVILGIKEILSRKELVVGLDKIMGI

SEQ ID NO: 96431 - protein, 162 aa, Unknown
  Bacterial polypetide isolated from the Sargasso Sea
PEQLQELASFAAKASMGGAVIPNFSVGMVLLQQAAAAAARFYDHAELVELHHNRKADAPSGTCIKTAELMEELGKQFNAQEVEEHETLEGSRGGLRPGGLRLHSIRLPGLVAHQEVQFGGAGERYVLRHDTFDRAAYMPGVLLTVRKVRQLGALVYGLERLL

SEQ ID NO: 96432 - protein, 244 aa, Unknown
  Bacterial polypetide isolated from the Sargasso Sea
MGQQLIKSAIKDKSINLVTLTENRAINRKISGIKPELNTEKALSKANVIIDFTIPECTFEVLKIATKLKKKVVIGTTGFTKKEENLIKKFSKKIPILKAGNMSLGINLLMYLTEITSASLGNNYQSKVFEIHHKHKKDHPSGTALMLGKGIAVGKNKDFYKMIGKKYLNKKYFPYGKKINFNSIRKGEIIGEHEVTFSSGKEIIKLNHEAFDRALYSDGAITAAKWLINKKPGLYSMRNLLNFK

SEQ ID NO: 96433 - protein, 195 aa, Unknown
  Bacterial polypetide isolated from the Sargasso Sea
IDFTTPQSTLSNVKIAGNTKTALVIGTTGITKAQKNKIKSFSKKTPILMSSNMSIGVNLLFDLVKQAASSLGGNEYDIEIAETHHKHKVDAPSGTALSLGEYAAKGRKTSLDKSKVLDRTKNLKKRKNGDIGFSVTRGGEIAGEHTVSFISKDDRVDLIHKANNRSIFVSGALKAAIFVSKRKSGYFEMKDLLKI

SEQ ID NO: 96434 - protein, 225 aa, Unknown
  Bacterial polypetide isolated from the Sargasso Sea
MKNHFKVSVLGASGRMGSQIIKRVNESPNIDLHCVVEHKGHNWIGQDCGEKLLGKENNIIVTDDLNLAVSSADAVIDFSTPDNSLECLKICTHTNTAHIIGTTGFDASQENNIKGYAEKVVVVKAGNMSLGINILTSLVEKISSSLDSDFDTEILEMHHRNKVDAPSGTALMLGEAAAKGKGKSLSELRGAIREGKFGIRDKGSIGFASLRGGGIVGEHEVLLHQ

SEQ ID NO: 96435 - protein, 268 aa, Unknown
  Bacterial polypetide isolated from the Sargasso Sea
MVKIGVAGVGGRMGIMILKEIENRSDTVIASGLVRSGSSLVGSDLGTIALLASVGVAATDNAKQCFADADVVIDFSLPEAIEEIAEAAIDAKKPWVVGTTGLDEKQEAILRAASHKVPVVFASNMSLGVNLLFALVEQVAGSLDDNYDIEILDFHHNNKVDAPSGTAISLGEAAATGRGINFKSSATLSREGLVGARGRGEIGFSALRGGAVVGEHAVLFASAGERIELHHKASDRGIYAAGAVTASLWVRNKSPGLYSMKNVLGIKS

SEQ ID NO: 96436 - protein, 221 aa, Unknown
  Bacterial polypetide isolated from the Sargasso Sea
MPKVKIAVAGCLGRMGQELSKQILNNKKLEFVGGFEHKKHKHVNKEFKKVSDINSSKIIDSDPALSIKLAKVLIDFTTPQATLENIRIASQNKTAVIIGTTGMTEAQKKKVKSFTKKIPILMSSNMSLGVNLLFNLVQQTSNALKDIDYDIEIAETHHKHKKDAPSGTALSLGEYAAEGRKIALNKSKVLDRTKKLMTRKKGDIGFSVTRGGEIAGEHTVS

SEQ ID NO: 96437 - protein, 220 aa, Unknown
  Bacterial polypetide isolated from the Sargasso Sea
MIENSKKPIPVLVSGALGRMGSEVVKTVLNSTDCELVAAIDINEKNNGSNISELLKVKNCDVFVSNDFEGTLCSVSQNYRNERIKPVLVDFTHPNSVYENTRSAIAYGVLPVVGTTGLTPSQIKDLSVFAQKASIGCAIIPNFSVGMVLLQQAASVAAKFYDNIELIEMHHNQKADSPSGTCIKTAEMIEEYPKKFNKNIVKESESLKGVRGGLRDSGIN

SEQ ID NO: 96438 - protein, 207 aa, Unknown
  Bacterial polypetide isolated from the Sargasso Sea
LNEIISKEQPDVVLDFTHPSVVFSNAKLILTAGKHAVIGTTGLTEVQLTELSQIAEQNNSGLLVCPNFAIGAILMMQFATQAAKYLKEVEIIEYHHPYKADAPSGTAIKTVDMITDQVNDINSAFSDLKQTEHISGSKGGYYKNIPIHSVRLDSYIASQEVLIGGPGQRLTIRHDSIDRMSFMPGVCLAIKKSMDVTGLVYGLENVL

SEQ ID NO: 96439 - protein, 186 aa, Unknown
  Bacterial polypetide isolated from the Sargasso Sea
VYENTRASIAYGVSPVVGTTGLSPSQIQDLSVFAQKASVGCAIIPNFSVGMVLLQQAASVAARFYDNIELIEMHHNQKADSPSGTCIKTAEMIEEYPKKFNQNLVKESESLKGVRGGLRDSGINIHSVRLPGLLAHQLVIMGSPGETYTIKHDTIDRKAYMSGVLQAIKKIGNYETLVYGLEKLIF

SEQ ID NO: 96440 - protein, 142 aa, Unknown
  Bacterial polypetide isolated from the Sargasso Sea
GVNLLFYLTQQAARVLDAQSGFDPEVIEMHHRSKKDAPSGTADRLLEILKDSRKLGPDDVSHGRSGMVGERKDDEIGSHALRGGDVVGEHTVMFAGLGERIELTHRATDRTIFAAGALKAARWAVNQAPGLYSMQDVLGLQA

SEQ ID NO: 96441 - protein, 255 aa, Unknown
  Bacterial polypetide isolated from the Sargasso Sea
INLAISGCMGRMGQQLIKSSKKNKNFKLVTLTENRLINKKFNGVKPELNSEKAFKKTDLIIDFTVPNCTLEILKIASKLRKKVVIGTTGFTRSQESQIKKYSKKIPILKAGNMSLGVNLLMYLTEITSKSLNDEYLSKIFEIHHKHKKDYPSGTALMLGKGIADGKNKNLYNLIGKKFLNKKSFPYGKKINFNSIRRGEIIGEHEVKFSSGKEIITLNHEAFDRALYSDGALTASKWLMKKKPGLYSMRDLLSFS

SEQ ID NO: 96442 - protein, 187 aa, Unknown
  Bacterial polypetide isolated from the Sargasso Sea
MVKIKIAVAGCLGRMGQEISKKIISNKKLEFIGGFEHKKHKHIKKEFKKVSEINSTKLIDSNPILSIKLANVLIDFTTPESTLQNIKIASQNKTAVIVGTTGITETQKKKIISYSKKIPILMSSNMSIGVNLLFNLVRQTAATLEDIDYDIEIAETHHKHKKDAPSGTALSLGEHAAKGRKVLLNKS

SEQ ID NO: 96443 - protein, 185 aa, Unknown
  Bacterial polypetide isolated from the Sargasso Sea
LALARVCSEKGNAMVVGTTGFDDQQTNALEGYSRKTAIFVSPNMSVGVSLSMKLIEIAAKALGDEFDVEVIEAHHKHKIDAPSGTAVRIGEVLATALNRSLASDAVYHRQGITGARDPKAIGFSTIRGGDIVGEHTVLFAGEGERLEITHRATSRNNFAQGALRAVALVANAAPGWYDMDDLLDI

SEQ ID NO: 96444 - protein, 240 aa, Unknown
  Bacterial polypetide isolated from the Sargasso Sea
RRLLFVGGFEHQSHKNLNKKLNQITNIKSNLIVTSNSNEIIKKSDVLIDFTSAVSTIDNVKKAALNKTAIVIGTTGLTESQKNKIKTYSKKTPILMSSNMSLGVNLLFNLVEQAASTLKHEDYDIEIAETHHKHKKDAPSGTAISLGEYAAIGRKTKLKKIQVFDRTKKTTVRKKGEIGFSVTRGGEIAGEHTVSFIGQNDRLDLFHKASNRSIFVSGAIEAAIFISKKKTGFFNMKDLF

SEQ ID NO: 96445 - protein, 196 aa, Unknown
  Bacterial polypetide isolated from the Sargasso Sea
MSQLNIGVSGCSGKMGKTLIELISNRQDCNIVSGLETEKNPDIGKDLGKLIGSENINGKVTFDRKIFFENSDIIIDFSTPLSTLENIKFAKKYGKGLVVGTTGLSEEIEQEIETATKNIPIVYSANMSIGINILLELTNKLSYILNKEDFDIEILEMHHKHKVDAPSGTALALGKAAASGRKIELSKNSEIVRDGI

SEQ ID NO: 96446 - protein, 211 aa, Unknown
  Bacterial polypetide isolated from the Sargasso Sea
KPELNDENAFKKANIIIDFTVPNCTFQVLKIASKLKKKVVIGTTGFTKKEEELIKKYSRKIPILKAGNMSLGINLLMYLTEIASSSLGNNFLSKVYEVHHKHKKDHPSGTALMLGKGIAVGKKKDFYKIIGNKYFNKKTFPYAKKINFNSIRKGETVGEHEVKFSSGKEIITLNHEAFDRALYSEGALTAAKWLMSKKPGLYSMRNVLNFK

SEQ ID NO: 96447 - protein, 266 aa, Unknown
  Bacterial polypetide isolated from the Sargasso Sea
RINIGLPGGGGRMGGMLIREIARADDLHLVATTDRADSLHIGKDAGEVAGLALNGVLIGIDPASLFLEADVVIDFSAPDASMHHAALAAKTGRAMVIGTTGLTSDQEDMLRQAARQVAIVYCANTSVGVTLLTQLVEQVAAQLTIGWDIEILETHHHHKVDAPSGTALSLGKAAARGRQVDLDRVADMVRKGQTGARGEGDIGFAVLRGGDVAGEHSVIFYGESERIEITHRANDRVIFARGALQAARFAAAAEPGFYDMHDVLKG

SEQ ID NO: 96448 - protein, 176 aa, Unknown
  Bacterial polypetide isolated from the Sargasso Sea
KKRVVIGTTGFTKKEENLIKKFSKKIPILKAGNMSLGINLLMYLTEITSSSLDDNYQSKVFEVHHKHKKDHPSGTALMLGKGIAIGKNKDFYKMMGKTYLNKKKFPYGKKINFNSIRKGEIIGEHKVTFSSGKETITLNHEAFDRALYSEGAITAAKWLINKKPGLYSMRNLLNFK

SEQ ID NO: 96449 - protein, 177 aa, Unknown
  Bacterial polypetide isolated from the Sargasso Sea
GSSPHYWAPTGFNENQENEILTFSNKIPIVKAGNMSLGINVLTKLVEKVAKSLDLDFDVEILEMHHRNKVDAPSGTALMLGESVALSRGKKLSDLASYNKEGITGIRERGKIGFASLRGGGVIGEHEVIFTSESEKISIKHEALSRNIFANGALKAAIWAAGRDPGLYGMNDVLGIN

SEQ ID NO: 96450 - protein, 231 aa, Unknown
  Bacterial polypetide isolated from the Sargasso Sea
MSEVRSADPIHVVVAGALGRMGAEVVKAVQGAADCELVGAIDNTPGQEGVDVGEALGLGSLDVAITADLEGCLCSASQAVRDRGPGGGAVMVDFTHPSVVYANTRAAIAYGVHPVIGTTGLSPEQLEDLQSFAHKASVGGAVIPNFSVGMVLLQQAAAAAARFYDHAELTELHHNRKADAPSGTCIKTAELMEELGKAFNPAEVDEHESLAGSRGGVRASGLRLHSLRLPG

SEQ ID NO: 96451 - protein, 249 aa, Unknown
  Bacterial polypetide isolated from the Sargasso Sea
MKKIKVIVTGASGRMGTQIAKRIVQDKSFTLFGATESVGHPLIGKDIGQILKTKKTGILITDNIIELFAKADAVIDFTIPKATLEHAKYSAQARIVHVIGTTGFSKNQLRKIDFAAQHATIIKSGNMSLGINLLESIVKIASSKLDSSFDIKINETHHKHKIDAPSGTAIMLGKAAASGKNKKLENVMKINRTNTIGKNIKNKIVMSSFRKGETIGDHEVMFSSNDETIRIQHIAENRGIFANGALQAV

SEQ ID NO: 96452 - protein, 203 aa, Unknown
  Bacterial polypetide isolated from the Sargasso Sea
MKKIKIVITGVTGRMGMQIAKRVLKDKSLVLYGATERSGHKAIGKDLGQLLKTKKLKIKVTDNIIPLFAKTDAVIDFTTPEATIMHTKYAAQARIVHIIGTTGFNSSQLKKIKLAAQHATIIKSGNMSLGINLINKLIKISSSSLKNDFDTVINETHHRHKVDAPSGTAVMMGQAAAEGKNKNFEKNEKISRLNIKAKSTKDK

SEQ ID NO: 96453 - protein, 258 aa, Unknown
  Bacterial polypetide isolated from the Sargasso Sea
MKKINLAITGCLGRMGQQLIKSSKSNKNFKLVSLTENVKIKRKINGLYPSLNNSEAFKKANVIIDFTVPKCTLEVLKIALKLKKKVVIGTTGFTNKQEKIIKTFARKIPVLKAGNMSLGVNLLMYLTEITSKSLGNNFLSKIYEVHHKNKIDYPSGTALMLGQGIATGKNKNLRNIMGKKYLNKKTFPFSKKINFNSIRKSAVIGEHEVKFSSGKEIITLNHESFDRSLYSEGALIAAKWLNGKKPGLYSMRDLLNFK

SEQ ID NO: 96454 - protein, 216 aa, Unknown
  Bacterial polypetide isolated from the Sargasso Sea
MKKIKVIVTGASGRMGTQILKRIIQDKSFVLFGATESVGHPSLGKDIGQILKTKKTGILITDNIIELFAKADAVIDFTVPTATLEYAKYSAQARIVHVIGTTGFSKSQLRKIDFAAQHATIIKSGNMSLGVNLLESIVKITSSKLDSSFNLKINETHHKHKIDAPSGTAIMLGKAAAAGKNKKLENIMKINRINTIGKYLKDKIVMSSFRKGEIIG

SEQ ID NO: 96455 - protein, 210 aa, Unknown
  Bacterial polypetide isolated from the Sargasso Sea
LQMNSENAFKKANIIIDFTIPECTLEILKIAVRQKKKVVIGTTGFTTKQENLIKKFSRKIPILKAGNMSLGVNLLMYLTEIASKSLGKKFLSKVYEVHHKHKKDYPSGTALMLGKGIAKGKGKEFYSLIGKKYLNKKFFPYGNKINFNSIRKGEVIGEHEVTFSNGKEIVSLNHKSFDRALYSEGALAAAKWLANKKPGLYSMRNLLNFK

SEQ ID NO: 96456 - protein, 257 aa, Unknown
  Bacterial polypetide isolated from the Sargasso Sea
GRMGQEISKKIITNNKLEFVGGFEHKNHKNINKEFNKVSEIRSSNLIHSNPIPSIKLANVLIDFTTPQSTLENIKIASLNKTAVVIGTTGISSAQKNKIKTFSKKIPILMSSNMSLGVNLLFNLVKQTSSALKETDYDIEIAETHHKHKKDAPSGTALTLGDYAALGRKTSLNKSKILDRTQKLSSRKKGDIGFSVTRGGEIAGEHTVSFIGENDRVDLVHKANNRSIFVKGALDAAIFLSKKKSGFYTMNDVLFNK

SEQ ID NO: 96457 - protein, 257 aa, Unknown
  Bacterial polypetide isolated from the Sargasso Sea
MSKIKLTITGCMGKMGKQLTKSSKKDKSFQIVSLTESRLLKKKIGNVIPQINSTESLKNSDVIIDFTIPKCTLEVLKLASKLNKRLVIGTTGFTKKQDLIIKNFSKKIPILKAGNMSLGINLLMYLTEISARSLNDKFKYKIFEVHHKHKKDYPSGTALMLGSGIAKGKRTNLFSLIGKKFLNKKSFPYGTKINFNSLRKGKIIGEHEVKFSSGKEIITLNHEAFDRTLYSEGALLAAKWLMKKKPGLYSMRDLLGF

SEQ ID NO: 96458 - protein, 228 aa, Unknown
  Bacterial polypetide isolated from the Sargasso Sea
MKKIKVIVTGASGRMGTQIAKRIVQDKSFTLFGATESVGHPSIGKDIGQILKTKKTGILITDNIIELFAKADAVIDFTVPKATLEHAKYSAQARIVHVIGTTGFSKSQLRKIDFAAQHATIIKSGNMSLGINLLESIVKIASSKLDSSFDIKINETHHKHKIDAPSGTAIMLGKAAASGKSKKLENIMKINRTNTIGKNIKNKIVMSSFRKGETIGDHEVIFSSNEKR

SEQ ID NO: 96459 - protein, 258 aa, Unknown
  Bacterial polypetide isolated from the Sargasso Sea
MKKINLLVTGCMGRMGQQIIKSVKSDKRFKLVAITENRIINKKIYGIKPSFNSEKIFKDINLIIDFTVPKCTFEVLKIAAKLKKRVVIGTTGFTKKEEDLIKKFSKKIPILKAGNMSLGINLLMYLTEITAATLGKNFLSKIYEIHHKHKKDYPSGTALMLGKGIAHGKNKNFYNLIGNKYLNKKKFPYGKKINFNSVRRGEIIGEHEVKFSSGKEIITLNHEAFDRALYSEGALSAARWLINKKPGLYSMRDLMNFK

SEQ ID NO: 96460 - protein, 262 aa, Unknown
  Bacterial polypetide isolated from the Sargasso Sea
VAGCLGRMGQELSKKIIANNKLEFVGGFEHKKHKNINKKFNKVSDIHSSNLIHSNPTPSIKLANVLIDFTTPQSTLENIKIASLNKTAVVIGTTGITSAQEKKIKSFSKKIPILMSSNMSLGVNLLFNLVKQTSSALIDTDYDIEIAETHHKHKKDAPSGTALSLGDYAALGRQTSLNKLKILDRTKKLSSRKKGDIGFSVTRGGEIAGEHTVSFIGENDRIDLVHKANNRSIFVKGALDAAIFLSKKKSGFYTMNDLLFSK

SEQ ID NO: 96461 - protein, 257 aa, Unknown
  Bacterial polypetide isolated from the Sargasso Sea
RMGREILKLVMKNDEFRLIGALEHENCVEIGQDAIKFIGQNSGITITDNAASISFKSQNNLVLIDFSNPKNTIKMLEICVSKSIGMVIGTTGFSEKELLLLRHASKTIPILFAPNMSLGVNKVFAIVKEAVKHFSDNYDVEIFEAHHRDKLDAPSGTALKMGSIIADALGLNPEDSFCFSRNGRKTNRGHGEIGFSVVRGGDIVGQHKVIFAGNGEQIEITHNSNSRKGYALGALEAARFLSKKNNPGFFGMDDVIS

SEQ ID NO: 96462 - protein, 181 aa, Unknown
  Bacterial polypetide isolated from the Sargasso Sea
MNNIKILVNGFKGRMGIETLKAIEDDPELALVGQTDLGDDLESAIRQTEADAVVDFTTASAAFSNCKAIIQASSRPVIGTSGLLPKQVKELQDLALQKNIGGIIAPNFAIGAVLMMKFASEAARFMPDVEILELHHEKKADAPSGTAIKTAALIAESRNSIPEPIKEKEILTGARGGRANE

SEQ ID NO: 96463 - protein, 201 aa, Unknown
  Bacterial polypetide isolated from the Sargasso Sea
KKANVIIDFTIPKCTLEVLKIASKLKKKVVIGTTGFSKKEENLIKKYSRKIPILKAGNMSLGINLLMYLTEIASKSLGNNFLSKVFEVHHRHKKDHPSGTALMLGKGIAVGKNKDFYKLLGKKYLNKKAFPYSKKINFNSIRKGEIIGNHKVHFSSGKETITLDHEAFDRALYSEGAFTAAKWLLNKKPGLYSMRNVLNFK

SEQ ID NO: 96464 - protein, 74 aa, Unknown
  Bacterial polypetide isolated from the Sargasso Sea
KGSRGGTRASGLRLHSVRLPGLVAHQQVMFGSNGETYELSHNTIDRSAYMPGVLLVVKKIRSFNKLVYGLEKIL

SEQ ID NO: 96465 - protein, 258 aa, Unknown
  Bacterial polypetide isolated from the Sargasso Sea
MKKINLAISGCMGRMGQQLIKSSKKNKNFKLVTLTENRLIKKKFNGIKPELNSDKAFKKTDVIIDFTVPNCTLEILKIASKLRKKVVIGTTGFTRAQENQIKKYSRKIPILKAGNMSLGVNLLMYLTEITSKSLSDEYLSKIFEVHHKHKKDYPSGTALMLGKGIADGKNKNLYNLIGKKFLNKKSFPYGKKINFNSIRKGEIIGEHEVKFSSGKEIITLNHEAFDRALYSDGALTASRWLIKKKPGLYSMRDLLNFS

SEQ ID NO: 96466 - protein, 202 aa, Unknown
  Bacterial polypetide isolated from the Sargasso Sea
LIFKEADVVIDFTTPISTLSNVKVASVTKTALVIGTTGITNTQKAKIKSFSNKLPILMSSNMSIGVNLLFDLVRQTASSLHADEYDIEIAETHHKHKVDAPSGTALSLGEYAAFGRKTKIDKTKVLDRTKSLKKRKNGEIGFSVTRGGEIAGEHTVSFISKDDRIDLHHKANNRSIFVNGALKAAKFISKKKTGYFEMKDLF

SEQ ID NO: 96467 - protein, 181 aa, Unknown
  Bacterial polypetide isolated from the Sargasso Sea
IATKLKKRVVIGTTGFTKKEENLIKKYSKRIPILKAGNMSLGINLLMYLTEIAAKSLGNNFLSKVFEVHHKHKKDYPSGTALMLGKGIAVGKNKDFYKIAGKKYLNKNSFPYSKKINFNSIRKGEIVGNHKVYFSSGKETITLDHEAFDRALYSEGAFTAAKWLMGKKPGLYSMRDVLNFK

SEQ ID NO: 96468 - protein, 226 aa, Unknown
  Bacterial polypetide isolated from the Sargasso Sea
MSKKKIAVSGCLGRMGQELVKQISKDKRLDYIGGFDLKDKKTFLNNIFKKANVVIDFSSPSSIKNNLEMAVNNNSGLVIGTTGLREKELKMLKAASKKIPILVSSNMSLGVNLLFNLVQKTASTLSDMDYDIEIAETHHKHKVDAPSGTALSLGEFAAKGRKINFQKSKVLDRTSKNLKRKKGTIGFSVARGGEIAGEHVVSFIGENDRIDLVHKANNRSIFVRGA

SEQ ID NO: 96469 - protein, 257 aa, Unknown
  Bacterial polypetide isolated from the Sargasso Sea
MKKINLAITGCMGRMGQQFIKSAKSNKSFKLVALTENRIIKKKINGIKPELNTEKAFKNTNVIIDFTVPKCTFEILQIASKLKKRVVIGTTGFTKKEENLIKKYSKKIPILKAGNMSLGINLLMYLTEIASKSLGNNFLSKVFEIHHKHKKDHPSGTALMLGKGIAIGKNKDFYKLLGKKFLNKKYFPYGKKINFNSIRKGEIIGEHEVTFSSGKEIITLNHEAFDRALYSEGAFTAAKWLINKKPGLYSMRDVLNF

SEQ ID NO: 96470 - protein, 258 aa, Unknown
  Bacterial polypetide isolated from the Sargasso Sea
MTKIKIAVAGCLGRMGQELSKKIIANNKLEFVGGFEHKKHKNINKEFNKVSDIQSSNLIHSNPTSSIKIANVLIDFTTPESTLENIKIASLNKTAVVIGTTGISSAQKNKIKSFSKKIPILMSSNMSLGVNLLFNLVKQTSSALKDTDYDIEIAETHHKHKKDAPSGTALSLGDYAALGRKTSLNKAKILDRTKKLSSRKKGEIGFSVTRGGEIAGEHTVSFIGENDRVDLVHKANNRSVFVKGALDAAIFLSKKKSG

SEQ ID NO: 96471 - protein, 220 aa, Unknown
  Bacterial polypetide isolated from the Sargasso Sea
MNICKIGISGCLGRMGQELLKEIYLNPKTIISGCFEHPDNDYIGQPISSIINKFANQDIELPNLNIESKGETTFKNSDVVIDFTTPKSTMQNVHLAEISKTPIVIGTTGLNKENLIIIENVSKVVPIVQSANMSIGVNLLLQITEKASKILSEENYDAEISDTHHRHKIDAPSGTALELGNSIARGRSVSLDEKKILDRTSKKESRKLGDIGFAISRAGE

SEQ ID NO: 96472 - protein, 193 aa, Unknown
  Bacterial polypetide isolated from the Sargasso Sea
HPEASVNHSVLAAQARTVHVIGTTGFSNSQQKKLSLAAQHAPIIRAGNMSLGVNLLTQITKVVAASLDTNFDIEILETHHNKKIDAPSGTALMLGEAAAEGRKTEIPRGINVVKQGLTQERENGSINFSSMRGGDVVGEHSVNFLGAGERIVLSHVATDRMIFARGAVKAALWGFGKEPAEYNMLDVLGLGSS

SEQ ID NO: 96473 - protein, 112 aa, Unknown
  Bacterial polypetide isolated from the Sargasso Sea
HHNRKADAPSGTCIKTAELMEELGKSFNPAEVDEHESLAGSRGGRRESGLRLHSLRLPGLVAHQEVMFGAPGETYTLRHDTIDRSAYMPGVLLTVRKVRSLETLVYGLERLI

SEQ ID NO: 96474 - protein, 249 aa, Unknown
  Bacterial polypetide isolated from the Sargasso Sea
MSTSSRLVVHGAAGRMGQRIIACASTDTHPWKLVSALECPGHPKTGTDAGILAGIEELGVCVSDSWTCPADVVIDFSLPEAVPGIVEACVRAGVPLVVATTGFEPEVSEKIRDASQRIPVLQAPSMSLAVNIAMDLVHRAGSLLHQSGVRADVEIMECHHRHKEDSPSGTALKFGSIVQDAMGQSQSAHGREGRPGARPADEIGYHAVRAGDNPGEHTILFGLDGESLSVAVRATSRDCYAQGALAAAA

SEQ ID NO: 96475 - protein, 156 aa, Unknown
  Bacterial polypetide isolated from the Sargasso Sea
AASFHSVVVRAGNMSLGVNLLVALTKKVAAALDDEFDIEIIEAHHKHKVDAPSGTALMLGEAAADGRGIKLAELADRGRDGITGARNKGSIGFSSIRGGDIIGRHDVLFASNGEQLTLSHNATDRNIFAQGAIKAVLWGIDKQPGQYDMMDVLGLT

SEQ ID NO: 96476 - protein, 178 aa, Unknown
  Bacterial polypetide isolated from the Sargasso Sea
KLKKKVVIGTTGFTRSQENKIKRFSKKIAILKAGNMSLGVNLLMYLTEIASKSLSDEYLSKIFEVHHKYKKDYPSGTALMLGKGIADGKNKNLYNLIGKQFLNKKSFPYGKKINFNSIRKGNIIGEHEVKFSSGKEIITLNHEAFDRALYFDGALTASKWLMKKKPGLYSMRDLLNFS

SEQ ID NO: 96477 - protein, 258 aa, Unknown
  Bacterial polypetide isolated from the Sargasso Sea
MKKINLTITGCMGRMGRQLIKTSKANKNFKIVSLTENRIINKNIMGIRPNLNTENAFKKANVIIDFTVPKCTLEVLKIASKLKKRVVIGTTGFTKREENIIKKYARKIPILKAGNMSLGVNLLMYLAEIASKSLNNNFLSKVFEVHHKNKKDYPSGTALMLGKGIAVGKNKDFYGLIGKKYLNKKSFPYGKKINFNSLRKGSVIGKHEVSFSSGKEIVSLNHEAFDRALFSEGALTAARWIIGKKPGLYSMRNVLNFK

SEQ ID NO: 96478 - protein, 179 aa, Unknown
  Bacterial polypetide isolated from the Sargasso Sea
MTDQIPVVVAGALGRMGAEVIQAVHGAEDCQLVGAIDTCPGREGEDVGLALGLGELEVALTQDFEGALCLASQQHPGAVLVDFTHPKVVYEHTRAAIAYGVTPVIGTTGLSPEQLQELATFAAKASMGGAVIPNFSVGMVLLQQAAAAAARFYDHAELVELHHNRKADAPSGTCIKTAE

SEQ ID NO: 96479 - protein, 258 aa, Unknown
  Bacterial polypetide isolated from the Sargasso Sea
MKKINLAITGCMGRMGQQLIKSSKASKSFKIVAITENKIINKDIMGIRPNVNNENAFKKANVIIDFTVPKCTFEVLKIASKLKKRVVIGTTGFTKKEEDIIKRYSRKIPILKAGNMSLGVNLLMYLTEIASKSLNSNFLTKVFEAHHKNKKDHPSGTALMLGKGIAVGKNKDLYRLMGKKYLNKKSFPYGKKINFNSLRKGSVIGKHEVSFSSGKEIVSLNHEAFDRALFSEGALTAAKWIIGKKPGLYSMRNVLNFK

SEQ ID NO: 96480 - protein, 178 aa, Unknown
  Bacterial polypetide isolated from the Sargasso Sea
MAKIKVGIAGCLGRMGQELTKQILEDKNFTFVGGFEHKAHKKIGKKISDVTNIISEEVVKNNASSIFKIADVVIDFTTPQLTLSNAKIASITKTALVIGTTGITKSQKNKIKSFSKKTPILMSSNMSIGVNLLFDLVKQAASSLQSNEYDIEIAETHHKHKVDAPSGTALSLGECAAA

SEQ ID NO: 96481 - protein, 267 aa, Unknown
  Bacterial polypetide isolated from the Sargasso Sea
MLRLGISGVAGKMGRALVQAIFETKDLRLGAAFESASSPVIGMDAGEFAGVGKLDVKVGELKNGNLSQTDIIIDFSIPEATLALAEICKSQDKGMVIGTTGFKKSQLRYLEECSANIPIFMSPNMSVGVNVLFKLVGMASEAFGEEVDCEIFEAHHSQKIDAPSGTAVRIGEILADSRSVDMKNVGKYGREGLVGKRTQQEIGFSSIRGGDIVGDHTVFFIGEGERVEITHRAQSRVNFAQGAIRAARFLSDKKNGLYDMEQLLELS

SEQ ID NO: 96482 - protein, 230 aa, Unknown
  Bacterial polypetide isolated from the Sargasso Sea
MSKIKVAVAGCLGRMGQEITKKILSNNKLTFIGGFEHADHFNLNKQLNKITDINSSFVVTSNANQIIKKADVVIDFTTPSSTLMNVKKASLNKTAMVIGTTGITESQKNKIKAHSKKIPILLSSNMSVGVNLLFNLVQQTAEALQQTEYDIEISETHHKHKKDAPSGTAISLGEFAAKGRKTNLKKVKIFDRTKKLNSRKKGEIGFSVTRGGEIAGEHTVSFIGESDRID

SEQ ID NO: 96483 - protein, 257 aa, Unknown
  Bacterial polypetide isolated from the Sargasso Sea
MKINLAITGCMGRMGQQIIKSAKSDKNLKLVALTENRTVSKKISGIKPSLNTEQTFKKANLIIDFTVPKCTFEVLKIASKLKKKVVIGTTGFTKREENLIKKYAKKIPILKAGNMSLGINLLMYLTEIASKSLGNNFLSKVFEIHHKHKKDHPSGTALMLGKGIAVGKNKDLYKLMGKKYLNKKTFPYGKKINFNSMRKGEVVGEHEVTFSSGKEIITLNHEAFDRALYSEGALTAGKWLMKKKPGLYSMRDVLNFK

SEQ ID NO: 96484 - protein, 255 aa, Unknown
  Bacterial polypetide isolated from the Sargasso Sea
MAIKVGVLGASGRMGSEVCRAVVNDLDTSLVSAIDEMNVGENVAGSDVSITDDFSALEDADVIVDFTVADSARRNLQRVAKAGIHAVVGTTGLTESDITTLGSLFKDSNCVVASNFAISAVLMMRFSEMAAPHFNNVEIIEYHHNSKIDAPSGTALTTAERISASSTEWDESSTSNFILGGARGGITEGGIPIHSVRMEGMVAHQDVIFGTEGQTLTIRQDSYDRSSFMPGVLLAVKKVRDFPGVTLGLEALLNL

SEQ ID NO: 96485 - protein, 143 aa, Unknown
  Bacterial polypetide isolated from the Sargasso Sea
MSTVGILGANGRMGRALVSVAKEHQLPITAATVRAGSALTGMDAGELAGCGKLNLPFIETSVAALDSADIWIDFTMPDAMLQHLELAVQAKKALVIGVTGLTDSQYAAVQQAAQSIPIVWAPNMSVGVNLLLHLVETAAKVMG

SEQ ID NO: 96486 - protein, 230 aa, Unknown
  Bacterial polypetide isolated from the Sargasso Sea
FKLTTLTENRLIKKKISGIKPCLNNVDSFKNVDLIIDFTVPNCTFEILEIASKLKKRVVIGTTGFTKKEESLIKKFSKKIPILKAGNMSLGINLLMYLTEIASKSLGNNFLSKVYEVHHKHKIDHPSGTALMLGKGIAIGKNKDFYNLLGKKYLNKKKFPYGKKINFNSIRKGKTVGEHEVKFSSGKEIITLNHEAFDRALYSEGALTAGKWLMKKKPGLYSMRDVLNFK

SEQ ID NO: 96487 - protein, 268 aa, Unknown
  Bacterial polypetide isolated from the Sargasso Sea
MKKIKVIVTGASGRMGTQIAKRIVQDESFTLFGATESIGHPLIGKDIGQILKTKKTGILITDNIIELFAKADAVIDFTVPKATLEHAKYSAQARIVHVVGTTGFSKSQLRKIDFAAQHATIIKSGNMSLGINLLESIVKIASSKLDSSFDIKINETHHKHKIDAPSGTAIMLGKAAASGKSKKLENIMKINRTNTIGKNIKNKIVMSSFRKGETIGDHEVIFSSNDETIRIQHIAENRGIFANGALQAVKWGMDKGPGLFSMTDVLNI

SEQ ID NO: 96488 - protein, 258 aa, Unknown
  Bacterial polypetide isolated from the Sargasso Sea
MKKINLAITGCLGRMGQQLIKSVKDDKNFKLVAITESKKRNKKINGVKIDVNTEQTFKKVHLIIDFTVPKCTFQILRIATKLKKRVVIGTTGFTKKEENLIKKFSKKIPILKAGNMSLGINLLMYLTEVASSSLGKNFLSKIYEIHHKHKKDYPSGTALMLGRGIAVGKKKNFYSLFGKKYLNKKNFPYGSKINFNSVRKGEIIGEHEVKFSSGKEIITLKHEAFDRALYSEGALSAAKWLMSKKPGLYSMRDLMNFK

SEQ ID NO: 96489 - protein, 267 aa, Unknown
  Bacterial polypetide isolated from the Sargasso Sea
MTKIKIAVAGCLGRMGQELSKKIIANNKLEFVGGFEHKKHKNINKEFNKVSDIQSSKLIHSNPTPSIKLANVLIDFTTPQSSLENIKIASLNKTAVVIGTTGISVAQKNKIKNFAKKIPILMSSNMSLGVNLLFNLVKQTSSALKEADYDIEIAETHHKHKKDAPSGTALSLGDYAALGRKTSLNKSKILDRTKKLSLRKKGDIGFSVTRGGEIAGEHTVSFIGENDRVDLVHKANNRSIFVKGALDAAIFLSKKKSGFYTMNDLLF

SEQ ID NO: 96490 - protein, 228 aa, Unknown
  Bacterial polypetide isolated from the Sargasso Sea
MKKIKVVITGVTGRMGMQIAKRVLRDKSLILYGATERNGHKAIGKDLGRLLKTKELKIKVTDNIIPLFAKTDAVIDFTTPEATMVHTKYAAQARIIHIIGTTGFNSSQLKKIKLAAQHATIIKSGNMSLGINLINKLIKISSTSLRNDFDMIINETHHRHKIDAPSGTAVMMGQAAAEGKNKNFENIKKISRLNTKARSTKDKIVVSSFRKGEVIGDHEIFFRVRMRI

SEQ ID NO: 96491 - protein, 258 aa, Unknown
  Bacterial polypetide isolated from the Sargasso Sea
MSKVNLAISGCMGRMGQQLVKSSRIDKYFKLTTLTENRLIKKKISGIKPSLNNEDSFKNVDLIIDFTVPNCTFEILKIASKLKKKVVIGTTGFTKKEESLIKTFSKKIPILKAGNMSLGINLLMYLTEIASKSLGNNFLSKIYDVHHKHKIDYPSGTALMLGKGIAIGKNKDFYNLFGKRYLNKKSFPYGKKINFNSIRKGKTVGEHEVKFSSGKEIITLNHEAFDRALYSEGALTAGKWLMKKKPGLYSMRDVLNFK

SEQ ID NO: 96492 - protein, 202 aa, Unknown
  Bacterial polypetide isolated from the Sargasso Sea
LNSEVIIDFTSPEATINHAEIASKNNVAHVIGTTGLSEKDEKLLSELSLLTQIFYSANMSLGVNLLIELINNSVSKLGNDWDIEIIEMHHKQKVDAPSGTALALGKEIAKLLNKNLNDIAVYSREGRIGPRKDGEIGFAVLRGGSVVGDHTVILSNGDERIELCHKAGNRSIFANGAIKAAIWIVKQKPGLYSMKNIFQKNS

SEQ ID NO: 96493 - protein, 258 aa, Unknown
  Bacterial polypetide isolated from the Sargasso Sea
MKKINLAITGCLGRMGQQFIKSAKSDKNFKLLALTENRIINKKISGIKPELNTEKAFKNTNVIIDFTVPKCTFEVLKIASKLKKRIVIGTTGFTKKEETLIKKYSKKIPILKAGNMSVGINLLMYLTEIASKSLGNNFLSKVFEVHHKHKKDHPSGTALMLGKGIAIGKNKDLYKLLGNKYLNKKSFPYGKKINFNSIRKGEIIGEHEVKFSSGKEVITLNHEAFDRALYSEGAFTAAKWLMNKKPGLYSMRDVLNFK

SEQ ID NO: 96494 - protein, 268 aa, Unknown
  Bacterial polypetide isolated from the Sargasso Sea
MTIKIGICGAAGRMGKTILEVCKNIKDVKICAAIEHPDSPYIGHDAGEVAGIGNLGVQITDSISSSSNKVDVFIDFTLADSVIQNINECESLGCSMVIGTTGLNDEAKARIQSAAKNISIVFAPNMSIGVNLCFRLLEVAASTIGKDADVEIVEAHHRDKKDAPSGTAIRMGEIIASTTDRDLKDCAIYGREGTSESRDKNSIGFETIRAGDIIGDHTVIFATTGERIEISHKATSRKNFANGAVRAALWLADKDKGLFDMQDVISLK

SEQ ID NO: 96495 - protein, 249 aa, Unknown
  Bacterial polypetide isolated from the Sargasso Sea
MIENSKKPIPVLVSGALGRMGSEVVNTVLNSTDCELVAAIDINEKNNGSNISELLKVKDCDVFVSNDFEGTLCSVSQNYRNENIKPVLVDFTHPDSVYENTRSAIAYGVSPVVGTTGLSPSQIQDLSVFAQKASVGCAIIPNFSVGMVLLQQAASVAARFYDNIELIEMHHNQKADSPSGTCIKTAEMIEEYPKKFNQNLVKESESLTGVRGGLRDSGINIHSVRLPGLLAHQLVIMGSPGETYTIKHD

SEQ ID NO: 96496 - protein, 156 aa, Unknown
  Bacterial polypetide isolated from the Sargasso Sea
LRFKQTSNSTKVFYAPNMSYGVNTFFEIARKAAKHLKDFDIEIIETHHRHKKDAPSGTALKLGEEIVAELGLSKSNFNFKRQDQEGQRKENEIGFSSIRGGNIPGEHTVIFHGDNESVELTHKAHNRKIFSDGAIQAAVWLSSKEKGFYTFKDMIS

SEQ ID NO: 96497 - protein, 187 aa, Unknown
  Bacterial polypetide isolated from the Sargasso Sea
FRGIAEACIQRGVPLVVATTGLEPDDEAAITEAAKTVPVLISPSMSLAVNIAMDLVGRAGRLLRGVGSRADVEIIECHHHHKEDAPSGTALKFGHIIKDAMGQSRETHGREGRPGARPEDEVGYHAVRSGDNPGEHTILFGLEGESLSVNVRATNRDSYARGALAAAAFLVGKPAGRYDMNDVLGIS

SEQ ID NO: 96498 - protein, 198 aa, Unknown
  Bacterial polypetide isolated from the Sargasso Sea
MVIGIAGRMGTTIAECIEDTDGIELGGGTECVGSDLISQDVGKVIGSDNKGVLIVDDPASALQSCDVAIDFTTPASSMFTLKAAAKSGKPVVVGTTGFSAEQKKEIAGLAQKIPLVVAPNMSIGVNVLFKLVADAARVLGDDYDVEIVEAHHKFKKDAPSGTAVRISEIVADSLGRNLDEVGVYGRPGHHGAHVKGNW

SEQ ID NO: 96499 - protein, 269 aa, Unknown
  Bacterial polypetide isolated from the Sargasso Sea
MKKIKIVITGVTGRMGMQIAKRVLKDKSLVLYGATERSGHKAIGKDLGQLLKTKKLKIKVTDNIIPLFAKTDAVIDFTTPEATMIHTKYAAQARIVHIIGTTGFNSSQLKKIKLAAQHATIIKSGNMSLGINLINKLIKISSSSLKNDFDTIINETHHRHKIDAPSGTAVMMGQAAAEGKNKKFENVKKISRLNIKAKSTKDKIVVSSFRKGEVIGDHEIIFSSRDEDITIKHTAKDRGIFANGAIQAVKWGMNKKPGLFDMSDVLNIS

SEQ ID NO: 96500 - protein, 181 aa, Unknown
  Bacterial polypetide isolated from the Sargasso Sea
KKYRKGLVIGTTGLSQEIEKAIETATKNVPIVYSANMSIGINILLELTNKLSNILSEEDFDIEILEMHHKHKVDAPSGTALALGNAAANGREIELKKHSEIVRNGINTKRTVGNIGFASLRGGSVTGDHSVLFASDHEIIELKHKADNRSLFAAGAIKAAIWLSDKENGLYSMKDVLNLKI

SEQ ID NO: 96501 - protein, 111 aa, Unknown
  Bacterial polypetide isolated from the Sargasso Sea
HNRKADAPSGTCIKTAEMMEELGKSFNPYEVDEHESLEGSRGGCRESGLRMHSLRLPGLVAHQEVMFGAAGETYTLRHDTIDRSAYMPGVLLTVRKVRSLEALVYGLERLI

SEQ ID NO: 96502 - protein, 282 aa, Unknown
  Bacterial polypetide isolated from the Sargasso Sea
MIENSKKPIPVLVSGALGRMGSEVVNTVLNSTDCELVAAIDINDKNNGSNISELLKVKDCDVFVSNDFEGTLCSVSQNYRNEDIKPVMVDFTHPDSVYENTRSAIAYGVSPVVGTTGLSPSQIQDLSVFAQKASIGCAIIPNFSVGMVLLQQAASVAARFYDNIELIEMHHNQKADSPSGTCIKTAEMIEEYPKKFNQNLVKESETLKGVRGGLRDSGINIHSVRLPGLLAHQIVIMGSPGETYTIKHDTIDRKAYMPGVLEAIKKIGNYETLVYGLEKLIF

SEQ ID NO: 96503 - protein, 149 aa, Unknown
  Bacterial polypetide isolated from the Sargasso Sea
VWAPNMSVGVNITLRLLELAAGAFGDDVDVEIIEAHHRHKVDAPSGTALKMGEVVAETLGRTLDEHGVFARQGHTGPRTDKEIGFSTIRASDVIGEHSVWFAGAKERVEITHKASGREIYANGALRCAQWLMEKSSGLFDMQDVLGLKS

SEQ ID NO: 96504 - protein, 164 aa, Unknown
  Bacterial polypetide isolated from the Sargasso Sea
MQRIAVMGAAGRMGKTLIEAVQLVDGASLSAAIDRADSSLVGADVGELVAQGKIGVNLSGDLNAVLDQFDVLIDFTHPSVTLKNLEICRQAGKSMVIGTTGFSPEEKQQLAEAGKQISIVFAANFSVGVNLCLKLLDTAARVLGDDVDMEIIEAHHRHKVDAPS

SEQ ID NO: 96505 - protein, 197 aa, Unknown
  Bacterial polypetide isolated from the Sargasso Sea
PVLVDFTHPDSVYENTRSAIAYGVSPVVGTTGLSPSQIKDLSVFAQKASVGCAIIPNFSVGMVLLQQAASVAARFYDNIELIEMHHNQKADSPSGTCIKTAEMIEEYPKKFNQNLVKESESLKGVRGGLRDSGINIHSVRLPGLLAHQLVIMGSPGETYTIKHDTIDRKAYMPGVLQAIKKIGNYETLVYGLEKLIF

SEQ ID NO: 96506 - protein, 250 aa, Unknown
  Bacterial polypetide isolated from the Sargasso Sea
AALQMKGVALGAALEREGSSLLGSDAGELAGVGKTGVTVQSSLEAVKGDFDVFIDFTRPEGTLNHLAFCRQHGKGMVIGTTGFDDAGKQAIRDAAQDIGIVFAANFSVGVNVMLKLLEKAAKVMGDYTDIEIIEAHHRHKVDAPSGTALAMGEAIAHALDKDLKECAVYSREGYTGERVPGTIGFATVRAGDIVGEHTAMFADIGERVEITHKASSRMTFANGAVRSALWVSAKQNGLFDMRDVLDLNNL

SEQ ID NO: 96507 - protein, 172 aa, Unknown
  Bacterial polypetide isolated from the Sargasso Sea
PVVGTTGLSPSQIQDLSVFAQKASVGCAIIPNFSVGMVLLQQAASVAARFYDNIELIEMHHNQKADSPSGTCIKTAEMIEEYPKKFNQNLVNESESLKGVRGGLRDSGINIHSVRLPGLLAHQLVIMGSPGETYTIKHDTIDRKAYMPGVLQAIKKIGNYETLVYGLEKLIF

SEQ ID NO: 96508 - protein, 194 aa, Unknown
  Bacterial polypetide isolated from the Sargasso Sea
MSKIKVGIAGCLGKMGQELTKQILDDRNFIFVGGFENKNHPKIGKKISDVTDIRSNTIVTNNAVSVFKAANVVIDFTTPQSTLSNVKIASTTKTALVIGTTGITANQKNKIKSFSKNIPILMSSNMSVGVNLLFDLVRQAASSLHYDEYDIEIAETHHKHKVDAPSGTALSLGEYAAAGRRTKLDKNKVLDRTK

SEQ ID NO: 96509 - protein, 75 aa, Unknown
  Bacterial polypetide isolated from the Sargasso Sea
ERDRSAIGFATVRAGDIVGDHTVTFAGRGERIEITHKASSRMTFANGAVRAATWIVSKKTGIYSMRDILNSTSKG

SEQ ID NO: 96510 - protein, 100 aa, Unknown
  Bacterial polypetide isolated from the Sargasso Sea
RMGEVVADALGRDLAKVAVYGREGQTGARDPQTIGFATVRAGDVVGDHTVLFATEGERVEITHKASSRMTFAKGAVRSAMWLAGRDRGLFDMQDVLGLKD

SEQ ID NO: 96511 - protein, 195 aa, Unknown
  Bacterial polypetide isolated from the Sargasso Sea
KLIDFTSPESTMANVELCQKHGKGIVIGTTGLTDEQKSKLKAAAADTRIVFAPNYSVGVNLCLNLLRMAAKVMGEDSDIEVIEMHHRHKVDAPSGTALRMGEVVAETMGWDLNEVACYGREGQTGARPHKQIGFETIRGGDVVGDHTVMFATEGERVEVTHKAQSRMTFAKGAVRAAKWLTEQPAGLYDMQDVLG

SEQ ID NO: 96512 - protein, 261 aa, Unknown
  Bacterial polypetide isolated from the Sargasso Sea
MHDAQIRVAIAGAGGRMGRQLIQATLGMEGVQLGAALEREGSSLLGSDAGELAGAGKTGVTVQSSLEAVKDDFDVFIDFTRPEGTLTHLAFCRQHGKGMVIGTTGFDDAGKQAIRDAAQEIAIVFAANFSVGVNVMLKLLEKAAKVMGDYTDIEIIEAHHRHKVDAPSGTALAMGEAIAGALDKDLKDCAVYSREGYTGERVPGTIGFATVRAGDIVGEHTAMFADIGERIEITHKASSRMTFANGAVRSAIWLKSKSNGL

SEQ ID NO: 96513 - protein, 192 aa, Unknown
  Bacterial polypetide isolated from the Sargasso Sea
TAPEASIVHLDWCVRHKKAMVIGTTGFNHAQKEQINAFAEQTPVVMAPNMSVGVNLMWKLLELAAEVMGDYTDIEIIEGHHRYKKDAPSGTALKMGEVIAKTLGRDLEKCAVYGREGITGERDRETIGFATIRAGDLVGEHTAMFADIGERLEITHKASSRMTFANGAMRAAHWLVEQKPGLYDMQQVLGLN

SEQ ID NO: 96514 - protein, 181 aa, Unknown
  Bacterial polypetide isolated from the Sargasso Sea
LAIKNKTRTWVIGTTGLSSDQEQTIRKNSLKAPIVYAANMSVGVNLLIALIEKAVKSIDYDWDIEILEMHHRHKVDAPSGTALTLGKTAAKVRDDHFEKVSKLSREGRVGERIKKEIGFATLRGGSVVGDHTMVLAHDDERIELTHKATNRKIYANGAVKAAIWCATKQTGLFNMKEVLKL

SEQ ID NO: 96515 - protein, 247 aa, Unknown
  Bacterial polypetide isolated from the Sargasso Sea
MTVRVGVMGPGGRMGRMLVEAITEGEASSTLAAAVDRPGSSLVGTDVGQSLGAGALGVRVADDLSAIIGDIDVLIDFTLPEATLAHAQTCAEHDVPMVIGTTGFTDDQSASLHSITTGLAVCQSSNFAPGVNLTFQLVEVAARALGDSVDVEIVEAHHRHKIDAPSGTALSLGEAVARARGTDLSDVAVHAREGRTGARPQNAIGFSSIRAGDIVGDHSVIFVGDGERLEITHRAGSRLAFAHGALT

SEQ ID NO: 96516 - protein, 92 aa, Unknown
  Bacterial polypetide isolated from the Sargasso Sea
KTLGRDLEKCAVYGREGITGERDRETIGFATVRAGDLVGEHTAMFADIGERLEITHKASSRMTFANGAMRAAYWLVEQKPGLYDMQQVLGLN

SEQ ID NO: 96517 - protein, 269 aa, Unknown
  Bacterial polypetide isolated from the Sargasso Sea
MSENIRVVVTGVSGRMGQMIVSGVLSSTKTRLVGALEREGHDWIGKDLGLVSGLNPLGVEVSDDPALVFKNADAIVDFSAPKASVEFSKLAAERGIVHVIGTTGFNDQELALIENSGKKAKIIRAGNMSLGVNLLVQLTKKVAATLDNDFDIEIIETHHNKKVDAPSGTALMLGNAAADGRQISLSNVRDSGRDGITGARNRGDIGFVSIRGGDVVGEHDVLFAAAGERITLRHVATDRAIFVRGALKAVEWGIQQEPGQYSMKDVLDL

SEQ ID NO: 96518 - protein, 283 aa, Unknown
  Bacterial polypetide isolated from the Sargasso Sea
MPAIVGICRVYPFRTLVAMKIAIAGASGRMGRMLIETVLNDSGATLSGALDRADSPQLGQDAGAFLGKQTGVLLTDDVERVFAESDYLIDFTRPEGTLMHLEAAQRHNVKMVIGTTGFDNGQKAQLRDAADKIAIMFSSNMSVGVNVTLKLLEYAAKHFATGYDIEIIEAHHRHKVDAPSGTALTMGEVIAHALGRNLDDCAVYSREGVTGERDPSTIGFSAIRGGDIVGDHTVLFAGIGERIEITHKSASRLSYAQGALRAVRFLEGHKTGFFDMQDVLGLR

SEQ ID NO: 96519 - protein, 270 aa, Unknown
  Bacterial polypetide isolated from the Sargasso Sea
MSKKIVKISIAGSAGRMGKMLVNAVDKHVECELVAATCHPSEEGVIGKDAGLISGINENEIVISDDPKELLKGEVIIDFTTPESTVQNSNLAAENKIGLVIGTTGLSKEQENIIKKNSQLSPIIYSSNMSIGVNLLFSLIDKAVKSIDNNWDIEVLEMHHRHKVDAPSGTALSMGKVAAASREYQFEKIKKLSREGKVGQRSNEEIGFATLRGGSVVGDHTMILAHEDERIELTHKATNRKIYANGAVKAAIWCSDKQKGLFSMKQVLGL

SEQ ID NO: 96520 - protein, 265 aa, Unknown
  Bacterial polypetide isolated from the Sargasso Sea
MKIAIAGASGRMGRMLIEAVLNDADAQLVGALDRADSPFLGQDAGAFLGKETGVKLTADLDAVFAQADTLIDFTRPEGTMAHIEAALRHDVKLVIGTTGFTAEQKAELQAAAGKIGIVFAANMSVGVNVTLKLLEFAAKHFSHGYDIEIIEAHHRHKVDAPSGTALMMGEAVAGALGRSLDECAVYGRHGVTGERDPSSIGFAAVRGGDIVGDHTVLFAGIGERIEITHKSSSRVSYAQGALRAVHFLSARGAGLFDMQDVLGLR

SEQ ID NO: 96521 - protein, 267 aa, Unknown
  Bacterial polypetide isolated from the Sargasso Sea
MQRIAVMGAAGRMGKTLIEAVSQAEGAKLSAAIDRADSSLIGADAGELVGLGKIGVTLAGDLAAVVDDFDVLIDFTHPSVTLKNLEVCRQAGKAMVIGTTGFTVEEKQQLSEAAKQIPIVFAANFSVGVNLCLKLLDTAARVLGDDVDIEIIEAHHRHKVDAPSGTALRMGEVVADALGRDLQKVAVYGREGQTGARERETIGFATVRAGDVVGDHTVLFAADGERVEITHKASSRMTFAKGAVRSALWLQGRDAALYDMQDVLGLR

SEQ ID NO: 96522 - protein, 282 aa, Unknown
  Bacterial polypetide isolated from the Sargasso Sea
MIENSKKPIPVLVSGALGRMGSEVINTVLNSTDCELVAAIDTNEKNNGSNISELLKVKNCDVFVSNDFEGTLCSISQNYRNEKIKPVLVDFTHPDSVYENTRSAIAYGVSPVVGTTGLSPSQIQDLSVFAQKASVGCAIIPNFSVGMVLLQQAASVAAKFYDNIELIEMHHNQKADSPSGTCIKTAEMIEEYPKKFNHNLVKESESLKGVRGGLRDSGINIHSVRLPGLLAHQLVIMGSPGETYTIKHDTIDRKAYMPGVLQAIKKIGNYETLVYGLEKLIF

SEQ ID NO: 96523 - protein, 281 aa, Unknown
  Bacterial polypetide isolated from the Sargasso Sea
MEVMNRFEEIEMGGQVRVAIVGAGGRMGRTLIESAYHQEHIRLGAAIERPGSSLVGVDAGELVGVGKLNVIIMDSLDYATDDFDVLIDFTAPEASIVHLDWCVRHKKAMVIGTTGFNHAQKEQINAFAEQTPVVMAPNMSVGVNLMWKLLELAAEVMGDYTDIEIIEGHHRYKKDAPSGTALKMGEVIAKTLGRDLEKCAVYGREGITGERDRETIGFATVRAGDLVGEHTAMFADIGERLEITHKASSRMTFANGAMRAAYWLVEQKPGLYDMQQVLGLN

SEQ ID NO: 96524 - protein, 282 aa, Unknown
  Bacterial polypetide isolated from the Sargasso Sea
MIENSKKTIPVLVSGALGRMGSEVVNTVLNSADCELVAAIDINKKNNGSNISELLNVENCDVFVSNDFEGTLCSVSQNYRNEKIKPVLVDFTHPDSVYENTRSAIAYGVSPVVGTTGLSPSQIQDLSVFAQKASVGCAIIPNFSVGMVLLQQAASVAARFYDNIELIEMHHNQKADSPSGTCIKTAEMIEEYPKKFNQNLVKESESLKGVRGGLRDSGINIHSVRLPGLLAHQLVIMGSPGETYTIKHDTIDRKAYMPGVLQAIKKIGNYETLVYGLEKLIF

SEQ ID NO: 96525 - protein, 187 aa, Unknown
  Bacterial polypetide isolated from the Sargasso Sea
MSKKTVKISIAGSAGRMGKMLVNVVDQHVECELVAATCHPSEVDVIGKDSGLISGINKNNIFISDNPKELLEGEVIIDFTTPESTVHNSNLASENKIGLVIGTTGLSKEQENIIEKNSQLSPIIYSSNMSVGVNLLFSLIDKAVRSIDNNWDIEVLEMHHRHKVDAPSGTALSMGKVAAASREYQFE

SEQ ID NO: 96526 - protein, 244 aa, Unknown
  Bacterial polypetide isolated from the Sargasso Sea
MNNIKILVNGSKGRMGIETLKAIEDDPELALVGQTDLGDDFESAIRQTEADAVVDFTTASAAFSNCKAIIQSSSRPVIGTSGLLPEQVKELQDLARQKNIGGIIAPNFAIGAVLMMKFASEAAKFMPDVEIIELHHEKKADAPSGTAIKTAALIAESRNRVPEAIEEKEILTGARGAWANEVSVHSVRLPGKVAHQEVIFGGKSQTLTIRHDSIHRDSFMPGVCLACKKVMDLDELVYGLEHVL

SEQ ID NO: 96527 - protein, 277 aa, Unknown
  Bacterial polypetide isolated from the Sargasso Sea
MPPSIPVVVAGALGRMGAEVIKAVVGSADCTLVGAIDNTAGKEGSDIGLELGLGELEVAVTADFEGCLCAVSQSVRDEEAGAVLVDFTHPSVVYEHTRAAFAYGVHPVIGTTGLSPEQLSDLCKFAAKASIGGAVIPNFSVGMVLLQQAAAAAARFYDHAELTELHHNRKADAPSGTCIKTAELMEELGKSFNPAEVDEHESLAGSRGGRRESGLRLHSLRLPGLVAHQEVMFGAPGETYTLRHDTIDRSAYMPGVLLTVRKVRSLQTLVYGLERLI

SEQ ID NO: 96528 - protein, 267 aa, Unknown
  Bacterial polypetide isolated from the Sargasso Sea
MKVGLFGANGRMGRVLVEALDLSDDAQLSVATVRDDSPWVGLNVGELAGIGKKDVDCTALSDLSGNDADVMIDFTLPSVIESNLTWCVKNKMPVVIGTTGLNDSQLAALDEAAKHIPIVFAANYSVGVNLMLSLVRQAASVLGETADIEITEAHHRFKQDAPSGTAMAIGEAIADELGRDLKTCAVYGREGKEPERDQGTIGFATIRAGDIVGEHTALFADIGERLEITHKASSRLTFAKGAVHAAKWLYGKEPGLYSMVDVLDLKL

SEQ ID NO: 96529 - protein, 244 aa, Unknown
  Bacterial polypetide isolated from the Sargasso Sea
MNNIKILVNGSQGRMGIETLKAIEDDPELVLVGQTDLGDDLESAIRQTEADAVVDFTTASAAFSNCKAIIQASSRPVIGTSGLLPEQVKELQDLAHQKNIGGIIAPNFAIGAVLMMKFASEAAKFMPDVEILELHHEKKADAPSGTAIKTAALIAESRNSVPEAIEEKEILTGARGGRANEVPVHSIRLPGKVAHQEVIFGGKSQTLTIRHDSIHRDSFMPGVCLACKKVMDLDELVYGLEHVL

SEQ ID NO: 96530 - protein, 190 aa, Unknown
  Bacterial polypetide isolated from the Sargasso Sea
NGVVILGTVTANSKELGGKIPIPAPADLGDLSGFEAGFKEPVAMASGKPFKPGKAYKDSKLCNMITTQELHRRLHGDTGITFASLYPGCVADTPLFRNTPKAFQTIFPWFQKNITGGYVTQALAGERVALVVSDPDFAESGVHWSWGNRQKKDGQQFSQELSDKATDPDTASRVWELSLQLVGLSSVETQ

SEQ ID NO: 96531 - protein, 242 aa, Unknown
  Bacterial polypetide isolated from the Sargasso Sea
MGTPGTVLITGTTSGVGLNATKALVERGWTVITANRSPQRAAGAADEMEIPKDRLQHVLMDLGDLDSVRSAVEKLPGGVDALVCNAAVYKPKLKQPERSPQGYEISMATNHFGHFLLVQLLLDRIRASSHPSRRVVILGTVTANSKELGGKIPIPAPADLGDLSGFEAGFLEPISMASGKPFKPGKAYKDSKLCNMITTQELHRRLHGETGITFTSLYPGCVADTPLFRNTPKAFQTIFPWF

SEQ ID NO: 96532 - protein, 229 aa, Unknown
  Bacterial polypetide isolated from the Sargasso Sea
LSGTTGTGSLEAVGIDLADLSSIKKFVDDVAYESFSAIVLNAGVAPDRAAMGMAAGPQTAKRTKQGFEETIGVNHLGHFLLCQGLLPKLLSTAGARKRIVITSGEIHNAESPDGRNGAVPTLGDLSGLELGPDFEMCDGGDFDGNKAYKDSKLCGVLFARELARRLRESLGDDADVVCNVFSPGFVPTSGLFRNQSAPVQALLKFAFNYPPLATSLETAGMFTTHMVLG

SEQ ID NO: 96533 - protein, 316 aa, Unknown
  Bacterial polypetide isolated from the Sargasso Sea
MSTPGTALITGTTSGVGLNATCALVKRGWTVITANRSPQRAAAAADEMDLPKERLQHVLMDLGDLDSVRRAVDALPDRLDAVVCNAAVYKPKLKQPERSPQGYEISMATNHFGHFLLVQLLLGRLQNSSHLSRRVVILGTVTANSKELGGKIPIPAPADLGDLSGFEAGFKEPIAMASGKPFKPGKAYKDSKLCNMITTQELHRRLHGESGITFTSLYPGCVADTPLFRNTPKAFQTIFPWFQKNITGGYVSQALAGERVADVVAHPDFAESGVHWSWGNRQKKDGQQFSQELSDKATDPDTARRVWDLSMQLVGL

SEQ ID NO: 96534 - protein, 171 aa, Unknown
  Bacterial polypetide isolated from the Sargasso Sea
MSAPGTVLITGTTSGVGLNATCALVKRGWTVITANRSQERAAAAADALDLPKDRLQHVLMDLGDLDGVRRAVDALPDRLDAVVCNAAVYKPKLKQPERSPQGYEISMATNHLGHFLLVQLLMGRLQNSSHPSRRVVILGTVTANSKELGGKIPIPAPADLGDLSGFEAGFP

SEQ ID NO: 96535 - protein, 362 aa, Unknown
  Bacterial polypetide isolated from the Sargasso Sea
MEIFIGSNVNWNKCWGELIIEELVRHDTECFCISPGSRSTPLTYAVATNPKANAVVCYDERAAAYYALGHARATGLPAVLICTSGTATANYLPAVIEASVEQIPLLLMTADRPPELTDTGANQAVNQTNLFGKYARWFFDPGCPGPEYSAEALLTTINHAIFKTHFPLSGPVHLNFPFREPFLDDNSGEKIQYKTSIEKIPYVRNSIPRKILPDNEIKELINNRPETGILSIGRVPRDSLDSVRILADELDWPVFADITSGLRLGKNCPNRITYYDQLLHEELETANWATEAIWHIGFPPTSKRWLTFWEQKPVPQMVWIADNSERQDQSNQFRCKIEMNIDEFCNKAVNALKFGKINLKEH

SEQ ID NO: 96536 - protein, 260 aa, Unknown
  Bacterial polypetide isolated from the Sargasso Sea
LADLESVRRFVEVFRGLQRPLSALVINAAVYKPLLKQPERSPQGYELSMATNHLGHFLLARLLMQDLQASSHQDKRLITLGTVTANSKELGGKIPIPAPADLGDLSGFAAGFQAPISMANGKPFKPGKAYKDSKLCNMITSLELHRRFHSSTGICFSSLYPGCVADTPLFRNSLPAFQRIFPWFQKNLTGGYVSQPLAGERVAQVVADSQFKTSGAHWSWGNRQRKDGREFQQELSDKVTDPATALRMWELSSQLVSLPA

SEQ ID NO: 96537 - protein, 237 aa, Unknown
  Bacterial polypetide isolated from the Sargasso Sea
MHLLCNAAVYKPKLKQPERSPQGYEISMATNHLGHFLLIQLLMDRIKVSSHPSRRVVILGTVTANSKELGGKIPIPAPADLGDLSGFEAGFQDPISMASGKGFKPGKAYKDSKLCNMITTQELHRRLHTETGISFTSLYPGCVADTPLFRNTPKAFQTIFPWFQKNITGGYVSQALAGERVAQVVADPDFAESGVHWSWGNRQTKDGLQFSQELSEKATDPETAQRVWDLSLRLVGL

SEQ ID NO: 96538 - protein, 317 aa, Unknown
  Bacterial polypetide isolated from the Sargasso Sea
MAIVTGASSGVGLWTTKALIDQGWTVVMACRDSAKAQQALVELGFGRPAEAIILPLDLSDLDSVKAFVERFRGLNRPLTALVINAAVYKPLLKEPEWSAQGYELSMATNHLGHFLLARLLLEDLKASPASDKRLITLGTVTANSKELGGKIPIPAPADLGDLSGFAKGFKAPITMASGKKFKPGKAYKDSKLCNMITSLELHRRFHDSTGISFSSLYPGCVADTPLFRNSLPAFQKIFPWFQKNITGGYVSQALAGERVAQVVADPAFRSSGAHWSWGNRQKKDGKQFNQELSDKASDPATALRVWDLSSELVGLNP

SEQ ID NO: 96539 - protein, 258 aa, Unknown
  Bacterial polypetide isolated from the Sargasso Sea
MKGKKGLIMGVANERSIAWGISQKLAGAGAELAFTYLGDALKKRVVPLAEKLNSNATFSCDVEKKEEVIKLFEDIKSKWGQIDFVVHAVAFSDKSELSGEYLNTTRENFIKSMLISCFSFTEVAKEASKIMNKDGSMLTLTYESNKAIPNYNVMGVCKSALEASVKYLARDLGSKGIRVNAISAGPIKTLAASAIGDAKFLYKWNEDHSFLKKNVDIHDVGNSALYLLSDLGGGVTGEIHYVDAGYNKVGMPDPKNIT

SEQ ID NO: 96540 - protein, 158 aa, Unknown
  Bacterial polypetide isolated from the Sargasso Sea
YLNTTRENFLRSMLISCFSFTEVAREASKIMKQGSSMITLSYEANKAIPNYNVMGVCKAALESSVKYIARDLGVKNIRVNAISAGPIKTLAASAIGDAKFLYKWNADHSFLKRNVDNLDVGNSALYLLSDMAAGVTGEIHYVDAGYNKVGMPDPKNFS

SEQ ID NO: 96541 - protein, 239 aa, Unknown
  Bacterial polypetide isolated from the Sargasso Sea
GISQKLAEAGAELAFTYLGDALKKRVIPLAEKLNSKIALSCDVEKKDNVRKLFEDLKSKWGKIDFVVHAVAFSDKSELSGEYLSTTRENFLKSMLISCFSFTEVSKEASKIMKEGGSMLTLTYESTKAIPNYNVMGVCKSALEASVKYLARDLGQKKIRVNAISAGPIKTLAASAIGDAKFLYKWNEDHSFLKRNVDIYDVGNSALYLLSDLASGVTGEIHYVDAGYNKVGMPDPKNIS

SEQ ID NO: 96542 - protein, 257 aa, Unknown
  Bacterial polypetide isolated from the Sargasso Sea
MKGKKGLIMGVANERSIAWGISQKLAEAGAELAFTYLGDALKKRVIPLAEKVNSNITFSCDVEKKDEIIKLFKDIKSKWDQIDFVVHAVAFSDKSELSGEYLNTTRENFLKSMLISCFSFTEVAKEASKIMNEGGSMLTLTYESNKAIPNYNVMGVCKSALEASVKYLARDLGLKGIRVNAISAGPIKTLAASAIGDAKFLYKWNEDHSFLKRNVDIHDVGNSALYLLSDLGGAVTGEIHYVDAGYNKVGMPDPKNI

SEQ ID NO: 96543 - protein, 220 aa, Unknown
  Bacterial polypetide isolated from the Sargasso Sea
MSLLKGKKGLIMGVANDRSIAWGIAKKLSENGAELAFTYLGDALKKRVVPLAESLKSNFTLSCDVEKKDDVIKTFEEIKKKWGNLDFVVHAIAFSDRSELSGEYLNTSRENFLKSMLISCFSLTEIAKEAAKIMKKGSSLLTLTYESSKVIPNYNVMGVCKSALETSVKYLARDLGTKGIRVNAISAGPIKTLAASAIGDAKFLYKWNEDHSLLKRNVDI

SEQ ID NO: 96544 - protein, 242 aa, Unknown
  Bacterial polypetide isolated from the Sargasso Sea
MHGGISQKLSEAGAELAFTYLGDALKKRVIPLAEKLNSNMTFSCDVENKDDIVKLFEDVKSNWGEIDFVVHAIAFSDKSELSGEYLNTTRENFQRSMLISCFSFTEVAREASKIMKPNGSMITLSYEANKAIPNYNVMGVCKAALESSVKYLARDLGAKQIRVNAISAGPIKTLAASAIGDAKFLYKWNEDHSFLKRNVDIHDVGNSALYLLSNLAGGVTGEIHYVDAGYNKVGMPDPKNIS

SEQ ID NO: 96545 - protein, 194 aa, Unknown
  Bacterial polypetide isolated from the Sargasso Sea
MSLLKGKKGLIMGVANERSIAWGIAKKLSEHGAELAFTYLGDSLKKRVVPLAESLKSNFTLSCDVEKKEDVIRTFEDIKKKWENLDFVVHAIAFSDRSELSGEYLDTSRENFLKSMLISCFSFTEIAKESSKIMKKGSSMLTLTYESSKVIPNYNVMGVCKAALESSVKYLARDLGSRGIRVNAISAGPIKTLA

SEQ ID NO: 96546 - protein, 239 aa, Unknown
  Bacterial polypetide isolated from the Sargasso Sea
GISQKLAEAGAELAFTYLGDALKKRVVPLAEKLNSKVTFSCDVEKKEEVVKLFEDIKSQWGEIDFVVHAVAFSDKSELSGEYLNTTRENFLRSMLISCFSFTEVAKEASKVMKQGGSLLTLTYESTKAIPNYNVMGVCKSALEASVKYLARDLGAKGMRVNAISAGPIKTLAASAIGDAKFLYKWNEDHSFLKRNVDIHDVGNSALYLLSDLANGVTGEIHYVDAGYNKVGMPDPKNIS

SEQ ID NO: 96547 - protein, 189 aa, Unknown
  Bacterial polypetide isolated from the Sargasso Sea
MEGKKGLIMGVANERSIAWGIAQKLSEAGAELAFTYLGDALKKRVVPLAEKLKSNVTFSCDVEKKEDVIKLFEDIKSSWGEIDFVVHAIAFSDKSELSGKYLNTTRENFLRSMLISCFSFTEVAREASKIMSSSGSMITLSYEANKAIPNYNVMGVCKAALESSVKYLARDLGARGIRVNAISAGPIKT

SEQ ID NO: 96548 - protein, 116 aa, Unknown
  Bacterial polypetide isolated from the Sargasso Sea
ESTKAIPNYNVMGVFKSALEASVKYLARDLGSKGVRVNAISAGPIKTLAASAIGDAKFLYKWNEDHSFLKRNVDILDVGNSALYLLSNLANGVTGEIHYVDAGYNKVGMPDPKNIK

SEQ ID NO: 96549 - protein, 170 aa, Unknown
  Bacterial polypetide isolated from the Sargasso Sea
APANELDGNFVDVATREGFQIAHDISSFSFTALAKGAKPFLNKKSALLTLTYLGAMQSLPNYNVMGLAKASLEANVRFMASSLGKDEIRVNGISAGPIKTLAASGVKNFRKMLSSYAKRAPLGRTVTTDEVGNVAAFLCSDLASGITGEITYVDGGFNTSALSIDEYLES

SEQ ID NO: 96550 - protein, 146 aa, Unknown
  Bacterial polypetide isolated from the Sargasso Sea
MLISCFSFTEVAKEAAKIMNPNGSMITLTYESTKAIPNYNVMGVCKSALEASVKYLARDLGTKQIRVNAISAGPIKTLAASAIGDAKFLYKWNEDHSFLKRNVDIHDVGNSALYLLSDLAGGVTGEIHYVDAGYNKVGMPDPKNIS

SEQ ID NO: 96551 - protein, 260 aa, Unknown
  Bacterial polypetide isolated from the Sargasso Sea
MLLNLTGKKILVTGIANNRSIAWGIAQQLSKAGAELGITYLPDDKGRFESKVRELTEPLNPSLFLPLDVQNPAQIEEIFNNIRENWGQIDGLVHCLAFAGRDELIGDYSATSSEGFDRALNISAYSLAPLCKAAKPLFSDGAGVVSLTYLGSERAIPNYNVMGVAKAALEASVRYLSAELGPEKQVRVNAISAGPIRTLASSAIGGILDMIHNVEEKAPLRRTVTQKEVGNTAAFLLSDLSSGISGQTIYVDAGYCINGM

SEQ ID NO: 96552 - protein, 134 aa, Unknown
  Bacterial polypetide isolated from the Sargasso Sea
KEASKVMNKGGSMLTLTYESNKAIPNYNVMGVCKSALEASVKYLARDLGVKGIRVNAISAGPIKTLAASAIGDAKFLYKWNEDHSFLKRNVDIHDVGNSAYYLLSDLGGGVTGEIHYVDAGYNKVGMPDPKNIT

SEQ ID NO: 96553 - protein, 195 aa, Unknown
  Bacterial polypetide isolated from the Sargasso Sea
KKEEVVKLFEDVKSKWGEIDFVVHAIAFSDKSELSGEYLNTTRENFLRSMLISCFSFTEVAREASKIMKQGGSMITLSYEANKAIPNYNVMGVCKAALESSVKYLARDLGSKGIRVNAISAGPIKTLAASAIGDAKFLYKWNADHSFLKRNVDNLDVGNSALYLLSDMAGGVTGEIHYVDAGYNKVGMPDPKNVT

SEQ ID NO: 96554 - protein, 255 aa, Unknown
  Bacterial polypetide isolated from the Sargasso Sea
TGKKILVTGIANNRSIAWGIAQQLSKAGAELGITYLPDDKGRFESKVRELTEPLNPSLFLPLDVQNPAQIEEIFKNIKDNWGQIDGLVHCLAFAGRDELIGDYSATTSEGFDRALNISAYSLAPLCKAAKPLFSDGAGVVSLTYLGSERAIPNYNVMGVAKAALEASVRYLSAELGPEKQVRVNAISAGPIRTLASSAIGGILDMIHNVEEKAPLRRTVTQTEVGNTAAFLLSDLSSGISGQTIYVDAGYCINGM

SEQ ID NO: 96555 - protein, 238 aa, Unknown
  Bacterial polypetide isolated from the Sargasso Sea
YFSKLAEAGAELAFTYLGDALRKRVVPLAEKLNSKTTFSCDVEKKEDVIKLFEDIKSSWGEIDFVVHAIAFSDKSELSGEYLNTTRENFLRSMLISCFSFTEVAREAAKIIKKNGSMITLTYESTKAIPNYNVMGVCKSALEASVKYLARDLGAKQIRVNAISAGPIKTLAASAIGDAKFLYKWNEDHSFLKRNVDINDVGNSALYLLSDLAGGVTGEIHYVDAGYNKVGMPDPKNIT

SEQ ID NO: 96556 - protein, 213 aa, Unknown
  Bacterial polypetide isolated from the Sargasso Sea
MSLMKGKKGLIMGVANERSIAWGISQKLAEAGAELAFTYLGDALKKRVVPLAEKLNSNVTFSCDVEKKEEVVKLFEDIKSQWGEIDFVVHAIAFSDKSELSGEYLNTTRENFQRSMLISCFSFTEVAREGSKIMKEGGSMITLSYEANKAIPNYNVMGVCKAALESSVKYLARDLGAKGIRVNAISAGPIKTLAASAIGDANFLYNGMLITHF

SEQ ID NO: 96557 - protein, 217 aa, Unknown
  Bacterial polypetide isolated from the Sargasso Sea
MSLVKGKKGLIMGVANERSIAWGISQKLAEAGAELAFTYLGDALKKRVIPLAKSLNSDFTISCDVEKKEEIIKLFENIKAKWGQIDFVVHAIAFSDKSELSGEYLNTSRENFLKSMLISCFSFTEVAKEASKIMKENGSMLTLTYESSKAIPNYNVMGVCKSALEASVKYLARDLGSKKIRVNAISAGPIKTLAASAIGDAKFLYKWNEDHSFLKEM

SEQ ID NO: 96558 - protein, 164 aa, Unknown
  Bacterial polypetide isolated from the Sargasso Sea
SELSGEYLNTTRENFLRSMLISCFSFTEVAKEASKIMKQGGSMITLSYEANKAIPNYNVMGVCKAALEASVKYLARDLGSKGVRVNAISAGPIKTLAASAIGDAKFLYKWNADHSFLKRNVDNLDVGNSALYLLSDMAGGVTGEIHYVDAGYNKVGMPDPKNIT

SEQ ID NO: 96559 - protein, 170 aa, Unknown
  Bacterial polypetide isolated from the Sargasso Sea
MLFPINQNWSGEYLNTTRENFLRSMLISCFSFTEVAKEASKIMNKNGSMLTLTYESNKAIPNYNVMGVCKSALEASVKYLARDLGVKGIRVNAISAGPIKTLAASAIGDAKFLYKWNEDHSFLKRNVDIHDVGNSALYLLSDLGGGVTGEIHYVDAGYNKVGMPDPKNIT

SEQ ID NO: 96560 - protein, 258 aa, Unknown
  Bacterial polypetide isolated from the Sargasso Sea
MKGKKGLIMGVANERSIAWGISQKLAESGAELAFTYLGDALKKRVIPLAEKLNSNVTFSCDVEKKEEIVKLFEDIKSKWGQVDFVVHAVAFSDKSELSGEYLNTTRENFLRSMLISCFSFTEVAKEASKIMSKNGSMLTLTYESNKAIPNYNVMGVCKSALEASVKYLARDLGAKGIRVNAISAGPIKTLAASAIGDAKFLYKWNEDHSFLKRNVDIHDVGNSALYLLSDLGAGVTGEIHYVDAGYNKVGMPDPKNIS

SEQ ID NO: 96561 - protein, 146 aa, Unknown
  Bacterial polypetide isolated from the Sargasso Sea
MLISCFSFTEVSKEASKIMRNGGSLLTLTYESTNAIPNYNVMGVCKSALEASVKYLARDLGSKKIRVNAISAGPIKTLAASAIGDAKFLYKWNEDHSFLKRNVDIHDVGNSTLYLLSNLPAGVTGEIHYVHAGYNKMGMPDPKNIV

SEQ ID NO: 96562 - protein, 200 aa, Unknown
  Bacterial polypetide isolated from the Sargasso Sea
SCDVEKKEEVVKLFEDIKSQWGEIDFVVHAVAFSDKSELSGEYLNTTRENFLRSMLISCFSFTEVAKEASKVMKQGGSLLTLTYESTKAIPNYNVMGVCKSALEASVKYLARDLGAKGIRVNAISAGPIKTLAASAIGDAKFLYKWNEDHSFLKRNVDIHDVGNSALYLLSELANGVTGEIHYVDAGYNKVGMPDPKNIT

SEQ ID NO: 96563 - protein, 146 aa, Unknown
  Bacterial polypetide isolated from the Sargasso Sea
DISSYSFTALAKASKPYLNDSSALLTLTYHGSTQTLPNYNVMGLAKASLEANTRFLAASLGKENIRVNAISAGPIKTLAASGVKNFRKMLNHHSNIAPLGRTVTSEEVGNVAAFLCSDFASGITGEITYVDAGFNIAAMPLQEVED

SEQ ID NO: 96564 - protein, 132 aa, Unknown
  Bacterial polypetide isolated from the Sargasso Sea
ASKIMNEGGSMLTLTYESTKAIPNYNVMGVCKSALEASVKYLARDLGSKGIRVNAISAGPIKTLAASAIGDAKFLYKWNEDHSFLKRNVDILDVGNSAVYLLSKLSSGVTGEIHYVDAGYNKVGMPDPKNIS

SEQ ID NO: 96565 - protein, 250 aa, Unknown
  Bacterial polypetide isolated from the Sargasso Sea
MGVANERSIAWGISQKLFEAGAELAFTYLGEALKKRVVPLAEKLNSNVTFSCDVENKDEVIKLFEDIKSKWGQIDFVVHAVAFSDKSELSGEYLNTTRENFLRSMLISCFSFTEVAKEASKIMNKGGSMLTLTYESNKAIPNYNVMGVCKSALEASVKYLARDLGAKGIRINAISAGPIKTLAASAIGDAKFLYKWNEDHSFLKRNVDIHDVGNSALYLLSDLGGGVTGEIHYVDAGYNKVGMPDPKNML

SEQ ID NO: 96566 - protein, 230 aa, Unknown
  Bacterial polypetide isolated from the Sargasso Sea
MKGKKGLIMGVANERSIAWGISQKLSEAGAELAFTYLGDALKKRVVPLAEKLNSNITFSCDVEKKEDVIKLFEDIKSKWSEIDFVVHAVAFSDKSELSGEYLNTTRENFLRSMLISCFSFTEVAKEASKVMKKGGSMLTLTYESTKAIPNYNVMGVCKSALEASVKYLARDLGSKGMRVNAISAGPIKTLAASAIGDAKFLYKWNEDHSFLKRNVDIHDVGNSALYLLSD

SEQ ID NO: 96567 - protein, 141 aa, Unknown
  Bacterial polypetide isolated from the Sargasso Sea
FSFTEVAKEASKVMKQGGSLLTLTYESTKAIPNYNVMGVCKSALEASVKYLARDLGAKGMRVNAISAGPIKTLAASAIGDAKFLYKWNEDHSFLKRNVDIHDVGNSALYLLSDLANGVTGEIHYVDAGYNKVGMPDPKNIS

SEQ ID NO: 96568 - protein, 166 aa, Unknown
  Bacterial polypetide isolated from the Sargasso Sea
DKSELSGEYLNTTRENFLRSMLISCFSFTEVAKEASKVMKQDGSLLTLTYESTKAIPNYNVMGVCKSALEASVKYLARDLGNKGIRVNAISAGPIKTLAASAIGDAKFLYKWNEDHSFLKRNVDIHDVGNSALYLLSDLANGVTGEIHYVDAGYNKVGMPDPKNIT

SEQ ID NO: 96569 - protein, 237 aa, Unknown
  Bacterial polypetide isolated from the Sargasso Sea
KLHENNADLAITYQNESLLKRVKPLAEKVNSDLLIECDFSNEKSLENTIKTVKNKWGKIDFVIHAVAFSDKNELNGRYIDTSKNNFINSLNISCYSFTNLAKLSEPILNEGGSLLTLSFYGSKKVMPNYNVMGVAKAALETSVKYLSVDLGSKNIRVNAISAGPMRTLAGAAIANARQVYKFTEENSSLKRNVLLEEIGNSALYFVSNLSSAVTGEIHYVDCGYNIIGMPKKYSEII

SEQ ID NO: 96570 - protein, 133 aa, Unknown
  Bacterial polypetide isolated from the Sargasso Sea
ESSKIMKEGGSMITLSYEANKAIPNYNVMGVCKAALESSVKYLARDLGAKGIRVNAISAGPIKTLAASAIGDAKFLYKWNADHSFLKRNVDNLDIGNSALYLLSDMAGGVTGEIHYVDAGYNKVGMPDPKNIT

SEQ ID NO: 96571 - protein, 248 aa, Unknown
  Bacterial polypetide isolated from the Sargasso Sea
MKGKKGLIMGVANERSIAWGISQKLVGAGAELAFTYLGDALKKRVVPLAEKLNSNVTFSCDVEKKEEVVKLFEDIKSHWGEIDFIVHAVAFSDKSELSGEYLNTTRENFLRSMLISCFSFTEVAKEASKVMKQGGSLLTLTYESTKAIPNYNVMGVCKSALEASVKYLARDLGAKGMRVNAISAGPIKTLAASAIGDAKFLYKWNEDHSFLKRNVDIHDVGNSALYLLSDLANGVTGEIHYVDAGYNK

SEQ ID NO: 96572 - protein, 259 aa, Unknown
  Bacterial polypetide isolated from the Sargasso Sea
MKGKKGLIMGVANERSIAWGISQKLAEAGAELAFTYLGDALKKRVVPLSEKLNSNLTFSCDVEKKEEVVKLFEDVKSKWGEIDFVVHAIAFSDKSELSGEYLNTTRENFLRSMLISCFSFTEVAKEASRIMKQGGSMITLSYEANKAIPNYNVMGVCKAALEASVKYLARDLGSRGVRVNAISAGPIKTLAASAIGDAKFLYKWNADHSFLKRNVDNLDVGNSALYLLSDMASGVTGEIHYVDAGYNKVGMPDPKNISE

SEQ ID NO: 96573 - protein, 202 aa, Unknown
  Bacterial polypetide isolated from the Sargasso Sea
MKGKKGLIMGVANERSIAWGISQKLAEAGAELAFTYLGDALKKRVVPLAEKLNSNVTFSCDVERKEEVVKLFEDVKSQWGEIDFVVHAIAFSDKSELSGEYLNTTRENFLRSMLISCFSFTEVAREASKIMKQGGSMITLSYEANKAIPNYNVMGVCKAALESSVKYLARDLGVKNIRVNAISAGPIKTLAASAIGDAKFLY

SEQ ID NO: 96574 - protein, 189 aa, Unknown
  Bacterial polypetide isolated from the Sargasso Sea
MKGKKGLIMGVANERSIAWGISQKLAEAGAELAFTYLGDALKKRVIPLAEKLNSKVTFSCDVEKKEDVIKLFDDIKSQWGEIDFVVHAIAFSDKSELSGEYLNTTRENFLRSMLISCFSFTEVAKEASKVMKKGGSLITLSYEANKAIPNYNVMGVCKAALESSVKYLARDLGAKGMRVNAISAGPIKT

SEQ ID NO: 96575 - protein, 189 aa, Unknown
  Bacterial polypetide isolated from the Sargasso Sea
MKGKKGLIMGVANERSIAWGISQKLSEAGAELAFTYLGDALKKRVVPLAEKLNSNVTFSCDVEKKEDVIKLFEDVKSQWGEIDFVVHAIAFSDKSELSGEYLNTTRENFLRSMLISCFSFTEVAKEASKVMKEGGSMITLSYEANKAIPNYNVMGVCKAALESSVKYLARDLGAKGIRVNAISAGPIKT

SEQ ID NO: 96576 - protein, 174 aa, Unknown
  Bacterial polypetide isolated from the Sargasso Sea
CCSAVAFSDKSELSGEYLNTSRENFLRSMLISCFSFTEVAKEASKIMNKGGSMLTLTYESNKAIPNYNVMGVCKSALEASVKYLARDLGAKGIRVNAISAGPIKTLAASAIGDAKFLYKWNEDHSFLKRNVDIHDVGNSALYLLSSLGGGVTGEIHYVDAGYNKVGMPDPKNIT

SEQ ID NO: 96577 - protein, 245 aa, Unknown
  Bacterial polypetide isolated from the Sargasso Sea
MKGKKGLIMGVANERSIAWGISQKLAEAGAELAFTYLGDALKKRVIPLAEKLNSKVTFSCDVEKKEEVVKLFEDIKSKWGEIDFVVHAIAFSDKSELSGEYLNTTRDNFQRSMLISCFSFTEVAKEASKIMKQGGSMITLSYEANKAIPNYNVMGVCKAALEASVKYLARDLGSKGVRVNAISAGPIKTLAASAIGDAKFLYKWNADHSFLKRNVDNLDVGNSALYLLSDMAGGVTGEIHYVDAG

SEQ ID NO: 96578 - protein, 229 aa, Unknown
  Bacterial polypetide isolated from the Sargasso Sea
MKGKRGLIMGVANERSIAWGISQKLSEAGAELAFTYLGDALKKRVVPLAEKLNSKLTFSCDVEKKEEVIKLFEDVKSQWGEIDFVVHAVAFSDKSELSGEYLNTTRENFLRSMLISCFSFTEVAKEASKIIKKGGSLLTLTYESTKAIPNYNVMGVCKSALEASVKYLARDLGAKDIRVNAISAGPIKTLAASAIGDAKFLYKWNEDHSFLKRNVDIYDVGNSALYLLS

SEQ ID NO: 96579 - protein, 154 aa, Unknown
  Bacterial polypetide isolated from the Sargasso Sea
TRENFQRSMLISCFSFTEVAREASKIMKPNSSMVTLSYEANKAIPNYNVMGVCKAALESSVKYLARDLGAKQIRVNAISAGPIKTLAASAIGDAKFLYKWNEDHSFLKRNVDINDVGNSALYLLSDLAGGVTGEIHYVDAGYNKVGMPDPKNIS

SEQ ID NO: 96580 - protein, 147 aa, Unknown
  Bacterial polypetide isolated from the Sargasso Sea
HDISSYSFTAMAKGAKPMLNENAALLTLTYLGSMQSLPNYNVMGLAKASLEANTRFLAAAMGPDGIRVNAISAGPIKTLAAMGVKNFRKMLTNYANRAPLRRAVTTLEVGNVAAFLCSDLASGVTGEITYVDGGFNTAAMSIEEYAD

SEQ ID NO: 96581 - protein, 220 aa, Unknown
  Bacterial polypetide isolated from the Sargasso Sea
MDLVKGKKGLIMGVANERSIAWGIAKKLSENGAELAFTYLGDALKKRVAPLADSVNSKFLLDCNVENKDDIKKTFEEIKKKWGQIDFVVHAIAFSDRAELSGQYIDTSRENFTKSMLVSCFSFTEIAKEASKIMKNGSSMLTLTYESTKVIPNYNVMGVCKAALESSVKYISRDLGIKGIRVNAISAGPIKTLAASAIGDAKFLYKWSSDHSFLKRNVDI

SEQ ID NO: 96582 - protein, 190 aa, Unknown
  Bacterial polypetide isolated from the Sargasso Sea
IKLFEVVKSQWGEIDFVVHAIAFSDKTELSGEYLNTTRENFLRSMLISCFSFTEVAKEASKVMKEGGSMITLSYEANKAIPNYNVMGVCKAALESSVKYLARDLGAKGIRVNAISAGPIKTLAASAIGDAKFLYKWNADHSFLKRNVDNIDVGNSALYLLSDMAGGVTGEIHYVDAGYNKVGMPDPKNIS

SEQ ID NO: 96583 - protein, 199 aa, Unknown
  Bacterial polypetide isolated from the Sargasso Sea
CDVEKEDEVVKLFEDIKSKWGEIDFVVHAVAFSDKSELSGEYLNTTRENFLRSMLISCFSFTEVAKEASKIMKKGGSMITLTYESSKAIPNYNVMGVCKSALEASVKYLARDLGAKGIRVNAISAGPIKTLAASAIGDAKFLYKWNEDHSFLKRNVDIYDVGNSALYLLSDLANGVTGEIHYVDAGYNKVGMPDPKNIS

SEQ ID NO: 96584 - protein, 199 aa, Unknown
  Bacterial polypetide isolated from the Sargasso Sea
MSLMKGKKGLIMGVANERSIAWGISQKLADAGAELAFTYLGDALKKRVIPLAEKLNSNITFSCDVEKKEEIIKLFEDIKSQWGEIDFVVHAVAFSDKSELSGEYLNTTRENFLRSMLISCFSFTEVSKEASKIMKDGGSMLTLTYESTKAIPNYNVMGVCKSALEASVKYLARDLGAKNIRVNAISAGPIKTLAASAIG

SEQ ID NO: 96585 - protein, 127 aa, Unknown
  Bacterial polypetide isolated from the Sargasso Sea
YMASSASLITLSFYGSTKVMPNYNVMGVAKAALETSVKYLSVDLGTKNVRVNAISAGPMRTLAGAAIANARDVYKYTEENSSLKRNVLLDEIGNSALYLVSDLSSAVTGEIHYVDCGFNIVGMPKIK

SEQ ID NO: 96586 - protein, 186 aa, Unknown
  Bacterial polypetide isolated from the Sargasso Sea
KTLNLVWGQIDFVVHAIAFSDKSELSGEYLNTTRENFLRSMLISCFSFTEVAKESAQVIKEGGSLLTLSYEANKAIPNYNVMGVCKAALESSVKYLARDLGTKGIRVNAISAGPIKTLAASAIGDAKFLYKWNADHSFLKRNVDNLDVGNSALYLLSDMAGGVTGEIHYVDAGYNKMGMPDPKNIS

SEQ ID NO: 96587 - protein, 179 aa, Unknown
  Bacterial polypetide isolated from the Sargasso Sea
GSIDFVVHAVAFSDKSELSGEYLNTTRENFLRSMLISCFSFTEVAKEASKIMNKGGSMLTLTYESNKAIPNYNVMGVCKSALESSVKYIARDLGSKGIRVNAISAGPIKTLAASAIGDAKFLYKWNEDHSFLKRNVDIHDVGNSALYLLSKLAGGVTGEIHYVDAGYNKVGMPDPKNIT

SEQ ID NO: 96588 - protein, 186 aa, Unknown
  Bacterial polypetide isolated from the Sargasso Sea
MKGKKGLIMGVANERSIAWGISQKLAEAGAELAFTYLGDALKKRVVPLAEKLNSNVTFSCDVEKKEEVIKLFEDIKSKWGQIDFVVHAVAFSDKSELSGEYLNTTRENFLRSMLISCFSFTEVSKEASKIMNKDGSMLTLTYESNKAIPNYNVMGVCKSALEASVKYLARDLGSKGIRVNAISAGP

SEQ ID NO: 96589 - protein, 169 aa, Unknown
  Bacterial polypetide isolated from the Sargasso Sea
AFSINQSYPGEYLNTTREHFLRSMLISCFSFTEVSKEAAKIIKEEGSLLTLTYESTKAIPNYNVMGVCKSALEASVKYLARDLGKKKIRVNAISAGPIKTLAASAIGDAKFLYKWNEDHSFLKRNVDIHDVGNSALYLLSNLAAGVTGEIHYVDAGYNKVGMPDPKNMI

SEQ ID NO: 96590 - protein, 199 aa, Unknown
  Bacterial polypetide isolated from the Sargasso Sea
MIECDVNKEDDLQNTLHQIKKNFGTIDFIIHAVAYSDKNELNGRYLDTSKDNFINSLSISCYSFTRIAKLFQPIINDGGSLITLSFHGANKVMPNYNVMGVAKAALEASVKYLSVDLGDQNVRVNAISSGPMRTLAGAAIANARDVFNYTSDNSSLKRNVNLEELGNSALYLVSDLSSAITGEIHYVDCGFNIIGMPKS

SEQ ID NO: 96591 - protein, 146 aa, Unknown
  Bacterial polypetide isolated from the Sargasso Sea
MLISCFSFTEVAKEASKVMKQGGSLLTLTYESTKAIPNYNVMGVCKSALEASVKYLARDLGAKGMRVNAISAGPIKTLAASAIGDAKFLYKWNEDHSFLKRNVDIHDVGSSALYLLSDLANGVTGEIHYVDAGYNKVGMPDPKNIS

SEQ ID NO: 96592 - protein, 227 aa, Unknown
  Bacterial polypetide isolated from the Sargasso Sea
MKGKKGLIMGVANERSIAWGISQKLAEAGAELAFTYLGDALKKRVVPLAEKLNSNVTFSCDVEKKEEVVKLFEDVKSKWGEIDFVVHAIAFSDKSELSGEYLNTTRENFLRSMLISCFSFTEIAREASKIMKQGGSMITLSYEANKAIPNYNVMGVCKAALESSVKYLARDLGAKNIRVNAISAGPIKTLAASAIGDAKFLYKWNADHSFLKRNVDNLDVGNSALYL

SEQ ID NO: 96593 - protein, 181 aa, Unknown
  Bacterial polypetide isolated from the Sargasso Sea
QWGEIDFVVHAIAFSDKSELSGEYLNTTRENFLRSMLISCFSFTEVAKEASKVMKEGGSMITLSYEANKAIPNYNVMGVCKAALESSVKYLARDLGAKGIRVNAISAGPIKTLAASAIGDAKFLYKWNADHSFLKRNVDNIDVGNSALYLLSDMAGGVTGEIHYVDAGYNKVGMPDPKNIS

SEQ ID NO: 96594 - protein, 199 aa, Unknown
  Bacterial polypetide isolated from the Sargasso Sea
CDVEKKDDVSKLFDDIKSKWGQLDFVVHAVAFSDKSELSGEYLNTTRDNFLKSMLISCFSFTEVSKEASNVMKEGGSLLTLTYESTKAIPNYNVMGVCKSALEASVKYLARDLGKKKIRVNAISAGPIKTLAASAIGDAKFLYKWNEDHSFLKRNVDIHDVGNSALYLLSDLAAGVTGEIHYVDAGYNKVGMPDPKNIS

SEQ ID NO: 96595 - protein, 258 aa, Unknown
  Bacterial polypetide isolated from the Sargasso Sea
MKGKKGLIMGVANERSIAWGISQKLSEAGAELAFTYLGDALKKRVVPLAEKLNSNVTFSCDVEKKEDVIKLFEDVKSQWGEIDFVVHAIAFSDKSELSGEYLNTTRENFLRSMLISCFSFTEVAKEASKLMKEGGSLITLSYEANKAIPNYNVMGVCKAALESSVKYLARDLGAKGIRVNAISAGPIKTLAASAIGDAKFLYKWNADHSFLKRNVDNIDVGNSALYLLSDMAGGVTGEIHYVDAGYNKVGMPDPKNIS

SEQ ID NO: 96596 - protein, 237 aa, Unknown
  Bacterial polypetide isolated from the Sargasso Sea
MKGKKGLIMGVANERSIAWGISQKLAGAGAELAFTYLGDALKKRVVPLAEKLNSKLTFSCDVEKKEEVIKLFEDIKTQWKEIDFVVHAVAFSDKSELSGEYLNTTRENFLRSMLISCFSFTEVAKEASKIMKTGGSLLTLTYESNKAIPNYNVMGICKSALESSVKYLARDLGTYGMRVNAISAGPIKTLAASAIGDAKFLYKWNEDHSFLKRNVDIYDVGNSALYLLSDLANGVTG

SEQ ID NO: 96597 - protein, 194 aa, Unknown
  Bacterial polypetide isolated from the Sargasso Sea
KEDVIKLFENVKSSWGEIDFVVHAIAFSDKSELSGEYLNTTRENFQRSMLISCFSFTEVAREASKIMKPNGSMITLSYEANKAIPNYNVMGVCKAALESSVKYLARDLGAKQIRVNAISAGPIKTLAASAIGDAKFLYKWNEDHSFLKRNVDIHDVGNSALYLLSDLAGGVTGEIHYVDAGYNKVGMPDPKNII

SEQ ID NO: 96598 - protein, 123 aa, Unknown
  Bacterial polypetide isolated from the Sargasso Sea
SMLTLTYESTKTIPNYNVMGVCKSALEASVKYLARDLGSKGIRVNAISAGPIKTLAASAIGDAKFLYKWNESHSFLKRNVDINDVGNSALYLLSDLASGVTGEIHYVDAGYNKVGMPNPKNIS

SEQ ID NO: 96599 - protein, 176 aa, Unknown
  Bacterial polypetide isolated from the Sargasso Sea
DFVVHAVAFSDKSELSGEYLNTTRENFLRSMLISCFSFTEVAKEASKIMKDGGSMLTLTYESTKAIPNYNVMGVCKSALEASVKYLARDLGSKKIRVNAISAGPIKTLAASAIGDAKFLYKWNEDHSFLKRNVDIHDVGNSALYLLSDLGGGVTGEIHYVDAGYNKVGMPDPKNMS

SEQ ID NO: 96600 - protein, 198 aa, Unknown
  Bacterial polypetide isolated from the Sargasso Sea
MKGKKGLIMGVANERSIAWGISQKLSEEGAELAFTYLGDALKKRVVPLAEKLNSNITFSCDVEKKEEITKLFEDIKSKWGEIDFVVHAVAFSDKSELSGEYLNTTRENFLRSMLISCFSFTEVAKEASKIMKQGGSLLTLTYESSKTIPNYNVMGVCKSALEASVKYLARDLGAKSMRVNAISAGPIKTLAASAIGDA

SEQ ID NO: 96601 - protein, 183 aa, Unknown
  Bacterial polypetide isolated from the Sargasso Sea
KKEWGQIDFVVHAVAFSDKSELSGEYLNTTRENFLRSMLISCFSFTEVAKEFSKIMKEGGSMITLSYEANKAIPNYNVMGVCKAALESSVKYLARDLGAKGIRVNAISAGPIKTLAASAIGDAKFLYKWNADHSFLKRNVDNLDVGNSALYLLSDMASGVTGEIHYVDAGYNKMGMPDPKNIT

SEQ ID NO: 96602 - protein, 154 aa, Unknown
  Bacterial polypetide isolated from the Sargasso Sea
YERKFLRSMLISCFSFTEVAKEASKIMSKGGSMLTLTYESNKAIPNYNVMGVCKSALEASVKYLARDLGSKGIRVNAISAGPIKTLAASAIGDAKFLYKWNEDHSFLKRNVDIHDVGNSALYLLSDLGGGVTGEIHYVDAGYNKVGMPDPKNIT

SEQ ID NO: 96603 - protein, 119 aa, Unknown
  Bacterial polypetide isolated from the Sargasso Sea
LTYESTKAIPNYNVMGVCKSALEASVKYLARDLGKKKLRVNAISAGPIKTLAASAIGDAKFLYKWNEDHSFLKRNVDIHDVGNSALYLLSNLAAGVTGEIHYVDAGYNKVGMPDPKNIV

SEQ ID NO: 96604 - protein, 258 aa, Unknown
  Bacterial polypetide isolated from the Sargasso Sea
MNGKKGLIMGVANDRSIAWGISQKLASAGAELAFTYLGDALKKRVVPLAEKLNSKTTFSCDVEKKEDIIKLFENIKSIWGEIDFVVHAIAFSDKSELSGEYLNTTRENFLRSMLISCFSFTEVAKEAAKIMRPNGSLITLTYESTKTIPNYNVMGVCKSALEASVKYLARDLGSKQIRVNAISAGPIKTLAASAIGDAKFLYKWNENHSFLKRNVDIHDVGNSALYLLSDLACGVTGEIHYVDAGYNKVGMPDPKNIT

SEQ ID NO: 96605 - protein, 211 aa, Unknown
  Bacterial polypetide isolated from the Sargasso Sea
MLLNLTGKKILVTGIANNRSIAWGIAQQLSKAGAELGITYLPDDKGRFESKVRELTEPLNPSLFLPLDVQNPAQIEEIFKNIKENWGQIDGLVHCLAFAGRDELIGDYSATTSEGFDRALNISAYSLAPLCKAAKPLFSDGAGVVSLTYLGSERAIPNYNVMGVAKAALEASVRYLSAELGPEKQVRVNAISAGPIRTLASSAIGGILDMI

SEQ ID NO: 96606 - protein, 255 aa, Unknown
  Bacterial polypetide isolated from the Sargasso Sea
MKGKKGLIMGVANERSIAWGIAQKLSEAGAELAFTYLGDALKKRVVPLAEKLNSNVTFSCDVEKKEDVIKLFEDVKSSWGEIDFVVHAIAFSDKSELSGEYLNTTRENFLRSMLISCFSFTEVAREASKVMKSDGSMITLSYEANKAIPNYNVMGVCKAALESSVKYLARDLGAKGIRINAISAGPIKTLAASAIGDAKFLYKWNADHSFLKRNVDNLDVGNSALYLLSDMASGVTGEIHYVDAGYNKVGMPDPK

SEQ ID NO: 96607 - protein, 136 aa, Unknown
  Bacterial polypetide isolated from the Sargasso Sea
QVDFVVHAIAFSDKSELSGEYLNTTRENFLRSMLISCFSFTEVAKESSRVMKEGGSLLTLSYEANKAIPNYNVMGVCKAALESSVKYLARDLGTKGIRVNAISAGPIKTLAASAIGDAKFLYKWNADHSFLKRNVD

SEQ ID NO: 96608 - protein, 201 aa, Unknown
  Bacterial polypetide isolated from the Sargasso Sea
MSLMKGKKGLIMGVANERSIAWGISQKLAEAGAELAFTYLGDALKKRVIPLAEKLNSNVTFSCDVENKEEVIKLFEDIKSKWGQIDFVVHAVAFSDKSELSGEYLNTTRENFLRSMLISCFSFTEVAKEASKIMNKGGSMLTLTYESNKAIPNYNVMGVCKSALEASVKYLARDLGSKGIRVNAISAGPIKTLAASAIGDA

SEQ ID NO: 96609 - protein, 246 aa, Unknown
  Bacterial polypetide isolated from the Sargasso Sea
MKGKKGLVMGVANERSIAWGISQKLSEAGAELAFTYLGEALKKRVVPLAEKLKSNKTFSCDVEKKEEIIKLFEDIKSEWGKIDFVVHAVAFSDKSELSGEYLKTTRENFLRSMLISCFSFTEVTREASKIMNEGGSLITLTYESSKAIPNYNVMGVCKSALESSVKYLARDLGNKKIRVNAISAGPIKTLAASAIGDAKFLYKWNEDHSFLKRNVDIHDVGNSALYLLSDLASGVTGEIHYVDARL

SEQ ID NO: 96610 - protein, 106 aa, Unknown
  Bacterial polypetide isolated from the Sargasso Sea
PNYNVMGVAKAALETSVKYLSVDLGDQDVRVNAISAGPMRTLAGAAIANARDVFNYTSENSSLKRNVNLEELGNSALYLVSDLSSAITGEIHYVDCGFNIVGMPKS

SEQ ID NO: 96611 - protein, 149 aa, Unknown
  Bacterial polypetide isolated from the Sargasso Sea
LKSMLISCFSFTEVAKEASKIMSDNGSMLTLTYESTKAIPNYNVMGVCKSALEASVKYLARDLGAKKIRVNAISAGPIKTLAASAIGDAKFLYKWNESHSFLKRNVDINDVGNSALYLVSDLAAGVTGEIHYVDAGYNKVGMPNPKNIS

SEQ ID NO: 96612 - protein, 156 aa, Unknown
  Bacterial polypetide isolated from the Sargasso Sea
VTTREGFQIAHDISSYSFTAMAKAAKPMLNEGSALLTLTYLGSNKTVPNYNVMGLAKASLEANTRFLAASMGRDNIRVNAISAGPIKTLAASGVKNFRKMLSEHSKIAPLGRTVTTDEVGNVAAFLCSDYASGVTGEITYVDAGFNIAAMPIDAYE

SEQ ID NO: 96613 - protein, 213 aa, Unknown
  Bacterial polypetide isolated from the Sargasso Sea
IPLAEKLNSNVTFSCDVEKKEEIIKLFQDIKTKWGEIDFVVHAVAFSDKSELSGEYLNTTRENFLRSMLISCFSFTEVAKEASGIMKEGGSMLTLTYESTKAIPNYNVMGVCKSALEASVKYLARDLGVKKIRVNAISAGPIKTLAASAIGDAKFLYKWNEDHSFLKRNVDIHDVGNSALYLLSNLSDGVTGEIHYVDGGYNKVGMPDPKNMK

SEQ ID NO: 96614 - protein, 209 aa, Unknown
  Bacterial polypetide isolated from the Sargasso Sea
AEKLNSKVTFSCDVEKKNEVIKLFEDIKTQWGEIDFVVHAVAFSDKSELSGEYLNTSRENFLKSMLISCFSFTEVAKEASKIMNKGGSLITLTYESNKAIPNYNVMGVCKSALEASVKYLARDLGVRGIRVNAISAGPIKTLAASAIGDAKFLYKWNEDHSFLKRNVDIHDVGNSALYLLSDLANGVTGEIHYVDAGYNKVGMPDPKNF

SEQ ID NO: 96615 - protein, 118 aa, Unknown
  Bacterial polypetide isolated from the Sargasso Sea
TYESSKVIPNYNVMGVCKAALETSVKYLAKDLGSKGIRVNAISAGPIKTLAASAIGDAKFLYKWNEDHSLLKRNVDINDVGGSALYLLSDLSAAVTGEIHYVDAGYNKVGMPNPKDMA

SEQ ID NO: 96616 - protein, 168 aa, Unknown
  Bacterial polypetide isolated from the Sargasso Sea
FSDKSELSGEYLNTTRENFLRSMLISCFSFTEVAKESSKVMKSGGSMITLSYEANKAIPNYNVMGVCKAALESSVKYLARDLGAKGIRVNAISAGPIKTLAASAIGDAKFLYKWNSDHSFLKRNVDNLDVGNSALYLLSDMAGGVTGEIHYVDAGYNKVGMPDPKNIT

SEQ ID NO: 96617 - protein, 208 aa, Unknown
  Bacterial polypetide isolated from the Sargasso Sea
KLNSKVTFSCDVEKKEEVVKLFEDVKSKWGEIDFVVHAVAFSDKSELTGEYLNTTRENFLKSMLISCFSFTEVSKEASKIMKDGGSLLTLTYESTKAIPNYNVMGICKSALEASVKYLARDLGKDKIRVNAISAGPIKTLAASAIGDAKFLYKWNEDHSFLKRNVDIHDVGNSALYLLSNLAAGVTGEIHYVDAGYNKVGMPDPKNMT

SEQ ID NO: 96618 - protein, 252 aa, Unknown
  Bacterial polypetide isolated from the Sargasso Sea
MKGKKGLIMGVANERSIAWGISQKLSEAGAELAFTYLGDALKKRVVPLAEKLNSNVTFSCDVEKKEEVVKLFKDIKSKWGEIDFVVHAVAFSDKSELSGEYLNTTRENFLRSMLISCFSFTEVAKEASNVMKKGGSLLTLTYESTKAIPNYNVMGVCKSALEASVKYLARDLGAKGIRVNAISAGPIKTLAASAIGDAKFLYKWNEDHSFLKRNVDIHDVGNSALYLLSNLANGVTGEIHYVDAGYNKVGMP

SEQ ID NO: 96619 - protein, 219 aa, Unknown
  Bacterial polypetide isolated from the Sargasso Sea
ALKKRVVPLAEKLNSKVTFSCDVEKKEDVIKLFEDVKSSWGEIDFVVHAIAFSDKSELSGEYLNTTRENFLRSMLISCFSFTEVARESAKIMKPNGSMITLTYESTKAIPNYNVMGVCKSALEASVKYLARDLGSKQIRVNAISAGPIKTLAASAIGDAKFLYKWNEDHSFLKRNVDIHDVGNSALYLLSDLAGGVTGEIHYVDAGYNKVGMPDPKNIS

SEQ ID NO: 96620 - protein, 231 aa, Unknown
  Bacterial polypetide isolated from the Sargasso Sea
KGLIMGVANERSIAWGISQKLVEAGAELAFTYLGDALKKRVVPLAEKLNSNVTFSCDVEKKEEVVKLFEDVKSQWGEIDFIVHAIAFSDKSELSGEYLNTTRENFLRSMLISCFSFTEVAREASKIMKQGGSMITLSYEANKAIPNYNVMGVCKAALESSVKYIARDLGVKNIRVNAISAGPIKTLAASAIGDAKFLYKWNADHSFLKRNVDNLDVGNSALYLLSDMASGV

SEQ ID NO: 96621 - protein, 149 aa, Unknown
  Bacterial polypetide isolated from the Sargasso Sea
LKSMLISCFSFTEVQKEASKIMKEGGSMLTLTYESTKAIPNYNVMGVCKSALEASVKYLARDLGTKGMRVNAISAGPIKTLAASAIGDAKFLYKWNEDHSFLKRNVDIYDVGNSALYLLSDLANGVTGEIHYVDAGYNKVGMPDPKNIS

SEQ ID NO: 96622 - protein, 165 aa, Unknown
  Bacterial polypetide isolated from the Sargasso Sea
IIGRNFVDVTTREGFKIAHDISSYSFTALAKASKPYLNENAALLTLTYLGSMQTLPNYNVMGLAKASLEANTRFLAASMGKDNIRVNAISAGPIKTLAASGVKNFRKMLSQHSKRAPLGRTVTADEVGNVAAFLCSDYASGVTGEITYVDAGFNISAMPLDELEE

SEQ ID NO: 96623 - protein, 196 aa, Unknown
  Bacterial polypetide isolated from the Sargasso Sea
MIKNKKGIVFGIANDHSIAWGIAKKLSENGAELAITYQNETLLKRVKPLANEINSKLLIECDFGKHNSIESSFEIINKNWGNIDFIIHSAAFSDKNELNGRYIDTSKNNFINSLNISCFSFTKIAKIYEPILNNGSSLLTLSFYGSTKVMPNYNVMGVAKAALETSVKYLSVDLGSKNIRVNAISAGPMRTLAGAA

SEQ ID NO: 96624 - protein, 147 aa, Unknown
  Bacterial polypetide isolated from the Sargasso Sea
SMLISCFSFTEVAKEASKVMKQGGSLLTLTYESTKAIPNYNVMGVCKSALEASVKYLARDLGAKGMRVNAISAGPIKTLAASAIGDAKFLYKWNEDHSFLKRNVDIHDVGNSALYLLSHLANGVTGEIHYVDAGYNKVGMPDPKNIS

SEQ ID NO: 96625 - protein, 184 aa, Unknown
  Bacterial polypetide isolated from the Sargasso Sea
IKSKWGQIDFVVHAVAFSDKSELSGEYLNTTRENFLRSMLISCFSFTEVAKEASKIMNIGGSMLTLTYESNKAIPNYNVMGVCKSALEASVKYLARDLGSKGIRVNAISAGPIKTLAASAIGDAKFLYKWNEDHSFLKRNVDINDVGNSALYLLSELGGGVTGEIHYVDAGYNKVGMPDPKNIT

SEQ ID NO: 96626 - protein, 205 aa, Unknown
  Bacterial polypetide isolated from the Sargasso Sea
MKILNGKNVLIVGVANKHSIAAGIAESMSENGANIALTYQNERLKRNVEKLGREMGIETFIPCDVTSDIEIKETFKNLSSQWESLDSVIHAVGFAPREELDGNFVDVTSREGFQIAHDISSYSFIALAKEAKNMMEGRNGSLLTLSYLGSQMTLPNYNVMGLAKASLEASVRYLAVSMGTEGHRVNAISAGPIKTLAASGVKNFR

SEQ ID NO: 96627 - protein, 231 aa, Unknown
  Bacterial polypetide isolated from the Sargasso Sea
MSLVKGKKGLIMGVANERSIAWGISQKLSEAGAELAFTYLGDALKKRVVPLAKSLNSDFTLSCNVENKEEIVKLFEDIKTKWGQIDFVVHAIAFSARSELSGEYLNTTRENFLKSMLISCFSFTEVAKEASKIMNKGGSMLTLTYESTKTIPNYNVMGVCKSALESSVKYLARDLGEKGIRVNAISAGPIKTLAASAIGDAKFLYKWNEDHSLLKRNVDIHDIGNSALYLL

SEQ ID NO: 96628 - protein, 236 aa, Unknown
  Bacterial polypetide isolated from the Sargasso Sea
SKLSEAGAELAFTYLGDALKKRVVPLAEKLNSNVTFSCDVEKKEEVVKLFEDIKSQWGEIDFVVHAVAFSDKSELSGEYLNTTRENFLRSMLISCFSFTEVAKEASKVMKQGGSLLTLTYESTKAIPNYNVMGVCKSALEASVKYLARDLGAKGMRVNAISAGPIKTLAASAIGDAKFLYKWNEDHSFLKRNVDIHDVGNSALYLLSDLANGVTGEIHYVDAGYNKVGMPDPKNIT

SEQ ID NO: 96629 - protein, 241 aa, Unknown
  Bacterial polypetide isolated from the Sargasso Sea
CLGYISKLAEAGAELAFTYLGDALKKRVVPLAEKLNSNVTFSCDVEKKEEVVKLFKDIKSKWGEIDFVVHAVAFSDKSELSGEYLNTTRENFLRSMLISCFSFTEVAKEASNVMKKGGSLLTLTYESTKAIPNYNVMGVCKSALEASVKYLARDLGAKGMRVNAISAGPIKTLAASAIGDAKFLYKWNEDHSFLKRNVDIHDVGNSALYLLSDLANGVTGEIHYVDAGYNKVGDADPKNIT

SEQ ID NO: 96630 - protein, 223 aa, Unknown
  Bacterial polypetide isolated from the Sargasso Sea
MLENKKILIAGLANKHSIAAGIAKAMHAQGAELAFTYQNERLKKNVEKIALDLNSKLLFECDVSSDKSIETMYQNLSKDWKKFDGFVHSIGFAPANELEGNFVDAATREGFKVAHDISSYSFTAMAKAAKSMLNPGSALLTLTYLGSVQSLPNYNVMGLAKASLEANTRFLAAAMGPDDIRVNAISAGPIKTLAASGVKNFRKMLVNYANRAPLRRVVTTTEV

SEQ ID NO: 96631 - protein, 215 aa, Unknown
  Bacterial polypetide isolated from the Sargasso Sea
RVVPLAEKLNSNVTFSCDVEKKEDVIKLFENIKSSWGEIDFVVHAIAFSDKSELSGEYLNTSRENFLRSMLISCFSFTEVAREASKVMKEGGSMITLSYEANKAIPNYNVMGVCKAALESSVKYLARDLGTKGIRVNAISAGPIKTLAASAIGDAKFLYKWNADHSFLKRNVDNLDVGNSALYLLSDMAGGVTGEIHYVDAGYNKVGMPDPKNFT

SEQ ID NO: 96632 - protein, 206 aa, Unknown
  Bacterial polypetide isolated from the Sargasso Sea
MKGKKGLIMGVANERSIAWGISQKLSEAGAELAFTYLGDALKKRVIPLAEKLNSKVTFSCDVEKKEEVKKLFEDIKSKWGEIDFVVHAVAFSDKSELSGEYLNTTRENFVKSMLISCFSFTEVSKEASKIMKEGGSLLTLTYESTKAIPNYNVMGVCKSALEASVKYLARDLGQKKIRVNAISAGPIKTLAASAIGDAKFLYKWNE

SEQ ID NO: 96633 - protein, 241 aa, Unknown
  Bacterial polypetide isolated from the Sargasso Sea
AWGISQKLAEAGAELAFTYLGDALKKRVLPLAEKLNSKVTFSCDVEKKEEVKKLFEDIKSKWGEIDFVVHAVAFSDKSELSGEYLNTTRENFLRSMLISCFSFTEISKEASKIMKNGGSLLTLTYESNKAIPNYNVMGICKSALEASVKYLARDLGQKKIRVNAISAGPIKTLAASAIGDAKFLYKWNEDHSFLKRNVDIHDVGNSALYLLSNLASGVTGEIHYVDAGYNKVGMPDPKNIT

SEQ ID NO: 96634 - protein, 117 aa, Unknown
  Bacterial polypetide isolated from the Sargasso Sea
YESTKAIPNYNVMGVCKSALEASVKYLARDLGVKGVRVNAISAGPIKTLAASAIGDAKFLYKWNEDHSFLKRNVDIHDVGNSALYLLSNLANGVTGEIHYVDAGYNKVGMPDPKNIS

SEQ ID NO: 96635 - protein, 258 aa, Unknown
  Bacterial polypetide isolated from the Sargasso Sea
MSGKKGLIMGVANERSIAWGISQKLAEAGAQLAFTYLGDALKKRVVPLAEKLNSNLTFSCDVEKKEQVIKLFKDIKSKWGQIDFVVHAVAFSDKSELSGEYLNTTRENFLRSMLISCFSFTEVAREASKIINKDGSMLTLTYESNKAIPNYNVMGVCKSALEASVKYLARDLGSKGIRVNAISAGPIKTLAASAIGDAKFLYKWNEDHSFLKRNVDIHDVGNSALYLLSDLGSGVTGEIHYVDAGYNKVGMPDPKNIT

SEQ ID NO: 96636 - protein, 231 aa, Unknown
  Bacterial polypetide isolated from the Sargasso Sea
AGAELAFTYLGDALKKRVVPLAEKLNSNVTFSCDVEKKEDVIKLFEDVKSQWGEIDFVVHAIAFSDKSELSGEYLNTTRENFLKSMLISCFSFTEVAKEASNVMKNGGSMITLSYEANKAIPNYNVMGVCKAALESSVKYLARDLGAKGIRVNAISAGPIKTLAASAIGDAKFLYKWNADHSFLKRNVDNLDVGNSALYLLSDMAGGVTGEIHYVDAGYNKVGMPDPKNIS

SEQ ID NO: 96637 - protein, 258 aa, Unknown
  Bacterial polypetide isolated from the Sargasso Sea
MKGKKGLIMGVANERSIAWGISQKLADAGAELAFTYLGDALKKRVIPLAEKLNSKATFSCDVEKKEEVIKLFENIKSQWGEIDFVVHAVAFSDKSELSGEYLDTTRENFLKSMLISCFSFTEVAKEASKVMKKGGSLLTLTYESTKAIPNYNVMGVCKSALEASVKYLARDLGAKGVRVNAISAGPIKTLAASAIGDAKFLYKWNEDHSFLKRNVDIHDVGNSALYLLSNLANGVTGEIHYVDAGYNKVGMPDPKNIS

SEQ ID NO: 96638 - protein, 200 aa, Unknown
  Bacterial polypetide isolated from the Sargasso Sea
MKGKKGLIMGVANERSIAWGISQKLAGAGAELAFTYLGDALKKRVIPLSEKLNSKLTFSCDVEKKEEVIKLFEDIKANWGQIDFVVHAIAFSDKSELSGEYLNTTRENFLRSMLISCFSFTEVAKEASKIMNKGGSMLTLTYESNKAIPNYNVMGVCKSALEASVKYLARDLGAKGIRVNAISAGPIKTLAASAIGDAKF

SEQ ID NO: 96639 - protein, 152 aa, Unknown
  Bacterial polypetide isolated from the Sargasso Sea
ENFLRSMLISCFSFTEVAKEASKIMNKGGSMLTLTYESNKAIPNYNVMGVCKSALEASVKYLARDLGSKGIRVNAISAGPIKTLAASAIGDAKFLYKWNEDHSFLKRNVDIHDVGNSALYLLSDLGGGVTGEIHYVDAGYNKVGMPDPKNIT

SEQ ID NO: 96640 - protein, 199 aa, Unknown
  Bacterial polypetide isolated from the Sargasso Sea
CDVEKKEEVVKLFEDIKSQWGEIDFVVHAVAFSDKSELSGEYLNTTRENFLRSMLISCFSFTEVAKEASRVINKGGSMLTLTYESTKAIPNYNVMGVCKSALEASVKYLARDLGTKGIRVNAISAGPIKTLAASAIGDAKFLYKWNEDHSFLKRNVDIHDVGNSALYLLSDLANGVTGEIHYVDAGYNKVGMPDPKNIT

SEQ ID NO: 96641 - protein, 235 aa, Unknown
  Bacterial polypetide isolated from the Sargasso Sea
LAEAGAELAFTYLGDALKKRVVPLAEKLNSKFTFSCDVEKKEEVVKLFEDIKNQLGQIDFVVHAVAFSDKSELSGEYLNTTRENFLRSMLISCFSFTEVAKEASKIMKDGGSMLTLTYESTKAIPNYNVMGVCKSALEASVKYLARDLGSKKIRVNAISAGPIKTLAASAIGDAKFLYKWNEDHSFLKRNVDIHDVGNSALYLLSDLGSGVTGEIHYVDAGYNKVGMPDPKNMKG

SEQ ID NO: 96642 - protein, 122 aa, Unknown
  Bacterial polypetide isolated from the Sargasso Sea
MLTLTYESTKVIPNYNVMGVCKAALESSVKYIAKDLGSKGIRVNAISAGPIKTLAASAIGDAKFLYKWSADHSFLKRNVDINDVGKSALYLLSNLSDGVTGEIHYVDAGYNKAGMPDPKNIT

SEQ ID NO: 96643 - protein, 201 aa, Unknown
  Bacterial polypetide isolated from the Sargasso Sea
MSLMKGKKGLIMGVANERSIAWGISQKLAEAGAELAFTYLGDALKKRVVPLAEKLNSKVTFSCDVEKKEDVIKLFEDVKSQWDEIDFVVHAIAFSDKSELSGEYLNTTRENFLRSMLISCFSFTEVAKEASKVMKEGGSLITLSYEANKAIPNYNVMGVCKAALECSVKYLARDLGARGMRINAISAGPIKTLAASAIGDA

SEQ ID NO: 96644 - protein, 151 aa, Unknown
  Bacterial polypetide isolated from the Sargasso Sea
SAYSLLPITKYASQLMPNGGSIITLSYLGGERSVPNYNVMGVAKAALECSVRYLAAEYGSQDIRVNAISAGPIRTLAAKGISGFDMIWKVNELRSPMKKNVSIDDVGNSGLYLCSDLSKGVTGETHHVDAGFHSVAVSKEDVKLIGKEITE

SEQ ID NO: 96645 - protein, 240 aa, Unknown
  Bacterial polypetide isolated from the Sargasso Sea
MEGKTGLIMGVANERSIAWGIANQLFLNKANIVLTYQNDSLKKRIEPLSEKIKCKNLYKCDVSLNPEDEYSIENLIKNINKDVGNLDFVVHALAYSDKEELKGKYVETSRQNFLSTLDISTYSFTRVSKSASKIMNNGGSFLTLTYVGSNKTTPNYNVMGVAKAALETSVKYLSVDLGKHNIRVNAISAGPMKTIAGAAISGARHVYRYSEKIAPLQKNPDLKQVGNAALYLLSDISSGV

SEQ ID NO: 96646 - protein, 162 aa, Unknown
  Bacterial polypetide isolated from the Sargasso Sea
MSGEYINTSREHFAKSMLVSCFSFTEIAKEASKIMDNGSSMLTLTYESTKVVPNYNVMGVCKAALESSVKYIAKDLGSKGIRVNAISAGPIKTLAASAIGDAKFLYKWSADHSLLKRNVDIDDVGKSALYLLSDLAAGVTGEIHYVDAGYNKVGMPNPKNIS

SEQ ID NO: 96647 - protein, 225 aa, Unknown
  Bacterial polypetide isolated from the Sargasso Sea
DLVITYQNNTLFKRVKPLADKIDCNCLIECDVNKEEEIKNAFDIVKDKFGKIDFIIHAIAYSDKNELNGRYIETSKNNFIHSLSISCYSFTKIAKVFQPIINANGSLVTLSFYGANKVMPNYNVMGVAKAALETSVKYLSVDLGEQNIRVNAISAGPMRTLAGAAIANAREVFKYTNDNSSLKRNVNLEELGNSALYLVSEMSSAVTGEIHYVDCGFNIVGMPKV

SEQ ID NO: 96648 - protein, 183 aa, Unknown
  Bacterial polypetide isolated from the Sargasso Sea
KSSWGEIDFVVHAIAFSDKSELSGEYLNTTRENFQRSMLISCFSFTEVAREASKIMRPNGSMITLSYEANKAIPNYNVMGVCKAALESSVKYLARDLGAKQIRVNAISAGPIKTLAASAIGDAKFLYKWNEDHSFLKRNVDIHDVGNSALYLLSDLAGGVTGEIHYVDAGYNKVGMPDPKNIS

SEQ ID NO: 96649 - protein, 227 aa, Unknown
  Bacterial polypetide isolated from the Sargasso Sea
LAFTYLGDALKKRVVPLAEKLNSKTTFSCDVEKKEDVIKLFEDIKSSWGDIDFVVHAIAFSDKSELSGEYLNTTRENFLRSMLISCFSFTEVAREAAKIMKPNGSMITLTYESTKAIPNYNVMGVCKSALEASVKYLARDLGAKEIRVNAISAGPIKTLAASAIGDAKFLYKWNEDHSFLKRNVDINDVGNSALYLLSDLAGGVTGEIHYVDAGYNKVGMPDPKNIT

SEQ ID NO: 96650 - protein, 179 aa, Unknown
  Bacterial polypetide isolated from the Sargasso Sea
GEIDFVVHAIAFSDKSELSGEYLNTTRENFLRSMLISCFSFTEVAREAAKIIKPNGSMITLTYESTKAIPNYNVMGVCKSALEASVKYLARDLGSKQIRVNAISAGPIKTLAASAIGDAKFLYKWNEDHSFLKRNVDIHDVGNSALYLLSDLAGGVTGEIHYVDAGYNKVGMPDPKNIT

SEQ ID NO: 96651 - protein, 206 aa, Unknown
  Bacterial polypetide isolated from the Sargasso Sea
MKGKKGLIMGVANERSIAWGISQKLAEAGAELAFTYLGDALKKRVIPLAEKLNSKVTFSCDVEKKDEVIKLFEDIKTQWGEIDFIVHAVAFSDKSELSGEYLNTTRENFLRSMLISCFSFTEVAKEASKVMKQGGSLLTLTYESSKAIPNYNVMGVCKSALEASVKYLARDLGAKGIRVNAISAGPIKTLAASAIGDAKFLYKWNE

SEQ ID NO: 96652 - protein, 145 aa, Unknown
  Bacterial polypetide isolated from the Sargasso Sea
LISCFSFTEVSKEASKIMKENGSLLTLTYESTKAIPNYNVMGVCKSALEASVKYLARDLGQKKLRVNAISAGPIKTLAASAIGDAKFLYKWNEDHSFLKRNVDIYDVGNSALYLLSDLAAGVTGEIHYVDAGYNKVGMPDPKNMS

SEQ ID NO: 96653 - protein, 158 aa, Unknown
  Bacterial polypetide isolated from the Sargasso Sea
MIKGKKGLIFGIANDHSIAWGIAEKLHLNGAQLAITYQNSTLLKRVKPLAEKVNCDCLIECDVGKEEDINNSLKIVKDKFDKIDFIIHAVAYSDKNELNGRYIETSKNNFINSLSISCFSFTKIAKVFQPIINENGSLLTLSFYGANKVMPNYNVMGV

SEQ ID NO: 96654 - protein, 225 aa, Unknown
  Bacterial polypetide isolated from the Sargasso Sea
MKGKKGLIMGVANERSIAWGISQKLADAGAELAFTYLGDALKKRVVPLAEKLNSKVIFSCDVEKKEEVIKLFEDIKSKWGQIDFVVHAVAFSDKSELSGEYLNTTRENFLRSMLISCFSFTEVAKEASKVMSKGGSMLTLTYESNKAIPNYNVMGVCKSALEASVKYLARDLGSKGIRVNAISAGPIKTLAASAIGDAKFLYKWNEDHSFLKRNVDIHDVEIQLY

SEQ ID NO: 96655 - protein, 134 aa, Unknown
  Bacterial polypetide isolated from the Sargasso Sea
KEASKIMNKNGSMLTLTYESNKAIPNYNVMGVCKSALEASVKYLARDLGTKGIRVNAISAGPIKTLAASAIGDAKFLYKWNEDHSFLKRNVDIHDVGNSALYLLSDLGGGVTGEIHYVDAGYNKVGMPDPKNIK

SEQ ID NO: 96656 - protein, 151 aa, Unknown
  Bacterial polypetide isolated from the Sargasso Sea
KFLRSMLISCFSFTEVAKEASKIMNKGGSMLTLTYESNKAIPNYNVMGVCKSALEASVKYLARDLGSKGIRVNAISAGPIKTLAASAIGDAKFLYKWNEDHSFLKRNVDINDVGNSALYLLSDLGGGVTGEIHYVDAGYNKVGMPDPKNIT

SEQ ID NO: 96657 - protein, 162 aa, Unknown
  Bacterial polypetide isolated from the Sargasso Sea
LSGQYIDTSRENFTKSMLVSCFSFTEVAKEASKIMKSGSSMLTLTYESTKVIPNYNVMGVCKAALESSVKYISRDLGTKGIRVNAISAGPIKTLAASAIGDAKFLYKWSSDHSFLKRNVDIDDVGKSALYLLSDLAAGVTGEIHYVDAGYNKAGMPDPKNIT

SEQ ID NO: 96658 - protein, 258 aa, Unknown
  Bacterial polypetide isolated from the Sargasso Sea
MKGKKGLVMGVANERSIAWGISQKLSEAGAELAFTYLGDALKKRVVPLAEKLTSKVIFSCDVEKKEEVVKLFEDIKSQWGEIDFVVHAVAFSDKSELSGEYLNTTRENFLRSMLISCFSFTEVAKEASKVMKEGGSLLTLTYESTKAIPNYNVMGVCKSALEASVKYLARDLGAKGMRVNAISAGPIKTLAASAIGDAKFLFKWNEDHSFLKRNVDINDVGNSALYLLSDLANGVTGEIHYVDAGYNKVGMPDPKNIR

SEQ ID NO: 96659 - protein, 205 aa, Unknown
  Bacterial polypetide isolated from the Sargasso Sea
MKGKKGLIMGVANERSIAWGISQKLADAGAELAFTYLGDALKKRVIPLAEKLNSSVILSCDVEKKEEIIKLFQDIKTKWGEIDFVVHAVAFSDKSELSGEYLNTTRENFLRSMLISCFSFTEVAKEASSIMKEGGSMLTLTYESTKAIPNYNVMGVCKSALEASVKYLARDLGAKKIRVNAISAGPIKTLAASAIGDAKFLYKWN

SEQ ID NO: 96660 - protein, 146 aa, Unknown
  Bacterial polypetide isolated from the Sargasso Sea
MLISCFSFTEVAKESCKVMTSGGSMLTLSYEANKAIPNYNVMGVCKAALESSVKYLARDLGAKGIRVNAISAGPIKTLAASAVGDAKFLYKWNADHSFLRRNVDNLDVGSSALYLLSEMAGGVTGEIHYVDAGYNKVGMPDPKNIT

SEQ ID NO: 96661 - protein, 160 aa, Unknown
  Bacterial polypetide isolated from the Sargasso Sea
FVDVTTRDGFKIAHDISSYSFTALAKASKPYLNDSSALLTLTYHGSTQTLPNYNVMGLAKASLEANTRFLAASLGKENIRVNAISAGPIKTLAASGVKNFRKMLNHHSNIAPLGRTVTSEEVGNVAAFLCSDFASGITGEITYVDAGFNIAAMPLQEVED

SEQ ID NO: 96662 - protein, 202 aa, Unknown
  Bacterial polypetide isolated from the Sargasso Sea
MKGKKGLIMGVANERSIAWGISQKLAEAGAELAFTYLGDALKKRVVPLAEKLNSNVTFSCDVEKKEEVVKLFEDIKSQWGEIDFVVHAIAFSDKSELSGEYLNTTRENFQRSMLISCFSFTEVAREASKVMKEGGSMITLSYEANKAIPNYNVMGVCKAALESSVKYLARDLGAKGIRVNAISAGPIKTLAASAIGDAKFLY

SEQ ID NO: 96663 - protein, 152 aa, Unknown
  Bacterial polypetide isolated from the Sargasso Sea
ENFLRSMLISCFSLTEVAKEFSKIMKEGGSMITLSYEANKAIPNYNVMGVCKAALESSVKYLARDLGAKGIRVNAISAGPIKTLAASAIGDAKFLYKWNADHSFLKRNVDNLDVGNSALYLLSDMASGVTGEIHYVDAGYNKMGMPDPKNIT

SEQ ID NO: 96664 - protein, 258 aa, Unknown
  Bacterial polypetide isolated from the Sargasso Sea
MKGKKGLVMGVANERSIAWGISQKLSEAGAELAFTYLGDALKKRVIPLAEKLNSKVTFSCDVEKKEDVTKLFEDVKSQWGEIDFVVHAIAFSDKSELSGEYLNTTRENFLRSMLISCFSFTEVAKEASKVMKEGGSLITLSYEANKAIPNYNVMGVCKAALEASVKYLARDLGAKGMRVNAISAGPIKTLAASAIGDAKFLYKWNEDHSLLKRNVDIHDVGNSALYLLSELANGVTGEIHYVDAGYNKVGMPDPKNIT

SEQ ID NO: 96665 - protein, 173 aa, Unknown
  Bacterial polypetide isolated from the Sargasso Sea
IGYAPADQLKGDFLEATNREGFKIAHDISSYSFTAMAKEAKSMLNENSALLTLTYLGSTQTVPNYNVMGLAKASLEANTRFLAASLGKDNIRVNAISAGPIKTLAASGVKNFRKMLSQHSDRSPLGRTVTAEEVGNVAAFLCSDYASGITGEITYVDAGFNIAAMPLTEFNND

SEQ ID NO: 96666 - protein, 224 aa, Unknown
  Bacterial polypetide isolated from the Sargasso Sea
MKGKKGLIMGVANERSIAWGISQKLADAGAELAFTYLGDALKKRVIPLAEKLNSKTTFSCDVEKKDEVTKLFEDIKSQWGQIDFIVHAVAFSDKSELSGEYLNTTRENFLRSMLISCFSFTEVSKEASKIMKEGGSMLTLTYESTKAIPNYNVMGVCKSALEASVKYLARDLGQKKIRVNAISAGPIKTLAASAIGDAKFLYKWNEDHSFLKRNVDIHDVGNSA

SEQ ID NO: 96667 - protein, 252 aa, Unknown
  Bacterial polypetide isolated from the Sargasso Sea
LIMGVANERSIAWGISQKLADAGAELAFTYLGDALKKRVIPLAEKLNSKVTFSCDVEKKEDVTKLFDNIKSQWGEIDFVVHAIAFSDKSELSGEYLNTTRENFLRSMLISCFSFTEVAKEASKVMKKGGSLITLSYEANKAIPNYNVMGVCKAALESSVKYLARDLGAKGMRVNAISAGPIKTLAASAIGDAKFLYKWNEDHSLLKRNVDIHDVGNSALYLLSDLANGVTGEIHYVDAGYNKVGMPDPKNIT

SEQ ID NO: 96668 - protein, 261 aa, Unknown
  Bacterial polypetide isolated from the Sargasso Sea
MKNKKGLVMGVANQKSIAWGIAEVLSAEGASLALTYQGENFKKRVEPLAEGIDSKLIFDVDVTDESSIDKCFNHLSKEWGSLDFVVHALAFSDKSELSGRFINTSRQNFLNSLDISCFSLIDVSKRCSPLMKKGGAILTLSYLGSQRVTPNYNVMGVAKAALESSVRYLASDLGEDGIRVNAISAGPMKTLAGAAIGGARRVFRLSEQNSPLKSNPTLKSVGGTAAFLLSDYGLHVSGEVIFVDGGYHVMGMPKLDNIEKA

SEQ ID NO: 96669 - protein, 206 aa, Unknown
  Bacterial polypetide isolated from the Sargasso Sea
NSKVTFSCDVKKKEEVVKLFEDIKSKWGEIDFIVHAIAFSDKSELSGEYLNTTRENFLRSMLISCFSFTEVAKEASKIMKTGGSMITLSYEANKAIPNYNVMGVCKAALEASVKYLARDLGSKGIRVNAISAGPIKTLAASAIGDAKFLYKWNADHSFLKRNVDNLDVGNSALYLLSDMAGGVTGEIHYVDAGYNKVGMPDPKNIT

SEQ ID NO: 96670 - protein, 128 aa, Unknown
  Bacterial polypetide isolated from the Sargasso Sea
MKKGGSLLTLTYESTKAIPNYNVMGVCKSALEASVKYLARDLGSKDIRVNAISAGPIKTLAASAIGDAKFLYKWNEDHSFLKRNVNINDVGNSALYLLSDLASGVTGEIHYVDAGYNKVGMPDPKNIS

SEQ ID NO: 96671 - protein, 197 aa, Unknown
  Bacterial polypetide isolated from the Sargasso Sea
MSLMKGKKGLIMGVANERSIAWGISQKLSEAGAELAFTYLGDALKKRVVPLAEKLNSNVTFSCDVEKKEDVIKLFEDVKSQWGEIDFVVHAIAFSDKSELSGEYLNTTRENFLRSMLISCFSFTEVAKEASKVMKEGGSMITLSYEANKAIPNYNVMGVCKAALESSVKYLARDLGAKGIRVNAISAGPIKTLAASA

SEQ ID NO: 96672 - protein, 141 aa, Unknown
  Bacterial polypetide isolated from the Sargasso Sea
SFTAMAKEAKPMLNDDSALLTLTYLGSVQTVPNYNVMGLAKASLEANTRFLAASLGKDKIRVNAISAGPIKTLAASGVKNFRKMLSQHSNRAPIGRTVTAEEVGNVAAFLCSDYASGITGEITYVDGGFNIAAMPINEYES

SEQ ID NO: 96673 - protein, 180 aa, Unknown
  Bacterial polypetide isolated from the Sargasso Sea
WGQIDFVVHAVAFSDKSELSGEYLNTTRENFLRSMLISCFSFTEVAKEASKVMNKGGSMLTLTYESNKAIPNYNVMGVCKSALEASVKYLARDLGAKGIRVNAISAGPIKTLAASAIGDAKFLYKWNEDHSFLKRNVDIHDVGNSAYYLLSDLGGGVTGEIHYVDAGYNKVGMPDPKNIT

SEQ ID NO: 96674 - protein, 261 aa, Unknown
  Bacterial polypetide isolated from the Sargasso Sea
MSLMKGKKGLIMGVANERSIAWGISQKLAESGAELAFTYLGDALKKRVVPLAEKLNSKVTFSCDVEKKEEVVKLFEDIKSKWGEIDFVVHAVAFSDKSELSGEYLNTTRENFLRSMLISCFSFTEVAKEASKVMRQGGSLLTLTYESTKAIPNYNVMGVCKSALEASVKYLARDLGAKGMRVNAISAGPIKTLAASAIGDAKFLYKWNEDHSFLKRNVDIHDVGNSALYLLSDLAAGVTGEIHYVDAGYNKMGMPDPKNIK

SEQ ID NO: 96675 - protein, 118 aa, Unknown
  Bacterial polypetide isolated from the Sargasso Sea
TYESTKVIPNYNVMGVCKAALESSVKYISRDLGVKGIRVNAISAGPIKTLAASAIGDAKFLYKWSSDHSFLKRNVDIDDVGKSALYLLSDLAAGVTGEIHYVDAGYNKAGMPDPKNIT

SEQ ID NO: 96676 - protein, 265 aa, Unknown
  Bacterial polypetide isolated from the Sargasso Sea
MKGKKGLIMGVANERSIAWGISQKLADAGAELAFTYLGDALKKRVIPLAEKLNSSVILSCDVEKKEEIIKLFQDIKTKWGEIDFVVHAVAFSDKSELSGEYLNTTRENFLRSMLISCFSFTEVAKEASSIMKEGGSMLTLTYESTKAIPNYNVMGVCKSALEASVKYLARDLGAKKIRVNAISAGPIKTLAASAIGDAKFLYKWNEDHSFLKRNVDIHDVGNSALYLLSNLSDGVTGEIHYVDGGYNKVGMPDPKNRNKCLKDIA

SEQ ID NO: 96677 - protein, 141 aa, Unknown
  Bacterial polypetide isolated from the Sargasso Sea
SYISAYSLAPLCKAAKPLFSDGAGVVSLTYLGSERAIPNYNVMGVAKAALEASVRYLSAELGPEKQVRVNAISAGPIRTLASSAIGGILDMIHNVEEKAPLRRTVTQTEVGNTAAFLLSDLSSGISGQTIYVDAGYCINGM

SEQ ID NO: 96678 - protein, 161 aa, Unknown
  Bacterial polypetide isolated from the Sargasso Sea
SGEYLNTTRENFLRSMLISCFSFTEVAKEASKIMNKGGSMLTLTYESNKAIPNYNVMGVCKSALEASVKYLARDLGSKGIRINAISAGPIKTLAASAIGDAKFLYKWNEDHSFLKRNVDIHDVGNSALYLLSDLGGGVTGEIHYVDAGYNKVGMPDPKNIT

SEQ ID NO: 96679 - protein, 123 aa, Unknown
  Bacterial polypetide isolated from the Sargasso Sea
SLLTLTYESTKAIPNYNVMGVCKSALEASVKYLARDLGAKGMRVNAISAGPIKTLAASAIGDAKFLYKWNEDHSFLKRNVDIHDVGNSALYLLSDLANGVTGEIHYVDAGYNKVGMPDPKNIK

SEQ ID NO: 96680 - protein, 232 aa, Unknown
  Bacterial polypetide isolated from the Sargasso Sea
MLLNLSGKKILVTGIANNRSIAWGIAQQLSKAGAELGITYLPDDKGRFESKVRELTEQLNPSLFLPLDVQNPAQIEEIFKNIKDNWGQIDGLVHCLAFAGRDELIGDYSATTSEGFDRALNISAYSLAPLCKAAKPLFSDGAGVVSLTYLGSERAIPNYNVMGVAKAALEASVRYLSAELGPEKQVRVNAISAGPIRTLASSAIGGILDMIHNVEEKAPLRRTVTQTEVGNT

SEQ ID NO: 96681 - protein, 195 aa, Unknown
  Bacterial polypetide isolated from the Sargasso Sea
MFLEGKKFLICGLANKRSIAAGIAKSMTEQGAQLAFSYQSERLKRNVESIANELGHDILIECDVASDSSIKDMFKILEKDWNKIDGIIHSIGFAPANELEGDYLESATREGFKIAHDISSYSFTALAKEGAHMLNENSALLTLTYHGSTQSLPNYNVMGLAKASLEANTRFLAASLGKQSIRVNAISAGPIKTLA

SEQ ID NO: 96682 - protein, 234 aa, Unknown
  Bacterial polypetide isolated from the Sargasso Sea
MSLVKGKKGLIMGVANERSIAWGIAKRLSEHGAELAFTYLGDALKKRVTPLAESLNSKFTLNCNVENSDDVVKIFQEIKSKWGKLDFVVHAVAFSDRAELSGEYINTSRENFAKSMLVSCFSFTEVAKEASKIMGSGSSLLTLTYESTKVVPNYNVMGVCKAALESSVKYIAKDLGSKGIRVNAISAGPIKTLAASAIGDAKFLYKWSADHSLLKRNVDIDDVGKSALYLLSDL

SEQ ID NO: 96683 - protein, 261 aa, Unknown
  Bacterial polypetide isolated from the Sargasso Sea
MSLMKGKKGLIMGVANERSIAWGISQKLSEAGAELAFTYLGDALKKRVIPLAEKLNSKITFSCDVEKKEEVVKLFEDIKSQWGEIDFVVHAVAFSDKSELSGEYLNTTRENFLRSMLISCFSFTEVAKEASKVMKKGGSMLTLTYESTKAIPNYNVMGVCKSALEASVKYLARDLGAKGMRVNAISAGPIKTLAASAIGDAKFLYKWNEDHSFLKRNVDIHDVGNSALYLLSDLANGVTGEIHYVDAGYNKVGMPDPKNIK

SEQ ID NO: 96684 - protein, 244 aa, Unknown
  Bacterial polypetide isolated from the Sargasso Sea
MKGKKGLIMGVANERSIAWGISQKLSEAGAELAFTYLGDALKKRVVPLAEKLNSKVILSCDVEKKEEVVKLFEDIKSQWGEIDFVVHAVAFSDKSELSGEYLNTTRENFLRSMLISCFSFTEVAKEASKFMKEGSSMITLSYEANKAIPNYNVMGVCKAALESSVKYLARDLGSKGIRVNAISAGPIKTLAASAIGDAKFLYKWNADHSFLKRNVDNLDVGNSALYLLSDMASGVTGEIHYVDA

SEQ ID NO: 96685 - protein, 169 aa, Unknown
  Bacterial polypetide isolated from the Sargasso Sea
HFLIEQNYQGEYINTSRENFTKSMLVSCFSFTEIAKEASKIMKSGSSMLTLTYESTKVVPNYNVMGVCKAALESSVKYIARDLGSKGIRVNAISAGPIKTLAASAIGDAKFLYKWSADHSMLKRNVDIDDVGKSALYLLSDLSGGVTGEIHYVDGGYNKIGMPDPKNMV

SEQ ID NO: 96686 - protein, 117 aa, Unknown
  Bacterial polypetide isolated from the Sargasso Sea
YESTKVIPNYNVMGVCKAALESSVKYISRDLGTKGIRVNAISAGPIKTLAASAIGDAKFLYKWSSDHSFLKRNVDIDDVGKSALYLLSDLAAGVTGEIHYVDAGYNKAGMPDPKNIT

SEQ ID NO: 96687 - protein, 258 aa, Unknown
  Bacterial polypetide isolated from the Sargasso Sea
MKGKKGLIMGVANERSIAWGISQKLAEAGAELAFTYLGDALKKRVVPLAEKLNSNVTFSCDVEKKEEVVKLFEDIKSQWGEIDFVVHAVAFSDKSELSGEYLNTTRENFLRSMLISCFSFTEVAKEASKVMRQDGSLLTLTYESTKAIPNYNVMGVCKSALEASVKYLARDLGAKGMRVNAISAGPIKTLAASAIGDAKFLYKWNEDHSFLKRNVDIHDVGNSALYLLSDLANGVTGEIHYVDAGYNKVGMPDPKNIS

SEQ ID NO: 96688 - protein, 250 aa, Unknown
  Bacterial polypetide isolated from the Sargasso Sea
MGVANERSIAWGISQKLAEAGAELAFTYLGDALKKRVVPLAEKLNSNVTFSCDVEKKEEVVKLFEDIKSQWGEIDFVVHAVAFSDKSELSGEYLNTTRENFLRSMLISCFSFTEVAKEASKIMKQGGSLLTLTYESTKAIPNYNVMGVCKSALEASVKYLARDLGAKGMRVNAISAGPIKTLAASAIGDAKFLYKWNEDHSFLKRNVDINDVGNSALYLLSDLANGVTGEIHYVDAGYNKVGMPDPKNIS

SEQ ID NO: 96689 - protein, 260 aa, Unknown
  Bacterial polypetide isolated from the Sargasso Sea
MLLNLTGKKILVTGIANNRSIAWGIAQQLSKAGAELGITYLPDDKGRFESKVRELTEPLNPSLFLPLDVQNPAQIEEIFKNIKDNWGQIDGLVHCLAFAGRDELIGDYSATTSEGFDRALNISAYSLAPLCKAAKPLFSDGAGVVSLTYLGSERAIPNYNVMGVAKAALEASVRYLSAELGPEKQVRVNAISAGPIRTLASSAIGGILDMIHNVEEKAPLRRTVTQTEVGNTAAFLLSDLSSGISGQTIYVDAGYCINGM

SEQ ID NO: 96690 - protein, 258 aa, Unknown
  Bacterial polypetide isolated from the Sargasso Sea
MKGKKGLIMGVANERSIAWGISQKLAEAGAELAFTYLGDALKKRVIPLAEKLNSKKTFSCDVEKKEEVIKLFKDIKSQWGEIDFVVHAVAFSDKSELSGEYLNTTRENFLRSMLISCFSFTEVAKEASKVMKEGGSMLTLTYESTKAIPNYNVMGVCKSALEASVKYLARDLGSKGMRVNAISAGPIKTLAASAIGDAKFLYKWNEDHSFLKRNVDIHDVGNSALYLLSDLANGVTGEIHYVDAGYNKVGMPDPKNFS

SEQ ID NO: 96691 - protein, 263 aa, Unknown
  Bacterial polypetide isolated from the Sargasso Sea
MLLKNKKILISGLANKYSIAAGIAYAMHREGAELAFTYQNERLLKNLKPIADECGSNILIECDVSNDDSIKSSFVELSKKWNKFDGFVHSIGFAPADQLEGDFLEVTNREGFQIAHDISSYSFTAMAKESKSMLNENSALLTLTYLGSTQTMPNYNVMGLAKASLEANTRFLAASLGKDNIRVNAISAGPIKTLAASGVKNFRKMLSQHSNKAPLGRTVTAEEVGNVAAFMCSDFASGITGEITYVDAGFNIAAMPLNELNND

SEQ ID NO: 96692 - protein, 159 aa, Unknown
  Bacterial polypetide isolated from the Sargasso Sea
RIFKYYKRKFLRSMLISCFSFTEVSKEASKIMNEGGSLLTLTYESTKAIPNYNVMGVCKSALEASVKYLARDLGRKKIRVNAISAGPIKTLAASAIGDAKFLYKWNEDHSFLKRNVDIHDVGNSALYLLSNLAAGVTGEIHYVDAGYNKVGMPDPKNMN

SEQ ID NO: 96693 - protein, 250 aa, Unknown
  Bacterial polypetide isolated from the Sargasso Sea
MGVANERSIAWGISQKLSEAGANLAFTYLGDALKKRVIPLAERLGSKVTFSCDVEKKDEIIKLFENIKSEWGKIDFVVHAIAFSDKSELSGEYLNTTRENFLRSMLISCFSFTEIAKEASKIMNEGASMITLTYESNKTIPNYNVMGVCKSALESSVKYIARDLGAKSIRVNAISAGPIKTLAASAIGDAKFLYKWNEDHSFLKRNVDINDVGNSALYLLSDLSAGVTGEIHYVDAGYNKVGMPNPKNIT

SEQ ID NO: 96694 - protein, 230 aa, Unknown
  Bacterial polypetide isolated from the Sargasso Sea
MGVANDRSIAWGIAKKLSENGAELAFTYLGDALKKRVTPLAESVNSKFLLNCNVENKDDIIKTFQEIKNKWGQLDFVVHAIAFSDRAELSGEYINTSRENFAKSMLVSCFSFTEIAKEASKMMKAGSSMLTLTYESTKVVPNYNVMGVCKAALESSVKYIARDLGSKGIRVNAISAGPIKTLAASAIGDAKFLYKWSADHSLLKRNVDIDDVGKSALYLLSDLAAGVTGE

SEQ ID NO: 96695 - protein, 250 aa, Unknown
  Bacterial polypetide isolated from the Sargasso Sea
MGVANERSIAWGISKKLSEAGADLAFTYLGDALKKRVVPLAEQLNSKITFSCDVEKKDEIIKLFENIKSQWGEIDFVVHAVAFSDKSELSGEYLNTTRENFLRSMLISCFSFTEVSKEASKLMKNGGSLITLTYESTKAIPNYNVMGVCKSALESSVKYLARDLGGKGIRVNAISAGPIKTLAASAIGDAKFLYKWNESHSFLKRNVDINDVGNSALYLLSDLASGVTGEIHYVDAGYNKMGMPDPKNIS

SEQ ID NO: 96696 - protein, 241 aa, Unknown
  Bacterial polypetide isolated from the Sargasso Sea
AWGIAQKLSEAGAELAFTYLGDALKKRVVPLAEKLNSNVTFSCDVEKKEDVIKLFEDVKSTWGEIDFVVHAIAFSDKSELSGEYLNTTRENFLRSMLISCFSFTEVAREASKIMKTDGSMITLSYEANKAIPNYNVMGVCKAALESSVKYLARDLGTKGIRVNAISAGPIKTLAASAIGDAKFLYKWNADHSFLKRNVDNLDVGNSALYLLSDMAGGVTGEIHYVDAGYNKVGMPDPKNIS

SEQ ID NO: 96697 - protein, 252 aa, Unknown
  Bacterial polypetide isolated from the Sargasso Sea
LIMGVANERSIAWGISQKLAESGAELAFTYLGDALKKRVIPLAEKLNSKITFSCDVEKKEEVIKLFEDIKSKWGQIDFVVHAVAFSDKSELSGEYLNTTRENFLRSMLISCFSFTEVAKEASKIMSKGGSMLTLTYESNKAIPNYNVMGVCKSALEASVKYLARDLGSKGIRVNAISAGPIKTLAASAIGDAKFLYKWNEDHSFLKRNVDIHDVGNSALYLLSDLGGGVTGEIHYVDAGYNKVGMPDPKNIA

SEQ ID NO: 96698 - protein, 260 aa, Unknown
  Bacterial polypetide isolated from the Sargasso Sea
MLLNLTGKKILVTGIANNRSIAWGIAQQLSKAGAELGITYLPDDKGRFESKVRELTEPLNPSLFLPLDVQNPAQIEEIFQNIKNNWGQIDGLVHCLAFAGRDELIGDYSATTSEGFDRALNISAYSLAPLCKAAKPLFSDGAGVVSLTYLGSERAIPNYNVMGVAKAALEASVRYLSAELGPEKQVRVNAISAGPIRTLASSAIGGILDMIHNVEEKAPLRRTVTQTEVGNTAAFLLSDLSSGISGQTIYVDAGYCINGM

SEQ ID NO: 96699 - protein, 213 aa, Unknown
  Bacterial polypetide isolated from the Sargasso Sea
MKGKKGLIMGVANERSIAWGIAQKLSEAGAELAFTYLGEALKKRVIPLAEKLNSKVTFSCDVEKKEEVVKLFKDIKSTWGEIDFVVHAIAFSDKSELSGEYLNTTRENFLRSMLISCFSFTEVAKEASTVMKENGSMVTLSYEANKAIPNYNVMGVCKAALEASVKYLARDLGSKGIRVNAISAGPIKTLAASAIGDAKFLYKWNADHSFLKR

SEQ ID NO: 96700 - protein, 215 aa, Unknown
  Bacterial polypetide isolated from the Sargasso Sea
MGVANERSIAWGIAQKLSEAGAELAFTYLGDALKKRVVPLAEKLNSNVTFSCDVEKKEDVIKLFEDVKSNWGEIDFVVHAIAFSDKSELSGEYLNTTRENFLRSMLISCFSFTEVAKEASKVMKEGGSMITLSYEANKAIPNYNVMGVCKAALESSVKYLARDLGAKGIRVNAISAGPIKTLAASAIGDAKFLYKWNADHSFLKRNVDNLDVGNS

SEQ ID NO: 96701 - protein, 263 aa, Unknown
  Bacterial polypetide isolated from the Sargasso Sea
MLLENKKFLIAGIANKYSIAAGIAYAMHKEGAELAFSYQNERLLKNIRPIAEACGSKILIECDVSDDDSIKSSFKELKQCWSTFDGFVHSIGYAPSDQLEGDFVDVTTREGFKVAHDISSYSFTAMAKESKSMLNENSALLTLSYLGSIQTMPNYNVMGLAKASLEANTRFLAASLGRNNIRVNAISAGPIKTLAASGVKNFRKMLSQHSKRAPLGRTVTAEEVGNAAAFLCSDYASGITGEITYVDAGFNIAAMPLNEIEHD

SEQ ID NO: 96702 - protein, 258 aa, Unknown
  Bacterial polypetide isolated from the Sargasso Sea
MKGKKGLIMGVANERSIAWGISQKLAEAGAELAFTYLGDALKKRVVPLAEKLNSNVTFSCDVEKKEEVVKLFEDIKSQWGEIDFVVHAVAFSDKSELSGEYLNTTRENFLRSMLISCFSFTEVAKEASKVMKQGGSLLTLTYESTKAIPNYNVMGVCKSALEASVKYLARDLGAKGMRVNAISAGPIKTLAASAIGDAKFLYKWNEDHSFLKRNVDIHDVGNSALYLLSDLANGVTGEIHYVDAGYNKVGMPDPKNIT

SEQ ID NO: 96703 - protein, 169 aa, Unknown
  Bacterial polypetide isolated from the Sargasso Sea
VIHAAAYSEKDELNGRYIDTSKDNFIKSLNISCFSFTKIAKLVEPIMNEGGSLLTLSFYGANKVMPNYNVMGVAKAALETSVKYLSVDLGEKNIRVNAISAGPMRTLAGAAIANSREVFKYTQENSVLKRNVSLEELGNTALYFVSDLSNAVTGEIHYVDCGFNIKGMP

SEQ ID NO: 96704 - protein, 258 aa, Unknown
  Bacterial polypetide isolated from the Sargasso Sea
MKGKKGLIMGVANERSIAWGISQKLAEAGAELAFTYLGDALKKRVVPLAEKLNSNVTFSCDVEKKEEVVKLFEDVKSQWGEIDFVVHAIAFSDKSELSGEYLNTTRENFLRSMLISCFSFTEVAREASKIMKQGGSMITLSYEANKAIPNYNVMGVCKAALESSVKYLARDLGAKNIRVNAISAGPIKTLAASAIGDAKFLYKWNADHSFLKRNVDNLDVGNSALYLLSDMAGGVTGEIHYVDAGYNKVGMPDPKNIT

SEQ ID NO: 96705 - protein, 250 aa, Unknown
  Bacterial polypetide isolated from the Sargasso Sea
MGVANERSIAWGISQKLAEAGAELAFTYLGDALKKRVVPLAEKLNSNVTFSCDVEKKEEVTKLFEDIKSKWGEIDFVVHAIAFSDKSELSGEYLNTTRENFLRSMLISCFSFTEVAKEASKIMKQGGSMITLSYEANKAIPNYNVMGVCKAALEASVKYLARDLGSKGIRINAISAGPIKTLAASAIGDAKFLYKWNADHSFLKRNVDNLDVGNSALYLLSDMAGGVTGEIHYVDAGYNKVGMPDPKNIT

SEQ ID NO: 96706 - protein, 258 aa, Unknown
  Bacterial polypetide isolated from the Sargasso Sea
MKGKKGLIMGVANERSIAWGISQKLSEAGADLAFTYLGDALKKRVIPLAKKLNSKITISCDVEKKEEIIKLFEDIKTEWGKIDFVVHAVAFSDKSELSGEYINTTRENFLRSMLISCFSFTEVAKEAAKIMNEGGSMLTLTYESNKAIPNYNVMGVCKSALEASVKYLARDLGTKSIRVNAISAGPIKTLAASAIGDAKFLYKWNEDHSFLQRNVDINDVGNSALYLLSNLAAGVTGEIHYVDAGYNKVGMPNPKNIS

SEQ ID NO: 96707 - protein, 258 aa, Unknown
  Bacterial polypetide isolated from the Sargasso Sea
MKGKKGLIMGVANERSIAWGISQKLSEAGAELAFTYLGDALKKRVVPLAQKLNSNVTFSCDVEKKEDVIKLFEDVKSQWGEIDFVVHAIAFSDKSELSGEYLNTTRENFLRSMLISCFSFTEVAKEASKVMKNGGSMITLSYEANKAIPNYNVMGVCKAALESSVKYLARDLGAKGIRVNAISAGPIKTLAASAIGDAKFLYKWNADHSFLKRNVDNIDVGNSALYLLSDMAGGVTGEIHYVDAGYNKVGMPDPKNIS

SEQ ID NO: 96708 - protein, 258 aa, Unknown
  Bacterial polypetide isolated from the Sargasso Sea
MKGKKGLIMGVANERSIAWGISQKLAEAGAELAFTYLGDALKKRVIPLAEKLNSKVTFSCDVEKKEEVTKLFEDIKSQWGQIDFVVHAVAFSDKSELSGEYLNTSRENFLRSMLISCFSFTEVAKEASKIMNKGGSMLTLTYESNKAIPNYNVMGVCKSALEASVKYLARDLGTRGIRVNAISAGPIKTLAASAIGDAKFLYKWNEDHSFLKRNVDIHDVGNSALYLLSSLGGGVTGEIHYVDAGYNKVGMPDPKNIT

SEQ ID NO: 96709 - protein, 261 aa, Unknown
  Bacterial polypetide isolated from the Sargasso Sea
MSLMKGKKGLIMGVANERSIAWGISQKLAEAGAELAFTYLGDALKKRVIPLAEKLNSKITFSCDVEKKEEIIKLFEDIKSQWGEIDFVVHAVAFSDKSELSGEYLNTTRENFLRSMLISCFSFTEVAKEASKIMKKSGSLLTLTYESTKAIPNYNVMGVCKSALEASVKYLARDLGAKGMRVNAISAGPIKTLAASAIGDAKFLYKWNEDHSFLKRNVDIHDVGNSALYLLSDLANGVTGEIHYVDAGYNKVGMPNPKNIT

SEQ ID NO: 96710 - protein, 258 aa, Unknown
  Bacterial polypetide isolated from the Sargasso Sea
MKGKKGLIMGVANERSIAWGISQKLSEAGAELAFTYLGDALKKRVIPLAEKLNSKVTFSCDVEKKEEVIKLFEDIKSKWGQIDFVVHAVAFSDKSQLSGEYLNTTRENFLRSMLISCFSFTEVAKEASKIMNKGGSMLTLTYESNKAIPNYNVMGVCKSALEASVKYLARDLGAKGIRVNAISAGPIKTLAASAIGDAKFLYKWNEDHSFLKRNVDIHDVGNSALYLLSDLGGGVTGEIHYVDAGYNKVGMPDPKNIS

SEQ ID NO: 96711 - protein, 265 aa, Unknown
  Bacterial polypetide isolated from the Sargasso Sea
MLLKNKKILITGLANKYSIAAGIAYAMHREGAKLAFTYQNERLLKNLKPIADECGSNILIECDVSSDDSIRSSFAELSKKWKKFDGFVHSIGFAPADQLEGDFLEVTNREGFKIAHDISSYSFTAMAKESKSMLNENSALLTLTYLGSTQTMPNYNVMGLAKASLEANTRFLAASLGKHNIRVNAISAGPIKTLAASGVKNFRKMLSQHSNKSPLGRTVTAEEVGNVAAFMCSDYASGITGEITYVDAGFNIAAMPLTLNELKDD

SEQ ID NO: 96712 - protein, 258 aa, Unknown
  Bacterial polypetide isolated from the Sargasso Sea
MKGKKGLIMGVANERSIAWGISQKLSEAGAELAFTYLGDALKKRVVPLAEKLNSNVTFSCDVEKKEDVIKLFEDVKSQWGQIDFVVHAIAFSDKSELSGEYLNTSRENFLRSMLISCFSFTEVAKEASKVMKEGSSMITLSYEANKAIPNYNVMGVCKAALESSVKYLARDLGAKGIRVNAISAGPIKTLAASAIGDAKFLYKWNADHSFLKRNVDNIDVGNSALYLLSDMAGGVTGEIHYVDAGYNKVGMPDPKNIS

SEQ ID NO: 96713 - protein, 201 aa, Unknown
  Bacterial polypetide isolated from the Sargasso Sea
FSCDVEKKEEVIKLFDDIKSKWKQIDFIVHAVAFSDKSELSGEYLNTTRENFLRSMLISCFSFTEVAKEASKIMNKGGSMLTLTYESNKAIPNYNVMGVCKSALEASVKYLARDLGSKGIRVNAISAGPIKTLAASAIGDAKFLYKWNEDHSFLKRNVDIHDVGNSALYLLSDLGGGVTGEIHYVDAGYNKVGMPDPKNIS

SEQ ID NO: 96714 - protein, 261 aa, Unknown
  Bacterial polypetide isolated from the Sargasso Sea
MDLVKGKKGLIMGVANDRSIAWGIAKRLSENGAELAFTYLGDALKKRVTPLADSLKSQFLLNCNVENKDDIKKTFEEIKKKWGQIDFVVHAIAFSDRAELSGQYIDTSRENFIKSMLVSCFSFTEIAKEASKIMKDGSSMLTLTYESTKVIPNYNVMGVCKAALESSVKYISRDLGTKGIRVNAISAGPIKTLAASAIGDAKFLYKWSSDHSFLKRNVDIDDVGKSALYLLSDLAAGVTGEIHYVDAGYNKAGMPDPKNIT

SEQ ID NO: 96715 - protein, 164 aa, Unknown
  Bacterial polypetide isolated from the Sargasso Sea
SELSGEYLNTSRENFLKSMLISCFSFTEVSKEASKIMKNGGSLLTLSYESNKAIPNYNVMGVCKSALEASVKYLARDLGRKKIRVNAISAGPIKTLAASAIGDAKFLYKWNEDHSFLKRNVDIHDVGNSALYLLSDLANGVTGEIHYVDAGYNKVGMPDPKNIS

SEQ ID NO: 96716 - protein, 258 aa, Unknown
  Bacterial polypetide isolated from the Sargasso Sea
MKGKKGLIMGVANERSIAWGISQKLSEAGAELAFTYLGDALKKRVVPLAEKLSSNVTFSCDVEKKEDVIKLFEDVKSQWGEIDFVVHAIAFSDKSELSGEYLNTTRENFLRSMLISCFSFTEVAKEASKVMKEGGSMITLSYEANKAIPNYNVMGVCKAALESSVKYLARDLGAKGIRVNAISAGPIKTLAASAIGDAKFLYKWNADHSFLKRNVDNIDVGNSALYLLSDMAGGVTGEIHYVDAGYNKVGMPDPKNIS

SEQ ID NO: 96717 - protein, 262 aa, Unknown
  Bacterial polypetide isolated from the Sargasso Sea
MLLKNKKILICGLANKYSIAAGIAESMHREGAELAFTYQNERLLKNLKPIAESCNSSLLLECDVSNDDSINKAIGKLSQKWGNFDGFVHSIGFAPADQLEGNFVDVTTRDGFKIAHDISSYSFTALAKASKPYLNDNSALLTLTYHGSTQTLPNYNVMGLAKASLEANTRFLAASLGKENIRVNAISAGPIKTLAASGVKNFRKMLSHHSNIAPLGRTVTSEEVGNVAAFLCSDFASGITGEITYVDAGFNIAAMPLQEVED

SEQ ID NO: 96718 - protein, 258 aa, Unknown
  Bacterial polypetide isolated from the Sargasso Sea
MKGKKGLIMGVANERSIAWGISQKLADAGAELAFTYLGDALKKRVVPLAEKLNSNITFSCDVEKKEEVVKLFEDIKSQWGEIDFVVHAVAFSDKSELSGEYLNTTRENFLRSMLISCFSFTEVAKEASKVMKQGGSLLTLTYESTKAIPNYNVMGVCKSALEASVKYLARDLGAKGMRVNAISAGPIKTLAASAIGDAKFLYKWNEDHSFLKRNVDIHDVGNSALYLLSDLANGVTGEIHYVDAGYNKVGMPDPKNIT

SEQ ID NO: 96719 - protein, 258 aa, Unknown
  Bacterial polypetide isolated from the Sargasso Sea
MQGKKGLVMGVANERSIAWGISQKLAEAGAELAFTYLGDALKKRVVPLAEKLNSNLTFSCDVEKKDEVIKLFEDIKSKWGKIDFVVHAVAFSDKSELSGEYLNTTRENFLRSMLISCFSFTEVAKEASKVMNKGGSMLTLTYESNKAIPNYNVMGVCKSALEASVKYLARDLGSKGIRVNAISAGPIKTLAASAIGDAKFFYKWNEDHSFLKRNVDIHDVGNSALYLLSDLGGGVTGEIHYVDAGYNKVGMPDPKNIS

SEQ ID NO: 96720 - protein, 258 aa, Unknown
  Bacterial polypetide isolated from the Sargasso Sea
MKGKKGLIMGVANERSIAWGISQKLAEAGAELAFTYLGDALKKRVIPLAEKLNSKITFSCDVEKKEEITKLFEDIKSKWGQIDFVVHAVAFSDKSELSGEYLNTTRENFLRSMLISCFSFTEVAKEASKIMNKDGSMLTLTYESNKAIPNYNVMGVCKSALEASVKYLARDLGAKGIRVNAISAGPIKTLAASAIGDAKFLYKWNEDHSFLKRNVDIHDVGNSALYLLSTLGGGVTGEIHYVDAGYNKVGMPDPKNIT

SEQ ID NO: 96721 - protein, 261 aa, Unknown
  Bacterial polypetide isolated from the Sargasso Sea
MNLMKGKKGLIMGVANERSIAWGISQKLAEAGAELAFTYLGDALKKRVVPLAEKLNSKATFSCDVEKKEDVIKLFKDVKSSWDEIDFVVHAIAFSDKSELSGEYLNTTRENFLRSMLISCFSFTEVAREAAKIMKPNGSMVTLTYESNKAIPNYNVMGICKSALEASVKYLARDLGAKKIRVNAISAGPIKTLAASAIGDAKFLYKWNEDHSFLKRNVDIHDVGNSALYLLSDLAGGVTGEIHYVDAGYNKVGMPDPKNIT

SEQ ID NO: 96722 - protein, 258 aa, Unknown
  Bacterial polypetide isolated from the Sargasso Sea
MKGKKGLIMGVANERSIAWGISQKLAEAGAELAFTYLGDALKKRVIPLAEKLNSKVTFSCDVEKKEEIEKLFENIKSNWGEIDFVVHAVAFSDKSELSGEYLNTTRENFLRSMLISCFSFTEVAKEASKVMKSNGSMLTLTYESNKAIPNYNVMGVCKSALEASVKYLARDLGKKNIRVNAISAGPIKTLAASAIGDAKFLYKWNEDHSFLKRNVDIHDVGNSALYLLSDLANGVTGEIHYVDAGYNKVGMPDPKNIS

SEQ ID NO: 96723 - protein, 257 aa, Unknown
  Bacterial polypetide isolated from the Sargasso Sea
MLKNKKGIIFGIANDHSIAWGIAKKMHENGAKLAITYQNEILLKRVKPLSEQIDADLLLECDFDKTNSLEFVIDEVKNKWGELDFVIHAAAYSDKNELNGRYIETSKDNFLRSLSVSCFSFTKISKLTQPIMKSGGSLLTLSFYGSTKVMPNYNVMGVAKAALETSVKYLSVDLGENNIRVNAISAGPMRTLAGAAIANAREVYKYTEENSSLKRNVKLDELGNAAVYFVSDLSKAVTGEIHYVDCGFNIKGMPKNY

SEQ ID NO: 96724 - protein, 261 aa, Unknown
  Bacterial polypetide isolated from the Sargasso Sea
MSLVKGKKGLIMGVANERSIAWGISQKLSGSGAELAFTYLGDALKKRVIPLAKSLNSEFTLSCNVENKDEVIKLFEDIKAKWGQIDFVVHAIAFSDKSELSGEYLNTTRENFLKSMLVSCFSFTEIAKEASKIMKKGGSMLTLTYESNKAIPNYNVMGVCKSALEASVKYLARDLGSKGIRVNAISAGPIKTLAASAIGDAKFLYKWNEDHSFLKRNVDINDVGNSALYLLSDLASGVTGEIHYVDAGYNKVGMPDPKNIS

SEQ ID NO: 96725 - protein, 258 aa, Unknown
  Bacterial polypetide isolated from the Sargasso Sea
MKGKKGLIMGVANERSIAWGIAQKLSEAGAELAFTYLGDALKKRVIPLAEKLKSKITFNCDVENKDDVIELFKDVKKEWGQIDFVVHAVAFSDKSELSGEYLNTTRENFLRSMLISCFSFTEVAKESSKIMKEGGSMITLSYEANKAIPNYNVMGVCKAALESSVKYLARDLGAKSIRVNAISAGPIKTLAASAIGDAKFLYKWNADHSFLKRNVDNLDVGNSALYLLSDMASGVTGEIHYVDAGYNKMGMPDPKNIT

SEQ ID NO: 96726 - protein, 262 aa, Unknown
  Bacterial polypetide isolated from the Sargasso Sea
MLLKNKKIVIFGLANKYSIATGIARSMHEQGAELAFAYQNERLLKNIKPIAEELGSEILIECDVSNDNSIDQAFKDLTNQWNKFDGLVHSIGFAPADQLEGNFVDVTTREGFKVAHDISSYSFTALAKASKPYLNENAALLTLTYLGSIQTLPNYNVMGLAKASLEANTRFLAASMGKDNIRVNAISAGPIKTLAASGVKNFRKMLSQHSKRAPLGRTVTADEVGNVAAFLCSDYASGVTGEITYVDAGFNISAMPLDELEE

SEQ ID NO: 96727 - protein, 261 aa, Unknown
  Bacterial polypetide isolated from the Sargasso Sea
MSLMKGKKGLIMGVANERSIAWGIAQKLAEAGAELSFTYLGDALKKRVIPLAEKLNSNVTFSCDVENKEEVVKLFEDVKKKWGQIDFVVHAIAFSDRSELSGEYLNTTRENFLRSMLISCFSFTEVAREASNIMKEGGSMLTLTYESTKAIPNYNVMGVCKSALESSVKYIARDLGTKGIRVNAISAGPIKTLAASAIGDAKFLYKWNEDHSFLKRNVDIHDVGNSALYLLSDLGGGVTGEIHYVDAGYNKVGMPDPKNIT

SEQ ID NO: 96728 - protein, 258 aa, Unknown
  Bacterial polypetide isolated from the Sargasso Sea
MKGKKGLVMGVANERSIAWGISQKLAEAGAELAFTYLGDALKKRVIPLAEKLNSKVTFSCDVEKKEDVTKLFEDIKSQWGEIDFVVHAIAFSDKSELSGEYLNTTRENFLRSMLISCFSFTEVAKEATKVMKEGGSLITLSYEANKAIPNYNVMGVCKAALESSVKYLARDLGAKGMRVNAISAGPIKTLAASAIGDAKFLYKWNEDHSLLKRNVDIHDVGNSALYLLSDLANGVTGEIHYVDAGYNKVGMPDPKNIS

SEQ ID NO: 96729 - protein, 258 aa, Unknown
  Bacterial polypetide isolated from the Sargasso Sea
MKGKKGLIMGVANERSIAWGISQKLAEAGAELAFTYLGDALKKRVVPLAEKLNSNVTFSCDVEKKDEVIKLFEDIKSKWGQIDFVVHAVAFSDKSELSGEYLNTTRENFLRSMLISCFSFTEVAKEASKVMNKEGSMLTLTYESNKAIPNYNVMGVCKSALEASVKYLARDLGSKGIRVNAISAGPIKTLAASAIGDAKFLYKWNEDHSFLKRNVDIHDVGNSALYLLSGLGGGVTGEIHYVDAGYNKVGMPDPKNIT

SEQ ID NO: 96730 - protein, 262 aa, Unknown
  Bacterial polypetide isolated from the Sargasso Sea
MLLKNKKILICGLANKYSIAAGIAESMHREGAELAFTYQNERLLKNLKPIAKSCNSTILIECDVSDDDSINKAIGELSKKWENFDGFVHSIGFAPADQLEGNFVDVTTRDGFKIAHDISSYSFTALAKASKPYLNDSSALLTLTYHGSTQTLPNYNVMGLAKASLEANTRFLAASLGKENIRVNAISAGPIKTLAASGVKNFRKMLNHHSNIAPLGRTVTSEEVGNVAAFLCSDFASGVTGEITYVDAGFNIAAMPLQEVED

SEQ ID NO: 96731 - protein, 258 aa, Unknown
  Bacterial polypetide isolated from the Sargasso Sea
MKGKKGLIMGVANERSIAWGISQKLAEAGAELAFTYLGDALKKRVVPLAEKLNSNVTFSCDVEKKEEVVKLFEDIKSQWGKIDFVAHAVAFSDKSELSGEYLNTTRENFLRSMLISCFSFTEVAKEASKVMKQGGSLLTLTYESSKAIPNYNVMGVCKSALEASVKYLARDLGAKGMRVNAISAGPIKTLAASAIGDAKFLYKWNEDHSFLKRNVDIHDVGNSALYLLSDLANGVTGEIHYVDAGYNKVGMPDPKNIT

SEQ ID NO: 96732 - protein, 88 aa, Unknown
  Bacterial polypetide isolated from the Sargasso Sea
PLGKKGIRVNAISAGPIKTLAASGVKNFRSMLKEYANRAPLGRAVTTEEVGNVAAFLCSDLASGITGEITYVDAGFNTSAMSLIPSKE

SEQ ID NO: 96733 - protein, 226 aa, Unknown
  Bacterial polypetide isolated from the Sargasso Sea
AFTYLGDALKKRVIPLAEKLNSKVTFSCDVEKKDEVIKLFENVKSKWGEIDFVVHAVAFSEKSELSGEYLNTSRENFLKSMLISCFSFTEVSKEASKIMKDGGSLLTLTYESNKAIPNYNVMGVCKSALEASVKYLARDLGQKKIRVNAISAGPIKTLAASAIGDAKFLYKWNEDHSFLKRNVDIHDVGNSALYLLSDLANGVTGEIHYVDAGYNKVGMPDPKNIS

SEQ ID NO: 96734 - protein, 258 aa, Unknown
  Bacterial polypetide isolated from the Sargasso Sea
MKGKKGLIMGVANERSIAWGISQKLAEAGAELAFTYLGDALKKRVIPLAEKLNSKITFSCDVEKKNEVIKLFEDIKSQWGDIDFVVHAVAFSDKSELSGEYLNTSRENFLRSMLISCFSFTEVSKEASKIMKKGGSMITLTYESTKAIPNYNVMGVCKSALEASVKYLARDLGAKGIRVNAISAGPIKTLAASAIGDAKFLYKWNENHSFLKRNVDIHDVGNSALYLLSDLAAGVTGEIHYVDAGYNKVGMPDPKNIS

SEQ ID NO: 96735 - protein, 221 aa, Unknown
  Bacterial polypetide isolated from the Sargasso Sea
GDALKKRVIPLAEKLNSKVTFSCDVEKKDEVVKLFEDIKSQWGEIDFVVHAVAFSDKSELSGEYLNTSRENFLKSMLISCFSFTEVAKEASKIMKKDGSLLTLTYESTKAIPNYNVMGVCKSALEASVKYLARDLGAKRLRVNAISAGPIKTLAASAIGDAKFLYKWNEDHSFLKRNVDIHDVGNSALYLLSDLASGVTGEIHYVDAGYNKVGMPDPKNIT

SEQ ID NO: 96736 - protein, 124 aa, Unknown
  Bacterial polypetide isolated from the Sargasso Sea
MQGRNGAMLTLSYLGAIRSMPNYNVMGLAKASLEANVRYMAANLGPEGIRVNAISAGPIRTLAASGISGMRDFLTHVENVSPLRRNVTIEEVGNVAAFLCSDYASAVTGEITYVDSGFSTIGMS

SEQ ID NO: 96737 - protein, 258 aa, Unknown
  Bacterial polypetide isolated from the Sargasso Sea
MKGKKGLIMGVANERSIAWGISQKLSEAGAELAFTYLGDALKKRVVPLAEKLNSNITFSCDVEKKDEVIKLFEDIKSKWGQIDFVVHAVAFSDKSELSGEYLKTTRENFLRSMLISCFSFTEVAKEASKVMNKGGSMLTLTYESNKAIPNYNVMGVCKSALEASVKYLARDLGSQGIRVNAISAGPIKTLAASAIGDAKFLYKWNEDHSFLKRNVDIHDVGNSALYLLSNLGGGVTGEIHYVDAGYNKVGMPDPKNIT

SEQ ID NO: 96738 - protein, 258 aa, Unknown
  Bacterial polypetide isolated from the Sargasso Sea
MKGKKGLIMGVANDRSIAWGISQKLAEAGAELAFTYLGDALKKRVVPLAEKLNSKLTFSCDVEKKEDVIKLFEDVKSQWGEIDFVVHAIAFSDKSELSGEYLNTTRENFLRSMLISCFSFTEVAKEASKVMKDGGSLITLSYEANKAIPNYNVMGVCKAALESSVKYLARDLGAKGMRVNAISAGPIKTLAASAIGDAKFLYKWNEDHSLLKRNVDIHDVGNSALYLLSDLANGVTGEIHYVDAGYNKVGMPDPKNIT

SEQ ID NO: 96739 - protein, 258 aa, Unknown
  Bacterial polypetide isolated from the Sargasso Sea
MKGKKGLIMGVANERSIAWGISQKLADAGAELAFTYLGEALKKRVIPLAEKLNSKMTFSCDVEKKEEIIKLFEDIKSQWGEIDFIVHAVAFSDKSELSGEYLNTTRENFLRSMLISCFSFTEVAREASKVMKSGSSMLTLTYESTKAIPNYNVMGVCKSALEASVKYLARDLGAKGVRVNAISAGPIKTLAASAIGDAKFLYKWNEDHSFLKRNVDIHDVGNSALYLLSELANGVTGEIHYVDAGYNKVGMPDPKNIS

SEQ ID NO: 96740 - protein, 260 aa, Unknown
  Bacterial polypetide isolated from the Sargasso Sea
MKGKKGLIMGVANERSIAWGISKKLAEAGAELAFTYLGDALKKRVIPLAEKLNSNITFSCDVEKKEEIIKLFEDIKSKWGKIDFIVHAVAFSDKSELSGEYLNTTRENFLRSMLISCFSFTEVAQEASKIMNKDGSMLTLTYESNKAIPNYNVMGVCKSALEASVKYIARDLGSKGIRVNAISAGPIKTLAASAIGDAKFLYKWNEDHSFLKRNVDINDVGNSALYLLSSLGGGVTGEIHYVDAGYNKVGMPDPKNISEN

SEQ ID NO: 96741 - protein, 265 aa, Unknown
  Bacterial polypetide isolated from the Sargasso Sea
MLLKNKKILISGLANKYSIAAGIAYAMYREGAELAFTYQNERLLKNLKPIADECGSNILIECDVSNDDSIKSSFAELSKKWKKFDGFVHSIGFAPADQLEGDFLEVTNREGFKIAHDISSYSFTAMAKESKSMLNENSALLTLTYLGSTQTMPNYNVMGLAKASLEANTRFLAASLGKYNIRVNAISAGPIKTLAASGVKNFRKMLSQHSNKAPLGRTVTAEEVGNVAAFMCSDYASGITGEITYVDAGFNIAAMPLTLDGHKDD

SEQ ID NO: 96742 - protein, 258 aa, Unknown
  Bacterial polypetide isolated from the Sargasso Sea
MKGKKGLIMGVANERSIAWGISQKLSEAGAELAFTYLGEALKKRVVPLAEKLNSKITFSCDVEKKGDIVKLFDDVKSKWGEIDFIVHAVAFSDKSELSGEYLNTSRENFLRSMLISCFSFTEVSKEASKIMREGGSLLTLTYESTKAIPNYNVMGVCKSALEASVKYLARDLGLKKIRVNAISAGPIKTLAASAIGDAKFLYKWNEDHSFLKRNVDIHDVGNSALYLLSNLAAGVTGEIHYVDAGYNKVGMPDPKNMT

SEQ ID NO: 96743 - protein, 261 aa, Unknown
  Bacterial polypetide isolated from the Sargasso Sea
MSLMKGKKGLIMGVANERSIAWGISQKLSEAGAELAFTYLGDALKKRVVPLAEKLNSNVTFSCDVEKKEDVIKLFEDVKTQWGEIDFVVHAIAFSDKSELSGEYLNTTRENFLRSMLISCFSFTEVAKEASKVMKEGGSMITLSYEANKAIPNYNVMGVCKAALESSVKYLARDLGAKGIRVNAISAGPIKTLAASAIGDAKFLYKWNADHSFLKRNVDNIDVGNSALYLLSDMAGGVTGEIHYVDAGYNKVGMPDPKNIS

SEQ ID NO: 96744 - protein, 261 aa, Unknown
  Bacterial polypetide isolated from the Sargasso Sea
MSLLKGKKGLIMGVANDRSIAWGIAKKLSENGAELAFTYLGDTLKKRVIPLAESLKSNFTLNCDVEKKEDIIKVFKDIQNKWGSLDFIVHAVAFSDRSELSGEYLNTSRENFLRSMLISCFSFTEVAKEASKVMEEGGSLITLSYEANKAIPNYNVMGVCKAALESSVKYLARDLGAKGIRVNAISAGPIKTLAASAIGDAKFLYKWNEDHSLLKRNVDIHDVGNSALYLLSDLANGVTGEIHYVDAGYNKVGMPDPKNIT

SEQ ID NO: 96745 - protein, 258 aa, Unknown
  Bacterial polypetide isolated from the Sargasso Sea
MKGKKGLIMGVANERSIAWGISQKLAEAGAELAFTYLGDALKKRVIPLAEKLNSKVTFSCDVEKKEDVKKLFEDVKSQWGEIDFVVHAIAFSDKSELSGEYLNTTRENFLRSMLISCFSFTEVAREASKVMKEGGSLITLSYEANKAIPNYNVMGVCKAALESSVKYLARDLGAKGIRVNAISAGPIKTLAASAIGDAKFLYKWNEDHSLLKRNVDIHDVGNSALYLLSELANGVTGEIHYVDAGYNKVGMPDPKNIT

SEQ ID NO: 96746 - protein, 222 aa, Unknown
  Bacterial polypetide isolated from the Sargasso Sea
MGDALKIRVIPLAEKLNSKITFSCDVEKKEDVIKLFEDVKSSWGEIDFVVHAIAFSDKSELSGEYLNTSRENFLRSMLISCFSFTEIAREAAKIMKQNGSMITLTYESTKTIPNYNVMGVCKSALEASVKYLARDLGSKQIRVNAISAGPIKTLAASAIGDAKFLYKWNEDHSFLKRNVDIYDVGNSALYLLSDLAGGVTGEIHYVDAGYNKVGMPDPKNMS

SEQ ID NO: 96747 - protein, 258 aa, Unknown
  Bacterial polypetide isolated from the Sargasso Sea
MKGKKGLIMGVANERSIAWGISQKLAEAGAELAFTYLGDALKKRVIPLAEKLNSNVTFSCDVEKKEEVVKLFENIKSQWGEIDFVVHAVAFSDKSELSGEYLNTSRENFLRSMLISCFSFTEVAKEASKIMKQGGSLLTLTYESTKAIPNYNVMGVCKSALEASVKYLARDLGAKGMRVNAISAGPIKTLAASAIGDAKFLYKWNEDHSLLKRNVDIHDVGNSALYLLSDLANGVTGEIHYVDAGYNKVGMPDPKNIT

SEQ ID NO: 96748 - protein, 201 aa, Unknown
  Bacterial polypetide isolated from the Sargasso Sea
MKGKKGLIMGVANERSIAWGISQKLAEAGAELAFTYLGDALKKRVVPLAEKLNSNVTFSCDVEKKEEVVKLFEDVKSQWGEIDFVVHAIAFSDKSELSGQYLNTTRENFLRSMLISCFSFTEVAREASKIMKQGGSMITLSYEANKAIPNYNVMGVCKAALESSVKYLARDLGAKNIRVNAISAGPIKTLAASAIGDAKFL

SEQ ID NO: 96749 - protein, 250 aa, Unknown
  Bacterial polypetide isolated from the Sargasso Sea
VANKYSIAAGIAQSMHKQGAELAFTYQNERLLKNIKEIADACDSNILIECDVSDDESIKSSFKSLKEKWSSFDGFVHSIGYAPADQLEGDFLEVTSREGFKIAHDISSYSFTAMAKESKPMLNENSALLTLTYLGSRQTMPNYNVMGLAKASLEANTRFLAASLGKDNIRVNAISAGPIKTLAASGVKNFRKMLAQHSNKAPLGRTVSAEEVGNVAAFMCSDYASGITGEITYVDAGFNIAAMPLNLHND

SEQ ID NO: 96750 - protein, 258 aa, Unknown
  Bacterial polypetide isolated from the Sargasso Sea
MKSKKGLIMGVANERSIAWGIAQKLSEAGAELAFTYLGDALKKRVVPLAEKLNSNVTFSCDVEKKEDVIKLFEDVKSTWGEIDFVVHAIAFSDKSELSGEYLNTTRENFLRSMLISCFSFTEIAREASKVMKGGGSMVTLSYEANKAIPNYNVMGVCKAALESSVKYLARDLGAKGIRVNAISAGPIKTLAASAIGDAKFLYKWNADHSFLKRNVDNLDVGNSALYLLSDMAGGVTGEIHYVDAGYNKVGMPDPKNIT

SEQ ID NO: 96751 - protein, 258 aa, Unknown
  Bacterial polypetide isolated from the Sargasso Sea
MKGKKGLIMGVANERSIAWGISQKLAEAGAELAFTYLGDALKKRVIPLAEKLNSKVTFSCDVEKKEEIEKLFENIKSNWGEIDFVVHAVAFSDKSELSGEYLNTTRENFLRSMLISCFSFTEVAKEASKVMKQGGSLLTLTYESTKAIPNYNVMGVCKSALEASVKYLARDLGAKGIRVNAISAGPIKTLAASAIGDAKFLYKWNEDHSFLKRNVDIHDVGNSALYLLSELANGVTGEIHYVDAGYNKVGMPDPKNIT

SEQ ID NO: 96752 - protein, 118 aa, Unknown
  Bacterial polypetide isolated from the Sargasso Sea
TYESTKAIPNYNVMGVCKSALEASVKYLARDLGAKGMRVNAISAGPIKTLAASAIGDAKFLYKWNEDHSFLKRNVDIHDVGNSALYLLSDLSNGVTGEIHYVDAGYNKVGMPDPKNIT

SEQ ID NO: 96753 - protein, 246 aa, Unknown
  Bacterial polypetide isolated from the Sargasso Sea
MKGKKGLIMGVANERSIAWGISQKLAEAGAELAFTYLGDALKKRVIPLAEKLNSKVTFNCDVEKKEEVIKLFEDIKSKWNEIDFVVHAVAFSDKSELSGEYLNTTRENFLRSMLISCFSFTEVAKEASKIIKKGGSMLTLTYESNKAIPNYNVMGVCKSALEASVKYLARDLGSKGIRVNAISAGPIKTLAASAIGDAKFLYKWNEDHSFLKRNVDIHDVGNSALYLLSDLGGGVTGEIHYVDAGY

SEQ ID NO: 96754 - protein, 92 aa, Unknown
  Bacterial polypetide isolated from the Sargasso Sea
FLLLHLGKKGIRVNAISAGPIKTLAASGVKNFRSMLKEYADRAPLGRAVTTEEVGNVAAFLCSDLASGITGEITYVDAGFNTSAMSLIHSKE

SEQ ID NO: 96755 - protein, 258 aa, Unknown
  Bacterial polypetide isolated from the Sargasso Sea
MKGKKGLIMGVANERSIAWGISQKLAEAGADLAFTYLGDALKKRVIPLAEKLNSKLTFSCDVEKKEEVIKLFKDIKSQWGEIDFVVHAIAFSDKSELSGEYLNTTRENFLRSMLISCFSFTEVAKEASSIMKDGGSMLTLTYESTKAIPNYNVMGVCKSALEASVKYLARDLGIKKIRVNAISAGPIKTLAASAIGDAKFLYKWNEDHSFLKRNVDIHDVGNSALYLLSDLSSGVTGEIHYVDAGYNKVGMPDPKNIT

SEQ ID NO: 96756 - protein, 258 aa, Unknown
  Bacterial polypetide isolated from the Sargasso Sea
MKGKKGLIMGVANERSIAWGISQKLSEAGAELAFTYLGDALKKRVVPLAEKLNSNITFSCDVEKKEDVIKLFKDIKSKWSEIDFVVHAVAFSDKSELSGEYLNTTRENFLRSMLISCFSFTEVAKEASKVMKKGGSMLTLTYESTKAIPNYNVMGVCKSALEASVKYLARDLGSKGMRVNAISAGPIKTLAASAIGDAKFLYKWNEDHSFLKRNVDIHDVGNSALYLLSDLANGVTGEIHYVDAGYNKVGMPDPRNIT

SEQ ID NO: 96757 - protein, 258 aa, Unknown
  Bacterial polypetide isolated from the Sargasso Sea
MKGKKGLILGVANERSIAWGISQKLAEAGAELAFTYLGDALKKRVIPLAEKLNSKVTFSCDVEKKEEVVKLFEDIKSEWGQIDFVVHAVAFSDKSELSGEYLNTTRENFLQSMLISCFSFTEIAKEASKVMKEGGSMLTLTYESTKAIPNYNVMGVCKSALEASVKYLARDLGARGMRVNAISAGPIKTLAASAIGDAKFLYKWNEDHSFLKRNVDIHDVGNSALYLLSELANGVTGEIHYVDAGYNKVGMPDPKNIT

SEQ ID NO: 96758 - protein, 258 aa, Unknown
  Bacterial polypetide isolated from the Sargasso Sea
MTGKKGLIMGVANERSIAWGIAQKLSEAGAELAFTYLGDALKKRVVPLAEKLNSNVTFSCDVEKKEDVVKLFEDVKSSWGEIDFVVHAIAFSDKSELSGEYLNTTRENFLRSMLISCFSFTEVAKESSKVMKSGGSMITLSYEANKAIPNYNVMGVCKAALESSVKYLARDLGAKGIRVNAISAGPIKTLAASAIGDAKFLYKWNADHSFLKRNVDNLDVGNSALYLLSDMAGGVTGEIHYVDAGYNKVGMPDPKNIT

SEQ ID NO: 96759 - protein, 261 aa, Unknown
  Bacterial polypetide isolated from the Sargasso Sea
MDLVKGKKGLIMGVANERSIAWGIAKKLSENGAELAFTYLGDALKKRVTPLAESVNSKFLLDCNVENKDDIKKTFEEIKKKWGQIDFVVHAIAFSDKAELSGQYIDTSRENFTKSMLVSCFSFTEIAKEASKIMKSGSSMLTLTYESTKVIPNYNVMGVCKAALESSVKYISRDLGVKGIRVNAISAGPIKTLAASAIGDAKFLYKWSSDHSFLKRNVDINDVGKSALYLLSDLAAGVTGEIHYVDAGYNKAGMPDPKNIT

SEQ ID NO: 96760 - protein, 217 aa, Unknown
  Bacterial polypetide isolated from the Sargasso Sea
MKGKKGLIMGVANERSIAWGIAQKLSEAGAELAFTYLGDALKKRVIPLAEKLNSNLTFSCDVEKKEEVLKLFKDIKSHWGEIDFVVHAIAFSDKSELSGEYLNTTRENFLRSMLISCFSLTEVAKEASKIMKTGGSIVTLSYEANKAIPNYNVMGVCKAALESSVKYLARDLGSKGIRVNAISAGPIKTLAASAIGDAKFLYKWNADHSFLKRNVDN

SEQ ID NO: 96761 - protein, 227 aa, Unknown
  Bacterial polypetide isolated from the Sargasso Sea
NGAELILTYQNETFLKRVKPLAEKLNNSFLVECDLDKKESLKKCFEIVENKFQNIDFVIHAVAFSDKSELNGRYISTSKENFTKTLNISCFSFTEISKYSSKIMNEGGSLLTLTFYGSNKVMPNYNVMGIAKAALETSVKYLSVDLGKQKIRVNAISAGPMRTLAGAAIANARNVFNYTKKNSALKRNVELEELGNSALFFVSDLSNAVTGEIHYVDCGFNIVGMPK

SEQ ID NO: 96762 - protein, 258 aa, Unknown
  Bacterial polypetide isolated from the Sargasso Sea
MKGKKGLIMGVANERSIAWGISQKLAEAGAELAFTYLGDALKKRVIPLAEKLNSNVTFSCDVEKKDEVLKLFEDINKKWGKIDFVVHAVAFSDKSELSGEYLNTSRENFLRSMLISCFSFTEIAKEASKIMDKGGSMLTLTYESNKAIPNYNVMGVCKSALEASVKYLARDLGTKGIRVNAISAGPIKTLAASAIGDAKFLYKWNEDHSFLKRNVDIHDVGNSALYLLSDLGGGVTGEIHYVDAGYNKVGMPDPKNIT

SEQ ID NO: 96763 - protein, 258 aa, Unknown
  Bacterial polypetide isolated from the Sargasso Sea
MGLLDNKRALVVGVASNRSIAWGIAQAMHREGAQIALTYQNEKLQKRVEKFASELDSKITLPCDVSSDTQIQSVFGDLSKYWDSFDILVHSIAFAPRELLDGEYLKNVTREGFRIAHEISSYSFSALAEASREMMKGRKGAMLTLSYLGAVRSMPNYNVMGLAKASLEANVRYMASSLGPEGIRVNAISAGPIRTLAASGIAGMRDFLTHVESTSPLRRNVTIEEVGNAATFLCSDSASAITGEITYVDCGFNTIGMS

SEQ ID NO: 96764 - protein, 215 aa, Unknown
  Bacterial polypetide isolated from the Sargasso Sea
RVEPLAQSVNSNFILSCNVESKEEISKLFEDIKKKWGKLDFVVHAIAFSDKNELNGEYLNTTRENFLKSMQISCFSFTEIAKEASKIMEEGSSMLTLTYESNKVIPNYNVMGVCKAALETSTKYLARDLGSKGIRVNAISAGPIKTLAASAIGDAKFLYKWNADHSLLKRNVDINDVGNAAVYLLSDLAAGVTGEIHYVDAGYNKVGMPNPKNIS

SEQ ID NO: 96765 - protein, 217 aa, Unknown
  Bacterial polypetide isolated from the Sargasso Sea
DKGRFESKVRELTEPLNPSLFLPLDVQNPAQIEEIFKNIKDNWGQIDGLVHCLAFAGRDELIGDYSATTSEGFDRALNISAYSLAPLCKAAKPLFSDGAGVVSLTYLGSERAIPNYNVMGVAKAALEASVRYLSAELGPEKQVRVNAISAGPIRTLASSAIGGILDMIHNVEEKAPLRRTVTQTEVGNTAAFLLSDLSSGISGQTIYVDAGYCINGM

SEQ ID NO: 96766 - protein, 258 aa, Unknown
  Bacterial polypetide isolated from the Sargasso Sea
MKGKKGLIMGVANERSIAWGISQKLVEAGAELAFTYLGDALKKRVIPLAEKLNSNVTFSCDVENKEEVIKLFEDIKLKWGQIDFVVHAVAFSDKSELSGEYLNTTRENFLRSMLISCFSFTEVSKEASKIMNKGGSMLTLTYESNKAIPNYNVMGVCKSALEASVKYLARDLGSKGIRVNAISAGPIKTLAASAIGDAKFLYKWNEDHSFLKRNVDIHDVGNSALYLLSDLGGGVTGEIHYVDAGYNKVGMPDPKNIT

SEQ ID NO: 96767 - protein, 258 aa, Unknown
  Bacterial polypetide isolated from the Sargasso Sea
MKGKKGLIMGVANERSIAWGISQKLSEAGADLAFTYLGDALKKRVVPLAEKLNSKTTFSCDVEKKDEVIKLFEDIKSHWGKIDFVVHAVAFSDKSELSGEYLNTTRENFLRSMLISCFSFTEVAKEASKIMEDGGSMLTLTYESTKAIPNYNVMGVCKSALEASVKYLARDLGNKKIRVNAISAGPIKTLAASAIGDAKFLYKWNEDHSFLKRNVDIHDVGNSALYLLSNLSGGVTGEIHYVDAGYNKVGMPDPKNIK

SEQ ID NO: 96768 - protein, 258 aa, Unknown
  Bacterial polypetide isolated from the Sargasso Sea
MKGKKGLIMGVANERSIAWGISQKLAEAGAELAFTYLGDALKKRVVPLAEKLNSNVTFSCDVEKKEDVIKLFEDVKSQWGEIDFVVHAIAFSDKSELSGEYLNTTRENFLRSMLISCFSFTEVAKEALKVMKNGGSMITLSYEANKAIPNYNVMGVCKAALESSVKYLARDLGAKGIRVNAISAGPIKTLAASAIGDAKFLYKWNADHSFLKRNVDNIDVGNSALYLLSDMAGGVTGEIHYVDAGYNKVGMPDPKNIS

SEQ ID NO: 96769 - protein, 261 aa, Unknown
  Bacterial polypetide isolated from the Sargasso Sea
MSLLKNKKGLIMGVANERSIAWGISKKLASEGAELAFTYVGDSLKKRVLPLASSLGSKLTIDCNVENEQQIKDTFLQIKNNWGNIDFVVHSVAFSDKSELSGEYLSTSRNNFLNSMLISCFSFTEIARNAAPLMKEGASMLTLTYESSKVIPNYNVMGVCKSALETSTKYLAKDLGKKGIRVNAISAGPIKTLAASAIGDAKFLYKWNEDHSLLKRNVNIDDVGNSALYLISDLAAGVTGEIHYVDAGYNKVGMPDPKNIT

SEQ ID NO: 96770 - protein, 221 aa, Unknown
  Bacterial polypetide isolated from the Sargasso Sea
GDALKKRVVPLAEKLNSNTTFSCDVEKKEEVVKLFEDIKSQWGEIDFVVHAVAFSDKSELSGEYLNTTRENFLRSMLISCFSFTEVVKEASKVMRQGGSLLTLTYESTKAIPNYNVMGVCKSALEASVKYLARDLGAKGMRVNAISAGPIKTLAASAIGDAKFLYKWNEDHSFLKRNVDIHDVGNSALYLLSDLANGVTGEIHYVDAGYNKVGMPDPKNIT

SEQ ID NO: 96771 - protein, 261 aa, Unknown
  Bacterial polypetide isolated from the Sargasso Sea
MSLVKGKKGLIMGVANERSIAWGIAKKLSENGAELAFTYLGDALKKRVTPLAESLNSKFLLDCNVENKEDIKKIFQEIKNKWGHLDFVVHAIAFSDRSELSGEYLNTTRENFLKSMLVSCFSFTEVAKEASQIMKDGSSMLTLSYESTKVIPNYNVMGVCKAALESSVKYIARDLGSKGIRVNAISAGPIKTLAASAIGDAKFLYKWSADHSFLKRNVDINDVGKSALYLLSDLSAGVTGEIHYVDAGYNKVAMPDPKNIS

SEQ ID NO: 96772 - protein, 197 aa, Unknown
  Bacterial polypetide isolated from the Sargasso Sea
VEKKEDVTRLFEDIKSQWGEIDFVVHAIAFSDKSELSGEYLNTTRENFLRSMLISCFSFTEVAKEASKVMKEGGSLITLSYEANKAIPNYNVMGVCKAALESSVKYLARDLGARGMRVNAISAGPIKTLAASAIGDAKFLYKWNEDHSLLKRNVDIHDVGNSALYLLSDLANGVTGEIHYVDAGYNKVGMPDPKNIS

SEQ ID NO: 96773 - protein, 261 aa, Unknown
  Bacterial polypetide isolated from the Sargasso Sea
MSLMKGKKGLVMGVANERSIAWGISQKLAEAGAELAFTYLGDALKKRVIPLAEKLNSKVTFSCDVEKKEDVTKLFEDIKSQWGEIDFVVHAIAFSDKSELSGEYLNTTRENFLRSMLISCFSFTEVAKEATKVMKEGGSLITLSYEANKAIPNYNVMGVCKAALESSVKYLARDLGAKGMRVNAISAGPIKTLAASAIGDAKFLYKWNEDHSLLKRNVDIHDVGNSALYLLSDLANGVTGEIHYVDAGYNKVGMPDPKNIS

SEQ ID NO: 96774 - protein, 221 aa, Unknown
  Bacterial polypetide isolated from the Sargasso Sea
RLLKKIKPIADDLGVKTLIECDVACDKSIEQTFSQLKDEWGTLDGIVHSIGFAPSDQLDGDFTEVTTREGFQIAHDISSYSFTALAKGALPILSEKAALLTLTYLGSIQSLPNYNVMGLAKASLEANTRFLAASLGKKGIRVNAISAGPIKTLAASGVKNFRSMLKEYADRAPLGRAVTTEEVGNVAAFLCSDLASGITGEITYVDAGFNTSAMSLIPSKE

SEQ ID NO: 96775 - protein, 165 aa, Unknown
  Bacterial polypetide isolated from the Sargasso Sea
LDGNFIDASTREGFAIAHDISVFSFIALAKASRELMADRSSSLLTLSYLGALRTLPNYNVMGLAKASLESSVRYLANSLGKENTRVNAISAGPVRTLAASGVKNFRKMLSYNAERTPLKRNITAREVGDTASFLCSDLASGITGEITYVDAGFNITAMGDLEEIS

SEQ ID NO: 96776 - protein, 234 aa, Unknown
  Bacterial polypetide isolated from the Sargasso Sea
QGANIILSYQSDRLKKKVEQVGSKINCEAYIECDVSDDKSIDNLINEVESKWGYLDGLVHAVGFAPANELEGDFTEVATREGFKIAHDISVFSFTALAKASRNLMKDRNAALLTLSYLGAVRTLPNYNVMGVAKAGLESTTRYLANSLGKENIRVNAISAGPVKTLAASGIKSFRKMLSYNASRAPLMRNITTEEVGNAAAFLCSDLASGITGEILYVDAGFNITAMGDLSEVD

SEQ ID NO: 96777 - protein, 240 aa, Unknown
  Bacterial polypetide isolated from the Sargasso Sea
SPGGIAQQLKAAGAELGITYLPDDKGRFEAKVRELTAPLEPSLFLPLNVQDADQMAEVFGEIKAKWGVLDGLVHCLAFAGKEELIGDYSATTAEGFARSLDISAYSLAPLCAHAKPLFSEKAGVITLSYLGAERAIPNYNVMGVAKAALEASVRYLAAELGPEKQVRVNAISAGPIRTLASSAIGGILDMIHNVEEKAPLRRTVTQMEVGGTAAFLLSDLASGISGQTIYVDAGYCVTGM

SEQ ID NO: 96778 - protein, 232 aa, Unknown
  Bacterial polypetide isolated from the Sargasso Sea
KLHENGAELAITYQNATLLKRVKPLAIKVNSNCLIECDVSKEEDINNAFDIVKNKFGNIDFIIHAVAYSDKNELNGRYIETSKNNFINSLSISCYSFTKIAKVFQPVINKNGSLVTLSFYGANKVMPNYNVMGVAKAALETSVKYLSVDLGDQNIRVNAISAGPMRTLAGAAIANSREVFKYTNDNSSLKRNVNLEELGNSALYLVSDLSSAVTGEVHYVDCGFSIIGMPKT

SEQ ID NO: 96779 - protein, 253 aa, Unknown
  Bacterial polypetide isolated from the Sargasso Sea
GKKGIIFGIANDHSIAWGIAEKFHEHGADLAITYQNSILLKRVKPLADKVNCDCLIECDVSKEEDLNKTLKVIKDKFGNIDFIIHAVAYSDKNELNGRYIETSKNNFINSLSISCYSFTKIAKVFQPILNKNGSLVTLSFYGANKVMPNYNVMGVAKAALETSVKYLSVDLGDQNIRVNAISAGPMRTLAGAAIANSREVFKYTNDNSSLKRNVNLEELGNSALFLVSEMSSAVTGEIHYVDCGFNIIGMPKA

SEQ ID NO: 96780 - protein, 212 aa, Unknown
  Bacterial polypetide isolated from the Sargasso Sea
ADDLGVKTLIECDVACDKSIEQTFSQLKDEWGTLDGIVHSIGFAPSDQLDGDFTEVTTREGFQIAHDISSYSFTALAKGALPILSENAALLTLTYLGSIQSLPNYNVMGLAKASLEANTRFLAASLGKKGIRVNAISAGPIKTLAASGVKNFRSMLKEYADRAPLGRAVTTEEVGNVAAFLCSDLASGITGEITYVDAGFNTSAMSLIHSKE

SEQ ID NO: 96781 - protein, 237 aa, Unknown
  Bacterial polypetide isolated from the Sargasso Sea
QAMHREGAELAFTYQNEKLKGRVEEFAAALGSDIVLPCDVAEDESITALFTELEKVWPKFDGFVHSIGFAPADQLDGDYVDVVTRDGFKIAHDISAYSFVAMAKACRTMLNPGSALLTLSYLGAERAIPNYNVMGLAKASLEANVRYMANAMGPEGVRVNAISAGPIRTLAASGIKDFRKMLAHCEAVTPIRRTVTIEDVGNSAAFLCSNLSAGISGEVVHVDGGFNIAAMNELELK

SEQ ID NO: 96782 - protein, 183 aa, Unknown
  Bacterial polypetide isolated from the Sargasso Sea
EWGTLDGIVHSIGFAPSDQLDGDFTEVTTREGFQIAHDISSYSFTALAKGALPILSEKAALLTLTYLGSIQSLPNYNVMGLAKASLEANTRFLAASLGKKGIRVNAISAGPIKTLAASGVKNFRSMLKEYADRAPLGRAVTTEEVGNVAAFLCSDLASGITGEITYVDAGFNTSAMSLIPSKE

SEQ ID NO: 96783 - protein, 217 aa, Unknown
  Bacterial polypetide isolated from the Sargasso Sea
MLKGKKGIIFGIANDHSIAWGIAKKLHQHGANLAIAYQNNTLLKRVKPLADKVNCNCIIECDVSKEEDLNKALKVIKDKFGNIDFIIHAVAYSDKNELNGRYIETSKKNFINSLSISCYSFTKIAKVFQPILNKNGSLVTLSFYGANKVMPNYNVMGVAKAALETSVKYLSVDLGDQNIRVNAISAGPMRTLAGAAIANSREVFKYTNDNSSLKRNV

SEQ ID NO: 96784 - protein, 175 aa, Unknown
  Bacterial polypetide isolated from the Sargasso Sea
WGVLDGLVHCLAFAGKEELIGDYSATTAEGFARSLDISAYSLAPLCAHAKPLFSEKAGVITLSYLGAERAIPNYNVMGVAKAALEASVRYLAAELGPEKQVRVNAISAGPIRTLASSAIGGILDMIHNVEEKAPLRRTVTQMEVGGTAAFLLSDLASGISGQTIYVDAGYCVTGM

SEQ ID NO: 96785 - protein, 123 aa, Unknown
  Bacterial polypetide isolated from the Sargasso Sea
LLTLTYLGSIQSLPNYNVMGLAKASLEANTRFLAASLAKKGIRVNAISAGPIKTLAASGVKNFRSMLKEYADRAPLGRAVTTEEVGNVAAFLCSDLASGITGEITYVDAGFNTSAMSLIPSKE

SEQ ID NO: 96786 - protein, 108 aa, Unknown
  Bacterial polypetide isolated from the Sargasso Sea
YNVMGLAKASLEASVRYLAVSLGEEGTRVNAISAGPIKTLAAQGVKNFRKMLTYNESRAPLKKNVTINEVGNAAAFLASDLASGITGETLYVDAGYNITAMGSLEETN

SEQ ID NO: 96787 - protein, 199 aa, Unknown
  Bacterial polypetide isolated from the Sargasso Sea
LIECDVSKEEDLNKALKVIRDKLGNIDFIIHAVAYSDKNELNGRYIETSKNNFINSLSISCYSFTKIAKVFQPILNENGSLVTLSFYGANKVMPNYNVMGVAKAALETSVKYLSVDLGEQNIRVNAISAGPMRTLAGAAIANAREVFKYTNDNSSLKRNVNLEELGNSALYLVSEMSSAVTGEIHYVDCGFNIVGMPKA

SEQ ID NO: 96788 - protein, 244 aa, Unknown
  Bacterial polypetide isolated from the Sargasso Sea
AAGIAESMNDFGAEIALSYQSEKLKSRVEALAENWNCSLLTECDVSNDSAIKETFKNIKDKWGHLDGVVHAVGFAPGNELDGNFVDASTREGFAIAHDVSVFSFIALAKASRELMTDRSSSLLTLSYLGALRTLPNYNVMGLAKASLESSVRYLANSLGKENTRVNAISAGPVRTLAASGVKNFRKMLSYNAERTPLKRNITAREVGDTASFLCSDLASGITGEITYVDAGFNITAMGDLEEIS

SEQ ID NO: 96789 - protein, 243 aa, Unknown
  Bacterial polypetide isolated from the Sargasso Sea
AAGIAKAMHAQGAQLAFTYQNERLKKNVEKIALELNSKLLFECDVSSDKSIETMYQNLSEDWKKFDGFVHSIGFAPANELEGNFVDAATREGFKVAHDISSYSFTAMAKAAKSMLNPGSALLTLTYLGSVQSLPNYNVMGLAKASLEANTRFLAAALGPDDIRVNAISAGPIKTLAASGVKNFRKMLVNYANRAPLRRVVTTSEVGNVAAFLCSDLASGITGEITYVDGGFNTAAMSIEEYTD

SEQ ID NO: 96790 - protein, 256 aa, Unknown
  Bacterial polypetide isolated from the Sargasso Sea
MIKGKKGLIIGIANDHSIAWGIAKQLHANGAELAITYQNDTLLKRVKPLADKVNSNILIECDVNKENNLQNTVNQIKKVFGKIDFIIHAVAYSDKHELNGRYLDTSKDNFINSLSISCYSFTRIAKLFQPIINDGGSLVTLSFHGANKVMPNYNVMGVAKAALEASVKYLSVDLGDQNVRVNAISAGPMRTLAGAAIANARDVFNYTSENSSLKRNVNLEELGNSALYLVSDLSSAITGEIHYVDCGFNIVGMPKN

SEQ ID NO: 96791 - protein, 262 aa, Unknown
  Bacterial polypetide isolated from the Sargasso Sea
MNFLSGKKILILGVASKLSIASGIAAAMHKAGAELAFTYQSEKLKDRVTGFAEGWDSNKVYPCDVTDDKQISELFSKLSDHWDGLDGIVHCLAFAPTHELNGNYVDVTTREGFITAHEISSYSLVALAQKGRDLMAGRNGSLLTLSYLGALRSLPNYNVMGLAKASLEANVRYISASLGPEGTRVNAISAGPIKTLAAAGIKSFRKMLEHNAKQTPLRRNVTIEEVGNAAAFLCSDLASGITGEVLYVDGGFNTTAMGTLND

SEQ ID NO: 96792 - protein, 261 aa, Unknown
  Bacterial polypetide isolated from the Sargasso Sea
MLNNKKILITGIANKFSIAHGIAQSMSKNGAELAFAYQNERLLKKIKPIADDLGVKTLIECDVACDKSIEQTFSQLADEWGTLDGIVHSIGFAPSDQLDGDFTEVTTREGFQIAHDISSYSFTALAKGALPILSEKAALLTLTYLGSIQSLPNYNVMGLAKASLEANTRFLAASLGKKGIRVNAISAGPIKTLAASGVKNFRSMLKEYADRAPLGRAVTTEEVGNVAAFLCSDLASGITGEITYVDAGFNTSAMSLIPSNE

SEQ ID NO: 96793 - protein, 244 aa, Unknown
  Bacterial polypetide isolated from the Sargasso Sea
IANGIAQSMSKNGAELAFAYQNERLLKKIKPIADELGVKTLIECDVACDKSIDRTFSQLADEWGTLDGIVHSIGFAPSDQLDGDFTEVTTREGFQIAHDISSYSFTALAKGALPILSENAALLTLTYLGSIQSLPNYNVMGLAKASLEANTRFLAASLGKKGIRVNAISAGPIKTLAASGVKNFRSMLKEYADRAPLGRAVTTEEVGNVAAFLCSDLASGITGEITYVDAGFNTSAMSLIPSKE

SEQ ID NO: 96794 - protein, 261 aa, Unknown
  Bacterial polypetide isolated from the Sargasso Sea
MLKNKKILITGIANKFSIANGIAQSMSKNGAELAFAYQNERLLKKIKPIADDLGVKTLIECDVACDKSIEQTFSQLKDEWGTLDGIVHSIGFAPSDQLDGDFTEVTTREGFQIAHDISSYSFTALAKGALPILSENAALLTLTYLGSIQSLPNYNVMGLAKASLEANTRFLAASLGKKGIRVNAISAGPIKTLAASGVKNFRSMLKEYTDRAPLGRAVTTEEVGNVAAFLCSDLASGITGEITYVDAGFNTSAMSLIPSKE

SEQ ID NO: 96795 - protein, 185 aa, Unknown
  Bacterial polypetide isolated from the Sargasso Sea
TLKVIKDKFGNIDFIIHAVAYSDKNELNGRYIETSKNNFINSLSISCYSFTKIAKVFQPILNENGSLVTLSFYGANKVMPNYNVMGVAKAALETSVKYLSVDLGEQNIRVNAISAGPMRTLAGAAIANAREVFKYTNDNSSLKRNVNLEELGNSALYLVSEMSSAVTGEIHYVDCGFNIVGMPKA

SEQ ID NO: 96796 - protein, 260 aa, Unknown
  Bacterial polypetide isolated from the Sargasso Sea
MLLDLTGKKILVTGIANNRSIAWGIAQQLKAAGAELGITYLPDDKGRFEAKVRELTAPLEPSLFLPLNVQDADQMAEVFGEIKAKWGVLDGLVHCLAFAGKEELIGDYSATTAEGFARSLDISAYSLAPLCAHAKPLFSEKAGVITLSYLGAERAIPNYNVMGVAKAALEASVRYLAAELGPEKQVRVNAISAGPIRTLASSAIGGILDMIHNVEEKAPLRRTVTQMEVGGTAAFLLSDLASGISGQTIYVDAGYCVTGM

SEQ ID NO: 96797 - protein, 261 aa, Unknown
  Bacterial polypetide isolated from the Sargasso Sea
MLKNKKFIITGLANKFSIASGIAKSMAAHGAELLFLYQNERFLKKIKPIADELGAELLIECDVSSDKSIDRAFKEIGSKWENIDGLVHSIGFAPSDQLEGDFTEVTTREGFQIAHDVSSYSFTALAKASLPLLNKNAALLTLTYLGSIQSLPNYNVMGLAKASLEANTRFLAASLGKRGIRVNAISAGPIKTLAASGVKDFRSMLTEYADRAPLGRTVTTEEVGNVAAFLCSDLASGITGEITYVDAGFNTSAMSTIPKTE

SEQ ID NO: 96798 - protein, 261 aa, Unknown
  Bacterial polypetide isolated from the Sargasso Sea
MLNNKKILITGIANKFSIANGIAQSMSKNGAELAFAYQNERLLKKIKPIADNLGVKTLIECDVACDKSIEQTFSQLKDEWGTLDGIVHSIGFAPSDQLDGDFTEVTTREGFQIAHDISSYSFTALAKGALPILSENAALLTLTYLGSIQSLPNYNVMGLAKASLEANTRFLAASLGKKGIRVNAISAGPIKTLAASGVKNFRSMLKEYADRAPLGRAVTTEEVGNVAAFLCSDLASGITGEITYVDAGFNTSAMSLIPSKE

SEQ ID NO: 96799 - protein, 204 aa, Unknown
  Bacterial polypetide isolated from the Sargasso Sea
MIKGKKGLIIGIANDHSIAWGIAKQLNANGADLAITYQNTTLLKRVKPLAEKINSNILIECDVNNEKHLQNLVNQIKKKLGKIDFIIHAVAYSDKKELNGRYLDTSRDNFINSLSISCYSFTRIAKLFQPIINKGGSLVTLSFHGANKVMPNYNVMGVAKAALEASVKYLSVDLGEQNVRVNAISAGPMRTLAGAAIANARDVF

SEQ ID NO: 96800 - protein, 209 aa, Unknown
  Bacterial polypetide isolated from the Sargasso Sea
NKDTDSMYNDFLSCAKTFFPVGDYITINISSPNTEGLRNFHEKENLEKLLIKINEIRKESDFKKSFLLKVSPDLDEGSINNIVDLSLKNNINGIILTNTSDKNRDKLIDNQKNEKGGLSGQPIKDLSTKIIKKFYKKLNGKIPIIGVGGVDSGEAAFEKIAAGASAIQLYTGMIYKGPMIVKEIKKGLIAKLNEKGFKNISQAVGSNSN

SEQ ID NO: 96801 - protein, 248 aa, Unknown
  Bacterial polypetide isolated from the Sargasso Sea
TRRNEALINRLGFNNSGSEEISKRIKENNKKGFLGINIGPNKDSTDRDEDYLICFRKFYNLADYITINISSPNTENLRDFHNQDELNSLISKLKNEKKELNSKVPLAIKVSPDLNDDQINEVSKIILEQEIGIVVVSNTTDKNRENLKNINKLEKGGLSGKPIEKISNEVISKFYKILKDKTKIIGVGGVSNGQDAFEKITSGATLVQLYTGMVYRGPRIASKISKELINLLKNKGFKNVSEAIGTKN

SEQ ID NO: 96802 - protein, 85 aa, Unknown
  Bacterial polypetide isolated from the Sargasso Sea
MSFFLKLFKLLPPELSHSFSLNSLNILYKLKILKFFIKRPSNEESFDFAGLRFKNRLGTAAGLDKNGDYIDSLGELGFGFLEVGT

SEQ ID NO: 96803 - protein, 166 aa, Unknown
  Bacterial polypetide isolated from the Sargasso Sea
MKNYLYNILLATLRILPPEMASKISLIFLKAFFKILNRQDSNSFKYSGTQKVKFKHLNFNNPLGVAAGLDKEGKYFPALASLGFSFVEVGTFTPKKQKGNEHPRIKRNIQEKSLINRLGFNNPGIICGVDNIKKNKRNFSGVLGVSIGKNKTTSLDRAFEDYLYCL

SEQ ID NO: 96804 - protein, 208 aa, Unknown
  Bacterial polypetide isolated from the Sargasso Sea
NKNSENRLEDYILCFKKFHIIADYLTINISSPNTENLRDFHDQNQLNELLSAIVNEKNNLNSKTPIAVKVSPDIDDNNIDKIVETLIKYQIELVIVSNTTDRNRKNLININKLEKGGLSGKPIEDLSNLLINKFYKKLNNKVKIIGVGGIDSGKSAYDKIINGASLIQLYTGMVYQGPNIVNKITNELIDILNNNGFKNISDAIGSKN

SEQ ID NO: 96805 - protein, 147 aa, Unknown
  Bacterial polypetide isolated from the Sargasso Sea
SNKPIFIKISPDLEDEQLRDIALMSLANNVNGLIISNSTLKRPNTLSSLYKNEIGGLSGKPLFIDSTIILKKMYSLTNGQIPLIGVGGISNANECYEKIKAGASLVQLYTALVYQGPKVISKIIKELNGLILTDGYKNISEAVGRSS

SEQ ID NO: 96806 - protein, 237 aa, Unknown
  Bacterial polypetide isolated from the Sargasso Sea
TNHGAKIICDRIKSKDKLGLLGVNIGPNKDSNDRLNDYLIGLKTFHEVADYVTVNISSPNTENLRNFHEENKLQELLKSILKEKNDLNSDIPIAVKISPDIDESQINLISEILLQNKIDAIIISNTSESSRDMLSNIQRHQKGGLSGKPIETKSNILINKFYKLLKGKIKIIGVGGIDSGQAAYDKFIAGADIIQLYTGMVFKGPNIAGIIKKDLKDLLLRDGVKNFTEIIGNKTLS

SEQ ID NO: 96807 - protein, 67 aa, Unknown
  Bacterial polypetide isolated from the Sargasso Sea
IGVGGIHSARAAWERITAGASLVQIYTGWIFEGPNLVPDILDGLIQQMEKHGFRNIKEAIGSEEPWK

SEQ ID NO: 96808 - protein, 69 aa, Unknown
  Bacterial polypetide isolated from the Sargasso Sea
MRSTEIIRLIHDYSNKKLPIIGVGGIMSTQDALDKLKAGASLIQLYTGFIYNGPSFARDINKEIIKSLN

SEQ ID NO: 96809 - protein, 93 aa, Unknown
  Bacterial polypetide isolated from the Sargasso Sea
MFSKLRPFIFKLDPELAHTLAIKALKFNFKSIKNIKKNNSIENTLLGKKFFNPIGIAAGFDKDAEVYNSLFKLGFGFVEVGTITPLKQYGNPK

SEQ ID NO: 96810 - protein, 105 aa, Unknown
  Bacterial polypetide isolated from the Sargasso Sea
MSFKTLSYALNFLPPEVLHSLFIKFLQTRLYNKKPKFKNLKTTAFGKEINNPLGLAAGFDKNAEVIQGALQLGFGFLELGTVTPMPQVGNPKPRVFKIPEFNAVI

SEQ ID NO: 96811 - protein, 215 aa, Unknown
  Bacterial polypetide isolated from the Sargasso Sea
MDSSLETTLGSLTLKRPTVLASGILGISLDVFNRLHDAGAGAVVTKSLSKEPWEGYPNPTIFSVKGGGWINAVGLSNPGAETFAKMIEPNDNVPIVVSLVGSVEDDFEYMIKKFENCKVAAYELNLSCPHVAKVGLEVGDDIELVSKIIKKVKSITNSPIVAKVGLGKSDYLATVDAAVSAGVDAITAINTVRAMAIDVETQMPILSNKIGGLSG

SEQ ID NO: 96812 - protein, 179 aa, Unknown
  Bacterial polypetide isolated from the Sargasso Sea
PLKQYGNEKPRVFRLVEDQALINRLGFNNHGSDIILNRIKSNKKLGMLGVNVGPNKDSNDRLNDYLIGLEKFSQVADYITINISSPNTENLRNFHDENKLKELLKSIFEKKKNLKTEIPIAVKISPDINENQIDLISEILLKNEISAIIISNTSEASRETLQNIQRHQKGGLSGKPIEK

SEQ ID NO: 96813 - protein, 71 aa, Unknown
  Bacterial polypetide isolated from the Sargasso Sea
MYSIFKPYIFSLDPEIAHDLAIKSLKFNVLPKSIFNVQGEEQLETNLLNEKIPNPIGLAAGFDKSAEVYNS

SEQ ID NO: 96814 - protein, 199 aa, Unknown
  Bacterial polypetide isolated from the Sargasso Sea
MDSSLETTLGSLKLERPTVLASGILGISLDVFKRLHDAGAGAVVTKSLSKEPWEGYPNPTIFSVKGGGWINAVGLSNPGAETFAKMIEPNKNVPIIVSLVGSVEDDFEYMIRKFENCNVTAYELNLSCPHVAKVGLEVGDDTELVSKIIKKVKSITNAPILAKVGLGKSNYLDTVDAAVSGGVDAITAINTVRAMAIDV

SEQ ID NO: 96815 - protein, 144 aa, Unknown
  Bacterial polypetide isolated from the Sargasso Sea
MSGPLAMEFCGLKLSSPVILLSGCVGFGEEYTRIEGFSNLDVGAIVLKGTTLEPRLGNPAHRVWETPSGMLNAIGLQNPGVKKVITDILPSLNFDETRFIANVCGSTIEEYAEVTRYFDDSPIDAMEINISCPNVKEGGVAFGN

SEQ ID NO: 96816 - protein, 150 aa, Unknown
  Bacterial polypetide isolated from the Sargasso Sea
IAPDLSLKDIDDICQLIIEENIDGIIATNTSIDRLGLENRKISQTGLLLSEENGGLSGRPLQKKANQIIKYIHNIDKNIILIGVGGIDSPESAWERICSGASLIQLYTGWIYKGPQLVPDILEGIIKQLNNHKLSNIKEAIGSDLKWVEE

SEQ ID NO: 96817 - protein, 209 aa, Unknown
  Bacterial polypetide isolated from the Sargasso Sea
PNKDSENRIEDYVNCFNKFHSLADYITINISSPNTENLRDFHNQDELNSLVKELKNKKKKLNSKIPIAVKVSPDLNDEQIEIVSNILLDQEIEIIIVSNSSDKNRDKLNNINKLEKGGLSGKPLYEISNNIISKFYKLLGNKIKIIGVGGVDSGETAFEKIIRGASLVQLYTGMVYKGPGIASSISSELIDILKNKGFKNISEAVGTKY

SEQ ID NO: 96818 - protein, 87 aa, Unknown
  Bacterial polypetide isolated from the Sargasso Sea
MLQLLPPETAHNVTIKLTKYGSPLLSKGFQDQSLHTNVKGLSFSNPLGIAAGFDKNAELIDPLLKIGFGFVECGNVTPKPQYGNAKP

SEQ ID NO: 96819 - protein, 93 aa, Unknown
  Bacterial polypetide isolated from the Sargasso Sea
MNPFFFLPPETAHKLALWGVKNGLAGRAKKPASLRKKIGGMTFTSPVGLSAGADKEGVALRGWSALGFGFVEAGTVTMHPRDGNPAPRVWRQP

SEQ ID NO: 96820 - protein, 289 aa, Unknown
  Bacterial polypetide isolated from the Sargasso Sea
MNLMDTPGHVDFGYEVSRSLAACEGSLLIVDASQGVEAQTLANVYQAIDADHEIVPVLNKIDLPAAEPDKVKIQIEEVIGLPADEAITASAKTGHGINEILEALVKRLPSPQGSAEAPLQALLVDSWYDSYLGVMTLVRVRHGVVKKGLKIRMMATGATHVIERVGVFAPKPVAREKLGPGEIGFINAGVKRVADAKVGDTITDERRQTEIALPGFKPSIPVVFCGLFPLDTNEFSGLREALEKLALNDASFSFEAETSAALGFGFRCGFLGLLHMEVIRERLSREFIW

SEQ ID NO: 96821 - protein, 247 aa, Unknown
  Bacterial polypetide isolated from the Sargasso Sea
PEDDALINRLGFNNDGMEIIYDRLSKTKKRGTVGINIGANKDTKDRLSDYQIGIKKFSTIADYITINISSPNTPGLRDLQSGQHFQELIKLIKAHKIDGLKTPILIKLAPDLTKKELEIIVNLSIDGGIDGLILSNTTVERKDIMNKKFINEEGGLSGRPLMQKSTKMLRDTYKISEGKIPLIGVGGIFTGQDIIEKIRNGASLIQLYTAIVYEGPTLINKLKKELIIEVERYGVKSISELIGSDIK

SEQ ID NO: 96822 - protein, 107 aa, Unknown
  Bacterial polypetide isolated from the Sargasso Sea
NAIKDKDMAGLENVTEENCKLMHKVMKTSKPSISYMTDVTHSCLSEIENLRSLGHSLFYTIDAGPQVKIICDPKSTEIIRDTIIDKTTVMDVIHAGLGGPPRIIDED

SEQ ID NO: 96823 - protein, 157 aa, Unknown
  Bacterial polypetide isolated from the Sargasso Sea
MANKNTITTEFLGLNLASPIVLLSGCVGFGDEYTRLEGFSNADIGGAVLKGTTLEPRLGNAPHRVYETPSGMLNSIGLQNPGAHEVVENILPSLEPFETHFIANVSGSTIDEYIEVCRIFDQSNIHAIELNISCPNVKKGGMEFGNDPEILRKLSRH

SEQ ID NO: 96824 - protein, 118 aa, Unknown
  Bacterial polypetide isolated from the Sargasso Sea
LAVINTISGMAIDINKRELILGNHAGGLSGPAIKPIALKKVYDVYQVSKKHGIPIMGQGGISSPEDAIEFILAGASTIGVGTALFFDPLVCKKINNGLEKYLKTSGLNGTEELIGGLI

SEQ ID NO: 96825 - protein, 126 aa, Unknown
  Bacterial polypetide isolated from the Sargasso Sea
AIDTEIDGIMQTNTTISRNNLKSSYQHEKGGLSGAPIFEMSTRVLAQLYSITEGKIPLIGVGGVFTGEQLFQKIQAGASLVQIYSALIYSGFSVTNKILRELDISLRENGFKNVEEAVGTGVDKWL

SEQ ID NO: 96826 - protein, 194 aa, Unknown
  Bacterial polypetide isolated from the Sargasso Sea
MANKNTITTEFLGLNLASPIVLLSGCVGFGDEYTRLEGFSNADIGGAVLKGTTLEPRLGNAPHRVYETPSGMLNSIGLQNPGAHEVVENILPSLEPFETHFIANVSGSTIDEYIEVCRIFDQSNIHAIELNISCPNVKKGGMEFGNDPEMSAQVVEACKGVTSKPIITKLSPNQADIKESARKCIDAGSDALSV

SEQ ID NO: 96827 - protein, 285 aa, Unknown
  Bacterial polypetide isolated from the Sargasso Sea
MVYLNWGFSSVEVGTVTPFSQAGNNKPRVFRLYKNRAVINSYGFNNDGMQIVKNRLNDGKKREGVLGVNIGPNKTSKNPIEDFKVTSKNLSKYCDYITINISSPNTPGLRNMHDKNLLCEVIRATKEGISKAGSHKPIFLKISPDEKFSKITEIINTSINENIDALVISNTTIERPVYLNSKYQYIKGGLSGNPLFKKSTKLLENIHKITNGKIDLVGVGGVESANQAYVKILVGAKLVQLYTGLLFQGPNIVKIITSQLSEFLKRDGFNSLEDAVGSLSYEEAA

SEQ ID NO: 96828 - protein, 121 aa, Unknown
  Bacterial polypetide isolated from the Sargasso Sea
MFSNLRSLIFKIDPERAHFLAIQSLKLNLVSNIFDEHKNDPIFKTKIFNKELNNPIGIAAGFDKNAEVYNPLFKLGFGLVEVGTITPLKQYGNSKPRVFRLVEDQALINRLGFNNHGSDVV

SEQ ID NO: 96829 - protein, 218 aa, Unknown
  Bacterial polypetide isolated from the Sargasso Sea
KGILGVNIGPNKESKDQKNDFCLGLKNFFDIADYITINISSPNTEGLRDFHDQQKLVDLIISLNKIKEDHATNIPLLLKISPDINNSYVPEIAETAIKNNISAVILTNTTNGNRDNLSSEFKNEKGGLSGDPLRQISTNMIKTFYKELNGKIPIIGVGGVNSGRSAYEKIIAGASLLQLYTSFVYRGPSAAKDIKKELIQILKADGIKTIKDIIGKGI

SEQ ID NO: 96830 - protein, 129 aa, Unknown
  Bacterial polypetide isolated from the Sargasso Sea
MKILFNKFLLKLAKLIDPERAHFISLLYLKFNFLNKLFFKKNFKSLNTTFCNIKLKNPIGVAAGLDKNAEAIKGLFNLGVSLVEIGAVTPKIQYGNRKPRVFRLNSDFAIINRLGFNNLGMKRVKSNLK

SEQ ID NO: 96831 - protein, 181 aa, Unknown
  Bacterial polypetide isolated from the Sargasso Sea
MANKNTITTEFLGLDLASPIVLLSGCVGFGDEYTRLEGFSNADIGGAVLKGTTLEPRLGNVPHRVYETPSGMLNSIGLQNPGAHEVVENILPSLEPFETHFIANVSGSTIDEYIEVCRIFDQSNISAIELNISCPNVKKGGMEFGNDPEMSAQVVEACKAVTSKPIITKLSPNQADIKESA

SEQ ID NO: 96832 - protein, 78 aa, Unknown
  Bacterial polypetide isolated from the Sargasso Sea
KIFYKQLKGKIPIIGVGGIDSGLSAFEKIEAGASAVQLYTGMIYKGPTIVKEIKKGLINILKEKGFNNINEAIGSSSN

SEQ ID NO: 96833 - protein, 190 aa, Unknown
  Bacterial polypetide isolated from the Sargasso Sea
DIADYITVNISSPNTVGLRDFHEQEKLEDLLNALNKIKKDKGTKIPLLLKISPDIKESYIREIAEIAIKNKISAVTVTNTTNGNRDNLISELRNEEGGLSGNPLDRISTNMIKKFYKELNNKVPIIGVGGISSGKSAYEKITAGASLLQLYTGFVYKGPSTAKIIKKELIQILKSEGIENIKDAVGKLVN

SEQ ID NO: 96834 - protein, 167 aa, Unknown
  Bacterial polypetide isolated from the Sargasso Sea
NYRCSQILKEPEWPLDVLICIVSKEPKKISSREGMEISKKTSPIYQDWLDVNEKHINLALNAIKGKDMARLQNVTEENCKLMHKVMKTSKPSISYMTDVTNSCLAEIEKLRSSGHSLFFTIDAGPQVKIICDPKSTEIIRESIIDKTGVIDVIDAGLGGPPRIIDES

SEQ ID NO: 96835 - protein, 247 aa, Unknown
  Bacterial polypetide isolated from the Sargasso Sea
EKDRALINRLGFNNDGLYMVLERLKRNAPNGFLGANIGPNKDSINRIEDYLNCLGKIHSLVNYITINISSPNTPGLREFHDQKILQNLLQKLTEFSKKNKIKKPLVLKVSPDITDDEVSNVIELIKKFKINGVIISNTTDKNREKLLGSNKNEEGGLSGEPINKLSNNLIKKFYKEIKKEITIIGVGGVCSGITAYEKMTSGASLLQLYTGMVYEGPGIIKKIKSELIDILKKEKIKNVNDIVGTRS

SEQ ID NO: 96836 - protein, 155 aa, Unknown
  Bacterial polypetide isolated from the Sargasso Sea
CPPLLVKIAPDLSNEEIDDIARVSIDNGIDGIIAINTSLNRFHLKNLRIKTGNTLEQESGGLSGLPLEKRGLEVIRRLRISTNKALPLIGVGGISSAQTAWERIAAGASLVQLYTGWIFEGPNLVPEILDGLTLQMDKHGFRNIKEVIGSEEPWK

SEQ ID NO: 96837 - protein, 231 aa, Unknown
  Bacterial polypetide isolated from the Sargasso Sea
SEKVKSRIISNSPKGLFGINIGPNKDTNNRLEDYLIGFRTFYNLADYLTINISSPNTENLRSFHNEEELSELLSLIEKEKKILKTSVPIAVKISPDIEDKNINIISDLLLKYSVEAVIISNTTEKNRENLSNINKLEKGGLSGKPLENRSNELINKFYKILKNKIKIIGVGGVDSGQSAYQKIINGASLVQLYTGMIYQGPKIASKISEELINILDKEGAKNISDVVGSKN

SEQ ID NO: 96838 - protein, 89 aa, Unknown
  Bacterial polypetide isolated from the Sargasso Sea
MYPIFRFLLFLLPAESAHVVALKSLKWLQRWHLLKSVPQDPGCGFSYQGLRFKNRIGLAAGLDKNGDYIDALGALGFGAIEIGTFISRL

SEQ ID NO: 96839 - protein, 107 aa, Unknown
  Bacterial polypetide isolated from the Sargasso Sea
MLINLLRLLPPETAHQITIKLLKYNLDLSRKKNLEFNALKQTILGIDFQNPLGLAAGFDKNAEIIKPMLSYGFGFIEVGTITPKPQRGNQKPRIFRFVEDEAVINHL

SEQ ID NO: 96840 - protein, 91 aa, Unknown
  Bacterial polypetide isolated from the Sargasso Sea
MSSAVDFVFHKLRPIIFSSDAETAHDRMLSSVEMISKFPGVIHFLRWQFREESPVLNTNLFGIKVNNPIGLAAGFDKDGRIYPSLFALGFG

SEQ ID NO: 96841 - protein, 222 aa, Unknown
  Bacterial polypetide isolated from the Sargasso Sea
SKQGTLGVNIGPNYDSKSYEADFCKCAKQLIKFSLADYITINISSPNTENLRDFHEENKLESLIEDLNKLKKEFNSSIPIFLKVSPDIKDSSIENISSIIINQNINGIILTNTTNENRLSLKNYNKNQVGGLSGKPIRDLSNRIIKKFYKKLKGKVFIIGVGGIDSGKTAFDKIVSGANAVQLYTGMVYKGPGVVKEIKKDLIEILKKEKIKNISEAVGINS

SEQ ID NO: 96842 - protein, 203 aa, Unknown
  Bacterial polypetide isolated from the Sargasso Sea
IDDYLLGMEKLGSLSSYITINISSPNTEGLRELQLKGKIEKLIKKILQKREQIESINKKPVLIKISPDLNEDQLRDIALISLANNIDGLILTNTTAERTNKLISNYKTKVGGLSGKPLYLTSNTILKKMYNLTNGQIPLIGVGGISSGSDCYNKIKSGASLIQLYTALIYSGPILITNIKNELIDLIKTDGYKNISDVIGKSV

SEQ ID NO: 96843 - protein, 216 aa, Unknown
  Bacterial polypetide isolated from the Sargasso Sea
MAANSDSTDPSNDFEGLVDKFASQIDFLTVDISCPNSKNGLVFLSPKPLKNLLNKLIEIRDRKDLQKPPALLVKLSPDIEYRELDILVEVIVNAGIDGITISNTTVKRPKDLTSPRKNEVGGLSGKPLFLISTEMLRYVFKITGGNIPLVGVGGISSGADAYEKICAGASLVQVYTALVYNGPKLIFNIKNDLAKLLESNGFSSIKDAIGSKNKID

SEQ ID NO: 96844 - protein, 103 aa, Unknown
  Bacterial polypetide isolated from the Sargasso Sea
MLQLLPPETAHNVTIQLTKYGSSLLSKSFQDQTLHTNVKGLSFNNPLGIAAGFDKNAELIDPLLKIGFGFVECGTVTPMPQFGNTKPQIFRLKKDNAIINRLG

SEQ ID NO: 96845 - protein, 234 aa, Unknown
  Bacterial polypetide isolated from the Sargasso Sea
GSKKISLRIEKNRPRGLLGINIGPNKDTINRINDYVECFKRFHNLADYLTINISSPNTESLRDFHGQKELQDLLLAINNEKNNLDSKIPIAVKLSPDLNQNQIENVSEVLIENKISIAIISNSTDKNREKLININKLEKGGLSGKPLENISNNIINRFYKLIGKNIKIIGVGGADSAEGVYEKILNGASLVQLYTGMVYKGPQIAAQINKKLVKILEKDGIKNIGEIVGSKKSS

SEQ ID NO: 96846 - protein, 197 aa, Unknown
  Bacterial polypetide isolated from the Sargasso Sea
YLVGFNKFYNLADYITINISSPNTENLRDFHNLDELGNLLDKIFSEKKKLNSDIPIALKVSPDIDNNIVKDISKILIQYKVNALIVSNTTDQNRDNLKDHQKFQKGGLSGKPLNDISNKLINNFFKNLNGQIKIIGVGGVESGETAYKKFLSGANFVQLYTGMVFRGPKIAIKINEELKKILKEKKIKNYSDIIGKL

SEQ ID NO: 96847 - protein, 215 aa, Unknown
  Bacterial polypetide isolated from the Sargasso Sea
MNNILVNILNLLDPEMAHKFAIYAISSEMIENKNLSKIPIKLGNLKFQHPIGLAAGFDKSAECFSGAFRLGFSSVEIGTVTPLPQSGNDKPRIFRLKEYNALINRYGFNNDGMAVVINRIKKKSISQKGILGVNIGPNKNSQNPLKDFNILSSRLCNYVDYLAINISSPNTPGLRSFHEKSSLIDVIDSCIDGIKKSKHDKPNIFKNFTLILLLR

SEQ ID NO: 96848 - protein, 136 aa, Unknown
  Bacterial polypetide isolated from the Sargasso Sea
LNCLRKFHDIADYITINISSPNTENLRDFHNNEELKNLLESIHNEREKLKSNIPIAIKISPDINQKKVEEICRTILDYDIKAVIVSNTTDGNRDSLKNHKKFQKGGLSGKPLNGISNKLINNFYKILNTKIDIIGV

SEQ ID NO: 96849 - protein, 175 aa, Unknown
  Bacterial polypetide isolated from the Sargasso Sea
MDSSLETTLGSLTLKRPTVLASGILGISLDVFNRLHDAGAGAVVTKSLSKEPWEGYPNPTIFSVKGGGWINAVGLSNPGAETFAKMIEPNDNVPIVVSLVGSVEDDFEYMIKKFENCKVAAYELNLSCPHVAKVGLEVGDDIELVSKIIKKVKSITNSPIVAKVGLGKSDYLATV

SEQ ID NO: 96850 - protein, 247 aa, Unknown
  Bacterial polypetide isolated from the Sargasso Sea
MHNAGAGAVVTKSLSKEPWEGYPNPTIFSVKGGGWINAVGLSNPGAENFAKMIEPNKNVPIIVSLVGSVEDDFEYMIKKFENCNVTAYELNLSCPHVAKVGLEVGDDTELVSKIIKKIKSITNVPILAKVGLGKSNYLDTVDAAVSGGVDAITAINTVRAMAIDVETQMPILSNKIGGLSGTPIKPIALRCVYEISSKFDIPIMGCGGISNWEDAVEFILAGSSAVQFGSVMGDHWVETFGEINSGI

SEQ ID NO: 96851 - protein, 266 aa, Unknown
  Bacterial polypetide isolated from the Sargasso Sea
MLHQCHNSGNTKPRVFRLKKDNAIINRLGFNNKGEKRFIKNLMSAKKTGIVGSNIGPNKDSKNFIDDYLKIYRKISVSCDYVTINVSSPNTEALRELQRKEYLEVLLREISQIRDEEKYKKPIMLKIDPDNTNDHYSMILNLVNKYNIDGIIATNTSLSRPEILRDLNKKREGGLSGTPIKDLSDKVLKFLYRETNQELILIGAGGVGSALDVYNKIKLGASLVQIYTSLTYSGPQLINKILIDLVKLIKDDGFANISEAVGVNNK

SEQ ID NO: 96852 - protein, 303 aa, Unknown
  Bacterial polypetide isolated from the Sargasso Sea
MDSSLETTLGSLTLKRPTVLASGILGISLDVFNRLHDAGAGAVVTKSLSKEPWEGYPNPTIFSVKGGGWINAVGLSNPGAETFAKMIEPNDNVPIVVSLVGSVEDDFEYMIKKFENCKVAAYELNLSCPHVAKVGLEVGDDIELVSKIIKKVKSITNSPIVAKVGLGKSDYLATVDAAVSAGVDAITAINTVRAMAIDVETQMPILSNKIGGLSGTPIKPIALRCVYEIASKFDIPIMGCGGISNWEDAVEFILAGSSVVQFGSVMGDHWVETFSEINSGIQKYMERKGYATIGEMIGKAKRQ

SEQ ID NO: 96853 - protein, 203 aa, Unknown
  Bacterial polypetide isolated from the Sargasso Sea
MNDYLIGLEKFHEVADYITINISSPNTENLRNFHDENKLKELLKSIKDKKNELKTNIPIVVKISPDIHLKQIELISEILFENDISAIIISNTSESTRDDLKNIQRHQKGGLSGKPIEQKSNLLINQFFKLLNGRIKIIGVGGIDSGKSAHDKFLSGADYIQLYTGMVFQGPNIAANIKKELKELLLRDGVKNISEIVGNKTLS

SEQ ID NO: 96854 - protein, 303 aa, Unknown
  Bacterial polypetide isolated from the Sargasso Sea
MDSSLQTTLGSLTLERPTVLASGILGISLDVFKRLHNAGAGAVVTKSLSKEPWEGYPNPTIFSVKGGGWINAVGLSNPGAETFAKMIEPNKNVPIIVSLVGSVEDDFEYMIKKFENCDVTAYELNLSCPHVAKVGLEVGDDTELVSKIIKKTKSITNVPILAKVGLGKSNYLDTVDAAVSAGVDAITAINTVRAMAIDVETQMPILSNKIGGLSGTPIKPIALRCVYEISSKFDIPIMGCGGISNWEDAVEFILAGSSAVQFGSVMGDHWVETFGEINSGIQNYMEKKNYKTIGEMVGRAKRQ

SEQ ID NO: 96855 - protein, 163 aa, Unknown
  Bacterial polypetide isolated from the Sargasso Sea
MANKNTITTEFLGLNLASPIVLLSGCVGFGDEYTRLEGFSNADIGGAVLKGTTLEPRLGNAPHRVYETPSGMLNSIGLQNPGAHEVVENILPSLEPFETHFIANVSGSTINEYIEVCRIFDQSNIHAIELNISCPNVKKGGMEFGNDPEMSAQVVEACKGVHV

SEQ ID NO: 96856 - protein, 148 aa, Unknown
  Bacterial polypetide isolated from the Sargasso Sea
IPIALKISPDIENKSIDRICEVLTNNKIKTVIISNSTDRTRENLKNINKLEKGGLSGKPLENKSNFLINEFFKNLKSDITIIGVGGIDSGRSVYEKIINGAKLVQLYTGMVFKGPNIVSKINDELIEIIKKTGVNNISELVGSKNKLD

SEQ ID NO: 96857 - protein, 320 aa, Unknown
  Bacterial polypetide isolated from the Sargasso Sea
MTTEFLGKQLSGPFTVPSGIVTTAPAIIQRVMDTMPEVGVITTKSIGFEPRLGNREPVYSQYAPGCFVNAVGLTNPGVEEALQGLQQLSVPADRFLLVSIFGGSVDEFVAIARQLAPVADGLELNLSCPHAKGYGMAMGQDPEMVREVTAAVCDAVKTPVIPKLTPNVDDIAVIGRAALEGGAAALCAINTAGPGYTESHGHPVLSNGMGGMSGKGVLPTTLKALKVLRAETDVPLIGCGGLSSAADCRDAIHCGANILGIGSGLTGMNTEEVQHYFADLARDLSEGGDAAGQRVRFDADMGFKPYRVVTNDIVCDDITV

SEQ ID NO: 96858 - protein, 147 aa, Unknown
  Bacterial polypetide isolated from the Sargasso Sea
MFSNLRSLIFKIDPERAHFLAIQSLKLNLVSNIFDDHKNDPIFKTKIFNKELNNPIGIAAGFDKNAEVYNSLFKLGFGLVEVGTITPLKQYGNSKPRVFRLVEDQALINRLGFNNDGSDIILNRIKSSNKLGVLGNNVGPNKDSDNR

SEQ ID NO: 96859 - protein, 303 aa, Unknown
  Bacterial polypetide isolated from the Sargasso Sea
MDSSLETTLGSLTLKRPTVLASGILGISLDVFNRLHDAGAGAVVTKSLSKEPWEGYPNPTIFSVKGGGWINAVGLSNPGAETFAKMIEPNDDVPIVVSLVGSVEDDFEYMIKKFENCKVAAYELNLSCPHVAKVGLEVGDDIELVSKIIKKVKSITNSPIVAKVGLGKSDYLATVDAAVSAGVDAITAINTVRAMAIDVETQMPILSNKIGGLSGTPIKPIALRCVYEIASKFDIPIMGCGGISNWEDAVEFILAGSSVVQFGSVMGDHWVETFSEINSGIQKYMERKGYATIGEMIGKAKRQ

SEQ ID NO: 96860 - protein, 321 aa, Unknown
  Bacterial polypetide isolated from the Sargasso Sea
MKETVAIAHPNFALVKYWGKKDSNKNRPAMSSISVTVDSMISKTKIFKNPQSNHHQLFINGIEESDLSKILPPLEYLSEFSGTEEYLVIESQNNFPTSSGLASSASGIASFVTAYEAHYDLCLDINHKVEASMLGSGSAPRSLIGGFVLMNHKDNYRCSQILKESDWPLDVLICIASKEPKKISSRDGMEISKKTSPIYQDWLDVNDKHINLALNAIKKKDMAALENVTEENCKLMHKVMKTSKPSISYMTDVTHSCLAEIENLRSSGHSLFFTIDAGPQVKIICEPKSTEIIRDTIIDKTTVMDVIHAGLGGPPRIIDEY

SEQ ID NO: 96861 - protein, 102 aa, Unknown
  Bacterial polypetide isolated from the Sargasso Sea
MNEQNGVFKNLYKNLITPVLKRDSGIDAENLTNLSLSLLSFSSRKYNWPVVSSILKNLNEEFSIVDKRLTQSICGINFCNPIGLAAGFDKNGNAANVWKDFG

SEQ ID NO: 96862 - protein, 193 aa, Unknown
  Bacterial polypetide isolated from the Sargasso Sea
KYRGQINIQLGDQRINDYIVCLEKVNKYADYITINISSPNTPNLRDLHNRENLTLLIDAIDKSIKDLNIIKPIFLKISPDESDKTIINIITHIENSSLSGIIATNTTIDKSMLVNEKIKSIDGGLSGEPIMDKSTQRLSFIKSKSKDLPLIGVGGVLSKEDFNEKINAGASLVQIYTGFIIKGPNLITEVLNN

SEQ ID NO: 96863 - protein, 79 aa, Unknown
  Bacterial polypetide isolated from the Sargasso Sea
MYNKIRSLIFKLDPETAHNLAIQTLKLNKFNKRKKEYNKKLSSEIFGKQVDNPIGLAAGFDKNAEVYNSIFNLGFGFEK

SEQ ID NO: 96864 - protein, 250 aa, Unknown
  Bacterial polypetide isolated from the Sargasso Sea
MQERFGNPRPRLHHVPKEKSIINSLGFPSQGLEKINKKLLENPQNGIFLSVSGINEDEIISCIETLEDKTKVFEVNISSPNTSGLRLFHNPSELSKLLEKIKSVSKNKILVKLPPWLESNKNEYLDLGKIAIMSGADGLVIANSLPVNSEKLAVGKGGKSGRVLTNNTPRMIAEVRSYVGPDPVIVACGGIFDANDVWNSLAMGADLCQGYTGFIYEGLFYAYNINKGLLRLMKENNIDSIEKIKGKSIL

SEQ ID NO: 96865 - protein, 207 aa, Unknown
  Bacterial polypetide isolated from the Sargasso Sea
MADLSCNVAGIKAPNPFWLASAPPTDKLYNVERAFRAGWGGVVWKTLGIDPPIVNVSSRYGAVHYNGHRMMGLNNLELITDRPLEDNLKEIKQIKKEWPDRAVVVSLMVPCNEKDWKFILKKIEDTGCDGVELNFGCPHGMSERGMGSAVGQVPEYIEMVTRWVKESSDLPCLVKLTPNVTDICHAARAANAGGADGVSLINTVNSI

SEQ ID NO: 96866 - protein, 186 aa, Unknown
  Bacterial polypetide isolated from the Sargasso Sea
AGYITINISSPNTENLRDFHNNEELKNLLESIHNEREKLKSDIPIAIKISPDINQKKVEEICRSILDYGIKAVIVSNTTDGNRDSLKNHKKFQKGGLSGKPLNEISNKLINNFYKILNNKIDIIGVGGVDSGETAYQKFMHGAKFVQLYTGMVFHGPKIVNKISEELNNILETNNVKKLSDIIGKI

SEQ ID NO: 96867 - protein, 236 aa, Unknown
  Bacterial polypetide isolated from the Sargasso Sea
NNKGEKRFVKNLMSAKGTGIVGSNIGPNKDTKNFIDDYLKIYRKISVSCDYVTINVSSPNTESLRELQRKEYLEVLLRDISQIRDEETNRKLIMLKIDPDNTNDHYSMILNLVNKYNIDGIIATNTSLSRPEILQDLNKKRDGGLSGAPIKDLSDKVLKFLYRETNQELILIGVGGVGSALDVYNKIKLGASLVQMYTSLTYGGPQLINKILIDLVKLIKDDGFANISEAVGVNNK

SEQ ID NO: 96868 - protein, 73 aa, Unknown
  Bacterial polypetide isolated from the Sargasso Sea
GLSGKPVFDASNEVIRKLRAEVGETVPIIGVGGIFSGEDARAKLAAGASLVQLYTGFIYRGPALVAECAQALR

SEQ ID NO: 96869 - protein, 213 aa, Unknown
  Bacterial polypetide isolated from the Sargasso Sea
MGLDLASPIVLLSGCVGFGDEYTRLEGFSNADIGGAVLKGTTLEPRLGNVPHRVYETPSGMLNSIGLQNPGAHEVVENILPSLEPFETHFIANVSGSTIDEYIEVCRIFDQSNISAIELNISCPNVKKGGMEFGNDPEMSAQVVEACKAVTSKPIITKLSPNQADIKESARKCIDAGSDALSVINTITGMAIDIESKRPVLGNTSGGLSGPAI

SEQ ID NO: 96870 - protein, 199 aa, Unknown
  Bacterial polypetide isolated from the Sargasso Sea
MEKIKNTSNDDAWKDYLFCFKKLFHLVDYFVINVSSPNTPGLRKLQNKNLLFDLLNKLQKENKKYKIRKPILLKISPDSSLNEIDDIITVVEKSKIDGIIATNTSIDKSILPNTKDYEEGGISGKSLHKKSTDIIKYISKKTKYKLLIIGVGGIYDHKTMIDKFNAGASLVQIYTGWIYEGPGLIKKMNKIMVNELSKN

SEQ ID NO: 96871 - protein, 152 aa, Unknown
  Bacterial polypetide isolated from the Sargasso Sea
MYKLVIRPLLFLFPPEFIHNISFIMIKIICMVPFMTSILRIYFSKNYKVLNKKIFNLNFKNSIGLAAGFDKNAILIKELSLFGFGHIEIGTITPKPQYGNKKPRLFRLNSEKSLINRMGFNNDGVEIISKRLENLNVDCIIGANIGKNKEYF

SEQ ID NO: 96872 - protein, 321 aa, Unknown
  Bacterial polypetide isolated from the Sargasso Sea
MKETVAIAHPNFALVKYWGKKDSNQNRPAMSSISVTVDSMISKTKIFKNYQSNHHQLFLNGKEESDLSKILPPLEYLSEFSRTDEYLVIESQNNFPTSSGLASSASGIASFVTAYEAHYNLCLDINHKVKACMLGSGSAPRSLIGGFVLMDHKDNYRCSQILKEPEWPLDVLICIASKEPKKISSRKGMEISKKTSPIYQDWLDVNDKHINLALNAIKDKDMAALEIVTEENCKLMHKVMKTSKPSISYMTDVTHSCLAEIENLRSSGHSLFYTIDAGPQVKIICDPKSTEIIRDTIIDKTSVIDVVYAGLGGPPRIIDED

SEQ ID NO: 96873 - protein, 158 aa, Unknown
  Bacterial polypetide isolated from the Sargasso Sea
ISEKKKNLKTNIPIVVKISPDISETQINLISEILLENDISGIIISNTSESSREVLKDIQKHQKGGLSGKPIEKKSNILINKFYNLFKGKIKIIGVGGIDSGQSAYEKFLLGADYIQLYTGMVFQGPNIAGSIKKELKELLIRDGVKNFTEIIGNKTLS

SEQ ID NO: 96874 - protein, 249 aa, Unknown
  Bacterial polypetide isolated from the Sargasso Sea
VEDQALINRLGFNNQGSDAVLNRIKSNNKLGVLGINVGPNKNSDNRINDYLIGIEKFHEVADYITINISSPNTENLRSFHDERKLQDLLKSVSEKKKNLETNIPIVVKISPDIDENQINLISEILLENDISGIIISNTSETSREILKNIQRHQKGGLSGKPIEKKSNILINKFYNLLKGKIKIIGVGGVDSGQSAYEKFLLGADYIQLYTGMVFQGPNIASIIKKDLKELLTRDGIKNFSEIIGNKTLS

SEQ ID NO: 96875 - protein, 49 aa, Unknown
  Bacterial polypetide isolated from the Sargasso Sea
YTIDAGPQVKIICDPKSTEIIRDTIIDKTSVIDVVYAGLGGPSRIIDED

SEQ ID NO: 96876 - protein, 113 aa, Unknown
  Bacterial polypetide isolated from the Sargasso Sea
MFNILRPLIFKFSPEVAHSLAIKALKLNNISYSKPKENHILETTFCEKKLSSPIGVAAGFDKNAEVYNPLFNLGFGFVEVGTITPKPQFGNPKPRVFRLEEDEALYNRLGFYN

SEQ ID NO: 96877 - protein, 119 aa, Unknown
  Bacterial polypetide isolated from the Sargasso Sea
MYNSALKILRLFPPEMAHDLTLNILKYKKFISKNFEDPILSQHLMGLDFPNPIGLAAGFDKNAEVIQSMFSFGFGFIEIGTVTPKPQKGNIKPRVFRLQEDRAIINSLGFNNKGVTKVK

SEQ ID NO: 96878 - protein, 168 aa, Unknown
  Bacterial polypetide isolated from the Sargasso Sea
MFEKIRSLIFKFDPETAHDLAIKALKTNIIPLKVKKFNSLKVKLLDREISNPIGIAAGFDKNAEVYNSLFKLGFGFVEVGTVTPKPQFGNSKPRVFRLEEDKALINRLGFNNIGSKKASLNIKNNTPKGLLRVNIGPNKDTKNRIEDYLRCFKTFYNLADYITINISS

SEQ ID NO: 96879 - protein, 101 aa, Unknown
  Bacterial polypetide isolated from the Sargasso Sea
MFEKLYKKIFPIIKFIPPEIAHNLAIKFFSNFKKEIKPDDPILNTRVCNLQFTNPIGLAAGFDKNGEAFEGLTCLGFGFVEVGTITINPQYGNKKPRIFRL

SEQ ID NO: 96880 - protein, 254 aa, Unknown
  Bacterial polypetide isolated from the Sargasso Sea
MLINLLRLLPPETAHELTIKLLRSNLNLKRNHAKLFKSLKQKILGINFKNPIGLAAGFDKNAEVMSQMFSYGFGFVEIGTVTPKIQLGNEKPRIFRLIEDEAIINHLGFNNEGSEKVLSNIKSFYKNKDINEIIGVNIGKNKSTQSDIDDYLYCVEKLGMYSDYITINISSPNTPGLRDLQLRGRIELLVKKIQTKQSEIEGLIKKPIFIKISPDLNDEQLRDIALMSLANNVNGLIISNSTIQRPDSLISSYK

SEQ ID NO: 96881 - protein, 123 aa, Unknown
  Bacterial polypetide isolated from the Sargasso Sea
MASGAEGTGSTSTMVRVAVGVVGGFAALRWAEGRWAEDVEFAAYGAATPAMRMLDAETAHTVGIAALAMGMGPRQRVEDGKSLEVEAFGMKLSNPVGLAAGFDKDAKAFEALIKMGFGFVEIG

SEQ ID NO: 96882 - protein, 133 aa, Unknown
  Bacterial polypetide isolated from the Sargasso Sea
VKISPDLDDESIARVAEVLTLRGIDGIVATNTTVSRPLNTEVHPHVSQTGGLSGAPLATLSHRVITELRQHTPSEFPVIGVGGIMDAASAQAAFSAGATLVQLYSGLIYRGPALVREILGALQAAQTAKAPTS

SEQ ID NO: 96883 - protein, 275 aa, Unknown
  Bacterial polypetide isolated from the Sargasso Sea
FGFIEVGAVTPLPQPGNPKPRLFRVVKDEAIINQFGFNNQGMHIINGRLKKVRTSAIVGINIGANKNKANDPSEFSKVLGVCYENIDFATINISSPNTANLRALQGKSSLSETLSEVTNTNLNLATPKPLFLKISPDLNYKQLEGIVEVALKFKISGIIATNTSSNFASINNSHLTQGGGLSGKPLFTNSTKILALLSKISDGEIPLIGVGGISTAQDAYVKILAGASAVQLYSALTFKGPSLISNIITGLDRILEKEGYANISEAVGLKKQDFC

SEQ ID NO: 96884 - protein, 132 aa, Unknown
  Bacterial polypetide isolated from the Sargasso Sea
MLVALLRLLPPEIAHELTITLLKSKLSINTIKTNNYQTLKQNILGIDFPNPIGLAAGFDKNAEVIRSMLNYGFGFVEIGTVTPKPQLGNSKPRIFRLLEDEAIINHLGFNNKGTEKILKNLQDIYKSDTFSG

SEQ ID NO: 96885 - protein, 304 aa, Unknown
  Bacterial polypetide isolated from the Sargasso Sea
MGIAWSLLGSPALRLIDSETAHSISMRVMRGFGETSAGQNMLNALYRPPEVPIEVFGKMFHHPLGLAAGFDKGAEALMAWSAMGFSWTEYGGVTRYPQDGNPKPRMFRANRHKALVNKMGFNNPGASEIRKRLISRKSEDKWPKTPVAANIGRSKKVPNEHAADDYASTLDILWDHADMFVLNISSPNTPGLRELQGQEHLSSILRSCNKVREMKGASKPILLKLSPDNGDDEILETVSLCLSSGVDGIVATNTTIKRPAPLSTQSRKAFSSDGGLSGRPLNSRSLEVINLAYGETQGKIPIVG

SEQ ID NO: 96886 - protein, 228 aa, Unknown
  Bacterial polypetide isolated from the Sargasso Sea
IDRFNDYKLLAENLSEFADYISINVSSPNTPNLRDFQKKGNLEKVIKVVKDGISISKTLNKKLPIFLKIAPDINKQTLNSIIEIAQLQKICGLIISNTTLDRDTNLKSKKSSELGGLSGKPLFKKSTAILSEANKIIKNKNYKLFLIAAGGVTDSQTAYVKILCGAHLVQLYSSLTFEGPLVANKIISGMLKLMKRDNIKNIFDTVGIIDNPREAMNISIHGYKKYKN

SEQ ID NO: 96887 - protein, 225 aa, Unknown
  Bacterial polypetide isolated from the Sargasso Sea
MIKKINKFLIMIAKFFEPERAHFFALILLKYNFFSKVFSKKKFEFLNTSFFNVKIKNPIGVAAGFDKNGEAIRGIFNLGVGIVEIGAVTPKPQYGNEKPRIFRLNEDNALINRLGFNNQGMIKIKKNIKRYNHGVLGINVGANKDSKDKVTDFIEVISYFSKEVDYFTINISSPNTHMLRSLQKKENLDKLLKRITSNNEEKKINKPILIKISPDLDNEELKTIV

SEQ ID NO: 96888 - protein, 255 aa, Unknown
  Bacterial polypetide isolated from the Sargasso Sea
MSLTTLGMKIFAKMDPEAAHRLAINLLRFGLFPSSKLLSKDPILEQNVFGINFSNPIGLAAGFDKNAEAFEPILALGCGFVEVGSFTLRPQFGNPKPRAFRLLEDEAAISRHGFNNDGLAKGLERLALRKKRSGLVGINLGINKDSKAPMADYVDSIVRASAYGDYITVNISSPNTEGLRELQNADNLDCLLKEIYKVKSSPLNEKKVPPILLKVAPDITNKMVEDIINLALKYKIDGLIVGNTHYFKTLQPSTS

SEQ ID NO: 96889 - protein, 34 aa, Unknown
  Bacterial polypetide isolated from the Sargasso Sea
METPTISRPSSLQHHSKNEAGGLSGKPLFELSTK

SEQ ID NO: 96890 - protein, 148 aa, Unknown
  Bacterial polypetide isolated from the Sargasso Sea
MSNLFLKLIKFFPPELAHNITIKLLKFSFKKKILIDNPILNQHLLGLDFSNPIGLAAGFDKNAEVVNPMLNLGFGFVEVGTITAKPQYGNEKPRIFRLSEDMAIINHLGFNNAGSDKVLQNLQKLKLSNLSSGIVGINIGKNKNSEDA

SEQ ID NO: 96891 - protein, 265 aa, Unknown
  Bacterial polypetide isolated from the Sargasso Sea
MIWKFITFFVRKLEPEIAHQISLIALKLGLHPRLKRIEIPVKINNLHFSNFLGVAAGFDKNAQVIEKIHHLNFGLTEVGTITPLPQYGNPKPRVFRLEKDQAIINRNGFNNLGMAQAIIKLKHYRKKFPVGSDFVLGINIGPNKDSNNRFKDYEILSKDLSEFADYLTINISSPNTPNLRDFHETENLEKVLISVKNGIAKSKKLELHLPIFLKISPDITENNLNLIIETANKNNIAGLIISNTTVDRYKDLHLDNLHEEGGLSG

SEQ ID NO: 96892 - protein, 259 aa, Unknown
  Bacterial polypetide isolated from the Sargasso Sea
MYLFTIITKLFHFLPEEIAHRLALSGLKILYFSGLLKILLRNKSMNGKIQTNSSFRCTYRNKLGIAAGLDKDGEYIDCLSALGVGFIEVGTVTPLPQPGNPKPRLFRNRTEKSLLNRLGFNNKGVEALVENLKNRKSTIPIGVSIGKNFDTSNVEAYKDYLFCMEKVYEFSSYIAINISSPNTKGLRELSNNKFLGDLLGIIKDKQNKLSESFDYVPIYIKISPDEKPEDLEKICKSIADNGIDGIIASNTTAVHNDKN

SEQ ID NO: 96893 - protein, 171 aa, Unknown
  Bacterial polypetide isolated from the Sargasso Sea
EKVYNYADYITINISSPNTPNLRDLHNKDHLNDLIGSIDKKVNEINIKIPIFLKISPDESDEILNNIIELIEHSSISGIVATNTTVDKSNISNEKLRKIEGGLSGKPLKEISTSKISYLKTKNKDLNLIGVGGVMNKEDYQSKIDSGASLVQIYTGFIINGPGVVHKILQD

SEQ ID NO: 96894 - protein, 289 aa, Unknown
  Bacterial polypetide isolated from the Sargasso Sea
EDPILAQHLIGLDFPNPIGLAAGFDKNAEVMHSMFSFGFGFLEVGTITPQPQSGNSKPRVFRLSEDKAIINSLGFNNKGIKKVKKNLIKYQKSYLSNKIVGVNIGKNKNSSEAIDDYLIGLEELGDLASYITINISSPNTEGLRDLQLRGNIEKLIKKIINKRDEIKNINTKPILIKISPDLNEDQLRDIALISLANNIDGLILTNSTINREINLISINKGQKGGLSGRPLYDNSNIILKKMYQLTNGQIPLIGVGGISSGRDCYEKIKSGASLVQLYTALVYSGPKFN

SEQ ID NO: 96895 - protein, 95 aa, Unknown
  Bacterial polypetide isolated from the Sargasso Sea
MFNILRPLIFKFSPEVAHSLAIKALKLNNISYSKPIDNHILETTFCEKKLSSPIGVAAGFDKNAEVYNPLFNLGFGFVEVGTITPKPQFGNPKPR

SEQ ID NO: 96896 - protein, 96 aa, Unknown
  Bacterial polypetide isolated from the Sargasso Sea
MFSFLRPFIFNLDPETAHDLAIKSLKYNVLPKSLFSVENEEILNIKLFGKIIDNPIGLAAGFDKSAEVYNEIFKIGFGFVEVGTVTPKKQYGNQKP

SEQ ID NO: 96897 - protein, 155 aa, Unknown
  Bacterial polypetide isolated from the Sargasso Sea
MFNFFRPFIFKFSPEVAHSLAIKALRLNNLTFKKSKDSKFLEIEFCGQKLSCPIGVAAGFDKNAEVYNPLFNLGFGFVEVGTITPKPQYGNPKPRVFRLEEDEALINRLGFNNAGSDEISLRIKKEIKKGFLGINIGPNKDTKNRIGDYLICFRK

SEQ ID NO: 96898 - protein, 167 aa, Unknown
  Bacterial polypetide isolated from the Sargasso Sea
MPPEAAHWAAVETLRRRIGPSPDLDDIPVDVAGLSFRNPLGLAAGFDKDAACPDGALRLGFGHAELGTITPLAQPGNPRPRVFRLPQDRAVINRYGFNSSGMEPAAARLAARRSGTSRQAGIVGINVGANKTSDVPTDDYRTAVARLAPYADYITLNISSPNTRGLR

SEQ ID NO: 96899 - protein, 241 aa, Unknown
  Bacterial polypetide isolated from the Sargasso Sea
LINRLGFNNVGSEKAASTILSDSPKGLLGINIGPNKDTKNRVDDYLKCFNNFNNLCDYITINISSPNTENLRSFHNPKELEELLNAINEEKIKINSCTNIAVKIAPDLQLKDLDFIGNTLLNNNIKIVIISNTSDKTRDSLKNISKFEKGGLSGKPIEQKSNLIIKEFYKIFKNKIKIIGVGGVDSGKSAYEKFISGASYIQLYTGMVYQGPNIVNKISEELNAILSSEGVKNIDEIVGSN

SEQ ID NO: 96900 - protein, 197 aa, Unknown
  Bacterial polypetide isolated from the Sargasso Sea
EDEALINRLGFNNSGADIVASRIKTNLPNGLLGINIGPNKDTKNRLEDYLICIKKFHDICDYLTINISSPNTENLRSFHNQNELDELLNAIKDEKQKLNSKIPIAVKISPDIEEANVEKISELLIKYNISLAIISNTSDKNRENLKNINKLEKGGLSGKPLEKKSNELINRFYKIIKGKVKIIGVGGVDSGKSAYEK

SEQ ID NO: 96901 - protein, 131 aa, Unknown
  Bacterial polypetide isolated from the Sargasso Sea
QIKSIVDTARGLGCAGIIATNTTISRPDDSLIMSETGGLSGRPLKSRSTEVIRLIADHTDGNWPIIGVGGIADADDAWEKITNGASLIQIYSSMVFNGASVIKGIVNGLDRKLKSKGLDNLDQAVGLARGD

SEQ ID NO: 96902 - protein, 221 aa, Unknown
  Bacterial polypetide isolated from the Sargasso Sea
INRLGFNNKGVDHLVKNLKNRSYEGILGVNIGANKESVGPERINDYLICLEKVYKHSDYITINISSPNTPNLRELHNKDELKNLIEAIDSKVIELDIATPIFLKISPDESDQVIDMVIEILDSSQISGIIATNTTIDKSNIINKEFRSIDGGLSGAPLMGKATDKLSYIYTRSNHLPLIGVGGVTSKKDYEMKLQAGAQLVQIYTGFIIKGPKIVNEILSN

SEQ ID NO: 96903 - protein, 245 aa, Unknown
  Bacterial polypetide isolated from the Sargasso Sea
GLDKEGKYVESLGNLGFGFIEVGTFTPLPQKGNEYPRVKRLSSENSLINRLGFNNPGIDVGLENLRRNKSKFDGIVGVSIGKNKKTSLESAYQDYIYCLQKAYPVADYIALNISSPNTEGLRELFRENYFDNLMVQINSEAKKLQKELQKFTPLFLKISPDENEERIEEIIECSLKNNICGFIVSNTSLGEFQNISGGISGELLKNKSIKILNTVNRINAKRGLIISSGGISTKEDIEQRRALGA

SEQ ID NO: 96904 - protein, 167 aa, Unknown
  Bacterial polypetide isolated from the Sargasso Sea
MNALYRPPEVPIEVFGKMFHHPLGLAAGFDKGAEALMAWSAMGFSWTEYGGVTRYPQDGNPKPRMFRANRHRALVNKMGFNNPGASEIRKRLISRKSEDKWPKTPVAANIGRSKKVPNDHAADDYASTLDILWDHADMFVLNISSPNTPGLRDLQGQEHLSSILRSC

SEQ ID NO: 96905 - protein, 160 aa, Unknown
  Bacterial polypetide isolated from the Sargasso Sea
MFNILRPLIFKFSPEVAHSLAIKALKLNNIPYSKPKDNHILETTFCKKKLSSPIGVAAGFDKNAEVYNPLFNLGFGFVEVGTITPKPQFGNPKPRVFRLEEDEALINRLGFNNSGSEQISQTIKENNKKGFLGINIGPNKDSTNRIDDYLICFRKFYNLA

SEQ ID NO: 96906 - protein, 275 aa, Unknown
  Bacterial polypetide isolated from the Sargasso Sea
FVEVGTITPKPQFGNPKPRVFRLEEDEALINRLGFNNSGSEEISKRIKENNRKGFLGINIGPNKDSTNRVDDYLICFRKFYNLADYITINISSPNTENLRDFHNRDELNLLIDKLKKEKKELNSNIPLAIKVSPDLNDDQINEVSKIIMEQDIGIIIVSNTTDKNRENLKNINKLEKGGLSGKPIAKISNEAISKFYKILKNKTKIIGVGGVSNGQDAFEKIISGATLVQLYTGMVYRGPRIASKISKELIDLLKNKGFKNVSEAMELKINLDAI

SEQ ID NO: 96907 - protein, 98 aa, Unknown
  Bacterial polypetide isolated from the Sargasso Sea
MYNTALKILRLFPPEVAHDLTLNILKYKKFVSKGFEDPILSQHLMGLDFPNPIGLAAGFDKNAEVIQSMFSFGFGFIEIGTVTPKPQKGNIKPRVFRL

SEQ ID NO: 96908 - protein, 231 aa, Unknown
  Bacterial polypetide isolated from the Sargasso Sea
KKVIFLIRSNPPKGLLGINIGPNKDTKDKINDYLICLRTFHDIADYITINISSPNTEHLRDFHDQNKFQNLIIAIEKEMIKLKSNTPIVIKISPDILNEEAKKISEVLLNHSIQAVIISNSTDKNRGQLNNHQKYQKGGLSGKPLETRSNELIKIFYNLLKGKIPIIGVGGVDSGQSAYDKFLAGASFIQLYTGMVYQGPNIIKKIKNELKIILTKKRITNFEQIIGKNNN

SEQ ID NO: 96909 - protein, 164 aa, Unknown
  Bacterial polypetide isolated from the Sargasso Sea
MFSNLRSLIFKLDPEIAHNLAIKSLKFNFVPNIIDEEKDNPLFKTKLFNKDLENPIGMAAGFDKNAEIYNSLFKLGFGFVEVGTITPLKQYGNPKPRVFRLVEDEALINRLGFNNHGAKSVFDRIKFNTQIGLLGINIGPNKDTENRLGDYVKCLKTFDEVADY

SEQ ID NO: 96910 - protein, 254 aa, Unknown
  Bacterial polypetide isolated from the Sargasso Sea
FEPRVFRLEEDEALINRLGFNNSGADKVSYRIKSHPPKGLLGINIGPNKDALNRVKDYIICLNKFYKLADYLTINISSPNTENLRSLHNENELDELLSEIKIEKKKLKTDIPIAIKISPDLENEKIEKLSELLIKYHVSTIIISNSTDSNREKLKNINKLEKGGLSGKPLELKSNLLINKFYNFLNNKVNIIGVGGVDSGYGVYEKIINGASLVQLYTGMVYKGPGIISKINNELIQIAKKNGVKNILELKGTK

SEQ ID NO: 96911 - protein, 62 aa, Unknown
  Bacterial polypetide isolated from the Sargasso Sea
RSGGARLRLLEVGTVTPRAQPGNPRPRMFRLPQANAVINRMGFNNAGVDQFVKNVQAARYRG

SEQ ID NO: 96912 - protein, 277 aa, Unknown
  Bacterial polypetide isolated from the Sargasso Sea
AGFDKNAEVYNSIFKLGFGFSEVGTITPEPQNGNPKPRVFRLNADQAIINSLGFPNDGMNKVYERIKNNPKKSILGINIGPNKENATKEDDYLRCIEKFYPLADYITINISSPNTPNLRNLHDKKKILDLINILQKFKNNFKEKKAIIFKLSPNLNNSEINDLSEIFLEKKIDGIVLTNTTIEGKELLEDENKNKEGGLSGYPLNQVSNQIIKKFYINFKKTIPIIGVGGVSDGVTAYEKIKCGASLLQLYTAMVFKGPYVASKINKELSNLIKKDG

SEQ ID NO: 96913 - protein, 258 aa, Unknown
  Bacterial polypetide isolated from the Sargasso Sea
MYNLFKAFLFLFDPEIIHRLTILFLKFIPLNKTFIPKELNTKILGMNFSSPIGLAAGFDKNAEVYSKMFNLGFGFVEVGTVTPKPQEGNSKPRIHRIKKERVIINSLGFNSIGFEKVKVNLLNKKTEGIIGVNIGANKDSKIFIDDYISGIKFFSNHVSYITINISSPNTPGLRELHIEKNLKDLLEKIKNLKTNNEIVEVPLLIKISPDLNNEDLSIMCDIFLEFNVDGIIISNTTLERPFKGFGENLKGGLSGELL

SEQ ID NO: 96914 - protein, 210 aa, Unknown
  Bacterial polypetide isolated from the Sargasso Sea
MSLTTLGMKIFAKMDPEAAHRLAINLLRFGLFPSSKLLFKDPILEQNVFGINFSNPIGLAAGFDKNAEAFEPILALGCGFVEVGSFTPRPQLGNPKPRAFRLLEDEAAISRHGFNNDGLAKGLERLALRKKRSGLVGINLGINKDSKAPIADYVDSIIRASAYGDYITVNISSPNTEGLRELQNADNLDCLLKEIYKVKSSQLNDKKVPP

SEQ ID NO: 96915 - protein, 89 aa, Unknown
  Bacterial polypetide isolated from the Sargasso Sea
MLDKTIKILKFLPPELAHSISINALKYLKFNFENLDNEILYQHLIGLDFPNPIGLAAGFDKNAEVVRSMFSIGFGFIEVGTITPLPQKG

SEQ ID NO: 96916 - protein, 157 aa, Unknown
  Bacterial polypetide isolated from the Sargasso Sea
MFSNLRSLIFKLDPETAHNLAIKSLKFNFVPNILDEDKDNPLFTTKLFNKNLDNPIGMAAGFDKNAEVYNSLFKLGFGFVEVGTITPLKQYGNPKPRVFRLVEDEALINRLGFNNLGATNVLNRIKSNRQLGLLGINIGPNKDTEDKLSDYIKGLKN

SEQ ID NO: 96917 - protein, 203 aa, Unknown
  Bacterial polypetide isolated from the Sargasso Sea
MLNDFLLCAKIFFPIGDYITINISSPNTEGLRSFHNKENLEKLLLKINEIREKSNFKKSFLLKISPDLDDQSINNIVDLSLKTNINGIILTNTSDKNRDKLQDIKKSEKGGLSGQPIKDLSTKMIKKFYKKLNGKIPIIGVGGIDSGEAAFEKITAGASAIQLYTGMVYKGPMIVKEIKKDLIQKLNEKGFKNITEAVGSNSN

SEQ ID NO: 96918 - protein, 267 aa, Unknown
  Bacterial polypetide isolated from the Sargasso Sea
YPQYGNEKPRVFRLKEDLALINHLGFNNKGTDYVKNKLKKLKLNSLSKGIVGVNIGKNKNSENYIKDYEYCLEQLGHLAHYVTINISSPNTPGLRNLQNRGQIENLVIALKKKKKSIPNLETTPIFLKIAPDINEEQMRDIALISLANNIDGLIISNSTTERSSSLKSFAKNEIGGLSGKPLFLESTLILKKMFSLTNGQILLIGVGGVSSGSECYEKIKSGASLIQLYTALTYQGPKIIDKILNDLINLLKSDGYKNIKEAIGKDV

SEQ ID NO: 96919 - protein, 103 aa, Unknown
  Bacterial polypetide isolated from the Sargasso Sea
NVISSNKSELGGLSGKPLKSISTKLIKRFYKDLKNKVPIIGVGGIDSGKSAFEKISAGASALQLYTGMIYEGPMMVKKIKKDLIKILKEQGYENIKQAIGSYS

SEQ ID NO: 96920 - protein, 254 aa, Unknown
  Bacterial polypetide isolated from the Sargasso Sea
KPRVFRLEEDEALINRLVFNNSGSEKISSRISKVTKKGILGINIGPNKDAENRIEDYLNCFKKFHSLADYITINISSPNTENLRDFHNHEELNSLIKELKNEKGKLNSKVPIAVKVSPDLNDEQIEVVSNVLLDQEIEIIIVSNTTDKNRDKLNNINKLEKGGLSGKPLYEISNKIISKFYKLLGNKIKIIGVGGIDSGEAAFEKIVRGASLVQLYTGMVYKGPGIASSISSELIDILKNKGFKNVSEAVGTKN

SEQ ID NO: 96921 - protein, 153 aa, Unknown
  Bacterial polypetide isolated from the Sargasso Sea
MYSNLRSLIFKIDPERAHFLAIQSLKLNLVSNIFDENKNDPILKTKLFNQNLDNPIGIAAGFDKNAEVYNPLFKLGFGFVEVGTVTPLKQYGNEKPRVFRLVEDQALINRLGFNNHGSDIILNRIKSNKKIGVLGVNIGPNKDSNDRLKDYLI

SEQ ID NO: 96922 - protein, 102 aa, Unknown
  Bacterial polypetide isolated from the Sargasso Sea
MFNFIRPLIFKFSPEVAHSLAIKALKLNNIPYSKPKDSHILEITFCEKKLSSPIGIAAGFDKNAEVYNPLFNLGFGFVEVGTITPKPQFGNPKPRVFRLEED

SEQ ID NO: 96923 - protein, 222 aa, Unknown
  Bacterial polypetide isolated from the Sargasso Sea
MFSKIRSLIFKLDPELAHSLAIKALKFNYFPFQDNKKYNSLEIDIFKKKIPNPIGIAAGFDKDAEVYNSLFRLGFGLVEVGTITPIKQYGNPKPRVFRLEEDEALINRLGFNSSGSDIVSSRIKSNPPSGLFGINIGPNKDSKNMLEDYLIGLRIFHKLADYLTINISSPNTENLRSFHGHNELNELLNAINLEKQKLKSNIFIAVKISPDIEDNNIEKICE

SEQ ID NO: 96924 - protein, 170 aa, Unknown
  Bacterial polypetide isolated from the Sargasso Sea
MNFFLKIFKLLPPELAHTISLNSLNILYNIGLVRLFSKQILTNDDFNFLGMNFKNRLGTAAGLDKNGDFINSLGELGFGFLEVGTVTPIAQKGNSKPRVFRAYEDQAIINRLGFNNKGIDYLVDNLKKRKYKGIVGVNIGANKSSKGTERINDYLICLEKVHKYADYITH

SEQ ID NO: 96925 - protein, 283 aa, Unknown
  Bacterial polypetide isolated from the Sargasso Sea
KQNILGIDFENPLGLAAGFDKNAEVILPMIRYGFGFVEVGTVTPNPQKGNQKPRIFRLLEDEAVINHLGFNNKGSDRILNNLIEFYQNKEINSVVGVNIGKNKSTKNDFDDYLYCIEKLGEYGNYITINISSPNTPGLRDLQLRGRIEALVKKIQSKQFEIKELNNKPIFIKISPDLDDEQLRDIALMALANNINGLIISNSSIKRPKSLISYYKNELGGLSGKPIFIDSTIILKKMYSLTNGQIPLIGVGGVSNGYECYEKIKAGACLVQLYTALTFHGPKK

SEQ ID NO: 96926 - protein, 217 aa, Unknown
  Bacterial polypetide isolated from the Sargasso Sea
EPFETHFIANVSGSTIDEYVEVCRIFDQSNIHAIELNISCPNVKKGGMEFGNDPEMSAQVVEACKGATSKPIITKLSPNQADIKESARKCIDAGSDALSVINTITGMAIDIDTKRPVLGNTSGGLSGPAIKPIALQKVMQVYEVAGPQNIPIMGQGGISSVKDALEFIIAGASTIGIGTALFIDPLVCNKINGGIEKYLSAQGLDGVESLVGSLIRD

SEQ ID NO: 96927 - protein, 156 aa, Unknown
  Bacterial polypetide isolated from the Sargasso Sea
MNFFLNIFKLLPPEVAHTLALKSLNILYRTSLLKLFYKPVKTRDFNLLGLNFKNKLGVAAGLDKNGDYIDSLGSLGFGFLEVGTVTPLPQAGNSKPRMFRAFEDDAIINKLGFNNNGVDYLVNRLKKRNYKGIIGVNIGANKSSTGDKRIEDYLIC

SEQ ID NO: 96928 - protein, 259 aa, Unknown
  Bacterial polypetide isolated from the Sargasso Sea
NPKPRLFRLPKDKAVINRFGFNNLGMHIVSARLAKRSEKGIVGVNLGANKDSDDRIKDYVKVLKCCGPFVDFATVNVSSPNTENLRNLQEKSSLNNLLYQVMSSRENLINKVPIFLKIAPDLSLNQIDDISEIALKMQIDAVVATNTTLDHQGLKSYVKNKQGGLSGRPLFSKSTWVLANLSRRLEKRVPLIGVGGIASAQDAYIKLLAGASAVQLYTGLVYNGMGLVTKINTGLSEILSQQNKTHISDIVGSEAEEFL

SEQ ID NO: 96929 - protein, 259 aa, Unknown
  Bacterial polypetide isolated from the Sargasso Sea
DYVEELESLGFGFIELGTVTPRPQEGNQKPRVFRYINQRAVVNRLGFNNKGVDYLVSQIKNKKYDAVIGVNIGANKESKNDQRVEDYVYCFEKVHKYCDYVTVNISSPNTPELRKLHNPDELEKIFKRINEIKSINQTDIPILLKISPDENQETILNILKIHETLKINGLIVSNTSIDKGILENCSHEGGISGKPLFEKSNQLIQRVHEFDNEIFLIGVGGVFSKEDYESKIKLGASLVQIYTGFIFEGPAIVKNILSR

SEQ ID NO: 96930 - protein, 254 aa, Unknown
  Bacterial polypetide isolated from the Sargasso Sea
NPRPRMFRLTSAQALVNRMGFNSGGLNLFLARLGQQHQQTIIGINLGRNATTSNNEAWRDYLTGLRAVYRVADYVTINISSPNTEGLRDLQEHDALDSLIQYLKDEQTRLADLHEKYTPIAVKISPDLDAESIARVAEVLIRRGIDGIVATNTTISRPLNTDAHPHALQAGGLSGAPLATLSHRVITELRQHTPSEFPVIGVGGIMDAASAQAAFSAGATLIQLYSGLIYRGPALVPEILKGLQTAKTAVSELT

SEQ ID NO: 96931 - protein, 289 aa, Unknown
  Bacterial polypetide isolated from the Sargasso Sea
TKIANLEFKNPIGLAAGFDKSGQCFHGIFKLGFSSVEVGTVTPFSQAGNNKPRVFRLYKDRAVINSYGFNNDGMEIVKNRLNDGKKRDGVLGVNIGPNKKSKNPIEDFKVTSKNLSKYCDYITINISSPNTPGLRNMHDKNLLSEVIKATKEGISEVGSHKPIFLKISPDEKISTITQIINTSINENIDALVISNTTIERPVYLNSKYQYIKGGLSGNPLFKKSTKLLENIHKITNGKIDLVGVGGVESANQAYVKILVGAKLVQLYTGLLFQGPNIVKIITSQLSEFS

SEQ ID NO: 96932 - protein, 218 aa, Unknown
  Bacterial polypetide isolated from the Sargasso Sea
MFSNLRSLIFKIDPERAHFLAIQSLKLNLVSNIFDEHKNDPIFKTKIFNKELNNPIGIAAGFDKNAEVYNPLFKLGFGLVEVGTITPLKQYGNSKPRVFRLVEDQALINRLGFNNHGSDVVLNRIKSNNKLGVLGINVGPNKDSDNRINDYLIGIEKFYDVADYITINISSPNTENLRNFHDQEKLQDLLKTISEKKKNLKTNIPIVVKISPDISETQ

SEQ ID NO: 96933 - protein, 166 aa, Unknown
  Bacterial polypetide isolated from the Sargasso Sea
MFEKIRSLIFKFNPETAHDLAIKALKTNVIPVKAKSFDCLKVKFLNKEIPNPIGIAAGFDKNAEVYNSLFQLGFGFVEVGTITPEPQFGNPKPRVFRLEEDEALINRLGFNNIGSKKVTLNIKNNSPKGILGVNIGPNKDTKNRIDDYLKCFRTFKHLGEYIPINI

SEQ ID NO: 96934 - protein, 267 aa, Unknown
  Bacterial polypetide isolated from the Sargasso Sea
KELSNFVFGFIEVGTVTPLKQDGNPKKRLFRLEVDDALINRMGFNNEGVESLISRLKKKKDIVVGVNIGKNKNTKIENSIDDYEFCFNKLHRYVDYFAINVSSPNTPNLRLLQKKDSLLKILNRLTFLNNNKSKQKPIFLKISPDLNEKQLEDVIDSVIKTKLSGIIATNTTLNRENLNSNINLINESGGLSGKPLNERSNEIISFISKKSKKSFVIIGVGGIQSSQDAIDKIKAGADLIQIYTGFIYKGPGLIKKINKSLLSLNNK

SEQ ID NO: 96935 - protein, 134 aa, Unknown
  Bacterial polypetide isolated from the Sargasso Sea
MFEKIRSLIFKFDPETAHDLAIKALKTNVVPVKAKSYDCLKVKFLEKEITNPIGIAAGFDKNAEVYNSLFKLGFGFVEVGTITPQPQFGNPKPRVFRLEEDEALINRLGFNNIGSEKAANNLKNNSPRGLLGIN

SEQ ID NO: 96936 - protein, 141 aa, Unknown
  Bacterial polypetide isolated from the Sargasso Sea
KIAPDLDDAERADIAAVIMDSDVDGLTVANTTVKRPDHMTDPQTPEDGGLSGAPLFPFALAIVRDMYRRTEGKLPIIGCGGVASGADAYAMIRAGASLVQLYTALVFHGPALIPRIKRDLTLLLKNDGFVSVSDAVGADHS

SEQ ID NO: 96937 - protein, 265 aa, Unknown
  Bacterial polypetide isolated from the Sargasso Sea
TVTFKAQYGNPKPRVFRLEKDRALINRLGFNNDGVQKVSQRLQKNPPTGFLGINIGPNKDSENRIDDYLKCIKEINTFAHYITINISSPNTPGLRDFHDHSTLQNLLGEITEFIKKNKINKPLALKVSPDIADKEIGFIIESIKKFKISAIIISNTTDKNRESLIGIHKSEVGGLSGEPLSKISNDLIKKFYRETKGKIIIIGVGGISSGLTAYEKLKSGANLLQLYTGMVYEGPGIVKKIKGELIDIFKKEKIKNVSEIVGTGS

SEQ ID NO: 96938 - protein, 109 aa, Unknown
  Bacterial polypetide isolated from the Sargasso Sea
MFSILRPYIFSLDPEVAHDLAIKSLKANILPKSFFKVESEEMLETNLFGKTISNPIGLAAGFDKSAEVYNSLFKFGFGFIEVGTITPKQQLGNPKPRIFRLEKDQALIN

SEQ ID NO: 96939 - protein, 320 aa, Unknown
  Bacterial polypetide isolated from the Sargasso Sea
SILSQHLMGLDFVNPIGLAAGFDKNAEVMNSMFSFGFGFLEVGTITPQPQKGNSKPRVFRLSEDKAIINSLGFNNKGIIKVKKNLIKYQKSYLNNKIVGVNIGKNKNSSEAIDDYLRGLEELGDLASYITINISSPNTEGLRDLQLRGKIEKLIKKIIDKRDEIKKINTKPILIKISPDLNEDQLRDIALISLANNIDGLILTNSTIKRNDNLISINKEKKGGLSGKPLYDNSNLVLKKMYELTNGQIPLIGVGGISSGRDCYEKIKSGASLVQLYTALVYSGPNLINSMKGDLIDLIKTDGYKNVSEVVGKSGIKVKKK

SEQ ID NO: 96940 - protein, 175 aa, Unknown
  Bacterial polypetide isolated from the Sargasso Sea
MKAFIKIFRFFPPENAHHLALLSLKILNKVRILKLFFPDNKDFDNPKKYFNLKFRNTLGVAAGLDKNGDYVDELESLGFGFVELGTVTPKPQEGNQKPRVFRYLNQQAVVNRLGFNNKGVNYLVSKIKNKKYDAVIGVNIGANKESTNDQRIEDYVFCFEKVYKYCDYITFNISS

SEQ ID NO: 96941 - protein, 245 aa, Unknown
  Bacterial polypetide isolated from the Sargasso Sea
LFRLMKDGGIINRMGFNNDGLEAAIEKLKGNKGKIIIGGNIGKNTNTTPENYTQDYLDCFEGLHPYVDYFVLNVSCPNVGSHAKLEDVEYLRELITAVKEINQTKVNPKPILLKIAPDLNNQQLDEIIELIAETKIDGIVVSNTSVNREGLKTSPEVLAEIGNGGLSGKPIRERSTKMIKYLSNKSNRAFPIIGVGGIHSAKDAIEKLDAGATLVQLYTGFIYEGPQLINDINQEILTRAGRISR

SEQ ID NO: 96942 - protein, 176 aa, Unknown
  Bacterial polypetide isolated from the Sargasso Sea
MFSIFKPYIFSLDPEVAHDLAIKSLKFNLLPKSIFNVRDEECLETHLLNEKIPNPIGLAAGFDKSAEVYNSLFKLGYGFVEVGTVTPKRQLGNIKPRVFRLEKDQALINRLGFNNHGSEIVFQRIAENLPSGFLGINVGPNKDTKNKEEDYYLCLSKLSSIAGYITINILLQILKD

SEQ ID NO: 96943 - protein, 246 aa, Unknown
  Bacterial polypetide isolated from the Sargasso Sea
MSLTTLGMKIFAKMDPEAAHRFAINLLRFGLFPSRKLLFKDPILEQNVFGINFSNPIGLAAGFDKNAEAFEPILALGCGFVEVGSFTPRPQFGNPKPRAFRLLEDEAAISRHGFNNDGLAKGLERLAFRKKKLGLVGINLGINKASKTPIVDYVDSIIRASAYGDYITVNISSPNTEGLRELQNANNLDCLLKEIYKVKSSILNDKKVPPILLKVAPDITNRMVEDIINLALKYKIDGLIVATPLF

SEQ ID NO: 96944 - protein, 152 aa, Unknown
  Bacterial polypetide isolated from the Sargasso Sea
MNPPIGFLGINIGPNKDTDNKEEDYYLCMEKLSSLGNYITINISSPNTEGLRDFHDQKELDKLLSGINKIKKEKNISKPIFVKLSPDIADSEISKIIELIMKYKIAGIIVSNTTDGNRKALSDTKKNEAGGLSGKPLKSLSTKLIQKFSKKP

SEQ ID NO: 96945 - protein, 167 aa, Unknown
  Bacterial polypetide isolated from the Sargasso Sea
MFSNLRSLIFKLDPEIAHSLAIKSLKLNFVPNILNSNKDNDLFKTKLFNKDIANPIGVAAGFDKNAEVYNSLFKLGFGFVEAGTVTPLRQYGNPKPRVFRLVEDEALINRLGFNNLGAKNIADRILSNKQIGLLGINIGPNKDTNNRHNDYVECLKAFHRIADYITI

SEQ ID NO: 96946 - protein, 222 aa, Unknown
  Bacterial polypetide isolated from the Sargasso Sea
MNFNSPIGLAAGFDKNAEIYNQIIDLGFSFTEVGTITPLPQEGNPKPRVFRLIEDKAIINRLGFPNDGMSIICKRIKNNPAKGICGVNIGPNKENATSIEDYLSCFDQFFNYASYITINISSPNTPNLRSQHDDDKISQLIDSIQWKRSENKSKIPILLKISPDIDDNKIKNLCNIFIKKKIDGIILTNTTIKNRDNLFNKNKFEKGGLSGAPLNDLSNDVI

SEQ ID NO: 96947 - protein, 220 aa, Unknown
  Bacterial polypetide isolated from the Sargasso Sea
NFGKSKITDLSQAKDDYLTSLKLLIPYCDYAAINVSSPNTAGLRKLQDPILLKELIKEIKNLPSCPPLFVKIAPDLSFKDIEDICQLIIEENIDGIIATNTSIDRLGLENRKIMQTGLLLSEENGGLSGRPLQKKANQIIKHIHNIDKKIILIGVGGIDSPESAWERICSGASLIQLYTGWIYKGPQLVPDILQGIIKQLNIHKLSNIKEAIGSDLKWIE

SEQ ID NO: 96948 - protein, 114 aa, Unknown
  Bacterial polypetide isolated from the Sargasso Sea
MFSNLRSLIFKLDPETAHSLAIKSLKFNFIPNILDEEKNNPLFKTKLFNKEIENPIGMAAGFDKNAEVYNSLFNLGFGFVEVGTVTPFEQYGNPKPRVFRLVEDEALINRLGFN

SEQ ID NO: 96949 - protein, 96 aa, Unknown
  Bacterial polypetide isolated from the Sargasso Sea
MFSFLRPFIFNLDPEKAHDLAIKSLKYNFLPEKLFYVENEEILKTNLFGKEIKNPIGLAAGFDKSAEVYNEIFKLGFGFVEVGTVTPKQQYGNEKP

SEQ ID NO: 96950 - protein, 98 aa, Unknown
  Bacterial polypetide isolated from the Sargasso Sea
MFNILRPLIFKFSPEVAHSLAIKALKLNNIPYSKPKDNHILETTFCGKKLSSPIGVAAGFDKNAEVYNPLFNLGFGFVEVGTITPKPQFGNPKPRVFR

SEQ ID NO: 96951 - protein, 92 aa, Unknown
  Bacterial polypetide isolated from the Sargasso Sea
MPTELSHTLALKGLKLVTSMGYRINQSKDEKELHLFNSYFRNPLGLAAGLDKNGDYIDVFAALGFGFLEIGTVTPKPQYGNKKPRLYRDKSS

SEQ ID NO: 96952 - protein, 297 aa, Unknown
  Bacterial polypetide isolated from the Sargasso Sea
KLNFYPRTKTLNISIKVDKMLVKNPIGLAAGFDKNGVIIKQTSNLGFGFTEIGTITPNYQYGNKKPRVFRLLDEKGIINRNGFNNEGIVKVKQRLKKYRNSFNFNNSFKVGVNFGANKDSLDRINDYKLLASNLSEYADFISINVSSPNTPGLRSLQSEKSLIEVIDSVYNGLKNEKAKRINIPIFIKISPDLEIHDLENMINVAIKKNITGLIISNTTVDRDLSLKTIHKKQSGGLSGRPLFKKSTEILIKANKISKKYNSKLYFIAAGGIEDSISAYIKILCGAHLLQLYTSLTF

SEQ ID NO: 96953 - protein, 232 aa, Unknown
  Bacterial polypetide isolated from the Sargasso Sea
SNLKSFYAHKDINEVIGINIGKNKSTKNDIDDYLYSIEKLGNYGDYITINISSPNTPGLRDLQLRGRIEALVKKIQKKQSEVDHLQKKPIFIKISPDLNDEQLRDIALMSLANNVDGLIISNSTIHRPDTLISNYKNEVGGLSGKPIFLNSTILLKKMYSLTNGQITLIGVGGISSGYECYEKIKAGASLVQLYTALVYQGPKIINQILKELDELITIDGYNNISEAIGKSI

SEQ ID NO: 96954 - protein, 278 aa, Unknown
  Bacterial polypetide isolated from the Sargasso Sea
LGFGFVEVGTVTPLKQYGNEKPRVFRLVEDQALINRLGFNNHGSDTILNRIKSNKKLGVLGVNVGPNKDSNNRLNDYLIGLEKFSEVADYITINISSPNTENLRNFHEENKLKELLKSVSEKKKQLKSEIPVAVKISPDISENQIDLISEILLENEISAIIISNTSEASRETLQNIQRYQKGGLSGKPIEKKSNLLISKFYNLIKGKIKIIGVGGVDSGKAAYDKFLLGADYVQLYTGMVFQGPNIAGMIKKDLKELLIRDGVKNFSEIVEIKLFLKC

SEQ ID NO: 96955 - protein, 88 aa, Unknown
  Bacterial polypetide isolated from the Sargasso Sea
MFSVLRPFLFNLDPETAHDLAIKSLKFNFFPRSMFEVEDEEMLKIELLGKIFPNPIGLAAGFDKSAEAYNSLLKLGFGFVEVGTVTPL

SEQ ID NO: 96956 - protein, 253 aa, Unknown
  Bacterial polypetide isolated from the Sargasso Sea
PRVFRLEEDEALINRLGFNNTGSEEISSRMFKEPKKGILGINIGPNKDTDNRTEDYINCFKKFHSLADYITINISSPNTENLRDFHKKDELNFLIKELKNEKEKLSSKVPIAVKVSPDLNNEQIEIVSKILLEQEIEIIVVSNTSDKNRDKLKNINKLEKGGLSGKPLYHVSNNTISKFYKLLGNRVKIIGVGGVDSGEAAFEKIIRGASLVQLYTGMVYKGPGIASLIASELIDILKNKGFKNISEAVGTKY

SEQ ID NO: 96957 - protein, 170 aa, Unknown
  Bacterial polypetide isolated from the Sargasso Sea
KKEILKELLSKVNQIRERSNFKKAFLLKISPDIEEENIGEVISLILEYKIDGVILTNTTDRNRESLISSNKLETGGLSGQPLRNFSTKLIKRFYKDLKDRVPIIGVGGVDSGKSAFEKIAAGASALQLYTGMIYKGPTIVKKIKSDLIKILNEQGFKNIKEAVGSYSYKA

SEQ ID NO: 96958 - protein, 241 aa, Unknown
  Bacterial polypetide isolated from the Sargasso Sea
MYNYPIKFLRLLPPELAHILTVKTLKYLYLKNRSVEDPILSQHLLGLDFPNPIGLAAGFDKNAEVMRSMFSFGFGFVEIGTVTPKPQKGNSKPRVFRLKEDEAIINSLGFNNMGEKKIRKNLMKVRNSFLKNKIIGVNIGKNRDSLDAIEDYLYLVENLGNFASYITINISSPNTEGLRDLQLRGNIEKLVKKILLKRDQIETINTKPILIKISPDLNDDQLRDIALLSLANNIDGLVLTN

SEQ ID NO: 96959 - protein, 258 aa, Unknown
  Bacterial polypetide isolated from the Sargasso Sea
MFNLGFGFVEVGTITPKPQFGNPKPRVFRLEEDEALINRLGFNNSGSERISQTIKENNKKGFLGINIGPNKDSKDRVEDYLICFRKFYNLADYITINISSPNTENLRDFHNQDELNSLIDKLKNEKKELNSNIPLAIKVSPDLNDDQINEVSKIIIEQEIGIIIVSNTTDKNRENLKNINKLEKGGLSGKPIEKISNEAISKFYKILKDKTKIIGVGGVSNGQDAFEKITSGATLVQLYTGMVYRGPRIASKISTELI

SEQ ID NO: 96960 - protein, 126 aa, Unknown
  Bacterial polypetide isolated from the Sargasso Sea
MQQPHHSTSDASSSKNSRHIFKHSHPENRMLYRLLRPLLFRGDPEQTHERVLATVDGLSSIKGFNSISEKIFRWESPLLETQLWDRVLPNPVGLAAGFDKNGRIIDPLFNLGFGLVEVGTVTPFPQ

SEQ ID NO: 96961 - protein, 263 aa, Unknown
  Bacterial polypetide isolated from the Sargasso Sea
STINYRSGNKEPIYWENSFLSINSSGLPNLGFDFYNNYKNENINKPYFISISGMSIEDNITMINNLNSNIDGIELNLSCPNIKGHSQTGYDFVATEHLLRKYSEILDNKHSKFVFGIKLPPYFDENHFNSMADIINEYSVTSITCINSLGNGLVVDYNSESTLIKPKNGFGGIGGSIIKPIALSNVHKFFKLTKCSVIGCGGIQNGKDAFEHILCGASAVQIGTTFYREDVECFTRIGNELKQIMIDKNYNSINDFKGNLKYL

SEQ ID NO: 96962 - protein, 163 aa, Unknown
  Bacterial polypetide isolated from the Sargasso Sea
MRRIFFNILKKLDPEVAHNLTVNALKFPNPFILSGNDFPILSNNINGLKFKNPIGMAAGFDKNAEVINPLFNLGFGFTECGTVTPRPQFGNAKPRVFRLASDKAIINRLGFNNNGIEKFLMNMSKSNKNGVLGANIGPNKDTENFIDDYINLYTQVYDYSSIM

SEQ ID NO: 96963 - protein, 247 aa, Unknown
  Bacterial polypetide isolated from the Sargasso Sea
RLPEEKALINRMGFNNKGMLHVSKIAEKPKLGIVGVNIGANAKSINKILDYTNVFEFIAHLFDYVTINVSSPNTKYLRDLQKPETLEKILRDVNTINVSLKRKVPIFIKIAPDLNDSNVTEILSVCEENNVSGLIATNTTINPKNLKNPNSFEGGLSGKPLFNQSNKILRLLAKRKNASTVLIGVGGIFSASDIYEKIMLGASAVQIYTGFVYNGPMHIKRMEMELKNLLLSDGYNSIDGAVGALIR

SEQ ID NO: 96964 - protein, 174 aa, Unknown
  Bacterial polypetide isolated from the Sargasso Sea
MYSKLRSLIFKLDPEIAHNLAIKAIKYNYLPKKKLVNFDLIKTEIFGKTLNNPIGMAAGFDKNAEVYNELFNLNFGFVEVGTVTPKSQYGNDKPRIFRLEEDSALINRLGFNNKGAENIFSRISSNSPKGLLGINIGPNKETTNRIEDYLLCFRKFHKLADYITINISSPNTEN

SEQ ID NO: 96965 - protein, 239 aa, Unknown
  Bacterial polypetide isolated from the Sargasso Sea
MNNLIKYLLNFFDPETAHKLAVSILSRNHFVSYRTKDLFTKIANLEFKNPIGLAAGFDKSGQCFHGIFKLGFSSVEVGTVTPFSQAGNNKPRVFRLYKNRAVINSYGFNNDGMEIVKNRLNDGKKREGVLGVNIGPNKKSKNPIEDFKVTSKNLSKYCDYITINISSPNTPGLRNMHDKNLLCEVIKATKEGISEAGSHKPIFLKISPDEKISTITEIINTSINENIDALVISNTTIER

SEQ ID NO: 96966 - protein, 308 aa, Unknown
  Bacterial polypetide isolated from the Sargasso Sea
MTVQLGRLSIPNPIMVASGTFGYANEMQEFVPLHRLGGIVPKTITVAPRVGNRPWRTIETAAGLLNSIGLDNDGIEQFVLDKLPFLRSCGAPVVVSIAGGTVAEFVLLAEQLDKESGIAALELNISCPNVSHGVDFATDPELCRQVVEGVRHATQLPVIAKLTPNVTDITSIAQAAADGGADAVTLINTCQGMAVDWRKQRTLLGNGIGGLSGPAIKPIALRCVHQVHVRVGIPIIGVGGIMTTDDCMEFFVAGASAVQIGTASFAEPVITTRILDELPAAVNSLGASELQQIVGTLVIGDSAKTSNK

SEQ ID NO: 96967 - protein, 223 aa, Unknown
  Bacterial polypetide isolated from the Sargasso Sea
MGINFGKSKITSLSHAKDDYLTSLKLLIPYCDYAAINVSSPNTEGLRKLQDPILLKELLQEIKNLPNCPPLFVKIAPDLSLKDIEDICQLIIEENINGIIATNTSIDRLGLENRKIKQTGLLLSEENGGLSGRPLQKKANQIIKHIHNIDKKIILIGVGGIDSPESAWERICSGASLIQLYTGWIYKGPQLVPDILKGITKQLNNHQLSDIKEAIGSNLKWVE

SEQ ID NO: 96968 - protein, 328 aa, Unknown
  Bacterial polypetide isolated from the Sargasso Sea
FLFLKFIPLNKTFIPKELNTKIFGINFSSPIGLAAGFDKNAEVYSKMFNLGFGFVEVGTVTPKPQEGNSKPRIHRIKKERVIINSLGFNSIGFEKVKVNLLNKKTEGIIGVNIGANKDSKIFIDDYISGIKFFSNHVSYITINISSPNTPGLRELHIEKNLRDLLEKIKNLKTNNEIVEVPLLIKISPDVNDDDLNIMCDMFLEFNVDGIIISNTTLERPFKGFGENLKGGLSGDLLYQTSTNQLKKVYEYTKGQIPLIGVGGISSAKDAYNKIRNGASLVQLYTGIVYHGPGLIKKMNSEISALLKNDGFDSISDAVGVDTEIKNGT

SEQ ID NO: 96969 - protein, 307 aa, Unknown
  Bacterial polypetide isolated from the Sargasso Sea
NTITTEFLGLDLASPIVLLSGCVGFGDEYTRLEGFSNADIGGAVLKGTTLEPRLGNVPHRVYETPSGMLNSIGLQNPGAHEVVENILPSLEPFETHFIANVSGSTIDEYIEVCRIFDQSNISAIELNISCPNVKKGGMEFGNDPEMSAQVVEACKAVTSKPIITKLSPNQADIKESARKCIDAGSDALSVINTITGMAIDIESKRPVLGNTSGGLSGPAIKPIALQKVMQVYEVAGPQNIPIMGQGGISSVEDALEFIIAGASTIGIGTALFVDPLVCNKINEGLEKYLVTQGLSNLNELVGSLIKD

SEQ ID NO: 96970 - protein, 270 aa, Unknown
  Bacterial polypetide isolated from the Sargasso Sea
DVGAICLKGTTLEPRLGNSPHRISETYLGMLNAIGLQNPGSKVVVDEYLPNLDFEETRFIANLSGSTIEEYEEITKIFDDSPIDAMEINISCPNVKKGGLEFGNDPVMSAKVVEVCRKATKKPLITKLSPNQTDIAENAKCCIESGTDGLSVINTITGMAIDIEKRRPIIDNNQAGLSGPAIKPIALLKVHQVYEVAKQYNIPIIGQGGIRTIEDVLEFIIAGSTTVGIGTALFYEPLVCSKLNQGIIEYLDKNNLNSISDLIGTLKLNS

SEQ ID NO: 96971 - protein, 350 aa, Unknown
  Bacterial polypetide isolated from the Sargasso Sea
MFSNLRSLIFKIDPERAHFLAIQSLKLNLVSNIFDEHKNEPIFKTKIFNKELNNPIGIAAGFDKNAEVYNPLFKLGFGLVEVGTITPLKQYGNSKPRVFRLVEDQALINRLGFNNHGSDVVLNRIKSNNKLGVLGINVGPNKDSDNRINDYLIGIEKFHEVADYITINISSPNTENLRNFHDERKLQDLLKSISEKKKNLDTNIPIVVKISPDIDENQINLISEILLENDISGIIISNTSESSRDILKNIQRHQKGGLSGKPIEKKSNLLINKFFNLLKGKIKIIGVGGVDSGQSAYEKFLLGADYIQLYTGMVFQGPNIASIIKKDLKELLTRDGVKNFSEIVGNKSLS

SEQ ID NO: 96972 - protein, 279 aa, Unknown
  Bacterial polypetide isolated from the Sargasso Sea
MYNLFKAFLFLFDPEVIHRLTILFLKLIPLNKTFIPKELNTKIFGMNFSSPIGLAAGFDKNAEVYSKMFNLGFGFVEVGTVTPKPQEGNSRPRIHRIKKERAIINSLGFNSIGFEKVKVNLLNKKTEGIIGVNIGANKDSKIFIDDYISGIKFFSNHVSYITINISSPNTPGLRELHIEKNLKDLLEKIKNLKTNNEIAEVPLLIKISPDVNDDDLSIMCDIFLEFNVDGIIISNTTLERPFKGFGENLKGGLSGELLYQTSTDQLKKVYEYTKGQIPL

SEQ ID NO: 96973 - protein, 311 aa, Unknown
  Bacterial polypetide isolated from the Sargasso Sea
MANKNTITTEFLGLNLASPIVLLSGCVGFGDEYTRLEGFSNADIGGAVLKGTTLEPRLGNAPHRVYETPSGMLNSIGLQNPGAHKVVENILPSLEPFETHFIANVSGSTIDEYIEVCRIFDQSKIHAIELNISCPNVKKGGMEFGNDPEMSAQVVEACKGVTSKPIITKLSPNQADIKESARKCIDAGSDALSVINTITGMAIDIDSKRPVLGNTSGGLSGPAIKPIALQKVMQVYEVAGPQNIPIMGQGGISSVNDALEFIIAGASTIGIGTALFIDPLICNKINEGIEKYLSAHGLGGLENLVGSLVKD

SEQ ID NO: 96974 - protein, 311 aa, Unknown
  Bacterial polypetide isolated from the Sargasso Sea
MANKNTITTEFLGLNLASPIVLLSGCVGFGDEYTRLEGFSNADIGGAVLKGTTLEPRLGNVPHRVYETPSGMLNSIGLQNPGAHEVVKSILPSLEPFETHFIANVSGSTVDEYIEVCRIFDQSNISAIELNISCPNVKKGGMEFGNDPEMSAQVVEACKAATSKPIITKLSPNQADIKESARKCIDAGSDALSVINTITGMAIDIESKRPVLGNTSGGLSGPAIKPIALQKVMQVYEVAGPQNIPIMGQGGISSVEDALEFIIAGASTIGIGTALFIDPLICNKINEGLEKYLVAQGLSCINELVGSLIKD

SEQ ID NO: 96975 - protein, 311 aa, Unknown
  Bacterial polypetide isolated from the Sargasso Sea
MANKNTITTEFLGLNLASPIVLLSGCVGFGDEYTRLEGFSNADIGGAVLKGTTLEPRLGNVPHRVYETPSGMLNSIGLQNPGAHEVVENILPSLEPFETHFIANVSGSTVDEYIEVCRVFDQSNISAIELNISCPNVKKGGMEFGNDPEMSAQVVGACKAATSKPIITKLSPNQADIKESAKKCIDAGSDALSVINTITGMAIDIESKRPVLGNTSGGLSGPAIKPIALQKVMQVYEVAGPQNIPIMGQGGISSVEDALEFIIAGASTIGIGTALFIDPLICNKINAGLEKYLNDHGLDGLECLVGSLIKD

SEQ ID NO: 96976 - protein, 327 aa, Unknown
  Bacterial polypetide isolated from the Sargasso Sea
MKAFIKIFRFFPPETAHHLALLSLKILNKVRILKLFFPDNKDFDNPKEYFNLKFRNTLGVAAGLDKNGDYVDELESLGFGFVELGTVTPKPQEGNQKPRVFRYLNQQAVVNRLGFNNKGVNYLVSKIKNKKYDAVIGVNIGANKESANDQRIEDYVFCFEKVYKYCDYVTVNISSPNTPKLRKLHHPDELEKIFKRINEIKSTNKTEIPVFLKISPDEDEETILKIVNIYKTLKINGLIITNTSIDKDILERCSHEGGISGKPLFKKSTQLLKRIHEFDKDIFLVGVGGVFTKEDYENKIRLGASLVQIYTGFIFEGPAIVKKILSR

SEQ ID NO: 96977 - protein, 240 aa, Unknown
  Bacterial polypetide isolated from the Sargasso Sea
MLNSIGLANIGVEEYINKMIPKYNNMDIPIIMNIAGSSEEEYCEVMDLVESVSSNIVGYEINISCPNVKVGGMEFGVDCELTEKLTSQLRKRTERLLIMKLSPNVTDISAIAQSAANGGADAVSAINTLVGMSINVQSMKSNIHYGFAGLSGPAIKPVGLASVYKIHQSVKIPIIGIGGIKSSDDVLEYILAGAFAVEIGTANYRDPNVGNNIISDINNFLDENNIKSINQIIGKVKLGK

SEQ ID NO: 96978 - protein, 214 aa, Unknown
  Bacterial polypetide isolated from the Sargasso Sea
MYNSSLKILRLLPPELSHTITINFLKYFKVRQKNIEDPILAQHLMGLDFANPIGLAAGFDKNAEVIHSMFSFGFGFLEVGTITPQPQSGNSKPRIFRLSEDKAIINSLGFNNKGIKKVKKNLIKHKKSYLNNKIVGANIGKNKNSSESIDDYLIGLEMLGDLASYITINISSPNTEGLRDLQLRGKIEKLIKKIIDKRDEIIQINTKPILIKIS

SEQ ID NO: 96979 - protein, 340 aa, Unknown
  Bacterial polypetide isolated from the Sargasso Sea
MPPELSHNITINFLKYFKVRKKNIEDSILSQHLMGLDFPNPIGLAAGFDKNAEVMHSMFSFGFGFLEVGTITPQPQSGNSKPRVFRLSEDKAIINSLGFNNKGIKKVKKNLIKHKKSYLNNKIVGVNIGKNKNSSDAIDDYLIGLEELGDLASYITINISSPNTEGLRDLQLRGKIEQLIKKIINKRDEIKNINTKPILIKISPDLNEDQLRDIALISLANNIDGLILTNSTIKRESNLISTNKRKKGGLSGKPLYDNSNIILKKMYELTNGQMPLIGVGGISSGRDCYEKIKSGASLVQLYTGLVYSGPNLINIMKSDLIDLIKTDGYKNVSEVIGKSV

SEQ ID NO: 96980 - protein, 327 aa, Unknown
  Bacterial polypetide isolated from the Sargasso Sea
MKAFIKIFRFFPPETAHHLALLSLKILNKLRILKLFFPANKDFDNPKEYFNLKFRNMLGVAAGLDKNGDYVDELESLGFGFIELGTVTPKPQEGNQKPRVFRYLNQQAVVNRLGFNNKGVNYLVSKIKNKKYDAVIGVNIGANKESTNDQRIDDYSYCFEKVYKYCDYVTVNISSPNTPKLRKLHNPDELEKIFKRINEIKSTNKIDIPIFLKISPDESEETILKIVNIYETLKINGLIVSNTSIDKDILEGCSNEGGISGKPLFKRSSQLLERIYEFDKDIFLIGVGGVFSKEDYENKINLGASLVQIYTGFIFEGPAIVKNILSR

SEQ ID NO: 96981 - protein, 311 aa, Unknown
  Bacterial polypetide isolated from the Sargasso Sea
MANKNTITTEFLGLDLASPIVLLSGCVGFGDEYTRLEGFSNADIGGAVLKGTTLEPRLGNVPHRVYETPSGMLNSIGLQNPGAHEVVENILPSLEPFETHFIANVSGSTIDEYIEVCRIFDQSNISAIELNISCPNVKKGGMEFGNDPEMSAQVVEACKAVTSKPIITKLSPNQADIKESARKCIDAGSDALSVINTITGMAIDIESKRPVLGNTSGGLSGPAIKPIALQKVMQVYEVAGPQNIPIMGQGGISSVEDALEFIIAGASTIGIGTALFIDPLVCNKINEGLEKYLVAQGLSNLNELVGSLIKD

SEQ ID NO: 96982 - protein, 156 aa, Unknown
  Bacterial polypetide isolated from the Sargasso Sea
MYSNLRSLIFKIDPERAHFLAIQSLKLNLVSNIFDENKNDPVLKTKLFNQHLGNPIGIAAGFDKNAEVYNPLFKLGFGFVEVGTVTPLKQYGNEKPRVFRLVEDQALINRLGFNNHGSDTILKRIKFNKKLGILGVNVGPNKDSNDRLNDYLIGLE

SEQ ID NO: 96983 - protein, 211 aa, Unknown
  Bacterial polypetide isolated from the Sargasso Sea
MGPNKDTLDRVEDYLNCFKKFYNFADYITINISSPNTPDLRNLHRYENLDELLNLIQTEKKNLNTKIPLALKVSPDIEEENISEISDLIMKHKLEIIIVSNSTDKNRQNLKNINKLEKGGLSGKPLENKSNNLINKFYKIFNGKVKIIGVGGIDSGRSAYEKFINGATLVQLYTGMVYKGPEIAHKISGELIDILKNKGVKNISEVIGIKN

SEQ ID NO: 96984 - protein, 119 aa, Unknown
  Bacterial polypetide isolated from the Sargasso Sea
MLRLLEPEISHVLSLKLLKLAHNIGLLRLLSLSYSDNHFSEKNKFSYEKLKFKNRLGIAAGIDKNGDYIDALGALGFGFLEIGTVTPKPQLGNPKPRVFRDQKNFSVINRLGFNNKGVK

SEQ ID NO: 96985 - protein, 263 aa, Unknown
  Bacterial polypetide isolated from the Sargasso Sea
IGFGFVEVGTFTPKAQYGNPKPRIKRLISHESLLNSLGFPNEGVRSIKSRLKKVSGDICLGVNIGPNKDTLPEEVINDYLLCYEEVFEYADFVTINISSPNTPNLRSLHNAENFKAVIDAILNERNRHQKKPKVFIKISPDEESKTYTNLIETINNSAIDGVIISNTSNNQNLKKSLNVAHLPGGISGKSLKNSSNKILKEIRTMINKEKIIVAVGGIFDVDSYNEKFELGADLVQMYTGLIYEGPNLVKRIVKNDKQISSNS

SEQ ID NO: 96986 - protein, 284 aa, Unknown
  Bacterial polypetide isolated from the Sargasso Sea
GLEVKNRLGLAAGLDKNGELIEEMSNLGFGFIEIGTVTPKKQFGNKKPRIFRIEREESLLNSLGFNNKGATYVKKKLQALKKKDIVIGANIGPNKNTKSNKRKEDYSYCFNELADYVDYMVLNISSPNTPDLRDLHNIENLKEIIECILIEKENKNYSGKIFLKLSPDEKKSKTEAVINLVNSINIDGVIASNTSDDNQLKSALGVSQKPGGISGKPLKNKSNELLKLVKSKIEPKKIIVAVGGVFDVDSYNEKIELGADLVQLYTGLIYEGPNIVKRILNNGK

SEQ ID NO: 96987 - protein, 98 aa, Unknown
  Bacterial polypetide isolated from the Sargasso Sea
MFSFLRPFIFNLDPEIAHDLAIKSLKFNFLPQNLFSVSDEQMLSTELFGKEISNPIGLAAGFDKSAEVYNEIFKIGFGFVEVGTVTPKQQFGNAKPRI

SEQ ID NO: 96988 - protein, 311 aa, Unknown
  Bacterial polypetide isolated from the Sargasso Sea
MANKNTITTEFLGLDLASPIVLLSGCVGFGDEYTRLEGFSNADIGGAVLKGTTLEPRLGNVPHRVYETPSGMLNSIGLQNPGAHEVVENILPSLEPFETHFIANVSGSTVDEYIEVCRIFDQSNISAIELNISCPNVKKGGMEFGNDPEMSAQVVEACKSATSKPIITKLSPNQSDIKESARKCIDAGSDALSVINTITGMAIDIESKRPVLGNTSGGLSGPAIKPIALQKVMQVYEVAGPQNIPIMGQGGISSVEDALEFIIAGASTIGIGTALFIDPLICNKINEGLEKYLVTQGLSNLNELVGSLIKD

SEQ ID NO: 96989 - protein, 131 aa, Unknown
  Bacterial polypetide isolated from the Sargasso Sea
MFSILRPLIFKFSPEVAHSLAIKALKLNNIPYPKPKDNHILETTFCKKKLSSPIGVAAGFDKNAEVYNPLFNLGFGFVEVGTITPKPQFGNPKPRVFRLEEDEALINRLGFNNSGSEQISQTIKENNKKGF

SEQ ID NO: 96990 - protein, 103 aa, Unknown
  Bacterial polypetide isolated from the Sargasso Sea
MYKLVRKFLFLFDAEEIHELSTKLIKLFNLIPFSSFLLRKCYLISDKSLEKELFGIKFKNPIGLAAGFDKNATLFNDFRNFGFGFIEIGTVTPLPQEGNPKKR

SEQ ID NO: 96991 - protein, 172 aa, Unknown
  Bacterial polypetide isolated from the Sargasso Sea
MFSNLRSLIFKLDPETAHNLAIKSLKFNFVPNILNEEKDNPLFKTKLFDKNLENPIGMAAGFDKNAEVYNSLFKLGFAFVEVGTITPLKQYGNPKPRVFRLVEDEALINRLGFNNLGSKNIVNRIKSNNQIGLLGVNIGPNKDSKNKLNDYIECLKIFHEVADYITINISSP

SEQ ID NO: 96992 - protein, 280 aa, Unknown
  Bacterial polypetide isolated from the Sargasso Sea
MANKNTITTEFLGLNLASPIVLLSGCVGFGNEYTRLEGFSNADIGGAVLKGTTLEPRLGNAPHRVYETPSGMLNSIGLQNPGAHEVVEKILPSLEPFETHFIANVSGSTIDEYIEVCRIFDQSNIHAIELNISCPNVKKGGMEFGNDPEMSAQVVEACKGVTSKPIITKLSPNQADIKESARKCIDAGSDALSVINTITGMAIDIDSKRPVLGNTSGGLSGPAIKPIALQKVMQVYEVAGPQNIPIMGQGGISSAIDALEFIIAGASTIGIGTALFIDPL

SEQ ID NO: 96993 - protein, 110 aa, Unknown
  Bacterial polypetide isolated from the Sargasso Sea
MFSKFRSLIFKINPETAHDLAIKSLKLNFIPNIFDENKNDPMFKTTLFGKVIENPIGIAAGFDKNAEVYNPLFKLGFGFVEVGTITPIKQFGNPKPRVFRLQEDEALITD

SEQ ID NO: 96994 - protein, 346 aa, Unknown
  Bacterial polypetide isolated from the Sargasso Sea
MFNFLRPFIFKFSPEIAHSLAIKALKLNNFPINKITKSEILQTNFCGKKISSPIGVAAGFDKNAEVYNPLFNLGFSFVEVGTITPKPQYGNAKPRVFRLEEDEALINRLGFNNSGSEEISSRISKENKKGILGINIGPNKDAENRIEDYINCFKKFHSLADYITVNISSPNTENLRDFHKHDELSTLIKELKNEKVKLNSKVPIAIKVSPDLNDKQIEVVSNILLDQDINIIIVSNTSDKNRDKLNNISKLEKGGLSGKPLYHISNDIISKFYKLLGNKIKIIGVGGVDSGEAAFEKIIRGASLVQLYTGMVYKGPGIASSISSELINILKNKGFKNISEAVGTKY

SEQ ID NO: 96995 - protein, 99 aa, Unknown
  Bacterial polypetide isolated from the Sargasso Sea
MFSKIRSLIFKLDPETAHDLAIKALKFNLVYQNKIKNNKLIQTEIFGKTIPNPIGIAAGFDKDAEVYNSLFKLGFGFVEVGTVTPVNQYGNPKPRIFRL

SEQ ID NO: 96996 - protein, 166 aa, Unknown
  Bacterial polypetide isolated from the Sargasso Sea
MFSNLRSLIFKLDPETAHNLAIKSLKFNFVSNILDQDKNNPLFKTKLFNKNLENPIGMAAGFDKNAEVYNSLFKLGFGFVEVGTITPLKQYGNPKPRVFRLIEDEALINRLGFNNFGAKNIFDRIKSNSQIGLLGINIGPNKDTKNRLNDYVECLKTFHSVADYLT

SEQ ID NO: 96997 - protein, 355 aa, Unknown
  Bacterial polypetide isolated from the Sargasso Sea
MRLIDSETAHSISMRVMRGFGETSAGQNMLNALYRPPEVPIEVFGKMFHHPLGLAAGFDKGAEALMAWSAMGFSWTEYGGVTRYPQDGNTKPRMFRANRHKALVNKMGFNNPGASEIRKRLISRKSEDKWPKTPVAANIGRSKKVPNEHAADDYSSTLDILWDHADMFVLNISSPNTPGLRDLQGQEYLSSILRSCNNVREMKGANKPILLKLSPDNGDDEILETVSLCLSSGVDGIVATNTTIKRPAPLSTQSRKAFSSDGGLSGRPLNSRSLEVINLVYGETQGKIPIVGVGGIESKETAWEAIISGSSLIQLYSALVFNGPTVVSSIVKGIKSRVRESGFSSLSEAVGYKHI

SEQ ID NO: 96998 - protein, 311 aa, Unknown
  Bacterial polypetide isolated from the Sargasso Sea
MANKNTITTEFLGLNLASPIVLLSGCVGFGDEYTRLEGFSNADIGGAVLKGTTLEPRLGNAPHRVYETPSGMLNSIGLQNPGAHEVVDNILPLLEPFETHFIANVSGSTIDEYVEVCRIFDQSNIHAIELNISCPNVKKGGMEFGNDPEMSAQVVEACKGATSKPIITKLSPNQADIKESARKCIDAGSDALSVINTITGMAIDIDTKRPVLGNTSGGLSGPAIKPIALQKVMQVYEVAGPQNIPIMGQGGISSVKDALEFIIAGASTIGIGTALFIDPLICNKINEGIENYLSAQGLDGVESLVGSLIKD

SEQ ID NO: 96999 - protein, 174 aa, Unknown
  Bacterial polypetide isolated from the Sargasso Sea
LYEYVDYFVVNVSSPNTINLRDLQSKKPLTRILSSLQKLNNKKPKRKPILLKIAPDLNKKELSDIVEIIKKTKIDGVVASNTTLNRNGIVSKNRNEKGGLSGRPLSKKSTDIISFLSQKSNKSFPIIGVGGVHSPQDAIEKLEAGADLIQLYTGFIYEGPGIAKKINQSLINYL

SEQ ID NO: 97000 - protein, 351 aa, Unknown
  Bacterial polypetide isolated from the Sargasso Sea
MYNSSLKILRLLPPELSHNITINFLKYFKIRQKNIEDPILAQHLMGLDFVNPIGLAAGFDKNAEVMHSMFSFGFGFLEVGTITPQPQSGNTKPRVFRLIEDKAIINSLGFNNKGIKKVKKNLIKHQKSYFNNKIVGVNIGKNKNSIKAIDDYLKGLEEFGDLASYITINISSPNTEGLRDLQLRGKIEKLIKKIIDKRDEIKNINTKPILIKISPDLNEDQLRDIALISLANNIDGLILTNSTIKREGNLISINKEKKGGLSGKPLYDNSNLVLKKIYELTNGQIPLIGVGGISSGRDCYEKIKSGASLVQLYTALVYYGPDLINSMKGDLIDLIKTDGYKNISEVIGKSV

SEQ ID NO: 97001 - protein, 329 aa, Unknown
  Bacterial polypetide isolated from the Sargasso Sea
MTQISHSQHSVVDLSVSLGRLQLPNPILVASGTFGYAKEMSGLVKLDRLGGIVPKTITLLPRQGNVPWRTLETASGLLNSIGLDNDGIDIFLKKQLPFLRDCGAPTIVSIAGANREEFVELASRLDGIPGIAALELNISCPNVSHGVDLGTDAELCRGVVSGVRGVTNVPVLAKLTPNVTDIVAIAKAAADGGADAVTLINTCQGMAIDWRRQRPLLGNVVGGLSGPAIKPIALRCVHQVRQKLSIPIIGVGGIMSLDDCMEFFVAGATAIQLGTVNFAEPVVCTQILDALPEAVQELGASSFADVVGTLVLPSQETGFSAKGCSEHAQ

SEQ ID NO: 97002 - protein, 103 aa, Unknown
  Bacterial polypetide isolated from the Sargasso Sea
CIATNTTISRDGLESRHKEETGGLSGMKLRDKSNLIISSLRKKLGKDFPIIGVGGIMNAEDALEKIELGADLVQLYTGFIYEGPSLIKRINRLLLDQELNRIK

SEQ ID NO: 97003 - protein, 295 aa, Unknown
  Bacterial polypetide isolated from the Sargasso Sea
MKILFPTKNYSHGQKNYLNLHFRNRLGVAAGLDKNGDYVDVLDSLGFGFIELGTTTPRQQSGNEKPRVFRYIHQEAVVNRLGFNNKGVDYLVSKIKNKKYDAVIGVNIGANKESTNDQRIEDYVFCFEKVYKYCDYVTVNISSPNTPKLRKLHNPDELEKIFKRINEIKTTNQTDIPVFLKISPDEGEETILKIVDIYETLKINGLIVSNTSIDKDILEGCSHEGGISGKPLLKKSNQLLKRIHGLDKDIFLVGVGGVFTKEDYENKITLGASLVQIYTGFIFEGPAIVKKILTR

SEQ ID NO: 97004 - protein, 346 aa, Unknown
  Bacterial polypetide isolated from the Sargasso Sea
MILIFINQESKILFNIYKKIAFNLPPEVAHDYTLKIAEVIYKSFLVKFLKSTPNIEPINKLNIRFQNKLGLAAGFDKNGDYLNFINNIGFGFIEIGTVTPYPQLGNKKPRVFRIAEQDAVINHLGFNNKGIIHLKKNLINFMDKKTTPIGVNIGKNATTSIENAHEDYIYCMEKIYEYADYLTINISSPNTKELRKLHHEDRLSTFLGNIKKSHESLEKKHKKLTPLFLKISPDIDQDDIASVSSMIKQFDIHGVIATNTTIDKEVIQNEIYRDYEGGVSGKPLFVKSNSIVKQMRENLPDILMIGCGGVNSKKTAEEKVNQGCDLVQIYTGLIYKGTKVINEITS

SEQ ID NO: 97005 - protein, 185 aa, Unknown
  Bacterial polypetide isolated from the Sargasso Sea
MKILTKIFQFFPPEVSHYLALESLKLLKKLGIMKILFPIKNYSDGQKNYLNLHFRNRLGVAAGLDKNGDYVDVLDSLGFGFIELGTTTPRQQPGNEKPRVFRYIHQEAVVNRLGFNNKGVDYLVSKIKNKKYDAVIGVNIGANKESTNDQRIEDYVFCFEKVYKYCDYVTVNISSPNTPKLRETP

SEQ ID NO: 97006 - protein, 80 aa, Unknown
  Bacterial polypetide isolated from the Sargasso Sea
MPPESAHFIGLFSLKILNLVGLLGIFFPVRKSNFIPRRFFGLEFRNTLGVAAGLDKNGDFIDVLDSLGFGFIEIGYKLHP

SEQ ID NO: 97007 - protein, 200 aa, Unknown
  Bacterial polypetide isolated from the Sargasso Sea
GANIGKNYFTQNNDAHSDYLKCLSELNEFVDYFAINISSPNTKDLRDLHDKSLLKPFLEKLVKFNNKHINKRPLLLKISPDLNEEQIADIVVLIKDLRLDGIIATNTTVSRDGATSKHKTQQGGMSGKLLTHKSNAIIKYLRKNLGDNFPIIGVGGIMSANDAIERLNSGADLIQLYTGFIYKGPSFIKEINKAIINQSN

SEQ ID NO: 97008 - protein, 191 aa, Unknown
  Bacterial polypetide isolated from the Sargasso Sea
DQSNIHAIELNISCPNVKKGGMEFGNDPEMSAQVVEACKGVTSKPIITKLSPNQADIKESARKCIDAGSDALSVINTITGMAIDIESKRPVLGNTSGGLSGPAIKPIALQKVMQVYEVAGPQNIPIMGQGGISSVEDALEFIIAGASTVGIGTALFIDPLVCNKINKGLEKYLTDHGLNCLEDLVGSLIKD

SEQ ID NO: 97009 - protein, 273 aa, Unknown
  Bacterial polypetide isolated from the Sargasso Sea
ESHILETTFFEKILPSPIGVAAGFDKNAEVYNPLFNLGFGFVEVGTITPKPQFGNPKPRVFRLEEDEALINRLGFNNSGAEEICTRIKENNKKGFLGINIGPNKDSSNRIQDYLMCFRKFYNLADYITINISSPNTENLRDFHNEDELNSLIYNLKKEKKELNSKVPIAIKVSPDLNDEQINEVSNIILEQEIEIIIVSNTTDKNRENLKNINKLEKGGLSGKPIEKISNEVISKFYRSLKNKTKIIGVGGVSNGEDAFEKITCGATLVQLYT

SEQ ID NO: 97010 - protein, 104 aa, Unknown
  Bacterial polypetide isolated from the Sargasso Sea
MNFFLKIFKLLPPEFAHSASLNSLNLLYKSKLLVLFNKKIINKNEHTIFGMKFRNKLGTAAGLDKNGDYIDALGALGFGFLEVGTVTPRPQYGNPKPRIFRNYS

SEQ ID NO: 97011 - protein, 290 aa, Unknown
  Bacterial polypetide isolated from the Sargasso Sea
MFSKFRSLIFKLDPEKAHNLAIKTLKFNFVKNIFDQDKDISMFQTTMFGKKIKNPIGIAAGFDKNAEVYNPLFRLGFGFVEVGTVTPLKQYGNSKPRIFRLEEDEALINRLGFNNEGSKDISFRIKSNTPEGLLGVNIGPNYNTKDQLNDYLINLKIFHNICDYVTINISSPNTEKLRDFHDSIKLEKLIDSIEKEKKNLKSKIPIVVKISPDIIDEQISEISKILLNHEIKGIIISNTTDSNREKLVNISKSEKGGLSGKPLEIKSNQLINKFYNLLKEKIQIIGVGGV

SEQ ID NO: 97012 - protein, 212 aa, Unknown
  Bacterial polypetide isolated from the Sargasso Sea
MFSILRPYIFSLDPEVAHDLAIKSLKANILPKSFFNVESEEMLETNLFGKTISNPIGLAAGFDKSAEVYNSLFKFGFGFIEVGTITPKKQLGNPKPRIFRLEKDQALINRLGFNNHGSEIVSKRISNNHPDGFLGINIGPNKETKNKEEDYYICISRLGMYAGYIVINISSPNTEGLRDFHDQGEMKKLLLGINKILKEKKIDCPILIKISP

SEQ ID NO: 97013 - protein, 236 aa, Unknown
  Bacterial polypetide isolated from the Sargasso Sea
TFVKKKLKKLNLSSLSKGIVGINIGKNKDTLNDIDDYIYCLQELGPFAHYVTVNISSPNTPGLRELQNRGRIEKLVQTLQKKQEEMNSLENTPIFFKIAPDIDEEQIRDIALISLANNIDGLVISNSTIERPDTLKSNLNNEIGGLSGKPLFLKSTMILRKMHTLTNGQIPLIGVGGINNALECYKKIKSGASLVQLYSALTFEGPKIINKILMDLSTLLKTDGYKSIKEAIGKDT

SEQ ID NO: 97014 - protein, 223 aa, Unknown
  Bacterial polypetide isolated from the Sargasso Sea
MKVLLAILRMLPPETAHLIALNSLKVLHKLKLINLFFPFKFSNSPFYFKGLEFKNRLGIAAGLDKNGDFIDSLGALGFGFIEVGTITPKPQSGNSKPRVFRFADQEAIVNRLGFNNKGVDYLVKRLKKRKYSGVLGINIGANKDSNGQKRIDDYIECFKKVSPFADYISVNISSPNTPGLRSLHSKENFLPLFEAIKNTRESEKFYNPIFIKLSPDEEQDTIF

SEQ ID NO: 97015 - protein, 211 aa, Unknown
  Bacterial polypetide isolated from the Sargasso Sea
MINFLKSIISIFPPELSHSITINLLKITTNFQKKNLYNDLKLHQHIWGLDFNNPVGLAAGFDKNAEAVIPLLNLGFGFVEAGTVTPLPQEGNDKPRVFRLLEDKAIINHLGFNNKGLKIVKKNLQKLNLNNLSNGVVGINIGKNLNSINHIEDYCQCLEKLGPFAHYITINVSSPNTPGLRDLQKTGNIEKLIKSLYKLRDNNEYLTNKAI

SEQ ID NO: 97016 - protein, 148 aa, Unknown
  Bacterial polypetide isolated from the Sargasso Sea
MPPSPLSSGAFYQRWLGPVLANDEGLDAEQLSRTALTALGQASLRRQWPLVSTVLEGLAGDLQRRDLRLEQVLFGCRFPNPVGLAAGFDKNGVAAGLWDRFGFGFAEVGTVTWHGQPGNPRPRLFRLAQEKAALNRMGFNNDGEQALR

SEQ ID NO: 97017 - protein, 238 aa, Unknown
  Bacterial polypetide isolated from the Sargasso Sea
MFEKIRSLIFKFDPETAHDLAIKALKTKIIPVRPKNYDRLKVKFLEKEIPNPIGIAAGFDKNAEVYNSLFNLGFGFVEVGTITPEAQYGNPKPRVFRLEEDEALINRLGFNNVGSEQAAKNINNDSPKGLLGINIGPNKDTINRISDYLKCFKTLCNLGDYITINISSPNTENLRSFHNPKELEELLKVINEEKTKVASTTNIAVKIAPDLNIKDLDLIGNILINNRVKLIIISNTSD

SEQ ID NO: 97018 - protein, 254 aa, Unknown
  Bacterial polypetide isolated from the Sargasso Sea
MFNILRPLIFKFSPEVAHSLAIKALKLNNIPYSKPKDNHILETTFCEKKLSSPIGVAAGFDKNAEVYNPLFNLGFGFVEVGTITPKPQFGNPKPRVFRLEEDEALINRLGFNNSGSEQISQTIKENNKKGFLGINIGPNKDSTNRIDDYLICFRKFYNLADYITINISSPNTENLRDFHNTDELNLLIDKLKNEKKKLNSNIPLAIKVSPDLNDDQINEVSKIIMEQEIEIIIVSNTTDKNRENLKNINKLEKV

SEQ ID NO: 97019 - protein, 228 aa, Unknown
  Bacterial polypetide isolated from the Sargasso Sea
ETKVFNIKIKNPIGLAAGFDKSAEVYNSLFRFGFGFIEVGTVTPKKQFGNPKPRVFRLENDKALINRLGFNNDGLEKVSKRLEKNSPSGFLGINIGPNKDSNDRIDDYIKCLKAIHTFANYITINISSPNTPGLRDFHKESTLQNLLEKITEFKKKSKIQKPLVLKVSPDIDDTNINHIIELIKKFKISGIIISNTTDKNRENLVGKNKKEVGGLSGEPLINISNNLI

SEQ ID NO: 97020 - protein, 290 aa, Unknown
  Bacterial polypetide isolated from the Sargasso Sea
SSLYKFPQESKEIKGLKIKNRLGLAAGLDKNGELIKEMDNIGFGFIEIGTVTPKPQYGNPKPRLKRLVNQGSLLNSLGFNNDGTEEIKNRLEKLNHNCTLGINIGPNKSTPADRFHEDYSICMRSLAKYADYIAINISSPNTPELRDLHKKENIEKVIRGVLEERDNTNNKPKIFIKLSPDEDNQTYLELIELINLSKIDGVIISNTSNNQELKKELNVDNLPGGISGLAIKNKSNELLKFVKKNLNEEKILVAVGGVFDVDSYNEKIDMGADLVQMYTGLVYEGPNQVR

SEQ ID NO: 97021 - protein, 262 aa, Unknown
  Bacterial polypetide isolated from the Sargasso Sea
MYSIFKPFIFSLDPEIAHDLAINSLKFNVLPKNIFQVDNEELLETSLFNVRLPNPIGLAAGFDKSAEVYNSLFKLGYGFVEVGTVTPNKQLGNPKPRIFRLEKDKALINRLGFNNHGSEIVSRRISENLPNGFLGINIGPNKDTKKKEEDYYLCLSRLASYAGYLTINISSPNTEGLRDFHDQNELEKLLTGINKIKKEKNILKPIALKLSPDINNSEVSRIMELVIKHQIDGIVVSNTTDSNRENLSDTQKNEKGGLSGQP

SEQ ID NO: 97022 - protein, 283 aa, Unknown
  Bacterial polypetide isolated from the Sargasso Sea
MYSNLRSLIFKIDPERAHFLAIQSLKLNLVSNIFDENKNDPLLKTKLFNQDLDNPIGIAAGFDKNAEVYNPLFKLGFGFVEVGTVTPLKQYGNEKPRVFRLVEDQALINRLGFNNHGSDAILNRIKSNKKLGVLGVNVGPNKNSNDRLNDYLIGLEKFSEVADYITINISSPNTENLRNFHDENKLIELLKSISEKKKQLKTEIPVAVKISPDINENQIDLISEILLENDISAIIISNTSEASRETLQNMHRHQKGGLSGKPIEKKSNLLISKFFNLIKGKIK

SEQ ID NO: 97023 - protein, 123 aa, Unknown
  Bacterial polypetide isolated from the Sargasso Sea
MFSILRPYIFSLDPEVAHDLAIKSLKANFLPKSFFSVENEEMLETSLLGKTISNPIGLAAGFDKSAEVYNSLFKFGFGFVEVGTVTPKQQLGNPKPRIFRLEKDQALINRLGFNNHGSETVSK

SEQ ID NO: 97024 - protein, 119 aa, Unknown
  Bacterial polypetide isolated from the Sargasso Sea
MFSKLRSLIFKLDPETAHSLAVKALKFNYFPVKNIKKSDSLKVEIFSKKLPNPIGIAAGFDKNAEVYNSLFKLGFGFVEVGTVTPIKQYGNPKPRIFRLEEDEALINRLGFNNFGSKKI

SEQ ID NO: 97025 - protein, 175 aa, Unknown
  Bacterial polypetide isolated from the Sargasso Sea
MIRNLPPELSHYITLKLLKLNLFKSKNFEDPILNQHIFGFDFSNPLGLAAGFDKNAEVVNSLLNLGFGFIEAGTVTPKYQYGNEKPRVFRLKKDRGIINHLGFNNKGTEFVKKKLERLKLSTLSKGIVGINIGKNKDTLNDIDDYIFCLQELGPFAHYVTVNISSPNTPGLRELQ

SEQ ID NO: 97026 - protein, 236 aa, Unknown
  Bacterial polypetide isolated from the Sargasso Sea
AGRLVRQKVPEKPVTCMGLTFKNPLGLAASLDKDGECIDALRAMGFGSIEIGTVTPRPQPGNDKPRLFRLVDAERLINRMGFNNHGVDNLVENVKKAHFDGILGINIGKNKDTPVEQGKDDYLICMEKIYAYAGYIAINISSPNTPGLRTLQYGDALDDLLSGIKNKQSELEQKHHKYVPVAVKIAPDLSHEELIQVADSLVRHNIDGVIATNTTLDRSLVQGMKIAMKWVGLVVV

SEQ ID NO: 97027 - protein, 237 aa, Unknown
  Bacterial polypetide isolated from the Sargasso Sea
MFNILRPLIFKFSPEVAHSLAIKALKLNNIPYSKPKDNHILETTFCEKKLSSPIGVAAGFDKNAEVYNPLFNLGFGFVEVGTITPKPQFGNPKPRVFRLEEDEALINRLGFNNSGSERISQTIKENNKKGFLGINIGPNKDSKDRVEDYLICFRKFYNLADYITINISSPNTENLRDFHNQDELNSLIDKLKNEKKELNSNIPLAIKVSPDLNDDQINEVSKIIIDPEIEFICFNYT

SEQ ID NO: 97028 - protein, 300 aa, Unknown
  Bacterial polypetide isolated from the Sargasso Sea
YPYSKPKDNHILETTFCEKKLSSPIGVAAGFDKNAEVYNPLFNLGFGFVEVGTITPKPQFGNPKPRVFRLEEDEALINRLGFNNSGSEQISQTIKENNKKGFLGINIGPNKDSTNRIDDYLICFRKFYNLADYITINISSPNTENLRDFHNQDELNSLIDKLKNEKKKLNSNIPLAIKVSPDLNDDQIKEVSKIIMEQEIEIIIVSNTTDKNRENLKNINKLEKGGLSGKPIEKISNEVISKFYTILKDKTKIIGVGGVSNGQDAFQKIISGATLVQLYTGMVYRGPRIALKISTELIDL

SEQ ID NO: 97029 - protein, 266 aa, Unknown
  Bacterial polypetide isolated from the Sargasso Sea
LSWSAMGFSWCEYGGITRYPQDGNPKPRMFRANKHRALINRMGFNNPGATEVKRRLIERRASDKWPKFPVAANIGRSKKVSNEHAAEDYSATLDMLWDHADLFVLNISSPNTPGLRDLQSGDHISSVLTSCNMIRERKRERKPILLKLSPDSKDEEISNSISSSMNLGIDGIVATNTTIKRPVPINTQSRKAFSNDGGLSGRPLQSRSLEVISKSYIETSGKIPIIGVGGIDSSESAWEAITSGATLLQLYSAMVFNGPSVVSSIV

SEQ ID NO: 97030 - protein, 265 aa, Unknown
  Bacterial polypetide isolated from the Sargasso Sea
YLKRLLFSLDPEVIHEHSIKFLSDYPLLSELFDQKISTSENDKYQVTLNGPSWSFPVGLAAGLDKNALALDFFSKLYFGAIEVGTVTPKPQEGNPKPRLFRYPDNESLRNKMGFNNGGAESVLRHLLSTTKNNKVLGVNLGKNKVTPIDKAWEDYNILYQNFSKISDYLVINVSSPNTPGLRGLQESDALEEILSSLEQVRNEKPCPLYLKISPDIDKTHVSAIINLVKKYSLTGIIATNTTIMKEKGEGGISGKLCLEKSRNVR

SEQ ID NO: 97031 - protein, 191 aa, Unknown
  Bacterial polypetide isolated from the Sargasso Sea
MSLYDWARPAFFLLGPEAAHDLTLALLSAGLIPTSKTSKRAQKVTNLGVTIAGIQFPNPVGLAAGFDKKAIATDALLNLGFGFVEVGTVTPKPQAGNPKPRLFRLTEDKAVINRFGFNNPGHEKFIQNLERAEKAGVIGGNIGANKDSKDPVMDYCEGVRTIGPHVDYLTLNISSPNTPGLRDLQCEEHLT

SEQ ID NO: 97032 - protein, 142 aa, Unknown
  Bacterial polypetide isolated from the Sargasso Sea
MFSILRPYIFSLDPEVAHDLAIKSLKANILPKSFFDIRDEEMLETELFNQKIPNPIGLAAGFDKSAEVYNSLFKFGFGFIEVGTVTPKRQLGNPKPRIFRLEKDKALINRLGFNNHGSDVVSKRISNDHPTGFLGINIGPNK

SEQ ID NO: 97033 - protein, 187 aa, Unknown
  Bacterial polypetide isolated from the Sargasso Sea
MFTIFRPYIFSLDPEVAHDLAIKTLKLNVLPKSLFSVDGEELLETSLLKEKIPNPIGLAAGFDKSAEVYNSLFKLGYGFVEVGTVTPKRQLGNPKPRIFRLEKDQALINRLGFNNHGAQVVSERIAENLPGGFLGVNVGPNKDTKNKEEDYYLCISKLFSYAGYLTINISSPNTQGLRDFHDQRELK

SEQ ID NO: 97034 - protein, 211 aa, Unknown
  Bacterial polypetide isolated from the Sargasso Sea
MNFFLKIFKLLPPELAHSISLNSLNLLYKLNLLSLFSQQILIRDNFNFLGMNFKNRLGTAAGLDKNGDFIDALGELGFGFLEVGTVTPIAQKGNSKPRVFRVYEDKAIINRLGFNNKGVNYLVKNLKKRKYKGIIGVNIGANKSSKGIQRINDYLICLEKVHKYADYITINISSPNTPNLRDLHNKDHLNNLIVSINNKVNEINTKIPIFL

SEQ ID NO: 97035 - protein, 158 aa, Unknown
  Bacterial polypetide isolated from the Sargasso Sea
MRILLSCLRILPPEFAHSIALYSIQILYRLKLIEIFFPNRFVDVPFTFKGLKFKNKLGIAAGLDKNGDFINSLGALGFGFIEVGTITPKSQPGNPKPRVFRFKDQEAIVNSLGFNNKGVDYLVKRVKGRKYNGVLGINIGANKDSIGQRRIDDYVECF

SEQ ID NO: 97036 - protein, 268 aa, Unknown
  Bacterial polypetide isolated from the Sargasso Sea
EIFGKTIPNPVGIAAGFDKDAEVYNPLFKLGFGFVEVGTVTPIYQYGNHKPRIFRLEEDMALINRLGFNNSGSEKVRSRIMSNSPKGLFGINIGPNKDTNNRLEDYLICLRKFYNLADYLTINISSPNTENLRSFHNRDELNELLSLIEKEKKILKTKVPIIVKISPDIKDENINMISDLLLKHDVKAIIISNTTDKNRENLLNINKLEKGGLSGKPLEKRSNELINKFYKILKNKIKIIGVGGVDSGQSAYEKIINGASLVQLYTGM

SEQ ID NO: 97037 - protein, 251 aa, Unknown
  Bacterial polypetide isolated from the Sargasso Sea
MLHLARKQVTINPRIFRLPESNAIINRMGFNNKGVDNLISNVKAAKYNGILGINIGKNKDTPNEQGKDDYIHCMRKVFEHASYITVNISSPNTPGLRDLQYGAALDDLLQSLKNEQLDLISEHNKQVPMLVKIAPDLDPIQIEQVSESLLNNKIDGVIATNTTLERSDVIGQQYAEEAGGLSGHPVRTRSTEVVSELRRLTKGQLPIIGVGGIDDANSAKEKLNAGASLVQVYTGFIYKGPELVKSIVNGL

SEQ ID NO: 97038 - protein, 247 aa, Unknown
  Bacterial polypetide isolated from the Sargasso Sea
INGKNNPSLEKEVFGIKFPNPVGLAAGFDKNAEVYKQMSSLGFGFIEIGTVTPVSQDGNPKKRIFRLVNDNALINRLGFNNDGVDKVVGRLINKGNIIIGGNIGKNKVTPNEKAKDDYLICFKALYDHVDYFAVNVSSPNTPNLRDLQNINDLREILYPLIRENNKKDSKPILIKISPDLNDDDIKKIVDMALDLKIDGIITSNTTISRNNLKSKKKLTSEIGGLSGKPLTIRSTEIIKLIHEYSNK

SEQ ID NO: 97039 - protein, 234 aa, Unknown
  Bacterial polypetide isolated from the Sargasso Sea
MFSILRPLIFKFSPEVAHSLAIKALKLNNIPYSKPKDNHILETTFCEKKLSSPIGVAAGFDKNAEVYNPLFNLGFGFVEVGTITPKPQFGNPKPRVFRLEEDEALINRLGFNNFGSEQISQTIKENNKKGFLGINIGPNKDSTNRIDDYLICFRKFYNLADYITINISSPNTENLRDFHNQDELNSLIDKLKNEKKKLNSKIPLAIKVSPDLNDDQINEVSKIIMEQEIEIIIV

SEQ ID NO: 97040 - protein, 98 aa, Unknown
  Bacterial polypetide isolated from the Sargasso Sea
MDGVIATNTTLSRDAVQGLKHADEMGGLSGSVMTDMSLEVTRKLNKALDRAIPIIGVGGIDSPKAAQARLDAGASLVQVYSAFIYQGPSLVKRIVNAL

SEQ ID NO: 97041 - protein, 122 aa, Unknown
  Bacterial polypetide isolated from the Sargasso Sea
MFSKIRPFIFKLDPELAHDLAIKALKTNLIINEKKKNEFTFRTQLFGKEIPNPVGIAAGFDKNAEVYNPLFKLGFGFVEVGTVTPLSQYGNPKPRVFRLEEDCALINRLGFNNNGADDARSR

SEQ ID NO: 97042 - protein, 178 aa, Unknown
  Bacterial polypetide isolated from the Sargasso Sea
MNNILFKLYQKIAFLGDAEKVHNISLPILEFIYKSYFGKVFHKKIISKKTKQFGISFDNPVGLAAGFDKNADYLNFLSNIGFGFIEVGTLTPKPQPGNPKPRVFRVINEQAIINHLGFNNKGIDYGINQIKKFNKNIPIGINIGKNATTDIKDAFRDYEYCLRKSYAIADYITLNISS

SEQ ID NO: 97043 - protein, 184 aa, Unknown
  Bacterial polypetide isolated from the Sargasso Sea
MFKKIRPLIFKFSPEAAHSLAIKALKSNLIPSNKIEEKSILKIKIFGKNIKNPIGVAAGFDKNAEVYNPLFNLGFGFVEVGTITPEAQYGNPKPRVFRLEEDNALINRLGFNNSGSDEISSRVKTDLPNGLLGINIGPNKDTSNRVEDYLKCFRKFYNLGDYITINISSPNTENLRDFHNKNEL

SEQ ID NO: 97044 - protein, 242 aa, Unknown
  Bacterial polypetide isolated from the Sargasso Sea
MFSKLKPFIFSLDPEVAHDLAIQSLKFNLLPKSIFNVEKEELLETYLLNEKIPNPIGLAAGFDKSAEVYNSLFKLGYGFVEVGTITPKRQLGNPKPRVFRLEKEQALINRLGFNNHGSEIVSKRIEENLPSGFLGINVGPNKETLNKEDDYYVCLSRLGANAGYLTINISSPNTEGLRDFHKKKELEKLLKGINKIRKEKNLSKPIVVKLSPDINDNEISNILELIYKYEINGIIVSNTTDS

SEQ ID NO: 97045 - protein, 248 aa, Unknown
  Bacterial polypetide isolated from the Sargasso Sea
MIFYKELFHKIEKILWSVFLKPFFFSIDPEKVHHFVVGAMKLFSPIFHLRKSFYHFKINGKNHPLLEKEVFGIKFPNPVGLAAGFDKNAEVYKQMSSLGFGFIEIGTVTPVTQDGNPKKRIFRLVSDNALINRLGFNNDGVDKVVGRLRNKGNIIIGGNIGKNKVTPNEKAKDDYLICFKALYDHVDYFAVNVSSPNTPNLRDLQNINDLREIIYPLIRENNKRDTKPILIKISPDLNDDDIKKIVDM

SEQ ID NO: 97046 - protein, 278 aa, Unknown
  Bacterial polypetide isolated from the Sargasso Sea
MFNILRPLIFKFSPEVAHSLAIKALKLNNISYSKPKENHILETTFCEKKLSSPIGVAAGFDKNAEVYNPLFNLGFGFVEVGTITPKPQFGNPKPRVFRLEEDQALINRLGFNNSGSEQISQTIKENNKKGFLGINIGPNKDSKDRVEDYLICFRKFYNLADYITINISSPNTENLRDFHNQDELNLLIDKLKNEKKELNSKIPLAIKVSPDLNDDQINEVSRIIMEQEIGIIIVSNTTDKNRENLKNINKLEKGGLSGKPIEKISNEAISKFYKILKD

SEQ ID NO: 97047 - protein, 174 aa, Unknown
  Bacterial polypetide isolated from the Sargasso Sea
MFSNLRSLIFKLDPETAHSLAIKSLKFNFVPNIMLEDINNPLFQTKLFNKDLDNPIGMAAGFDKNAEVYNSLFKLGFGFVEVGTITPLKQYGNPKPRVFRLVEDEALINRLGFNNLGSKNIFDRIKQNKPTGLLGINIGPNKDTKEKTNDYIECLKTFHEVADYITINISSPNT

SEQ ID NO: 97048 - protein, 146 aa, Unknown
  Bacterial polypetide isolated from the Sargasso Sea
MFSFIRPFIFNLDPEKAHDLAIKSLKYNILPSNFFSVNNEEILSTKLFGKEISNPIGLAAGFDKSAEVYNEIFKIGFGFVEVGTVTPKKQYGNDKPRVFRLEKDLALINRLGFNNDGSETVKKRIETNMPSSLLGINIGPNKDTEN

SEQ ID NO: 97049 - protein, 296 aa, Unknown
  Bacterial polypetide isolated from the Sargasso Sea
LGLDFPNPVGLAAGFDKNAEVMQSMFSLGFGFVEIGTVTPEPQKGNIKPRIFRLKEDEAIVNSLGFNNKGAQKVKKNLLKIRNTYINNKIIGVNIGKNKSTKNAVDDYLYNIEYLGSLASYITINISSPNTEGLRDLQLRGNIDNFLKKILDKRDQIKDINKKPILIKISPDLDENQLRDIALISLANNIDGLILTNTTTERLNTLISNNKKRKGGLSGKPLFETSNTILKKMYSLTNGQIPLIGVGGISSASDCYEKIKAGASLVQLYTALTYAGPSLIYNIKNELIDLIKQMVT

SEQ ID NO: 97050 - protein, 287 aa, Unknown
  Bacterial polypetide isolated from the Sargasso Sea
KFLNPIGLAAGLDKDAKALLGLARLGFGHIEVGTVTPKPQLGNPKPRLFRIRESEALINRMGFNNEGVESMVGRLEKIRRENLLGSTLVGVNLGKNKTTPNEKAVEDYLACMGVVGSLADYFTLNLSSPNTPGLRELQYGETLRKLLTEFKEGQLALAQDVAAKPVFLKIAPDLSEKELDQIAAVFLETKIDGLIATNTTLSRIPELDHRYLSETGGMSGRPLFDLSRWVVKNMRARLGRDHLIIAVGGIDSEERAQKMMDSGANLLQIYTSFIYKGTKLVHKLIES

SEQ ID NO: 97051 - protein, 234 aa, Unknown
  Bacterial polypetide isolated from the Sargasso Sea
VFRIIDEQAIINHLGFNNKGIDYAINQIKKFNKNIPIGINIGKNATTDIKDAFRDYEYCLRKSYSVADYITLNISSPNTKNLRDLQSANNMDSFLNSIKILHNNLKKVYKKHTPLVVKIAPDIEEEPLNDLLNLVNSYDIDGIICTNTTIDKTDLDHKFKNIQGGLSGKPLYEKSNIVLKNVKKHLNNDITIIGVGGIDSASSANEKFKLGADLVQLYTGLVYKGPNLIKNILN

SEQ ID NO: 97052 - protein, 108 aa, Unknown
  Bacterial polypetide isolated from the Sargasso Sea
MIFYKELFHKIEKILWSVFLKPFFFSIDPEKVHHFVVGAMKLFSPIFYLRKSFYHFKINGKNHPSLEKEVFGIKFPNPVGLAAGFDKNAEVYKQMSSLGFGFIEIGTI

SEQ ID NO: 97053 - protein, 170 aa, Unknown
  Bacterial polypetide isolated from the Sargasso Sea
MLPPELAHSFSLNSLNILYKLKILGLLFNKIEHDEKVTFLGMEFNNRLGTAAGLDKNGDYIDSLGALGFGFLEVGTVTPLPQYGNTKPRIFRNYNENSIVNRLGFNNKGVDYLVSNLKKRKYKGILGINIGANKNSDGDERINDYIVCLQKVIQYADYITINISSPNTPN

SEQ ID NO: 97054 - protein, 300 aa, Unknown
  Bacterial polypetide isolated from the Sargasso Sea
MLSTSIAGLKINNPIGLAAGFDKNAEVINAMSRIGFGFIECGTTTIKPQYGNPKPRIFRLEEDDALINRLGFNNNGIDNFLSNFRKRKQQNAIAGINIGPNKDSDNFIKDYITLFEKTYSDGDYITINLSSPNTEGLREIQKIESLDTLTNELKIIKDSKEHKKNIFLKIDPDSTEKDYDDIINIAYKNNIDGLIISNTSTERPSNLTSRFCIESGGLSGKPLRDKSNDVLRLIAAKTKGEISLIGVGGISNANDVYQKIKLGASAVQLYTALTFEGSKLIENIKRDLVKFLKQDNFENI

SEQ ID NO: 97055 - protein, 274 aa, Unknown
  Bacterial polypetide isolated from the Sargasso Sea
EVAHSLAIKALKLNNIPYSKPEDNHILETIFCEKKLSSPIGVAAGFDKNAEVYNPLFNLGFGFVEVGTITPKPQFGNPKPRVFRLEEDEALINRLGFNNSGSEQISKRIKENNKKGFLGINIGPNKDSTNRIDDYLICFRKFYNLADYITINISSPNTENLRDFHNQDELNSLIDKLKNEKKNLNSNIPLAIKVSPDLNDNQINEVSKIIMEQEIGIIIVSNTTDKNRENLKNINKLEKGGLSGKPIEKISNEAISKFYKILKDKTKIIGVGGV

SEQ ID NO: 97056 - protein, 133 aa, Unknown
  Bacterial polypetide isolated from the Sargasso Sea
MNEQKGVFKNLYKNLITPVLKRDSGIDAEYLTNLSLSLLSFSSRKYNWPVVSSILKNLNEEFSIVDKRLTQSICGINFCNPIGLAAGFDKNGNAANVWKDFGFGFAELGTVTKFAQNGNPKPRLFRLAEEGAA

SEQ ID NO: 97057 - protein, 106 aa, Unknown
  Bacterial polypetide isolated from the Sargasso Sea
MWKYFIRPLFFLFDPELVHNFLIKWTKLFGGTGLPDMRFSSPLIEKKVFGINFPNPVGLAAGFDKNAEIVTSIRRLGGFGFTEIGTVTPRPQSGNPKKRIFRLTKD

SEQ ID NO: 97058 - protein, 283 aa, Unknown
  Bacterial polypetide isolated from the Sargasso Sea
NYIPHKKNRKNKILELDIFGKKIPNPVGIAAGFDKDAEVYNSLFKLGFGFVEVGTVTPHKQYGNPKPRVFRLEEDEALINRLGFNNSGSDKVRSRILSNSPSGLLGVNIGPNKDTKDRVKDYLVGLRKFHDIGDYLTVNISSPNTENLRSFHKDEELDELLKEIQAEKTRLKTNVPIALKISPDIENKSIDRICEILTDNKITTVIISNSTDRTRENLKNINKLEKGGLSGKPLENKSNFLINEFFKSFKSDITIIGVGGVDSGRSVYEKIINGAKLVQLYTG

SEQ ID NO: 97059 - protein, 277 aa, Unknown
  Bacterial polypetide isolated from the Sargasso Sea
LLNFIKSFQPETSHFLIIQLLKYLAFTINQKKDDPMLSTSIAGLKINNPIGLAAGFDKNAEVINAMSRIGFGFIECGTTTIKPQYGNPKPRIFRLEEDNALINRLGFNNKGIDNFLSNFKKRKKENSIAGINIGPNKDSDNFIKDYIILFERTYSEGDYITINLSSPNTEGLREIQKIESLNTLTTELKIIKDSKKYKKNIFLKIDPDSTERDYDDIINIAYKNNIDGLIISNTSTERPSNLTSRFCLESGGLSGKPLRDKSNDVLKLIAAKTKGEI

SEQ ID NO: 97060 - protein, 297 aa, Unknown
  Bacterial polypetide isolated from the Sargasso Sea
EILQTNFCGKKLSSPIGVAAGFDKNAEVYNPLFNLGFGFVEVGTITPKPQYGNPKPRVFRLEEDEALINRLGFNNSGSEEISSRMSKEIKKGILGINIGPNKDAENRIEDYINCFNKFHSLADYITVNISSPNTENLRDFHNRDELNSLIKELKNEKKKLNSKVPIAVKVSPDLNDEQIEVVSNILLDQEIEIIIVSNTSDKNRDKLNNINKLEKGGLSGKPLYHVSNNIIGKFYKLLGNKIKIIGVGGVDSGEAAFEKIIRGASLIQLYTGMVYKGPGIASSISSELIDILKNKGL

SEQ ID NO: 97061 - protein, 280 aa, Unknown
  Bacterial polypetide isolated from the Sargasso Sea
MIKNLPPEFSHYVTLKLLKLNLFTGNNFNDPILHQHLFGFDFSNPLGLAAGFDKNAEVIKPLLNLGFGFIEAGTVTPKYQYGNEKPRVFRLKEDKAIINHLGFNNKGTAFVKKKLKKLNLSSLSKGIVGINIGKNKETLNDIDDYIYCLQELGPFAHYITVNISSPNTPGLRELQNRGRIEKLVQTLQKKQEEMNSLENTPIFFKIAPDIDEEQIRDIALISLANNIDGLVISNSTIERPDILKSNLKNEIGGLSGKPLFLKSTMILRKMYTLTNGQIPL

SEQ ID NO: 97062 - protein, 221 aa, Unknown
  Bacterial polypetide isolated from the Sargasso Sea
KVIAENLKKRRDIIIGANIGKNFFTENIDAHNDYLKCLIDLNDYVDYFAVNISSPNTKGLRDFHDKKLLKPLLEKLVNKNDDIRNSKPLLLKISPDVNSQQLDAIIQLVLELKIDGVIATNTTISRDGLVSIHKEETGGLSGMKLRDKSNLIISYLRKKLGPDFPIIGVGGIMNAEDALKKIEFGADLVQLYTGFIYEGPSLIKRINKLLLDKELNKNYEK

SEQ ID NO: 97063 - protein, 246 aa, Unknown
  Bacterial polypetide isolated from the Sargasso Sea
MRRIFFNILKTLDPEVAHNLTINALKLPNPFIEINNDFPILSNDINGLSFKNPIGMAAGFDKNAEVINSLFNLGFGFTECGTVTPRPQFGNVKPRVFRLASDKAIINRLGFNNNGIEKFLINMSKSNKNGVLGANIGPNKDTENFVDDYINLYTKVVDYSDYVTVNVSSPNTKNLREIQEHDTLNTLLGELSQLRENMKTQKKIILKIDPDSTKQHYSMILNLVQKYKIDGIIATNTTISRPHELM

SEQ ID NO: 97064 - protein, 241 aa, Unknown
  Bacterial polypetide isolated from the Sargasso Sea
MLNSTSKLLKIFPPEFAHSLTINILKYLNLRNNNFDDPILSQHLFGLDFPNPIGLAAGFDKNAEIIKSMFSLGFGFVEVGTVTPLPQKGNPKPRVFRLTEDKAIINSLGFNNKGSKKVKKNIIKFRKSLKESRLIGVNIGKNKSSINAIDDYLFCMDELGSIASYITINISSPNTEGLRDLQLRGNIEELIKKINRKRESFDTINKKPILIKISPDLNDDQLRDIALISLANNIDGLIVAN

SEQ ID NO: 97065 - protein, 259 aa, Unknown
  Bacterial polypetide isolated from the Sargasso Sea
MLNQHFLGLDFSNPIGLAAGFDKNAEVINPIFNLGFGFVEIGTITPKPQKGNNKPRIFRLKEDEAIINHLGFNNLGTEKILKNLKKFRSLNFKGKVLGINIGKNQNSLNAIDDYCYCLEKLSGFGHYITVNISSPNTPGLRDLQLRGKIEVLVKSLQKKQKELTNRADLPIFIKISPDISEEQLRDIALMSLANNVSGLVISNTTIKRKNNLASPNKNEIGGLSGKPLFLQSTLILKKMYSLTNGQVPLIGVGGVSNGK

SEQ ID NO: 97066 - protein, 262 aa, Unknown
  Bacterial polypetide isolated from the Sargasso Sea
GFGFVEVGTVTPKAQDGNPKPRLFRLTKDKGIINRMGFNNGGVEAMIKRLKKRKTKVIIGGNIGKNKVTPNEEAIKDYEICFEALYDHVDYFVVNVSSPNTPGLRSLQEKGPLLAILNRLMTLNKAKVKEKAIFLKIAPDLEWSQIDEVIEVVQESGIHGLIATNTTIDRSSLQTESVIVEDIGNGGLSGAPLTKRATEVIKYISDKTNGQLPIIGVGGIMTAQDAIDKLNAGASLVQLYSGFIYEGPYLVKKINKTIFNTL

SEQ ID NO: 97067 - protein, 306 aa, Unknown
  Bacterial polypetide isolated from the Sargasso Sea
IFKIDPERAHFLAIQSLKLNLVSNIFDENKNDPILKTKLFNKDLNNPIGIAAGFDKNAEVYNPLFKLGFGFVEVGTVTPLKQYGNEKPRVFRLVEDQALINRLGFNNHGSDTILNRIKSNKKLGVLGVNVGPNKDSNDRLNDYLIGLEKFSQVADYITINISSPNTENLRNFHDENKLKELLKSISEKKKNLKTEIPIAVKISPDINENQIEQISEILLENNISAIIISNTSEASREKLQNIQRHQKGGLSGKPIEKKSNLLISKFYNLIKDKIKIIGVGGVDTGKAAYDKFSLGADYVQLVYPAM

SEQ ID NO: 97068 - protein, 285 aa, Unknown
  Bacterial polypetide isolated from the Sargasso Sea
MKLGLHPRLNQNIISIKIGDLFFKNLIGVAAGFDKNAEVIKKVNFLNFGFTEVGTITPMPQYGNPKPRVFRLEKDKAIINRNGFNNLGMLEAKKKLQHYRKSYPVGSDFLVGINIGPNKDSKDRFNDYKVLAENLSVFADYVSINISSPNTPNLRDFQNKDNLEKVIKFVKNGIVSSKTLNKKLPIFLKIAPDINKQTLNSIIEIAHSQKIYGLIISNTTLDRASNLKSKKSDELGGLSGKPLFKKSTDILSQANKIIKINNYKIFLIAAGGVSDSKTAYVKILC

SEQ ID NO: 97069 - protein, 147 aa, Unknown
  Bacterial polypetide isolated from the Sargasso Sea
MLINLLRLLPPESAHHITIKLLKSNLSISGKNTLEFNTLKQTILGIDFANPIGLAAGFDKNAEVIKPMLSYGFGFVEVGTITPRPQKGNPKPRVFRLEEDEAVINHLGFHNYGSEKILKNLKSFYSSDYLNGVVGINIGKNKSTEND

SEQ ID NO: 97070 - protein, 232 aa, Unknown
  Bacterial polypetide isolated from the Sargasso Sea
MFSIFKPLIFSLDPEIAHDLAINSLKLNILPKNIFQVENEELLETNLFNERLPNPIGLAAGFDKSAEVYNSLFKLGYGFVEIGTVTPKRQLGNPKPRIFRLEKDLALINRLGFNNHGSEMVSKRISDNLPSGFLGINIGPNKETVKKEEDYYTCISRLASLAGYLTINISSPNTEGLRDFHDQEELEKLLTGINKIRREKNISKPITLKLSPDINNSEISKIIELITKHKID

SEQ ID NO: 97071 - protein, 118 aa, Unknown
  Bacterial polypetide isolated from the Sargasso Sea
MRPLIFWLDPERAHGLSLWALRSGLVPGPGPIKDQILTQTLWGLEFPNPVGSAAGFDKDVQVPMQTLNLGFGFVEIGSVTPRPQEGNPRPRLFRLAADEAVINRNGFNSCGMDFAAQP

SEQ ID NO: 97072 - protein, 160 aa, Unknown
  Bacterial polypetide isolated from the Sargasso Sea
MNEQKGEFKNLYKNLITPVLKRDSGIDAEYLTNLSLSLLSFSSRKYNWPVVSSILKNLNEEFSIVDKRLTQSICGINFCNPIGLAAGFDKNGNAANVWKDFGFGFAELGTVTKFAQNGNPKPRLFRLAEEEAALNRMGFNNNGAENLVKNLMEQGIEFKK

SEQ ID NO: 97073 - protein, 293 aa, Unknown
  Bacterial polypetide isolated from the Sargasso Sea
MFNKIRPLIFKLDPEFAHSLAIKALKTNLFLKQKIPEDLYLKSSLFGKEIKNPIGIAAGFDKDAEVYNSLFNLGFGFVEVGTVTPLKQYGNKKPRVFRLENDKALINRLGFNNSGSDNVSKRIKKNKPIGILGVNIGPNWDSKDRVEDYLIGFKKFHNLADYITLNISSPNTENLRDFHNLDELENLLDKIFAEKRKLSSEIPIALKVSPDINNEIIKEISKLLIEYKVNALIVSNTTDQNRDNLKDHQKFQRGGLSGKPLRNISNKLINHFFKNLNGQVKIIGVGGVDSGKS

SEQ ID NO: 97074 - protein, 131 aa, Unknown
  Bacterial polypetide isolated from the Sargasso Sea
QTHGKYVPLFIIIAPDLSDVEIDSIAASLINSKMDGVIATNTTLSRDAVAGLQHAEEMGGLSGSVMTDMSLEVTRKLNKALDRAIPIIGVGGIDSPEAAQARLDAGASLVQVYSAFIYQGPSLVKRIVNAL

SEQ ID NO: 97075 - protein, 160 aa, Unknown
  Bacterial polypetide isolated from the Sargasso Sea
MKLNILRKKKTFENLKINILNRQFENPLGLAAGFDKNAEVIDGSLGLGFGFVEVGTVTPMPQEGNPKPRVFKIPEFEAIIQRLGFNNSGVEIFLNNLKKIKKTQNQIIGVNIGKNKGSLKPYSDYEFLYELMQPFADYITINISSPNTPGLRDLQKKEKL

SEQ ID NO: 97076 - protein, 211 aa, Unknown
  Bacterial polypetide isolated from the Sargasso Sea
MFSKFRSLIFKINPETAHSLAIKSLKLNFIQNIFDENKNDPMFKTNLFGKTINNPIGIAAGFDKNAEVYNPLFKLGFGFVEVGTVTPFKQFGNPKPRIFRLEQDEALINRLGFNNFGADIISSKIISNKPNGLLGINIGPNSDSKDRLNDYLICIKKFHDIADYMTINISSPNTEKLRDFHENDKLEELLSSISEEMKNLNSKTPIVVKIS

SEQ ID NO: 97077 - protein, 149 aa, Unknown
  Bacterial polypetide isolated from the Sargasso Sea
MNEQKGGFKNLYKNLITPVLKKDSGIDAEYLTNLSLSLLSFSSRKYNWPVVSSILKNLNEEFSIVDKRLTQSICGINFCNPIGLAAGFDKNGNAANVWKDFGFGFAELGTVTKFAQNGNPKPRLFRLAEEEAALNRMGFNNNGAENLVK

SEQ ID NO: 97078 - protein, 163 aa, Unknown
  Bacterial polypetide isolated from the Sargasso Sea
LFGKEINNPIGLAAGFDKSAEVYNEIFKIGFGFVEVGTVTPKQQFGNEKPRVFRLEKDQALINRLGFNNDGSDVVRKRIEANIPSSLLGINIGPNKDTENMANDFLKCAEIFFPIGDYITINISSPNTKGLRDFHNEDDLKNLLSKINEIREKSNFKKSFLLK

SEQ ID NO: 97079 - protein, 271 aa, Unknown
  Bacterial polypetide isolated from the Sargasso Sea
GKKLSSPIGVAAGFDKNAEVYNSLFNLGFGFVEVGTITPKPQFGNPKPRVFRLEEDEALINRLGFNNSGSERISQTIKENNKKGFLGINIGPNKDSKDRVEDYLICFRKFYNLADYITINISSPNTENLRDFHNQDELNSLIDKLKNEKKELNSNIPLAIKVSPDLNDDQINEVSKTIMEQEIGIIIVSNTTDKNRENLKNINKLEKGGLSGKPIEKISNEAISKFYKILKDKTKIIGVGGVSNGRDAFEKSFLAQHSFNYILEWFTEVLV

SEQ ID NO: 97080 - protein, 220 aa, Unknown
  Bacterial polypetide isolated from the Sargasso Sea
MSSPVDFVFHKLRPIIFSSDAETAHERMLSSVEMISKFPGVIPFLRWQFREESPILNTNLFGIKVNNPIGLAAGFDKDGRIYPSLFALGFGFVEIGTVTPLPQSGNSKPRIFRLLDDHALVNHLGFNSQGIQKMSEKLYLRNKIYSLEKSEKIKKYFEKQEKSSSCMLGINIGKNRDTSLKKAREDYVSALSALHPFADYFTINISSPNTEGLRSLQEKQ

SEQ ID NO: 97081 - protein, 181 aa, Unknown
  Bacterial polypetide isolated from the Sargasso Sea
MYSLLKPFIFKIDPEMAHDLAIKSLKYNFLPEDIFKVQEEEILETKIFNTKIKNPIGLAAGFDKSAEVYNSLFKFGFGFIEIGTVTPREQYGNPKPRVFRLENDRALINRLGFNNDGIEKVSQRLQKNTPSGFLGINIGPNKDSENRTDDYLKCIKEINTFANYITINISSPNTPGLRDFH

SEQ ID NO: 97082 - protein, 286 aa, Unknown
  Bacterial polypetide isolated from the Sargasso Sea
FQEESPALCTRIFGKKINNPIGLAAGFDKDGRIFSSLFALGFSFVEIGTVTPLPQSGNPKPRIFRLEEDQALVNRLGFNNLGIEKMAETLDSGINIIPPKKSETINYSLKNNSYAMLGINIGINKETSLLKARDDFMLAINKLHSFADYFTINISSPNTTGLQRLQEKQMLGKLLESVCSERNKIDRNKIRQTPLLLKLSPDLDDNGLKNFTEVIKEFPIQGVIATNTSLDRPQLKSNHKIEHGGLSGKPLKRRSTEVVRYLFKELGNDVTIIGTGGVFNGADAYE

SEQ ID NO: 97083 - protein, 285 aa, Unknown
  Bacterial polypetide isolated from the Sargasso Sea
WHFLIKTPLLGYLSKKLFFFEDNSLNTKVFGINFANPVGLAAGFDKNADLYNDFSHFGFSFIEVGTVTPKPQAGNPKPRLFRLIEDSAIINRMGFNNLGLENAISNLKKRKTNIVVGGNIGKNKWTKNELASDDYLECFNQLFPYVDYFVVNVSSPNTPNLRSLQDKEPLSNLLGLIQKCNDSKESRKPILLKIAPDVSTNELDDIIDVVVSCKLDGIVATNTTIERSNLKTSKSKVDAIGNGGVSGKPLKEKSNQIISYIYNKTEGKIPIIGVGGIHSANDAIE

SEQ ID NO: 97084 - protein, 256 aa, Unknown
  Bacterial polypetide isolated from the Sargasso Sea
LAIKSLKYNFLPESLFKVENEEVLNTRLFGKEIQNPIGLAAGFDKSAEVYNKIFKLGFGFVEVGTVTPRQQYGNEKPRIFRLERDNALINRLGFNNDGSEIVKKRIEEDVPNGLLGINIGPNKDTSNMTNDFIECAKTFFPLGDYITINISSPNTEGLRDFHNKEHLQKLLSNINLVRETSNFNKSFLLKVSPDLDDQSIDNIVQLSLENNIDGLILTNTTDRNRENLLDEKKNEKGGLSGKPIQALSTSYIKKFY

SEQ ID NO: 97085 - protein, 293 aa, Unknown
  Bacterial polypetide isolated from the Sargasso Sea
DKNAEVYNSLFNLGFGFVEVGTVTPKPQYGNPKPRVFRLEEDEALINRLGFNNKGSENVSSRVKKNKPRGLLGINIGPNKDSINRVEDYIVCFKKFCNLADYITINISSPNTENLRDFHERGELGNLIKTINKEKKNNNSNIPIAVKISPDLTFDQIEGVSEILIENNVEIIIISNSTDKNRDALKNINKIEKGGLSGKPIEKISNNIINRFYKLIGKKIIIIGVGGVDSARGVYEKMTSGATIVQLYTGMVYKGPKIASMINDDLVKILEKDGIKNIREIIGSKKSSDDGRS

SEQ ID NO: 97086 - protein, 184 aa, Unknown
  Bacterial polypetide isolated from the Sargasso Sea
MPPSPLSSGAFYQRWLGPVLANDEGLDAEQLSRTALTALEQASLRRQWPLVSTVLEGLAGDLQRRDLRLEQVLFGCRFPNPVGLAAGFDKNGVAAGLWDRFGFGFAEVGTVTWHGQPGNPRPRLFRLAEEQAALNRMGFNNDGAQALRRTLERQRLDPPGRRPAVLGINVGKSKVTALEQAPED

SEQ ID NO: 97087 - protein, 108 aa, Unknown
  Bacterial polypetide isolated from the Sargasso Sea
MYSLARPFLFSLDAERAHGLGLSALELAYRTGTSPLLARRPAPMPTPAFGLTFPNPVGLAAGLDKNGEHIDALLALGFGFVEIGTITPRAQDGNPKPRLFRLPKHQAI

SEQ ID NO: 97088 - protein, 165 aa, Unknown
  Bacterial polypetide isolated from the Sargasso Sea
MIFNIIKPLIFKFDPETAHSLAIKALKYNYIPKTKLLKNDLISTEIFGKKISNPIGLAAGFDKNAEVYNSFFKLGFGFVEVGTITPKTQYGNPKPRVFRLEEDEALINRLGFNNSGADKIGSRIKSNPPNGLLGINIGPNKDTKNKIEDFLIGLRNLITSRLFDN

SEQ ID NO: 97089 - protein, 274 aa, Unknown
  Bacterial polypetide isolated from the Sargasso Sea
MNFFLKIFKFLPPEFAHSASLNSLNLLHKSKLLVLFNNKIINKNEHTIFGMKFRNKLGTAAGLDKNGDYIDALGALGFGFLEVGTVTPKPQYGNPKPRIFRNYSENSIINRLGFNNKGIDYLVNNLKKRKYGGVVGVNIGSNKSSKGIERINDYLLCIEKIHKFADYITINISSPNTPDLRDLHLKENLQNLITSVENKIDKLNFKKPIFLKISPDETDESIEMIIDLVKKSSITGLVATNTTIDKENLNNKKLKKEDGGVSGQPLMDKSTNKI

SEQ ID NO: 97090 - protein, 254 aa, Unknown
  Bacterial polypetide isolated from the Sargasso Sea
MFSFIRPFLFNLDPEKAHDLAIKSLKYNFLPSNLFSVNGEEILRTKLLGREINNPIGLAAGFDKSAEVYNEIFKIGFGFVEVGTVTPKKQFGNEKPRVFRLEKDQALINRLGFNNDGSEIIKKRIENNIPSSLLGINIGPNKNTVNMTDDFLKCAEIFFPIGDYITINISSPNTSGLRDFHDEDALKKLLFKINEVREKSNFKKSFLLKVSPDLDSSQIPTMVKLILEYKIDGVILTNTSNKNRDNLIDPNSKE

SEQ ID NO: 97091 - protein, 238 aa, Unknown
  Bacterial polypetide isolated from the Sargasso Sea
MYNLLKAFLFLFDPETVHRLTILFLKFIPINKTSIPPELNIKIFGLDFMSPIGLAAGFDKDAEVYDKMLQLGFGFVEVGTVTPKPQRGNPKPRIHRIKKEKAIINSLGFNSIGFENVKENLQNKKTEGIIGVNIGANKYSKIFIDDYISGIKFFSNHVSYITINISSPNTPGLRELHIEKNLKDLLEKIINLKTNNEIAEVPLLIKISPDVNDDDLSIMCDIFLEFNVDGIIISNTTL

SEQ ID NO: 97092 - protein, 296 aa, Unknown
  Bacterial polypetide isolated from the Sargasso Sea
SNPFIESNNDFPFLSNDINGLNFKNPIGMAAGFDKNAEVINSLFNLGFGFTECGTVTPRPQFGNVKPRVFRLASDKAIINRLGFNNKGIEKFLTNMSKSNKNGVLGANIGPNKDTVNFLDDYINLYTKVVDYSDYVTVNVSSPNTKNLREIQEHDTLNTLLSELSQLRENMKTQKKIILKIDPDSTKQHYSMILNLVQKHKIDGIIATNTTISRPQDLMDEYKDEEGGISGQPLKELSNKVLSFLSKETNGELLLIGVGGISNAKDVYTKIKLGASLVQLYTALTFNGPQMINKIK

SEQ ID NO: 97093 - protein, 200 aa, Unknown
  Bacterial polypetide isolated from the Sargasso Sea
MFSILKPYIFSLDPEIAHDLAIKSLKFNVLPKSIFKVEDEEILETTFLDTKLPNPIGLAAGFDKSAEVYNSLFRLGYGFIEVGTVTPRRQLGNPKPRIFRLEKDQALINRLGFNNHGSEIVSKRIEMNPPIGYLGINIGPNKDTENKEEDYYLCMEKLSSLGNYITINISSPNTEGLRDFHDQKELDKLLSGLNRIKKEK

SEQ ID NO: 97094 - protein, 297 aa, Unknown
  Bacterial polypetide isolated from the Sargasso Sea
FSIGVAAGFDKNAEVYNSLFNLGFGFVEVGTVTPKPQFGNPRPRVFRLEEDEALINRLGFNNQGCEEISLRIKKNKPKGLLGINIGPNKDSSNRVEDYTTCLKKFINLANYISINISSPNTENLRDFHKTSELNNLIKSILEEKNNSKSSTPIAVKISPDLSSNQVEKISQILIDNKIETIIISNSTDRNREGLTNMNRFEKGGLSGKPIEKISNRIINEFYKLVGKQIKIIGVGGVDSAKSAYEKILSGATLVQLYTGMVYRGPRIAAQINNGLIKILEQEGINNINDVVGLKKST

SEQ ID NO: 97095 - protein, 280 aa, Unknown
  Bacterial polypetide isolated from the Sargasso Sea
VYNSLFQLGFGFVEVGTITPEPQFGNPKPRVFRLEEDDALINRLGFNNIGSEKVALNLKNNTPKGLLGINIGPNKDTKNRAEDYLKCFRILNKLGDYITINISSPNTENLRSFHNPEELEKLLKLLNEEKTKLNSTISFAVKIAPDIQTKDLEIIGNILLANNIKFVIISNTSDVTRENLKNINKFEKGGISGKPIEEKSNLLINEFYKKFENKIKIIGVGGIDSGKSAYEKFISGASYIQLYTGMVYQGPNIVNKISKELYEILSSNGVKNITEIIGSK

SEQ ID NO: 97096 - protein, 259 aa, Unknown
  Bacterial polypetide isolated from the Sargasso Sea
MYKLVRNFLFLFDAEEIHELSTKLINLFNFIPFSSFLLRKCYLISDKSLEKELFGIKFKNPIGLAAGFDKNATFFNDFRNFGFGFIEVGTVTPLPQEGNPKKRIFRLSKDEALINRLGFNNSGVEKIKKNLNRKKNIIIGANIGRNSFTSNEEAHLDYIKCYTELYPYVDYFAINISSPNTKGLRDLHNRDLLEPLIKKITSLNYSKGNPKPILLKISPDVTFNQLDQIIQLVIDYRIDGIIATNTSISREGLLSKNKS

SEQ ID NO: 97097 - protein, 239 aa, Unknown
  Bacterial polypetide isolated from the Sargasso Sea
MFSFLKPLIFGLDPEAAHDLAIKSLKLNIVPENIFKVENEEMLETNFLKKKIKNPIGMAAGFDKSAEVYNSLFKLGFGFVEVGTVTPIKQIGNPKPRIFRLEEDEALINRLGFNNDGLETILKRLESGQFGKGDNTLGVNIGPNFNSKSFESDFCKSAESLIRLSLADYITINISSPNTENLRDFHDESKLDSLLEAINKLKQEFGSLMPIFVKVSPDIKDSSIEKISEIIINQKVQGA

SEQ ID NO: 97098 - protein, 288 aa, Unknown
  Bacterial polypetide isolated from the Sargasso Sea
MWSVFLKPFFFSIDPEKVHHFVVGAMKLFSPIFYLRKSFYHFKINGKNHPSLEKEVFGIKFPNPVGLAAGFDKNAEVYKQMSSLGFGFIEIGTVTPLSQDGNPKKRIFRLVNDNALINRLGFNNDGVDKVVGRLRNKGNIIIGGNIGKNKVTPNEKAKDDYLICFKALYDHVDYFAVNVSSPNTPNLRDLQNINDLREIMYPLISENNKRDTKPILIKISPDLNDYDIKKIVDMALDLKIDGIITSNTTISRNNLKSKKKLTTETGGLSGEPLTMRSTEIIRLIHEYS

SEQ ID NO: 97099 - protein, 288 aa, Unknown
  Bacterial polypetide isolated from the Sargasso Sea
YLKRSYFGKKIDNPIGLAAGFDKNAEVYNPIFSLGFGYVEVGTVTPLKQYGNPKPRVFRLVEDQALINRLGFNNLGAENISSRIRSNKPKGLLGVNIGPNKNSTDRLNDYVIGLKTFNDIADYLTINISSPNTEQLRDFHDKNKLDELMTTIFNEKEKLNSKIPIVVKISPDIQDYQIENISSLLIKYKVSAIIISNTTDRYRDKLLSNSRHQKGGLSGKPLEDKSNLLIKKFYNVLNGRIDIIGVGGIDSGRSAYEKIVSGSSYLQLYTGMVYQGPNIISKIKSELK

SEQ ID NO: 97100 - protein, 156 aa, Unknown
  Bacterial polypetide isolated from the Sargasso Sea
MFSKFRNLIFKIDPEIAHNLAIKSLKLNFTRNIFDENKNDPMFQTILFGKKLDNPIGLAAGFDKNAEVYNSIFKLGFGFVEVGTVTPLKQYGNPKPRIFRLVEDQALINRLGFNNLGSDNISSRIRLNKPNGLLGVNLGPNKDTQDRLNDYLIGLR

SEQ ID NO: 97101 - protein, 259 aa, Unknown
  Bacterial polypetide isolated from the Sargasso Sea
MYSILKPFIFKIDPEMAHDLAIKSLKYNFLPEDLFKVENESILETEIFNTKIKNPIGLAAGFDKSAEVYNSLFKFGFGFIEVGTVTPKKQFGNLKPRVFRLENDQALINRLGFNNDGLEKVSERLKKNTPSGFLGINIGPNKDSDDRIADYTECLKGIYSFANYITINISSPNTPGLRDFHKEDFLKELLKHLSEFANKNKINKPLVLKVSPDITDKEISYIIDLIKKFNIKGIIVSNTTDKNRDNLIAKNKNEVGGLS

SEQ ID NO: 97102 - protein, 214 aa, Unknown
  Bacterial polypetide isolated from the Sargasso Sea
MFSILRPFLFNLDPEAAHDLAIKSLKFNFLPSKVFEVEDEQMLNIKLLGKNFPNPIGLAAGFDKSAEAYNSLLKLGFGFVEVGTVTPLKQFGNPKPRIFRLEDDGALINRLGFNNDGMETVKNRIKSDGKKGILGINIGPNKDTKDQKIDFCLGLKNFFDVADYITVNISSPNTEGLRDFHNQEKLKDLLLVLNKIKKDNKTDIPLLLKISPRY

SEQ ID NO: 97103 - protein, 124 aa, Unknown
  Bacterial polypetide isolated from the Sargasso Sea
MLFDIAQKIMLRMDAETAHDVTLSILKRSANTPVDKLYRQTLKSKPIELMGLRFPNPVGLAAGLDKDGEAIDAFHAMGFGHVEVGTVTPRPQSGNQLPRLFRLQETKAIINRMGFNNLGVNNLK

SEQ ID NO: 97104 - protein, 292 aa, Unknown
  Bacterial polypetide isolated from the Sargasso Sea
GVAAGFDKNAEVYNPLFNLGFGFVEVGTITPKPQYGNPKPRVFRLEEDEALINRLGFNNSGSDEISLRIKKEIKKGFLGINIGPNKDSQNRIEDYLICFRKLHTLGDYITINISSPNTENLRDFHNKSELNSLIKKLKEEKKKLNSKIPIAIKVSPDLNEDQIDNVAKILLDEEIEIIIISNTSEKNRDNLKNINKLEKGGLSGKPIQEISNNTIFKFYKILGNKIKIIGVGGVDTGQSAFEKIISGASLVQLYTGMVYKGPGIASKISYELIDILKNKGFKNVSEAIGTKN

SEQ ID NO: 97105 - protein, 256 aa, Unknown
  Bacterial polypetide isolated from the Sargasso Sea
MFSNLRSLIFKLDPETAHNLAIKSLKFNFVPNISDENKDDPLFKTRMFNKDIENPIGIAAGFDKNAEVYNSLYKLGFGFVEVGTITPLKQYGNPKPRVFRLVEDEALINRLGFNNLGAKNVVNRIKSNKPIGLLGINIGPNKETENRLGDYIECLKTFHEVADYITINISSPNTEDLRNFHEQTKLNELLEIINKEKKILNSKIPIVVKISPDIDDQEINKVSEVLLSNNIEVIIISNSSDSTRYSLIDIQKHQKG

SEQ ID NO: 97106 - protein, 200 aa, Unknown
  Bacterial polypetide isolated from the Sargasso Sea
MVQSETAGSLTCGAFYRRWLGPVLSRDEGMDAEQLSRAALSALAQASLRRSWPGVSTVLKGLATELNRRDLRLEQVLFGCRFSNPVGLAAGFDKNGVAAGIWDRFGFGFAELGTVTWHGQPGNPRPRLFRLAEEQAALNRMGFNNDGAEALLRTLQRQRLESPGKRPAVLGINFGKSRITALEQAADDYASSLELLSPMA

SEQ ID NO: 97107 - protein, 233 aa, Unknown
  Bacterial polypetide isolated from the Sargasso Sea
  misc_feature (213)..(213): Xaa can be any naturally occurring amino acid
MNILAKIISRIYLGFLFNKSPEKSHDIALNQLDKLHKLRLLNFLGINKKYFSPVSCMGIDFPNMLGLAAGLDKNGDYIDALSSLGFGYIEIGTVTPKPQLGNQKPRLFRLKKDKAIINRMGFNNKGVDYLIKQVEKSSYKGILGINIGKNADTPIESAVDDYLICLRKVYDYSSYVTINISSPNTKNLRDLQSEDSLNNLLSCLIKERMILQXKYNKYVPLVVKISPDINKNQ

SEQ ID NO: 97108 - protein, 255 aa, Unknown
  Bacterial polypetide isolated from the Sargasso Sea
KIFKLLPPEIAHSASLISLKILHKTKLLKFFIKKNSKNENYNFEGMIFSNKLGTAAGLDKNGDFIDALGDLGFGFLEVGTITPLPQSGNAKPRVFRNYKEESIINSLGFNNKGVDYLVENLKRRKFKGVVGVNIGANKSSSGNQRVDDYLICLEKVHKYADYITVNISSPNTPNLRDLHNEKNFKSLISALEERSKKIGINIPIFIKISPDESKDDLDSIINIVKESFLSGIVATNTTINKSNVVDQKFQSINGG

SEQ ID NO: 97109 - protein, 239 aa, Unknown
  Bacterial polypetide isolated from the Sargasso Sea
KDDALINRLGFNNDGVDAVVKRLKNKKFKFYNTSLPIGANIGKNKSTPNSKAHEDYLECFKKLRSYVDYFAVNVSSPNTPELRNLQSVSFLKKILNTLIRENKIGERKPILVKVSPDLSNRQLADVVSLLMELNIDGIICSNTTIARENLKSDKLKNETGGLSGKPLSKRSTEMVKLIKNQAGDKLPIVAVGGIMTPDDVVEKINAGASLVQIYTGWIYYGPTFVYDINKRLLKEYFKN

SEQ ID NO: 97110 - protein, 295 aa, Unknown
  Bacterial polypetide isolated from the Sargasso Sea
TDVFKIRSLIFKLDPETAHDLAIKALKFNIVSQNKIKNNKLIQTEIFGKTIPNPIGIAAGFDKDAEVYNPLFRLGFGFVEVGTVTPVNQYGNPKPRIFRLEEDQALINRLGFNNSGSDKVRLKIISNSPKGLFGINIGPNKDTNNRLEDYLIGFRKFYNLADYLTINISSPNTENLRSFHNENELSELLSSIEKEKKILNTNVPIAVKISPDIEDKNINIISDLLLKYRIAAIIISNTTDKNRENLFNINKLEKGGLSGKPLEKRSNELINKFYKILKNKIKIIGVGGVDSGQSA

SEQ ID NO: 97111 - protein, 237 aa, Unknown
  Bacterial polypetide isolated from the Sargasso Sea
MFSILKPFIFTLDPEVAHDLAINSLKLNVLPKNLFKVDDEELLETKLFNQSLPNPIGLAAGFDKSAEVYNSLFKLGYGFVEVGTVTPKRQLGNPKPRVFRLEKDQALINRLGFNNHGSEIVSKRILENIPNGFLGINVGPNKDTKNKEEDYYLCLSKLHSCAGYLTINISSPNTEGLRDFHEKKEFEKLLIGINKIKEEKNILKPLAVKLSPDIDDSEISEIIELILKYKVNGIIIS

SEQ ID NO: 97112 - protein, 131 aa, Unknown
  Bacterial polypetide isolated from the Sargasso Sea
MNEQKGVFKNLYKNLITPVLKRDSGIDAEYLTNLSLSLLSFSSRKYNWPVVSSILKNLNEEFSIVDSRLSQKICGINFCNPIGLAAGFDKNGNAANVWKDFGFGFAELGTVTKFAQNGNPKPRLFRLAEEE

SEQ ID NO: 97113 - protein, 280 aa, Unknown
  Bacterial polypetide isolated from the Sargasso Sea
MAEVYNPLFNLGFGFVEVGTITPEPQYGNPKPRVFRLEEDEALINRLGFNNSGSEEIYKRIESNKPFGLLGVNIGPNKTSDNRIQDYVKCFRKFISVADYITINISSPNTENLRNFHNQEEMNNLLSEIQKEKKKLQSNLPIAVKISPDINFNSIDQICESLVKHSIEVLIVSNTSEKNRDNLKNINKLEKGGLSGAPIENKSNELINLFYNNLKNKIKIIGVGGVSTGKGAYEKIIRGASLIQLYTGMVYRGPDIANKISQELIEILTKDGIKNISEIV

SEQ ID NO: 97114 - protein, 207 aa, Unknown
  Bacterial polypetide isolated from the Sargasso Sea
MFSIFKPFIFSLDPETAHDLAINSLKLNVLPKNIFQVENEDLLETKLFDETLPNPIGLAAGFDKSAEVYNSLFKLGYGFVEVGTVTPRRQLGNPKPRIFRLEKDQALINRLGFNNHGSEIVLKRISENLPSGFLGINIGPNKDTKKKEEDYYLCLSRLSSYAGYLTINISSPNTVGLRDFHDQSELEKLLLGINKIKLEKNISKPIA

SEQ ID NO: 97115 - protein, 156 aa, Unknown
  Bacterial polypetide isolated from the Sargasso Sea
MFSNIRSLIFKLDPETAHSLAIKSLKFNFVPNILDEDKNNPLFKTEIFNKKIENPIGMAAGFDKNAEVYNALFKLGFGFVEVGTVTPLKQYGNPKPRVFRLVEDEALINRLGFNNLGAKNIVDRIKQSNPIGLLGVNIGPNKDTTNRIGDYVENLR

SEQ ID NO: 97116 - protein, 284 aa, Unknown
  Bacterial polypetide isolated from the Sargasso Sea
KEKSYDCLKVKFLGKEIPNPIGIAAGFDKNAEVYNPLFKLGFGFVEVGTVTPEPQFGNPKPRVFRLEEDEALINRLGFNNIGSNKVSLNIKKDLPRGLLGINIGPNKDTKNRIDDYLKCIRSLNNLGDYITINISSPNTDNLRSFHNPNELEKLLKLIQEEKNKLKSSINIAVKVAPDIEINNLDNIGNILLNYDVKFIIISNTSDGTRDRLKNINKFEKGGLSGKPIEEKSNILIKKFYKKFNNKIKIIGVGGVDSGRSAYEKFISGASFIQLYTGMVYQGPR

SEQ ID NO: 97117 - protein, 291 aa, Unknown
  Bacterial polypetide isolated from the Sargasso Sea
MAAGFDKNAEVYNSLFKLGFGFVEVGTITPLTQSGNPKPRVFRLVEDKALINRLGFNNQGCQNIFSRIKSNKQKGILGVNIGPNKDTRDRLNDYVKGFKTFYAVADYITINISSPNTEDLRNFHDQIRLSELLKVINKEKENLDSDIPIVVKISPDIKDQEINKICEVLLDNKIEAVIISNTSDATREKLLNIQKYQKGGLSGKPIEEKSTLLINKFYKILKGRIKIIGVGGVDSGESAYSKFLAGANYLQLYTGMVFRGPNIVNYIKKELKELLIKDGVSNFSENIGKNH

SEQ ID NO: 97118 - protein, 288 aa, Unknown
  Bacterial polypetide isolated from the Sargasso Sea
VKQFDVLFDNPVGLAAGFDKNADYLNFITNIGFGFVEVGTLTPKAQAGNPKPRVFRLVKDEAIINHLGFNNKGIDYGISRIKEFNRNIPIGVNIGKNASTDVKDAFRDYEYCLRKAYSVADYITLNISSPNTENLRDLQKGEKISSFLHSIKTLHDNLKKVYKKHTPLVVKIAPDVTDEIIFDLSNLVNEYDIDGVICTNTTIDKSYLSDQFKALQGGLSGKPLFQKSNDVLTKISNVLGKERTIIGVGGIDSYESANEKFRLGANLLQLYTGLVYKGPKVIEDILRY

SEQ ID NO: 97119 - protein, 304 aa, Unknown
  Bacterial polypetide isolated from the Sargasso Sea
FGDLTFANPIGIAAGYDKNAEVIDPLLKMGFGFVECGTVTPIAQYGNPKPRVFRLKEDRGIINRLGFNNCGVSQFLKNFNQRSATLGIAGINIGPNKGSENFIDDYLKTFDLIYDYADYITLNVSSPNTKNLRDIQRKEDLNFLTSEINSFRESKEAKKKILLKLDPDSTEEDYGKIINIAQKNKIDGLIIGNTSIYRPEFLKSNYKNEEGGLSGAPIKKKSNDVLRFISKETRGEIVLIGTGGIENARDAYEKIKIGASFVQLYSALTFSSLGFINKLNKDLASYINNDGFDNIKEAIGIEIR

SEQ ID NO: 97120 - protein, 184 aa, Unknown
  Bacterial polypetide isolated from the Sargasso Sea
MFSNLRSLIFKLDPETAHSLAIKSLKFNFIPNILDEEKNNPLFKTKLFNKEIENPIGMAAGFDKNAEVYNSLFNLGFGFVEVGTVTPLKQYGNPKPRVFRLVEDEALINRLGFNNLGSKNIVDRIKRNNPTGLLGINIGPNKDSEDRTNDYIQCLKTFNGVSDYITINISSPNTEDLRSFHDQK

SEQ ID NO: 97121 - protein, 228 aa, Unknown
  Bacterial polypetide isolated from the Sargasso Sea
MFSILKPFLFNLDPETAHDLAIKSLKFNILPERLFQVEEEQILNIELLGKKFPNPIGLAAGFDKSAEVYNSLLKLGFGFVEIGTVTPLKQFGNPKPRIFRLEDDGALINRLGFNNDGMDVIKNRIMLDRKSGILGVNIGPNKDTEDQKNDFGLGLKNFFNIADYIVINISSPNTEGLRDFHDQEKLKGLLSYLNKIKEDKKTNIPLLLKISPDIEDDYIHKIVDVANK

SEQ ID NO: 97122 - protein, 229 aa, Unknown
  Bacterial polypetide isolated from the Sargasso Sea
MFEKIRSLIFKFDPEKAHDLAIKALKTNIVPVKIRTYESLKVNFLEKEIPNPIGIAAGFDKNAEVYNSLFKLGFGFVEVGTITPEPQYGNPKPRVFRLEEDEALINRLGFNNVGSKKASENINNNIPKGLLGINIGPNKNTKNRLDDYLNCFRSLSNLSDYITINISSPNTENLRSFHNPKELDELLNAINEEKSKINASVKIAVKIAPDLKSSDLDVLGNILLKNNIK

SEQ ID NO: 97123 - protein, 147 aa, Unknown
  Bacterial polypetide isolated from the Sargasso Sea
MFSIFRPLIFSLDPETAHDLAINSLKLNVLPKNIFQVENEEILETNLFKEALPNPIGLAAGFDKSAEVYNSLFKLGYGFVEVGTVTPKRQLGNPKPRIFRLEKDKALINRLGFNNHGSEIVSKRISENLPSGFLGINIGPNKDTKKK

SEQ ID NO: 97124 - protein, 249 aa, Unknown
  Bacterial polypetide isolated from the Sargasso Sea
MAEVYNPLFKLGFGFVEVGTVTPKSQYGNEKPRVFRLEEDKALINRLGFNNSGAEKIYSRIASNKPNGLLGINIGPNKNSENRLEDYIICVRKFCNIADYLTINISSPNTENLRDYHNHKQLNELLESINNEKSNLNSKTPIAVKVSPDIDDENIEKISENLIKHNVELIIVSNTTDSNRKNLININKLEKGGLSGKPLENLSNLIINKFYKKLNNKVKIVGVGGVDSGKSAYEKIINGASLIQLYTGM

SEQ ID NO: 97125 - protein, 161 aa, Unknown
  Bacterial polypetide isolated from the Sargasso Sea
DLRALQEKEPLMELLSHLQQLNINKEKRKPILLKIAPDLSDHQLDDIIEIVQHTKLDGIIATNTTIDRSNLIDKSKADKIGTGGLSGTPLKDRATQVIKYISDKTNGSLPIIGVGGIHSGEDAVEKLKAGASLVQIYTGFIYEGPGLVKDINQSIRNYENN

SEQ ID NO: 97126 - protein, 205 aa, Unknown
  Bacterial polypetide isolated from the Sargasso Sea
MYKLVRKFLFLFDAEEIHELSTKLIKLFNFIPFSSFLLRKCYLISDKSLERELFGIKFKNPIGLAAGFDKNATLFNDFRNFGFGFIEIGTVTPLPQEGNPKKRIFRLSKDEALINRLGFNNSGVEKIKKNLNRKKNVIIGANIGRNSFTSNEEAHFDYIKCYNELYPYVDYFAINISSPNTKGLRDLHNKDLLEPLIKKITSLNY

SEQ ID NO: 97127 - protein, 287 aa, Unknown
  Bacterial polypetide isolated from the Sargasso Sea
LKFNFVPNILAEDQNNPLFKSKLFNKEIENPIGMAAGFDKNAEVYNSLFKLGFGFVEVGTVTPLKQYGNPKPRVFRLVEDEALINRLGFNNLGAQNIASRIKKNDPTGLLGINIGPNKDTKERIVDYIDCLKIFHSLADYITINISSPNTQDLRNLHDQKKLNELLETINKEKKNLKSQTPISVKVSPDLQNEEIKSICEVLLKNNVDAIIISNTSDATRNELKNVQSHQKGGLSGKPIQSKSSELINKFYKILNGKIKIIGVGGVDSGKSAYDKFLAGANYIQLYT

SEQ ID NO: 97128 - protein, 239 aa, Unknown
  Bacterial polypetide isolated from the Sargasso Sea
MFSVLRPFLFNLDPETAHDLAIKSLKFNPIPEKVFQVKDEQMLNINLLGKNFPNPIGLAAGFDKSAEAYNALLKLGFGFVEIGTVTPLKQLGNPKPRIFRLENDDALINRLGFNNDGMEVIKNRINSNKKKGILGINIGPNKNTKNQKNDFCLGLNNFFDIADYITVNISSPNTEGLRDFHDREKLEELLLALNKIKKENKTNIPLLLKVSPDIEDNHISEIVDVAIKNNISAIILTNT

SEQ ID NO: 97129 - protein, 231 aa, Unknown
  Bacterial polypetide isolated from the Sargasso Sea
MHTNIKGLSFSNPLGIAAGFDKNAELIDPLLKIGFGFVECGTVTPLPQFGNPKPRVFRLKQDNAIINRLGFNNKGEKRFVKNLISAKKTGIVGSNIGPNKNSKNFIDDYLKIYRKISVSCDYVAINVSSPNTIALRELQRKEYLEVLLREVSQIRDEEKNRKPIMLKIDPDNTNDHYSMILNLVDKYKIDGIIATNTSLSRPEILRDLNKKREGGLSGTPIKDLSDKVLKF

SEQ ID NO: 97130 - protein, 229 aa, Unknown
  Bacterial polypetide isolated from the Sargasso Sea
MFNILRPLIFKFSPEVAHSLAIKALKLNNITYTKPKDNHMLETTFCEKKLSSPIGVAAGFDKNAEVYNPLFNLGFGFVEVGTITPKPQFGNPKPRVFRLEEDEALINRLGFNNSGSEQISQTIKENNKKGFLGINIGPNKDSTNRIDDYLICFRKFYNLADYITINISSPNTENLRDFHKQDELNSLIDKLKNEKKELNSNIPLAIKVSPDLNDDQINEVSKIILEQEI

SEQ ID NO: 97131 - protein, 281 aa, Unknown
  Bacterial polypetide isolated from the Sargasso Sea
AGLDKNAVAVDGLAAMGFGSIEVGTVTPRPQPGNPKPRLFRLTEQLAIINRFGFNNQGVDAMLERLDGVRYQGVLGINIGKNAVTPVENAVDDYLYCLRKVYDRASYVTVNLSSPNTPGLRTLQYGEALKVLLGQIKQCQQQLAAERGRYVPIAIKIAPDMTAEEVTLVGATLLEEGMDAVIATNTTLDRSAVADSPYANEAGGLSGAPLTDMSTEVIRLLADELKGRTPIIGVGGIFSGADAADKIAAGASLVQLYSGFIYRGPELVRECADAIAVMPQP

SEQ ID NO: 97132 - protein, 186 aa, Unknown
  Bacterial polypetide isolated from the Sargasso Sea
MFSFFKPYIFSLDPEVAHDLAIKSLKFNVLPKSIFSVHDEEMLETKLFNSKLPNPIGLAAGFDKSAEVYNSLFKLGYGFVEVGTITPKRQLGNPKPRIFRLEKDQALINRLGFNNHGSETISRRIAGNLPSGFLGINIGPNKDTLNKEEDYYICLSKLSSFAGYLTINISSPNTEGLRDFHDQKEL

SEQ ID NO: 97133 - protein, 222 aa, Unknown
  Bacterial polypetide isolated from the Sargasso Sea
MYKLVRKFLFLFDAEEIHELSTKLIKLFNFIPFSSFLLRKCYLISDKSLEKELFGIKFNNPIGLAAGFDKNAILYNDFRNFGFGFIEIGTVTPLPQDGNPKKRIFRLSEDEALINRLGFNNSGVEKIKKNLNRKKNVIIGANIGRNSFTSNEEAHLDYIKCYNELYPYVDYFAINISSPNTKGLRDLHDKYLLEPLIKKITSLNYSKGNPKPILLKISPDVA

SEQ ID NO: 97134 - protein, 241 aa, Unknown
  Bacterial polypetide isolated from the Sargasso Sea
MLETSLLGKKISNPIGLAAGFDKSAEVYNSLFKFGFGFIEVGTVTPKQQLGNPKPRIFRLESDQALINRLGFNNHGSEIVSKRISSNYPDGFLGINIGPNKETKTKENDYYICLSRLGMYAGYITINISSPNTEGLRDFHDQEEMKKLLSGINKIVKKEKIDCPIAIKISPDINDNEISKIVELVSSHKIQGLIVSNTSDSNRDNLSDIKRHEAGGLSGQPLKDISTNLIKKFFKETKGKI

SEQ ID NO: 97135 - protein, 218 aa, Unknown
  Bacterial polypetide isolated from the Sargasso Sea
KNKDTPLEHAVEDYLKGLSATHAWADYFCINISSPNTENLRQLQEGDQLSRLLDQLCSQREMLDREAGKKTPLLIKLAPDWEKEALQQSIERIKTSPLDGVIATNTTISREGLTSSLARESGGLSGKPLLKSSNKVIKTLYREIGAHIPIIGVGGIFTAEDAYAKIKAGASAVQVYTGLVYQGPGIVREIKKGLVRLLRQDGLPNLSAAIGLDEKTAV

SEQ ID NO: 97136 - protein, 294 aa, Unknown
  Bacterial polypetide isolated from the Sargasso Sea
RPFIFNLDPETAHDLAIKSLKYNVLPKSLFTVEDEEILNTKLFGKIIDNPIGLAAGFDKSAEVYNEIFKIGFGFVEVGTVTPKKQYGNQKPRVFRLEKDQALINRLGFNNDGSDTIKKRIEHNTPDGLLGINIGPNKDTDNMYNDFLSCAKTFFPIGDYITINISSPNTEGLRNFHEKENLEKLLIQVNEIRKESNFKKSFLLKISPDLDESSINNIVDLSLNNNINGIILTNTSDKNRDKLIDNQKNEKGGLSGQPIKDLSTKIIKKFYQKLGRKIPIIGVGGVDSGEAAFEK

SEQ ID NO: 97137 - protein, 161 aa, Unknown
  Bacterial polypetide isolated from the Sargasso Sea
MLVNLLRLFPPETAHEITIKFLKSKFNLKKKHVQIHKCLQQTILGINFKNPIGLAAGFDKNAEVINSMLSYGFGFIEVGTVTPKKQLGNEKPRVFRLLEDEAIINHLGFNNKGSEKILSNLKSFYEHKNSNEIVGINIGKNKSTQNDIDDYLYCVEKLWYL

SEQ ID NO: 97138 - protein, 128 aa, Unknown
  Bacterial polypetide isolated from the Sargasso Sea
MFSFLRPFIFSLDPEKAHDLAIKSLKYNFLPQNLFQVDDEEILNTNLFGKKIQNPIGLAAGFDKSAEVYNEIFKLGFGFVEVGTITPKEQYGNKKPRMFRLEKDQALINRLGFNNDGSEIVKNRIEKI

SEQ ID NO: 97139 - protein, 277 aa, Unknown
  Bacterial polypetide isolated from the Sargasso Sea
DAEVYNPLFKLGFGFVEVGTVTPKIQYGNEKPRVFRLEEDNALINRLGFNNTGAEKVYSRISLELPKGLLGINIGPNKNSKNRLEDYLICLRKFYKIADYLTINISSPNTDNLRDFHNEKELDELLKSVINEKNNLNTKVPIAVKVSPDIDDKNVEKISEILIKHNIEIIIVSNTTDRNRENLVNINKLEKGGLSGKPLEKISNLLINKFYKNLNKKVIIIGAGGIDSGQSAFEKIINGASLIQLYTGMVYQGPNIVNKISSELIDILKKKRISKHI

SEQ ID NO: 97140 - protein, 288 aa, Unknown
  Bacterial polypetide isolated from the Sargasso Sea
MYSKLRSLIFKLDPELAHILAIKALKFNYVPKINLQKNKILETNIFGKVIPNPIGVAAGFDKDAEVYNSLFRLGFGFVEVGTITPKKQYGNPKPRVFRLEEDEALINRLGFNSSGADIVSSRIQNNIPKGLLGINIGPNKDTNNRLEDYLVCLRKFYNIGDYLTINISSPNTENLRSFHNLKELDQLLKSIEKEKEILKTKIPVALKISPDIDEKNIIEIVELITKYKLEAIIISNTTDGNRENLKNINKLEKGGLSGKPLENFSNILINKFYKLLNNKIKIIGVGGV

SEQ ID NO: 97141 - protein, 315 aa, Unknown
  Bacterial polypetide isolated from the Sargasso Sea
GAFYQRWLGPVLANDEGLDAEQLSRTALIALGQASLRRQWPLVSTVLEGLAGDLQRRDLRLEQVLFGCRFPNPVGLAAGFDKNGVAAGLWDRFGFGFAEVGTVTWHGQPGNPRPRLFRLAQEQAALNRMGFNNDGAQALRRTLERQRLDPPGRRPAVLGINVGKSKVTALEQAPEDYASTLELLAPLADYAVINVSSPNTPGLRDLQDSSQLRRLVERLRRLPACPPLLVKIAPDLEDEAIDGIARLAFEEGLAGVIAVNTSLDRLGLEQRRLLQTGRTLAEEAGGLSGAPLRQRALEVIRRLRASAGPALTLIG

SEQ ID NO: 97142 - protein, 288 aa, Unknown
  Bacterial polypetide isolated from the Sargasso Sea
IWEKIDNPIGLAAGFDKNAEVYNSIFKLGFGFVEVGTVTPLKQYGNPKPRVFRLAEDQALINRLGFNNLGVENVSSRISMNKPKGLIGVNLGPNKDTDNRLNDYLIGLRAFHNLVDYITINISSPNTENLREFHEENKFDELMTLIFNEREKLNSNIPIVLKISPDVSEDKIDKITSILINHKVKAVIISNTTEANRENLKNISKYQKGGLSGKPLEQKSNILISKFYSFLNGKIDIIGVGGIDSGKSAYDKFLAGASYLQLYTGMVYQGPNIVSKIKKELKEILIDK

SEQ ID NO: 97143 - protein, 268 aa, Unknown
  Bacterial polypetide isolated from the Sargasso Sea
AAGFDKNAEVYNPLFKLGFGFVEVGTVTPLKQYGNEKPRVFRLVEDQALINRLGFNNQGSDTILSRIKSNKKLGMLGINIGPNKDSKNRLKDYLIGLEKFYETADYITINISSPNTENLRNFHDTNKLKELLNSILEKKKELKTEIPIAVKISPDINENQINLISEILLENNVSAIIISNTSDTSRETLQNIQRHQKGGLSGKPIEKKSNFLISKFYTLVKGKIKIIGVGGVDSGKAAYDKFLLGANYVQLYTGMVFQGPNIASMIKK

SEQ ID NO: 97144 - protein, 149 aa, Unknown
  Bacterial polypetide isolated from the Sargasso Sea
MKILLSFFKLFSPETSHFLALHSLKILHKTRLLNIFFSKFEDKDFQFLGLTFKNRLGTAAGLDKNGDYIDCLGDLGFGFLEVGTVTPLPQPGNPKPRVFRLSNENAVINRLGFNNKGVDHLVNNLKNRKYKGIVGVNIGANKSSKGQQR

SEQ ID NO: 97145 - protein, 310 aa, Unknown
  Bacterial polypetide isolated from the Sargasso Sea
MYYPFVRKALFQLDPERAHELTFQQLRRITGTPLEALVRQKVPAKPVTCMGLTFKNPLGLAAGLDKDGECIDALGAMGFGSIEIGTVTPRPQPGNDKPRLFRLVDAEGLINRMGFNNHGVDNLVENVKKSHFDGILGINIGKNKDTPVENGKDDYLICMEKVYAYAGYIAINISSPNTPGLRTLQYGEALDDLLTAIKNKQNDLQAIHHKYVPVAVKIAPDLSVEELIQVADSLVRHNIDGVIATNTTLDRSLVQGMKNCDQMGGLSGRPLQLKSTEIIRQLSQELKGQLPIIGVGGIDSVIAAREKIAA

SEQ ID NO: 97146 - protein, 274 aa, Unknown
  Bacterial polypetide isolated from the Sargasso Sea
DKNGDYIDAFARLGFGFIEIGTITPRPQPGNPKPRLFRLPEERAIINRMGFNNKGVDHLVEQVKKAKFKGVLGINIGKNFDTAVEDATSDYLICLEKVYQYATYITVNISSPNTPGLRTLQYGDALRDLLMPLKARQAELAKEHGYKPIFVKIAPDMEDAEIDTVAQTLLDCEIDGVIATNTTLSREGVEGSKHGAEAGGLSGAPVTDLSTMTIERLCGVLGDRLPVIGVGGILEGEDAVDKVRAGASLVQVYSGFIYRGPELIGECVRSLSKA

SEQ ID NO: 97147 - protein, 229 aa, Unknown
  Bacterial polypetide isolated from the Sargasso Sea
MYSVLRSLIFKLDPELSHSLAIKSLKFNYSPVKNVIIDSSIETNFFGKKINNPIGVAAGFDKNAEVYNPLYKLGFGFVEVGTVTPKKQYGNSKPRVFRLEEDEALINRLGFNNSGSDSIGSRINSYPPKGVLGINIGPNMNTTNKLEDYLICLRKFHKLCDYLTINISSPNTENLRNFHNKSELDQLLKTIHEEKKILKSKVLIALKISPDIEEKNISNISDLLLKYEV

SEQ ID NO: 97148 - protein, 346 aa, Unknown
  Bacterial polypetide isolated from the Sargasso Sea
MFNKIRPLIFKFSPEVAHSLAIKTLKLNSLPKKKIKNKTVLETSIFNKILENPIGVAAGFDKNAEVYNPLFNLGFGFVEVGTITPEPQYGNPKPRVFRLEEDEALINRLGFNNSGSEEIYKRIESNKPYGLLGVNIGPNKTSDNRIQDYVKCFRKFISVADYITINISSPNTENLRNFHNQEEMNNLLSEIQKEKKKLQSNLPIAVKISPDINFNSIDEICESLIKHSIEILIVSNTSEKNRDNLKNINKLEKGGLSGAPIENKSNELINLFFNNLKNKIKIIGVGGVSTGKGAYEKIIRGASLIQLYTGMVYRGPDIANKISQELIEILTKDGIKNISEIVGSKN

SEQ ID NO: 97149 - protein, 210 aa, Unknown
  Bacterial polypetide isolated from the Sargasso Sea
MFSILRPYIFSLDPEVAHDLAIKSLKANILPKSFFYVEDEQMLKINLLGKTISNPIGLAAGFDKSAEVYNSLFKFGFGFIEVGTITPKQQLGNPKPRIFRLEKDQALINRLGFNNHGSETVSNRISNNHPDGFLGINIGPNKETKNKENDYYICLSRLAIHAGYITINISSPNTEGLRDFHDQNEMKKLLSGINKIKKEKKINCPIAIKI

SEQ ID NO: 97150 - protein, 234 aa, Unknown
  Bacterial polypetide isolated from the Sargasso Sea
MAIKSLKFNFVPNVLEEDKNNPLFKTKLFNKDLENPIGMAAGFDKNAEVYNTLFKLGFGFVEVGTVTPLKQYGNPKPRVFRLVEDEALINRLGFNNLGAKNIVDRIKSNKQTGLLGINIGPNKDSENRLEDYLNCFKTFYDVADYITINISSPNTEDLRSFHEDTKLNELLEAVNKEKATLGSKIPIAVKVSPDIDDKQIKKITEVLLSNNIEVVVISNTSDSTRERLNNIQKH

SEQ ID NO: 97151 - protein, 375 aa, Unknown
  Bacterial polypetide isolated from the Sargasso Sea
MITPVLKKDSGIDAEYLTNLSLSLLSFSSRKYNWPVVSSILKNLNKEFSVVDKRLTQNICGINFCNPIGLAAGFDKNGNAANIWKDFGFGFAELGTVTKFAQNGNSKPRLFRLAKEEAALNRMGFNNNGAENLVKNFVEQGIEFKKNRKNICLGINFGKSKITDLSQAKDDYLTSLKLLIPYCDYAAINVSSPNTEGLRKLQDPILLKELIKEIKNLPSCPPLFVKIAPDLSFKDIEDICQLIIEENIDGIIATNTSIDRLGLENRKIMQTGLLLSEENGGLSGRPLQKKANQIIKHIHNIDKKIILIGVGGIDSPESAWERICSGASLIQLYTGWIYKGPQLVPNILQGIIKQLNIHKLSNIKEAIGSDLKWIE

SEQ ID NO: 97152 - protein, 297 aa, Unknown
  Bacterial polypetide isolated from the Sargasso Sea
NPIGMAAGFDKNAEVYNSLFKLGFGFVEVGTITPLKQYGNPKPRVFRLEEDEALINRLGFNNDGARNIMNRIKSNQQKGLLGVNIGPNKDTKDRIADYLNCLNIFSEVADYITINISSPNTQDLRNFHNQTKLDKLLRNIEIEKKKMNSKIPIVVKVSPDVNDKEINEISDVLLNNDIEGIIISNTSDSTRNDLINIQKHQKGGLSGKPIKEKSTLLINKFYNLIKGRIKIIGVGGVDSGASTYEKFLAGANYVQLYTGMVYRGPNIVSIIKKELKELLMRDGVKNFSEIVGNKTIS

SEQ ID NO: 97153 - protein, 333 aa, Unknown
  Bacterial polypetide isolated from the Sargasso Sea
GLASSKDLRGNEFSETISNIFELRFRNPIGLAAGFDKDGEVFDQLSQIGPGFVEAGTLTLEPQIGNPRPRVFRLSSDNAVINRLGFNNKGIMGGLERLSKRRDKSVVLGVNIGINKSTQTPVEDYVECLSLLRNIADYVTVNVSSPNTPGLRSFQQVEKLEELLNTLITASWENSDSNRRIPLLLKIAPDLTNEDINEIVDVAVSSGISGIIISNTTISRPKNLLDAKQGEPGGLSGAPLFELSTQKLAQTFLAAKQRIPIIGVGGVESAETAYTKVKAGASLIQLYTALIYKGPRLFSEINKGLSEALKNDNIDHISEAVGIEADYWASREV

SEQ ID NO: 97154 - protein, 336 aa, Unknown
  Bacterial polypetide isolated from the Sargasso Sea
KFDPELAHNLAIKALKVKYISLNKPRKYSSLETAVLGKKILNPIGLAAGFDKDAEVYNSLFKLGFGFVEVGTVTPLKQFGNEKPRVFRLEEDEALINRLGFNNSGVEKISSRIKLNPPNGLFGINIGPNKDTKNRLEDYLICLKKIYDIADYITINISSPNTENLRDLHQEVELDQLLSSVQNEKKKLNSKIPIAVKISPDIKENEIEKISEILIKNNIFAAIISNSSDSNRQNLKNINKLERGGLSGKPIEKKSNDLISKFYKYLKDKVIIIGVGGVDSGKSVYEKITNGASLVQLYTGMIYKGPNIVSKISEDLNDILKKDGIKNISEVVGIKK

SEQ ID NO: 97155 - protein, 323 aa, Unknown
  Bacterial polypetide isolated from the Sargasso Sea
NTIPSKQLFSVTGEEILRTKLLGKEINNPIGLAAGFDKSAEVYNEIFKIGFGFVEVGTVTPKKQFGNEKPRIFRLEKDQALINRLGFNNDGSEIVKKRIENNIPSSLLGINIGPNKNTVNMTDDFLRCAEIFFPIGDYITINISSPNTSGLRDFHDEDALKKLLTKINEVREKSNFNKSFLLKISPDLDSSQIPVIVKLILEYKIDGVILTNTTNKNRDNLKDPNSKEIGGLSGKPIRDLSTEFVKKFYRNLNGKIPIIGVGGIDSGETAFEKIAAGASAVQLYTGLIYKGPNIVKVIKKDLIKILNNKGFKNISEAVGTSSH

SEQ ID NO: 97156 - protein, 346 aa, Unknown
  Bacterial polypetide isolated from the Sargasso Sea
MFSKIRSLIFKLDPEIAHDLAIKALKFNLVSQNKIKNNNLIQTEIFGKTIPNPVGIAAGFDKDAEVYNPLFKLGFGFVEVGTVTPIYQYGNHKPRIFRLEEDMALINRLGFNNSGSEKVRSRIMSNSPKGLFGINIGPNKDTNNRLEDYLICLRKFYNLADYLTINISSPNTENLRSFHNRDELNELLSLIEKEKKILKTKVPIIVKISPDIKDDNINMISDLLLKHNVKAIIISNTTDKNRENLININKLEKGGLSGKPLEKRSNELINKFYKILQNKIKIIGVGGVDSGQSAYQKIINGATLVQLYTGMIYQGPSIASKISEELINILDKERVKNISDVVGSKN

SEQ ID NO: 97157 - protein, 184 aa, Unknown
  Bacterial polypetide isolated from the Sargasso Sea
YLHCLERVYPHASYVTVNISSPNTKNLRQLQGASELDSLLGTLRGAQQRLADQHKRYVPVALKIAPDLDDDQIANVADALLRHKMDGVIATNTTISREAVVGLAHAEEAGGLSGQPVREGSTRVIRALHSLLGDAVPIIGVGGILAGEHAREKIDAGAQLVQLYTGLIYRGPALIAECARALAR

SEQ ID NO: 97158 - protein, 294 aa, Unknown
  Bacterial polypetide isolated from the Sargasso Sea
PIGLAAGFDKSAEVYNSLFKLGYGFVEVGTVTPKRQLGNPKPRVFRLEKDQALINRLGFNNHGSETVSRRISNNLPTGFLGINVGPNKDTANKEEDYYLCLSRLSSYAGYLTINISSPNTEGLRNFHDQKELEKLLIGINKIKKEKNISKPLVLKLSPDINDGEISKIIELVIKYKIDGIIVSNTTDSNRENLHDVQRFEKGGLSGKPLKDISTDLIKKFYLETRGKIQIIGVGGVDTGKATFEKISAGANAVQLYTGMVYKGPGIVKEMKKELISILKKENIKNISSAVGINA

SEQ ID NO: 97159 - protein, 374 aa, Unknown
  Bacterial polypetide isolated from the Sargasso Sea
MIWKFITFFVRKLDPEIAHKITIKFLQLGLHPKLNKIGIPINIGNLIFKNFIGVAAGFDKNAEVINKINFLNFGFTEVGTITPMPQYGNPKPRIFRLEKDKAIINRNGFNNLGMLKAKKKLEHYRKKFPVGSDFLVGINIGPNKDSEDKFSDYKVLAKNLSKFADYISINVSSPNTPNLREFQNKENLEKVINFVKDGIPTSKTFNKKLPIFLKIAPDINNQTLKSIIETAHSQKIFGLIISNTTLDRKSNLKSKKAYELGGLSGKPLFKKSTDILSQANKIIKNNNYKLFLIAAGGVSDSKTAYVKILCGAHLVQLYSSLTFEGPLVANQIISGILKLMKRDKIKNIIDIVGVIDNPKEAMNVASNGFKNYKS

SEQ ID NO: 97160 - protein, 341 aa, Unknown
  Bacterial polypetide isolated from the Sargasso Sea
MLPPEIAHSITIKTLKYLRLKSKNFDDQILSQHILGLDFPNPIGLAAGFDKNAEVMNSMFSFGFGFVEVGTVTPMPQYGNTKPRVFRLTEDKAIINSLGFNNNGSKKIKKNLNNNRNAEFNNKIIGINIGKNKNSINAIDDYLYLIQDLGHLASYITVNISSPNTAGLRDMQLRGNIEKLIKKIVKKRDEIDSINNKPILIKLSPDLNEDQLRDIALISLANNIDGLILTNTTTNRNQKLLSQYKIKNGGLSGQPLFERSNQTLRKMFTLTNGQIPLIGVGGIFSGSDCYAKIKSGASLVQLYTSLVYSGPGLIANIKNELIDLIKTDGYKNISEVIGKSV

SEQ ID NO: 97161 - protein, 346 aa, Unknown
  Bacterial polypetide isolated from the Sargasso Sea
MFNLIRPFIFKFSPEVAHSLAIKALKLNQIPAIDKTTRVTIQTKFLNKTLNSPLGVAAGFDKNAEVYNPLYKLGFGFVEVGTITPKPQIGNPKPRVFRLEEDEALINRLGFNNIGSEESKKNIENNSPNGLLGINIGPNKDTENRVEDYLICFRKFHNLADYITINISSPNTENLRNFHKNEELDNLLKCINEEKKNLNSNVPIAVKVSPDIDEKSIDEISELFLKYNVQIVIVSNTTDRNRENISNINKLEKGGLSGKPLENISNELINKFFKLVGKKILIIGVGGVDSADGVFNKIVSGATLVQLYTGMVYKGPTIASKINKDLDEIVKREGFKNISEAIGTKN

SEQ ID NO: 97162 - protein, 339 aa, Unknown
  Bacterial polypetide isolated from the Sargasso Sea
MFYKIAQKVMFQMDPERAHNLAIGSLRLTGNSPLNAFYAQHIAPAPVSFMGLTFPNPVGLAAGMDKDGESIDAFHAMGFGHVEVGTVTPRPQPGNDLPRLFRLKPAKAIINRMGFNNKGVDNLVKNLIAKKTDIMVGVNIGKNKDTPVEQGKDDYLICMDKVYPYAAYIAVNISSPNTPGLRSLQYGDLLDELLSALKTKQLELAEKHKKYVPIALKIAPDLTTEEIENIAQALIKNQFDGAIATNTTLTRDGVSGLTNANESGGLSGKPLTELSTKVIKQLATSLQGKLPIIGVGGINSAEDALAKFDAGATMVQIYSGFIYQGPKLIKEIVEAYRLK

SEQ ID NO: 97163 - protein, 209 aa, Unknown
  Bacterial polypetide isolated from the Sargasso Sea
MFSILRPFLFNLDPETAHDLAIKSLKFNPLPKKMFEVEDEQILNIKLFGKNFPNPIGLAAGFDKSAEAFNPLLKLGFGFVEIGTVTPLKQYGNPKPRIFRLEDDNALINRLGFNNDGIEIIKDRIISNKKKGILGVNIGPNKETKDQKNDFCLGLKNFFNLADYITVNISSPNTEGLRDFHDQEKLTDLITTLNKIKKDNKTNIPLLLK

SEQ ID NO: 97164 - protein, 356 aa, Unknown
  Bacterial polypetide isolated from the Sargasso Sea
MSFIPAVRPIPVFSSLYPLARASLFKMDAEDAHHLTLRALGAAGRTGLACALSARVPDAPRTVMGLTFRNPVGLAAGLDKDGAAIDGLAALGFGFIEVGTVTPRPQPGNPRPRMFRLPQAEALINRMGFNNHGVDQFVKNVQAARYRGILGLNIGKNADTPIERAAEDYLYCLERVYPFASYVTINISSPNTKNLRQLQGAGELDALLAALKDKQQRLADLHGKLVPLALKIAPDLDDEQVKEIGDTLLRHKIEAVIATNTTLSRAAVQGLPHADEAGGLSGRPVFDASNEVIRKLHAEVGSEVPIIGVGGIFSGEDARAKLAAGAALVQLYTGFIYRGPALVAECVKAVARDRTA

SEQ ID NO: 97165 - protein, 349 aa, Unknown
  Bacterial polypetide isolated from the Sargasso Sea
MYNLLKAFLFLFDPEIVHRLTILFLKFIPINKTSIPPELNIKIFGLDFMSPIGLAAGFDKDAEVYDKMLQLGFGFVEVGTVTPKPQRGNPKPRIHRIKKEKAIINSLGFNSIGFENVKENLQNKKIEGIVGINIGANKDSKNFIDDYLSGIEFFSNYISYITINISSPNTPGLRDLHLANNLKNLLKNIENLRKKNEIRTVPIFVKISPDLNDDELGVMCGIFLEFNVDGIIISNTTLERPFKGFGINLKGGLSGRLLYQTSTDQLKKVYEKTKGKIPLIGVGGISSAKDAYNKIRNGASLVQLYTGLVYQGPGLIKKINQEISVLLKNDGFDNIKDAVGIDTEIVNDN

SEQ ID NO: 97166 - protein, 222 aa, Unknown
  Bacterial polypetide isolated from the Sargasso Sea
VDHLLERVKAAKFKGVLGINIGKNFDTPVERAVDDYLACLDKVYAHASYVTVNVSSPNTPGLRSLQFGDSLKELLEALRRRQEDLAQEHGKRVPLAIKIAPDMSDEETALVASALLGADMDAVIATNTTLSREGVEGLAHGDEAGGLSGAPVRDKSTHIVKVLAGELSGRLPIIAVGGITEGRHAAEKIAAGASLVQIYSGFIYKGPALIREAVDAIAALRK

SEQ ID NO: 97167 - protein, 246 aa, Unknown
  Bacterial polypetide isolated from the Sargasso Sea
MYSNLRSLIFKLDPEKAHTLAIQSLKFNLVSNVFDENKNDPIFKTQIFGKDLSNPIGIAAGFDKNAEVYNPLFKLGFGFVEVGTVTPLKQYGNEKPRVFRLVEDQALINRLGFNNQGSETILNRIKSNKKNGILGVNVGPNKDSDNRLNDYLIGLEKFYEVADYVTINISSPNTANLRNFHDENKLKELLKSIKDKKNELKTNIPIAVKISPDIDLKQIELISEILLENEISAIIISNTSERTRDD

SEQ ID NO: 97168 - protein, 346 aa, Unknown
  Bacterial polypetide isolated from the Sargasso Sea
MFNKLRSIIFKLDPELAHNLAIKALKYNYIPNNKIPANSLIETEIFGKKISNPIGLAAGFDKDAEVYNSFYKLGFGFVEVGTITPLKQYGNPKPRVFRLEEDEALINRLGFNNSGANKVSSRIKSSPPNGLFGINIGPNKDTKNRVEDYLIGLRKFYNLADYLTVNISSPNTENLRSFHNSNELGELLSEIENEKKLLKSNIPIVVKISPDIHGNDIEKISELLLKYNISSVIISNSTDSSRENLKNINKLEKGGLSGKPLEVKSNLLINKFFKILRNKIKIIGVGGVDSGKSAYEKIINGANLVQIYTGMVYQGPNIASKIAKELIEITKNHSVKNISELVGIKK

SEQ ID NO: 97169 - protein, 238 aa, Unknown
  Bacterial polypetide isolated from the Sargasso Sea
MFSKFRNLIFKIDPEIAHNLAIKSLKFNFTQNIFDENKKNPMFQTTLFGKKLDNPIGLAAGFDKNAEVYNAIFNLGFGFVEVGTVTPLKQYGNPKPRVFRLVEDQALINRLGFNNLGSENVSSRIRLNKPKGLIGVNLGPNKDTDDRLNDYLVGFRAFHDLVDYITINISSPNTENLREFHEEKKFDELMTLIFNEREKLNSNIPIVVKISPDIKEDKIEKITSLLINHKVKAVIIRT

SEQ ID NO: 97170 - protein, 345 aa, Unknown
  Bacterial polypetide isolated from the Sargasso Sea
MFDKIRPLIFKLDPELAHTLAIKALKTNLFLKQKISEVSYLKSELFGREIKNPIGVAAGFDKDAEVYNSLFNLGFGFVEVGTVTPLKQYGNKKPRVFRLENDKALINRLGFNNSGSDIVSDRIKKNKPIGILGVNIGPNWNSKDRVGDYLIGFNKFYKLADYITINISSPNTENLRDFHNLDELGNLLDKIFSEKKKLNSDIPIALKISPDIDNTIVKDISKILIQYKVNALIVSNTTDQNRDNLKDHQKFQKGGLSGKPLNDISNKLINNFFKNLNGQIKIIGVGGVESGETAYKKFLSGANFVQLYTGMVFRGPKIAIKINEELKKILKEKKIKNYSDIIGKL

SEQ ID NO: 97171 - protein, 307 aa, Unknown
  Bacterial polypetide isolated from the Sargasso Sea
MIETEIFGKKISNPIGLAAGFDKDAEVYNSLYKLGFGFVEVGTITPLKQYGNPKPRVFRLEEDEALINRLGFNSSGADVVSSRIRSTPPNGLFGINIGPNKDTKNRVEDYLINLRKFYNLAHYLTVNISSPNTENLRSFHNSNELTELLSEIENEKKILKSNIPIVVKISPDIYDNDIEKISELLLKYNISSVIISNSTESNRENLKNINKLEKGGLSGKPLEVKSNLLINKFYKTLRSKIKIIGVGGVDSGKSAYEKIINGANLVQLYTGMVYQGPNIASKITKELIEITKNHSVKNISELVGIKK

SEQ ID NO: 97172 - protein, 346 aa, Unknown
  Bacterial polypetide isolated from the Sargasso Sea
MFSKIRSLIFKLDPETAHDLAIKALKFNFISQNKIKNNESIKTEIFGKIVPNPIGIAAGFDKDAEVYNSLFKLGFGFVEVGTVTPINQYGNPKPRIFRLEEDEALINRLGFNNSGSEKVSTRIISNPPKGLFGINIGPNKDTKSRIEDFLICLNKFYNLADYLTINISSPNTENLRSFHNENELDELLSLIEKEKKKLKTSVPIVVKISPDIEDENINKISDLLIKYKVKAVIISNTTDKNRHNLSNINKLEKGGLSGKPLEKKSNELINKFYKILKNEVKIIGVGGVDSGQSAYQKIINGASLIQLYTGMIYQGPNIVSKINEELINILDKEGVQNISDIVGSKK

SEQ ID NO: 97173 - protein, 313 aa, Unknown
  Bacterial polypetide isolated from the Sargasso Sea
KNDFSILSNDINGLSFKNPIGMAAGFDKNAEVINSLFNLGFGFTECGTVTPRPQYGNVKPRVFRLASDKAIINRLGFNNNGIEKFLMNMSKSNNNGVLGANIGPNKDTENFVDDYINLYTQVVDYSDYVTVNVSSPNTKNLREIQEHDTLNTLLSELSQLRENMKTQKKIILKIDPDSTKQHYSMILNLVQKYKIDGVIATNTTISRPQDLRDEYKDEEGGISGQPLKELSNKVLGFLSKETNGELLLIGVGGISNAEDVYTKIKLGASLVQLYTALTFNGPQMINNIKKDLSYLLQNDGYKNISDAVGSIHS

SEQ ID NO: 97174 - protein, 288 aa, Unknown
  Bacterial polypetide isolated from the Sargasso Sea
MFNILRPLIFRFSPEVAHSLAIKALKLNNISYSKPKENHILETTFCEKKLSSPIGVAAGFDKNAEVYNQLFNLGFGFVEVGTITPKPQFGNPKPRVFRLEEDEALINRLGFNNSGSERISQTIKENNKKGFLGINIGPNKDTKDRVEDYLICFRKFYNLADYITINISSPNTENLRDFHNQDELNSLIDKLKNEKKELNSNIPLAIKVSPDLNDDQINEVSKIIMEQEIAIIIVSNTTDKNRENLKNINKLEKGGLSGKPIQKISNEAISKFYKILKDKTKIIGSGWV

SEQ ID NO: 97175 - protein, 350 aa, Unknown
  Bacterial polypetide isolated from the Sargasso Sea
MFSNLRSLIFKIDPERAHFLAIQSLKLNLVSNIFDEHKNDPIFKTKIFNKELNNPIGIAAGFDKNAEVYNPLFKLGFGLVEVGTITPLKQYGNSKPRVFRLVEDQALINRLGFNNHGSDIVLNRIKSNNKQGVLGINIGPNKDSDNRINDYLIGIEKFYEVADYITVNISSPNTENLRNFHDEGKLQDLLKNISEKKKNLKTNIPIVVKISPDISEIQINLISEILLENDISGIIISNTSESSREVLKDIQKHQKGGLSGKPIEKKSNILINKFYNLFKGKIKIIGVGGIDSGQSAYEKFLLGADYIQLYTGMVFQGPNIAGSIKKELKELLIRDGVKNFTEIIGNKTLS

SEQ ID NO: 97176 - protein, 339 aa, Unknown
  Bacterial polypetide isolated from the Sargasso Sea
MFYKIAQKVMFQMDPERAHNLAIGSLKMTGNSPLNAFYAQNIAPAPVSFMGLTFPNPVGLAAGMDKDGESIDAFHAMGFGHVEVGTVTPRPQPGNDLPRLFRLKPAKAIINRMGFNNKGVDNLVKNLIAKKTDIMVGVNIGKNKDTPVEQGKDDYLICMDKVYPYAAYIAVNISSPNTPGLRSLQYGDLLDELLSALKTKQLELAEKHKKYVPIALKIAPDLTTEEIENIAQSLIKNKFDGAIATNTTLTRDGVSGLANANESGGLSGKPLTELSTKVIKQLATCLNGQIPIIGVGGINSAEDALAKFDAGATMVQIYSGFIYQGPKLIKEIVEAYRLK

SEQ ID NO: 97177 - protein, 350 aa, Unknown
  Bacterial polypetide isolated from the Sargasso Sea
MYSNLRSLIFKIDPERAHFLAIQSLKLNLVSNIFDENKNDPILKTKLFNQDLDNPIGIAAGFDKNAEVYNPLFKLGFGFVEVGTVTPLKQYGNEKPRVFRLVEDQALINRLGFNNHGSDTILNRIKSNKKLGVLGVNVGPNKDSNDRLNDYLIGLEKFSEVADYITINISSPNTENLRNFHDENKLKELLKSISEKKKQLKTEIPVAVKISPDINENQIDLISEILLENEISAIIISNTSEASRETLQNIQRHQKGGLSGKPIEKKSNFLISKFYNLLKGKIKIIGVGGVDSGKAAYDKFLLGADYVQLYTGMVFQGPNIAGMIKKDLKELLIRDGVKNFTEIVGNKTVS

SEQ ID NO: 97178 - protein, 336 aa, Unknown
  Bacterial polypetide isolated from the Sargasso Sea
MAHSLTLKGLSLGSRLIPSSNHDDSRLAVEALGLNFSNPLGMAAGFDKNGEVPDALLKLGFGFTEIGTVTPEPQIGNPKPRVFRLVKDQALINRLGFNNNGQKHLVDRLRQRSEVKNGSRRIGVIGVNLGANKESLDRILDYGAGAKALSPYADYLVVNVSSPNTPNLRGLQSAEALSAIINQVRSSMVKEVPVLVKIAPDLKKNEIEEIAEIARITSVNGIIVSNTTIERPKNIQDQHKNEEGGLSGNPLFEPSTRLLSQLYHLTKGQTTLIGVGGVGSAEDVLKKIRSGASLVQLYTALVYKGPGLIKKIKHDLVELLERDGLQNISNAIGIDV

SEQ ID NO: 97179 - protein, 345 aa, Unknown
  Bacterial polypetide isolated from the Sargasso Sea
MFPFLKPFIFGLDPEVAHDLAIKSLKLNVIPENFFKVENENILETNMFDKKLKNPIGMAAGFDKSAEVYNSLYKIGFGFVEVGTITPKRQFGNPKPRIFRLEKDQALINRLGFNNDGLEKISKRISKNKPSKILGVNIGPNKDTRNKIDDFIICLSELHSQADYITINISSPNTEGLRDFHEKKSLSKLLEQINSLKLKKKINKPIFIKISPDIDDKDISQINEIILKHNISGIIISNSTDRNRAGLYDNNKNEEGGLSGLPLKNLSTKLIKRFYRETKGKIQIIGVGGVDSGQSTFEKITSGANAVQLYTGMIYKGPGIVKEIKKELIEILKKEKIKNITAAIG

SEQ ID NO: 97180 - protein, 344 aa, Unknown
  Bacterial polypetide isolated from the Sargasso Sea
MIKNLNPEFSHYVTLQLLKLNLFTGNNFNDPILHQHLFGFDFSNPLGLAAGFDKNAEVIKPLLNLGFGFIEAGTVTPKYQFGNERPRVFRLKEDKAIINHLGFNNKGTTFVKKKLKKLNLSSLSKGIVGINIGKNKETLNDIDDYIYCLQELGPFAHYVTVNISSPNTPGLRELQNRGRIEKLVQTLQKKQEEMNSLENTPIFFKIAPDIDEEQIRDIALISLANNIDGLVISNSTIERADTLKSNLNNEIGGLSGKPLFLKSTMILRKMYTLTNGQIPLIGVGGINNALECYEKIKSGASLVQLYSALTFEGPKIINKILIDLSNLLKTDGYKSIKEAIGKDT

SEQ ID NO: 97181 - protein, 300 aa, Unknown
  Bacterial polypetide isolated from the Sargasso Sea
IDNPIGIAAGFDKNAEVYNSLFKLGFGFVEVGTVTPIKQYGNPKPRVFRLEEDQALINRLGFNSSGAEKVYTNISSNLPNGLFGINIGPNKESKNRFEDYLIGLRRFHKIADYLTINISSPNTEDLRKFHNEEELYKLLNLIINEKNKLKTKIPIAVKVSPDLNDENIDKISELLLKFKIDAAIISNTTEKNRESLNNINKVEKGGLSGKPIEKMSNIIINKFFNKLDNKVKIIGVGGVDSGLSAYEKFLHGASAVQLYTGMVYQGPDIAYKIGKDLIQILKNKNIKSISSVIGKKNNLD

SEQ ID NO: 97182 - protein, 298 aa, Unknown
  Bacterial polypetide isolated from the Sargasso Sea
MFYSLARSLMFCTDAEFSHHLALGSLKHLKNTPASLLWRQDLPKKPVTVAGIHFDNPVGLAAGLDKNADCIDAFGQMGFGFIEVGTVTPRPQVGNDKPRLFRLPEANAIINRMGFNNKGVDYLVENVKKSSYKGVLGINIGKNKDTPNEQGKDDYIECMRKVYAHASYITVNISSPNTPGLRDLQFGDALFDLLQAVKNEQLDLQAQQDKYVPVFVKIAPDMDEVAVQQVAETLLRSKMDGVIATNTTLDKSSVQHLKYGNEMGGLSGLPVQQKSTEIIRQFRAALGPQMPIIGVGGI

SEQ ID NO: 97183 - protein, 349 aa, Unknown
  Bacterial polypetide isolated from the Sargasso Sea
MFSFIRPFIFNLDPEKAHDLAIKSLKFNFLPSNLFSVQGEEILNTSLFGKEISNPIGLAAGFDKSAEVYNEIFKIGFGFVEIGTVTPKQQFGNEKPRVFRLEKDQALINRLGFNNDGSNEIRKRIEANIPSSLLGINIGPNKDTDNMTNDFLKCAEIFFPIGDYITINISSPNTKGLRDFHNEDDLKNLLSKINEIREKSNFKKSFLLKISPDLEDSQISGIVNLILEYKIDGIILTNTTNKNRESLIDVNSKEAGGLSGKPIKELSTEFVKKFYKELNGKIPIIGVGGVDSGESAFEKIAAGASAVQLYTGLIYKGPNIVKEIKKDLIRILKSKGFTNINKAVGSSLN

SEQ ID NO: 97184 - protein, 327 aa, Unknown
  Bacterial polypetide isolated from the Sargasso Sea
MFLKIFKLLPPETAHSISLNSLKLLYKLKLLKFFTKQNFKNNEYYFEGMIFKNQLGTAAGLDKNGDFIDALGELGFGFLEIGTTTPLPQDGNPKPRVFRNYKENSIINRLGFNNKGVDYLVNNLKKRKYKGIVGVNIGANKTSSGKQRIDDFLICLEKVHKFADYITINISSPNTPNLRELHNKENLKILITALENKSNEIKLNIPIFIKISPDESDQILDNIITVVSNSFITGIIATNTTISKSKIINDEFKQIEGGLSGQFLMDESTKRLSYIRNKSNNMPLIGVGGVMSREDFLEKIDAGAHLVQLYTGFIIKGPNLINQILKD

SEQ ID NO: 97185 - protein, 292 aa, Unknown
  Bacterial polypetide isolated from the Sargasso Sea
EIFRFFFQFKDPRLERVVFGIKFNNPIGLAAGFDKDAKFIKEFSNFGFGFIEIGTLTPRAQIGNSKKRVFRLTSDSALVNRLGFNNDGVDAAIKKIKRVKGIIIGGNIGKNRDTPNSEALNDYKYCFIKLHPYVDYFAINLSSPNTQGLRELQEKKNLRKILSGLKKLNLNFKIQKPILLKIDPDLNDDQLTDVIDVVKETKIDGVIASNTTTKRINLKSDINLVSQKGGLSGKPLSKRSTEIINFLHKKSNGSFPIIGVGGVHSPDDAIEKIRAGALLFNYILDLYTKAPF

SEQ ID NO: 97186 - protein, 350 aa, Unknown
  Bacterial polypetide isolated from the Sargasso Sea
MLINLLRLLPPETAHELTINLLRSNLILKRKPTKLFKSLKQTILGINFKNPIGLAAGFDKNAEVINQMFSYGFGFVEIGTVTPKIQLGNEKPRIFRLVEDEAIINHLGFNNKGSEKILSNIKYFYENKHINEIVGINIGKNKSTQSDIDDYLYCVEKLGMFSDYITINISSPNTPGLRDLQLRGRIELLVKKIQAKQSEIKELVKKPIFIKISPDLNDEQLRDIALMSLANNVNGLIISNSTTQRPDTLISSYKNELGGLSGKPIFLNSTILLKKMYSLTNGQITLVGVGGVSSGHECYEKIKAGASLVQLYTALVYKGPKIINKILKELDELIIIDGYQNISEAIGKSS

SEQ ID NO: 97187 - protein, 235 aa, Unknown
  Bacterial polypetide isolated from the Sargasso Sea
MFSILRPLIFNLEPEIAHDLAIQSLKTNLIPKGFFRVEGEEMLETDLLKKRIKNPIGLAAGFDKSAEVYNPLFKLGFGFVEIGTVTPRRQLGNPKPRIFRLEKDKAMINRLGFNNHGADVIASRIEKIKPDGILGVNIGPNKDSLNKLEDYLTALTSLHHISDYITINISSPNTEGLRDFHNKDLMQNLFNQLNKLKSLKKIKKPLMIKISPDIDDKNISEIIELILNLKLMELS

SEQ ID NO: 97188 - protein, 350 aa, Unknown
  Bacterial polypetide isolated from the Sargasso Sea
MFSNLRSLIFKLDPETAHGLAIKSLKFNFVPNVLDKNKNSHLFKTKLFEKEIENPIGMAAGFDKNAEVYNSLFKLGFGFVEVGTVTPLKQYGNPKPRVFRLVEDEALINRLGFNNLGAKNIVDRISSNKQIGLLGINIGPNKDTNDRLKDYVECLKTFHEFADYITINISSPNTEELRNFHDQEKLNSLLNIINSEKTKLNSKIPIVVKVSPDIKDKEIPKISDVLLSNNIKAVILSNTSDSTRDKLNDIQKHQKGGLSGKPIEEKSTMLINKFYKTLGNKIKIIGVGGVDSGISAYNKFLAGASYVQLYTGMVYRGPNIVNLIKKELKELLIRDGVKHYSEIIGKKTTS

SEQ ID NO: 97189 - protein, 204 aa, Unknown
  Bacterial polypetide isolated from the Sargasso Sea
MYSNLRSLIFKIDPERAHFLAIQSLKLNLVSNIFDENKNDPILKTKLFNQHLDNPIGIAAGFDKNAEVYNPLFKLGFGFVEVGTVTPLKQYGNEKPRVFRLVEDQALINRLGFNNHGSDTILNRIKSNKKLGVLGVNVGPNKDSNNRLNDYLIGLEKFSEVADYITINISSPNTENLRNFHKENKLKELLKSVSEKKKQLKTKI

SEQ ID NO: 97190 - protein, 374 aa, Unknown
  Bacterial polypetide isolated from the Sargasso Sea
MIWKLITFFVRKLDPEIAHKLTIKSLKLGLHPRLNQSEISIKIGDLIFKNLLGVAAGFDKNAEVINKIHFLNFGFTEVGTITPLPQYGNPKPRIFRLEKDKAIINRNGFNNLGMLEAKKKLEDYRKRFPVGSDFLVGVNIGPNKDSEDRFNDYKFLAENLSEYADYISINVSSPNTPNLRKLQNKENLEKVIKFVKDGVATSRALNKKLPIFLKIAPDINKQTLNSIIETAHSQKIFGMIISNTTLDRDSNLKSKKSNELGGLSGKPLFKKSTAILSEANKIIKNKNYKLFLIAAGGVTDTTTAYVKILCGAHLVQLYSSLTFEGPLVANKIISGMLKLMKRDNLNNIFDIVGIIDNPKEAMNIAISGFKKSKN

SEQ ID NO: 97191 - protein, 345 aa, Unknown
  Bacterial polypetide isolated from the Sargasso Sea
MYSILRKILFLFDAELIHEFSVHSIKIFNKIPLIDILIKKFFCISDKKLERNILGLKFNNPVGLAAGFDKNAECYNEFSNFGFGFIEIGTVTPMPQPGNPKKRIFRLAEDKSLINRLGFNNKGISEVVDNLKKERDIIIGANIGKNYFTQNSDAHSDYLKCLSELNEFVDYFAINISSPNTKGLRDLHDKSLLKPFLEKLVKFNNKQMNKRPLLLKISPDLNEEQIADIVVLIKDLKLDGIIATNTTVSRDGATSKHKTQEGGMSGKLLTHKSNKIIKYLRKSLGDNFPIIGVGGIMSANDAIERLNSGADLIQLYTGFIYKGPSLIKKINNLILDQELNKNYEK

SEQ ID NO: 97192 - protein, 215 aa, Unknown
  Bacterial polypetide isolated from the Sargasso Sea
MFKKLRPIIFKFSPEVAHSLAIKALKTNLLPSHKLNNPSTLSTNLFGKNIKTPVGVAAGFDKNAEVYNPLFNLGFGFVEVGTITPKPQYGNPKPRVFRLEEDNALINRLGFNNSGSEEVSRRINGNTPNGFLGINIGPNKDSDNRIDDYIKCFNKFYNLGDYITINISSPNTENLRELHNKNELKELLDAINEEKNKKKSNIPIAVKISPDIKND

SEQ ID NO: 97193 - protein, 348 aa, Unknown
  Bacterial polypetide isolated from the Sargasso Sea
MFSNLRSLIFKLDPETAHSLAIKSLKFNFIPNILDEEKNNPLFKTKLFNKEIENPIGMAAGFDKNAEVYNSLFNLGFGFVEVGTVTPLEQYGNPKPRVFRLVEDEALINRLGFNNLGSKNIVDRIKRNNPTGLLGINIGPNKDSEDRTNDYIQCLKIFNGVSDYITVNISSPNTEDLRNFHDQKKLDDLLKLIEKEKRDLNSKTPIAVKVSPDINDKEIMKISEVLLDNKIEAAIISNTSDTTRENLQNTQSHQKGGLSGKPIELKSSELIRKFYKVLKGRIKIIGVGGVDSGRSAYQKFLAGADYLQLYTGMVFRGPNIVGLIKKELKEILLKDGVKNFNEIVGKKD

SEQ ID NO: 97194 - protein, 344 aa, Unknown
  Bacterial polypetide isolated from the Sargasso Sea
MIKNLNPEFSHYVTLKLLKLNLFTGNNFNDPILHQHLFGFDFSNPLGLAAGFDKNAEVIKPLLNLGFGFIEAGTVTPKYQFGNEKPRVFRLKEDKAIINHLGFNNKGTTFVKKKLKKLNLSSLSKGIVGINIGKNKETLNDIDDYIYCLQELGPFAHYVTVNISSPNTPGLRELQNRGRIEKLVQTLQKKQDEMNSLENTPIFFKIAPDIDEEQIRDIALISLANNIDGLVISNSTIERPDTLKSNLKNEIGGLSGKPLFLKSTMILRKMYTLTNGQIPLVGVGGINNALECYEKIKSGASLVQLYSALTFDGPKIINKILIDLSNLLKTDGYKSIKEAIGKDT

SEQ ID NO: 97195 - protein, 346 aa, Unknown
  Bacterial polypetide isolated from the Sargasso Sea
MFKKIRPFIFKFSPEVAHSLAIKTLKSNLIPSSKAIDSEILKTKLFGKNIKNPIGVAAGFDKNAEVYNPLFNLGFGFVEVGTITPNPQYGNPKPRVFRLEEDKALINRLGFNNSGSDEISARIKKNSAHGLLGINIGPNKDTKNRVEDYLKCFRKFYNLGDYITINISSPNTENLRDFHNKNELEELLDAIHKEKIKLKSNIPIAVKISPDIENNKIESVAEILNKYFVDIAIISNTSDMNRDSLNNINKLEKGGLSGRPIEKISNDLIRIFYKLLGKNIKIIGVGGVDSGKGVLEKLLNGASLIQLYTGMVYNGPNIASKISNELNDILKNQGIKNISEIIGSKN

SEQ ID NO: 97196 - protein, 132 aa, Unknown
  Bacterial polypetide isolated from the Sargasso Sea
MRFFLKIFRLLPPEIAHKIALDLLNLSHKLGILSFIFRKPKDENCSFAGMNLSNRLGTAAGLDKNGDYIDCLGALGFGFLEVGTVTPMPQYGNPKPRVFRNFDDNSIINRLGFNNRGVDRLVKNLKSRSFNG

SEQ ID NO: 97197 - protein, 329 aa, Unknown
  Bacterial polypetide isolated from the Sargasso Sea
MSFFLKLFKLLSPELSHSFSLNSLNILYKLKILKFFIKTPSNEECFDFVGLKFKNRLGTAAGLDKNGDYIDALGELGFGFLEVGTITPKAQKGNSKPRVFRNFKENSIINRLGFNNKGVDHLVKNLKNRSYEGIIGVNIGANKQSEGPERINDYLICLEKVYKHSDYITINISSPNTPNLRELHNKDELKNLIEAIDSKVIELDIAAPIFLKISPDESDLVIDTVIEILDSSQISGIIATNTTIDKSNIINKEFRSIDGGLSGAPLMGKATDKLSYIYTRSNHLPLIGVGGVTSKKDYEMKLQAGAQLVQIYTGFIIKGPKIVNEILSN

SEQ ID NO: 97198 - protein, 313 aa, Unknown
  Bacterial polypetide isolated from the Sargasso Sea
MFSFLRPFIFNLDPETAHDLAIKSLKYNVLPKSLFTVEDEEILNTKLFGKIIDNPIGLAAGFDKSAEVYNEIFKIGFGFVEVGTVTPKKQYGNQKPRVFRLEKDQALINRLGFNNDGSDAIKKRIEHNAPDGLLGINIGPNKDTDNMYNDFLSCAKTFFPIGDYITINISSPNTEGLRNFHEKENLEKLLIKINEIRKESNFKKSFLLKISPDLDESSINNIVDLSLKNNINGIILTNTSDKNRDKLIDNQKNEKGGLSGQPIKDLSTKIIKKFYKKLNGKIPIIGVGGVDSGNAAFEKIAAGASAIQLYTGM

SEQ ID NO: 97199 - protein, 329 aa, Unknown
  Bacterial polypetide isolated from the Sargasso Sea
MNFFLKIFKFLPPEFAHSASLNSLNLLHKFKLLVLFRNKIINKNEHIIFGMKFRNKLGTAAGLDKNGDYIDALGALGFGFLEVGTVTPKPQYGNPKPRIFRNYPENSIINRLGFNNKGIDYLVNNLKKRKYGGVVGVNIGANKSSKGIERINDYLLCIEKIHKFADYITINISSPNTPDLRDLHLKENLQNLITSVENKIAKLNFKKPIFLKISPDETDESIEMIIDLVKKSSITGLVATNTTIYKANLNNKKLKKEDGGVSGQPLMYKSTNKISLIRSKCSDIPIIGVGGVMSKKDYLSKLNAGADLVQIYTGFIIKGPNLINQIVRD

SEQ ID NO: 97200 - protein, 346 aa, Unknown
  Bacterial polypetide isolated from the Sargasso Sea
MFNIIRPIIFKFSPEVAHSLAIKALKLNNISYTKPKGSQILETTFCEKKLPSPIGVAAGFDKNAEVYNPLFNLGFGFVEVGTITPKPQFGNPKPRVFRLEEDEALINRLGFNNSGSEEISRRIRENDKKGLLGINIGPNKDSMNRVEDYLICFRKFYNLADYITINISSPNTENLRDFHNQNELNLLIDKIKKEKKELNSEVPIAIKVSPDLNDDQINEVSKIIMEQEIGIIVVSNTTDRNRENLKNINKLEKGGLSGKPIKNISNEVISKFYKILKNKTKIIGVGGVSNGHDVFEKITSGATLVQLYTGMVYRGPRIASKISNELIDLLKNKGFKNVSEAIGTKN

SEQ ID NO: 97201 - protein, 308 aa, Unknown
  Bacterial polypetide isolated from the Sargasso Sea
EILQTNFCGKMLSSPICVAAGFDKNAEVYNPLFNLGFGFVEVGTITPKQQYGNPKPRVFRLEEDEALINRLGFNNSGSEEISSRMSKEIKKGILGINIGPNKDTENRIEDYINCFNTFHGLADYITVNISSPNTENLRDFHNRDELNSLIKELKNEKGKLNSKVPIAVKVSPDLNDEQIEVVSNILLDQEIEIIIVSNTSDKNREKLKNINKLEKGGLSGKPLYHVSNNIIGKFYKLLGKKIKIIGVGGVDTGEAAFEKIIRGASLIQLYTGMVYKGPGIASSISSELINILKNKGFKNISEAVGSKY

SEQ ID NO: 97202 - protein, 164 aa, Unknown
  Bacterial polypetide isolated from the Sargasso Sea
MYSLARELLFKLSPETSHELSIDLIGAGGRLGLNGLLTKAPTSLPVNVMGLQFANPVGLAAGLDKNGDAIDGFAQLGFGFVEIGTVTPRPQPGNPKPRLFRLPEAEAVINRMGFNNHGVDHLLERVKAAKFKGVLGINIGKNFDTPVERAVDDYLACLDKVYTH

SEQ ID NO: 97203 - protein, 327 aa, Unknown
  Bacterial polypetide isolated from the Sargasso Sea
MKAFIKIFRFFPPETAHHLALLSLKILNKVRILKLFFPDNKDFDNPKEYFNLKFRNTLGVAAGLDKNGDYVDELESLGFGFVELGTVTPKPQEGNQKPRVFRYLNQQSVINRLGFNNKGVNYLVSKIKNKKYDAVIGVNIGANKKSTNDQRIEDYVFCFEKVYKYCDYVTVNISSPNTPKLRKLHNPDELEKIFKRINEIKTINQTDIPVFLKISPDEGEEAILKIVNIYETLKINGLIVSNTSIDKDILEGCSHDGGISGKPLFKKSNQLLKKIHELDKDIFLVGVGGVFTKEDYENKITLGASLVQIYTGFIFEGPAIVKKILSR

SEQ ID NO: 97204 - protein, 121 aa, Unknown
  Bacterial polypetide isolated from the Sargasso Sea
MFSKIRSLIFKFEPEVAHSLAIKALKYNFVPPKKIPNNKLIETKLFSKIIKNPIGLAAGFDKDAEVYNSIFDLGFGFVEVGTVTPLKQYGNKKPRVFRLEEDEALINRLGFNNSGSEEVLQ

SEQ ID NO: 97205 - protein, 174 aa, Unknown
  Bacterial polypetide isolated from the Sargasso Sea
MFSFLRPYIFNLDPEKAHKLAISSLKYNLLPESLFKVENEEILSINLFGKSIKNPIGLAAGFDKSAEVYNQMFKIGFGFVEVGTVTPNKQYGNPKPRVFRLEKDSALINRLGFNNDGSDLVKKRIENNLPKSLLGINIGPNKATKDMSQDFFSCAETFFPLGDYITINISSPNT

SEQ ID NO: 97206 - protein, 389 aa, Unknown
  Bacterial polypetide isolated from the Sargasso Sea
MNEQKGGFKNLYKNLITPVLKKDSGIDAEYLTNLSLSLLSFSSRKYNWPIVSSILKNLNEEFSVVDKRLTQNICGINFCNPIGLAAGFDKNGNAANIWKDFGFGFAELGTVTKFAQNGNPKPRLFRLAEEEAALNRMGFNNNGAENLVKNFVEQGIEFKKNRENICLGINFGKSKITGLSQAKDDYLTSLKLLIPYCDYAAINVSSPNTEGLRKLQDPILLKELLREIKNLPNCPPLFVKIAPDLGLKDIEDICQLIIEENIDGIIATNTSIDRLGLENRKIRQTGLLLSQENGGLSGRPLQKKANQIIKHIHNIDKKIILIGVGGIDSPESAWERICSGASLIQLYTGWIYKGPQLVPDILEGIIKQLNNHQLSSIKDAIGSDLKWVE

SEQ ID NO: 97207 - protein, 346 aa, Unknown
  Bacterial polypetide isolated from the Sargasso Sea
MFSKIRSLIFKLDPEIAHDLAIKSLKFNFIYQNKIKKNKLIETEIFGKKIPNPIGIAAGFDKDAEVYNSLFKLGFGFVEVGTVTPLNQYGNPKPRIFRLEEDEALINRLGFNSSGSEKVRSRIISNSPKGLFGINIGPNKDTNNKEEDYLIGLRKFYNLADYLTINISSPNTENLRSFHNEDELSKLLDLVEKEKKILKTNIPIVVKISPDIKDENINIIAELLLKHNVEAVIISNSTDRNRENLSNINKLEKGGLSGKPLEKKSNELINKFYKILKNKIKIIGVGGVDSGQSVYQKIINGASLVQLYTGMIYKGPSIVSKINEELINILENERVKNISDIVGSKN

SEQ ID NO: 97208 - protein, 295 aa, Unknown
  Bacterial polypetide isolated from the Sargasso Sea
MFSALRPFLFSLDPETAHDLAIKSLKFNPFPRKMFEVEDEHMLNIELFGKKFPNPIGLAAGFDKSAEVYNSLLSLGFGFVEVGTVTPLKQYGNPKPRIFRLEEDHALINRLGFNNDGIEKIKDRISSNRKNGILGINIGPNKDTKDQKNDFCLGLKNFFSLADYITINISSPNTEGLRDFHDQKKLLDLVNILNKIKKDNKTSIPLLLKISPDISNNNISEIAEGAVKNNISAIILTNTTSGNRDDLISRFKKEEGGLSGDPLSQISTSMIKKFSKELNGKIQIIGVGGVSSGQS

SEQ ID NO: 97209 - protein, 174 aa, Unknown
  Bacterial polypetide isolated from the Sargasso Sea
MNEQKGVFKNLYKNLITPILKKDTGIDAEYLTNLSLSLLSFSSRKHNWPVVSSILKNLNQEFSIVDNRLSQNICGINFCNPIGLAAGFDKNGNAANIWRDFGFGFAELGTVTQFAQDGNPKPRLFRLAEEEAALNRMGFNNNGAENLVKNFLEQGIELKKNREQYLFGNKFRQI

SEQ ID NO: 97210 - protein, 205 aa, Unknown
  Bacterial polypetide isolated from the Sargasso Sea
MFPFLRPFIFSLDPEKAHELAIKSLKYNIIPKSFFEVESEEILNTKLFGKNIKNPIGLAAGFDKSAEVYNQIFKIGFGFVEVGTITPRKQDGNPKPRVFRLEQDLALINRLGFNNDGSEIIEKRIENNIPDGLLGVNIGPNKDTDNMVEDFLDCAKTFFPLGDYLTINISSPNTKGLRDFHDKENLQKLLSSINKIRKESNFNKS

SEQ ID NO: 97211 - protein, 389 aa, Unknown
  Bacterial polypetide isolated from the Sargasso Sea
MNEQKGVFKNLYKNLITPVLKKDSGIDAEYLTNLSISLLSFSSRKYNWPVVASILKNLNKEFSVIDKRLTQNICGINFCNPIGLAAGFDKNGNAANIWKDFGFGFAELGTVTKFAQNGNPKPRLFRLAAEEAALNRMGFNNNGAENLVKNFVEQGIEFKKNRENICLGINFGKSKITDLSQAKDDYLTSLKLLIPYCDYAAINVSSPNTEGLRKLQDPILLKELLREIKNLPNCPPLFVKIAPDLGLKDIEDICQLIIEENIDGIIATNTSIDRLGLENRKIRQTGLLLSKENGGLSGRPLQKKANQIIKHIHNIDKKIILIGVGGIDSPESAWERICSGASLIQLYTGWIYKGPQLVPDILEGIIKQLNNHQLSSIKDAIGSDLKWVE

SEQ ID NO: 97212 - protein, 247 aa, Unknown
  Bacterial polypetide isolated from the Sargasso Sea
MFSKIRSLIFKLDPETAHDLAIKALKFNPIPKEKIKNNNLIETEIFGKSIPNPIGIAAGFDKDAEVYNPLFKLGFGFVEVGTVTPVNQYGNPKPRIFRLEEDMALINRLGFNNSGSEKVRSRIISNSPKGLFGINIGPNKDTINRLEDYLICFRKFYNLADYLTINISSPNTENLRNFHNEDELNELLSLINKEKKILKTTIPITVKISPDIENQNINIISDLLLKHSVEAVIISNTTDKNRENLSN

SEQ ID NO: 97213 - protein, 350 aa, Unknown
  Bacterial polypetide isolated from the Sargasso Sea
MFSNLRSLIFKLDPETAHSLAIKSLKFNFAPNILDEDKNNPLFKTKLFNRNLENPIGIAAGFDKNAEVYNSLFKLGFGFVEVGTVTPLQQYGNPKPRVFRLVEDEALINRLGFNNFGSKNVLDRIKSKKQIGLLGVNIGPNKDTKDRNGDYIECLKTFCEVADYITINISSPNTEDLRSFHDEFKLDELLKAIDKEKKILNSSIPIVVKVSPDISDQDVSKISDVLLDNNIKAVIISNTSDSTRDRLSNILKHQKGGLSGKPIEEKSTSLINKFYNILEGRIKIIGVGGVDSGMSAYKKFLAGADYVQLYTGMVYRGPNVVGIIKKELKELLLKDGVKNFTEIIGKKRQS

SEQ ID NO: 97214 - protein, 220 aa, Unknown
  Bacterial polypetide isolated from the Sargasso Sea
VSISGQNLIAKKTDIMVGVNIGKNKDTPVEQGKDDYLICMDKVYPYAAYIAVNISSPNTPGLRSLQYGDLLDELLSALKTKQLELAEKHKKYVPIALKIAPDLTTEEIENIAQSLIKNKFDGAIATNTTLTRDGVSGLANANESGGLSGKPLTELSTKVIKQLATCLNGQIPIIGVGGINSAEDALAKFDAGATMVQIYSGFIYQGPKLIKEIVEAYRLK

SEQ ID NO: 97215 - protein, 350 aa, Unknown
  Bacterial polypetide isolated from the Sargasso Sea
MYSNLRSLIFKIDPERAHFLAIQSLKLNLVSNIFDENKNDPILKTKLFNQNLDNPIGIAAGFDKNAEVYNPLFKLGFGFVEVGTVTPLKQYGNEKPRVFRLVEDQALINRLGFNNHGSDTILNRIKSNKKLGVLGVNVGPNKDSNDRLNDYLIGLEKFSEVADYITINISSPNTENLRNFHEENKLKELLKSVSEKKKQLKSEIPVAVKISPDISENQIDLISEILLENEISAIIISNTSESSRETLQNIQRHQKGGLSGKPIEKKSNLLISKFYNLIKGKIKIIGVGGVDSGKAAYDKFLLGADYVQLYTGMVFQGPNIAGMIKKDLKELLIRDGVKNFTEIVGNKTVS

SEQ ID NO: 97216 - protein, 351 aa, Unknown
  Bacterial polypetide isolated from the Sargasso Sea
MLESFIKILKFLPPELAHSTTINALKYFRFNFDNIDDPILAQHLIGLDFPNPIGLAAGFDKNAEVVNSMFSLGFGFVEVGTITPKPQKGNPRPRVFRLDQDNAIINSLGFNNKGSKKVKKNITKIKNSFVGNRIIGVNLGKNKNTLNSIDDYLFGIENLGNLASYITINISSPNTEGLRDLQLRGNIENLIKKIVSKRDEIEIINKKPVFIKISPDLNDDQLRDIALISLANNIDGLILTNTTTNRPNNLLSKNKKNKGGLSGRPLFEDSNNVLRKMYKLTNGQIILIGVGGITNASDCYQKIKSGASLVQLYTALTFSGPYLISKIKNELIDLIKTDGYRNISEVIGKSV

SEQ ID NO: 97217 - protein, 329 aa, Unknown
  Bacterial polypetide isolated from the Sargasso Sea
MNFFLKIFKFLPPEFAHSASLNSLNLLHKSKLLFLFNNKIINKNEYTIFGMKFKNKLGTAAGLDKNGDYIDALGALGFGFLEVGTVTPKPQYGNPKPRIFRNYSENSIINRLGFNNKGIDYLVNNLKKRKYGGVVGVNIGANKSSKGIERINDYLLCIEKIHKFADYITINISSPNTPDLRDLHLKENLKNLIASVENKITKLNFKKPIFLKVSPDETDESIEMIIDLVKKSSITGVVATNTTIDKENLINKKLKKEDGGVSGQPLMDKSTNKISLIRSKCSDIPIIGVGGVMSKKDYLTKLSAGADLVQIYTGFIIKGPNLINQIVRD

SEQ ID NO: 97218 - protein, 329 aa, Unknown
  Bacterial polypetide isolated from the Sargasso Sea
MNFFLKIFKFLPPEFAHSASLNSLNLLHKSKLLVLFNNKIINKNEHTIFGMKFKNKLGTAAGLDKNGDYIDALGALGFGFLELGTVTPKPQYGNPKPRIFRNYSENSIINRLGFNNKGIDYLVNNLKKRKYGGVVGVNIGANKSSRGNERINDYLICIEKIHKFADYITINISSPNTPDLRDLHLKENLQNLITSVENKIAKLNFKKPIFLKISPDETDESIEMIIDLVKKSSITGLVATNTTIDKENLNNKKLKKEDGGVSGQPLMDKSTNKISLIKSKCSDIPIIGVGGVMSKKDYLTKLNAGADLVQIYTGFIIKGPDLINQIVRD

SEQ ID NO: 97219 - protein, 234 aa, Unknown
  Bacterial polypetide isolated from the Sargasso Sea
MFSFIRPFIFNLDPEKAHDLAIKSLKYNFLPSNLFSVSGEEILRTKLLGKEINNPIGLAAGFDKSAEVYNEIFKIGFGFVEVGTVTPKKQFGNEKPRIFRLEKDQALINRLGFNNDGSEIVKKRIENNIPSSLLGINIGPNKNTVNMTDDFLRCAEIFFPIGDYITINISSPNTSGLRDFHDEDALKKLLSKINEVREKSNFNKSFLLKVSPDLDSSQIPVIVKLILEYKIDGV

SEQ ID NO: 97220 - protein, 201 aa, Unknown
  Bacterial polypetide isolated from the Sargasso Sea
ANPVGLAAGLDKDGECIDAFGAMGFGFIEVGTVTPRAQSGNDKPRLFRVIPAEGIINRMGFNNKGVDHLVAQVKKAKYQGVIGINIGKNKDTPIEQGKDDYLICMDKVYDHAGYIAVNISSPNTPGLRSLQYGDALDELLAALKVRQQELAAQYKKYVPLAVKIAPDLTPDEINQVAASLIKNGIDGVIATNTTLERVHDL

SEQ ID NO: 97221 - protein, 80 aa, Unknown
  Bacterial polypetide isolated from the Sargasso Sea
MPHAGEAGGLSGRPLQHKSTEVIRQLAKALDGALPIIGVGGIDSAMAAREKLTAGASLVQIYSGFIYKGPDLVKEIVTHI

SEQ ID NO: 97222 - protein, 335 aa, Unknown
  Bacterial polypetide isolated from the Sargasso Sea
MYELIQKALLNCDPEKSHDFSIKWLHRTQRTPLSALYRVNTPDKPVTVAGVTFRNPVGLAAGLDKNGECIDAFAAMGFGFIEVGTVTPRPQPGNPKPRLFRLPEKNAIINRMGFNNKGVDYLVDQVKASRYDGALGINIGKNKDTEEANALDDYLKCLNKVYEHASYVTINISSPNTPGLRNLQYGEALEALLGGLKEAQGALAQVHGKYVPLFIKIAPDLSPEEVNGIAESLIKSEMDGVIATNTTLDREAVKGLEHANEAGGLSGEVLVNQSQLITEQLHTALNGTMPIIGVGGIHDVASAKARMAAGAELIQVYSSFIYQGPALIKQLVEGL

SEQ ID NO: 97223 - protein, 328 aa, Unknown
  Bacterial polypetide isolated from the Sargasso Sea
MNFFLNIFKFLPPEYAHSISLNSLNFLYKLKLLSLFQIKKDDEVEFNLCGMNFKNKLGTAAGLDKNGDYIDALGELGFGFLEVGTVTPSPQSGNSKPRVFRNYEDNAIINRLGFNNKGIDYLLKNLKKRKYKGIVGVNIGANKTSKDDQRINDYLLCFEKIHEYADYITINISSPNTPDLRDLHNEENLKNLISSVENKSIEINFQKPIFLKISPDESDESIKMIIELVENSSFSGLVATNTTVNKDSITNEKLRNEEGGLSGQPLMEKSTNKISFIRSNTDMLIIGVGGVMSKNDFHTKIEAGANLVQIYTGFIIKGPKLINQIIRD

SEQ ID NO: 97224 - protein, 314 aa, Unknown
  Bacterial polypetide isolated from the Sargasso Sea
MWLIIRILRIFPPEIAHKISLTLLFFIHRLGLLSIFKNEKQSETIEFLGLRFKNTLGTAAGLDKNGDYIDCLGALGFGFLEVGTITPKAQAGNKKPRVFRLSKDKGVINRLGFNNKGIDHLVTNLKQHKYDGVIGVNIGANKNSHGKKRIEDYIECIRKVYKYTDYITVNISSPNTKNLRNLQNSENIDKLFVALENEIHTLKIDKPIFIKISPDESLDTIKYIINKVQNSKITGIIATNTTTDKSTLKDEKYWNYEGGLSGEPLREKSNDLISEIRRVSEEIPLIGVWRVMTQKDYKEKLDLGANLVQIYTGF

SEQ ID NO: 97225 - protein, 371 aa, Unknown
  Bacterial polypetide isolated from the Sargasso Sea
MSLLYKTFLRPAVFLQDSERAHSRVLAVLSKMSRTRFSLSMLGALYRSPDLPVNVFDIDFPNPIGVAAGMDKNGAAVPSWQSIGYGFCEIGGVTLHEQPGNPKPRMFRINKEKALINRMGFNNIGATALQEQLQFWKDKGLWPDSPVGINLGKSKLTSLEEAPSDYSGSIKILWNHADFFVINVSSPNTPGLRNLQESKNLDSIIKKCCDINKQKSVEKGTSEKPLLVKIAPELGDGFLEDIVKLVKKYKLSGIVATNTTVKRPKAKHQSSEKVYQEKGGLSGAPLKDQSTEMIRKIFKMTDGKVPIIGVGGILTADDAWEKIKAGASILQLYTGLVFEGPGIAKSIVKGLKKRIESEGFESTAEAVGIEA

SEQ ID NO: 97226 - protein, 310 aa, Unknown
  Bacterial polypetide isolated from the Sargasso Sea
MYSILKPYIFSLDPEVAHDLAIKSLKANFLPESFFSVKHEELIETNLFKKKINNPIGLAAGFDKSAEVYNSLFKLGFGFVEVGTITPKRQLGNPKPRIFRLEKDEALINRLGFNNHGSEIVADRIAKNKPLGVLGINIGPNRDTKNKSEDFYSCLSKLYSFSDYITINISSPNTEGLRDFHEKNSMNKLLEGLQKIKKNKNIKKPLVIKLSPDLNEKEISNTIEIIKKYEIDGIIVSNTTDKNRDKLLDNKKNELGGLSGQPIKDISTNLIKKFYRELNKKTTIIGVGGVDSGKSTFEKITAGAQCSAII

SEQ ID NO: 97227 - protein, 316 aa, Unknown
  Bacterial polypetide isolated from the Sargasso Sea
MLVNLLRLLPPETAHEITIKLLKSNLNFNRKHIKIYKSLNQTILGINFKNPIGLAAGFDKNAEVIKQMFTYGFGFIEVGTVTPKKQLGNEKPRVFRLVEDGAIINHLGFNNKGSEEILFNLKSFYAHKDINEVIGINVGKNKSTKNDIDDYLHSIEKLGNYGDYITINISSPNTPGLRDLQLRGRIEALVKKIQKKQSDLEHLQKKPIFIKISPDLNDEQLRDIALMSLANNVNGLIISNSTIKRYDTLISNYKNEIGGLSGKPIFLNSTILLKKMYSLTNGQITLIGVGGISSGYECYEKIKAGASLVQLYTALV

SEQ ID NO: 97228 - protein, 323 aa, Unknown
  Bacterial polypetide isolated from the Sargasso Sea
ILRLLPPEIAHKIALDLLSLSYKFGILSFIFRKPNDENCSFAGMDLSNRLGTAAGLDKNGDYIDCLGALGFGFLEVGTVTPMPQYGNPKPRVFRNFDENSIINRLGFNNRGVDRLVKNLKSRSFDGIVGVNVGANKNSNDEERINDYLHCIEKVHKYADYITVNVSSPNTPNLRNLQNDANLHNLVSKVDKLVNKLQIKIPLFLKISPDENNITIENIIEIVKNSIFSGIVATNTTIDKTSLSNIKYKNIEGGLSGEPLMKKSTEMIELINTKANKTIPIIGVGGVMNREDYLEKITSGAGLVQIYTGFVLKGPNIVSQILPD

SEQ ID NO: 97229 - protein, 348 aa, Unknown
  Bacterial polypetide isolated from the Sargasso Sea
MKNIFLNFLRNLNPETSHHISILSLKYLSGFLEKNYKSEILNTNFGNLNFANPIGLAAGYDKNAEVIDSLFKIGFGFVECGTVTPVAQYGNTKPRIFRLKEDKGIINRLGFNNCGIDQFSKNFNQRNFNLGIAGVNIGPNKESNNFIDDYLNLFNSVYEYADYVTLNVSSPNTKNLRSIQRTEDLSVLTYEINSLRESKGSHKKIVLKVDPDCTKKEYSKIINIIQKNKIDGLIVANTTLSRPEFLKSDFKNEEGGLSGAPIKEKSNKILRFISKETQGEVTLIGVGGISSAKDAYEKIKIGASLVQLYSSLTFNNLGFINQINKDLSSYLRKDGFTNIKEAIGIEIR

SEQ ID NO: 97230 - protein, 400 aa, Unknown
  Bacterial polypetide isolated from the Sargasso Sea
MAPSPSAGSITSGAFYRRWLAPMLSRDEGMDAEQLSRMALAALAQASLRRRWPGVSTVLAGLAMDLQRRDLRLEQVLFGCRFVNPVGLAAGFDKNGVAAGIWDQFGFGFAEVGTVTWHGQPGNPRPRLFRLAEEQAALNRMGFNNDGAEALLRTLNRQVLPARGQRPAVLGINFGKSKITPLDLAPDDYASSLELLAPLADYAVINVSSPNTPGLRDLQDTTQLRRLVERLRRLAGCPPLLVKIAPDLEDESIDGIARLAFEEGLAGVIAVNTSLDRLGLERRRLVQTGRTLAEEPGGLSGVPLRQRAIEVIRRLRAGAGPALPLIGVGGIDSPESAWERITAGASLIQLYTGWIFQGPDLVPRILEGFQQQLDRHGLRTVSEAVGSGLAWRGEDGPESG

SEQ ID NO: 97231 - protein, 109 aa, Unknown
  Bacterial polypetide isolated from the Sargasso Sea
KNATWQEAIASSLTELFAPHIHQQRLDTWPEKYPWVDPEGMKYFKYRLGQARRDVKHGLEVTKDFFSNSRALQDRALEILQFKLDVLWSLADAIMLQQCEISVLGSKQG

SEQ ID NO: 97232 - protein, 110 aa, Unknown
  Bacterial polypetide isolated from the Sargasso Sea
FCRGASWQEAACSSLTELFAPDIHKRRLKNWPEHYPWIDTEGYNYFRKRLSEARRDVQHGLDITLDHFKSREQQEHALEILQFKLNVLWTMLDAMQMAYELEKPPFHSCP

SEQ ID NO: 97233 - protein, 136 aa, Unknown
  Bacterial polypetide isolated from the Sargasso Sea
MSQAAMTPAEFEQALRAKGALYHIHHPFHRAMYEGRATREQIQGWVANRFYYQVNIPLKDAAILANCPDRETRREWIQRILDHDGAPGEEGGIEAWLRLAESVGLDRDQVLSQELVLPGVRFAVDAYVNFARRANW

SEQ ID NO: 97234 - protein, 126 aa, Unknown
  Bacterial polypetide isolated from the Sargasso Sea
MSQAAMTPAEFEQALRAKGALYHIHHPFHRAMYEGRATREQIQGWVANRFYYQVNIPLKDAAILANCPDRETRREWIQRILDHDGAPGEEGGIEAWLRLAESVGLDRDQVLSQELVLPGVRFAVDA

SEQ ID NO: 97235 - protein, 230 aa, Unknown
  Bacterial polypetide isolated from the Sargasso Sea
MHATPWTATEFETRLRALESRYHIHHPFNRRLNGGACSPTQIRGWVANRFYYQINIPLKDAAILSNCPDRDTRRRWIQRLVDHDGQGDNEGGIEAWVRLGEACGLSRAELWSLEHVLPGVRFAVDAYVNFARRAPWQEAVCSSLTEMFAPQIHLDRLAGWPSHYPWIEPAGLHYFRSRVPLAQRDVEHGLAVTLQHFTTPDAQQRALGILQFKLDILWSMLDAVERAYPL

SEQ ID NO: 97236 - protein, 173 aa, Unknown
  Bacterial polypetide isolated from the Sargasso Sea
QRILDHDGAPGEEGGIEAWLRLAESVGLDREQVLSQELVLPGVRFAVDAYVNFARRASWQEAASSSLTELFAPTIHQSRLDAWPQHYPWIDAAGYDYFRNRLSQARRDVEHGLRITLEHYRTREAQERMLNILQFKLDVLWSMLDAMSMAYELERPPYHTVTNERVWHRGIAL

SEQ ID NO: 97237 - protein, 221 aa, Unknown
  Bacterial polypetide isolated from the Sargasso Sea
MTQTVKEASIEPVKDYFQSLQEQICSTLEALEIDEKFSVENISTPGGGMSKPRVVSDGEHIEKAAVMFTHSIGDSLPPAASERNPKLAGKPFQAAAISLIVHPKNPFVPMTHMNLRFFIVFTEEPSWHFGGGYDLTPYYPYEQDVVHWHSTASQAAGKYYRRFKDQCDDYFYLPHRNEARGVGGLFFDDWSEGGFNKSFKLTQKIGDSFLKAYQPIFEKRK

SEQ ID NO: 97238 - protein, 114 aa, Unknown
  Bacterial polypetide isolated from the Sargasso Sea
QLQHKKIEDSLDLLNAIANCYIETYVSLVNSNKNQKFTADDREFQLYRRGRYVEFNLLFDRGTKFGIESNGRTDSILASMPPAVNWPFRLSKNIIKNESKLLRFINKNWNQHIL

SEQ ID NO: 97239 - protein, 231 aa, Unknown
  Bacterial polypetide isolated from the Sargasso Sea
MVVSKYKVTKEEKVSAENWFSELRDNICSEFQNIEKNISNNTFQIKNWKRDGGGGGKMSIMKGDIFEKVGVNISTVHGKFSEQFRKNIPGAEEDGKFWASGISVVAHPKNPFVPAAHMNTRLISTSKSWFGGGGDITPMKPAPEMSKLFHKDLKNVCDKHNKEYYKKFKEWADKYFFLEHRNETRGDGGIFFDYLNNGNWKNDFNFVKDIGMGFLGSYSNIVRKNFSIPWK

SEQ ID NO: 97240 - protein, 207 aa, Unknown
  Bacterial polypetide isolated from the Sargasso Sea
MQINQEIQKKIASEWFRFLQIEICKKFQNLERIFSKRKKLKPKYFKKNEWKKRNINNGGGTYYLLENGRVFDKVGVNHSTVKGIFPKKFKSSIPGTKKNNSYWASGISVVAHMKNPCIPSMHFNTRFVVTSKSWFGGGMDVTPSLKDLKEKKLLHKELKVLCDNNKKNYKSYKKWCDKYFYITHRKEVRGIGGIFFDYLFEDWTTKI

SEQ ID NO: 97241 - protein, 252 aa, Unknown
  Bacterial polypetide isolated from the Sargasso Sea
MDLNIKKDLSSNWFKLLQDAFCNDISILENNKTNFKSITWKKNEYRDEGGGEYRILKDGKIFDKVGVNYSKVYGKFPKKFQKNILGAQKDPRFWASGISVVMHMKNPLIPAMHFNTRYICTTRQWFGGGMDITPSKKDDLEKKDFHQILSNMCNRHNKSYYKKYKRFCDEYFYLPHRKEKRGIGGIFFDYKKDNFEKDFKFVRDVGITFQLIFNKIIRKKIKKKWTKKDKETQYIKRGRYTEFNLLYDRGTK

SEQ ID NO: 97242 - protein, 109 aa, Unknown
  Bacterial polypetide isolated from the Sargasso Sea
CDEYFFLPHRNEPRGIGGIFFDNLNNNDWDKDFNFVKDVGLFFKNYSINIINKYKDKKWNNEEKKIQLKKRSRYAEFNLLHDRGTRFGLETGGNIDAILMSMPPQASWD

SEQ ID NO: 97243 - protein, 147 aa, Unknown
  Bacterial polypetide isolated from the Sargasso Sea
MLINLEKSFKKIQSLIINNFKLLEGSSSAEISSDAWKRQEGGGGKTFVISNGNFFDNCAVNFSSIYGKNMPTSALEKKLAKKINHGYQAMGVSVISHPKNPYVPTSHMNVRLFGILDKNKNIKDWWIGGGYDLTPYISFSEDNISWH

SEQ ID NO: 97244 - protein, 188 aa, Unknown
  Bacterial polypetide isolated from the Sargasso Sea
MDQIIKKKLARNWFKTLQEVLCKEIEEIEGGIKLFKYKNWERGKKSNEGGGQSRIYENGKIFDKVGINFSEVYGKFSKQFKNKIPGANKNPKFWASGISVVMHMKNPHIPAMHFNTRYVYTSHGWFGGGMDVTPCFKDKKLEKWFHSELKKSCDKHNKNYYKKYKKWCDEYFYLPHRNEPRGIGGIFF

SEQ ID NO: 97245 - protein, 232 aa, Unknown
  Bacterial polypetide isolated from the Sargasso Sea
MVNVNNLIEKIRLQPKIRHEKTLLKKQDLTKEWFSCLRDEICKDFLILEKEFLKKNTFKSFLKIPNSKFVTRKWKRKGGGGGTMSIMRGVLFEKVGVNISTVFGEFSKEFRSQIPGAEKSGKFWASGISIVAHMNNPKIPAAHMNTRFLVTGEGEKQKFWFGGGCDLTPMLEDNKAKNTFHDGLKEMCNKHDDKYYKRFKSWCDDYFFLPHRNESRGVGGIFFDYLNNSNWE

SEQ ID NO: 97246 - protein, 110 aa, Unknown
  Bacterial polypetide isolated from the Sargasso Sea
KLCDEYFYLAHRKEPRGIGGIFFDYKKDNFEKDFNFVRDVGVTFQILFNKMIRKKLKKKWTAKDKEIQYIKRGRYTEFNLLYDRGTKFGLQTGGNIDGILMSLPPLAKWK

SEQ ID NO: 97247 - protein, 212 aa, Unknown
  Bacterial polypetide isolated from the Sargasso Sea
MKTNEISKSFKKTQNQIIKAIKTLDSTIIKKSSTWKYRSGGGGVSCEMEGSKYIDKAAVNFSSIVGDKLPASALQKSGVSGLNKFRATGVSVIIHPANPKIPCAHMNIRFFEARVNKKNVWWFGGGFDLTPYFINKSDIHYWKNSAKELCDKYKTGMYEEYNKNCNNYFFLPHREEPRGVGGLFYDQMNSPDYRTCKEFSLDCASTFKNSYL

SEQ ID NO: 97248 - protein, 78 aa, Unknown
  Bacterial polypetide isolated from the Sargasso Sea
MFREPPKNSREKTKNLLLTLQDKICSGLQNIDGKGKFIEESWLRDEGGGGRSRVLKNGSIFEQAGVKFSEVRGKELPQ

SEQ ID NO: 97249 - protein, 151 aa, Unknown
  Bacterial polypetide isolated from the Sargasso Sea
WFGGGMDATPSIKDEKEKKFFHRKIKLTCDKYNKSYYPRYKKWCDKYFYLPHRKETRGIGGIFFDYKKDNWEKDFSFVRNIGLCFLDCAKNIIEKKINTVWSEKEKNEQLYKRGRYIEFNLLYDRGTKFGLNTGGNVDAILMSLPPMAKWK

SEQ ID NO: 97250 - protein, 200 aa, Unknown
  Bacterial polypetide isolated from the Sargasso Sea
MNIKKKQKLTKEWFAKLQNMICKNIEDLEKEYGSRSKFKKNKWNYGEFRIIKGKVIEKGGVAFSNVKGRFSENFAKKIPGVKKNLRFWSSGVSVVLHPKNPKIPAMHFNTRFICTSKNWFGGGIDVTPCLADSKEKKFLHMQLKKMCNVHNKKYYKKYKKWCDEYFYLPHRKEIRGVGGIFFDYKMDDWNKDFLFVKDVG

SEQ ID NO: 97251 - protein, 169 aa, Unknown
  Bacterial polypetide isolated from the Sargasso Sea
SYIFPEDAEHFHGTLKGVCDKHDEAFYPRFKEWADDYFIIKHRMNERRGIGGVFFDDMNDRPQEELLAFATDMASAVVPAYVPLVAKHKDDEFTEQEREWQQMRRGRYVEFNLVYDRGTTFGLRTGGRIESILMSLPLTARWQYDMQPEEGSREADALDAFRNPRTWVA

SEQ ID NO: 97252 - protein, 139 aa, Unknown
  Bacterial polypetide isolated from the Sargasso Sea
ESKKIANYFHGELEKTCNDYKKGSYKKYKKWCDDYFFLPHRNESRGLGGIFFDYLDSDNWNSDMNFVSNVGKTFINTYKTIVQKTINLPWNNKDKLLQFHRRSRYVEFNLLYDRGTKFGLETDGNIEAIFMSLPPMASW

SEQ ID NO: 97253 - protein, 237 aa, Unknown
  Bacterial polypetide isolated from the Sargasso Sea
GCGRWSNVHYARRSSVRKSWCKYFNSVWTIGKQAQDSISARRNVPGLDKDPRFWASGISLVAHMRSPKTPAVHMNTRMFWTPEDWWFGGGADLNPMLENSEDTKFFHTELRKACDRHDPSYYPRFKKWADEYFLIRHWNEPRGVGGVFFDDHCTNDWEKDFSFTKDIGRAFLNAFIPITEKHSTEEWTEAERETQLIKRGRYTEFNLVYDRGTQFGLHTGHNPEAVLMSLPPIAKWP

SEQ ID NO: 97254 - protein, 225 aa, Unknown
  Bacterial polypetide isolated from the Sargasso Sea
MRRKFEQMLREAQNKICSAVEELDGEGTFRQDVWERENGGGGISRVMAGGKVWEKAGCSLSVVYGSMPQEALASATERGVDRAKGMEPGERVPFCVEINQCDGCTTILHYVISRRWRGRPGSVERRGTGIVTPSSRRPRRWRGGRRDDSARTRRKILISTQVPFFACGLSSVMHPRNPMAPTMHFNYRYFETDGGVWWFGGGIVAASVPAFDTSRRQRRVAELRE

SEQ ID NO: 97255 - protein, 129 aa, Unknown
  Bacterial polypetide isolated from the Sargasso Sea
TLDKYNKNFYKSFSENCNKYFYIPHRKERRGIGGIFFDNLSSFSLDDSLKMLNSIASTYLNSYLDIVSKRKKIKYSSDEKDFQLIRRGRYAEFNLIYDRGTSFGLQSNGRIESILASLPTEVKWKYKKN

SEQ ID NO: 97256 - protein, 150 aa, Unknown
  Bacterial polypetide isolated from the Sargasso Sea
MIRTTSLECPFGGIGQDMCDYALSLQDTIVSHLSDYEPNSVFKTDIWDRPGGGGGRTCVIEDGLIFEKGGVNVSAVEGLISTPHEVQMFQQLLQQQNRSCPLDNAHFFATGISLVLHPRHPLVPIVHMNYRYFEMRTQQHTIWWFGGGTD

SEQ ID NO: 97257 - protein, 50 aa, Unknown
  Bacterial polypetide isolated from the Sargasso Sea
HNGLKIICDEYSPNKYYEFKKWCDEYFYLPHRKEPRGAGGIFFDYLKNNW

SEQ ID NO: 97258 - protein, 178 aa, Unknown
  Bacterial polypetide isolated from the Sargasso Sea
ISVVMHMKNPMIPAMHFNTRYICTTQDWFGGGMDVTPSIKDDSEKKEFHKILEKMCNQHGKNYYTKYKKWCDNYFYLPHRKEPRGIGGIFFDYKKNNFEKDFKFVRDVGVTFQFIFEKIIRKKMNKKWTKKHKELQFIKRGRYTEFNLLYDRGTKFGLQTGGNVEGILMSLPPLAKWK

SEQ ID NO: 97259 - protein, 230 aa, Unknown
  Bacterial polypetide isolated from the Sargasso Sea
MDLIEDQKKIARRWFETLRDQICHVFETIENTVDGVDCIMKMQPGHFDRTDWERPEGLDAGGGGVMSIMRGRVFEKVGVNVSTVFGEFSENFRASVPGAEENPQFWASGISVVAHPRSPRVPIAHMNTRMIVTTKQWFGGGGDLTPVIPIREDTKEFHKALKIACDAHDKEYYPRFKKWCDEYFYLPHREESRGVGGVFYDNLSTGNWDNDMNFTRDIGISFKNTYSNIV

SEQ ID NO: 97260 - protein, 176 aa, Unknown
  Bacterial polypetide isolated from the Sargasso Sea
SGISVVAHMKNPKILAIHFNTRFIVTSKSWFGGGMDVTPSFRDEKEKYFVHKKLRQLCKKNKKNFNIYKKWCDRYFFIKHRNEPRGIGGIFFDYLYKDWKSNFKFVRELGLCFLSLSKEIIFKKKLLKWNKKHKYDQILKRKKYVEFNLLYDRGTKFGLNTGGNIDAIFMSLPPLK

SEQ ID NO: 97261 - protein, 232 aa, Unknown
  Bacterial polypetide isolated from the Sargasso Sea
NWFKILQNAICDDIVKIEKNKINFQSTSWKRSSKKNEGGGEYRILKNGKIFEKVGVNFSKVYGKFPKQFQKNIPGANKDPRFWASGISIVMHMQNPHIPAMHFNTRFICTTKNWFGGGIDVTPAIKDEKERKNFHKILKAMCDRHNKNYYKKYKKWCDKYFYLPHRKETRGIGGIFFDYKNDNFENDFKFVRDVGVTFQMLFNEIIKKKIKRKWTLKDKEFQYIKRRSIRRI

SEQ ID NO: 97262 - protein, 146 aa, Unknown
  Bacterial polypetide isolated from the Sargasso Sea
MDVTPSKNDENEKKEFHKILKNMCDRHNMNYYRKYKKWCDQYFYLPHRKETRGIGGIFFDYKKNDFEKDFKFVRDVGITFQTIFQNIILKKIKKKWTKKDKEIQYTKRGRYIEFNLLYDRGTKFGLQTGGNIEGILMSIPPLAKWK

SEQ ID NO: 97263 - protein, 131 aa, Unknown
  Bacterial polypetide isolated from the Sargasso Sea
FHQTLKKMCDQHNKYYYRKYKKLCDEYFYLPHRKEHRGIGGIFFDYKKDNFEKDFQFVRDVGVTFQILFNKIIRKKLKKKWTVKDKEIQYIKRGRYTEFNLLYDRGTKFGLQTDGNVEGILMSLPPLAKWK

SEQ ID NO: 97264 - protein, 201 aa, Unknown
  Bacterial polypetide isolated from the Sargasso Sea
MEHFPKSFRKQIPGAQKNGKYWASGISVVAHMKNPKIPAIHFNTRYIVTSKTWFGGGIDLTPSFKDKTEEIYFHSKLKRVCESNSKNYKKYREWCDKYFFLPHRNEPRGVGGIFFDYENRNWEKDFKFVREVGMSFLEISTHIIKRKMKIKYNNTDKDKQLFKRGRYIEFNLLYDRGTKFGLNSGGNTEAILMSLPPKAKW

SEQ ID NO: 97265 - protein, 188 aa, Unknown
  Bacterial polypetide isolated from the Sargasso Sea
MDQTIKKKLARNWFKTLQEVICQEIEELEAKKNIFKIKNWERGKNSNEGGGQFRILENGKIFEKVGVNFSEVYGKFSKEFRNRIPGGDKNPNFWATGISVVMHMQNPHVPAMHFNTRYIYTSHGWFGGGMDVTPCLKDKLLEKWFHNELKKSCDKHNKNFYKKYKKWCDEYFYLPHRKEPRGIGGNFF

SEQ ID NO: 97266 - protein, 98 aa, Unknown
  Bacterial polypetide isolated from the Sargasso Sea
MDITPCIKDEKEKKYFHSSLKKMCNIHNEKYYSKYKSWCDKYFYLNHRKEPRGIGGIFFDYKMNDWQKDFLFIKDVGTFFANIVNVIIREKMRKKWGK

SEQ ID NO: 97267 - protein, 275 aa, Unknown
  Bacterial polypetide isolated from the Sargasso Sea
MDLDIKKDLVSNWFKLLQKSICNDINDLENQKIKFKTTIWKRNSKRDEGGGEYRILKDGKIFDKVGVNFSKVYGKFPKKFQKKIFGANRNPKFWASGISVVMHMRNPLIPAMHFNTRFICTTHQWFGGGIDVTPSKKDDLEKKYFHQTLKKMCDKHNKNYYKEYKKLCDEYFYLPHRKETRGIGGIFFDYKRDNFEKDFKFTRDVGITFQMLFNRIIRKKINKNWSTHDKELQYIKRGRYAEFNLLYDRGTQFGLQTGGNVEGNFMSLPPLAKWK

SEQ ID NO: 97268 - protein, 217 aa, Unknown
  Bacterial polypetide isolated from the Sargasso Sea
EWFKFLQFKIVEEFQNLEKENSISKRAEIKYFKKNEWKKKNTKDGGGTYYLLKNGNLFDKVGINHSTVQGLFPKTFKSNIPGTKKNNSYWASGISVVAHMKNPKIPAIHFNTRFVVTSKSWFGGGMDVTQSFKDFKEKKFLHNELRFLCKNNKKNYDRYKKWCDKYFYIKHKKEIRGIGGIFFDYLYNEWEKNFKFIRELGICFLNTSKIIIQKKSL

SEQ ID NO: 97269 - protein, 174 aa, Unknown
  Bacterial polypetide isolated from the Sargasso Sea
MDKYIKKKLTRNWFINLQEMICNTIQQVEGGKIKFFKKSWKRNIKKDEGGGCYYILENGKVFDKVGVNFSEVYGKLTEEFKKKIPGTKNNRDFWASGVSVVMHMKNPHVPAMHFNTRYIYTNHGWFGGGMDVTPCFNDPAIKKLLFKKLKKVCDRHNKKYFKKYKKWCDEYFYL

SEQ ID NO: 97270 - protein, 97 aa, Unknown
  Bacterial polypetide isolated from the Sargasso Sea
VISNGNFFDNCAVNFSSIYGKNMPTSALGKKLAKKIDHGYQAMGVSVISHPKNPYVPTSHMNVRLFGILDKNKNIKDWWIGGGYDLTPYISFSEDNI

SEQ ID NO: 97271 - protein, 192 aa, Unknown
  Bacterial polypetide isolated from the Sargasso Sea
ILGADKNPNYWASGISVVAHMKNPKIPAMHFNTRFIVTSKNWFGGGMDATPSFKDDRERKFFHNKIKFTCDKYNKRYYPKYKKWCDRYFYLPHRKETRGIGGIFFDYKKGNWENDFSFVRNVGLCFLDCAKNIIKKKYRLKWTKNQKNEQLYKRGRYIEFNLLYDRGTKFGLNTGGNVEAILMSLPPNAKWK

SEQ ID NO: 97272 - protein, 98 aa, Unknown
  Bacterial polypetide isolated from the Sargasso Sea
TLDHGLKLSQNVCEAFTNSYVEIINKRKDLGFEERDKEFQKFRRGRYVEFNLVYDRRTLFGIHTGGRIESILMSLPNDVAWRYKFDENLTEKEKNLYK

SEQ ID NO: 97273 - protein, 39 aa, Unknown
  Bacterial polypetide isolated from the Sargasso Sea
DEYFYLPHRKEPRGIGGIFFDYKKENWEKDFSFVREVGI

SEQ ID NO: 97274 - protein, 195 aa, Unknown
  Bacterial polypetide isolated from the Sargasso Sea
MDDVWEKKDLGQGNSIVIDDGNFFDKAGINFSSISGKSLPESSVGKKSKSMGLPFFATGVSVVFHPKNPYIPTSHLNVRYFCTYKEDKVFEEWFGGGFDLTPYILNEVDCKKWHEGAKYACKLVGANFYEKAKKNCDEYFFIPHRKEHRGIGGIFYEKQKFNQIEEGLHFSDRVSEQFIENYLEIINKHKDTKYT

SEQ ID NO: 97275 - protein, 280 aa, Unknown
  Bacterial polypetide isolated from the Sargasso Sea
MIKNIEIKKQFVSNWFVFLQSQICEQFEAIEKKFSKKKIKKNKKFLVRKWFKKNKEEGGGLSLILENGTVFDKVGINQSTVSGIFKKEFRSKIPGAKKDGKYWASGISIVAHMKNPKIPAFHFNTRFIVTTKEWFGGGIDVTPSYKDLKEKKKIHNKLKAICLNNNKNYLKYKKWCDKYFYLPHHNETRGIGGIFFDYETKDWINNFEFVRNLGICFMDITKEIINKKGKLKWNKKEKEKQSFKRGKYVEFNLLYDRGTKFGLNSGGNIEAILMSIPPKP

SEQ ID NO: 97276 - protein, 180 aa, Unknown
  Bacterial polypetide isolated from the Sargasso Sea
MDQYIKKKLARNWFKTLQEVLCREIEEKESNKIKFKITNWNRSKSNDEGGGQYRILENGKIFDKVGVNFSEVYGKFSNEFKNKVPGTKKSSKFWASGISVVMHMKNPHVPAMHFNTRYIVTSFGWFGGGMDVTPCIKDKKLENWFHSELKKSCDKHNKNYYKKYKKWCDEYFYLPHKEGA

SEQ ID NO: 97277 - protein, 216 aa, Unknown
  Bacterial polypetide isolated from the Sargasso Sea
MKKIEQKKKLSSQWFKELRDNICQEIEKLEITGKKFKKKKWNRDKKGTNALGGGEMSVLRGKTFEKAGVNISTVFGPISNELKGKIPGSKTTKNFWASGISVVIHPYSPKIPAIHMNTRFIVTGKNWFGGGTDITPNNLKSANSIKLANYFHGKLKEICEKYKKGSYIKYKNWCDEYFFLPHRNEPRGLGGIFYDYLDSKNWESDFSFTKDVGQTF

SEQ ID NO: 97278 - protein, 223 aa, Unknown
  Bacterial polypetide isolated from the Sargasso Sea
MTNTEIKKSLVNNWFDYLQLQICGEFENLENSLNGKSKRFGKRVWKKKDLNEGGGASYLLSNGKLFDKVGVNKSTVSGVFKKEFRSNILGAQKDGKYWASGVSVVAHMKNPKIPAFHFNTRFIVTSKEWFGGGMDATPSFSDKKEKEKIHKKLKELCLTNKKNYKKYKKWCDRYFYLPHRKEPRGIGGIFFDYETKNWEKNFKFVRDLGLTFIEITKGSILKN

SEQ ID NO: 97279 - protein, 148 aa, Unknown
  Bacterial polypetide isolated from the Sargasso Sea
MTNRSNQAIQFAQLVQDRQNDICKALADVDGGEFKEDIWERPGGGGGKTRIITGDVIEKGGVNTSEVFGHLKASELPMFNQLIQRVDSTAEATEDSSFYATGISLVIHPHNPHVPTVHANFRYFDIQLADRTLWWIGGGADLTPLYFI

SEQ ID NO: 97280 - protein, 267 aa, Unknown
  Bacterial polypetide isolated from the Sargasso Sea
MSDKQFNLAKDWFEDLRNQLINLVSEIDGKEFVQTNWSHRHEGGGTMSKIKGPVIEKGGVNISSVYGEFNSEMQNKIPGAKKDPKYKATGISVVLHPVSPKIPSMHFNTRFLITSEKWFGGGMDITPCLDFNKIDDYHDGLKKLCNEYYPNKYSEFKKWCDDYFYLPHRDEPRGAGGIFFDYLKNNWENDFEFIKNVGKYFRDFVETTLIELKNEKWNEREKNIQLVKRSRYAEFNLLHDRGTKFGLETGGNIDAILMSMPPIAKWD

SEQ ID NO: 97281 - protein, 240 aa, Unknown
  Bacterial polypetide isolated from the Sargasso Sea
MDLNLEIQKKLSSEWFLYLQSLICYEFERIEKEVSKRKRMVSKKFKKNTWSKKDVNEGGGQYFILKNGQVFDQVGVNFSRVQGRFPKNFRSKIPGANKNPNYWASGISVVAHMKNPKVPAVHFNTRFITTSKSWFGGGMDVTPSFKDTGEETLVHKNLKNLCIKNKKNYNNYKKWCDSYFFIKHREEPRGIGGIFFDYLYNDWDQNFKFIRELGLCFLTTSQEIINSKIKKKWNKKHKYD

SEQ ID NO: 97282 - protein, 301 aa, Unknown
  Bacterial polypetide isolated from the Sargasso Sea
MIANLERQFKQIQTTIYSSFSQLESSNEIDISEDAWKRPEGGGGKTIVMACGNFFDNCAINYSSIFGNKLPKAALAKSLNKNTKYGYQAMGISVISHPINPHIPSSHMNVRFFGILDKEKRINDWWIGGGYDLTPFIPYEEDILSWHSSAKDNLDSWDTNFYKIFSDNCNNYFNIPHRNERRGVGGIFFDNLSDLSIDNSIDFLKSVAQTYLDSYLKIINNRKMLKFTKEEKDFQLIRRGRYAEFNLIYDRGTAFGLQSNGRIESILASLPSDVKWSYKKNKEYKHLEKKLLKSINRDWNV

SEQ ID NO: 97283 - protein, 213 aa, Unknown
  Bacterial polypetide isolated from the Sargasso Sea
MKIKEKQRLTKKWFKDLQNLICKNIEDLEKKYGSRKKFKKNKWEHGEFRIIEGELIEKGGVAFSNVIGKFPKTFAKNIPGTKKKLNFWSSGVSVVLHPNSPKIPAMHFNTRFICTEKNWFGGGMDATPCFKDNKEKKIFHNELKKICDYHNKKYYPKYKKWCDNYFYLPHRKEPRGIGGIFFDYKMDKWEKDFLFVKDVGLVFVKLINKIMKK

SEQ ID NO: 97284 - protein, 280 aa, Unknown
  Bacterial polypetide isolated from the Sargasso Sea
MELNLEIQKKLSSEWFLYLQSIICDEFERIENEESKRKRKVSKKFKKNTWSKKDVNEGGGQYFILKNGQVFDQVGVNFSKVQGKFPKNFRSKIPGANKNPNYWASGISVVAHMKNPKIPAVHFNTRFITTSRSWFGGGMDVTPSFKDNKEKIFVHRNLKNLCAKNKKNYINYKKWCDKYFFIKHREEPRGIGGIFFDYLYNDWDKNFKFIRELGLCFLTTSKDIINNKISKKWNKKQKNDQYLKRKRYVEFNLLYDRGTKFGLNTGGNVDAIFMSFPPLN

SEQ ID NO: 97285 - protein, 270 aa, Unknown
  Bacterial polypetide isolated from the Sargasso Sea
MEIEEKKDLASSWFRNLRDQFCKEFETLDGSSFERTEWNHSGSGGGEISIMKGNVFEKVGVNISTVSGEFKEDYRSNVSGTEESPEYWASGLSIVAHMNSPFVPAFHFNTRFIVTGKSWFGGGADMTPTYIYNDDTEDFHNSLKDACDKYNKNYYPDFKKNCAEYFFLPHRGEERGVGGIFFDHLKTDDWETDFSFVKDVGLSFYKIVPHIINKRKDDNWTEEEKNKQLLKRGRYVEFNLLWDRGTQFGIKTGGNTDAILMSMPPDARWE

SEQ ID NO: 97286 - protein, 80 aa, Unknown
  Bacterial polypetide isolated from the Sargasso Sea
RHGSCTDGGATWEFNLVHDRGTLFGLQTNGRTEAILMSLPPLVRWEYGHTPDEGTPEAALMADFLRPRDWLAVDAGAAAS

SEQ ID NO: 97287 - protein, 166 aa, Unknown
  Bacterial polypetide isolated from the Sargasso Sea
NPKIPAIHFNTRFITTSKSWFGGGMDVTPSFKDNREKILVHKNLKNLCIKNKKSYNNYKKWCDKYFFIKHREEPRGIGGIFFDYLYNDWDQNFKFIRELGLCFLTTSQEIINSKIKKKWNKKHKYDQNLKRKRYVEFNLLYDRGTKFGLNTGGNVDAIFMSFPPLN

SEQ ID NO: 97288 - protein, 301 aa, Unknown
  Bacterial polypetide isolated from the Sargasso Sea
MTVKLEKYFKNIQSTIYNSFEELENPNTVNISKDSWKRPEGGGGKTIVLADGSFFDNCAVNYSSISGKDLPEAALANSLNKDTKFGYQAMGVSVISHPKNPHIPTSHMNVRLFGILDKKGKMTDWWIGGGYDLTPFIPYQDDILAWHKSAKKNLDSWNTGFYKIFSDNCNNYFNIPHRNERRGVGGIFFDNLSEFSVEKSIDFLKSVALCYLNSYLKIVNNRKMQTFTQDEKDFQLLRRGRYAEFNLIYDRGTAFGLQSNGRIESILASLPSNVKWSYKKSKEYKSLEKKLLKVVNRDWNV

SEQ ID NO: 97289 - protein, 270 aa, Unknown
  Bacterial polypetide isolated from the Sargasso Sea
MEIEEKKDLASSWFRNLRDQFCKEFETLDGSKFERTEWNHSGSGGGEISLMKGNVFEKVGVNISTVSGEFKEDYRSNVSGTEDSPEYWASGLSIVAHMNSPFVPAFHFNTRFIVTGKSWFGGGADMTPTYIYNDDTEDFHNSLKDACDKYDKNYYPDFKKNCAEYFFLPHRGEERGVGGIFFDHLTTDNWETDFSFVRDVGLSFFKIVPHIINKRKDDNWTEEEKNKQLLKRGRYVEFNLLWDRGTQFGIKTGGNTDAILMSMPPDARWE

SEQ ID NO: 97290 - protein, 176 aa, Unknown
  Bacterial polypetide isolated from the Sargasso Sea
MDQTIKKKLARNWFKTLQEVICQEIEELEAKKNIFKIKNWERGKNSNEGGGQFRILENGKIFEKVGVNFSEVYGKFSKEFRNRIPGGDKNPNFWAAGISVVMHMKNPHVPAMHFNTRYIYTSHGWFGGGMDVTPCLKDKSLEKWFHNELKKSCDKHNKNFYKKYKKWCDEYFYLPQ

SEQ ID NO: 97291 - protein, 266 aa, Unknown
  Bacterial polypetide isolated from the Sargasso Sea
WKRPEGGGGKTFVISNGNFFDNCAINFSSIYGKSMPTSALGKKLAKKIDHGYQAMGVSVISHPKNPYVPTSHMNVRLFGILDKNKNIKDWWIGGGYDLTPYISFSEDNIRWHNSAKETLDKYNKNFYKSFSENCNKYFYIPHRKERRGIGGIFFDNLSSFSLDDSVKMLNSIASTYLNSYLDIVSKRKKIKYSSDEKDFQLIRRGRYAEFNLIYDRGTSFGLQSNGRIESILASLPTEVKWKYKKNKKYKIMERALLKNLNRDWNE

SEQ ID NO: 97292 - protein, 275 aa, Unknown
  Bacterial polypetide isolated from the Sargasso Sea
MDISIKKDLASNWFKLLQNAICDDILKIEKNKLNFQSTSWKRSNNRDEGGGEYRILNNGKIFEKVGVNFSKVYGKFPKQFQRNIPGASKDPRFWASGISIVMHMQNPHIPAMHFNTRFICTTKNWFGGGMDVTPTIKDEKEKKNFHKILKAMCDRYNKNYYKKYKKWCDEYFYLPHRKEARGIGGIFFDYKNDNFENDFKFVRDVGVTFQMLFNEIINKKIKRKWTLKDKEFQYIKRGRYAEFNLLYDRGTKFGLQTGGNVEGILMSLPPIAKWK

SEQ ID NO: 97293 - protein, 212 aa, Unknown
  Bacterial polypetide isolated from the Sargasso Sea
MELITKKKIIKNWFMILQDIITNDIEKIEKKKNIFKSKHWSRGFNQGGGEFRIFENGKIFEKVGVNFSEVYGKLSHKFKGQIPGTDKNSNFWASGISVVMHMKNPHIPAMHFNTRYIVTSHGWFGGGMDVTPCLKDINFKNWLHKELKKTCDKHNKNYYKKYKKWCERYFYLPHRNEERGIGGIFFDYKKGNWDKDFAFVRDVGLLFTKIFK

SEQ ID NO: 97294 - protein, 210 aa, Unknown
  Bacterial polypetide isolated from the Sargasso Sea
GVNFSKVYGKFPKEFQKNIPGASKDPKFWASGISIVMHMQNPHIPAMHFNTRFICTTKNWFGGGMDVTPTIKDEKEKKNFHKILKTMCDRHNKNYYKKYKKWCDEYFYLPHRKEARGIGGIFFDYKNNNFENDFKFVRDIGVTFQMLFNEIIRKKIKRKWTLKDKELQYIKRGRYAEFNLLYDRGTKFGLQTGGNVEGILMSLPPIAKWK

SEQ ID NO: 97295 - protein, 221 aa, Unknown
  Bacterial polypetide isolated from the Sargasso Sea
MSKIKGPVIEKGGVNISTVYGEFNSEMQNKIPGAKKDPKYKATGISVVLHPVSPKIPSMHFNTRFLMTSEKWFGGGMDITPCLTFSKIDDYHNGLKKICNEYDPNKYSEFKKWCDEYFYLPHRDEPRGVGGIFFDYLKNNWENDFEFIKNIGNYFRDFVETTLIDLKNEKWNHKEKNIQLIKRGRYAEFNLLHDRGTKFGLETGGNIDAILMSMPPLAKWD

SEQ ID NO: 97296 - protein, 253 aa, Unknown
  Bacterial polypetide isolated from the Sargasso Sea
MLNKKKITKLWFKKLQTLICKTVIELEKGSGSKARFKSHKWKKGEFRIIKGNVIEKGGIAFSNVTGTFPKEFAKQIPGTEKNKTFWSSGVSVVLHPVNPKVPALHFNTRHIITDKNWFGGGIDATPCFRDAKLKSQFHSKLKTMCENHNKSYYKKYKKWCDEYFYLPHRNEMRGIGGIFFDYKMDDWKKDFDFVKDVGLTFNDIVRDIISQKMSEKFTKKDKEIQLLKRGRYVEYNLLYDRGTKFGLNTGGNI

SEQ ID NO: 97297 - protein, 195 aa, Unknown
  Bacterial polypetide isolated from the Sargasso Sea
AEKTGRFWASGISVVAHMCNPKIPAAHMNTRFLVTGEGSKMKTWFGGGCDLTPMTNDKKAEKLFHSDIKKMCDRYNKNYYEDYKLWCDEYFFLPHRNEPRGIGGIFFDYLNSLDWDKDLEFVKDVGLTFSKVYSNIIKERMFLDYSKKDKLEQLEKRGRYVEFNLLYDRGTVFGLKTGGNPEAILMSLPPQVSWK

SEQ ID NO: 97298 - protein, 115 aa, Unknown
  Bacterial polypetide isolated from the Sargasso Sea
MQNIKNVCDEYFYLPHRKESRGIGGIFFDYKKNNFEKDFKFVRDVGITFQLIFQKIIRKKIKKRWSVSDKEMQYIKRGRYTEFNLLYDRGTKFGLQTGGNIDGILMSLPPLAKWK

SEQ ID NO: 97299 - protein, 249 aa, Unknown
  Bacterial polypetide isolated from the Sargasso Sea
KLEKSSVKFVYTKWKKNKKRNEGGGEYRILKNGKIFEKVGVNFSEVKGKFSKEIAGKIPGTKRDRSFWASGISVVMHMKNPKIPAMHFNTRYIYTSFGWFGGGMDITPCIKDSKEKNWFHRELKKTCDIHDKKYYKKYKKWCDKYFYLPHRKERRGIGGIFFDYKKNDWEKDFAFVRDVGITFKNIFKTIILKKYKKKWNIKQKELQLLKRGKYVEFNLIYDRGTKFGLQTGGNVDAILMSLPPIVKWK

SEQ ID NO: 97300 - protein, 251 aa, Unknown
  Bacterial polypetide isolated from the Sargasso Sea
MNLEIKKDLVSNWFQTLQDAFCDDIIKIERNKTKFKSTNWKRNEKKDEGGGQYRILQNGNVFDKVGVNFSKVYGKFPKEFQKNIPGAYKDPKFWATGISVVMHMKNPLIPAMHFNTRYICTTHAWFGGGMDVTPSKVDDAEKKEFHKILKNMCNRHNKNFYRKYKKWCDEYFYLPHRKEARGIGGIFFDYKKDNFEKDFRFVRDVGITFQLIFNKIITKKIKRKWTARDKEMQYVKRGRYAEFNLLYDRGT

SEQ ID NO: 97301 - protein, 170 aa, Unknown
  Bacterial polypetide isolated from the Sargasso Sea
NPKIPAMHFNTRFICTKKNWFGGGMDITPSIKDNNEKKYFHNELKKMCDTHNKKYYTKYKKWCDRYFYIKHRNEIRGIGGIFFDYKMNEWEQDFSFVKDVGKFFVYILKKIIRKKMFKKWTKIEKEIQLLKRGRYVEFNLMYDRGTKFGLNSGGNTEAILMSMPPTAKWK

SEQ ID NO: 97302 - protein, 99 aa, Unknown
  Bacterial polypetide isolated from the Sargasso Sea
YGYEEDAVHWHATAKAACDPFGEDVYPRLKKWCDDYFYLPHRQEPRGVGGLFYDDLNEWGFDKTFSFMCSVGDGFLKAYAPILERSMDRPWTEPQRQWQ

SEQ ID NO: 97303 - protein, 133 aa, Unknown
  Bacterial polypetide isolated from the Sargasso Sea
ENFHKILKVMCDRHNKNYYKKYKKWCDEYFYLPHRKEARGIGGIFFDYKNDNFENDFKFVRDAGVTFQMLFHEIIKKKLKRKWTLKDKEFQYIKRGQYAEFNLLYDRGTKFGLQTGGNVEGILMSLPPVAKWK

SEQ ID NO: 97304 - protein, 198 aa, Unknown
  Bacterial polypetide isolated from the Sargasso Sea
EFRKNIPGADEDPRFWASGISLVAHMRSPLVPAAHMNTRFIVTTKPWFGGGGDLTPMYPNDDDTAAFHSAFEDACDRHDPAYYPKFKKWCDEYFHLPHRDEPRGVGGIFYDYLDTCDWDADFAFTQDVGEAFLEIYPKIVAAHMNETWTNNQREHQLFRRGRYVEYNLLHDRGTIFGLKTGGNVDAILMSLPPEVKWP

SEQ ID NO: 97305 - protein, 260 aa, Unknown
  Bacterial polypetide isolated from the Sargasso Sea
RWRKTIVIADGSFFDNCAINYSSIYGKKLPKAALASSLNKSTKYGYQAMGISVISHPKNPHIPTSHMNIRFFGILDKNKDIKDWWIGGGYDLTPFIPYKEDILSWHRSAKDNLDAWNTNFYKNFSDNCNNYFNIPHRNERRGIGGIFFDNFSDLNVEDSFNFLKSVALCYLDSYLKIIDKRKMLKFTKDEKNFQLIRRGRYVEFNLIYDRGTAFGLQSNGRIESILASLPSNVKWSYKKNKEYKSLEKKLINVIKRDWNV

SEQ ID NO: 97306 - protein, 224 aa, Unknown
  Bacterial polypetide isolated from the Sargasso Sea
MADSWFSYLQIQICKEFSQLEKNKVKFTKRDWNKKRKKEGGGTSYLLSGGKIFDKVGVNKSTVSGIFPKQFRSKILGAEKNGKYWASGISVVAHMKNPKIPAIHFNTRFIVTSKEWFGGGIDVTPCFKDSKEKKILHNDLKKVCVQNKKNYKKYKKLCDRYFYLPHRKEARGIGGIFFDYETNDWIKNFKFVRELGISFIEISKKIIKRKEKLKWSSKDKEKQF

SEQ ID NO: 97307 - protein, 153 aa, Unknown
  Bacterial polypetide isolated from the Sargasso Sea
YGWFGGGMDITPCKKDDNLKKWYHKELKYMCDQHNKNYYKIYKKWCDEYFYLPHRKEMRGIGGIFFDYKKENWEKDFYFVRDVGITFKNIFRQIIFKKNKVKWNSKDKEIQYLKRGRYVEFNLLYDRGTKFGLQTGGNVEGILMSLPPLAKWK

SEQ ID NO: 97308 - protein, 224 aa, Unknown
  Bacterial polypetide isolated from the Sargasso Sea
MDPITKKKLARNWFKTLQEVLCQEIEELEGSSNLFIYKDWERGKKSSEGGGQFRIHENGKIFEKVGVNFSEVYGKFSKQFRNKIPGTNKNSKFWASGISIVMHMKNPHVPAMHFNTRYIYTSHGWFGGGMDITPCIKDKKTEKWFHAELKKSCNKHNKNYYKKYKKWCDQYFYLPHRNEPRGIGGIFFDYKKDNWEKDFSFVREVGISFKNIFREIILRKNKKK

SEQ ID NO: 97309 - protein, 241 aa, Unknown
  Bacterial polypetide isolated from the Sargasso Sea
FKKTTWRKSQKREEGGGKYAIMKNGLVFDSVGVNFSEVSGKFHKKFRSQILGAKKNPNYWASGISVVAHMKNPKIPAMHFNTRFIVTSKSWFGGGMDATPSVKDDFEKKFFHKKIKSTCDRYNKKYYPKYKKWCDNYFYLPHRKETRGIGGIFFDYKNDNWEKDFSFVMNIGLCFLDCAKKMIIKKINYNWSKKEKDAQLYKRGRYIEFNLLYDRGTKFGLNTGGNVEAILMSLPPMAKWK

SEQ ID NO: 97310 - protein, 103 aa, Unknown
  Bacterial polypetide isolated from the Sargasso Sea
YLPHRKEARGIGGIFFDYKDDNFEKDFKFVRDVGITFQMIFNEIIRKKIKKKWSLKEKEKQYIKRGRYAEFNLLYDRGTKFGLQTGGNVEGILMSLPPLAKWK

SEQ ID NO: 97311 - protein, 181 aa, Unknown
  Bacterial polypetide isolated from the Sargasso Sea
AAGISVVMHMKNPHVPAMHFNTRYIYTSHGWFGGGMDVTPCLKDKSLEKWFHNELKKSCNKHNKNFYKKYKKWCDEYFYLPHRKEPRGIGGIFFDYKKENWEKDFSFVREVGISFKNIFREIILKKYKKKWSNKQREIQLEKRGRYVEFNLLYDRGTKFGLQTNGNVEAILMSLPPVAKWK

SEQ ID NO: 97312 - protein, 234 aa, Unknown
  Bacterial polypetide isolated from the Sargasso Sea
MEIDIKKKLARNWFKVLQDMICFEIEEIEKNKKKFISNHWEKNKKKDEGGGEYRILENGKVFEKVGVNFSEVYGKFSKEFRKKIPGANSDPNFWASGISIVMHMQNPHVPAMHFNTRYIYTSFGWFGGGMDVTPSIEDKKLKNWFHKELKLTCDRHNKSFYKKYKKNCDEYFYLPHRKETRGIGGIFFDYKKENWEKDFSFVRDVGLTFKKISREIINKKNNKKWNNKEKEVQY

SEQ ID NO: 97313 - protein, 117 aa, Unknown
  Bacterial polypetide isolated from the Sargasso Sea
NYYSKYKKWCDKYFYLPHRNEPRGIGGIFFDYKKENWEKDFAFVREVGLCFKNIFREIILKKAKKKWTNKEKEIQYLKRGRYVEFNLLYDRGTKFGLQTGGNVEGILMSLPPIAKWK

SEQ ID NO: 97314 - protein, 275 aa, Unknown
  Bacterial polypetide isolated from the Sargasso Sea
MKIEKKQKLVKSWFMDLQEIICDTIEKIEKDYGSNVKFKKNRWKHGEFRTIKGQVIEKGGVAYSNVKGKLSKELAKKVPGAKNKLSFWSSGVSVVLHPKNPKIPAMHFNTRFICTKKNWFGGGMDATPCLTDNREKKYFHNELRKMCDSHNKKYYSNYKKWCDRYFYLPHRKETRGIGGIFFDYKMDDWEKDFLFVKDAGVTFNYLARNIIRKKMFLKWKKKEKDLQLIKRGRYVEFNLLYDRGTKFGLNSGGNPKAILMSMPPIASGNNLGKRA

SEQ ID NO: 97315 - protein, 234 aa, Unknown
  Bacterial polypetide isolated from the Sargasso Sea
KSSNPKEGGGIYYIIKNGAIFDSVGINFSEVSGKFNKKFRSQILGANKNPNYWASGISVVAHMKNPKIPAMHFNTRYIVTSKNWFGGGMDATPSMKDVEEKKFFHKKIKFTCDKYNKKYYPKYKKWCDRYFYLPHRKESRGIGGIFFDYKKDDWKKDFSFVRNIGLCFLDCAKSIIERKMNTRWSKKQKNEQLYKRGRYIEFNLLYDKGTKFGLNTGGNVEAILMSLPPSAKWK

SEQ ID NO: 97316 - protein, 226 aa, Unknown
  Bacterial polypetide isolated from the Sargasso Sea
GGEYRILKNGKVFDKVGINFSKVYGKFPKKFQNNIPGAQKDPRFWASGISVVMHMKNPLVPAMHFNTRFICTTQKWFGGGIDVTPSKKDNYERKNFHQTLKNMCNRHNNNYFKKYKKWCDEYFYLPHRNEPRGIGGIFFDYKNDNFENDFKFVRDVGITFQYLFNEIIKKKMKKKWTIEDKEAQYIKRGRYAEFNLLYDRGTKFGLQTGGNVEGILMSLPPIAKWK

SEQ ID NO: 97317 - protein, 148 aa, Unknown
  Bacterial polypetide isolated from the Sargasso Sea
GGGMDVTPSFEDNKEKKLLHHDLKKVCIQNKKNYKKYKKWCDEYFYLPHRGELRGIGGIFFDYETKDWTKNFKFVRELGLSFIQISKKIIKRKEKLKWSKIDKEKQLLKRGRYVEFNLLYDRGTRFGLNSGGNIDSILMSLPPEARWK

SEQ ID NO: 97318 - protein, 187 aa, Unknown
  Bacterial polypetide isolated from the Sargasso Sea
MDEIIKKKLARNWFKTLQEVICQEIEELEGKKKIFKIKNWERGIKSNEGGGQFRILENGKIFEKVGVNFSEVYGKFSKEFRKKIPGGEKKPKFWASGISIVMHMQNPHVPAMHFNTRYIYTSHGWFGGGMDVTPCLKDNSLEKWFHKELKVSCDKHNKKYYKKYKKWCDEYFYLPHRKEPRGIGGIF

SEQ ID NO: 97319 - protein, 265 aa, Unknown
  Bacterial polypetide isolated from the Sargasso Sea
MTDSWFSYLQIQICKEFEFLEKGKTKFIRREWNKKNKNEGGGTSFLLSKGNLFEKVGVNKSTVSGTFPKNFRDKILGAEKNGKYWASGISVVAHMKNPKIPAIHFNTRFIVTNKEWFGGGMDVTPSHQDAKEKKLVNNMLKKTCLKNKKNYKKYKKWCDEYFYLPHRKEIRGIGGIFFDYETGNWIKNFKFVRELGLSFINISRKIIERKKNSKWSQKDKEKQLMKRGRYVEFNLLYDRGTKFGLNSGGNIDSILMSLPPHAKWK

SEQ ID NO: 97320 - protein, 124 aa, Unknown
  Bacterial polypetide isolated from the Sargasso Sea
MCDQHNKNYYIKYKKWCDEYFYLPHRKEARGIGGIFFDYKDDNFEKDFKFVRDVGITFQMIFNEIIRKKIKKKWSLKEKEMQYIKRGHYAEFNLLYDRGTKFGLQTGGNVEGILMSLPPLAKWK

SEQ ID NO: 97321 - protein, 110 aa, Unknown
  Bacterial polypetide isolated from the Sargasso Sea
NGVITIFILPHRKETRGIGGIFFDYKKEDWVKDFSFVREVGINFKNLFRHIIMKKNKKKWTKHQKNIQNEKRGRYVEFNLLYDRGTKFGLQTNGNVEAILMSLPPVAKWK

SEQ ID NO: 97322 - protein, 118 aa, Unknown
  Bacterial polypetide isolated from the Sargasso Sea
GGIFFDDQNDRDPEKIFAFSKECLDSLVPAYLPLVAKHKDDSYTQKQKEWQQMRRGRYVEFNLVYDRGTVFGLKTGGRIESILMSLPETARWEYNHQVEPGTPEADILDAFKNPREWC

SEQ ID NO: 97323 - protein, 247 aa, Unknown
  Bacterial polypetide isolated from the Sargasso Sea
IEKNSKFLVNRWNKNEEKDEGGGEYRILKDGKIFDKIGVNFSEVYGKFSNNFRGKIPGTSKSAKYWASGISIVMHLRNPHVPAMHFNTRYIQTEKEWFGGGMDFTPCLNDRMEKKWIHNELRKMCNSHNKKYYQKYKTWCDKYFYLNHRKETRGIGGIFFDYKKDNWNNDFKFVRDVGLTFQHIFRTVISKKANKKWSIKDKEKQFLKRGRYVEFNLLYDRGTRFGLDTGGNTEAILMSLPPLAKWK

SEQ ID NO: 97324 - protein, 239 aa, Unknown
  Bacterial polypetide isolated from the Sargasso Sea
MSKNKNNYNQYKFIEKNFFNLRNQICSEFESIENNLSSNNKNNLNPGKFKKTTWQRKPDKGFSSGGGGVMSIMYGRVFEKVGVNISTVMGSFTKEMRDKIPGAKSNPNFYATGISLVAHMHSPLIPAAHFNTRFIRTTKNWFGGGADLTPTYLNKSKIVSKLFHADLKNTCDKYNTLFYPKYKKWCDEYFYLPHRKEKRGLGGIFFDYLEDDFERDYKFVKDIGQTFLKSYSKIISKKM

SEQ ID NO: 97325 - protein, 248 aa, Unknown
  Bacterial polypetide isolated from the Sargasso Sea
MEISTKKSIVKNWFLILQDIITNDIEKLENKKNVFKIKNWSRGPDGGGGQFRIFENGKLFEKVGVNFSEVYGKFPKKFKGQVPGTKKNSNFWASGISVVMHMKNPHIPAMHFNTRYIVTSHGWFGGGIDVTPCLRDEILKKWLHNELKKACNKHNKNYYKKYKKWCEKYFFLPHRNEERGIGGIFFDYKKSNWEKDFAFIRDVGLSFTKIFNEIIKKKRKKKWTTKQKELQYLKRGRYVEFNLLYDRG

SEQ ID NO: 97326 - protein, 114 aa, Unknown
  Bacterial polypetide isolated from the Sargasso Sea
KFKKACDEYFYLAHREEPRGVGGIFFDYHDTGDWMSDFALTRDIGLAFLEVYPRIIRRSMNKSWTDDEREHQLIRRGRYVEFNLLYDRGTQFGLKTGGNVEAILMSLPPEVRWP

SEQ ID NO: 97327 - protein, 134 aa, Unknown
  Bacterial polypetide isolated from the Sargasso Sea
KEEFYFHNKLKKVCKENQKNYYRFKNWCDKYFFLKHRNEPRGIGGIFFDYENKNWEKDFKFVREVGMSFLEISKNIINKKKSLKYNDNDKEKQFLKRGRYVEFNLLYDRGTKFGLNSGGNTEAILMSLPPKAKW

SEQ ID NO: 97328 - protein, 221 aa, Unknown
  Bacterial polypetide isolated from the Sargasso Sea
SFKKIQSLIIKNFKLLEGSSSAEISSDVWKRPEGGGGKTFVISNGNFFDNCAVNFSSIYGKNMPTSALGKKLAKKIDHGYQAMGVSVISHPKNPYVPTSHMNVRLFGILDKNKNIKDWWIGGGYDLTPYISFSEDNISWHNSAKETLDKYNKNFYKLFSENCNKYFYIPHRKERRGIGGIFFDNLSSLSLDDSLKMLNSIASTYLNSYLDIVSKRQKIKYS

SEQ ID NO: 97329 - protein, 225 aa, Unknown
  Bacterial polypetide isolated from the Sargasso Sea
MKISQEIEKKLTGQWFAFLQEKIVEEFQNLESEFSIKNRTKVTYFKKKLWKKKDPKDGGGQYYILRNGQIFDKVGVNHSTVEGVFQKNYKSNIPGTKKNQNYWASGVSVVAHMRNPKIPAVHFNTRFVVTSKKWFGGGMDVTPSLEDSNEKKLVHKNLKLVCNNNKKSYKNYKKWCDDYFLIKHREETRGIGGIFFDYLYKDWEKNFKFVRDVGIGFIDITKNVD

SEQ ID NO: 97330 - protein, 236 aa, Unknown
  Bacterial polypetide isolated from the Sargasso Sea
LQNAICDDILKIEKNKVNFESTSWKRSIKKDEGGGEYRILKNGKIFEKVGVNFSKVYGKFPKQFQKKIPGASKDPKFWASGISIVMHMQNPHIPAMHFNTRFICTKKNWFGGGMDVTPAVKDETEKKNFHKILKAMCDRHNKNYYKKYKKWCDEYFYLPHRKEARGIGGIFFDYKNNNFENDFKFVRDVGVTFQMLFNEIIKKKIKKKWTLKDKEFQYIKRGRYAEFNLLYDRGTK

SEQ ID NO: 97331 - protein, 180 aa, Unknown
  Bacterial polypetide isolated from the Sargasso Sea
IWNLSCNAYEKSINSCNAFNTRYICTTQCWFGGGMDVTPSKIDKTETKDFHKILSNMCNRHDKNYYKKYKKWCDEYFYLPHRKESRGIGGIFFDYKKDNFNKDFKFVRDVGVTFQIIFNKIISNKIKKKWTIKDKEDQYIKRGRYTEFNLLYDRGTKFGLQTGGNVEGILMSLPPLAKWK

SEQ ID NO: 97332 - protein, 237 aa, Unknown
  Bacterial polypetide isolated from the Sargasso Sea
MELNLETQKKIASEWFKFLQLKILEEFQYLEKELSKKKRVPPKRFKKNHWKKGKFGEGGGTYYILKNGQLFEKVGINHSTVMGIFPKKFRGSIPGTKKNNSYWASGISIVVHMKNPKIPAMHFNTRFVVTSKSWFGGGMDVTPSFKDLNEKKLFHRELKILCKNNKKNYNKYKNWCDNYFYLGHRKEARGIGGIFFDYLYKDWKKNFKFIREVGICFLNISKAIIDKKIFSEWSNKQ

SEQ ID NO: 97333 - protein, 261 aa, Unknown
  Bacterial polypetide isolated from the Sargasso Sea
MIRNLENIFKKIQENILLKFEELEGNSTNEKSLDSWIRKEGGGGKTAVIANGNFFDNCAVNYSSIVGKKLPEAALKNKKKLSNGKFSAMGVSVISHPKNPHVPTSHMNVRLFCLFDSDDNIKDWWIGGGYDLTPYLPYSDDIKDWHKQAKHFLDSFDETYYKNFSKECNDYFYIPHRKERRGVGGIFFDNEKDLSIENSLSFLENVAKQYLNSYLKIASKRKDTEYSQAEKEFQLIRRGRYVEFNLVYDRGTAFGLQSDGR

SEQ ID NO: 97334 - protein, 158 aa, Unknown
  Bacterial polypetide isolated from the Sargasso Sea
FICTKKNWFGGGIDLTPCLKDEKEKNFFHEKLKKMCDLHNKEYYTKYKKWCDEYFFLPHRNEPRGIGGIFFDYKMNNWEKDFLFVKHAGYVFNEIIHEVISKKMFSKWSKKQKKIQAYKRGRYVEFNLLYDRGTKFGLNSGGNPSAILVSLPPSPKWK

SEQ ID NO: 97335 - protein, 154 aa, Unknown
  Bacterial polypetide isolated from the Sargasso Sea
NKLPDSSIANKIKTKSKKFHAMGVSVIAHPMNPLCATSHMNVRIFMELETDNSIQNWWVGGGFDLTPFFPTSKESRSWHSSAKKCLNNFNSNYYKKFAKDCDNYFYLPHRNEKRGIGGIFFDQLQHKNISDSLIFLDEIANCYIETYAKLVSAK

SEQ ID NO: 97336 - protein, 222 aa, Unknown
  Bacterial polypetide isolated from the Sargasso Sea
RILKNGKIFDKVGVNYSKVYGKFPKQFQKNIPGAKQNPRFWASGISVVMHMKNPLIPAMHFNTRYICTTHEWFGGGMDVTPSKIDEDEKKQFHSTLKKMCDRHNKKYYHRYKKWCDEYFYLPHRKETRGIGGIFFDYKKNNFEKDFKFVRDVGITFQVIFEKIIRKKIKKKWSLKDKEKQYLKRGRYTEFNLLYDRGTKFGLQTGGNVEGILMSLPPLAKWK

SEQ ID NO: 97337 - protein, 179 aa, Unknown
  Bacterial polypetide isolated from the Sargasso Sea
GISIVMHMQNPHIPAMHFNTRFICTKKNWFGGGMDVTPAIKDMSEKNNFHKKLKLMCDQHDKKYYAKYKKWCDEYFYLPHRSEARGIGGIFFDYKKDNFEKDFKFVRDVGVTFQMLFNNIIRKKISKKWTLKEKEKQYIKRGRYAEFNLLYDRGTKFGLQTGGNVEGILMSLPPIAKWK

SEQ ID NO: 97338 - protein, 175 aa, Unknown
  Bacterial polypetide isolated from the Sargasso Sea
VMHMKNSHVPAMHFNTRYIHTSHGWFGGGMDITPCIKDKKLERWFHAELKKSCDKHNKDYYKKYKKWCDEYFYLPHRNEPRGIGGIFFDYKKNNWEKDFSFVREVGITFKNIAREIILKKYKKKWTKKEKEIQYEKRGRYVEFNLLYDRGTKFGLQTGGNVEAILMSLPPLAKWK

SEQ ID NO: 97339 - protein, 212 aa, Unknown
  Bacterial polypetide isolated from the Sargasso Sea
MPTSALGKKLAKKIDHGYQAMGVSVISHPKNPYVPTSHMNVRLFGILDKKKNIKDWWIGGGYDLTPYISFSEDNISWHNSAKETLDKYNKNFYRSFSENCNKYFYIPHRKERRGIGGIFFDNLSSLSLDDSVKMLNSIASTYLNSYLDIVSKRKKIKYSSDEKDFQLIRRGRYAEFNLIYDRGTSFGLQSNGRIESILASLPTEVKWKYKKK

SEQ ID NO: 97340 - protein, 190 aa, Unknown
  Bacterial polypetide isolated from the Sargasso Sea
METNIKKKLAKNWFKTLQDMVCFEIEEIENNKKKFISNRWKKNKKKDEGGGEYRILKNGKVFEKVGVNFSEVYGKFSKEFSKKIPGTSADPSFWASGISIVMHMENPHVPAMHFNTRYIHTSFGWFGGGMDVTPCIEDKKLKKWFHKEIKLTCDKHNKKYYKKYKKKCDEYFYLPHRNETRGIGGIFFDY

SEQ ID NO: 97341 - protein, 222 aa, Unknown
  Bacterial polypetide isolated from the Sargasso Sea
MESFIQQLQDEICQALEKKDSRKFQEDCWKRKEGGGGRTRVLENGSFLEKGGVNISSVHGSMSDELAKQLGTKASFFGACGISLVLHPRSPKIPTVHMNLRYFETLSGDCWYGGGIDLTPYFPYPEDFRHFHHTLQQVCERCIPNSYDEYKKNCDEYFSLPHRQEMRGIGGIFFDHLKGSEEKYYGLVHEVGEEFLNAYLPLVDRRMNEEWNDEDVEFITTE

SEQ ID NO: 97342 - protein, 193 aa, Unknown
  Bacterial polypetide isolated from the Sargasso Sea
MDISIKKDLASNWFKLLQNAICDDILKIEKNKVNFKSTSWNRSNKKDEGGGEYRILKNGKIFEKVGVNFSKVYGKFPKQFQKNIPGVSKDPRFWASGISIVMHMQNPHIPAMHFNTRFICTTKNWFGGGMDVTPAIKDEKERNKFHKILKAMCDRHNKNYYKKYKKWCDEYFYLPHRKEARGIGGIFFDYKND

SEQ ID NO: 97343 - protein, 198 aa, Unknown
  Bacterial polypetide isolated from the Sargasso Sea
KEFRKKIPGTNSNPNFWASGISIVMHMKNPHIPAMHFNTRYVHTSFGWFGGGMDVTPCIEDKKLKNWLHKQLKLTCDRHNKNYYKKYKKNCDEYFYIPHRKEMRGIGGIFFDYKKKNWEKDFNFVQDVGLTFKKVFKEIINKKKNKKWSNKEKEIQYYKRGRYVEFNLIYDRGTRFGLQTGGNTNAILMSLPPIAKWK

SEQ ID NO: 97344 - protein, 255 aa, Unknown
  Bacterial polypetide isolated from the Sargasso Sea
EGKTMVMSDGSFFDNCAVNYSSIYGKDLPQAALANSLNKDTKFGYKVMGVSVISHPKNPHVPTSHMNVRFFGILDKKGKITDWWIGGGYDLTPFIPYEEDILSWHSSAKDNLDPWSTFFYEIFSEGCNSYFNIPHRNERRGVGGIFFDDLSLGSIDKSIDFLKSVAQTYLDSYLKIIDKRKMLKFTKNEKDFQLIRRGRYVEFNLIYDRGTAFGLQSNGRIESILASLPGNVKWSYKKSKEYKSLEKKLLKVINR

SEQ ID NO: 97345 - protein, 124 aa, Unknown
  Bacterial polypetide isolated from the Sargasso Sea
GIFFDDFNELGFNRSFEMVQQVGNSFLPAYLPIVQRRKNLQWGQREKTFQEYRRGRYVEFNLVYDRGTLFGLQSGGRIESILMSMPPVANWSYAFKPEEGTPESHLYRHLKPFDWINFEKDSSS

SEQ ID NO: 97346 - protein, 199 aa, Unknown
  Bacterial polypetide isolated from the Sargasso Sea
FSNEFKNKVPGTKKSSKFWASGISVVMHMKNPHVPAMHFNTRYIVTSFGWFGGGMDVTPCVKDKKLENWFHSELKKSCDKHNKNYYKKYKKWCDEYFYLPHRKEPRGIGGIFFDYKKNNWEEDFSFVREVGISFKNISNEIIEKKNKLKWTIKDKEIQYKKRGRYVEFNLLHDRGTKFGLQTGGNVEAILMSLPPTAKW

SEQ ID NO: 97347 - protein, 184 aa, Unknown
  Bacterial polypetide isolated from the Sargasso Sea
RFWASGISIVMHMQNPHIPAMHFNTRFICTTKNWFGGGMDVTPAIKDEKEKKNFHKILKAMCDRHNKNYYKKYKKWCDEYFYLPHRKEARGIGGIFFDYKNDNFENDFKFVRDVGVTFQMLFNEIIKKKLKRKWTLKDKEFQYIKRGRYAEFNLLYDRGTKFGLQTGGNVEGILMSLPPVAKWK

SEQ ID NO: 97348 - protein, 197 aa, Unknown
  Bacterial polypetide isolated from the Sargasso Sea
MDQIIKKKLTKNWFKTLQEVFCKEIEELEGKSNLFKITNWERGNKSKEGGGQFRILENGKIFDKVGVNFSEVYGKFNKKFKNKIPGGNKSTKFWASGISVVMHMKNPHVPAMHFNTRYIYTSHGWFGGGMDVTPCIKDKKLERWFHAELKKSCDKHNRSYYKKYKKWCDNYFYLPHRNEPRGIGGIFFDYKKDDWEK

SEQ ID NO: 97349 - protein, 195 aa, Unknown
  Bacterial polypetide isolated from the Sargasso Sea
QKNILGAEKDPSFWASGISIVMHMKNPHIPAMHFNTRFICTKKNWFGGGMDVTPAIKDVNEKKNFHKKLKLMCDQHDKKYYAKYKKWCDEYFYLPHRGEARGIGGIFFDYKKDNFEKDFKFVRDVGVTFQMLFNNIIRKKISKKWTLKEKEKQYIKRGRYAEFNLLYDRGTKFGLQTGGNVEGILMSLPPIAKWK

SEQ ID NO: 97350 - protein, 99 aa, Unknown
  Bacterial polypetide isolated from the Sargasso Sea
RQEARGIGGIFFDYETENWVKNFKFIRDLGLTFIEVSKKIIERKKKLRWTKKDKEKQLLKRGRYVEFNLLYDRGTKFGLYSGGNIDSILMSLPPKAKWK

SEQ ID NO: 97351 - protein, 180 aa, Unknown
  Bacterial polypetide isolated from the Sargasso Sea
SGVSVVLHPVNPKVPALHFNTRHIITSKSWFGGGIDATPCLEDKILKKNFHSKLKNTCDMHSKSYYPKYKKWCDEYFYLPHRKEIRGIGGIFFDYKMDNWDNDFEFVKDVGLTFVEIIKDVVRRKMFEKFTKKQKEIQLLKRGRYVEYNLLYDRGTKFGLNSGGNIDAILMSMPPNAKWK

SEQ ID NO: 97352 - protein, 183 aa, Unknown
  Bacterial polypetide isolated from the Sargasso Sea
MIENVFKKLQNNILDSFLSIDNQAKSDNTRWRYKHGGGGLSCEIFNGKVIEKGMVNFSSIRGDVLPNSALSKKSSGSIKKFLATGISVVIHPLNPFVPCSHLNVRYFETDRKDRWWFGGGYDLTPYFVYKDDVKLWHANTEKMCDKYDTNYYTKFSKQCDDYFYLTHRKENRGVGGIFYDNLH

SEQ ID NO: 97353 - protein, 241 aa, Unknown
  Bacterial polypetide isolated from the Sargasso Sea
MDKDIKKKLTRNWFINLQEMICNTIQQVEGGKIKFLKKSWRRSIKKDEGGGCYYILENGKVFDKVGVNFSEVYGKLTEEFKKKIPGTKNNKDFWASGVSVVMHMKNPHVPAMHFNTRYIYTNHGWFGGGMDVTPCFNDPTIKKLLFKKLKKMCDRHNKKYFKKYKKWCDEYFYLSHRKEPRGIGGIFFDYKKKNWEKDFGFVRDLGINFIQIFNQIISLRKSKKWNLKQKNIQYLKRGRYV

SEQ ID NO: 97354 - protein, 96 aa, Unknown
  Bacterial polypetide isolated from the Sargasso Sea
PRGIGGIFFDYEQNNWIKDFKFVRDVGLTFIDMSNKIINRKININWNKRDKEKQLIKRGRYVEFNLLYDRGTKFGLNSGGNIESILMSLPPEVKWK

SEQ ID NO: 97355 - protein, 99 aa, Unknown
  Bacterial polypetide isolated from the Sargasso Sea
RKEARGIGGIFFDYETKDWIKNFKFVRELGLSFIDISKKIVKRKEKFKWTKKDKEKQFFKRGRYVEFNLLYDRGTRFGLNSGGNIDSILMSLPPEAKWK

SEQ ID NO: 97356 - protein, 225 aa, Unknown
  Bacterial polypetide isolated from the Sargasso Sea
GEYRILVNGKVFDKVGVNFSEVYGKFSKEFRKKIPGTKSNANFWASGISIVMHMKNPHVPAIHFNTRYIYTTYGWFGGGMDVTPCIEDKNLKKWFHKELKILCNKHNKNYYKKYKKNCDEYFYLPHRNEPRGIGGIFFDYKKDNWQKDFDFVRDAGTTFKKIFKEIIDKKNYKKWTKKEKEIQYLKRGRYVEFNLLYDRGTRFGIQTGGNTNAILMSLPPIAKWK

SEQ ID NO: 97357 - protein, 94 aa, Unknown
  Bacterial polypetide isolated from the Sargasso Sea
MNEFERVRAYLTELQDRICAAIEAVDGRARFQEDLWQRAEGGGGRTRVLRDGAVFEQAGIGFSDVAGSRLPPSASANRPELAGASWRATGVSLV

SEQ ID NO: 97358 - protein, 243 aa, Unknown
  Bacterial polypetide isolated from the Sargasso Sea
GGSQKFLATKWSKSKKSEGGGNYRILKAGKVFDKVGVNKSTVSGKFSKKFRTNILGAQKDGNYWASGISVVAHMKNPKIPAMHFNTRFIVTKKSWFGGGIDLTPSFKDKKEEIYFHSKLKELCNNNRKNYNKYKIWCDKYFFLKHRNEKRGIGGIFFDYEKKNWEKDFQFVREIGIGFIELSSHIINNKIKLKYNKRDKERQYLKRGRYIEFNLLYDRGTKFGLNSGGNTEAILMSLPPKAKW

SEQ ID NO: 97359 - protein, 225 aa, Unknown
  Bacterial polypetide isolated from the Sargasso Sea
GEYRILKDGKIFDKVGVNFSKVYGKFPKKFQQNIPGAQKDPRFWASGISVVMHMKNPLIPAMHFNTRYICTTFDWFGGGIDVTPSKKDKKEKEVFHKTLRDMCNRHDKNYYKKYKKWCDEYFYLPHRKEPRGIGGIFFDYKKDNFEKNFKFVRDVGVTFESIFQKIISKKIKKKWTSKDKENQYIKRGRYAEFNLLYDRGTKFGLQTGGNVEGILMSLPPHAKWK

SEQ ID NO: 97360 - protein, 220 aa, Unknown
  Bacterial polypetide isolated from the Sargasso Sea
MDISIKKDLASNWFKLLQNAICDDILKIEKNKVNFQSNSWKRSNKKDEGGGEYRILKNGKIFEKVGVNYSKVYGKFPKQFQKNIPGANKDPRFWASGISIVMHMQNPHIPAMHFNTRFICTTKNWFGGGMDITPTIKDEKEKKNFHKILKAMCDRHNKNYYKKYKKWCDEYFYLPHRKEARGIGGIFFDYKNNNFENDFKFVRDVGVTFQMLFNEIIKKK

SEQ ID NO: 97361 - protein, 192 aa, Unknown
  Bacterial polypetide isolated from the Sargasso Sea
ILGAKRNPNYWASGISVVAHMKNPKIPAMHFNTRFIVTSKNWFGGGMDATPSIKDDKEKKFFHKKIKKTCDQYNKKYYPKYKKWCDKYFYLPHRKETRGIGGIFFDYKKGDWEKDFSFVRNLGLCFLDCAKNIIEKKMYAKWSKKQKNEQLYKRGRYVEFNLLYDRGTKFGLNTGGNVQAILMSLPPMAKWK

SEQ ID NO: 97362 - protein, 151 aa, Unknown
  Bacterial polypetide isolated from the Sargasso Sea
NWFGGGMDATPSLIDKKEKNYFHNKIKRICNQNQKNYKRYMKWCDNYFFLPHRNEARGIGGVFFDYETKDWKRNFKFVRELGICFINISSDIISKKINTKWSLKDKEKQYIKRGRYVEFNLLYDRGTKFGLNSGGNIESILMSLPPKAKWN

SEQ ID NO: 97363 - protein, 275 aa, Unknown
  Bacterial polypetide isolated from the Sargasso Sea
MDIKDKKMFSEKWFAYLQTQICKDFEDLEKKANSNKKFISTNWQKKKVSEGGGTYKILKDGKIFDKVGVNKSTVSGVFSKEFRKKIPGAKKNGKYWASGISVVAHMKNPKVPAIHFNTRFIVTTDQWFGGGIDLTPCIKDRKEEVYFHSQLKKVCNQNNKNYTKFKKWCDKYFFLTHRNEPRGIGGIFFDYQNKNWEKDFKFVRETGLTFLKISRSVIKNKFKKKYSIKDKEKQFFKRGRYVEFNLLYDRGTKFGLNSGGNPKAILMSLPPKAKW

SEQ ID NO: 97364 - protein, 224 aa, Unknown
  Bacterial polypetide isolated from the Sargasso Sea
MDLEIKQKLTSNWFKSLQEMFCKTIGDFEKNKISFKSTTWKRNLKKDEGGGEYRILKNGKIFDKVGVNFSKVYGKFPKKFQQNIPGAQKDPRFWASGISVVMHMKNPLIPAMHFNTRYICTTFDWFGGGIDVTPSKKDNKEKEVFHKTLRDMCNRHDKNYYKKYKKWCDEYFYLPHRKEPRGIGGIFFDYKKDNFEKNFKFVRDVGVTFETIFQKIISKKIKKK

SEQ ID NO: 97365 - protein, 108 aa, Unknown
  Bacterial polypetide isolated from the Sargasso Sea
CDNYFYLPHRKENRGIGGIFFDYKKENWQKDFDFVRDVGITFKKIFREIIKKKNKKKWTKKDKEIQYFKRGRYVEFNLLYDRGTKFGLQTGGNTEAILMSLPPLAKWK

SEQ ID NO: 97366 - protein, 191 aa, Unknown
  Bacterial polypetide isolated from the Sargasso Sea
MINLEFRKKITDSWFSYLQMQICKEFENLEKGKIKFKKRNWKKQNHKEGGGTSFLLTNGNIFEKVGVNKSTVSGKFKKNFRSKILGAKKDGKYWASGVSVVAHMKNPKIPALHFNTRFIVTTKEWFGGGMDVTPSHKDKREKLFVHSMLKKICKQNGKNYSKYKKWCDEYFFLPHRNESRGIGGIFFDYEK

SEQ ID NO: 97367 - protein, 310 aa, Unknown
  Bacterial polypetide isolated from the Sargasso Sea
NLEQLLENNMLINLEKSFKKIQSLIIKNFKLLEGSSSAEISSDVWKRPEGGGGKTFVISNGNFFDNCAVNFSSIYGKSMPTSALGKKLAKKIDHGYQAMGVSVISHPKNPYVPTSHMNVRLFGILDKNKNIKDSWIGGGYDLTPYISFSEDNIRWHNSAKETLDKYNKNFYKSFSENCNKYFYIPHRKERRGIGGIFFDNLSSFSLDDSLKMLNSIASTYLNSYLDIVSKRKKIKYSSDEKDFQLIRRGRYAEFNLIYDRGTSFGLQSNGRIESILASLPTEVKWKYKKNKKYKIMERALLKNLNRDWNE

SEQ ID NO: 97368 - protein, 236 aa, Unknown
  Bacterial polypetide isolated from the Sargasso Sea
MVTENQTKTEIQKKRATDWFARLRDDICSAFEVIEDDHKGALANQSAGRFERTPWTRETDDEAGEETGVMQGGGEMSVMRGRVFEKVGVNISTVQGTFSEKFAKEIPGAAEDGRFWAAGISLVAHMQSPLVPAVHMNTRYIVTTKSWFGGGTDLTPMIPDETDTRDFHAALKKVCDAHSVADHKRYKEWCDQYFFLKHRGEARGVGGIFYDYLESGDWDADFAFTQDVGRTFLEIY

SEQ ID NO: 97369 - protein, 197 aa, Unknown
  Bacterial polypetide isolated from the Sargasso Sea
MDTIIKKKLVKNWFKVLQDIICKDIEELEGKKDIFRSKTWFRNKNKNEGGGEFRILENGKIFEKVGVNFSEVYGKLSKKFKKKIPGTNKNSNFWASGISVVMHMKNPHIPAMHFNTRYIYTSHGWFGGGMDITPCINDNILKKWFHNELKKICNKHNKNYYKKYKKWCDNYFYLPHRNEPRGIGGIFFDYKKNNGKK

SEQ ID NO: 97370 - protein, 257 aa, Unknown
  Bacterial polypetide isolated from the Sargasso Sea
MSLEIKKDLASNWFKTLQDAFCDDIRKIEKNKIQFKSKTWKRNTKKDEGGGEYRILKNGKIFEKVGVNFSKVYGKFPKQFQKSIPGARKDPRFWASGISVVMHMKNPLIPAMHFNTRYIVTTQSWFGGGMDVTPSKIDKTEKKEFHNILRNMCNRHNKNYYKKYKKWCDEYFYLPHRKEPRGIGGIFFDYKKGNFEKDFKFVRDVGVTFQLIFNKIISKKIKKKWNSKDKEKQYIKRGRYTEFNLLYDRGTKFGLQT

SEQ ID NO: 97371 - protein, 230 aa, Unknown
  Bacterial polypetide isolated from the Sargasso Sea
MEENIKKKLARNWFLTIQELICHEIENIENGSSYFKTKVWSRSETKDEGGGKSKLLKNGNIFEKVGVNFSEVHGNFSNEFKKKIPRFNNSKNFWASGISIVMHMKNPYIPAMHFNTRYIITDHGWFGGGMDFTPCFKDSALKKIVEKKLKMMCNKHGKNYYKKYKKWCDDYFYLHHRNEPRGIGGIFFDYKKENWERDFAFVRDVGITFSYLFKEIIAKKFKKRWKKKDK

SEQ ID NO: 97372 - protein, 298 aa, Unknown
  Bacterial polypetide isolated from the Sargasso Sea
NLDLVGDKEKELASEWFQSLRNQICNAFEKLEIEQSTGPYSDLNPGQFERKETHRSSETGDDGGGGVMSVMRSGRLFEKVGVNISTVYGTLGEAAQKSISARNNIPDLDKDPRFWASGISLVAHMRSPKCPAVHMNTRMFWTSKGWWFGGGTDLNPMVEEIEDTRFFHKTLEKACDGHDKSYYPRFKKWADEYFMIKHWKEPRGVGGIFFDDHCTGNWHADFNFTKEVGKAFLDAYLPLTKKHRDEGWTEEEREWQLIKRGRYAEFNLVYDRGTQFGLQTGHNPEAVLMSLPPEAKWP

SEQ ID NO: 97373 - protein, 119 aa, Unknown
  Bacterial polypetide isolated from the Sargasso Sea
NKNYYPKYKKWCDEYFFLPHRNEPRGIGGIFFDYKKDNWEKNFNFVKDVGLEFIDIFKSSILKKNKLKWKKKHKEAQFIKRGRYVEFNLLYDRGTKFGLQTGGNVEGIFMSLPPTTKWK

SEQ ID NO: 97374 - protein, 183 aa, Unknown
  Bacterial polypetide isolated from the Sargasso Sea
FWASGISIVMHMQNPHIPAMHFNTRYIYTSHGWFGGGVDITPCFKDKKLKQWFHNEIKKSCDRHNKNYYSKYKKWCDEYFYLPHRKEARGIGGIFFDYKKDSWNKDFEFIRDIGVTFKNIFREIIIKKKKLKWTKKDKEIQYKKRGRYIEFNLLYDRGTKFGLQTGGNVEAILMSLPPIAKWN

SEQ ID NO: 97375 - protein, 131 aa, Unknown
  Bacterial polypetide isolated from the Sargasso Sea
FFLPHRNENRGIGGIFFDQLQHKDIDTSLYLLEKTSESYINAYEKIILDHRNNKFSNDEKDFQLYRRGRYVEFNLLFDRGTKFGIESNGRAESILASLPPFVSWLPLKSSRLKNKDKNLIKFINKSWSERL

SEQ ID NO: 97376 - protein, 246 aa, Unknown
  Bacterial polypetide isolated from the Sargasso Sea
KNKVNFQSTSWNRSSKRDEGGGEYRILKNGKIFEKVGVNFSKVYGKFPKQFQKNIPGASKDPRFWASGISIVMHMQNPHIPAMHFNTRFICTTKNWFGGGMDVTPAIKDEKEKKNFHKILKAMCDRHNKNYYKKYKKWCDEYFYLPHRKEARGIGGIFFDYKNDNFENDFKFVRDVGVTFQMLFNEIIKKKLKRKWTLKDKEFQYIKRGRYAEFNLLYDRGTKFGLQTGGNVEGILMSLPPIAKWK

SEQ ID NO: 97377 - protein, 235 aa, Unknown
  Bacterial polypetide isolated from the Sargasso Sea
ERNKKKDEGGGEYRILENGRVFEKVGVNFSEVYGKFSKAFRNKIPGTNYNSNFWASGISIVMHMKNPHVPAMHFNTRYIYTSFGWFGGGMDLTPCIKDDNFKKWFHKELKLSCDKHNKNYYKKYKKNCDEYFYLPHRKETRGIGGIFFDYKKENWEKDFNFVRDVGLTFKKIFRETINKKNNKKWNKKQKEIQYLKRGRYVEFNLLYDRGTRFGLQTGGNTNAILMSLPPTAKWK

SEQ ID NO: 97378 - protein, 265 aa, Unknown
  Bacterial polypetide isolated from the Sargasso Sea
MLINLEKSFKKIQSLIIKNFKLLEGSSSAEISSDAWKRPEGGGGKTFVISNGNFFDNCAVNFSSIYGKNMPTSALGKKLAKKIDHGYQAMGVSVISHPKNPYVPTSHMNVRLFGILDKNKNIKDWWIGGGYDLTPYLSFSEDNINWHNSAKETLDKYNKNFYRSFSENCNKYFYIPHRKERRGVGGIFFDNLSSLSLDDSLKMLNSIASTYLNSYLDIVTKRKKIKYSSDEKDFQLIRRGRYAEFNLIYDRGTSFGLQSNGRIES

SEQ ID NO: 97379 - protein, 230 aa, Unknown
  Bacterial polypetide isolated from the Sargasso Sea
KDEGGGEYRILENGKVFEKVGVNFSEVYGKFSSEFRKKIPGTNSDPNFWASGISIVMHMKNPHIPAMHFNTRYIHTSFGWFGGGMDVTPSFKDKRLKNWFHKELRLACNKHNKNYYKKYKKKCDEYFYLPHRKETRGIGGIFFDYKKGNWKKDFDFVRDMGLTFKKIFREIINKKKNKRWNNKEKEVQYLKRGRYVEFNLLYDRGTRFGLQTGGNTDAILMSLPPIAKWK

SEQ ID NO: 97380 - protein, 209 aa, Unknown
  Bacterial polypetide isolated from the Sargasso Sea
MDQTIKKKLARNWFKTLQEVICQEIEELEGKKNIFKIKNWERGKNSNEGGGQFRILENGKIFEKVGVNFSEVYGKFSKQFRNRIPGGDKNPNFWAAGISVVMHMKNPHVPAMHFNTRYIYTSHGWFGGGMDVTPCLKDKSLEKWFHNELKKSCNKHNKNFYKKYKKWCDEYFYLPHRTEPRGIGGIFFDYKKENWEKDFSFVREVGISF

SEQ ID NO: 97381 - protein, 119 aa, Unknown
  Bacterial polypetide isolated from the Sargasso Sea
NKNYYKKYKKWCDKYFYLSHRKEPRGIGGIFFDYKKKNWVKDFSFIRDVGITFKEIFSSIIKSKCKKKWTKKQKEIQYIKRGRYVEFNLLYDRGTRFGLQTNGNAEAILMSLPPIAKWK

SEQ ID NO: 97382 - protein, 124 aa, Unknown
  Bacterial polypetide isolated from the Sargasso Sea
MCDRHNKKYYKMYSKWCDKYFYLNHRKETRGIGGIFFDYKKDNWEKDFHFIKDVGLEFMKVFNEIISKKNKIRWSKADKEVQYFKRGRYVEFNLLYDRGTKFGLQTGGNIDAILMSLPPLAKWK

SEQ ID NO: 97383 - protein, 156 aa, Unknown
  Bacterial polypetide isolated from the Sargasso Sea
HFHQTLQQVCERCIPDSYEEYKKNCDEYFSLPHRQEMRGIGGIFFDHLNGSEEKYFNLVHEVGEEFLNAYLPLVDRRINEEWNDEDVEFHHYRRGRYVEFNLIYDKGTLFGIKSNGRIESIFMSLPPKVDFRYNWEPRKNSPHHEMNGFYQPQNWC

SEQ ID NO: 97384 - protein, 261 aa, Unknown
  Bacterial polypetide isolated from the Sargasso Sea
MLINLEKSFKKIQSLIIKNFKLLEGSSSAEISSDVWKRPEGGGGKTFVISNGNFFDNCAVNFSSIYGKNMPTSALGKKLAKKIDHGYQAMGVSVISHPKNPYVPTSHMNVRLFGILDKNKNIKDWWIGGGYDLTPYISFSEDNISWHNSAKETLDKYNKNFYKLFSENCNKYFYIPHRKERRGIGGIFFDNLSSLSLDDSLKMLNSIASTYLNSYLDIVSKRQKIKYSSDEKDFQLIRRGRYAEFNLIYDRGTSFGLQSNG

SEQ ID NO: 97385 - protein, 101 aa, Unknown
  Bacterial polypetide isolated from the Sargasso Sea
PHRKEARGIGGIFFDYKNDNFENDFKFVRDVGVTFQMLFNEIIKKKLKRKWTLKDKEFQYIKRGRYAEFNLLYDRGTKFGLQTGGNVEGILMSLPPVAKWK

SEQ ID NO: 97386 - protein, 220 aa, Unknown
  Bacterial polypetide isolated from the Sargasso Sea
METNIKKKLAKNWFRTLQDMICFEIEEIENNKKKFISNHWKKNKKKDEGGGEYRILENGKVFEKVGVNFSEVYGKFSEEFRKKIPGTNSNPNFWASGISIVMHMKNPHVPAMHFNTRYIHTSFGWFGGGMDVTPSIEDKKLKNWFHKELKLTCNRHNKNYYKKYKKNCDDYFYLPHRKETRGIGGIFFDYKKENWEKDFSFVRDVGLTFKRIFKEIINKK

SEQ ID NO: 97387 - protein, 101 aa, Unknown
  Bacterial polypetide isolated from the Sargasso Sea
PHRKEARGIGGIFFDYKNDNFENDFKFVRDVGVTFQMLFNEIIKKKIKRKWTLKDKEFQYIKRGRYAEFNLLYDRGTKFGLQTGGNVEGILMSLPPIAKWK

SEQ ID NO: 97388 - protein, 110 aa, Unknown
  Bacterial polypetide isolated from the Sargasso Sea
WCDDYFYLPHRKEPRGVGGIFLDYLCHEDWEKDFSFIRDIGSIFLISYLKIIKSRSNKEFSHKDRDFQLIKRGRYVEFNLLYDRGTIFGLKTGGNTEAVLMSLPPKVSWD

SEQ ID NO: 97389 - protein, 233 aa, Unknown
  Bacterial polypetide isolated from the Sargasso Sea
MDLDTKKNLASNWFKTLQNAFCESIIELENSKIEFKSTTWKRNKKKDEGGGEYRILKNGSVFDKVGVNFSKVYGKFPKRFQKNILGAKKNPNFWASGISVVMHMKNPLIPAMHFNTRYICTTQDWFGGGMDVTPSKKDEIEKKEFHKILRNMCNRHNKTYYSKYKKWCDEYFYLPHRKEPRGIGGIFFDYKKDNFYKDFKFVRDVGVTFQFIFEKIIKRKMKKKWTAKDKEMQ

SEQ ID NO: 97390 - protein, 269 aa, Unknown
  Bacterial polypetide isolated from the Sargasso Sea
MKLKEKQKLAKEWFVKLQNIICNNIEKLEKECGSKTKFKKNKWKHGEFRIIKGKVIEKGGVAFSNVIGRFPKEFAKKIPGTKNNTKFWSSGISVVLHPKNPKIPAMHFNTRFICTKKIWFGGGMDATPCLPDKNEKKYFHRTLKQMCDLHNKKYYPEYKKWCDNYFFLPHRNEPRGIGGIFFDYKKGNWEKDFLFIKDVGITFAYMVNKIIRKKMFLKWTKREKKIQQIKRGRYVEFNLLYDRGTKFGLNSGGNPKAILMSLPPSADWK

SEQ ID NO: 97391 - protein, 290 aa, Unknown
  Bacterial polypetide isolated from the Sargasso Sea
DEYLDREKIADHFKSFQAQIYKRIEGFEDNKSLIKDGWEKQNLGSGLSIVVDDGLVFNKAGINFSQISGDSLPESSLGILNESEKLPYFATGVSVVFHPNNPNIPTAHLNVRYFCTTKDGEIHNHWFGGGFDLTPYILFKEDCYDWHKSAKNACDQTDPGFYKTFKKNCDEYFYIPHRNEHRGVGGIFYEKLEIPLDQGIQFSKDVCAAFIETYTKILEKRKDLNFTQRDVDFQKFRRGRYVEFNLIHDRGTLFGLQTSGRIESILMSLPKDVSWRYKFDDNLEEKEKNL

SEQ ID NO: 97392 - protein, 264 aa, Unknown
  Bacterial polypetide isolated from the Sargasso Sea
MLINLEKSFKKIQSLIIKNFKLLEGSSSAEISSDVWKRPEGGGGKTFVISNGNFFDNCAVNFSSIYGKNMPTSALGKKLAKKIDHGYQAMGVSVISHPKNPYVPTSHMNVRLFGILDKNKNIKDWWIGGGYDLTPYISFSEDNISWHNSAKETLNKYNKNFYKLFSENCNKYFYIPHRKERRGIGGIFFDNLSSLSLDDSLKMLNSIVSTYLNSYLDIVSKRQKIKYSSDEKDFQLIRRGRYAEFNLIYDRGTSFGLQSKGRIE

SEQ ID NO: 97393 - protein, 203 aa, Unknown
  Bacterial polypetide isolated from the Sargasso Sea
MRAKLIKTIESHDGNRFKQKSWKHSGEGGGLMSLIKGNIIEKGGVNISTVSGIFSTEMQKKIPGADKNPQYWATGISVVLHPMNPNIPSIHFNTRFLQTEKSWFGGGMDITPCLEFVEEKNSFHNDLKSMCDKHNKNYYPKYKKWCDEYFFIKHRNEPRGIGGIFFDYLKTDDVESDFLFVQDTGKFFNHYIDQIIEKYKNKK

SEQ ID NO: 97394 - protein, 234 aa, Unknown
  Bacterial polypetide isolated from the Sargasso Sea
MDTIIKKKLVKNWFKVLQDIICKDIEELEGKKNIFKSKIWFRNKNKNEGGGEFRILENGKIFEKVGVNFSEVYGKLSKKFKKKIPGTNKNANFWASGISVVMHMKNPHIPAMHFNTRYIYTSHGWFGGGMDITPCIKDNILKKWFHNELKKTCNKHNKNYYKKYKKWCDNYFYLPHRNEPRGIGGIFFDYKKNNWEKDFSFVRDIGIAFKNISKNIVLKKKKKKWTKKQKNFNI

SEQ ID NO: 97395 - protein, 200 aa, Unknown
  Bacterial polypetide isolated from the Sargasso Sea
FSKKFRNKIPGTNKNSNFWASGISVVMHMKNPHVPAMHFNTRYIYTSYGWFGGGMDVTPCIKDKKLEKWFHSELKKSCDKFNKNYYKKYKKWCDEYFYLPHRNEPRGIGGIFFDYKKDNWEKDFAFVREIGINFTNLFREIILKKHKKKWTKKEKEIQYEKRGRYVEFNLLYDRGTKFGLQTGGNVDGILMSLPPLAKWK

SEQ ID NO: 97396 - protein, 242 aa, Unknown
  Bacterial polypetide isolated from the Sargasso Sea
MNLEIKKDLTSNWFKTLQESFCDDIVKFEKNKTKFKSTNWRRNTKVDEGGGEYRILQGGKIFEKVGVNFSKVYGKFPKQFQKNILGANKDPRFWASGISVVMHMKNPLIPAMHFNTRYICTTQEWFGGGMDVTPSKKDLKEKREFHKILKNMCDRHNKSYYTKYKKWCDEYFYLPHRKESRGIGGIFFDYKKDNFEKDFKFVRDIGITFQLIFQKIIRKKMKKKWSISDKEMQYIKRGRYTE

SEQ ID NO: 97397 - protein, 162 aa, Unknown
  Bacterial polypetide isolated from the Sargasso Sea
FNTRYISTQKNWFGGGMDVTPAIKDDNEKNKFHKTLKLMCDQHNKNYYKKYKKWCDEYFYLPHRKEARGIGGIFFDYKNYNFEKDFKFVRDVGITFQMIFNEIIKKKIRKKWSLKEKEIQYIKRGRYAEFNLLYDRGTKFGLQTGGNVEGILMSLPPLAKWK

SEQ ID NO: 97398 - protein, 99 aa, Unknown
  Bacterial polypetide isolated from the Sargasso Sea
RKEARGIGGIFFDYKNDNFENDFKFVRDVGVTFQMLFNEIIKKKLKRKWTLKDKEFQYIKRGRYAEFNLLYDRGTKFGLQTGGNVEGILMSLPPIAKWK

SEQ ID NO: 97399 - protein, 155 aa, Unknown
  Bacterial polypetide isolated from the Sargasso Sea
MYSKPNNSKELILEFLLNFQNDLTSNLEKLDGKAKFIEDKWTNPELGGGKTRVLSNGDLFEQGGVNFSEISKDQVPKSLLGHKPELKDQKFWGAGVSMVLHPKSPFCPTVHLNYRYFEAGSVFWFGGGADLTPYYPFEEDCILWHKAHKDAMDRH

SEQ ID NO: 97400 - protein, 118 aa, Unknown
  Bacterial polypetide isolated from the Sargasso Sea
KKYFRKYKKWCDEYFYLSHRKEPRGIGGIFFDYKKKGWEKDFRFVRDLGISFIQIFSEIINLRKNKKWNLKQKDIQYLKRGRYVEFNLLYDRGTKFGLQTDGNVEAILMSLPPLAKWK

SEQ ID NO: 97401 - protein, 135 aa, Unknown
  Bacterial polypetide isolated from the Sargasso Sea
LKKWYHKELKYMCDQHNKDYYKDYKKWCDEYFYLPHRKEMRGIGGIFFDYKKNNWEKDFAFVRDVGITFKNIFKQIILKKQKIKWNNRDKEMQYLKRGRYVEFNLLYDRGTKFGLKTGGNVEGILMSLPPLAKWK

SEQ ID NO: 97402 - protein, 215 aa, Unknown
  Bacterial polypetide isolated from the Sargasso Sea
IEKGGVNISTVSGKFSDKMRPRIPGTEKSAKYWATGISVVIHPFSPLIPSMHFNSRYLKTSKSWFGGGVDITPATPFKEETKNFHNKLKSICDMHDKSYYEKHKKWCDDYFFLKHRNEARGVGGVFFDYIDTGDYQSDFAYTSSIGSFFLEYVKYIFDKYSKKTWTNNDKRLQMVKRGRYVEFNLLYDRGTKFGLETGGNTEAILMSMPPLASWD

SEQ ID NO: 97403 - protein, 152 aa, Unknown
  Bacterial polypetide isolated from the Sargasso Sea
QKEWFGGGMDVTPSHEDKKEKSFVHSMLKKICKQNGKNYNKYKKWCDEYFFLPHRNEPRGIGGIFFDYEKKNWTKNFKFVRELGIGFIDISKSIIDKKKKLKWTKKDKQIQLIKRGRYVEFNLLFDRGTKFGLNSGGNVDSILMSLPPQAKW

SEQ ID NO: 97404 - protein, 275 aa, Unknown
  Bacterial polypetide isolated from the Sargasso Sea
MDLEIKQKLTSNWFKSLQEMFCKTISDFEKNKINFKSTTWKRNLKKDEGGGEYRILKDGKIFDKVGVNFSKVYGKFPKKFQQNIPGAQKDPRFWASGISVVMHMKNPLIPAMHFNTRYICTTFDWFGGGIDVTPSKKDNKEKEQFHKTLRDMCNRHDRNYYKKYKKWCDEYFYLPHRKEPRGIGGIFFDYKKNNFEKNFKFVRDVGITFETIFQKIINKKIKKKWTSKDKENQYIKRGRYAEFNLLYDRGTKFGLQTGGNVEGILMSLPPHAKWK

SEQ ID NO: 97405 - protein, 275 aa, Unknown
  Bacterial polypetide isolated from the Sargasso Sea
MKIDLKQELAKQWFKNLQEIVCKNIEEIENNKVLFKSKKWTRNKKKNEGGGESKILESGKIFDKVGVNFSEVYGKFPNKMKGKIPGTKKNTKFWATGISIVMHMKNPHVPAMHFNTRYINTSHGWFGGGMDVTPCFKDDKLKKWLHKSLQTMCNRHNKKYYKIYSNWCDKYFYLPHRKETRGIGGIFFDYKKNNWEKDFYFVKDVGLEFIKVFNEIISKKNKIKWSKKDKEIQYIKRGRYIEFNLLYDRGTKFGLQTGGNIDAILMSLPPIAKWK

SEQ ID NO: 97406 - protein, 165 aa, Unknown
  Bacterial polypetide isolated from the Sargasso Sea
DAIHFHRICKSVCEKHSASFYKIFKEKCDLYFWNHHRKEARGIGGLFFDYLRANNKYSIENRFSFVTDVGDSFLDAYLPIIRKRKDYKYNLSQKKWQEIRRGRYVEFNLVHDKGTLFGLKTNGRIESILMSLPPKVQWVYDHLPEIGSEEEKLIKVLQNPRSWTS

SEQ ID NO: 97407 - protein, 275 aa, Unknown
  Bacterial polypetide isolated from the Sargasso Sea
MDLEIKKDLTSNWFKMLQDSICHQITELEKNSTKFRLKTWRKNQKKDEGGGEYRILKDGKIFDKVGVNFSKVYGKFPKKFAKNIPGTKKNLRFWASGISVVMHMKNPLIPAMHFNTRYICTSHEWFGGGMDVTPSKKDNKEEKEIHKILKDMCDRHNKNYYPKYKKWCDEYFYIPHRKESRGIGGIFFDYKKNNFEKDFKFVRDLGITFQIIFQKIINKKIKKRWTVKDKEMQYIKRGRYTEFNLLYDRGTKFGLQTGGNVEGILMSLPPLAKWK

SEQ ID NO: 97408 - protein, 306 aa, Unknown
  Bacterial polypetide isolated from the Sargasso Sea
MNISDRQNYISKIFKDVHKNIFDQIKMFEDKSKIQDDVWHKKELGSGNSVVIDDGNFFDKAGINFSSISGKSLPESSVGNKSKSMGLPFFATGVSVVFHPKNPHIPTAHLNVRYFCTYKKNQVSEEWFGGGFDLTPYILDEEDCKRWHKGAKDVCSLVDDNFYKVSKKNCDDYFYIPHRKEHRGIGGIFYEKKKFKQVDQGLSFSQKVAESFIENYVQIVNKQKLKKYNKEEKKFQRFRRGRYVEFNLTYDRGTLFGLQSGGRIESILMSLPNEVEWHYKFDEKLTDEQQKLYDVLKKPKNWTDDV

SEQ ID NO: 97409 - protein, 283 aa, Unknown
  Bacterial polypetide isolated from the Sargasso Sea
MKLNLEIQKKIASNWFKFLQSEIYKEFELLERKKSTKFQKNLFIKRNWKKSKDNNDGGGTYIIMKDGSVFDSLGINFSQVSGKFHKKFRSQILGAKKNPNYWATGISVVAHMKNPKIPALHFNTRFIVTSKSWFGGGMDCTPSIKDIKEQKFFHKKIKDMCDKHSKSFYPKYKKWCDNYFYLPHRKEARGIGGIFFDYKKENWEKDFSFVRDAGICFLGLAKAIIEKKINKGWSKWQKNQQLYKRGRYIEFNLLYDRGTKFGLNTGGNVEAILMSLPTIAKWK

SEQ ID NO: 97410 - protein, 285 aa, Unknown
  Bacterial polypetide isolated from the Sargasso Sea
MKFEELESSNVVNISRDEWERPDGGGGITHVLTDGNLFDNCAINYSSIYGKNLPNTALAKTLKKETKHGYRAMGISVISHPKNPNIPSSHMNVRLFIILDKNGEISDWWIGGGYDLTPFIPYENDILDWHNNAKDLLEPFGTGFYKEFSENCNNYFNIPHRNERRGVGGIFFDNLKDFPSINNATSFLQAVVVSYVSSYLNIVNRRKDTKYDEMQKEFQLLRRGRYVEFNLVYDRGTSFGLQSNGRVESILASLPTNVKWSYKKSKEYNLLEKELLEFINRDWNV

SEQ ID NO: 97411 - protein, 256 aa, Unknown
  Bacterial polypetide isolated from the Sargasso Sea
MDKEIKKRLARNWFKLIQDVICFEIENLEKKNKKFFKKKWQRNPDKDEGGGEYRILKNGKIFEKVGVNFSEVYGKFPKATGKNIPGINQNGNFWASGISVVMHMQNPHIPAMHFNTRYIFTNHGWFGGGVDLTPCIKDNKEKKFFHNKLKQMCDGHNKKYYKKYKKWCDQYFYLPHRKETRGIGGIFFDYKKSNWEKDFAFVRDLGLTFKFIFRSVIENKINKNWNNNEKDLQYVKRGRYAEFNLIYDRGTKFGLQ

SEQ ID NO: 97412 - protein, 267 aa, Unknown
  Bacterial polypetide isolated from the Sargasso Sea
MSNNKKICKDWFIELQNLICNAVLELEKEYGSTAKFKKNKWLKGEYRIIEGDVIEKGGVAFSNVIGKFPKDFAKQIPGTKKNNNFWSSGVSVVLHPVNPKVPALHFNTRHIITSKSWFGGGIDATPCLEDKILKKNFHSKLKNTCDKHSKNYYPKYKKWCDEYFYMPHRKEIRGIGGIFFDYKMDDWDNDFNFVKDIGLTFVEIIKEVVRRKMFEKFTKKQKEIQLLKRGRYVEYNLLYDRGTKFGLNSGGNTDAILMSMPPNAKWK

SEQ ID NO: 97413 - protein, 223 aa, Unknown
  Bacterial polypetide isolated from the Sargasso Sea
MLINLEKSFKKIQSLIIKNFKLLEGSSSAEISSDVWKRPEGGGGKTFVISNGNFFDNCAVNFSSIYGKNMPTSALGKKLAKKIDHGYQAMGVSVISHPKNPYVPTSHMNVRLFGILDKNKNIKDWWIGGGYDLTPYISFSEDNIRWHNSAKETLDKYNKNFYKSFSENCNKYFYIPHRKERRGIGGIFFDNLSSLNLDDSLKMLNSIASTYLNSYLDIVLKER

SEQ ID NO: 97414 - protein, 271 aa, Unknown
  Bacterial polypetide isolated from the Sargasso Sea
MSDQIKNQQTKAEKWFRELRNQMVGSIQKLDGSEFIEKEWQRPGGGGGLMSLLKGEIFEKVGVNISTVHGNFTEEFKKSMPGTEEDPSFWASGISVVAHMKNPKIAAAHFNTRYITTKGKQWFGGGCDLTPAIPEKLETDNFHQGLQRTCDQHNSTYYEKFKKQCDEYFYLEHRKESRGIGGIFFDYINTDFDKDLSFIKDVGQFFVNFVIENSKRKKDFNFNQDDLDALSKKRSRYVEFNLLYDRGTLFGLKTGGNIDAILMSMPPEAKW

SEQ ID NO: 97415 - protein, 300 aa, Unknown
  Bacterial polypetide isolated from the Sargasso Sea
MLKRQQIGDNEKSQVEEWFLTLRDQICLAFESVETDQKSGIFSQLPPGRFQRKETSRESSTNEDAGGGVMSIMREGRVFEKVGVNISTVFGQLGKQAQESISARRNVPGLEKDPRFWASGISLVAHMRSPKTPAVHMNTRMFWTPGDWWFGGGADLNPMLENSDDTSFFHNELRKACNLHDPSYYPRFKKWADEYFLIKHWNEPRGVGGIFFDDHCTNNWEEDFAFTKDVGRAFLKAFVPLTRKHCNEEWTQEEREIQLIKRGRYTEFNLVYDRGTQFGLHTGHNPEAVLMSLPPIAKWP

SEQ ID NO: 97416 - protein, 163 aa, Unknown
  Bacterial polypetide isolated from the Sargasso Sea
HFNTRYISTQKNWFGGGMDVTPAIKDDNEKNKFHKTLKLMCDQHNKNYYKKYKKWCDEYFYLPHRKEARGIGGIFFDYKDDNFEKDFKFVRDVGITFQMIFNEIIRKKIKKKWSLKEKEMQYIKRGRYAEFNLLYDRGTKFGLQTGGNVEGILMSLPPLAKWK

SEQ ID NO: 97417 - protein, 275 aa, Unknown
  Bacterial polypetide isolated from the Sargasso Sea
MDSFIKKKLARNWFKILQDMICFEIEEIEKKKIKFISTQWNRSNKKDEGGGEYRILKNGKVFEKVGVNFSEVYGKLSKEFKKKLPGTNLNPSFWASGISIVMHMKNPHVPAMHFNTRYIYTSYGWFGGGMDVTPCINDEQLKNWFHKELKFTCDKHNKKYYKKYKKNCDEYFYLPHRKETRGIGGIFFDYKKENWEKDFSFVRDVGLTYKKIFKEIINKKNKMKWNKKQKEIQYLKRGRYVEFNLLYDRGTKFGLQTGGNTDAILMSLPPLAKWK

SEQ ID NO: 97418 - protein, 300 aa, Unknown
  Bacterial polypetide isolated from the Sargasso Sea
MTQTVIEASIEPIKDYFQSLQEQICSTLESLEIDEKFSVENISTPGGGLSKPRVLSDGEHIEKAAVMFTHSIGDSLPPAATERNPKLAEKPFQAAAISLIVHPRNPFVPMTHMNLRFFIVSADEPSWHFGGGYDLTPYYPFEQDIVHWHSTASLAAGKHYRQFKDQCDDYFYLPHRKEARGVGGLFFDDWKEGGFNESYDLTTTIGDSFLKAYQPIFEKRKNETFTEKQKDFQLYRRGRYAEFNLAIDRGTKYGLQSGRRIESVLASLPPLAKWSYNYPIDPDSDESKLTDYYLTRKDWI

SEQ ID NO: 97419 - protein, 302 aa, Unknown
  Bacterial polypetide isolated from the Sargasso Sea
MINEIEKNFKDIQASIINKFEKFELSKNLNKVHDAWNRPEGGGGITHIISEGNVFDNCAINFSSIYGERLPESALANSLNVEAKNGYQAMGISVISHPKNPHVPSSHMNIRLFSILDNNNEIKDWWIGGGYDLTPFLPNKNDVTDWHNSAKKLLEPYGKNFYKDFSDACNNYFNIPHRKERRGIGGIFFDNLKCFSSIEDAVNFLQQVADTYLKSYIRILNKRKDTKYDQMHKEFQLIRRGRYVEFNLIYDRGTSFGIQSNGRIESILASLPASVKWKYNKSDEYKTLEKKLLEFINRDWNV

SEQ ID NO: 97420 - protein, 303 aa, Unknown
  Bacterial polypetide isolated from the Sargasso Sea
MIRKLENIFKKIQDNILEKFEKFEEFEETSINNKSLDSWIRKEGGGGKTAVIANGTFFDNCAVNFSSIVGKKLPEAALKNKKKLSNCKFSAMGVSVISHPKNPHVPTSHMNVRLFCLFDSNDNIKDWWIGGGYDLTPYIPYLDDIKNWHKEAKHFLNSFDTEYYKNFSKECNDYFYIPHRKERRGVGGIFFDNVKDLSIENSLIFLENVANQYLNSYVEIASKRKDTKYSQVEKEFQLIRRGRYVEFNLVYDRGTAFGLQSDGRIESILASLPAEVKWSYKKDDEYKALEKKLLKYINKDWNV

SEQ ID NO: 97421 - protein, 267 aa, Unknown
  Bacterial polypetide isolated from the Sargasso Sea
MLNKKKITKAWFKGLQDLICETVLELEKKNGSKARFKTNKWKKGEYRIIKGNVIEKGGIAFSNVTGTFPKEFAKQIPGTEKNKKFWSTGVSVVLHPANPKVPALHFNTRHIITGKNWFGGGIDATPCFKDAKLKKQFHNKLKTMCENHNKSYYKNYKKWCDEYFYLPHRKEIRGIGGIFFDYKMDDWKKDFDFVKDVGLTFNDIVRDIISQKMNEKFTKKDKEIQLLKRGRYVEYNLLYDRGTKFGLNTGGNIDAILMSMPPNAKWK

SEQ ID NO: 97422 - protein, 280 aa, Unknown
  Bacterial polypetide isolated from the Sargasso Sea
MVGSKYKVTKEEKVSAENWFSELRDDICNEFQNIEKNISNNTFQIKNWKRDGGGGGKMSVMKGDVFEKVGVNISTVHGKFSEQFRKNIPGAEEDGKFWASGISVVAHPKNPFVPAAHMNTRLISTSKSWFGGGGDITPMKPAPEMSKLFHNDLKNVCNKYNKEYYEKFKEWADKYFFLEHRNETRGDGGIFFDYLNNGNWKNDFNFVKDIGKAFLTSYSHIVRKNLSTPWNEDDRREQLIKRGRYVEFNLLYDRGTIFGLKTGGNVEAILMSLPPEVNWN

SEQ ID NO: 97423 - protein, 306 aa, Unknown
  Bacterial polypetide isolated from the Sargasso Sea
MNTEDKTNYIADFFSELHKNLHSKIRPYEDSNFFIEDEWKKENLGSGTSIVVDQGSFFDKAGINFSKISGESLPISSVGNKDNSADMPFFATGVSVVFHPKNPNIPTAHLNVRYFCTFKDGQIFEEWFGGGFDLTPYVLFEEDCINWHQAAKKACDSTNEKLYKVFKKNCDDYFFIKHRKEHRGIGGIFYEKYKAESLDDGLKLSQDVCKAFTNSYIEIIEKRKNLEFEERDKEFQKFRRGRYVEFNLVYDRGTLFGLQTGGRIESILMSLPNDVAWRYKFDDNLTDKEKNLYKFVREPKDWIDGT

SEQ ID NO: 97424 - protein, 257 aa, Unknown
  Bacterial polypetide isolated from the Sargasso Sea
LQDIICNDIEELEGKKNIFKSKSWSRGKKEGGGEFRIFENGNIFEKVGVNFSEVYGKFSQKFREKIPGTKKSPNFWASGISVVMHMKNPHIPAMHFNTRYIYTSHGWFGGGMDVTPCIKDNNIKKWFHNELRKSCDRHNKSYYKKYKKWCDKYFYLPHRNESRGIGGIFFDYKKDNWEKDFAFVRDVGITFKKIANYIILRKKKKKWTKKQKEIQYLKRGRYVEFNLLYDRGTKFGLQTGGNVEGILMSLPPLAKWK

SEQ ID NO: 97425 - protein, 224 aa, Unknown
  Bacterial polypetide isolated from the Sargasso Sea
MDIDIKKDLTSNWFKLLQNAICDDIVKLESNKFKFKSTSWKRNTKKDEGGGEYRILSNGKIFEKVGVNYSKVYGKFPKKFQKNILGAEKDPSFWASGISVVMHMQNPHIPAMHFNTRFICTKKNWFGGGMDVTPAIKDVNEKNNFHKKLKLMCDQHNKKYYAKYKKWCDEYFYLPHRGEARGIGGIFFDYKKDNFEKDFKFVRDVGVTFQMLFNNIIRKKISKK

SEQ ID NO: 97426 - protein, 279 aa, Unknown
  Bacterial polypetide isolated from the Sargasso Sea
MIDNFYRYEQKEKIIIDKWEKESLGRGISAVVDCGRFFDKAGINFSQISGNSLPRSSVGSEGYKDAPYFATGVSVVFHPKNPNIPTAHLNVRYFATFNENNKINEDWFGGGFDLTPYVPFKEDCKSWHQQAKTASKNKYQEWKNNCDDYFYLKHRNEHRGVGGIFYEKQTFEKPEQGLKLSKSVAESFLNGYSNILDKRKDLEFTERQKEFQIFRRGRYVEFNLLYDRGTLFGLQSGGRIESILMSLPSEVSWRYKFDQNLNSEEQNLYNLISKKHQWI

SEQ ID NO: 97427 - protein, 268 aa, Unknown
  Bacterial polypetide isolated from the Sargasso Sea
MKNNNKKICKDWFIELQNLICKAVLELEKEYGSTAKFKKNKWSKGEYRIIEGDVIEKGGVAFSNVVGKFPKDFAKQIPGTEKNNSFWSSGVSVVLHPVNPKVPALHFNTRHIVTGKSWFGGGIDATPCLEDKILKKNFHSTLKNACDMHNKSYYPKYKKWCDEYFYLPHRKEIRGIGGIFFDYKMDNWDNDFEFVKDVGLTFVEIIKDVVRRKMFEKFTKKQKEIQLLKRGRYVEYNLLYDRGTKFGLNSGGNIDAILMSMPPNAKWK

SEQ ID NO: 97428 - protein, 143 aa, Unknown
  Bacterial polypetide isolated from the Sargasso Sea
TPSINDGLEKKWYHKELKKMCNRHNKNFYKKYKKWCDDYFYLPHRSEPRGVGGIFFDYKNQNWEKDFRFVKDVGLTFKYIFQKIIKNKINKKWNKNDKNKQFIKRGRYVEFNLLYDRGTKFGLETKGNIDAILMSLPPIAKWK

SEQ ID NO: 97429 - protein, 275 aa, Unknown
  Bacterial polypetide isolated from the Sargasso Sea
MDIDIKKDLSSNWFKLLQNAICDDIIKLEKNKLKFKSTSWKRNTKKDEGGGEYRILKNGKIFEKVGVNFSRVYGKFPKKFQKNIPGAEKNPSFWASGISVVMHMQNPHIPAMHFNTRYICTQKNWFGGGMDVTPAIKDINEKNNFHKTLKLMCDQHNKNYYSKYKKWCDEYFYLPHRHEARGIGGIFFDYKNENFENDFKFVRDVGVTFQMLFNDIIRKKVSKKWTLKDKEKQYIKRGRYAEFNLLYDRGTKFGLQTGGNVEGILMSLPPIVKWK

SEQ ID NO: 97430 - protein, 192 aa, Unknown
  Bacterial polypetide isolated from the Sargasso Sea
MDQTIKKKLARNWFKTLQEVICQEIEELEGKKNIFSIKNWERGKNSNEGGGQFRILENGKIFEKVGVNFSEVYGKFSKEFRNRIPGGDKNPNFWAAGISVVMHMKNPHVPAMHFNTRYIYTSHGWFGGGMDVTPCLKDKSLEKWFHNELKKSCDKHNKYFYKKYKKWCDEYFYLPHRKEPRGIGGIFFDYKK

SEQ ID NO: 97431 - protein, 100 aa, Unknown
  Bacterial polypetide isolated from the Sargasso Sea
MFKEPPKNSREKTKNLLLTLQDKICSGLENVDGKGKFTEESWLRDEGGGGRSRVLKNGSIFEQAGVNFSEVQGKELPQSIISQRPEAKGHEWFATGTSMV

SEQ ID NO: 97432 - protein, 134 aa, Unknown
  Bacterial polypetide isolated from the Sargasso Sea
KIWFHKELKKCCNNHDKKYYKKYKNWCDKYFYLPHRKEPRGIGGIFFDYKNKNWEKDFAFVRDVGITFKKIFKHIIKIKNKKKWNKKQKEIQYIKRGRYVEFNLLYDRGTKFGLKTNGNIEAILMSLPPIAKWK

SEQ ID NO: 97433 - protein, 174 aa, Unknown
  Bacterial polypetide isolated from the Sargasso Sea
MHMQNPHIPAMHFNTRFISTTKNWFGGGMDVTPAIKDEKERKNFHKILKAMCDRHNKNYYKKYKKWCDEYFYLPHRKEARGIGGIFFDYKNDNFENDFKFVRDVGVTFQMLFNEIIKKKIKRKWTLKDKEFQYIKRGRYTEFNLLYDRGTKFGFQTGGNIEGILMSLPPIAKWK

SEQ ID NO: 97434 - protein, 269 aa, Unknown
  Bacterial polypetide isolated from the Sargasso Sea
MISDPKFNTANDWFEKLRNNLVEIIQNIDDNKFEITHWDHKDEGGGKMSKLKGNIIEKGGVNISTVSGKFNENMQEKIPGAKDNPNYSATGISVVLHPISPKIPSMHFNTRFIKTNQEWFGGGIDITPCLVFNAEEKYHKDLEALCNKYDKSYYPKFKKWCDDYFFLKHRNESRGIGGIFFDYLQTGDWGKDFEFVQDVGVYFQKFVSNTLEKLKDEKWNDDDKKKQLIKRSRYAEFNLLYDRGTKFGLETGGNIDAILMSMPPLAKWE

SEQ ID NO: 97435 - protein, 264 aa, Unknown
  Bacterial polypetide isolated from the Sargasso Sea
MTDSWFSYLQAQICKEFESFEKKKKFIRRDWSKKNKNEGGGTSFILSGGNLFEKVGVNKSTVSGKFAKEYKNKILGAGKNGKYWASGVSVVAHMKNPKIPAIHFNTRFIVTKKEWFGGGMDVTPSHKDTKEKRLVHNMLRKVCVQNKKNYKKYKRWCDTYFYLPHRKEVRGIGGIFFDYETDNWIKNFKFVRELGLTFINISREIIRRKKKLKWKKKDKEKQLIKRGRYVEFNLLYDRGTKFGLNSGGNIESILMSLPPEAKWK

SEQ ID NO: 97436 - protein, 268 aa, Unknown
  Bacterial polypetide isolated from the Sargasso Sea
MNNSKIEIARKWFEELRDKLILNIEKIDSTNFIITEWDHKHQGGGKMSKIKGQVIEKGGVNISTVEGKFEENMIGKVPGTENDSSYQATGISVVLHPHSPFIPSMHFNTRFLKTEQEWFGGGIDVTPCLPFKDEEQYHSSLESLCDKFDKNYYKKFKSWCDEYFYLTYRKEPRGIGGIFFDYLKTDDWGRDFEFVQNVGNFFNDFSSKTILKYKDLNWSDEEKNIQLLKRSKYVEFNLLHDRGTKFGLETGGNIDAILMSMPPLAKWD

SEQ ID NO: 97437 - protein, 275 aa, Unknown
  Bacterial polypetide isolated from the Sargasso Sea
MNSEIKKNLASNWFKTLQEAFCEDINKLEKNKVKFKSNIWKRNAKKDGGGGEYKILQNGKIFEKVGVNFSTVYGKFPKQFQKNILGAHKDPRFWASGVSVVMHMKNPLIPAMHFNTRYVCTTQDWFGGGMDVTPSKIDLNEKREFHKTLKNMCNRHNKKYYTKYKKWCDEYFYLPHRKESRGIGGIFFDYKKNNFEKDFKFVRDVGITFQLIFQKIIRKKMKKKWTTKDKEMQYIKRGRYAEFNLLYDRGTKFGLQTNGNIEGILMSLPPLAKWK

SEQ ID NO: 97438 - protein, 275 aa, Unknown
  Bacterial polypetide isolated from the Sargasso Sea
MDNSIKKDLASNWFKLLQDTICNDILELENNKIKFESTSWKRSSKKDEGGGEYRILKNGKIFEKVGVNFSKVYGKFPKKFQKNIPGAEKNPRFWASGISIVMHMQNPHIPAMHFNTRYISTQKNWFGGGMDVTPAIKDDNEKNKFHKTLKLMCDQHNKNYYKKYKKWCDEYFYLPHRKESRGIGGIFFDYKDDNFEKNFKFVRDVGITFQIIFNEIIRKKIKKKWSLKEKEMQYIKRGRYAEFNLLYDRGTKFGLQTGGNVEGILMSLPPLAKWK

SEQ ID NO: 97439 - protein, 243 aa, Unknown
  Bacterial polypetide isolated from the Sargasso Sea
MDLDIKKDLASNWFKLIQDAFCYDISVLENNKIKFSSKTWKRNQKKDEGGGEYRILRNGKIFDKVGVNFSKVYGKFPKKFQKNIPGASKDPRFWASGVSVVMHMKNPLIPAMHFNTRFICTTQQWFGGGVDLTPSIKDVPEKNDFHKTLENMCNRHNKNYYKKYKKWCDEYFYLQHRREARGIGGIFFDYKKNNFEKDFNFVRDLSITFQILFNKIIRKKLKKKWSIKNKEAQYIKEVDMQNS

SEQ ID NO: 97440 - protein, 139 aa, Unknown
  Bacterial polypetide isolated from the Sargasso Sea
PDETDTVDFHAALEGACKPYGEERYAEYKKWCDEYFYLPHREESRGVGGIFYDYLDKDWERDFEFTRGVGEAFLEVYPRIVRRHMNDEWTKAQREQQLVRRGRYVEFNLLHDRGTKFGLMTGGNTEAILMSMPPEARWP

SEQ ID NO: 97441 - protein, 82 aa, Unknown
  Bacterial polypetide isolated from the Sargasso Sea
MDGKNAAEVIEQVKSYLLGLQDTICQTLELADGKGQFVEDSWQREEGGGGRSRVLKNGAVIEQGGVNFSHVFGSQMPASATA

SEQ ID NO: 97442 - protein, 275 aa, Unknown
  Bacterial polypetide isolated from the Sargasso Sea
MDLDIRKDLASNWFKTLQDSICHSISELEKNKIKFKSTTWKRNQKKDEGGGEYRILKDGRIFEKVGVNFSKVYGKFPKHFQKQIPGAEKNPNFWASGISVVMHMKNPLIPAMHFNTRYICTSHDWFGGGMDVTPSKKDENEKKEFHKILKNMCNRHNKKYYPKYKKWCDEYFYLPHRKEARGIGGIFFDYKKNDFEKDFKFVREVGTTFELIFKKIIKKKLKKKWTLKDKEMQYIKRGRYTEFNLLYDRGTKFGLQTGGNVEGILMSLPPIAKWK

SEQ ID NO: 97443 - protein, 301 aa, Unknown
  Bacterial polypetide isolated from the Sargasso Sea
MLINLEKSFKKIQSLIIKNFKLLEGSSSAEISSDVWKRPEGGGGKTFVISNGNFFDNCAVNFSSIYGKNMPTSALGKKLAKKIDHGYQAMGVSVISHPKNPYVPTSHMNVRLFGILDKNKNIKDWWIGGGYDLTPYISFSEDNINWHNSAKETLDKYNKNFYRSFSENCNKYFYISHRKERRGVGGIFFDNLSSLSLDDSLKMLNSIASTYLNSYLDIVSKRKKIKYSSDEKDFQLIRRGRYAEFNLIYDRGTSFGLQSNGRIESILASLPTEVKWKYKKNKKYKIMERALLKNLNRDWNE

SEQ ID NO: 97444 - protein, 237 aa, Unknown
  Bacterial polypetide isolated from the Sargasso Sea
TWQRNKNKDEGGGEYRIIKDGKIFEKVGVNFSKVYGKFPKKFQKKIPGATKDPRFWASGISVVMHMQNPHIPAMHFNTRYICTTQNWFGGGMDVTPSIKDANEKNKFHKTLKIMCDRHNKKFYKKYKKWCDEYFYLPHRNESRGIGGIFFDYKKENFEKDFNFVRDVGVTFQMLFNKIIEKKIKKKWTLKDKETQYIKRGRYAEFNLLYDRGTKFGLQTGGNVEGILMSLPPIAKWK

SEQ ID NO: 97445 - protein, 274 aa, Unknown
  Bacterial polypetide isolated from the Sargasso Sea
MDIEDKKLYSDKWFSYLHAQICDHFEKIEKDSKSSKKFISTNWSKKNNGGGGTFKILKDGKVFDKVGVNKSTVKGTFSKKFRQNILGAEKNGKYWASGISVVAHMKNPKVPAIHFNTRFIVTSKNWYGGGIDLTPCLRDRKEEIYFHNKLKKVCKENHKNYYKFKKWCDKYFFLKHRNEPRGIGGIFFDYENKNWEKDFKFVREVGMSFLEISKNIINKKKSLKYNGKDKEKQFLKRGRYVEFNLLYDRGTKFGLNSGGNTEAILMSLPPKAKW

SEQ ID NO: 97446 - protein, 121 aa, Unknown
  Bacterial polypetide isolated from the Sargasso Sea
RHNKNYYKKYKKWCDDYFYLPHRNESRGIGGIFFDYKNDSFEKDFKFVRDVGITFQTLFNQIIKKKIKKKWTLKDKESQYIKRGRYSEFNLLYDRGTKFGLQTGGNVEGILMSLPPLVKWK

SEQ ID NO: 97447 - protein, 275 aa, Unknown
  Bacterial polypetide isolated from the Sargasso Sea
MDISIKKDLASNWFKLLQNAICDDILKIEKNKVNFQSTSWNRSSKKDEGGGEYRILKNGKIFEKVGVNFSKVYGKFPKQFQKNIPGASKDPRFWASGISIVMHMQNPHIPAMHFNTRFICTTKNWFGGGMDVTPAIKDEKEKKNFHKILKAMCDRHNKNYYKKYKKWCDEYFYLPHRKEARGIGGIFFDYKNDNFENDFKFVRDVGVTFQMLFNEIIKKKLKRKWTLKDKEFQYIKRSRYAEFNLLYDRGTKFGLQTGGNVEGILMSLPPVAKWK

SEQ ID NO: 97448 - protein, 268 aa, Unknown
  Bacterial polypetide isolated from the Sargasso Sea
MNDNQRMAKDWFFSLRNNLVDTLEKIDGNKFGFKDWTHSGSGGGTMGSIRGKIVEKGGVNISTVSGQFSEEMRQRIPGAKKDPQYWATGISVVIHPTSPLIPSMHFNSRFLKTSKTWFGGGIDITPAIPFKKETEHFHSILNEACSKHSKTYYDEHKKWCDEYFFLKHRNEARGAGGIFFDYLDSGDINNDLEYVKEVGNFFLSYIQYIFNKYAEKEWTDQEKHMQLKKRGRYVEFNLLYDRGTKFGLETGGNTEAILMSMPPNASWD

SEQ ID NO: 97449 - protein, 275 aa, Unknown
  Bacterial polypetide isolated from the Sargasso Sea
MDLQVKKKITRNWFKILQEVICKDIEEIEKKKNIFKIKNWKRNLNKEEGGGEFRIFKNGKVFEKVGVNYSEVFGKFSKQIRNKIPGTEKSSNFWASGISVVMHMQNPNIPAMHFNTRYIVTSYGWFGGGMDVTPCIKDNNLSKWFHNELKRSCNKHNKKYYPKYSKWCDEYFYLPHRKEPRGIGGIFFDYKKKDFEKDFNFVRDVGLTFKNIFREIISRKQNKKWDKKLKEIQNLKRGRYVEFNLLYDRGTKFGLQTGGNVEGILMSLPPIAKWK

SEQ ID NO: 97450 - protein, 215 aa, Unknown
  Bacterial polypetide isolated from the Sargasso Sea
MKEKFYTYIKSLQNKITDRIEEIDQLEKFKEDIWKRKEGGGGKTRILQNGKVFEKAGVNISAVKGKLPESIMNYLKVDESRFFACGLSVVIHPLNPMIPTCHANWRYFELYNEKSEIIDQWFGGGQDLTPYYLYKEDAVHFHKVCKNSCDKFGKNLYTDFKKRCDNYFWNSHRNEARGVGGIFFDYLRANSKKSIQDWHKFTVEVGNNFIESYFP

SEQ ID NO: 97451 - protein, 184 aa, Unknown
  Bacterial polypetide isolated from the Sargasso Sea
NFWASGISIVIHMRNPFVPAMHFNTRYIYTSHGWFGGGIDVTPCFKDEKLRRWFHKSLKKMCDRHNKKYYKNYSQWCDKYFYLPHRRETRGIGGIFFDYKKNKWEKDFHFIKDVGLEFIKIFNEIIEKKNKNKWSIKEKENQYIKRGRYVEFNLLYDRGTKFGLQTGGNIDAILMSMPPLAKWK

SEQ ID NO: 97452 - protein, 275 aa, Unknown
  Bacterial polypetide isolated from the Sargasso Sea
METDIKKKLARNWFKVLQDMICFEIEEIEKNKKKFTSSHWKRSKKKDEGGGEYRILENGKVFEKVGVNFSEVSGKFSKEFRKKIPGTNSNPNFWASGISIVMHMKNPHVPAMHFNTRYIHTSFGWFGGGMDVTPSFEDKKIKNWFHKELKLTCDRHNKKFYKKYKKNCDEYFYLPHREETRGIGGIFFDYKKENWEKDFSFVRDVGLTFKRIFREIINKKNNKKWNNKEKEIQYFKRGRYVEFNLLYDRGTRFGLQTGGNTNAILMSLPPVAKWK

SEQ ID NO: 97453 - protein, 117 aa, Unknown
  Bacterial polypetide isolated from the Sargasso Sea
NYYKKYKKWCDEYFYLPHRKEPRGIGGIFFDYKKNNFEKNFKFVRDVGITFETIFQKIINKKIKKKWTSKDKENQYIKRGRYAEFNLLYDRGTKFGLQTGGNVEGILMSLPPHAKWK

SEQ ID NO: 97454 - protein, 130 aa, Unknown
  Bacterial polypetide isolated from the Sargasso Sea
HNELKLTCNKHDKSFYKKYSKWCDKYFFLPHRKESRGIGGIFFDYKKANWEKDFAFVMDIGLTFKRLFRETIEKKSKKKWSLKDKEIQYLKRGRYVEFNLLHDRGTKFGLQTGGNVEAIFMSLPPLAKWK

SEQ ID NO: 97455 - protein, 191 aa, Unknown
  Bacterial polypetide isolated from the Sargasso Sea
PGTENDPSYQATSISVVLHPHSPFIPSMHFNTRFLKTEQEWFGGGIDITPCLPFKDEEQYHSSLKSLCDKFDKNYYKKFKSWCDEYFYLTYRKEPRGIGGIFFDYLKSDDWGKDFEFVQNVGNFFNDFSSKTILKYKDFNWSDEEKNIQLLKRSKYVEFNLLHDRGTKFGLETGGNIDAILMSMPPLAKWD

SEQ ID NO: 97456 - protein, 125 aa, Unknown
  Bacterial polypetide isolated from the Sargasso Sea
KKVCTENKKDYKKYKKWCDKYFYLPHRKEARGIGGIFFDYEKKDWIKNFKFIRELGFAFIDISKKIINRKKNLRWTKKDKEKQLLKRGRYVEFNLLYDRGTKFGLNSGGNIDSILMSLPPQAKWK

SEQ ID NO: 97457 - protein, 275 aa, Unknown
  Bacterial polypetide isolated from the Sargasso Sea
MDKEIKKDLASNWFKLLQNAICDDIIKLENNKINFQSTTWKRSKSKDEGGGEYRILKDGKIFEKVGVNFSKVNGKFPKKFQKNILGASKDPRFWASGISIVMHMQNPHIPAMHFNTRYICTTQNWFGGGMDVTPAIKDNQEKSKFHKTLKTMCDRHNKKYYKKYKKWCDEYFYLPHRKEARGIGGIFFDYKKNDFENDFKFVRDVGVTFQMLFNSIIKKKIKKKWTFKDKEMQYVKRGRYAEFNLLYDRGTKFGLQTGGNVEGILMSLPPIVKWK

SEQ ID NO: 97458 - protein, 140 aa, Unknown
  Bacterial polypetide isolated from the Sargasso Sea
IKDETEKKSFHKILKSMCDRHNKNYYKKYKKWCDEYFYLPHRKEARGIGGIFFDYKNDNFENDFKFVRDVGVTFQMLFNEIIKKKIKRKWTLKDKEFQYIKRGRYAEFNLLYDRGTKFGLQTGGNIEGILMSLPPIAKWK

SEQ ID NO: 97459 - protein, 296 aa, Unknown
  Bacterial polypetide isolated from the Sargasso Sea
MEDTFKKIQENILVKFEEFEETFSSNKSVDAWVRKEGGGGKTAVIANGNFFDNCAVNFSSIVGKNLPEAALKNKNKLANGKFSAMGVSVISHPKNPHVPTSHMNVRLFCLFDSNNKIKDWWIGGGYDLTPYLPYNDDIKNWHKEAKNFLDTFDTTYYKNFSKECNDYFYIPHRKERRGVGGIFFDNIKYRSIENSLIFLENVAKQYLDSYIQIATKRKETKYTKMEKEFQLIRRGRYVEFNLVYDRGTAFGLQSDGRIESILASLPAEVKWSYKKDDEYKALEKKLLKYINKDWNV

SEQ ID NO: 97460 - protein, 290 aa, Unknown
  Bacterial polypetide isolated from the Sargasso Sea
MHKNLYSKISPYEDSNFFIEDEWKKENLGSGTSIVIDQGSFFDKAGINFSKISGDSLPASSVGSMDNSTEMPFFATGVSVVFHPKNPNIPTAHLNVRYFCTFKDGQILEEWFGGGFDLTPYILFEEDCANWHKSAKKACDSINENLYIDFKKNCDEYFFIKHRKEHRGIGGIFYEKHKADTLDHGLKLSENVCEAFTNSYIEIINKRKDLDFEERDKEFQKFRRGRYVEFNLVYDRGTLFGLQTGGRIESILMSLPNDVAWRYKFDENLTEKEKNLYKFIKSPKDWIDDS

SEQ ID NO: 97461 - protein, 268 aa, Unknown
  Bacterial polypetide isolated from the Sargasso Sea
MNDNQRMAKEWFFTLRNNLVDALEKIDGNKFYFKDWEHSGSGGGTMGSIRGKIVEKGGVNISTVSGQFTEEMRQRIPGAKKDPQYWATGISVVIHPTSPLIPSMHFNSRFLKTSKTWFGGGIDITPAIPFKKETEHFHSILNKACSKHSKTYYDEHKKWCDEYFFLKHRNEARGVGGIFFDYLDSGNIINDLEYVKEVGKFFLHYINYIFDKYADKEWTTEQKHMQLKKRGRYVEFNLLYDRGTKFGLETGGNTEAILMSMPPHASWD

SEQ ID NO: 97462 - protein, 290 aa, Unknown
  Bacterial polypetide isolated from the Sargasso Sea
MHKNLHSKIRPYEDSNFFIEDEWKKENLGSGTSIVVDQGNFFDKAGINFSKISGDSLPASSVGSMDNSTEMPFFATGVSVVFHPKNPNIPTAHLNVRYFCTFKDGQIFEEWFGGGFDLTPYILFEEDCANWHKSAKKACDSINENLYTDFKKNCDEYFFIKHRKEHRGIGGIFYEKHKAETLDHGLKLSQNVCEAFTNSYIEIINKRKDLGFEERDKEFQKFRRGRYVEFNLVYDRGTLFGLQTGGRIESILMSLPNDVAWRYKFDESLTEKERNLYKLIKNPKDWIDGS

SEQ ID NO: 97463 - protein, 274 aa, Unknown
  Bacterial polypetide isolated from the Sargasso Sea
MEENIKKKLTKNWFKILQDMICSEIEELENKPKFKLTNWQRNKSKDEGGGEYRILENGKIFEKVGVNFSEVYGKFSEKFKDRIPGTKNDPSFWASGISVVMHMKNPHIPAMHFNTRYIHTSYGWFGGGMDVTPCFEDKKLKKWFHNELKKTCDSHNKKFYKKYKKQCDEYFYLPHRGETRGIGGIFFDYKKENWEKDFKFVRDVGLTFKQVFKDIIMKKNKKKWTKKQKEVQYLKRGRYIEFNLLYDRGTKFGLQTGGNTDAILMSLPPIAKWK

SEQ ID NO: 97464 - protein, 238 aa, Unknown
  Bacterial polypetide isolated from the Sargasso Sea
KTWYRNPIKNEGGGEYRILEKGKVFDKVGVNFSEVYGTFSKEFRKNIPGANKKGKFWASGVSVVMHMKNPHIPAMHFNTRYIYTSFGWFGGGIDITPCFNDKQNTKWFHKELEKMCNKHNKNYYIKYKKWCDNYFYLPHRKEPRGVGGIFFDYKKTNFDKDFSFVRDVGLAFKKIFNEIINIKRKKKWTSKQKDVQYLKRGRYVEFNLLHDRGTKFGLKTGGNVDAILMSLPPVAKWK

SEQ ID NO: 97465 - protein, 263 aa, Unknown
  Bacterial polypetide isolated from the Sargasso Sea
MDIELKKKLARNWFNILQDMICNEIEELEGKTKFKPKNWQRNKKKDEGGGEYRILENGKIFDKVGVNFSEVYGKFSEKFKNRIPGTKKDSSFWASGISVVMHMKNPHVPAMHFNTRYIYTSYGWFGGGMDVTPCLDDKNLKNWFHKELKKICDYHNKKYYKKYKKQCDEYFYLPHRKETRGIGGIFFDYKKENWEKDFNFVRDVGLTFKSIFREIITKKNKKKWTKKQKEIQYLKRGRYIEFNLLYDRGTKFGLQTGGKYKCN

SEQ ID NO: 97466 - protein, 209 aa, Unknown
  Bacterial polypetide isolated from the Sargasso Sea
MDKDIKKKLTRNWFINLQEMICNTIQQIEGGKIKFLKKSWERSIKKDEGGGCYYILENGKVFDKVGVNFSEVYGKLTKEFKKKIPGTKNNRDFWASGVSVVMHMKNPHVPAMHFNTRYIYTNHGWFGGGMDVTPCFNDSAIKKLLFKKLKKICDKHDKKYFKKYKKWCDEYFYLSHRKEPRGIGGIFFDYKKKDWEKDFGFIRDLGINL

SEQ ID NO: 97467 - protein, 101 aa, Unknown
  Bacterial polypetide isolated from the Sargasso Sea
MPHRKEPRGIGGIFFDYKKNNWEKDFSFVREVGISFKNISNEIIEKKNKLKWTIKDKEIQYKKRGRYVEFNLLHDRGTKFGLQTGGNVEAILMSLPPTAKW

SEQ ID NO: 97468 - protein, 172 aa, Unknown
  Bacterial polypetide isolated from the Sargasso Sea
MFHLKFLLCILIQDLLKLLREWFGGGMDITPCVIFEDEKKYHRGLELLCNKYDKSYYPKFKKWCDDYFFLKHRNEPRGVGGIFFDYLQTGDWGKDFEFVQGVGTYFHQFIKNTLIALKDEKWNEEEKKIQLVKRSRYAEFNLLYDRGTKFGLETGGNVDAILMSMPPHAVWE

SEQ ID NO: 97469 - protein, 275 aa, Unknown
  Bacterial polypetide isolated from the Sargasso Sea
MDLDIKKDLVSSWFKLLQDSFCKDIKKLENNKIKFHSTSWSRNTKKNEGGGEYRILRNGKVFEKVGINFSKVYGRFSKKFQNNIPGAKKDPRFWASGISVVMHMKNPLIPAMHFNTRYICTSHQWFGGGIDITPSKKDNFEKKYFHQNLKMMCDRNNKDYYKKYKKWCDEYFYLPHRNETRGIGGIFFDYKKNNFKKDFKFVRDVGITFQMLFNQIIKRKIKKRWNMKDKETQYIKRGRYSEFNLLYDRGTKFGLQTGGNVEGILMSLPPLAKWK

SEQ ID NO: 97470 - protein, 283 aa, Unknown
  Bacterial polypetide isolated from the Sargasso Sea
MEISQEIEKKLVSQWFAFLQRKILEEFQNLEIEFSKKKRLKVKYFRKNIWRKDNPQDGGGQYYILKNGQIFDQVGINHSTVQGKFQKNYKSNIPGTKKNQSYWASGISVVAHMKNPNIPAIHFNTRFVITSKRWFGGGMDVTPSNKDFNEKKFVHENLKFVCDNNKKNYKNYKKWCDDYFYIKHLGETRGIGGIFFDYLYKDWEKNFKFIRDVGISFIEITKTIVEKKKFLRWTEKQKGDQLIKRGKYVEFNLLYDRGTKFGLNTGGNIDAIFMSLPPNARWK

SEQ ID NO: 97471 - protein, 245 aa, Unknown
  Bacterial polypetide isolated from the Sargasso Sea
MASNWFRDLRDTFCSSFESIEGNKYSFERKSWPHRHSGGGEMSIMKGEVFEKVGVNISTVSGKFQEDFRGQIKGTEQSPEYFATGISLVAHMNSPKIPAFHFNTRFLVTGESWFGGGADLTPTLSDKEAVDLFHNHMKDACSDYKKDAYEEYKKNCDEYFYLGHREEPRGAGGIFFDHINSNDWERDFDFIKQVGKSTNQVITQIVESKKDHSWTEEEKNLQLIKRGRYVEFNLIWDRGTLFGLK

SEQ ID NO: 97472 - protein, 275 aa, Unknown
  Bacterial polypetide isolated from the Sargasso Sea
MNKEIKKKIARNWFKLLQNVICFEIEKLEKSSAKFVCKKWEKNKKKNEGGGECRILQNGKIFEKVGVNFSEVSGKFSKDIKKKIPGAGKKGTFWASGISVVMHMKNPNIPAMHFNTRYIYTSYGWFGGGMDFTPCVKDLGEKKWLHSMLKKTCNLHNKNYYPKYKKWCDKYFYLPHRKEMRGIGGIFFDYKKKNWEKDFAFVRDVGISFKDIFKTIILKKYKKKWNSKQKELQYLKRGRYVEFNLIYDRGTKFGLQTGGNVDAILMSLPPIAKWK

SEQ ID NO: 97473 - protein, 206 aa, Unknown
  Bacterial polypetide isolated from the Sargasso Sea
MDSFLKKKLARNWFKILQDMICFEIEEIEKNKIKFISTHWNRSKKKDEGGGEYRILKNGKIFEKVGVNFSEVYGKLSNELKKKIPGANLNTNFWASGISIVMHMKNPHVPAMHFNTRYIYTSFGWFGGGMDVTPCFNDEKLKNWFHKELKFTCDKHDKKYYKKYKEKCDEYFYLPHRKETRGIGGIFFDYKKDNWEKDFSFVRDVG

SEQ ID NO: 97474 - protein, 162 aa, Unknown
  Bacterial polypetide isolated from the Sargasso Sea
TPYFPFQDDINLWHSNARKMCDKHDKSYYKKFKKQCDEYFYLPHRNERRGVGGIFFDNLNNLSKEKHCNFIIDVLDSYINSYIQIITKRYKSRFTKSQKDFQLYRRGRYVEFNLLYDRGTTFGLQSGGRAESILMSLPPNVKWSASKSKQFKSYEKNLLKYL

SEQ ID NO: 97475 - protein, 225 aa, Unknown
  Bacterial polypetide isolated from the Sargasso Sea
MIADPKFNTAKEWFEKLRDNLVETIQNIDENQFEISNWDHKGDGGGKMSKIKGNIIEKGGVNISTVSGTFNENMRDAIPGAKEDPNYNATGISVVLHPVSPKIPSMHFNTRFIKTTQEWFGGGMDITPCVIFEDEKKYHRGLEVLCNKYDKSYYPKFKKWCDDYFFLKHRNEPRGVGGIFFDYLQTGDWGKDFEFVQGVGTYFHQFIKNTLIALKDENWNEEEKK

SEQ ID NO: 97476 - protein, 191 aa, Unknown
  Bacterial polypetide isolated from the Sargasso Sea
PGAYKNPKFWASGISVVMHMKNPHVPAMHFNTRYIYTSHGWFGGGMDVTPCIKDEKLNKWFHSELKKTCNRHNKNYYKKYKKWCDEYFYLPHRKEARGIGGIFFDYKKENWEKDFSFVRDVGICFKKVFREIILKKHRMKWTNKQKEIQYEKRGRYVEFNLLYDRGTKFGLQTDGNVEAILMSLPPVAKWK

SEQ ID NO: 97477 - protein, 275 aa, Unknown
  Bacterial polypetide isolated from the Sargasso Sea
FSEVQGKELPQSIISQRPEAKGHEWFATGTSMVLHPKNPYIPTVHLNYRYFEAGPVWWFGGGADLTPFYPYLSDVRNFHNEHKKACEKVDQDLHKVFKPWCDEYFFLKHRNESRGIGGIFYDYQDGSGNIYRGNNQNGEASKASQTIDRSNLNWDDLFSLAENCGQAFLPSYLPIIDKRASQTYSSKEREFQLYRRGRYVEFNLVWDRGTIFGLQTNGRTESILMSLPPLARWEYGYKARKNSREEFLTSIFTKPQDWLNDKELEKFCIENNIFD

SEQ ID NO: 97478 - protein, 265 aa, Unknown
  Bacterial polypetide isolated from the Sargasso Sea
MFENAKTWFEDLRDRLVEKIQSYESQAFVEKKWSHHEKGGGLMTKINGNIIEKGGINISTVSGKFNEKMQGRILGAKDDPSFSATGISVVLHPRSPHIPSMHFNTRFLSTTKTWFGGGMDLTPCLNFENETKDFHKKLKIICDKFDINCYEKYKKWCDDYFFLKHRNEPRGVGGIFFDHVFTSTPENDFEFVKNVGQFFLEHSCNLIDKFKDETWTDHQKEIQLIKRGRYVEFNLLYDRGTKFGLETGGNTEAILMSMPPQAYWK

SEQ ID NO: 97479 - protein, 141 aa, Unknown
  Bacterial polypetide isolated from the Sargasso Sea
MLKEPPKNSREKTKNLLLTLQDKICSGLENVDGKGKFTEESWLRDEGGGGRSRVLKNGSIFEQAGVNFSEVQGKELPQSIISQRPEAKGHEWFATGTSMVLHPKNPYIPTVHLNYRYFEAGPVWWFGGGADLTPFYPYLSE

SEQ ID NO: 97480 - protein, 314 aa, Unknown
  Bacterial polypetide isolated from the Sargasso Sea
MSWAGFACLGSAIDWSGFMVRSLVRRLLGRPQGHGPALELPPEDSRARARAMVMGLQDEICAGLESLDGEGRFVEESWERPEGGGGRSRVMREGRVFEQGGVNFSEVQGQELPPSILKQRPEAKGHPWFATGTSMVLHPRNPYIPTVHLNYRYFEAGPVWWFGGGADLTPYYPFLEDARHFHRTHQAACDSVHPDLHKVFKPWCDEYFFLKHRGETRGVGGIFYDYQDSSGVLYKGQDPSGPAAGVSAQLGARPLGWEQLFALGQANGRAFLPSYAPIVEKRHPMAYGDRERQFQLYRRGRYVEFNLVWDRGTI

SEQ ID NO: 97481 - protein, 136 aa, Unknown
  Bacterial polypetide isolated from the Sargasso Sea
NCDDYFYLPHRKEKRGIGGIFFDQLKHKTIEDSLDLLNAVANCYIESYLDIVNINKDKKFTADDREFQLYRRGRYVEFNLLFDRGTKFGIESNGRTDSILASMPPAVNWPFRLSKNIIRNEKKLLRFINKNWNQHI

SEQ ID NO: 97482 - protein, 217 aa, Unknown
  Bacterial polypetide isolated from the Sargasso Sea
GKIFEKVGVNFSEVHGKFSKEFRKRIPGGEKNPKFWASGISIVMHMQNPHVPAMHFNTRYIYTSYGWFGGGMDVTPCFKDNSLEKWFHKELKVSCDKYNKNFYKKYKKWCDEYFYLPHRKEPRGIGGIFFDYKKDNWEKDFSFVREVGISFKNIFREIILKKYKKKWSNKQKEIQLEKRGRYVEFNLLYDRGTKFGLQTNGNVEAILMSLPPIAKWK

SEQ ID NO: 97483 - protein, 264 aa, Unknown
  Bacterial polypetide isolated from the Sargasso Sea
MEKEIIEEAFKEIQDNICNALTNVDGKSFLEQKWNRPGGGGGRTRVIEGNLIEKGGVNFSAVKGETPDKILKALNLDKSNFYATGVSIVLHPKNPLVPIIHMNIRYFEMDNGIWWFGGGIDLTPHLINKDQASYFHKQLKATCDKFNPDFYPKFKKWADDYFYIPHRKETRGVGGIFFDRLNEKSSELTKGEIFEFIKAVGNTFAPTYTTILNNNKELEYSESQKEWQFIRRSRYAEFNLVYDKGTKFGLETDGRIESILMSMP

SEQ ID NO: 97484 - protein, 214 aa, Unknown
  Bacterial polypetide isolated from the Sargasso Sea
MTVPDGVLSWAGITCLGSSIEWSAFMVRSLVRRLLGRPQNNGTAAPALELPPEDSRARARAMVMGLQDEICAGLESLDGEGTFVEESWERPEGGGGRSRVMREGRVFEQGGVNFSEVQGQELPPSILKQRPEAKGHPWFATGTSMVLHPRNPYIPTVHLNYRYFEAGPVWWFGGGADLTPYYPFLEDARHFHRTHQAACDSVDPDLHKVFKPWC

SEQ ID NO: 97485 - protein, 191 aa, Unknown
  Bacterial polypetide isolated from the Sargasso Sea
AEKEGEAPVWWFGGGFDLTPFYPVEADVVHWHQVAKDCCDGFDATYYPKYKKWCDEYFYLKHRNETRGVGGLFFDDLNEPGFEQSFAFMSAVGEAFTKAYLPIVERNKNKAFSEAERQFQLYRRGRYVEFNLVFDRGTLFGLQSGGRTESILMSMPPLVRWQYGYQPETGSPEAQLYQRYLTPQDWLGLNG

SEQ ID NO: 97486 - protein, 197 aa, Unknown
  Bacterial polypetide isolated from the Sargasso Sea
EFAKKILGAENNMNFWSSGISVVLHPKSPKIPAMHFNTRFICTKKNWFGGGMDVTPSLIDKNEKKNFHNILKKMCNLHNKKYYKKYKKWCDEYFYLPHRKESRGIGGIFFDYKMDNWEKDFLFVKDVGFTFSYLIDDIIRKKMFLKWTKKEKEIQQFKRGRYVEFNLLYDRGTKFGLNSGGNPEAILMSMPPSATWK

SEQ ID NO: 97487 - protein, 147 aa, Unknown
  Bacterial polypetide isolated from the Sargasso Sea
PKYKKWCDEYFYLKHRNETRGVGGLFFDDLNEPGFEQSFAFMSAVGKAFTLAYLPIVERNKNKAYSEAERQFQLYRRGRYVEFNLVFDRGTLFGLQSGGRTESILMSMPPLVRWEYGYQPEAGSPEALLYQRYLMPQDWLGLNGSQL

SEQ ID NO: 97488 - protein, 225 aa, Unknown
  Bacterial polypetide isolated from the Sargasso Sea
SKLKIGKRGKKSNEGGGQFRILENGKIFEKVGVNFSEVYGKFSKQFRNRIPGGDKNPNFWAAGISVVMHMKNPHVPAMHFNTRYIYTSHGWFGGGMDVTPCMKDKSLEKWFHNELKKSCNKHNKNFYKKYKKWCDEYFYLPHRKEPRGIGGIFFDYKKENWEKDFSFVREVGISFKNIFREIILKKYKKKWSNKQREIQLEKRGRYVEFNLLYDRGTKFGLQTNG

SEQ ID NO: 97489 - protein, 217 aa, Unknown
  Bacterial polypetide isolated from the Sargasso Sea
KEKSLIKFGVNKSTVSGIFPKTFRSKILGAEKKGRYWASGVSVVAHMRNPKMPAIHFNTRFIVTTKEWFGGGMDVTPSFKDNKEKKMIHEDLKKLCVLNKKNYKKYKKWCDEYFFLPHRGETRGIGGIFFDYETQDWIKNFKFVRELGLSFIDISKKIIKRKEKFKWTKKDKEKQLLKRGRYVEFNLLYDRGTKFGLNSGGNIDSILMSLPPEAKWK

SEQ ID NO: 97490 - protein, 245 aa, Unknown
  Bacterial polypetide isolated from the Sargasso Sea
NKLARNWFKTLQEVLCKEIEELEGRSNLFRYKNWERGKKSSEGGGQSRLYENGKIFDKVGVNFSEVYGKFSKQFRNKIPGTSKNSKFWASGISVVMHMKNPHVPAMHFNTRYIYTSHGWFGGGMDVTSSIKDKKLEKWFHSEIKKSCDKHNKNYYKKYKKWCDEYFYLPHRNEPRGIGGIFFDYKKDNWEKDFSFVREVGISFTNIFREIILKQHKKKWTKKEKEIQYEKRGRYVEFNLLYDRGT

SEQ ID NO: 97491 - protein, 282 aa, Unknown
  Bacterial polypetide isolated from the Sargasso Sea
EESWVRPEGGGGRSRVMREGRVFEQGGVNFSEVQGEELPPSILKQRPEAKGHPWFATGTSMVLHPRNPYIPTVHLNYRYFEAGPVWWFGGGADLTPYYPFLEDARHFHRTHQAACDSVHPDLHKVFKPWCDEYFFLKHRGETRGVGGIFYDYQDANGTLYKGQDPAGPAAQVSAHLGARPLSWEQLFSLGQANGRAFLPSYAPIVEKRHPMVYGDREREFQLYRRGRYVEFNLVWDRGTIFGLQTNGRTESILMSLPPLVRWEYGYTAEAGSREALLTELSP

SEQ ID NO: 97492 - protein, 124 aa, Unknown
  Bacterial polypetide isolated from the Sargasso Sea
KYGVQNKKNYKKYKKWCDEYFYLPHRKEARGIGGIFFDYETKDWIKNFKFVRELGLSFIDISKKIIKRKEKFEWTNNDKEKQLFKRGRYVEFNLLYDRGTKFGLNSGGNIDSILMSLPPEARWK

SEQ ID NO: 97493 - protein, 200 aa, Unknown
  Bacterial polypetide isolated from the Sargasso Sea
MFKEPPKNSREKTKNLLLTIQDKICSGLENVDGKGKFTEESWIRDEGGGGRSRVLKNGSIFEQAGVNFSEVHGKELPQSIISQRPEAKGHEWFATGTSMVLHPKNPYIPTVHLNYRYFEAGPVWWFGGGADLTPFYPYLSDVRNFHKEHKKACEKVDKDLHKVFKPWCDEYFFLKHRNESRGIGGIFYDYQDGSGNIYRG

SEQ ID NO: 97494 - protein, 229 aa, Unknown
  Bacterial polypetide isolated from the Sargasso Sea
MFKEPPQNSREKTKNLLLTLQDKICSGLENVDGKGKFTEESWLRDEGGGGRSRVLKNGSIFEQAGVNFSEVHGKELPQSIISQRPEAKGHEWFATGTSMVLHPKNPYIPTVHLNYRYFEAGPVWWFGGGADLTPFYPYLSDVRHFHKEHKKACEKVDKDLHKVFKPWCDEYFFLKHRDESRGIGGIFYDYQDGSGNIYKGNNQNGQASKASKNIGKSNLNWDNLFSLAK

SEQ ID NO: 97495 - protein, 197 aa, Unknown
  Bacterial polypetide isolated from the Sargasso Sea
FRQRIPGAEDDGRFWASGVSLVAHMQSPLVPAVHMNTRHIVTSKGWFGGGADLTPMYPDDEDTEQFHGAFKAACDAHDPDYYPKFKAWCDEYFHLEHRDEPRGVGGIFYDYVDTGDWEADFAFTQDVGKSFLNVYPRIVRRHMDRSWEETQRAHQLQRRGRYVEFNLLYDRGTQFGLKTGGNVEAILMSMPPTVTWP

SEQ ID NO: 97496 - protein, 248 aa, Unknown
  Bacterial polypetide isolated from the Sargasso Sea
EYIEKNKVKFSKRIWSKNKKDEGGGISYLLTKGKIFDKVGVNKSTVSGIFPKQFRSKILGAERKGRYWASGISVVAHMRNPKIPAIHFNTRFIVTSKEWFGGGMDATPSYADIKEKKIMHNFLKKVCVQNKKNYKKYKKWCDEYFYLPHRGETRGIGGIFFDYETKDWIKNFKFVRELGLAFINISKKIIKRKEKFKWTKKDKEKQLFKRGRYVEFNLLYDRGTRFGLNSGGNIESILMSLPPEARWK

SEQ ID NO: 97497 - protein, 139 aa, Unknown
  Bacterial polypetide isolated from the Sargasso Sea
MGEASKASQNIGRSNLNWDNLFSLAENCGQAFLPSYLPIIEKRASQTYSPREREFQLYRRGRYVEFNLVWDRGTIFGLQTNGRTESILMSLPPLARWEYGYKAKNGSREEFLTSIFTKSQDWLNDKELEKFCIENNIFD

SEQ ID NO: 97498 - protein, 229 aa, Unknown
  Bacterial polypetide isolated from the Sargasso Sea
MDGGGTYAILKNGAVFDSVGVNFSEVSGKFHKKFRSQIFGARENPNYWASGISVVAHMRNPKIPAMHFNTRFIVTSKNWFGGGMDATPTIKDLKEKKLFHKKIKITCDKYSKKYYPKYKKWCDEYFYLPHRGETRGIGGIFFDYKKNNWEKDFSFVRDVGLCFLDCAKTIITKKMNSKWSKKQKNQQFYKRGRYVEFNLLYDRGTKFGLNTGGNVNAILMSLPPAAKWK

SEQ ID NO: 97499 - protein, 248 aa, Unknown
  Bacterial polypetide isolated from the Sargasso Sea
IEGGKIKFLKKSWKRSIKKDEGGGCYYILENGKVFDKVGVNFSEVYGNLTEEFKKKIPGTKNNRDFWASGVSVVMHMKNPHVPAMHFNTRYIYTNHGWFGGGMDVTPCFNDSTVKKLLFKKLKKICDRHNKKYFKKYKKWCDEYFYLSHRKEPRGIGGIFFDYKKKDWEKDFGFVRDLGINFIQIFNQIISLRKSKKWNLKQKNIQYLKRGRYVEFNLLYDRGTKFGLQTGGNVEAILMSLPPLAKWK

SEQ ID NO: 97500 - protein, 105 aa, Unknown
  Bacterial polypetide isolated from the Sargasso Sea
SYLPIIEKRANKTYTSKEREFQLYRRGRYVEFNLVWDRGTIFGLQTNGRTESILMSLPPLARWEYGYKAKKGSREEFLTSIFTKPQDWLNDKELEKFCMENNIFD

SEQ ID NO: 97501 - protein, 122 aa, Unknown
  Bacterial polypetide isolated from the Sargasso Sea
CNKHNKNYYKKYLKWCDEYFYLPHRKESRGIGGIFFDYKKNNWEKDFSFVREVGISFKNISNEIIEKKNKLKWTIKDKEIQYKKRGRYVEFNLLHDRGTKFGLQTGGNVEAILMSLPPTAKW

SEQ ID NO: 97502 - protein, 107 aa, Unknown
  Bacterial polypetide isolated from the Sargasso Sea
GFEQSFSFMQAVGNGFLTAYAPIVERRKETEFGERERQFQLYRRGRYVEFNLVYDRGTLFGLQTGGRTESILMSMPPLVRWQYAYTPEAGSPEADLYDNYLKPRDWV

SEQ ID NO: 97503 - protein, 275 aa, Unknown
  Bacterial polypetide isolated from the Sargasso Sea
MNKEIKKKLTKNWFKTFQDMICEDIQKIEGKNKKFVTTKWLRNKKKDEGGGEYRILKGGKIFDKVGVNFSEVYGKFSKQYRNKIPGTKYSPNFWASGISIVMHMKNPHVPAMHFNTRYIYTSYGWFGGGMDVTPCFKDAKLKKWFHKKIKKSCDRHNKNYYKKYKKWCDDYFYLPHRKEARGIGGIFFDYKKNNWKKDFDFIRDVGITFKNISNEIINKNNKKKWTFKDKEIQYEKRGRYVEFNLIYDRGTRFGLQTGGNVDAILMSLPPTAKWK

SEQ ID NO: 97504 - protein, 261 aa, Unknown
  Bacterial polypetide isolated from the Sargasso Sea
REKTKNLLLTLQNKICSGLENLDGKGKFIEESWLRDEGGGGRSRVLKNGSIFEQAGVNFSEVQGKELPQSIISQRPEAKGHEWFATGTSMVLHPKNPYIPTVHLNYRYFEAGPVWWFGGGADLTPFYPYLSDVRNFHNEHKKACEKVDKNLHKVFKPWCDEYFFLKHRNESRGIGGIFYDYQDGSGNIYRGNNQNGEASKVSQNIRGSNLNWDNLFSLAENCGQAFLPSYLPIIEKRAAQTFSSREREFQLYRRGRYVEFN

SEQ ID NO: 97505 - protein, 256 aa, Unknown
  Bacterial polypetide isolated from the Sargasso Sea
GAVFEQAGVNFSHVFGDKMPGSATAHRPELAGRKFEAMGVSLVIHPLNPHIPTSHANVRFFIAEKEGEAPVWWFGGGFDLTPFYPVEADVVHWHQVAKDCCDGFDAAYYPKYKKWCDEYFYLKHRNETRGVGGLFFDDLNEPGFEQSFAFMSAVGKAFTKAYVPIVQRNKNKAYSEAERQFQLYRRGRYVEFNLVFDRGTLFGLQSGGRTESILMSMPPLVRWEYGYQPEAGSPEALLYQRYLMPQDWLGLNGSQL

SEQ ID NO: 97506 - protein, 270 aa, Unknown
  Bacterial polypetide isolated from the Sargasso Sea
KKKLARNWFKTLQEVICNDIEELEENTNLFKITNWEKNKKSDEGGGQFRIFKNGKIFEKVGVNFSEVYGKFSKEFKDRIPGAKKNPKFWASGISVVMHMQNPHIPAMHFNTRYIFTSHGWFGGGMDVTPCLKDENLKKWFHSELKKSCDKHNRNYYKKYKKWCDRYFYLPHRNETRGIGGIFFDYKKENWEKDFSFVREIGISFKNIFREIILKKYKKKWTNNQKQIQNEKRGRYVEFNLLYDRGTKFGLQTNGNTEAILMSLPPVANWK

SEQ ID NO: 97507 - protein, 160 aa, Unknown
  Bacterial polypetide isolated from the Sargasso Sea
MLKEPPKNSREKTKNLLLTLQDKICSGLENVDGKGKFTEESWLRDEGGGGRSRVLKNGSIFEQAGVNFSEVQGKELPQSIISQRPEAKGHKWFATGTSMVLHPKNPYIPTVHLNYRYFEAGPVWWFGGGADLTPFYPYLSDVRNFQKEHKKACEKMIKIA

SEQ ID NO: 97508 - protein, 232 aa, Unknown
  Bacterial polypetide isolated from the Sargasso Sea
VHLNYRYFEAGPVWWFGGGADLTPFYPYLSDVRNFHNEHKKACEKVDQDLHKVFKPWCDEYFFLKHRNESRGIGGIFYDYQDGSGNIYKGNNQNGEASKASQNIGRSNLNWDDLFSLAENCGQAFLPSYLPIIEKRASQTYSSKEREFQLYRRGRYVEFNLVWDRGTIFGLQTNGRTESILMSLPPLARWEYGYKAKNGSREEFLTSIFTKPQDWLNDKELEKFCIENNIFD

SEQ ID NO: 97509 - protein, 130 aa, Unknown
  Bacterial polypetide isolated from the Sargasso Sea
HRGEPRGIGGLFFDDLNEWDFDTSFAFMRAIGDAYIQAYLPIVQRRKLMPFGEREREFQAFRRGRYVEFNLVFDRGTLFGLQSGGRTESILMSLPPHVRWGYDWKPEPGSIEARLTEYFLTDRDWLSATS

SEQ ID NO: 97510 - protein, 275 aa, Unknown
  Bacterial polypetide isolated from the Sargasso Sea
MDKDIKKKLSRNWFINLQEMICNTIQQIEGGKIKFFKKSWKRNIKKDEGGGCYFILENGKVFDKVGVNFSEVYGKLAEEFKKKIPGTKNNRDFWASGVSVVMHMKNPHVPAMHFNTRYIHTNHGWFGGGMDVTPCFNDPIVKKLLFKKLKKMCDKHNKKYFKKYKKWCDEYFYLSHRKEPRGIGGIFFDYKKKDWEKDFGFVRDLGINFIQIFNQIISLRKSKKWNLKQKNIQYLKRGRYVEFNLLYDRGTKFGLQTGGNVDAILMSLPPLAKWK

SEQ ID NO: 97511 - protein, 200 aa, Unknown
  Bacterial polypetide isolated from the Sargasso Sea
MIDIDSIKQYLLSLQDQISTALLQIDGKLELREDEWQREGGGGGRTRVMNGGELFEQGGINFSHVFGDRLPPSATASRPELAGRSFQALGDSLVIHPLNPYIPTTHMNIRFFVAEKEGEEPIWWFGGGFDLTPYYGFKEDARFWHETAKAACAGFGEDKYEKYKKWCDDYFYLKHRQEPRGIGGLFYDDLNEQGFEHCFN

SEQ ID NO: 97512 - protein, 257 aa, Unknown
  Bacterial polypetide isolated from the Sargasso Sea
EVVCKDIEQIEKKKNIFISKDWKRGKNGNEGGGQFRIFENGRIFEKVGVNFSEVYGKFSKQFRDRIPGTKKKPDFWASGISVVMHMRNPYVPAMHFNTRYIVTDHGWFGGGMDVTPCLKDEKLKKWFHEEIKKTCDKHNKKFYSEYKKWCDNYFYLPHRKESRGIGGIFFDYKKKNFEKDFSFVRDVGLSFKKIFRDIIVKKNKKKWTKKTKEIQLYKRGRYVEFNLLYDRGTKFGLQTGGNVEGILMSLPPTAKWK

SEQ ID NO: 97513 - protein, 226 aa, Unknown
  Bacterial polypetide isolated from the Sargasso Sea
GGQFRILENGKIFEKVGVNFSEVYGKFSKEFRNRIPGGDKNPNFWAAGISVVMHMKNPHVPAMHFNTRYIYTSHGWFGGGMDVTPCLKDKSLEKWFHNELKKSCNKHNKNFYEKYKKWCDEYFYLPHRKEPRGIGGIFFDYKKENWEKDFSFVREVGISFKNIFREIILRKYKKKWSNKQKEIQLEKRGRYVEFNLLYDRGTKFGLQTNGNVEAILMSLPPLAKWK

SEQ ID NO: 97514 - protein, 223 aa, Unknown
  Bacterial polypetide isolated from the Sargasso Sea
HRPELAGAPFEAMGVSLVFHPRNPFVPTVHMNVRMIAAGSGAAGSGAAGHPGNEPTCWFGGGMDLTPVYGFEEDAQHFHRVCRDALAPFGDTLYPRFKTWCDEYFCLKHRNEQRGIGGIFFDDFSELGQARSFDMLRSVGDSFLESYLPIVERRQAMDYGQQQVDFQRYRRGRYVEFNLVWDRGTHFGLQSGGRTESILLSMPPHASWSYQREDAPGTPERAL

SEQ ID NO: 97515 - protein, 234 aa, Unknown
  Bacterial polypetide isolated from the Sargasso Sea
RGKKSNEGGGQSRIFENGKIFDKVGVNFSEVYGKLSEEFKNKIPGASKNRKFWASGISVVMHMKNPYVPAMHFNTRYVYTSYGWFGGGMDVTPCMKDKKLETWFHSKIKKSCDKHNKNYYKKYKKWCDEYFFLPHRNEPRGIGGIFFDYKKNNWEKDFSFVREVGISFKNIAREIILKKHKKKWTKQEKEIQYEKRGRYVEFNLLYDRGTKFGLQTGGNIDAILMSLPPLAKWK

SEQ ID NO: 97516 - protein, 176 aa, Unknown
  Bacterial polypetide isolated from the Sargasso Sea
GQDLTPYYLFEEDAKHFHQVCKTACDKHNPEFYPKYKARCDEYFYNTHRNEARGIGGLFFDYCKATEEMSMENWYNFVTEVGNSFLEAYLPIVEKRKELPYTKAQRDWQEIRRGRYVEFNLVHDKGTLFGLKTNGRIESILMSLPPHVQWVYDHNPEDGSDEAKLLDVLKNPKNWV

SEQ ID NO: 97517 - protein, 97 aa, Unknown
  Bacterial polypetide isolated from the Sargasso Sea
MQAVGNGFIDAYVPIVERRKQTDFGERERDFQLYRRGRYVEFNLVFDRGTLFGLQTGGRTESILMSMPPLARWEYCYTPAPGSAEAKLTDWLKPTDW

SEQ ID NO: 97518 - protein, 263 aa, Unknown
  Bacterial polypetide isolated from the Sargasso Sea
MEENIRKKLARNWFLTIQELICHEIENIENGSSYFKTKAWSRSETKDEGGGKSKLLKNGKVFEKVGVNFSEVYGNFSNEFKKKIPRFNNSKDFWASGISIVMHMKNPYIPAMHFNTRYIITDHGWFGGGMDFTPCFKDSALEKIVEKKLKMMCNKHGKNYYKKYKKWCDDYFYLHHRNEPRGIGGIFFDYKKKNWDRDFAFVRDVGIVFSYLFKEIIAKKFKKRWKKKDKLIQNKKRGRYVEFNLLHDRGTKFGLQTGRKCRS

SEQ ID NO: 97519 - protein, 306 aa, Unknown
  Bacterial polypetide isolated from the Sargasso Sea
MGLQDEICAGLESLDGEGTFVEESWERPEGGGGRSRVMREGRVFEQGGVNFSEVQGQELPPSILKQRPVAKGHPWFATGTSMVLHPRNPYIPTVHLNYRYFEAGPVWWFGGGADLTPYYPFLEDARHFHRTHQAACDSVHPDLHKVFKPWCDEYFFLKHRGETRGVGGIFYDYQDSSGVLYKGQDPSGPAAGVSAQLGARPLGWEQLFALGQANGRAFLPSYAPIVEKRHPMAYGDRERQFQLYRRGRYVEFNLVWDRGTIFGLQTNGRTESILMSLPPLVRWEYGYKAEAGSREALLTELFTNPR

SEQ ID NO: 97520 - protein, 95 aa, Unknown
  Bacterial polypetide isolated from the Sargasso Sea
GDAFLQAYLPIVERRAELPYGERERDFQAYRRGRYVEFNLVFDRGTLFGLQSGGRTESILMSMPPVANWRYNWQPEPGSPEARLYSDFIVPRDWV

SEQ ID NO: 97521 - protein, 251 aa, Unknown
  Bacterial polypetide isolated from the Sargasso Sea
SEVHGKELPQSIISQRPEAKGHEWFATGTSMVLHPKNPFIPTVHLNYRYFEAGPVWWFGGGADLTPYYPYLTDVRNFHKEHCNACEKVNKNLHKVFKPWCDEYFFLKHRNESRGIGGIFYDYQDGSGRIYKGDNKESKAYKESINIGELNLNWNNLFSLAENCGGAFLDSYQPIIEKRVNQNYTKEQREFQLYRRGRYVEFNLVWDRGTIFGLQTNGRTESILMSLPPLARWEYGYKAQKGSREDYLTKIF

SEQ ID NO: 97522 - protein, 185 aa, Unknown
  Bacterial polypetide isolated from the Sargasso Sea
FGGGFDLTPYYGNEEDRIHWHRVAEQACAPFGPDVYSRYKAWCDTYFHIKHRNEPRGIGGLFFDDLNEWGFDTCFAFIRAIGDAYIDAYLPIVQRRKAMAYTEQQRQFQEFRRGRYVEFNLVYDRGTLFGLQSGGRTESILMSLPPQVRWSYDWKAEAGSEEARLTDYFLQDRDWLGVAAPKAAV

SEQ ID NO: 97523 - protein, 263 aa, Unknown
  Bacterial polypetide isolated from the Sargasso Sea
MDELIKKKLARNWFKTLQEVICNEIEELEGKKKIFKIKNWERGKKSNEGGGQFRILENGKIFEKVGVNFSEVYGKFSKKFRNRVPGGEKNPKFWASGISIVMHMQNPHVPAMHFNTRYIYTSHGWFGGGMDVTPCLKDKSLEKWFHKELKVACDKHNKNYYKKYKKWCDEYFYLPHRKEPRGIGGIFFDYKKDNWEKDFSFIREVGLSFKNIFREIILKKYKKKWSIKQKEIQFEKRGRYVEFNLLYDRGTKFGLQTNGNVEA

SEQ ID NO: 97524 - protein, 207 aa, Unknown
  Bacterial polypetide isolated from the Sargasso Sea
MVRSLIRRVLGRQDVGVSKAPLELPPSDSRERARAMVMGLQDEICAGLEALDGEGRFVEESWVRPEGGGGRSRVMREGRVFEQGGVNFSEVQGEELPPSILKQRPEAKGHPWFATGTSMVLHPRNPYIPTVHLNYRYFEAGPVWWFGGGADLTPYYPFLDDARHFHRTHQAACDSVHPDLHKVFKQWCDEYFYLKHRGETRGVGGIF

SEQ ID NO: 97525 - protein, 171 aa, Unknown
  Bacterial polypetide isolated from the Sargasso Sea
MRNPKMPAIHFNTRFIVTAKEWFGGGMDATPSYKDLKEKKMIHDELEKVCVQNKKNYKKYKKWCDEYFYLPHRKEARGIGGIFFDYETKDWIKNFKFVRELGLTFINISKKIIKRKEKFKWTNKDKEKQLLKRGRYVEFNLLYDRGTRFGLNSGGNIDSILMSLPPEAKWK

SEQ ID NO: 97526 - protein, 283 aa, Unknown
  Bacterial polypetide isolated from the Sargasso Sea
TTLLRDGSGEAGDDSAMRAKFEQMIRKAQDEICDAISKLDGKPFHEDAWTRPAGGGGVSRVLQDGNVFEKAGVNVSVVYGQMPPEAYRAATGEAGESTEMIPFFAAGISSVMHPHNPMAPTVHFNYRYFETDAPKGAAGAPRAWWFGGGTDLTPSYVFEDDVKHFHQTLKDVCDKHDDEYYPRFKQWADDYFMIKHREERRGVGGVFFDDMNDRSKEELLAFATDMASAVVPAYVPLVEKHKDDEFTPEQRAWQQMRRGRYVEFNLVYDRGTTFGLKTGGRIE

SEQ ID NO: 97527 - protein, 279 aa, Unknown
  Bacterial polypetide isolated from the Sargasso Sea
MVRSLIRRVLGRQDVGVSTAPLELPPSDSRERARAMVMGLQDEICAGLEALDGEGRFVEESWVRPEGGGGRSRVMRKGRVFEQGGVNFSEVQGEELPPSILKQRPEAKGHPWFATGTSMVLHPRNPYIPTVHLNYRYFEAGPVWWFGGGADLTPYYPFLDDARHFHRTHQAACDSVHPDLHKVFKPWCDEYFYLKHRGETRGVGGIFYDYQDANGTLYKGQDPSGPAAQVSARLGVRPLSWEQLFSLGKANGRAFLPAYAPIVEKRHPMAYGDRERDFS

SEQ ID NO: 97528 - protein, 275 aa, Unknown
  Bacterial polypetide isolated from the Sargasso Sea
MDELIKKKLARNWFKTLQEVICQEIEELEGKKNIFKIKNWERGKKSNEGGGQFRILENGKIFEKVGVNFSEVYGKFSKEFRNRIPGGEKNPKFWAAGISIVMHMQNPHVPAMHFNTRYIYTSHGWFGGGMDVTPCLKDKSLEKWFHKELKVSCDKHNKNYYKKYKKWCDEYFYLPHRKEPRGIGGIFFDYKKDNWEKDFSFVREVGISFKNIFREIILKKYKKKWSNKQKESQLEKRGRYVEFNLLYDRGTKFGLQTNGNVEAILMSLPPVAKWR

SEQ ID NO: 97529 - protein, 256 aa, Unknown
  Bacterial polypetide isolated from the Sargasso Sea
MEEIIKKKLARNWFKTLQEVLCQEIEELEGRSNLFKYKNWERGKKSSEGGGQFRIYENGKIFEKVGVNFSEVHGKFSKQFRNKIPGTKENPKFWASGISVVMHMKNPHVPAMHFNTRYIYTSYGWFGGGMDVTPCFKDKTLEKWFHSELKKSCDKYNKNYYKKYKKWCDNYFYLPHRKESRGIGGIFFDYKKHNWEKDFSFVREVGISFKNIFREIILKKHKKKWTKKEKEIQYEKRGRYVEFNLLYDRGTKFGLQ

SEQ ID NO: 97530 - protein, 302 aa, Unknown
  Bacterial polypetide isolated from the Sargasso Sea
MSVPDATVVKAFLLDLQHRICAGLEQLDGQASFAADSWTRTEGGGGTSRVLTQGAVFEQAGVNFSHVTGAAMPASATAHRPELAGRSFEAMGVSLVIHPRNPYIPTTHANVRFFIAHKDGADPVWWFGGGFDLTPYYPFEEDVREWHQSAKNLCQPFGDDVYPKYKKWCDEYFFLPHRNETRGVGGLFFDDLNQTGFDKSFDFMQAVGNGFLTAYAPIVERRKETPYGEREREFQLYRRGRYVEFNLVYDRGTLFGLQTGGRTESILMSMPPLVRWQYAYTPEAGSPEADLYDNYLKPRDWV

SEQ ID NO: 97531 - protein, 252 aa, Unknown
  Bacterial polypetide isolated from the Sargasso Sea
MKKEIKKKLVKNWFKILQDVICYDIEKIENKSSKFVTKDWKRNNEKNSGGGICKILENGKVFDKVGVNFSEVHGKLSKKFKQKIPGGSKSSYFWASGISIVMHMKNPHVPAMHFNTRYVYTTHGWFGGGIDVTPCFKDNALKKWFHKKIKSTCDKHNKNYYKKYKKWCDEYFYLPHRKEPRGIGGIFFDYKKNNWEKDFAFVRDIGLVFHKIFNELINKKNKKKWSKNEKDIQYKKRGRYVEFNLLYDRGTE

SEQ ID NO: 97532 - protein, 275 aa, Unknown
  Bacterial polypetide isolated from the Sargasso Sea
MDQTIKKKLARNWFKTLQEVICQEIEELEAKKKIFKIKNWERGKNSNEGGGQFRILENGKIFEKVGVNFSEVYGKFSKEFRNRIPGGDKNPNFWAAGISVVMHMKNPHVPAMHFNTRYIYTSHGWFGGGMDVTPCLKDKSLEKWFHNELKKSCNKHNKNFYKKYKKWCDEYFYLPHRKEPRGIGGIFFDYKRENWEKDFSFVREVGISFKNIFREIILRKYKKKWSNKQKEIQLEKRGRYVEFNLLYDRGTKFGLQTNGNVEAILMSLPPLAKWK

SEQ ID NO: 97533 - protein, 262 aa, Unknown
  Bacterial polypetide isolated from the Sargasso Sea
MRDKAKDWFEDLRNKLVSMIEGHDGSRFKIKRWNHSGEGGGMMSIIKGNVIEKGGVNISTVSGKFSEKMQQRILGASKDPTYWATGISVVLHPLNPNIPSMHFNTRYLVTQKSWFGGGMDITPCLDFTAEKKQFHENLKEMCDRHDKDYYPKYKKWCDDYFFLKHRNEARGIGGIFFDHLNNDNFENDFCFIQDVGKFFHEYVNQIITVNKKKKWTKKDRNLQLIKRGRYVEFNLLYDRGTKFGLETGGNTEAILMSLPPIA

SEQ ID NO: 97534 - protein, 291 aa, Unknown
  Bacterial polypetide isolated from the Sargasso Sea
MLKEPPKNSREKTKNLLLTLQDKICSGLENVDGKGKFTEETWLRDEGGGGRSRVLKNGSIFEQAGVNFSEVQGKELPQSIISQRPEAKGHEWFATGTSMVLHPKNPYIPTVHLNYRYFEAGPVWWFGGGADLTPFYPYLSDVRNFHNEHKKACEKVDQDLHKVFKPWCDEYFFLKHRNESRGIGGIFYDYQDGSGNIYKGNNQNGEASKASQNIGRSNLNWDDLFSLAENCGQAFLPSYLPIIEKRASQTYSSKEREFQLYRRGRYVEFNLVWDRGTIFGLQTNGRTESIL

SEQ ID NO: 97535 - protein, 164 aa, Unknown
  Bacterial polypetide isolated from the Sargasso Sea
MLKIPPKNSREKTKNLLLTLQDKICSGLENVDGKGKFTEESWLRDEGGGGRSRVLQNGSVFEQAGVNFSEVKGKELPKSIISQRPEAKGHEWFATGTSMVLHPKNPYIPTVHLNYRYFEAGPVWWFGGGADLTPFYPYLSDVRNFHKEHKKACEKVDKDLHKVF

SEQ ID NO: 97536 - protein, 306 aa, Unknown
  Bacterial polypetide isolated from the Sargasso Sea
MQNVDKHQVKAFLMALQDSICAELAAADGVSIFVEESWDRAEGGGGRSRVLTHGAVFEQAGVNFSHVFGDKMPASATAHRPELAGRKFEAMGVSLVIHPLNPHIPTSHANVRFFIAEKEGEAPVWWFGGGFDLTPFYPVEADVVHWHQVAKDCCDGFDATYYPKYKKWCDEYFYLKHRNETRGVGGLFFDDLNEPGFEQSFAFMSAVGEAFTKAYLPIVERNKNKAFSEAERQFQLYRRGRYVEFNLVFDRGTLFGLQSGGRTESILMSMPPLVRWQYGYQPETGSPEAQLYQRLFNATRLAGPER

SEQ ID NO: 97537 - protein, 285 aa, Unknown
  Bacterial polypetide isolated from the Sargasso Sea
MESFIQQLQDEICQALEKKDSRKFQEDCWKRKEGGGGRTRVLENGSFLEKGGVNISSVHGPMSDELAKQLGTKASFFGACGISLVLHPRSPKIPTVHMNLRYFETLSGDCWYGGGIDLTPYFPYPEDFRHFHQTLQQVCERCIPDSYEEYKKNCDEYFCLPHRQEMRGIGGIFFDHLNGSEEKYFNLVHEVGEEFLNAYLPLVDRRINEEWNDEDVEFQNYRRGRYVEFNLIYDRGTLFGIKSNGRIESIFMSLPPKVDFRYNWEPRKNSPHHEMNGFYQPQNWC

SEQ ID NO: 97538 - protein, 227 aa, Unknown
  Bacterial polypetide isolated from the Sargasso Sea
RYFEAGPVWWFGGGADLTPFYPYLSDIRNFHNEHKKACEKVDQDLHKVFKPWCDEYFFLKHRNESRGIGGIFYDYQDGSGNIYRGNNQNGEASKASQNIGKSNLNWDDLFSLAENCGQAFLPSYLPIIEKRASQTYSSKEREFQLYRRGRYVEFNLVWDRGTIFGLQTNGRTESILMSLPPLARWEYGYKAKKNSREEFLTSIFTKPQDWLNDKELEKFCIENNIFD

SEQ ID NO: 97539 - protein, 307 aa, Unknown
  Bacterial polypetide isolated from the Sargasso Sea
MTDSTYDVARVRTYLQGLQTRIADALGALDGTPLATDAWQRGPAERLRGGGCTRILEGGRVFERAGIGFSDVAGDALPPSASAARPQLAGRGFEALGVSLVLHPRNPYCPTVHMNVRMLIATKPGEEPVFWFGGGMDLTPVYGFEDDARHFHQTCKDALDPFGVELYPRFKKWCDEYFFLKHRNEMRGIGGIFFDDFSEPGFERSFDMMQSVGDAFLQAYLPIVERRAELPYGERERDFQAYRRGRYVEFNLVFDRGTLFGLQSGGRTESILMSMPPVANWRYNWQPEPGSPEARLYSDFIVPRDWV

SEQ ID NO: 97540 - protein, 285 aa, Unknown
  Bacterial polypetide isolated from the Sargasso Sea
MESFIQQLQDQICQALEKKDSQKFQEDCWKRNEGGGGRTRVLENGSFLEKGGVNISSVHGPMSNELAKQLGTKASFFRACGISLVLHPRSPKIPTVHMNLRYFETLSGDCWYGGGIDLTPYFPYPEDFRHFHHTLQQVCERCIPDSYEEYKKNCDEYFCLPHRQEMRGIGGIFFDHLIGSEEKYFNLVHEVGEEFLNAYLPLVDRRINEEWNDEDVEFQHYRRGRYVEFNLIYDRGTLFGIKSNGRIESIFMSLPPKVDFRYNWEPRKNSPHHEMNGFYQPQNWC

SEQ ID NO: 97541 - protein, 309 aa, Unknown
  Bacterial polypetide isolated from the Sargasso Sea
MKTKFKVEDGDIISKSFQTLQNNIINEFLKYEETDFHIDTWKRPEGGGGKTCVLSKGCTFDKVGVNFSDINGTSLPPAATSNRPELNGMKYRAMGVSVVTHPKNPFVPTVHLNVRFFMAFDENTEPLWWFGGGFDMTPFYPFLEDVVLWHESAQKICVLDKKNYYDDFKKQCDDYFYLKHRNEPRGVGGIFFDNLNNHKLADCHDFVIKVGECFYTTYSKILKKRKDLPYSEKHKSFQLFRRGRYVEFNLVYDRGTLFGLQSNGRTESILMSLPPSVNWIYNYPVEDGSEESVLYNDYLMAKDWLKEKN

SEQ ID NO: 97542 - protein, 109 aa, Unknown
  Bacterial polypetide isolated from the Sargasso Sea
WCDKYFYLPHRKEARGIGGIFFDYETTDWIKNFKFVRELGLAFIDISNKVIKRKKKLKYTARDKEKQLLKRGRYVEFNLLHDRGTKFGLNSGGNTESILMSLPPEAKWK

SEQ ID NO: 97543 - protein, 294 aa, Unknown
  Bacterial polypetide isolated from the Sargasso Sea
MKTNEISKSFKNTQNQIVKAIKTLDSTIIKKSSSWKHRTGGGGISCEMEGSKYIDKAAVNFSSIVGDKLPASALQKSGVSGLNKYRATGVSVIIHPINPKIPCAHMNIRFFEAKVNRKNVWWFGGGFDLTPYFINKSDILYWKNSAKELCDKYKRGMYEEYNKNCNNYFFLPHRQEPRGVGGLFYDQMNSPDYSTCKEFSLDCAMTFKNSYLYLFDLKKNKKYTKKEKSFQLYRRGRYVEFNLLYDRGTLFGLQSGGRAESILMSLPPEVTWNKKYDFTKYEKKLMEMFSLARK

SEQ ID NO: 97544 - protein, 275 aa, Unknown
  Bacterial polypetide isolated from the Sargasso Sea
MDEIIKKKLARNWFKTLQEVLCKEIEELEGGSKLFKYKNWERGKKSNEGGGQSRIYKNGKIFDKVGVNFSEVYGKFSNQFKNKIPGTNKNSKFWASGISVVMHMKNPHVPAMHFNTRYVYTSYGWFGGGMDVTPCFKDKKLEKWFHSEIKKSCDKHNKNYYKKYKKWCDEYFYLPHRNEPRGIGGIFFDYKKNNWEKDFSFVREVGISFKNIFREIILKKHKKKWTKKDKEIQYEKRGRYVEFNLLYDRGTKFGLNTGGNVDAILMSLPPLAKWK

SEQ ID NO: 97545 - protein, 294 aa, Unknown
  Bacterial polypetide isolated from the Sargasso Sea
MLDKIAENFQEIHQSLVDNFYRYEQKEKIIVDKWEKETLGRGISVVVDCGKFFDKAGINFSQISGNSLPRSSVGSEGYKDAPYFATGVSVVFHPKNPNIPTSHLNVRYFATFNENNEINEDWFGGGFDLTPYVPFKEDCKSWHQQAQIASKNKYQEWKNNCDDYFYLKHRNEHRGIGGIFYEKQTFEKPEQGLELSKSVAESFLSGYSNILDKRKDLEFTERQKEFQIFRRGRYVEFNLLYDRGTLFGLQSGGRIESILMSLPSEVSWRYKFDQNLNSEEQNLYNLISKKHKWI

SEQ ID NO: 97546 - protein, 302 aa, Unknown
  Bacterial polypetide isolated from the Sargasso Sea
MSVPDATVVKAFLLDLQNRICAGLEQLDGQASFAADSWTRTEGGGGTSRVLTQGAVFEQAGVNFSHVTGAAMPASATAHRPELAGRSFEAMGVSLVIHPKNPYIPTTHANVRFFIAHKDGADPVWWFGGGFDLTPYYPFEEDVREWHQTAKNLCLPFGDDVYPKYKKWCDEYFFLPHRNETRGVGGLFFDDLNQAGFDKSFDFMQAVGNGFLTAYAPIVERRKETPYGEREREFQLYRRGRYVEFNLVYDRGTLFGLQTGGRTESILMSMPPLVRWQYAYTPEAGSPEADLYDNYLKPRDWV

SEQ ID NO: 97547 - protein, 301 aa, Unknown
  Bacterial polypetide isolated from the Sargasso Sea
MKHKIENNLIDIQSDIINAFKSLESENDSIISLDEWKREEGGGGKTFVIENGSFFDKCAVNFSSIKGKDLPKTALANNLNKEVNYGYKAMGVSVISHPKNPNVPTSHMNVRLFGILDKNSEIDEWWIGGGYDLTPFIAFEDDIKKWHRNAKECLDEINNDYYPCFSDNCNNYFKIPHRNERRGVGGIFFDNVTDLSLENSVKMLESVANAYLGSYMEIANKRKNIKFSDTERDFQLIRRGRYVEFNLIYDRGTLFGLQSNGRIESILASLPNNTKWQYKKTEEYNRLEKELLSTINKDWNV

SEQ ID NO: 97548 - protein, 285 aa, Unknown
  Bacterial polypetide isolated from the Sargasso Sea
MYLSTKNQRLETQKWFEVLRDQICSSFEKLEQNYEGPKQSMPPGKFRRKKWHREGGGGGEMSIMEGRLFEKVGVNISTVMGELSPEFSKQIPGAENNPKFWASGISLVAHMWSPHIPAVHMNTRHIATTRSWFGGGADLTPMIINTEDKELFHNAFRSACTKHDDTYYTRFKEWCDDYFYLKHRNEPRGVGGIFYDQLANNFETDFNFTKDVGSTFASIYPTIVKRHMNKTWTKKERQAQLVKRGRYVEFNLLYDRGTLFGLQTGGNVEAILMSLPPAVAWPSSI

SEQ ID NO: 97549 - protein, 265 aa, Unknown
  Bacterial polypetide isolated from the Sargasso Sea
MFNEAKNWFKLLRDDLVKNTQVFEKKSFIEKRWKHHDEGGGLMTKIKGNVIEKGGINISTVSGKFNEKMQKNVLGASEDPTFSATGISVVFHPMSPHIPSMHFNTRYLTTTKSWFGGGMDLTPCLDFDTESQIFHKELEDICNRYNDDYYPKYKKWCDEYFYLKHRKEPRGIGGIFFDHLNSGNQENDFEFVKDVGKFFLKHAIYLINKDKDRAWTSREKDVQLIKRGRYVEFNLLYDRGTKFGLETGGNTEAILMSMPPIANWE

SEQ ID NO: 97550 - protein, 239 aa, Unknown
  Bacterial polypetide isolated from the Sargasso Sea
MNEELKKNLARDWFKILQDMICLEIEKIEKNKVIFESRSWKRNKVRDEGGGEYRILTNGKVFDKVGVNFSEVYGKFSKEFKNKIPGTNSSSKFWASGISVVMHMKNPHIPAMHFNTRFIYTSHGWFGGGVDVTPCFNDKKLKKWFHAEIKKCCDRHNKTYYKKYKKWCDEYFYLPHRKESRGIGGIFFDYKKNNWKKDFSFVRDVGISFKRIFEEIIKNKNKKKWNKNEKEIQYQKRGR

SEQ ID NO: 97551 - protein, 274 aa, Unknown
  Bacterial polypetide isolated from the Sargasso Sea
MITPDFRKKMADSWFSYLQTQICKEFEYLEKNKVKFSKRDWSKKKKKEGGGTSFLLSNGKIFDKVGVNKSTVSGIFPKQFRSKILGAEKKGKYWASGVSVVAHMRNPKMPAIHFNTRFIVTSKEWFGGGMDATPSYKDLIEKKMIHDELKKVCVQNKKNYKKYKKWCDEYFYLPHRKEARGIGGIFFDYETKDWIKNFKFVRELGLSFIDISKKIIKRKEKFKWTIKDKEKQLFKRGRYVEFNLLYDRGTKFGLNSGGNIDSILMSLPPEAKWK

SEQ ID NO: 97552 - protein, 234 aa, Unknown
  Bacterial polypetide isolated from the Sargasso Sea
MLKEPPKNSREKTKNLLLTLQDKICSGLENIDGKGKFTEESWLRDEGGGGRSRVLKNGSIFEQAGVNFSEVQGKELPQSIISQRPEAKGHEWFATGTSMVLHPKNPYIPTVHLNYRYFEAGPVWWFGGGADLTPFYPYLSDIRNFHNEHKKACEKVDQDLHKVFKPWCDEYFFLKHRNESRGIGGIFYDYQDGSGNIYRGNNQNGEASKASQNIGRSNLNWGNLFSLAENCGQA

SEQ ID NO: 97553 - protein, 275 aa, Unknown
  Bacterial polypetide isolated from the Sargasso Sea
MDQTIKKKLARNWFKTLQEVICQEIEELEAKKNIFKIKNWERGKNSNEGGGQFRILENGKIFEKVGVNFSEVYGKFSKEFRNRIPGGDKNPNFWAAGISVVMHMKNPHVPAMHFNTRYIYTSHGWFGGGMDVTPCLKDKSLEKWFHNELKKSCDKHNKNFYKKYKKWCDEYFYLPHRKEPRGIGGIFFDYKKENWEKDFNFVREVGISFKNIFREIILKKYKKKWSNKQREIQLEKRGRYVEFNLLYDRGTKFGLQTNGNVEAILMSLPPVAKWK

SEQ ID NO: 97554 - protein, 185 aa, Unknown
  Bacterial polypetide isolated from the Sargasso Sea
EPCLLPGLQPWCDEYFYLKHRDETRGIGGIFYDYQAPGGAIYKGPDADGLAAAVGKDQMPERDWESLFQLASACGNAFLPSYVPIAERRQGLSYGDRERQFQLYRRGRYVEFNLVFDRGTIFGLQTNGRTESILMSLPPLVRWEYGYSADEGSREALLTDVFTSPQDWLGDGALEQRCALHGAVG

SEQ ID NO: 97555 - protein, 302 aa, Unknown
  Bacterial polypetide isolated from the Sargasso Sea
MSKPDVAQVKAFLLQLQDEICRGLELADGVGHFVEDAWLREGGGGGRTRVLRHGAVIEQGGVNFSHVHGDAMPASATAHRPELAGRRFEAMGVSLVIHPHNPYVPTSHANVRFFIAEKEGEEPIWWFGGGFDLTPFYPFEEDVQHWHQVSFDLCQPFGTDIYPEFKSWCDRYFFLKHRDETRGVGGLFFDDLNRWPFVDCFAFMQAVGKGYLDAYLPIVECRKALAYGEREREFQLYRRGRYVEFNLVYDRGTLFGLQTGGRTESILMSMPPLARWEYDWQPPAGSPEALLYSDYLKPREWL

SEQ ID NO: 97556 - protein, 131 aa, Unknown
  Bacterial polypetide isolated from the Sargasso Sea
FIKYLRKSCDQHNKNYYKKYKKWCDEYFFLKHRNEPRGIGGIFFDYKKKNWEKDFEFVRDVGLTFQMIYNEIIFKYKNKKWTKKDKEKQFLKRGRYVEFNLIYDRGTKFGLQTGGNVEGILMSLPPIAKWK

SEQ ID NO: 97557 - protein, 341 aa, Unknown
  Bacterial polypetide isolated from the Sargasso Sea
MKEPPKNSREKTKNLLLTLQDKICSGLENVDGKGKFTEETWLRDEGGGGRSRVLKNGSIFEQAGVNFSEVQGKELPQSIISQRPEAKGHEWFATGTSMVLHPKNPYIPTVHLNYRYFEAGPVWWFGGGADLTPFYPYLSDVRNFHNEHKKACEKVDQDLHKVFKPWCDEYFFLKHRNESRGIGGIFYDYQDGSGNIYKGNNQNGEASKASQNIGRSNLNWDDLFSLAENCGQAFLPSYLPIIEKRASQTYSSKEREFQLYRRGRYVEFNLVWDRGTIFGLQTNGRTESILMSLPPLARWEYGYKAKNGSREEFLTSIFTKPQDWLNDKELEKFCIENNIFD

SEQ ID NO: 97558 - protein, 254 aa, Unknown
  Bacterial polypetide isolated from the Sargasso Sea
MSEIEELEGKKKIFKIKDWERGKNSNEGGGQFRILENGKIFEKVGVNFSEVYGKFSKQFRNRIPGGDKNPNFWAAGISVVMHMKNPHVPAMHFNTRYIYTSHGWFGGGMDVTPCLKDKSLEKWFHNELKKSCDKHNKNFYKKYKKWCDEYFYLPHRKEPRGIGGIFFDYKKENWEKDFSFVREVGISFKNIFREIILKKYKKKWSNKQREIQLEKRGRYVEFNLLYDRGTKFGLQTNGNVEAILMSLPPVAKWK

SEQ ID NO: 97559 - protein, 133 aa, Unknown
  Bacterial polypetide isolated from the Sargasso Sea
ASQNIGRFNLNWDNLFYLAENCGQAFLPSYLPIIEKRASQAYSSKEREFQLYRRGRYVEFNLVWDRGTIFGLQTNGRTESILMSLPPLARWEYGYKAKKSSREEFLTSIFTKPQDWLNDKELEKFCIENNIFD

SEQ ID NO: 97560 - protein, 73 aa, Unknown
  Bacterial polypetide isolated from the Sargasso Sea
MFIPTIQGQGDEEQRKYWIPKCVKLECIGTYAQTELGHGTFLRGLETTATYDQSTEEFIVHSPTLTSTKWWAG

SEQ ID NO: 97561 - protein, 75 aa, Unknown
  Bacterial polypetide isolated from the Sargasso Sea
GWNGDEYLGPAVLLQAARWVSDSRDSERKERLKAINDSLKLYRCHSIMNCTRSCPKGLNPAKEIAGLKKAIVTEL

SEQ ID NO: 97562 - protein, 164 aa, Unknown
  Bacterial polypetide isolated from the Sargasso Sea
MVQINLPENSKIQKGKYFKDKTNSRNIRKVNIYRWDPSTGAKPRIDTYEVDMDNCPSKVLDILNKIKNEIDPTITYRRSCAHGVCGSCAMNMGGKNGLACTTSHSEIKGDINIYPLPHLKVKKDLIGDLDGLYNQYKSIEPWLKNKSTSESKEIHQSQKDRSKL

SEQ ID NO: 97563 - protein, 139 aa, Unknown
  Bacterial polypetide isolated from the Sargasso Sea
VIKDLIVDLSHALNKLEFIQPWLQNNIGKSTKNEQIQLSNDRSKIDGLWECILCFSCTTSCVSYWWNGEKYLGPAVLLQASRWVNDSRDSEKKKRLKYIEQNSNIHNCHSIMNCANSCPKGLNPGKAIVDLKKQIAMNV

SEQ ID NO: 97564 - protein, 60 aa, Unknown
  Bacterial polypetide isolated from the Sargasso Sea
PKAVCELEHMVLPFSRFENGRIYQRPFGGQSKEFGKGGQASRTCAAADRTGHALLHTLYQ

SEQ ID NO: 97565 - protein, 187 aa, Unknown
  Bacterial polypetide isolated from the Sargasso Sea
MNKVINISNKSNIKEFDALIVGGGGSGMRTSLELAKSGLNTAVISKVFPTRSHTVSAQGGITCAIQSEDPNDDWRWHMYDTVKGSDYIGDQDAIEYMCSEGPKAVYELEHMGLPFSRFENGRIYQRPFGGQSKDFGKGGQAARTCAAADRTGHALLHTLYQNNVKEGTNFLNEWFAVDLVKNSKNEI

SEQ ID NO: 97566 - protein, 164 aa, Unknown
  Bacterial polypetide isolated from the Sargasso Sea
MNKVINISKKNNIKEFDALIVGGGGSGMRTSLELAKSGLNTAVISKVFPTRSHTVSAQGGITCAIQSADPNDDWRWHMYDTVKGSDYIGDQDAIEYMCSEGPKAVYELEHMGLPFSRFENGRIYQRPFGGQSKDFGKGGQAARTCAAADRTGHALLHTLYQNNG

SEQ ID NO: 97567 - protein, 237 aa, Unknown
  Bacterial polypetide isolated from the Sargasso Sea
MVQLNLPANSKVEKGQYYKDKTGSKNIRKVNVYRWDPSTNENPRLDTYEVDMDNCSSKVLDVLNKIKNEIDPSIAYRRSCAHGVCGSCAMNMNGKNGLACTKSHSELSGDIDIYPLPHLKVLKDLIGDLSTLYKQYESVEPWLKTSKINDKENIQTKQDRAKLDGLYECIMCACCSTSCPSYWWNGEKYLGPAVLLQAYRWIIDSRDEDRKERLKKVADELKLYRCHTILKCTNACP

SEQ ID NO: 97568 - protein, 198 aa, Unknown
  Bacterial polypetide isolated from the Sargasso Sea
MVQFNLPKNSKILKGQYFKNKTGSSNIKLVHVYRWNPEKKENPREDTFEVDLNTCGNKVLDILNKIKNEIDSTLTFRKSCAHGICGSCAMNVDGVNTLSCMKSHKDIKGDLRIFPLPHLKVIKDLVADLSILYKQYESIEPWLKTSKSRSEKNEINQSKKNREKLDGLYECIMCACCSTSCPSYWWNGESYLGPAVLL

SEQ ID NO: 97569 - protein, 128 aa, Unknown
  Bacterial polypetide isolated from the Sargasso Sea
QLASIKPWLQREKTNEEKNSGDEKKQSPKDREKLDGKWECVLCFCCTTSCPSYWWNGDEYLGPAVLLQAARWVSDSRDSERKERLKAINDSLKLYRCHSIMNCTRSCPKGLNPAKEIAGLKKAIVTEL

SEQ ID NO: 97570 - protein, 243 aa, Unknown
  Bacterial polypetide isolated from the Sargasso Sea
MNKVINISKKNNIKEFDALIVGGGGSGMRTSLELAKSGLNTAVISKVFPTRSHTVSAQGGITCAIQSEDPNDDWRWHMYDTVKGSDYIGDQDAIEYMCSEGPKAVYELEHMGLPFSRFENGRIYQRPFGGQSKDFGKGGQAARTCAAADRTGHALLHTLYQNNVKEGTNFLNEWFAVDLVKNSKNEITGVIAFSIESGEVCYLKAQATVLATGGAGRIYASTTNALINTGDGLGMTLRAGFPA

SEQ ID NO: 97571 - protein, 130 aa, Unknown
  Bacterial polypetide isolated from the Sargasso Sea
QLASIKPWIERDKDEYTKQDSTIAENKQTTKDREKLDGKWECVLCFCCTTACPSYWWNEDEYLGPAVLMQAARWVDDSRDSKRKERLKSINDSMKLFRCHSIMNCTRSCPKGLNPAKAIADLKKAIVTEL

SEQ ID NO: 97572 - protein, 83 aa, Unknown
  Bacterial polypetide isolated from the Sargasso Sea
MEDGTLHRFKCKNTVLATGGYGRAWYSATSAHTCTGDGNAMAARAGLPMQDLEFVQFHPTGIYGAGCLITEGAHAVVNGGWWW

SEQ ID NO: 97573 - protein, 70 aa, Unknown
  Bacterial polypetide isolated from the Sargasso Sea
YWVPAVLLQAYRWIVDSRDEEREARLKKVADELKLYRCHTILNCTSACPKGLNPAKAIAEIKKMLATASL

SEQ ID NO: 97574 - protein, 136 aa, Unknown
  Bacterial polypetide isolated from the Sargasso Sea
LSKAYEQLASIKPWLERSKSNDKNLEDQNEEKKQSPQDREKLDGKWECVLCFCCTTSCPSYWWNGDEYLGPAVLLQAARWVEDSRDVERKKRLSAINDSLKLYRCHSIMNCTRSCPKGLNPAKEIAGLKKAIVTEL

SEQ ID NO: 97575 - protein, 152 aa, Unknown
  Bacterial polypetide isolated from the Sargasso Sea
MANIRKMEFDGLIVGGGGSGMRASLQIAQSGLKTAVITKVFPTRSHTVSAQGGITCAIASDDPNDDWRWHMYDTVKGSDYIGDQDAIEYMCSEGPQAVFELEHMGLPFSRTENGRIYQRPFGGQSKDFGKGGQAARTCAAADRTGHALLHTL

SEQ ID NO: 97576 - protein, 55 aa, Unknown
  Bacterial polypetide isolated from the Sargasso Sea
DSRDEERKARLKKVSDELKLYRCHTILNCTNACPKGLNPAKAIAEIKKMLASKNL

SEQ ID NO: 97577 - protein, 220 aa, Unknown
  Bacterial polypetide isolated from the Sargasso Sea
MVKFNLPPNSKILKGQYFKDKTGSSNLKIVHVYRWSPDENKNPREDTFEVDLNTCGNKVLDVLNKIKNEIDSSLAFRKSCAHGVCGSCAMNVDGVNTLSCMKSHKDIKGDIRIFPLPHLKVIKDLVADLSTLYKQYESIEPWLKTKGSKSQNNEINQSKENREKLDGLYECIMCACCSTACPSYWWNGESYLGPAVLLQAYRWISDSRDEEKKERLKMVA

SEQ ID NO: 97578 - protein, 144 aa, Unknown
  Bacterial polypetide isolated from the Sargasso Sea
AVLRDKMQRAMQEEAAVFRTQETLEEGCRRISEIWKELPDVKVTDRSMIWNSDLVETLELQNLMACAITTVYGAEARKESRGAHAREDYADGPFSGRDDENWRKHTLAWVNEAGDVKLDYRPVHTDLIADGIDIKKIAPKARVY

SEQ ID NO: 97579 - protein, 231 aa, Unknown
  Bacterial polypetide isolated from the Sargasso Sea
MVQISLPENSKIEKGNYYKDKTGSKNLRKVNIYRWDPSTGKNPRIDTYEVDMDNCPSKVLDILNKIKNEIDPSIAYRRSCAHGVCGSCAMNMDGKNGLACTKPHSEIKGDINIYPLPHLKVLKDLIGDLSTLYKQYESVEPWLKTSKKNDEKENLQSKKDRAKLDGLYECIMCACCSTSCPSYWWNGEKYLGPAVLLQAYRWIIDSRDEDRKERLKKVADELKLYRCHTIM

SEQ ID NO: 97580 - protein, 181 aa, Unknown
  Bacterial polypetide isolated from the Sargasso Sea
MVQINLPENSKIKKGKYFKDKTGSKNLRKVNIYRWDPSTGDNPRLDTYEVDMDNCSSKVLDVLNKIKNEIDSTIAYRRSCAHGVCGSCAMNMGGKNGLACTKPHSEIDGDLDIYPLPHLKVKKDLIGDLDGLYRQYKSIEPWLKSNSKSEKTEIFQSKEDRKKLDGAYECIMCACCSTSCP

SEQ ID NO: 97581 - protein, 175 aa, Unknown
  Bacterial polypetide isolated from the Sargasso Sea
MNIDGVNTLACLKSMSDVKKEIKIYPLPHMRVVKDLVPDLSKAYEQLASIKPWLERSKSDTKTEINTKEEKKQSPQDREKLDGKWECVLCFCCTTSCPSYWWNGDDYLGPAVLLQAARWVNDSRDTERKERLTAINDSLKLYRCHSIMNCTRSCPKGLNPAKEIAGLKKAIVTEL

SEQ ID NO: 97582 - protein, 221 aa, Unknown
  Bacterial polypetide isolated from the Sargasso Sea
MVQINLPQNSKIIKGKYYKDQTGSKNIRKVNVYRWNPSTGENPRIDTYEVDMDNCPSKVLDILNKIKNEIDPSLAYRRSCSHGVCGSCAMNMDGKNGLACTKSHSEIKGDINIYPLPHLKVLKDLIGDLSTLYKQYQSIEPWLKSSKKDDGKENIQSIEDREKLDGLYECIMCACCSTSCPSYWWNGEKYLGPAVLLQAYRWIVDSRDEEKKERLKKVADE

SEQ ID NO: 97583 - protein, 40 aa, Unknown
  Bacterial polypetide isolated from the Sargasso Sea
VADELKLYRCHTILNCTNACPKGLNPAKAIAEIKKMLATS

SEQ ID NO: 97584 - protein, 159 aa, Unknown
  Bacterial polypetide isolated from the Sargasso Sea
MNKVINISNKSNIKEFDALIVGGGGSGMRTSLELAKSGLNTAVISKVFPTRSHTVSAQGGITCAIQSADPNDDWRWHMYDTVKGSDYIGDQDAIEYMCAEGPKAVYELEHMGLPFSRFENGRIYQRPFGGQSKDFGKGGQAARTCAAADRTGHALLHTL

SEQ ID NO: 97585 - protein, 222 aa, Unknown
  Bacterial polypetide isolated from the Sargasso Sea
MSSLRTISFDAVIIGGGGSGMRAALQLSQSGHKTAVISKVFPTRSHTVSAQGGITCAIASADPNDDWRWHMYDTVKGSDYIGDQDAIEYMCSEGPQTVFELEHMGLPFSRTDNGRIYQRPFGGQSKDFGKGGQAARTCAAADRTGHALLHALYQGNLKNNTEFLSEWYAVDLVRNQDGCVVGVIAIEIESGEIVFINSKSTVLATGGAGRIYASTTNALICT

SEQ ID NO: 97586 - protein, 232 aa, Unknown
  Bacterial polypetide isolated from the Sargasso Sea
MLQFNLPKNSKILKGQYFKDKTGSSNIKIVHIYRWNPEKNENPREDTFEVDLNTCGNKVLDILNKIKNEIDSSLTFRKSCAHGVCGSCAMNVDGQNTLSCMKSHKDIKGDLRIFPLPHLKVVKDLVADLSTLYKQYESIEPWLKIKKTKSKKNEINQSKKNREKLDGLYECIMCACCSTSCPSYWWNGESYLGPAVLLPAYRWISDSRDDEKKERLKMVADKLKLYRCHTIN

SEQ ID NO: 97587 - protein, 43 aa, Unknown
  Bacterial polypetide isolated from the Sargasso Sea
MQKVADELKLYRCHTILNCTSACPKGLNPAKAIAEIKKMLATA

SEQ ID NO: 97588 - protein, 153 aa, Unknown
  Bacterial polypetide isolated from the Sargasso Sea
LDRIDNLRHAKGEVRTAELRLEMQRIMQNNCAVFRTGEVLDEGVQLMQSAIDKRDNLQVTDTTMVWNSDLVETLELQNLLDQSMATIASAANRTESRGAHAREDYPDRDDDEWMKHTLAWVDHGGNVKIDYREVVMRTLSNDVQVFPPKARVY

SEQ ID NO: 97589 - protein, 50 aa, Unknown
  Bacterial polypetide isolated from the Sargasso Sea
EREARLKKVADELKLYRCHIILNCTSACPKGLNPAKAIAEIKKMLATTSL

SEQ ID NO: 97590 - protein, 85 aa, Unknown
  Bacterial polypetide isolated from the Sargasso Sea
MLLDFVPSYWWNGDKYLGPALLLQAYRWIVDSRDEEREARLKKVADELKLYRCHTILNCTSACPKGLNPAKAIAEIKKMLATASL

SEQ ID NO: 97591 - protein, 95 aa, Unknown
  Bacterial polypetide isolated from the Sargasso Sea
KTTKINDKENIQTKEDRAKLDGLYECIMCACCSTSCPSYWWNGEKYLGPAVLLQAYRWIIDSRDEDRKERLKKVADELKLYRCHTILNCTNACPK

SEQ ID NO: 97592 - protein, 159 aa, Unknown
  Bacterial polypetide isolated from the Sargasso Sea
MNTVNSSNISTLEFDVLVIGGGGSGMRTSLELAKSGLKTAVVSKVFPTRSHTVSAQGGITCAIASADPQDDWRWHMYDTVKGSDYIGDQDAIEYMCSEGPKAVFELEHMGLPFSRTENGRIYQRPFGGQSKDFGKGGQAARTCAAADRTGHALLHTLYQ

SEQ ID NO: 97593 - protein, 104 aa, Unknown
  Bacterial polypetide isolated from the Sargasso Sea
KQSPKDREKLDGKWECVLCFCCTTSCPSYWWNGDEYLGPAVLLQAARWVSDSRDSERKERLKAINDSLKLYRCHSIMNCTRSCPKGLNPAKEIAGLKKAIVTEL

SEQ ID NO: 97594 - protein, 128 aa, Unknown
  Bacterial polypetide isolated from the Sargasso Sea
QLASIKPWLQREKTNEEKNAGDEKKQSPKDREKLDGKWECVLCFCCTTSCPSYWWNGDEYLGPAVLLQAARWVSDSRDSERKERLKAINDSLKLYRCHSIMNCTRSCPKGLNPAKEIAGLKKAIVTEL

SEQ ID NO: 97595 - protein, 183 aa, Unknown
  Bacterial polypetide isolated from the Sargasso Sea
MAQISLPKNSEVNKGKYFKDKTGSKNIRKVNVYRWDPSTEENPRIDTYEVDMDNCPSKVLDILNKIKNEIDPTLAYRRSCAHGVCGSCAMNMGGKNGLACTKPHAEIDGDIDIYPLPHLKVKRDLIGDLDGLYKQYKSIEPWLKSNSTKETTEIFQSKEDRAKLDGAYECIMCACCSTSCPSY

SEQ ID NO: 97596 - protein, 220 aa, Unknown
  Bacterial polypetide isolated from the Sargasso Sea
MNKVINIATKNNIKEFDALIVGGGGSGMRTSLELAKSGLNTAVISKVFPTRSHTVSAQGGITCAIQSADPNDDWRWHMYDTVKGSDYIGDQDAIEYMCSEGPKSVYELEHMGLPFSRFENGRIYQRPFGGQSKDFGKGGQAARTCAAADRTGHALLHTLYQNNVKEGTNFLNEWFAVDLVKNSKNEITGVIAFSIESGEVCYLKAQATVLATGGAGRIYA

SEQ ID NO: 97597 - protein, 241 aa, Unknown
  Bacterial polypetide isolated from the Sargasso Sea
MNILNSSNITTLEFDVLVIGGGGSGMRTSLELAKSGLKTAVVSKVFPTRSHTVSAQGGITCAIASADPQDDWRWHMYDTVKGSDYIGDQDAIEYMCSEGPKAVFELEHMGLPFSRTENGRIYQRPFGGQSKDFGKGGQAARTCAAADRTGHALLHTLYQNNVKEGSNFLNEWFAVDLVLNQLKEVTGVIAFSIESGEVAYLKSQATVLATGGAGRIYSSTTNALINTGDGLGMSLRAGIPA

SEQ ID NO: 97598 - protein, 119 aa, Unknown
  Bacterial polypetide isolated from the Sargasso Sea
LSLTITISDNLNEERKQSPKDREKLDGKWECVLCFCCTTSCPSYWWNGDEYLGPAVLLQAARWVEDSRDAERKKRLSAINDSLKLYRCHSIMNCTRSCPKGLNPAKEIAGLKKAIVTEL

SEQ ID NO: 97599 - protein, 73 aa, Unknown
  Bacterial polypetide isolated from the Sargasso Sea
VDSDKYLGPAVLLQSYRWLQDSRDESRRERLEELDDAFKVYRCHTIMNCTQTCPKGLNPAEAISGIKRMIASR

SEQ ID NO: 97600 - protein, 37 aa, Unknown
  Bacterial polypetide isolated from the Sargasso Sea
KLYRCHTILNCTSACPKGLNPAKAIAEIKKMLASANL

SEQ ID NO: 97601 - protein, 233 aa, Unknown
  Bacterial polypetide isolated from the Sargasso Sea
MVQFNLPSNSKIKKGQYYKDKTGSKNIRKVNVYRWDPSKNENPRIDTYEVDMDNCSSKVLDILNKIKNEIDPSIAYRRSCAHGVCGSCAMNMNGKNGLACTKSHSELDGDIDIYPLPHLKVLKDLIGDLSTLYKQYESVEPWLKTTKINDKENIQTKEDRAKLDGLYECIMCACCSTSCPSYWWNGEKYLGPAVLLQAYRWIIDSRDEDRKERLKKVADELKLYRCHTILNVQ

SEQ ID NO: 97602 - protein, 38 aa, Unknown
  Bacterial polypetide isolated from the Sargasso Sea
DELKLYRCHTILNCTNACPKGLNPAKAIAEIKKMLATS

SEQ ID NO: 97603 - protein, 179 aa, Unknown
  Bacterial polypetide isolated from the Sargasso Sea
CGSCAMNIDGVNTLACLKNMSDVKNEIKIYPLPHMRVVKDLVPDLSKAYEQLASIKPWLQRKKINEEEKNSRDEKKQSPKDREKLDGKWECVLCFCCTTSCPSYWWNGDEYLGPAVLLQAARWVSDSRDSERKERLKAINDSLKLYRCHSIMNCTRSCPKGLNPAKEIAGLKKAIVTEL

SEQ ID NO: 97604 - protein, 147 aa, Unknown
  Bacterial polypetide isolated from the Sargasso Sea
INIYPLPHLKVQKDLIGDLSILYKQYESVEPWLKVSKKDEGKENLQSIEDRSKLDGLYECIMCACCSTSCPSYWWNGDKYLGPAVLLQAYRWIIDSRDEDRKERLKKVADELKLYRCHTIMNCTNACPKGLNPAKAIASIKKMLATS

SEQ ID NO: 97605 - protein, 213 aa, Unknown
  Bacterial polypetide isolated from the Sargasso Sea
IDQEKCGPMVLDALMKIKNEIDPTLTFRRSCREGVCGSCAMNIDGVNTLACLKSMSDVKNEIKIYPLPHMRVVKDLVPDLSKAYEQLASIKPWLQRKKTNEEKNSGDEKKQSPKDREKLDGKWECVLCFCCTTSCPSYWWNGDEYLGPAVLLQAARWVSDSRDSERKERLKAINDSLKLYRCHSIMNCTRSCPKGLNPAKEIAGLKKAIVTEL

SEQ ID NO: 97606 - protein, 235 aa, Unknown
  Bacterial polypetide isolated from the Sargasso Sea
MVQINLPKNSKVQKGKFYKDKTGSKNIRKVNIYRWDPSSGENPRIDTYEVDMDNCPSKVLDLLNKIKNEIDPSIAYRRSCAHGVCGSCAMNMDGKNGLACTKPHKDIKGDINIYPLPHLKVQKDLIGDLSTLYKQYESVEPWLKVSKKDGHKENLQSIEDRSKLDGLYECIMCACCSTSCPSYWWNGDKYLGPAVLLQAYRWIIDSRDEDRKERLKKVADELKLYRCHTIMNCTN

SEQ ID NO: 97607 - protein, 199 aa, Unknown
  Bacterial polypetide isolated from the Sargasso Sea
MVQINLPKNSKVQKGKYYQDKTGSKNIRKVNIYRWDPSSGENPRIDTYEVDMDNCPSKVLDLLNKIKNEIDPSLAYRRSCAHGVCGSCAMNMDGKNGLACTKPHKEIKGDINIYPLPHLKVQKDLIGDLSTLYKQYESVEPWLKVSKKEKDQENLQSIEDRSKLDGLYECIMCACCSTSCPSYWWNGDKYLGPAVLLLA

SEQ ID NO: 97608 - protein, 139 aa, Unknown
  Bacterial polypetide isolated from the Sargasso Sea
VKKDLIGDLDGLYKQYKSIEPWLKSSSKSESAELIQSKEDRAKLDGAYECIMCACCSTSCPSYWWNGDKYLGPAVLLQAYRWIIDSRDEERQARLKKVADELKLYRCHTILNCTSACPKGLNPAKAIAEIKKMLATANI

SEQ ID NO: 97609 - protein, 220 aa, Unknown
  Bacterial polypetide isolated from the Sargasso Sea
GENPRIDTYEVDMDNCPSKVLDILNKIKNEIDPTLAYRRSCAHGVCGSCAMNMGGKNGLACTKPHEEIDGDIDIYPLPHLKVKKDLIGDLDGLYKQYQSIEPWLKNNSKSETNEIIQSKEDRAKLDGAYECIMCACCSTSCPSYWWNGDKYLGPAVLLQAYRWIVDSRDEERNSRLKKVADELKLYRCHTIMNCTSACPKGLNPAKAIAEIKKMLATANI

SEQ ID NO: 97610 - protein, 242 aa, Unknown
  Bacterial polypetide isolated from the Sargasso Sea
YYKLEAENKSIKKFKIYRWSPEDDKNPRMDTYEIDIDDCGPMVLDAVMKIKNEVDTSLTFRRSCREGICGSCAMNIDGTNTLACTKAISDVKGDIKIYPLPHMPVIKDLVTNLKNLYKQLKSIKPWLIKQKQEATDTENIQSRNDREKLDGLYECILCACCSTSCPSYWWNSDKYLGPAVLLQSYRWLQDSRDEERKERLKELDDTFKVYRCHTIMNCTQACPKGLNPAKAIAGIKQMIAQQ

SEQ ID NO: 97611 - protein, 233 aa, Unknown
  Bacterial polypetide isolated from the Sargasso Sea
KNIRKVNIYRWDPSDTENPRIDTYEVDMDNCPSKVLDILNKIKNEIDPSIAYRRSCAHGVCGSCAMNMDGKNGLACTKPHKEIKGDINIYPLPHLKVQKDLIGDLSTLYRQYESVEPWLKVLKKDGNKENFQSIEDRSKLDGLYECIMCACCSTACPSYWWNGDKYLGPAVLLQAYRWIIDSRDEDRKERLKKVADELKLYRCHTIMNCTNACPKGLNPAKAIASIKKMLATG

SEQ ID NO: 97612 - protein, 257 aa, Unknown
  Bacterial polypetide isolated from the Sargasso Sea
MVQINLPQNSKIEKGEYYKDKTGSKNIRKVNIYRWDPSTGKNPRIDTYEVDMDNCPSKVLDLLNKIKNEIDPSIAYRRSCAHGVCGSCAMNMDGKNGLACTKPHSEIKGDINIYPLPHLRVQKDLIGDLNTLYKQYHSVEPWLKNSNKNDSKENLQSIEDRSKLDGLYECIMCACCSTSCPSYWWNGDKYLGPAVLLQAYRWIIDSRDEDRKQRLQKVADELKLYRCHTIMNCTNACPKGLNPAKAIAEIKKMLVSS

SEQ ID NO: 97613 - protein, 257 aa, Unknown
  Bacterial polypetide isolated from the Sargasso Sea
MVQISLPENSKVEKGEYYKDKTGSKNIRKVNIYRWDPSSGKNPRIDTYEVDMDNCASKVLDLLNKIKNEIDSSIAYRRSCSHGVCGSCAMNMDGKNGLACTKPHAEIKGDINIYPLPHLRVEKDLIGDLSTLYKQYHSIEPWLKNSKKDDEKENLQSIEDRSKLDGLYECIMCACCSTSCPSYWWNGDKYLGPAVLLQAYRWIIDSRDEERKERLKKVADELKLYRCHTIMNCTNACPKGLNPAKAIASIKKMLATS

SEQ ID NO: 97614 - protein, 96 aa, Unknown
  Bacterial polypetide isolated from the Sargasso Sea
SKLDGLYECIMCACCSTSCPSYWWNGDKYLGPAVLLQAYRWIIDSRDEDRKERLKKVADELKLYRCHTIMNCTNACPKGLNPAKAIASIKKMLATS

SEQ ID NO: 97615 - protein, 167 aa, Unknown
  Bacterial polypetide isolated from the Sargasso Sea
DMDGKNGLACTKSHSEITGDINIYPLPHLKVLKDLIGDLSILYKQYESVEPWLKTSKVNDRKENIQSKEDRAKLDGLYECIMCACCSTACPSYWWNGDKYLGPAVLLQAYRWIIDSRDEDRKERLKKVADELKLYRCHTIMNCTNACPKGLNPAKAIASIKKMLATV

SEQ ID NO: 97616 - protein, 202 aa, Unknown
  Bacterial polypetide isolated from the Sargasso Sea
PKVLDILFKIKNDIDSSLTFRRSCAHGVCGSCAMNVDGVNTLSCIKSHSDINGELNIYPLPHLKVIKDLIGDLSTLYKQYESIQPWLKTSKTNSEKQEILQSQKDRSKLDGYYECILCACCSTACPSYWWNGEKYLGPAVLLQAYRWISDSRDEEKKERLKKVADELKLYRCHTIMNCTNSCPKGLNPAKAIGSIKKMLASS

SEQ ID NO: 97617 - protein, 101 aa, Unknown
  Bacterial polypetide isolated from the Sargasso Sea
IYKLVSKLDGLYECIMCACCSTSCPSYWWNGEKYLGPAVLLQAYRWIIDSRDEDRKKRLKKVADELKLYRCHTIMNCTSACPKGLNPAKAIASIKKMLATS

SEQ ID NO: 97618 - protein, 255 aa, Unknown
  Bacterial polypetide isolated from the Sargasso Sea
MAEFILPKNSKIVKGKYYKDKTNSRNIKKVNVYRWDPEDGRNPRIDTFEVDMDNCGPKVLDILFKIKNEIDSSLTFRRSCAHGVCGSCAMNVDGVNTLSCIKAHDDIKGELNIYPLPHLRVIKDLIGDLSNLYKQYESIQPWLKNSKTDTEKREILQSQDDRSKLDGYYECILCACCSTSCPSYWWNGEKYLGPAVLLQAYRWISDSRDEDKKERLKKVADELKLYRCHTIMNCTNSCPQGLNPAKAIGSIKKML

SEQ ID NO: 97619 - protein, 234 aa, Unknown
  Bacterial polypetide isolated from the Sargasso Sea
SLNIRKVNVYRWDPSKNENPRIDTYEVDMDNCPSKVLDILNKIKNELDPSLAYRRSCAHGVCGSCAMNMNGKNGLACTKSHSELDGDINIYPLPHLKVLKDLIGDLSTLYKQYESVEPWLKTSKKNTEGENLQSIEDRAKLDGLYECIMCACCSTSCPSYWWNGDKYLGPAVLLQAYRWIIDSRDEERKERLKKVADELKLYRCHTILNCTNACPKDLNPAKAIAEIKKMLATT

SEQ ID NO: 97620 - protein, 258 aa, Unknown
  Bacterial polypetide isolated from the Sargasso Sea
MVQFNLPDNSKLTDGDYFKSEKNLKNIKKFKIYRWSPDDEKNPRMDTYEVDLDDCGPMVLDAVMKIKSDIDTSLTFRRSCREGICGSCAMNIDGTNTLACTKAISDVKGDVKIYPLPHMPVIKDLVTNLKTLYSQLKSIKPWLMNNKQKANDTENIQSKDDREKLDGLYECILCACCSTSCPSYWWNSDKYLGPAVLLQSYRWLQDSRDEERKERLKELDDTFKVYRCHTIMNCTQACPKGLNPAKAIAGIKRMIAQQ

SEQ ID NO: 97621 - protein, 221 aa, Unknown
  Bacterial polypetide isolated from the Sargasso Sea
DWRNPRIDTYEVDMDNCPSKVLDILNKIKNEIDPTLAYRRSCAHGVCGSCAMNMGGKNGLACTKPHSEIDGNIDIYPLPHLKVKKDLIGDLDGLYRQYQSIEPWLKSNAKSDKKEIIQSKKDREKLDGAYECIMCACCSTSCPSYWWNGDKYLGPAVLLQAYRWIIDSRDDEREARLKKVADELKLYRCHTILNCTSACPKGLNPAKAIAEIKKMLVKASL

SEQ ID NO: 97622 - protein, 282 aa, Unknown
  Bacterial polypetide isolated from the Sargasso Sea
MTNNLHSINFNNIKTKEFDALIIGGGGSGMRASLELAKSGLKTAVVSKVFPTRSHTVSAQGGITCAIASADPNDDWRWHMYDTVKGADFIGDQDAIEYMCSEGPKAVFELEHMGLPFSRFDNGRIYQRPFGGQSKDFGKGGQAARTCAAADRTGHALLHTLYQNNVKEGSNFLNEWFAVDLVKNNKDEVTGVIAFSIESGEVAYLKAQATVLATGGAGRIYASTTNALINTGDGLAMALRAGFPAQDMEMWQFHPTGIFGAGSLVTEGCRGEGGYLVNGEGE

SEQ ID NO: 97623 - protein, 112 aa, Unknown
  Bacterial polypetide isolated from the Sargasso Sea
QTGQEKIELKQSQKDREKLDGYYECILCACCSTSCPSYWWNGDKYLGPAVLLQAYRWINDSRDGDKKERLKKVADELKLYRCHTIMNCTNSCPKGLNPAKAIGSIKKMLATS

SEQ ID NO: 97624 - protein, 147 aa, Unknown
  Bacterial polypetide isolated from the Sargasso Sea
HIFPLPHLKVVKDLVADLSILYKQYESIEPWLKTKEFKSEKSEINQSKENREKLDGLYECIMCACCSTSCPSYWWNGESYLGPAVLLQAYRWISDSRDEEKNERLKKVADKLKLYRCHTIMNCTSSCPKGLNPAKAIGSIKKMLATS

SEQ ID NO: 97625 - protein, 242 aa, Unknown
  Bacterial polypetide isolated from the Sargasso Sea
MVQINLPQNSKVQKGKYYEDKTGSKNIRKVNIYRWDPSTGDKPRIDTYEVDMDNCPSKVLDLLNKIKNEIDPSIAYRRSCAHGVCGSCAMNMDGKNGLACTKPHKEIKGDINIYPLPHLKVQKDLIGDLSTLYKQYASVEPWLKNSKKDDAKENFQSVEDRSKLDGLYECIMCACCSTACPSYWWNGDKYLGPAVLLQAYRWIIDSRDEERKERLKKVADELKLYRCHTIMNCTNACPKGLN

SEQ ID NO: 97626 - protein, 179 aa, Unknown
  Bacterial polypetide isolated from the Sargasso Sea
RRSCREGICGSCSMNINGTNTLACLKPLQNENEVNIFPLPHMKVIKDLVPDMNEFYEQYKSIKPWLENTKKSGKENRQSPDERKKLDGLYECVLCACCSTSCPSYWWNSDKFLGPAILLQAYRFIVDSRDKNKKERIDFLKDKFKLYRCHTIMNCTKTCPKNLNPAKAIAEIKKLQINS

SEQ ID NO: 97627 - protein, 230 aa, Unknown
  Bacterial polypetide isolated from the Sargasso Sea
MVQFSLPKNSKILKGKYYKDETGSNYLKKVNIYRWSPSNNENPRVDTFEVDLNDCGPKVLDVLFKIKNEIDPTLTFRRSCAHGVCGSCAMNVDGVNTLSCIKSHSDIKGELNIYPLPHLKVIKDLVGDLTTLYKQYESVEPWLKSKVGEKTSTEIKQSQEDRAKLDGYYECILCACCSTSCPSYWWNGDKYLGPAVLLQAYRWITDSRDEERKERLKKVADELKLYRCHT

SEQ ID NO: 97628 - protein, 244 aa, Unknown
  Bacterial polypetide isolated from the Sargasso Sea
GKYYKDKTNSNNIKKVTIYRWNPDDGQNPRIDTFEVDMGNCGPKVLDILFKIKNEMDSSLTFRRSCAHGVCGSCAMNVDGINTLSCIKSHNDIKGELNIYPLPHLKVIKDLIGDLSNLYKQYESIQPWLKTSKTDTEKKEILQSQKDRSKLDGYYECILCACCSTSCPSYWWNGDKYLGPAVLLQAYRWISDSRDEEKKERLKKVADELKLYRCHTIMNCTNSCPKGLNPAKAIGSIKKMLATS

SEQ ID NO: 97629 - protein, 166 aa, Unknown
  Bacterial polypetide isolated from the Sargasso Sea
MACLKPINEIKGDIKIYPLPHMKVIKDLVPDLSHAYKQLASVTPWLKRNINNTKKTKNIEENKQLPKDRAKLDGQWECVLCFCCTTSCPSYWWNSDEYLGPAVLLQAARWANDSRDEERKDRLTKINDSLKLYRCHSIMNCTSSCPKGLNPAKAIADLKKAIVTEL

SEQ ID NO: 97630 - protein, 262 aa, Unknown
  Bacterial polypetide isolated from the Sargasso Sea
LPKNSIPIKGKSYSNVDLIDEQSQQNHDIRIVNVYRWSGEEDTPPQIDRFEIDVAKAGTMVLDILNKIKAEVDPSLTFRKSCREGVCGSCAMNIDGVNTLACQKHIEECSDEINIYPLPHMRVLKDLVVDLKKAFEQFKSIKPWLNKKSPNNERENIQSVEDRDKLDGKWECVMCFSCSTSCPSYWWNEDEYLGPAVLLQANRWIKDSRDEEKKERLNELDDSLKLYRCHSIMNCTNSCPKGLNPAKAIAEIKHEISKMDNK

SEQ ID NO: 97631 - protein, 174 aa, Unknown
  Bacterial polypetide isolated from the Sargasso Sea
VCGSCAMNMDGKNGLACTKPHKEIKGDINIYPLPHLKVQKDLIGDLSTLYKQYESVEPWLKNSKKNDDKENLQSIEDRSKLDGLYECIMCACCSTSCPSYWWNGDKYLGPAVLLQAYRWIIDSRDEERKERLKKVADELKLYRCHTIMNCTNACPKGLNPAKAIASIKKMLATS

SEQ ID NO: 97632 - protein, 102 aa, Unknown
  Bacterial polypetide isolated from the Sargasso Sea
QSQKDREKLDGYYECILCACCSTSCPSYWWNGDKYLGPAVLLQAYRWINDSRDGDKKERLKKVADELKLYRCHTIMNCTNSCPKGLNPAKAIGSIKKMLATS

SEQ ID NO: 97633 - protein, 169 aa, Unknown
  Bacterial polypetide isolated from the Sargasso Sea
MNVDGVNTLSCIKSHKDIKGEINIYPLPHLKVVKDLIGDLSNLYKQYESIQPWLKTSKTDTEKQEILQSQKDRSKLDGYYECILCACCSTSCPSYWWNGEKYLGPAVLLQAYRWISDSRDEEKKERLKKVADELKLYRCHTIMNCTNSCPKGLNPAKAIGSIKKMLASS

SEQ ID NO: 97634 - protein, 255 aa, Unknown
  Bacterial polypetide isolated from the Sargasso Sea
LPKNSKIVEGNYFKNNSNDNKIKKLKVYRWNPDDKKNPRMDTYEIDLKTCGPMVLDALIKIKNEIDTTLTFRRSCREGVCGSCAMNIDGINTLACLKPIKEIKNDIKIYPLPHMKVVKDLVPDLNEAYKQLKSIKPWIRKNDENLKTKVKQKQSPDERSKLDGKWECVLCFCCTTACPSYWWNGEKYLGPAVLLQASRWINDSRDEKRKERLNEINDSLKLYRCHSIMNCTRSCPKGLNPAKAIADIKKSIVTEK

SEQ ID NO: 97635 - protein, 246 aa, Unknown
  Bacterial polypetide isolated from the Sargasso Sea
MVQISLPENSKTKKGKYFKDKTGSKNLRKVNVYRWDPSSGEGPRIDTYEVDMENCPSKVLDILNKIKNEIDPTLAYRRSCAHGVCGSCAMNMGGKNGLACTTPHENIDGDIDIYPLPHLKVKKDLIGDLDGLYKQYKSIEPWLKSSSKSESAELIQSKEDRAKLDGAYECIMCACCSTSCPSYWWNGDKYLGPAVLLQAYRWIIDSRDEERQARLKKVADELKLYRCHTILNCTSACPKGLNPAKA

SEQ ID NO: 97636 - protein, 156 aa, Unknown
  Bacterial polypetide isolated from the Sargasso Sea
KEIKGDINIYPLPHMPVIKDLVPNLKQLYEQYQSIEPWIQSTKKSNGTEGLQTIQDRSKLDGLYECIMCACCATSCPSYWWNGDKYLGPAVLLQAYRWIIDSRDEERQKRLKKVADELKLFRCHTIMNCTNACPKGLNPAKAIGSIKKMLVTEKSS

SEQ ID NO: 97637 - protein, 208 aa, Unknown
  Bacterial polypetide isolated from the Sargasso Sea
KLLVYRWNPDDEDNPRLDTYEIDQKECGPMVLDALIKIKNEIDSTLTFRRSCREGVCGSCAMNIDGVNTLACLKPMKEIKKEVKVYPLPHMRVIKDLVPDLKEAYEQLKSIKPWLIQNKKTQSEANKFTNNQKPKEREKLDGKWECILCFCCTTSCPSYWWNSEKYLGPAVLLQASRWIDDSRDDNKKERLKEINDSMKLYRSHSIMN

SEQ ID NO: 97638 - protein, 105 aa, Unknown
  Bacterial polypetide isolated from the Sargasso Sea
EILQSQKDRSKLDGYYECILCACCSTSCPSYWWNGDKYLGPAVLLQAYRWISDSRDDEKKERLKKVADELKLYRCHTIMNCTNSCPKGLNPAKAIGSIKKMLATS

SEQ ID NO: 97639 - protein, 202 aa, Unknown
  Bacterial polypetide isolated from the Sargasso Sea
MAEFKLPKNSQIVEGDTHPEPTSSGEKKVFKIYRWSPDDDKNPRVDTFTIDKDECGPMVLDALIKIKNEVDGSLTFRRSCREGICGSCSMNIDGTNTLACLKSIEDIKGDVVVFPLPHMSVVKDLVPDLTKAYAQLSSIEPWLKSDTPPTEGERRQSKEERAVLDGAWECVLCFSCSTSCPSYWWNGDQYLGPAVLLQAYRW

SEQ ID NO: 97640 - protein, 258 aa, Unknown
  Bacterial polypetide isolated from the Sargasso Sea
MVQFNLPQNSKIEVGKHYQDKTNSKNIKKVNIYRWDPSSGQNPRIDTFEVDMDNCGPKVLDILFKIKNEIDPSLTFRRSCAHGVCGSCAMNIDGINTLACIKSHTDINGDLNVYPLPHLKVVKDLIGDLTTLYKQYESIKPWLETEQTGEEKAELQQSQKDREKLDGYYECILCACCSTSCPSYWWNGDKYLGPAVLLQAYRWIQDSRDGDKKERLKKVADELKLYRCHTIMNCTNSCPKGLNPAKAIGSIKKMLATS

SEQ ID NO: 97641 - protein, 257 aa, Unknown
  Bacterial polypetide isolated from the Sargasso Sea
MVQINLPQNSKVQKGKHYKDKTGSKNLRKVNIYRWDPSSGENPRIDSYEVDMDNCPSKVLDILNKIKNEIDPSIAYRRSCAHGVCGSCAMNMDGKNGLACTKPHKEIKGDINIYPLPHLKVQKDLIGDLSTLYKQYQSVEPWLKNSKKDDDKENIQTIEERSKLDGLYECIMCACCSTACPSYWWNGDKYLGPAVLLQAYRWIIDSRDEDRKERLKKVADELKLYRCHTIMNCTNACPKGLNPAKAIASIKKMLATS

SEQ ID NO: 97642 - protein, 250 aa, Unknown
  Bacterial polypetide isolated from the Sargasso Sea
GITCAIASADPNDDWRWHMYDTVKGADFIGDQDAIEYLCSEGPKAVFELEHMGLPFSRFENGRIYQRPFGGQSKDFGKGGQASRTCAAADRTGHALLHTLYQNNVKEGANFLNEWFAVDLVKNSKDEVTGVIAFSIENGEIAYLKAQATVLATGGAGRIYASTTNALINTGDGLAMTLRAGYPAQDMEMWQFHPTGIYGAGSLVTEGCRGEGGYLINKDGERFMERYAPNVKDLAGRDVVARSMVLEILE

SEQ ID NO: 97643 - protein, 258 aa, Unknown
  Bacterial polypetide isolated from the Sargasso Sea
MVQFSLPQNSKIIKGKFYKDKSGSNNLKKVNVYRWNPIGNENPRIDTFEVDLNECGPKVLDILFKIKNEIDPTLTFRRSCAHGVCGSCAMNVDGVNTLSCIKSHSDIKGELNIYPLPHLKVIKDLVGDLTTLYKQYESVEPWLKSKVGEKTSTEIKQSQEDRAKLDGYYECILCACCSTSCPSYWWNGDKYLGPAVLLQAYRWISDSRDDERKERLKKVADELKLYRCHTIMNCTNSCPKGLNPAKAIGSIKKMLATS

SEQ ID NO: 97644 - protein, 247 aa, Unknown
  Bacterial polypetide isolated from the Sargasso Sea
NLKGKYYKDQSGSKNLKKVNIYRWDPSSNENPRVDVFEVDVNECGPKVLDILFKIKNEIDPTLTFRRSCAHGVCGSCAMNVDGVNTLSCIKSHSDIKGELNIYPLPHLKVIKDLVGDLSTLYKQYESVEPWLKTKVGEKTNKEIIQTQEDRAKLDGYYECILCACCSTSCPSYWWNGDKYLGPAVLLQAYRWINDSRDEEKKARLKKVADELKLYRCHTIMNCTNSCPKGLNPAKAIGSIKKMLATS

SEQ ID NO: 97645 - protein, 239 aa, Unknown
  Bacterial polypetide isolated from the Sargasso Sea
MVQFNLPDNSKLTDGDYYKSEKSNGNTKKFKIYRWSPDDTKNPRMDTYEVDLDDCGPMVLDAVMKIKSEIDTSLTFRRSCREGICGSCAMNIDGTNTLACTKAISDVKGDIKIYPLPHMPVIKDLVTNLKTLYKQLKSIKPWLMNNKQNAIDTENIQSRNDREKLDGLYECILCACCSTSCPSYWWNSDKYLGPAVLLQSYRWLQDSRDEERKERLKELDDTFKVYRCHTIMNCTQACP

SEQ ID NO: 97646 - protein, 77 aa, Unknown
  Bacterial polypetide isolated from the Sargasso Sea
PSYWWNGDKYLGPAVLLQAYRWINDSRDEDKKERLKKVADELKLYRCHTIMNCTNSCPKGLNPAKAIASIKKMLATG

SEQ ID NO: 97647 - protein, 259 aa, Unknown
  Bacterial polypetide isolated from the Sargasso Sea
MVQISLPENSKTKKGKYFKDKTGSKNLRKVNVYRWDPSSGEGPRIDTYEVDMDNCPSKVLDILNKIKNEIDPTLAYRRSCAHGVCGSCAMNMGGKNGLACTTPHENIDGDIDIYPLPHLKVKKDLIGDLDGLYKQYKSIEPWLKSSSKSESAELIQSKEDRAKLDGAYECIMCACCSTSCPSYWWNGDKYLGPAVLLQAYRWIIDSRDEERQARLKKVADELKLYRCHTILNCTSACPKGLNPAKAIAEIKKMLATANI

SEQ ID NO: 97648 - protein, 146 aa, Unknown
  Bacterial polypetide isolated from the Sargasso Sea
YPLPHMPVVKDLVPDLNNFYAQHRSIEPWLKTVSPPPAKEWKQSHENRVKLDGLYECILCACCSTSCPSYWWNGDRYLGPAVLLQAYRWLIDSRDEATGERLDNLEDPFRLYRCHTIMNCTQACPKGLNPAKAIAGIKKMMVERSV

SEQ ID NO: 97649 - protein, 141 aa, Unknown
  Bacterial polypetide isolated from the Sargasso Sea
HLKVVKDLIGDLSNLYKQYELIHPWLKVDQTGEEKKELKQSQKDREKLDGYYECILCACCSTSCPSYWWNGEKYLGPAVLLQAYRWINDSRDNDKKERLKKVADELKLYRCHTIMNCTNSCPKGLNPAKAIGSIKKMLATS

SEQ ID NO: 97650 - protein, 174 aa, Unknown
  Bacterial polypetide isolated from the Sargasso Sea
VCGSCAMNMDGKNGLACTKPHKEIKGDINIYPLPHLKVQKDLIGDLSTLYKQYQSVEPWLKNSKKEEDKENLQSVEDRSKLDGLYECIMCACCSTACPSYWWNGDKYLGPAVLLQAYRWIIDSRDEDRKERLKKVADELKLYRCHTIMNCTNACPKGLNPAKAIASIKKMLATS

SEQ ID NO: 97651 - protein, 258 aa, Unknown
  Bacterial polypetide isolated from the Sargasso Sea
MFQFNLPDNSKLTDGDYYKLESENKRVKKFKIYRWSPEDDKNPRMDTYEVDIDDCGPMVLDAVMKIKNEVDTSLTFRRSCREGICGSCAMNIDGTNTLACTKAISDVRGDIKIYPLPHMPVIKDLVTNLKNLYKQLKSIKPWLIKQKQEATDTENIQSRNDREKLDGLYECILCACCSTSCPSYWWNSDKYLGPAVLLQSYRWLQDSRDEERKERLRELDDTFKVYRCHTIMNCTQACPKGLNPAKAIAGIKQMIAQQ

SEQ ID NO: 97652 - protein, 164 aa, Unknown
  Bacterial polypetide isolated from the Sargasso Sea
WKNGLACTKPHSEIKGDINIYPLPHLKVLKDLIGDLSTLYKQYESVEPWLKNTSKESDKENIQSKEDRAKLDGLYECIMCACCSTSCPSYWWNGDKYLGPAVLLQAYRWIIDSRDEDRKERLKKVADELKLYRCHTIMNCTNACPKGLNPAKAIASIKKMLATS

SEQ ID NO: 97653 - protein, 134 aa, Unknown
  Bacterial polypetide isolated from the Sargasso Sea
LMGDLTTLYKQYESIQPWLKVDQTGQEKTELKQSQKDREKLDGYYECILCACCSTSCPSYWWNGDKYLGPAVLLQAYRWINDSRDGDKKERLKKVADELKLYRCHTIMNCTNSCPKGLNPAKAIGSIKKMLATS

SEQ ID NO: 97654 - protein, 306 aa, Unknown
  Bacterial polypetide isolated from the Sargasso Sea
VLATGGYGRAYFSCTSAHTCTGDGNAMALRAGLAAEDPEFVQFHPTGIYGAGCLITEGCRGEGGILRNREGERFMERYAPSAKDLASRDVVSRAMTMEIRDGRGVGKDADHIHLHLDHLPPELLNERLPGISETASIFAGVDVTKEPIPVLPTVHYNMGGVPTNHYGEVIRQRKDASGAVVDHDEVVPGLFAAGEVACASVHGANRLGANSLLDIVVFGRACALRIADIAKPGDAIPPMPANAGAESIHQLDKLRYSQTKGGSIPTAEIRMNLQKTMQDHAAVYRTGESMAEGCVKVDAVVDTFRD

SEQ ID NO: 97655 - protein, 259 aa, Unknown; identical to SEQ ID NO: 97647
  Bacterial polypetide isolated from the Sargasso Sea

SEQ ID NO: 97656 - protein, 120 aa, Unknown
  Bacterial polypetide isolated from the Sargasso Sea
TETPEDEWKQSVDQRKKLDDLYECVMCACCSTSCPSYWWNSDKYLGPAALLHAYRWLVDSRDETRDERLNELEDSFKLYRCHTIMNCARTCPKNLNPAKAIAEIKKMMVEKNSRSKQKSF

SEQ ID NO: 97657 - protein, 126 aa, Unknown
  Bacterial polypetide isolated from the Sargasso Sea
MYKQYESIEPWLKTSAKVESKEILQSREDRSKLDGAYECIMCACCSTACPSYWWNGDKYLGPAVLLQAYRWIIDSRDEERKERLKKVADELKLYRCHTIMNCTNACPKGLNPAKAIASIKKMLATS

SEQ ID NO: 97658 - protein, 132 aa, Unknown
  Bacterial polypetide isolated from the Sargasso Sea
GDLTTLYKQYESVEPWLKSKVGEKTSTEIKQSQEDRAKLDGYYECILCACCSTSCPSYWWNGDKYLGPAVLLQAYRWITDSRDEERKERLKKVADELKLYRCHTIMNCTNSCPKGLNPAKAIGSIKKMLASS

SEQ ID NO: 97659 - protein, 120 aa, Unknown
  Bacterial polypetide isolated from the Sargasso Sea
MNLGSSLKFGEKTSTEIKQSQEDRAKLDGYYECILCACCSTSCPSYWWNGDKYLGPAVLLQAYRWITDSRDEERKERLKKVADELKLYRCHTIMNCTNSCPKGLNPAKAIGSIKKMLASS

SEQ ID NO: 97660 - protein, 258 aa, Unknown
  Bacterial polypetide isolated from the Sargasso Sea
MVQINLPENSKVQKGKYYKDKTGSKNIRKVNVYRWDPSSSEKPRIDTYEVDMDNCPSKVLDVLNKIKNEIDPSIAYRRSCAHGVCGSCAMNMDGKNGLACTKAHAEIKGDINIYPLPHLKVLKDLIGDLSTLYKQYESVQPWLKTSKKTDKENIQSKEDRSKLDGLYECIMCACCSTACPSYWWNGDKYLGPAVLLQAYRWIIDSRDEDRKERLRKVADELKLYRCHTIMNCTNACPKGLNPAKAIAEIKKMLAASNI

SEQ ID NO: 97661 - protein, 237 aa, Unknown
  Bacterial polypetide isolated from the Sargasso Sea
RFKKLRKVNIYRWDPSTGENPRIDTYEVDMDNCPSKVLDILNKIKNELDPTIAYRRSCAHGVCGSCAMNMNGKNGLACTTPHADIDGDIDIFPLPHLKVKRDLIGDLDGLYRQYQSIEPWLKSNSKSETTEIIQSKEDRKKLDGAYECIMCACCSTSCPSYWWNGDKYLGPAVLLQAYRWIVDSRDEEREARLKKVADELKLYRCHTILNCTSACPKGLNPAKAIAEIKKMLATASL

SEQ ID NO: 97662 - protein, 294 aa, Unknown
  Bacterial polypetide isolated from the Sargasso Sea
EPLCSYRNLGYKTAVISKVFPTRSHTVSAQGGITCAIASADPNDDWRWHMYDTVKGSDYIGDQDAIEYMCSEGPQTVFELEHMGLPFSRTDNGRIYQRPFGGQSKDFGKGGQAARTCAAADRTGHALLHALYQGNLKNNTSFLSEWYAVDLVKNQDGEIVGVIAIEIESGEVVFINSKATVLATGGAGRIYASTTNALICTGDGIGMALRAGYPMQDMEMWQFHPTGIYGAGTLVTEGCRGEGGYLINKDGERFMERYAPNAKDLAGRDVVARSMILEIIDGRGCGEKCDHVML

SEQ ID NO: 97663 - protein, 140 aa, Unknown
  Bacterial polypetide isolated from the Sargasso Sea
HLKVQKDLIGDLSTLYKQYQSVEPWLKVSKKNDNGENLQSIEDRSKLDGLYECIMCACCSTSCPSYWWNGDKYLGPAVLLQAYRWIIDSRDEDRKERLKKVADELKLYRCHTIMNCTNACPKGLNPAKAIASIKKMLATS

SEQ ID NO: 97664 - protein, 303 aa, Unknown
  Bacterial polypetide isolated from the Sargasso Sea
EGIAQRTCAAADRTGHAMLHTLYGKAISNSAEFFIEYFAIDLIMDKNGACLGVVALCLEDGTIHRFQAQKTILATGGYGRAYFSATSAHSCTGDGNAMVLRAGLPLQDMEFVQFHPTGIYGAGCLITEGSRGEGGYLTNSEGERFMERYAPSAKDLASRDVVSRSMTIEIREGRGVGKDKDHIHLHLEHLAPEVLAERLPGISETAKIFSGVDVTKEPIPVLPTVHYNMGGIPTNFHGEVLTKINGDPDCVVDGLMAIGEAACVSVHGANRLGSNSLIDLVVFGRAAGLRAADTTTANANQPP

SEQ ID NO: 97665 - protein, 210 aa, Unknown
  Bacterial polypetide isolated from the Sargasso Sea
EVDLNKCGNKVLDILNKIKNEIDSSLTFRKSCAHGICGSCAMNVDGVNTLSCMKSHKEIKGDLRIFPLPHLKVVKDLVADLSALYRQYESIEPWLKTADSKSQKKEINQSKKNREKLDGLYECIMCACCSTACPSYWWNGEKYLGPAVLLQAYRWISDSRDEDKKARLEMVADKLKLYRCHTIMNCTSACPKGLNPAKAIGSIKKMLATS

SEQ ID NO: 97666 - protein, 88 aa, Unknown
  Bacterial polypetide isolated from the Sargasso Sea
MYYVCVLFSSCPSYWWNGDKYLGPAVLLQAYRWIIDSRDEERKERLKKVADELKLYRCHTIMNCTNACPKGLNPAKAIASIKKMLATS

SEQ ID NO: 97667 - protein, 118 aa, Unknown
  Bacterial polypetide isolated from the Sargasso Sea
PWLKTSKTNTEQQEIIQSQKDRSKLDGYYECILCACCSTSCPSYWWNGDKYLGPAVLLQAYRWISDSRDEEKKERLKKVADELKLYRCHTIMNCTNSCPKGLNPAKAIGSIKKMLATS

SEQ ID NO: 97668 - protein, 231 aa, Unknown
  Bacterial polypetide isolated from the Sargasso Sea
NSKILKGKHYKDKFGSKNLKKVNIYRWDPETKDNPRIDTFEVDINECGPKVLDILFKIKNEIDPSLTFRRSCAHGVCGSCSMNVDGVNTLSCIKSHSDIKGDLNIYPLPHLKVIKDLVGDLSTLYKQYESVEPWLKTKAGEKTTEELKQSQEDRAKLDGYYECILCACCSTACPSYWWNGEKYLGPAVLLQAYRWISDSRDEERKKRLKKVADELKLYRCHTIMNCTNSCP

SEQ ID NO: 97669 - protein, 86 aa, Unknown
  Bacterial polypetide isolated from the Sargasso Sea
MCACCSTSCPSYWWNGDKYLGPAVLLQAYRWIVDSRDEDRKERLKKVADELKLYRCHTIMNCTNACPKGLNPAKAIASIKKMLATS

SEQ ID NO: 97670 - protein, 157 aa, Unknown
  Bacterial polypetide isolated from the Sargasso Sea
TKPHAEIKGDINIYPLPHLKVQKDLIGDLNTLYKQYHSVEPWLKNSKKNDNKENIQSIEDRSKLDGLYECIMCACCSTACPSYWWNGDKYLGPAVLLQAYRWIIDSRDEERKQRLEKVADELKLYRCHTILNCTNACPKGLNPAKAIAEIKKMLATS

SEQ ID NO: 97671 - protein, 133 aa, Unknown
  Bacterial polypetide isolated from the Sargasso Sea
GDLDGLYKQYQSIEPWLKNNSKKETTEIYQSQEDRAKLDGAYECIMCACCSTSCPSYWWNGDKYLGPAVLLQAYRWIVDSRDEERKARLKKVADELKLYRCHTILNCTNACPKGLNPAKAIAEIKKMLATANV

SEQ ID NO: 97672 - protein, 257 aa, Unknown
  Bacterial polypetide isolated from the Sargasso Sea
MVQFVLPKNSKIQKGIIHKPKQPTTDPIKLEIYRWDPEKKENPKIDTFEVNKNKFGPMVLDALIKIKNEIDSTLTFRRSCREGVCGSCAMNIDGINTLACIKPIEEIKGTIKIFPLPHMNIIKDLVPDLSKAFKQLASIKPWLQNNNKKHKSSSKNIQETKQLPKEREKLDGKWECVLCFCCTTACPSYWWNSDEYLGPAVLLQAARWVNDSRDDERKKRLNAINDSLKLYRCHTIMNCTQSCPKGLNPAKAIADLK

SEQ ID NO: 97673 - protein, 132 aa, Unknown
  Bacterial polypetide isolated from the Sargasso Sea
MGDLSTLYKQYESVQPWLKTTKKISDTEHLQSKNDRSKLDGLYECIMCACCSTSCPSYWWNGDKYLGPAVLLQAYRWIIDSRDEDRKERLKKVADELKLYRCHTIMNCTNACPKGLNPAKAIASIKKMLATS

SEQ ID NO: 97674 - protein, 264 aa, Unknown
  Bacterial polypetide isolated from the Sargasso Sea
MVQFTLPANSKVKKGIEHPVREISKKPKKIIIYRWNPEDNQNPRLDSYQIDLKKCGPMVLDALMKIKNEIDSSLTFRRSCREGVCGSCAMNIDGVNTLACLKPIEEVNGEIRIYPLPHMPVVKDLVPDLSKAYDQLASIKPWLQRSDENNNANKTQNEEKKQSPKDREKLDGQWECVLCFCCTTACPSYWWNSDEYLGPAVLMQAARWVNDSRDSERKSRLKAVNDSMKLYRCHSIMNCTRSCPKGLNPAKAIADLKKAIVTEL

SEQ ID NO: 97675 - protein, 250 aa, Unknown
  Bacterial polypetide isolated from the Sargasso Sea
MVQFNLPDNSKLTDGDYYKLEAENKSIKKFKIYRWSPEDDKNPRMDTYEVDIDDCGPMVLDAVMKIKNEVDTSLTFRRSCREGICGSCAMNIDGTNTLACTKAISDVKGDVRIYPLPHMPVIKDLVTNLKNLYKQLKSIKPWLIKQKQEATDTENIQSRNDREKLDGLYECILCACCSTSCPSYWWNSDKYLGPAVLLQSYRWLQDSRDEERKERLKELDDTFKVYRCHTIMNCTQACPKGLNPAKAIAG

SEQ ID NO: 97676 - protein, 230 aa, Unknown
  Bacterial polypetide isolated from the Sargasso Sea
KVNIYRWDPSTGKNPSIDTFEVDMDNCGPKVLDILFKIKNEIDPSLTFRRSCAHGVCGSCAMNIDGVNGLACIKSHTDIKGDLTVYPLPHLKVVKDLIGDLTTLYKQYESIQPWLKVDQTGKEKTELKQSQKDREKLDGYYECILCACCSTSCPSYWWNGDKYLGPAVLLQAYRWINDSRDGDKKERLKKVADELKLYRCHTIMNCTNSCPKGLNPAKAIGSIKKMLATS

SEQ ID NO: 97677 - protein, 183 aa, Unknown
  Bacterial polypetide isolated from the Sargasso Sea
RRSCAHGVCGSCAMNMGGKNGLACTTPHAEIDGDIDIYPLPHLKVKRDLIGDLDGLYKQYQSIEPWLKNNSTKQSTEIYQSKEDRAKLDGAYECIMCACCSTSCPSYWWNGDKYLGPAVLLQAYRWIIDSRDEERKARLKKVSDELKLYRCHTILNCTNACPKGLNPAKAIAEIKKMLATANV

SEQ ID NO: 97678 - protein, 199 aa, Unknown
  Bacterial polypetide isolated from the Sargasso Sea
MDILFKIKNEIDPSLTFRRSCAHGVCGSCAMNIDGINGLACIKSHEDIKGDLNIYPLPHLKVVKDLIGDLTTLYKQYESIQPWLKVDQTGHEKTELKQSQKEREKLDGYYECILCACCSTSCPSYWWNGDKYLGPAVLLQAYRWINDSRDGDKKERLRKVADELKLYRCHTIMNCTNSCPKGLNPAKAIGSIKKMLATS

SEQ ID NO: 97679 - protein, 188 aa, Unknown
  Bacterial polypetide isolated from the Sargasso Sea
DPSLTFRRSCAHGVCGSCAMNIDGVNGLACIKSHTDIKGDLNIYPLPHLKVVKDLIGDLTTLYKQYESIQPWLKVDQTGQEKIELKQSQKEREKLDGYYECILCACCSTSCPSYWWNGDKYLGPAVLLQAYRWINDSRDGDKKERLKKVADELKLYRCHTIMNCTNSCPKGLNPAKAIGSIKKMLATS

SEQ ID NO: 97680 - protein, 162 aa, Unknown
  Bacterial polypetide isolated from the Sargasso Sea
MACTKPHAEIDGDIDIYPLPHLKVKKDLIGDLDGLYKQYQSIEPWLKSNSKSENTEIIQSKEDRKKLDGAYECIMCACCSTSCPSYWWNGNKYLGPAVLLQAYRWIVDSRDDERQARLKKVADELKLYRCHTILNCTSACPKGLNPAKAIAEIKKMLATANI

SEQ ID NO: 97681 - protein, 154 aa, Unknown
  Bacterial polypetide isolated from the Sargasso Sea
HKEIKGDINIYPLPHLKVQKDLIGDLSTLYKQYESVEPWLKISKKDEGKENLQSIEDRSKLDGLYECIMCACCSTSCPSYWWNGDKYLGPAVLLQAYRWIIDSRDEDRKERLKKVADELKLYRCHTIMNCTNACPKGLNPAKAIASIKKMLATS

SEQ ID NO: 97682 - protein, 202 aa, Unknown
  Bacterial polypetide isolated from the Sargasso Sea
MVQINLPENSKIEKGSYYKDTTGSKNIRKVNVYRWDPSTGKKPRIDTYEVDMDNCPSKVLDVLNKIKNEIDPSLAYRRSCAHGVCGSCAMNMDGKNGLACTKPHSEIKGDINIYPLPHLKVLKDLIGDLSTLYKQYESVEPWLKTSKKNDNKENLQSKEDRKKLNGLYECIMCACCSTSCPSYWWNGDKYLGPAVLLQAYRW

SEQ ID NO: 97683 - protein, 93 aa, Unknown
  Bacterial polypetide isolated from the Sargasso Sea
DGLYECIMCACCSTSCPSYWWNGDKYLGPAVLLQAYRWIIDSRDEERKERLKKVADELKLYRCHTIMNCTNSCPKGLNPAKAIASIKKMLATG

SEQ ID NO: 97684 - protein, 176 aa, Unknown
  Bacterial polypetide isolated from the Sargasso Sea
CGSCANEYLVEKNGLACTTPHSEINGDIDIYPLPHLKVKKDLIGDLDGLYKQYQSIEPWLKSNSKSETKEIIQSKEERAKLDGAYECIMCACCSTSCPSYWWNGDKYLGPAVLLQAYRWIIDSRDEERQARLKKVADELKLYRCHTIMNCTNACPKGLNPAKAIAEIKKMLATANI

SEQ ID NO: 97685 - protein, 138 aa, Unknown
  Bacterial polypetide isolated from the Sargasso Sea
KFKKILFGDLSTLYKQYQSVEPWLKVSKKNDNSENLQSIEDRSKLDGLYECIMCACCSTSCPSYWWNGDKYLGPAVLLQAYRWIIDSRDEDRKERLKKVADELKLYRCHTIMNCTNACPKGLNPAKAIASIKKMLATS

SEQ ID NO: 97686 - protein, 257 aa, Unknown
  Bacterial polypetide isolated from the Sargasso Sea
MVQINLPENSKVKKGHYYKDKTGSKNIRKINVYRWDPSSGDNPRLDTYEVDMDNCPSKVLDVLNKIKNEIDPSLSYRKSCAHGVCGSCAMNMDGKNGLACTTSHAEIKGDIDIYPLPHLKVKKDLIGDLDGLYKQYESIEPWLKNNSKDKNDEIYQSQKDREKLDGAYECIMCACCSTSCPSYWWNGDKYLGPAVLLQAYRWIIDSRDEERKERLEKVADELKLYRCHTILNCTNACPKGLNPAKAIAEIKKMLATA

SEQ ID NO: 97687 - protein, 236 aa, Unknown
  Bacterial polypetide isolated from the Sargasso Sea
MVEFILPTNSKIKKGTTHPVKEVSEKPKKVVIYRWNPEDQDNPRLDSYEIDLSKCGPMVLDALMKIKNEIDSSLTFRRSCREGVCGSCAMNIDGVNTLACLKPIEEVNGEIRIYPLPHMPVVKDLVPDLSKAYQQLESIKPWLQRSKENSNTKSVSSEEKKQTPKEREKLDGQWECVLCFCCTTSCPSYWWNSDEYLGPAVLMQAARWVNDSRDSERKNRLKAVDDKMKLYKCHSI

SEQ ID NO: 97688 - protein, 74 aa, Unknown
  Bacterial polypetide isolated from the Sargasso Sea
WWNGDKYLGPAVLLQAYRWINDSRDGSKKERLKKVADELKLYRCHTIMNCTNSCPKGLNPAKAIGSIKKMLATS

SEQ ID NO: 97689 - protein, 164 aa, Unknown
  Bacterial polypetide isolated from the Sargasso Sea
MEKNGLACTKAHSELEGDIDIYPLPHLKVLKDLIGDLSTLYKQYESVEPWLKTTKKNDKENIQSKEDRAKLDGFYECIMCACCSTSCPSYWWNGEKYLGPAVLLQAYRWIIDSRDEDRKERLKKVADELKLYRCHTILNCTNACPKGLNPAKAIAEIKKMLATA

SEQ ID NO: 97690 - protein, 215 aa, Unknown
  Bacterial polypetide isolated from the Sargasso Sea
MVQINLPENSKVKKGNYFKDKTGSKNLRKVNIYRWDPSTGENPRIDTYEVDMDNCPSKVLDILNKIKNELDPTIAYRRSCAHGVCGSCAMNMNGKNGLACTTPHVDIDGDIDIYPLPHLKVKRDLIGDLDGLYRQYQSIEPWLKSNSKSETTEIIQSKEDRKKLDGAYECIMCACCSTSCPSYWWNGDKYLGPAVLLQAYRWIVDSRDEEREARL

SEQ ID NO: 97691 - protein, 181 aa, Unknown
  Bacterial polypetide isolated from the Sargasso Sea
RRSCSHGVCGSCAMNMDGKNGLACTKPHKEIKGDINIYPLPHLKVQKDLIGDLSTLYKQYESVEPWLKISKKNEGKENLQSIEDRSKLDGLYECIMCACCSTACPSYWWNGDKYLGPAVLLQAYRWIIDSRDEDRKERLKKVADELKLYRCHTIMNCTNACPKGLNPAKAIASIKKMLATA

SEQ ID NO: 97692 - protein, 191 aa, Unknown
  Bacterial polypetide isolated from the Sargasso Sea
ITFRRSCREGVCGSCAMNIDGINTLACLKPIEEVKDDIKIYPLPHMPVVKDLVPDLSQAYSQLESIKPWLERSNNSTNKDSNKLEEEKQSPKEREKLDGQWECVLCFCCTTSCPSYWWNSDEYLGPAVLLQAARWVNDSRDSQRKKRLQDINDSMKLYRCHSIMNCTRSCPKGLNPAKAIADLKKAIVTEL

SEQ ID NO: 97693 - protein, 227 aa, Unknown
  Bacterial polypetide isolated from the Sargasso Sea
MVQFNLPDNSKLTDGDYYKSEKSNGNTKKFKIYRWSPDDEKNPRMDTYEVDLDDCGPMVLDAVMKIKSEIDTSLTFRRSCREGICGSCAMNIDGTNTLACTKAISDVKGDIKIYPLPHMPVIKDLVTNLKTLYKQLKSIKPWLMNNKQNANDTENIQSRNDREKLDGLYECILCACCSTSCPSYWWNSDKYLGPAVLLQSYRWLQDSRDEERKERLKELDDTFKVYR

SEQ ID NO: 97694 - protein, 156 aa, Unknown
  Bacterial polypetide isolated from the Sargasso Sea
KPYSEIKGDINIYPLPHLKVLKDLIGDLSTLYKQYESVEPWLKNSNKNDEKENLQSKKDRAKLDGLYECIMCACCSTSCPSYWWNGEKYLGPAVLLQAYRWIIDSRDEDRKARLKKVADELKLYRCHTIMNCTNACPKGLNPAKAIASIKKMLATS

SEQ ID NO: 97695 - protein, 220 aa, Unknown
  Bacterial polypetide isolated from the Sargasso Sea
MVEFSLPANSKVTTGKLHMSKEIAESPKKLVIYRWDPEDDKNPRLDTYEIDQSKCGPMVLDALMKIKNEIDPTLTFRRSCREGVCGSCAMNIDGVNTLACLKSMSDVKSDIKIYPLPHMRVVKDLVPDLTKAYEQLASIKPWLERPKSNDNNSDNLNEERKQSPKDREKLDGKWECVLCFCCTTSCPSYWWNGDEYLGPAVLLQAARWVEDSRDAERKKD

SEQ ID NO: 97696 - protein, 257 aa, Unknown
  Bacterial polypetide isolated from the Sargasso Sea
MVQISLPKNSEIKKGNYYKDKTGSKNIRKVNIYRWDPATGDNPRIDTYEVDMDNCPSKVLDLLNKIKNEIDPSLAYRRSCAHGVCGSCAMNMDGKNGLACTKPHSEIKGDINIYPLPHLRVLKDLIGDLSILYKQYESVQPWLKTTKKSDGTENLQSKEDRSKLDGLYECIMCACCSTACPSYWWNGEKYLGPAVLLQAYRWIIDSRDEDRKDRLKKVADELKLYRCHTIMNCTNACPKGLNPAKAIASIKKMLATS

SEQ ID NO: 97697 - protein, 256 aa, Unknown
  Bacterial polypetide isolated from the Sargasso Sea
MVQINLPQNSKVEKGKYFKDKTGSKNIRKVNIYRWDPSTGENPRIDTYEVDMDNCPSKVLDLLNKIKNEIDPSIAYRRSCAHGVCGSCAMNMDGKNGLACTKPHSEIKGDINIYPLPHLKVLKDLIGDLSTLYKQYESVEPWLKTTSKTEKENIQSKEDRAKLDGLYECIMCACCSTSCPSYWWNGDKYLGPAVLLQAYRWIIDSRDEDRKERLKKVADELKLYRCHTIMNCTNACPKGLNPAKAIASIKKMLATS

SEQ ID NO: 97698 - protein, 131 aa, Unknown
  Bacterial polypetide isolated from the Sargasso Sea
DLTTLYKQYESIQPWLKVDQTGKEKTELKQSQKDREKLDGYYECILCACCSTSCPSYWWNGDKYLGPAVLLQAYRWINDSRDGDKKERLKKVADELKLYRCHTIMNCTNSCPKGLNPAKAIGSIKKMLATS

SEQ ID NO: 97699 - protein, 251 aa, Unknown
  Bacterial polypetide isolated from the Sargasso Sea
QNSKILKGKYYKDKSGSTNIKRVNVYRWNPSSNENPRIDTFEINIEECGPKVLDILFKIKNEIDPSLTFRRSCAHGVCGSCAMNVDGVNTLSCIKSHSDIKGDLNIYPLPHLKVVKDLVGDLSTLYKQYESVEPWLKTKAGEKTSVEIQQSQEDRAKLDGYYECILCACCSTSCPSYWWNGDKYLGPAVLLQAYRWITDSRDEERKARLKKVADELKLYRCHTIMNCTNSCPKGLNPAKAIASIKKMLATS

SEQ ID NO: 97700 - protein, 197 aa, Unknown
  Bacterial polypetide isolated from the Sargasso Sea
KNEIDPTLTFRRSCREGVCGSCAMNIDGVNTLACLKSMSDVKNEIKIYPLPHMRVVKDLVPDLSKAYEQLASIKPWLQRKKTNDEEKNLGDEKKQSPKDREKLDGKWECVLCFCCTTSCPSYWWNGDEYLGPAVLLQAARWVSDSRDAERKERLKAINDSLKLYRCHSIMNCTRSCPKGLNPAKEIAGLKKAIVTEL

SEQ ID NO: 97701 - protein, 169 aa, Unknown
  Bacterial polypetide isolated from the Sargasso Sea
MNVDGVNTLSCIKSHSDIKGELNIYPLPHLKVIKDLVGDLTTLYKQYESVEPWLKAKVGEKTSTEIKQSQEDRAKLDGYYECILCACCSTSCPSYWWNGDKYLGPAVLLQAYRWITDSRDEERKERLKKVADELKLYRCHTIMNCTNSCPKGLNPAKAIGSIKKMLASS

SEQ ID NO: 97702 - protein, 157 aa, Unknown
  Bacterial polypetide isolated from the Sargasso Sea
SHKEIDGDIDIYPLPHLKVKRDLIGDLDGLYKQYQSIEPWLKNNSKKERTEIVQSKEDRAKLDGAYECIMCACCSTSCPSYWWNGDKYLGPAVLLQAYRWIIDSRDEERKLRLKKVADELKLYRCHTILNCTSACPKGLNPAKAIAEIKKMLATTNV

SEQ ID NO: 97703 - protein, 193 aa, Unknown
  Bacterial polypetide isolated from the Sargasso Sea
IKNEIDPSLTFRRSCAHGVCGSCAMNVDGVNTLSCTKSHSDIRGDLNIYPLPHLKVVKDLVGDLTTLYKQYESVEPWLKTKVGQKTTKEIKQSQEDRAKLDGYYECILCACCSTACPSYWWNGDKYLGPAVLLQAYRWINDSRDEDKKERLKKVADELKLYRCHTIMNCTNSCPKGLNPAKAIGSIKKMLATG

SEQ ID NO: 97704 - protein, 231 aa, Unknown
  Bacterial polypetide isolated from the Sargasso Sea
MKPSSLFKIYRSGIKTRMDKFNLDTSLFGPMVLDALIHIKNTEDKSLVFRRSCREGICGSCAMNINGKNSLACLTPITKTVSVYPLPHQPIIRDLVTDMSNFYEQYKEIKPWLHSDLETTVEKKGENLQSIQDRKKLDGLYECILCACCSTSCPSYWWNSKEYLGPAVLMQAYRWVEDSRDTNTKERLKYLDNAMKLYRCKTIMNCSNTCPKGLNPGKAIGKLKLKIAQQI

SEQ ID NO: 97705 - protein, 75 aa, Unknown
  Bacterial polypetide isolated from the Sargasso Sea
IGWNGDKYLGPAVLLQAYRWIIDSRDEDRKERLKKVADELKLYRCHTIMNCTNACPKGLNPAKAIASIKKMLATS

SEQ ID NO: 97706 - protein, 169 aa, Unknown
  Bacterial polypetide isolated from the Sargasso Sea
NIGGKNGLACTTPHSEIEGDIDIYPLPHLKVKKDLIGDLDGLYKQYKSIEPWLKANPKSETTEIFQSKKDRKKLDGAYECIMCACCSTSCPSYWWNGDKYLGPAVLLQAYRWIIDSRDEEREARLKKVADELKLYRCHTILNCTSACPKGLNPAKAIAEIKKMLATSSL

SEQ ID NO: 97707 - protein, 258 aa, Unknown
  Bacterial polypetide isolated from the Sargasso Sea
MVQFSLPQNSKILKGKFYKDKTGSNNLKKVNVYRWSPSSNENPRIDTFEVDLNECGPKVLDILFKIKNEIDPTLTFRRSCAHGVCGSCAMNVDGINTLSCIKSHSDIKGELNIYPLPHLKVIKDLVGDLTTLYKQYESVEPWLKTKAGEKTPAEIKQSQEDRAKLDGYYECILCACCSTSCPSYWWNGDKYLGPAVLLQAYRWITDSRDDERKERLKKVADELKLYRCHTIMNCTNSCPKGLNPAKAIASIKKMLATS

SEQ ID NO: 97708 - protein, 164 aa, Unknown
  Bacterial polypetide isolated from the Sargasso Sea
VNTLSCIKSHSDIKGELNIYPLPHLKVIKDLVGDLTTLYKQYESVEPWLKTRAGEKTNAEIKQSQEDRAKLDGYYECILCACCSTSCPSYWWNGDKYLGPAVLLQAYRWITDSRDEERKERLKKVADELKLYRCHTIMNCTNSCPKGLNPAKAIGSIKKMLASS

SEQ ID NO: 97709 - protein, 170 aa, Unknown
  Bacterial polypetide isolated from the Sargasso Sea
GVNTLACTRGLNEIKGDVRIYPLPHMPVIKDLIPDLTNFYKQHASIMPWLETKTETPEKEWEQSIEQRKKLDDLYECVMCACCSTSCPSYWWNSEKYLGPAALLHAYRWLVDSRDETRDERLNDIEDSFKLYRCHTIMNCARTCPKNLNPAKAIAEIKKMMVEKNSRNKQ

SEQ ID NO: 97710 - protein, 234 aa, Unknown
  Bacterial polypetide isolated from the Sargasso Sea
MVQFSLPQNSKILKGKYYQDKSGSNNLKKVNVYRWDPSKKENPRIDTFEVNMNECGPKVLDILFKIKNEIDSSLTFRRSCAHGVCGSCAMNVDGVNTLSCIKSHSDIKGELNIYPLPHLKVVKDLVGDLTTLYKQYESVEPWLKTKVVEKTTKEIKQSQADREKLDGYYECILCACCSTACPSYWWNGDKYLGPAVLLQAYRWINDSRDEDKKERLKKVADELKLYRCHTIMNA

SEQ ID NO: 97711 - protein, 79 aa, Unknown
  Bacterial polypetide isolated from the Sargasso Sea
PSYWWNGDKYLGPAVLLQAYRWIIDSRDEERKARLKKVADELKLYRCHTILNCTNACPKGLNPAKAIAEIKKMLATANV

SEQ ID NO: 97712 - protein, 106 aa, Unknown
  Bacterial polypetide isolated from the Sargasso Sea
ERRQSKKKRAVLDGAWECVLCFSCSTSCPSYWWNGDQYLGPAVLLQAYRWIADSRDESTGERLDALEDPFKLYRCHTIMNCSKTCPKGLNPAKAIGEIKKLMVERR

SEQ ID NO: 97713 - protein, 242 aa, Unknown
  Bacterial polypetide isolated from the Sargasso Sea
YFKTRQGSTNLKKVNVYRWNPDDGKNPRIDTFEVDMNNCGPKVLDILFKIKNEIDSSLTFRRSCAHGVCGSCAMNVDGINTLSCIKSHNDIKGELNIYPLPHLKVIKDLIGDLSNLYKQYESIQPWLKTSKTDTEKQEILQSQKDRSKLDGYYECILCACCSTSCPSYWWNGDKYLGPAVLLQAYRWISDSRDEEKKERLKKVADELKLYRCHTIMNCTNSCPKGLNPAKAIGSIKKMLATS

SEQ ID NO: 97714 - protein, 90 aa, Unknown
  Bacterial polypetide isolated from the Sargasso Sea
MSVYFARVAQLHARAYWWNGDKYLGPAVLLQAYRWITDSRDEERKERLKKVADELKLYRCHTIMNCTNSCPKGLNPAKAIGSIKKMLASS

SEQ ID NO: 97715 - protein, 203 aa, Unknown
  Bacterial polypetide isolated from the Sargasso Sea
VKVLDILNKIKNEIDPTLAYRRSCAHGVCGSCAMNMGGKNGLACTTPHSEINGDIDIYPLPHLKVKKDLIGDLDGLYKQYQSIEPWLKSNSKSETKEIFQSKEDRAKLDGAYECIMCACCSTSCPSYWWNGDKYLGPAVLLQAYRWIIDSRDEERQSRLKKVADELKLYRCHTILNCTSACPKGLNPAKAIAEIKKMLATANI

SEQ ID NO: 97716 - protein, 219 aa, Unknown
  Bacterial polypetide isolated from the Sargasso Sea
MVQFALPKNSKIKEGIQHPVKEQSESPKKIVIYRWSPDDDENPRLDSYEIDLKKCGPMVLDALMKIKNEIDSSLTFRRSCREGVCGSCAMNIDGVNTLACLKPIEEVNGEIRIYPLPHMPVVKDLVPDLTKVYKQLASIKPWLQRSKKGEASKSKLIEEIKQSPKDREKLDGQWECVLCFCCTTSCPSYWWNSDEYLGPAVLLQAARWVNDSRDVERKK

SEQ ID NO: 97717 - protein, 203 aa, Unknown
  Bacterial polypetide isolated from the Sargasso Sea
MVKFNLPDNSKLTKGDYFKSDIGSKNIKKFQIYRWSPEDERNPRMDTYEVDMNSCGPMVLDAVMKIKNEIDSSLTFRRSCREGICGSCAMNIDGTNTLACTKAINDVKGDIKIYPLPHMPVIKDLITNLKSLYTQLKSIKPWLHSKKTQATDVENIQSKEERSKLDGLYECILCACCSTSCPSYWWNSDKYLGPAVLLQSYRW

SEQ ID NO: 97718 - protein, 217 aa, Unknown
  Bacterial polypetide isolated from the Sargasso Sea
MVQINLPKNSKIQKGKYFKDTTGSKNIRKVNIYRWDPSTGENPRIDTYEVDMDNCPSKVLDLLNKIKNEIDPTIAYRRSCAHGVCGSCAMNMDGKNGLACTKPHSEIKGDINIYPLPHLKVLKDLIGDLSTLYRQYESVEPWLKNSNDSSKTENLQSKEDRAKLDGLYECIMCACCSTSCPSYWWNGDKYLGPAVLLQAYRWIIDSRDEDRKARLKK

SEQ ID NO: 97719 - protein, 149 aa, Unknown
  Bacterial polypetide isolated from the Sargasso Sea
CTKPHAEIKGDINIYPLPHLKVQKDLIGNLDTLYKQYHSVEPWLKNSKKNDNKENLQSIEDRSKLDGLYECIMCACCSTACPSYWWNGDKYLGPAVLLQAYRWIIDSRDEERKQRLEKVADELKLYRCHTILNCTNACPKGLNPSKSYC

SEQ ID NO: 97720 - protein, 150 aa, Unknown
  Bacterial polypetide isolated from the Sargasso Sea
KGDINIYPLPHLKVQKDLIGDLSVLYKQYQSVEPWLKVSKKNEDKENLQSIEDRSKLDGLYECIMCACCSTSCPSYWWNGEKYLGPAVLLQAYRWIIDSRDEDRKERLKKVADELKLYRCHTIMNCTNACPKGLNPAKAIASIKKMLATG

SEQ ID NO: 97721 - protein, 264 aa, Unknown
  Bacterial polypetide isolated from the Sargasso Sea
MVQLTLPANSKITKGKLHQSKEILESEKKLVIYRWNPDDDKNPRLDTYIIDQTKCGPMVLDALMMIKNEIDSTLTFRRSCREGVCGSCAMNIDGVNTLACLKSMSEIKKDIKIYPLPHMRVVKDLVPDLSKAYEQLESIKPWLERSKSNGKNLDNQNGEKKQLPKDREKLDGKWECVLCFCCTTSCPSYWWNGEEYLGPAVLLQAARWVNDTRDAERKERLKAINDSLKLYKCHSIMNCTRSCPKGLNPAKEIAGLKKAIVTEL

SEQ ID NO: 97722 - protein, 326 aa, Unknown
  Bacterial polypetide isolated from the Sargasso Sea
MRTSFELAKSGLNTAVISKVFPTRSHTVSAQGGITCAIQSADPNDDWRWHMYDTVKGSDYIGDQDAIEYMCSEGPKAVYELEHMGLPFSRFENGRIYQRPFGGQSKDFGKGGQAARTCAAADRTGHALLHTLYQNNVKEGTNFLNEWFAVDLVKNSKKEITGVIAFSIESGEVCYLKAQATVLATGGAGRIYASTTNALINTGDGLGMTLRAGFPAQDMEMWQFHPTGIHGAGSLVTEGCRGEGGYLINADGERFMERYAPNAKDLAGRDVVARSMVMEILEGRGCGPEKDHVYLKLDHLGADVLNSKVPGICELSKTFAHVDPIM

SEQ ID NO: 97723 - protein, 185 aa, Unknown
  Bacterial polypetide isolated from the Sargasso Sea
SIAYRRSCAHGVCGSCAMNMDGKNGLACTKPHKEIKGDINIYPLPHLKVQKDLIGDLSTLYKQYESVEPWLKVSKKDEGKENLQSIEDRSKLDGLYECIMCACCSTSCPSYWWNGDKYLGPAVLLQAYRWIIDSRDEDRKERLKKVADELKLYRCHTIMNCTNACPKGLNPAKAIASIKKMLATS

SEQ ID NO: 97724 - protein, 149 aa, Unknown
  Bacterial polypetide isolated from the Sargasso Sea
IDIYPLPHLKVKKDLIGDLDGLYKQYKSIEPWLKSSSKSETTELIQSKEDRAKLDGAYECIMCACCSTSCPSYWWNGDKYLGPAVLLQAYRWIIDSRDEERQARLKKVADELKLYRCHTILNCTSACPKGLNPAKAIAEIKKMLATANI

SEQ ID NO: 97725 - protein, 233 aa, Unknown
  Bacterial polypetide isolated from the Sargasso Sea
NLKKVNVYRWNPSSNENPRIDTFEVDLNECGPKVLDILFKIKNEIDPTLTFRRSCAHGVCGSCAMNVDGVNTLSCIKSHSDIKGELNIYPLPHLKVIKDLVGDLTTLYKQYESVEPWLKAKVGEKTSTEIKQSQEDRAKLDGYYECILCACCSTSCPSYWWNGDKYLGPAVLLQAYRWITDSRDEERKERLKKVADELKLYRCHTIMNCTNSCPKGLNPAKAIGSIKKMLASS

SEQ ID NO: 97726 - protein, 236 aa, Unknown
  Bacterial polypetide isolated from the Sargasso Sea
GSDNLKKINVYRWYPSTKENPRVDTFEVNMNECGPKVLDILFKIKNEIDPSLTFRRSCAHGVCGSCAMNVDGVNTLSCTKSHSDIKGDLNIYPLPHLKVVKDLVGDLTTLYKQYESVEPWLKTKVGQKTTKEIKQSQEDRAKLDGYYECILCACCSTACPSYWWNGDKYLGPAVLLQAYRWINDSRDEDKKARLKKVADELKLYRCHTIMNCTNSCPKGLNPAKAISSIKKMLATS

SEQ ID NO: 97727 - protein, 248 aa, Unknown
  Bacterial polypetide isolated from the Sargasso Sea
KVQKGKYYKDKTGSKNIRKVNVYRWNPSDGQRPRIDTYEVDMDNCPSKVLDLLNKIKNEIDPSLAYRRSCSHGVCGSCAMNMDGKNGLACTKSHSEIKGDINIYPLPHLKVLKDLIGDLSTLFKQYDSIEPWLKNSKKDDGKENLQSRKEREKLDGYYECIMCACCSTACPSYWWNGDKYLGPAVLLQAYRWIIDSRDEERKERLNKVADELKLYRCHTIMNCTNACPKDLNPAKAIAEIKKMLATNY

SEQ ID NO: 97728 - protein, 153 aa, Unknown
  Bacterial polypetide isolated from the Sargasso Sea
RIYPLPHMPVVKDLVPDLSKAYEQLASIKPWLQRSNEEFNSLQNGSEEKKQTPKDREKLDGQWECVLCFCCTTSCPSYWWNSDEYLGPAVLMQAARWINDSRDSEKKNRLKVVNDKMKLYRCHSIMNCTRSCPKGLNPAKAIAELKKAIVTEL

SEQ ID NO: 97729 - protein, 121 aa, Unknown
  Bacterial polypetide isolated from the Sargasso Sea
MSHGLKNNSTKQTTEIYQSKEDRAKLDGAYECIMCACCSTSCPSYWWNGDKYLGPAVLLQAYRWIIDSRDEERKERLKKVADELKLYRCHTILNCTNACPKGLNPAKAIAEIKKMLATANV

SEQ ID NO: 97730 - protein, 187 aa, Unknown
  Bacterial polypetide isolated from the Sargasso Sea
DPSLAYRRSCAHGVCGSCAIYMDGKNGLACTKAHSEIKGDINIYPLPHLKVLKDLIGDLNTLYKQYASVEPWLKTSKKNDNVENIQSINDRSKLDGLYECIMCACCSTSCPSYWWNGDKYLGPAVLLQAYRWIMDSRDEDRKERLKKVADELKLYRCHTIMNCTNSCPKGLNPAKAIAEIKKMLVTV

SEQ ID NO: 97731 - protein, 258 aa, Unknown
  Bacterial polypetide isolated from the Sargasso Sea
MVQFNLPSNSKILKGKYFKDKTGSSKLRIVHIYRWDPEKNENPREDTFEVNLDNCGNKVLDILNKIKNEIDSSLTFRKSCAHGVCGSCAMNVDGINTLSCMKSHKDIKGAIRIFPLPHLKVVKDLVADLSTLYKQYESIEPWLKTKESKLRKNEITQSKENREKLDGLYECIMCACCSTSCPSYWWNGESYLGPAVLLQAYRWISDSRDEEKKERLKMVADKLKLYRCHTIMNCTSSCPKGLNPAKAIGSIKKMLATS

SEQ ID NO: 97732 - protein, 212 aa, Unknown
  Bacterial polypetide isolated from the Sargasso Sea
MVLDALVQIKNEIDSTLTFRRSCREGVCGSCAMNIDGVNTLACLKPINEVKKEIKIFPLPHMRVVKDLVPDLSEAYEQLKFIEPWLEINKKKQTKSSIQKKFLKTEEKKQSITERANLDGKWECVLCFCCTTSCPSYWWNSDQYLGPAVLLQASRWINDSRDDKRKERLKKINDSMKLYRCHSIMNCTRSCPKGLNPAKAIADIKKAIVTEL

SEQ ID NO: 97733 - protein, 99 aa, Unknown
  Bacterial polypetide isolated from the Sargasso Sea
TTPHEEIKGDINIYPLPHLKVKKDLIGDLDGLYKQYQSIEPWLKTNSKSETKEIIQSKKDREKLDGAYECIMCACCSTSCPSYWWNGDKYLGPAVLLQA

SEQ ID NO: 97734 - protein, 239 aa, Unknown
  Bacterial polypetide isolated from the Sargasso Sea
MVQINLPQNSKVQKGEYYKDKTGSKNIRKVNIYRWDPSSGENPRIDTYEVDMDNCPSKVLDLLNKIKNEIDPSISYRRSCAHGVCGSCAMNMDGKNGLACTKPHKEIKGDINIYPLPHLKVQKDLIGDLSILYKQYESVEPWLKISKKDQKKENLQSIEDRSKLDGLYECIMCACCSTSCPSYWWNGDKYLGPAVLLQAYRWIIDSRDEDRKERLKKVADELKLYRCHTIMNCTNAVQK

SEQ ID NO: 97735 - protein, 83 aa, Unknown
  Bacterial polypetide isolated from the Sargasso Sea
CCSTACPSYCGNGDKYLGPAVLLQAYRWIIDSRDEERKERLKKVADELKLYRCHTIMNCTNACPKGLNPAKAIASIKKMLATS

SEQ ID NO: 97736 - protein, 257 aa, Unknown
  Bacterial polypetide isolated from the Sargasso Sea
MVQIRLPENSKIEKGNYYKDKTGSKNLRKVNVYRWDPSTGKKPRIDTYEVDMDNCPSKVLDILNKIKNEIDPSIAYRRSCAHGVCGSCAMNMDGKNGLACTKPHSEIKGDINIYPLPHLKVLKDLIGDLSTLYKQYESVEPWLKTSKRNDEKENLQSKKDRAKLDGLYECIMCACCSTSCPSYWWNGEKYLGPAVLLQAYRWIIDSRDEDRKARLKKVADELKLYRCHTIMNCTNACPKGLNPAKAIASIKKMLATS

SEQ ID NO: 97737 - protein, 107 aa, Unknown
  Bacterial polypetide isolated from the Sargasso Sea
SKEIKQSQEDRAKLDGYYECILCACCSTSCPSYWWNGDKYLGPAVLLQAYRWITDSRDEERKERLKKVADELKLYRCHTIMNCTNSCPKGLNPAKAIGSIKKMLATS

SEQ ID NO: 97738 - protein, 265 aa, Unknown
  Bacterial polypetide isolated from the Sargasso Sea
MVEFTLPKNSKVVKGIDHSLKNNSENTRKLIIYRWDPEEDKNPRLDRYEIDLNKCGPMVLDALIKIKNEIDTTLTFRRSCREGVCGSCSMNIDGINTLACLKPMAEIKKDITIYPLPHMRVIKDLVPDLKKAYQQLESIKPWLSSNNSNKIDVIKKDKRENKQTPEERAKLDGTWECILCFCCTTSCPSYWWNSDEYLGPAVLLQASRWINDSRDNKKKERLKELNNSMKLYRCHSIMNCARSCPKGLNPAKAIAEIKKAIVTEK

SEQ ID NO: 97739 - protein, 264 aa, Unknown
  Bacterial polypetide isolated from the Sargasso Sea
MVEFTLPANSKVQKGIAHPVKKVSKKPKKLVIYRWNPEDQDNPRLDSYEIDLSKCGPMVLDALMKIKNEIDSSLTFRRSCREGVCGSCAMNIDGVNTLACLKPIEEVNGEIRIYPLPHMPVVKDLVPDLSKAYEQLASIKPWLQRSYDNSSATASISQEKKQTPKDREKLDGQWECVLCFCCTTACPSYWWNSEEYLGPAVLMQAARWVNDSRDSERKNRLKAVNDKMKLYRCHSIMNCTRSCPKGLNPAKAIADLKKAIVTEL

SEQ ID NO: 97740 - protein, 259 aa, Unknown
  Bacterial polypetide isolated from the Sargasso Sea
MVQINLPKNSKVQKGNYFKDKTGSKNLRKVNVYRWDPSTGENPRIDTYEVDMDNCPSKVLDVLNKIKNEIDPSIAYRRSCAHGVCGSCAMNMGGKNGLACTTPHSEIDGDIDIYPLPHLKVKKDLIGDLDGLYKQYQSIEPWLKSNSNSETTEIIQSKKDREKLDGAYECIMCACCSTSCPSYWWNGDKYLGPAVLLQAYRWIVDSRDEEREARLKKVADELKLYRCHTILNCTSACPKGLNPAKAIAEIKKMLATANI

SEQ ID NO: 97741 - protein, 253 aa, Unknown
  Bacterial polypetide isolated from the Sargasso Sea
MPQNSKILKGKYYQDKSDSNNLKKVNVYRWDPSKKENPRIDTFEVNMNECGPKVLDVLFKIKNEIDPSLTFRRSCAHGVCGSCAMNVDGVNTLSCIKSHSDIKGELNIYPLPHLKVVKDLVGDLTTLYKQYESVEPWLKTKVGEKTTKEIKQSQADREKLDGYYECILCACCSTACPSYWWNGDKYLGPAVLLQAYRWINDSRDGDKKERLKKVADELKLYRCHTIMNCTNSCPKGLNPAKAIGSIKKMLATS

SEQ ID NO: 97742 - protein, 259 aa, Unknown
  Bacterial polypetide isolated from the Sargasso Sea
MVQLNLPKNSEVKKGKYFKDKTGSKNLRKVNVYRWDPSTEENPRIDTYEVDMDNCPSKVLDILNKIKNEIDPTLAYRRSCAHGVCGSCAMNMGGKNGLACTTPHSEIDGDVDIYPLPHLKVKRDLIGDLDGLYKQYESIEPWLKNNSKKETTEIYQSQDDRAKLDGAYECIMCACCSTSCPSYWWNGDKYLGPAVLLQAYRWIVDSRDEERKARLKKVADELKLYRCHTILNCTNACPKGLNPAKAIAEIKKMLATANV

SEQ ID NO: 97743 - protein, 258 aa, Unknown
  Bacterial polypetide isolated from the Sargasso Sea
MAQFNLPQNSKIEVGKYYKDETNSKNLKKVNVYRWDPSSGQNPRVDTFEVDMDTCGPKVLDILFKIKNEIDPSLTFRRSCAHGVCGSCAMNIDGVNTLACIKSHTDINGDLNVYPLPHLKVVKDLIGDLSTLYKQYESIKPWLQTEQTGKEKEELRQSQKDREKLDGYYECILCACCSTSCPSYWWNGDKYLGPAVLLQAYRWINDSRDGDKKERLKKVADELKLYRCHTIMNCTNSCPKGLNPAKAIGSIKKMLATS

SEQ ID NO: 97744 - protein, 257 aa, Unknown
  Bacterial polypetide isolated from the Sargasso Sea
MVQINLPKNSKVIKGIYYKDKTNSKNIRKVNVYRWDPSTGENPRIDTYEVDMDNCPSKVLDLLNKIKNEIDPSLAYRRSCAHGVCGSCAMNMDGKNGLACTKPHAEIKGDINIYPLPHLKVLKDLIGDLNTLYKQYESVEPWLKTSKKNDQQENIQSKSDRSKLDGLYECIMCACCSTSCPSYWWNGDKYLGPAVLLQAYRWIMDSRDEDRKERLNKVADELKLYRCHTIMNCTNACPKGLNPAKAIASIKKMLATS

SEQ ID NO: 97745 - protein, 257 aa, Unknown
  Bacterial polypetide isolated from the Sargasso Sea
MVQINLPKNSKVQKGKFYKDKTGSKNIRKVNIYRWDPSSGENPRIDTYEVDMDNCPSKVLDLLNKIKNEIDPSIAYRRSCAHGVCGSCAMNMDGKNGLACTKPHKEIKGDINIYPLPHLKVQKDLIGDLSTLYKQYESVEPWLKVSKKDENKENLQSIEDRSKLDGLYECIMCACCSTSCPSYWWNGDKYLGPAVLLQAYRWIIDSRDEDRKERLKKVADELKLYRCHTIMNCTNACPKGLNPAKAIASIKKMLATS

SEQ ID NO: 97746 - protein, 257 aa, Unknown
  Bacterial polypetide isolated from the Sargasso Sea
MVQINLPENSKVQKGEYYKDKTGSKNIRKVNVYRWDPSKNENPRIDTYEVDMDNCPSKVLDILNKIKNELDPSLAYRRSCAHGVCGSCAMNMNGKNGLACTKAHSELDGDINIYPLPHLKVLKDLIGDLSTLYKQYESVEPWLKTSKKNMDSENLQSVEDRAKLDGLYECIMCACCSTSCPSYWWNGDKYLGPAVLLQAYRWIIDSRDEERKERLKKVADELKLYRCHTILNCTNACPKDLNPAKAIAEIKKMLATT

SEQ ID NO: 97747 - protein, 203 aa, Unknown
  Bacterial polypetide isolated from the Sargasso Sea
CPSKVLDLLNKIKNEIDSSIAYRRSCAHGVCGSCAMNMDGKNGLACTKPHNEIKGDINIYPLPHLRVQKDLIGDLSTLYKQYASVEPWLKNSKKDDSKENLQSIEDRSKLDGLYECIMCACCSTACPSYWWNGDKYLGPAVLLQAYRWIIDSRDEERKERLKKVADELKLYRCHTIMNCTNACPKGLNPAKAIASIKKMLATS

SEQ ID NO: 97748 - protein, 215 aa, Unknown
  Bacterial polypetide isolated from the Sargasso Sea
PRIDTYEVDMDNCPSKVLDLLNKIKNEIDPSIAYRRSCAHGVCGSCAMNMDGKNGLACTKSHKEIKGDINIYPLPHLRVQKDLIGDLSTLYRQYESVEPWLKTSKKDETKENLQSIEDRSKLDGLYECIMCACCSTSCPSYWWNGDKYLGPAVLLQAYRWIIDSRDEERKERLKKVADELKLYRCHTIMNCTNACPKGLNPAKAIASIKKMLATS

SEQ ID NO: 97749 - protein, 253 aa, Unknown
  Bacterial polypetide isolated from the Sargasso Sea
MPQNSKILKGKHYKDETGSNNLKKVNVYRWDPSKSENPRIDTFEVDMNECGPKVLDILFKIKNEIDPSLTFRRSCAHGVCGSCAMNIDGVNTLSCIKSHLDIKGELNVYPLPHLKVVKDLVGDLTTLYKQYESVEPWLKTKVGEKTTQEIKQSQEDREKLDGYYECILCACCSTACPSYWWNGDKYLGPAVLLQAYRWINDSRDEDKKERLKKVADELKLYRCHTIMNCTNSCPKGLNPAKAIGSIKKMLATS

SEQ ID NO: 97750 - protein, 424 aa, Unknown
  Bacterial polypetide isolated from the Sargasso Sea
TEFGEGPPVQRTCAAADRTGHAILHTLYGQSLKNNAEFFIEYFAIDLIMTEDGICQGIIAWNLDDGTLHRFNAKMVVLATGGYGRAYFSATSAHSCTGDGNGMVARQGLPLQDMEFVQFHPTGIYGAGCLITEGARGEGGYLTNSDGERFMERYAPTYKDLASRDVVSRCMTMEIRDGRGVGSEKDHIFLHLNHLPPETLAERLPGISESARVFAGVDVNKDPIPVLPTVHYNMGGIPTNYWGEVISPNGEDQNKILPGLMAVGEAGCASVHGANRLGSNSLIDLVVFGRAAAIKAAEVIDKNESNRPLNKNSVDQAIGRLDGLRFSKGTTPTAELRLKMQKTMQSDAAVFRSDRTLSDGCEKMADIAAGIDYVNVTDKSMIWNTDLMETLELTNLMPNALATIVSAEARKESRGAHAQEDHPD

SEQ ID NO: 97751 - protein, 257 aa, Unknown
  Bacterial polypetide isolated from the Sargasso Sea
MVQINLPANSKVQKGEYYKDKTGSKNIRKVNVYRWDPSKNENPRIDTYEVDMDNCPSKVLDILNKIKNELDPSIAYRRSCAHGVCGSCAMNMNGKNGLACTKSHSELDGDINIYPLPHLKVLKDLIGDLSTLYKQYESVEPWLKTSKKNIESENLQSIEDRAKLDGFYECIMCACCSTSCPSYWWNGDKYLGPAVLLQAYRWIIDSRDEERKERLKKVADELKLYRCHTILNCTNACPKDLNPAKAIAEIKKMLATT

SEQ ID NO: 97752 - protein, 175 aa, Unknown
  Bacterial polypetide isolated from the Sargasso Sea
SLCSCAMNVDGVNTLSCIKSHSDIKGALNIYPLPHLRVVKDLVGDLSTLYKQYESVDPWLKAKVGEKTSNEIKQSQEDRAKLDGYYECILCACCSTSCPSYWWNGDKYLGPAVLLQAYRWITDSRDEERKERLKKVADELKLYRCHTIMNCTNSCPKGLNPAKAIGSIKKMLASN

SEQ ID NO: 97753 - protein, 257 aa, Unknown
  Bacterial polypetide isolated from the Sargasso Sea
MVQINLPKKSEIKKGHYYKDKTGSKNIRKVNIYRWDPATGENPRIDTYEVDMDNCPSKVLDLLNKIKNEIDPSLAYRRSCAHGVCGSCAMNMDGKNGLACTKPHSEINGDINIYPLPHLKVLKDLIGDLSTLYKQYESVQPWLKTTKRIDDTEHHQSKEDRSKLDGLYECIMCACCSTSCPSYWWNGEKYLGPAVLLQAYRWIIDSRDEDRKERLKKVADELKLYRCHTIMNCTNACPKGLNPAKAIASIKKMLATS

SEQ ID NO: 97754 - protein, 258 aa, Unknown
  Bacterial polypetide isolated from the Sargasso Sea
MAQFSLPQNSKIEVGNYFKDKTNSKNLRKINVYRWDPSTGKNPRVDTFEVDMDNCGPKVLDILFKIKNEIDPSLTFRRSCAHGVCGSCAMNIDGVNGLACIKSHTDISGDLNIYPLPHLKVVKDLIGDLTTLYKQYESIQPWLKVDQTGQEKIELKQSQKDREKLDGYYECILCACCSTSCPSYWWNGDKYLGPAVLLQAYRWINDSRDGDKKERLKKVADELKLYRCHTIMNCTNSCPKGLNPAKAIGSIKKMLATS

SEQ ID NO: 97755 - protein, 200 aa, Unknown
  Bacterial polypetide isolated from the Sargasso Sea
MDILNKIKNEIDPTLAYRRSCAHGVCGSCAMNMDGKNGLACTTPHKEIDGDINIYPLPHLKVKKDLIGDLDGLYKQYQSIEPWLKSNSKSETKEIFQSKEDRAKLDGAYECIMCACCSTSCPSYWWNGDKYLGPAVLLQAYRWIIDSRDEERTSRLKKVADELKLYRCHTILNCTSACPKGLNPAKAIAEIKKMLATANI

SEQ ID NO: 97756 - protein, 142 aa, Unknown
  Bacterial polypetide isolated from the Sargasso Sea
MPHLKVQKDLIGDLSTLYKQYASVEPWLKNSKKDDAKENIQSIEDRSKLDGLYECIMCACCSTSCPSYWWNGDKYLGPAVLLQAYRWIIDSRDEERKERLKKVADELKLYRCHTIMNCTNACPKGLNPAKAIASIKKMLATS

SEQ ID NO: 97757 - protein, 234 aa, Unknown
  Bacterial polypetide isolated from the Sargasso Sea
MIIYRWNPEDKKNPRLDTYEIDQSKCGPMVLDALMKIKNEIDPTLTFRRSCREGVCGSCAMNIDGVNTLACLKSMSDVKNEIKIYPLPHMRVVKDLVPDLSKAYEQLASIKPWLQREQTNGIKKNSTDEKKQSPKDREKLDGKWECVLCFCCTTSCPSYWWNGDEYLGPAVLLQAARWVEDSRDSERKERLKAINDSLKLYRCHSIMNCTRSCPKGLNPAKEIAGLKKAIVTEL

SEQ ID NO: 97758 - protein, 259 aa, Unknown
  Bacterial polypetide isolated from the Sargasso Sea
MVQLNLPENSKVKKGKYFKDRTGSKNLKKVNIYRWDPSSGENPRIDTYEVDMDNCSSKVLDILNKIKNEIDPTLAYRRSCAHGVCGSCAMNMGGKNGLACTKPHSEIDGDIDIYPLPHLKVRKDLIGDLDGLYKQYKSIEPWLKSNSKSESEEIFQSKEDRKKLDGAYECIMCACCSTSCPSYWWNGDKYLGPAVLLQAYRWIIDSRDDEKQARLKKVADELKLYRCHTILNCTSACPKGLNPAKAIAEIKKMLATANI

SEQ ID NO: 97759 - protein, 254 aa, Unknown
  Bacterial polypetide isolated from the Sargasso Sea
MPKNSEVNKGKYFKDKTGSKNIRKVNVYRWDPSTEENPRIDTYEVDMDNCPSKVLDILNKIKNEIDPTLAYRRSCAHGVCGSCAMNMGGKNGLACTKPHAEIDGDIDIYPLPHLKVKRDLIGDLDGLYKQYESIEPWLKNNSTKETTEIFQSKEDRAKLDGAYECIMCACCSTSCPSYWWNGDKYLGPAVLLQAYRWIVDSRDDERKARLKKVADELKLYRCHTILNCTSACPKGLNPAKAIAEIKKMLATANV

SEQ ID NO: 97760 - protein, 257 aa, Unknown
  Bacterial polypetide isolated from the Sargasso Sea
MVQINLPQNSKVEKGKYYKDKTGSKNIRKVNIYRWDPSTGGNPRIDTYEVDMDNCPSKVLDLLNKIKNEIDPSIAYRRSCAHGVCGSCAMNMDGKNGLACTKPHKEIKGDINIYPLPHLKVQKDLIGDLSTLYKQYQSVEPWLKVSKKNDNGENLQSIEDRSKLDGLYECIMCACCSTSCPSYWWNGDKYLGPAVLLQAYRWIIDSRDEDRKERLKKVADELKLYRCHTIMNCTNACPKGLNPAKAIASIKKMLATS

SEQ ID NO: 97761 - protein, 257 aa, Unknown
  Bacterial polypetide isolated from the Sargasso Sea
MVQINLPQNSKVEKGEYYKDRTGSKNIRKVNIYRWDPSTGKNPRIDTYEVDMDNCPSKVLDLLNKIKNEIDPSIAYRRSCAHGVCGSCAMNMDGKNGLACTKPHSEIKGDINIYPLPHLKVQKDLIGDLNTLYKQYHSVEPWLKNSKKNDNKENLQSIEDRSKLDGLYECIMCACCSTACPSYWWNGDKYLGPAVLLQAYRWIIDSRDEERKQRLEKVADELKLYRCHTILNCTNACPKGLNPAKAIAEIKKMLATS

SEQ ID NO: 97762 - protein, 257 aa, Unknown
  Bacterial polypetide isolated from the Sargasso Sea
MVQIRLPEKSKVKKGNYYKDKTGSKNLRKVNVYRWDPSTEENPRIDTYEVDMDNCPSKVLDILNKIKNEIDPSIAYRRSCAHGVCGSCAMNMDGKNGLACTKSHSEIKGDINIYPLPHLKVLKDLIGDLSTLYKQYESVEPWLKNSKNISEKENLQSKEDRAKLDGLYECIMCACCSTSCPSYWWNGEKYLGPAVLLQAYRWIIDSRDEDRKARLKKVADELKLYRCHTIMNCTNACPKGLNPAKAIASIKKMLATS

SEQ ID NO: 97763 - protein, 262 aa, Unknown
  Bacterial polypetide isolated from the Sargasso Sea
MAQFTLPANSKITKGKTHQLKEPANDPKKLAIYRWDPEDDKNPRIDNYEIDQEKCGPMVLDALMKIKNEIDPTLTFRRSCREGVCGSCAMNIDGVNTLACLKSMSDVKNEIKIYPLPHMRVVKDLVPDLSKAYEQLASIKPWLQREKTNEEKNSGDEKKQSPKDREKLDGKWECVLCFCCTTSCPSYWWNGDEYLGPAVLLQAARWVSDSRDSERKERLKAINDSLKLYRCHSIMNCTRSCPKGLNPAKEIAGLKKAIVTEL

SEQ ID NO: 97764 - protein, 256 aa, Unknown
  Bacterial polypetide isolated from the Sargasso Sea
MVQLNLPANSKVEKGQYYKDKTGSKNIRKVNVYRWDPSTNENPRLDTYEVDMDNCSSKVLDVLNKIKNEIDPSIAYRRSCAHGVCGSCAMNMNGKNGLACTKSHSELNGDIDIYPLPHLKVLKDLIGDLSTLYKQYESVEPWLKTSKVNDKENIQSKDDRAKLDGLYECIMCACCSTSCPSYWWNGEKYLGPAVLLQAYRWIIDSRDEDRKERLKKVADELKLYRCHTILNCTNACPKGLNPAKAIAEIKKMLATA

SEQ ID NO: 97765 - protein, 259 aa, Unknown
  Bacterial polypetide isolated from the Sargasso Sea
MAQIGLPDNSKVKKGKYFKDKTGSKNLRKVNVYRWDPSTEENPRIDTYEVDMDNCPSKVLDILNKIKNEIDPTLAYRRSCAHGVCGSCAMNMDGKNGLACTTPHKEIDGDINIYPLPHLKVKKDLIGDLDGLYKQYQSIEPWLKSNSKSETKEIFQSKEDRAKLDGAYECIMCACCSTSCPSYWWNGDKYLGPAVLLQAYRWIIDSRDEERNSRLKKVADELKLYRCHTILNCTSACPKGLNPAKAIAEIKKMLATANI

SEQ ID NO: 97766 - protein, 258 aa, Unknown
  Bacterial polypetide isolated from the Sargasso Sea
MVQFNLPDNSKLTDGDYYKSEKSNGNTKKFKIYRWSPDDEKNPRMDTYEVDLDDCGPMVLDAVMKIKSEIDTSLTFRRSCREGICGSCAMNIDGTNTLACTKAISDVKGDIKIYPLPHMPVIKDLVTNLKTLYKQLKSIKPWLMNKKQNANDTENIQSRNDREKLDGLYECILCACCSTSCPSYWWNSDKYLGPAVLLQSYRWLQDSRDEERKERLKELDDTFKVYRCHTIMNCTQACPKGLNPAKAIAGIKQMIAQQ

SEQ ID NO: 97767 - protein, 257 aa, Unknown
  Bacterial polypetide isolated from the Sargasso Sea
MVQLNLPQNSKVNKGKYFKDKTGSKNIRKVNVYRWDPSTGENPRIDTYEVDMDNCPSKVLDILNKIKNEIDPTLAYRRSCAHGVCGSCAMNMGGKNGLACTKPHAEIKGDIDIYPLPHLKVKKDLIGDLSGLYKQYQSIEPWLKNNSKSETTEIHQSPEDRAKLDGAYECIMCACCSTSCPSYWWNGDKYLGPAVLLQAYRWIMDSRDEDRKERLQKVADELKLYRCHTILNCTNACPKGLNPAKAIAEIKKMLATT

SEQ ID NO: 97768 - protein, 262 aa, Unknown
  Bacterial polypetide isolated from the Sargasso Sea
MAEFTLPKNSKIEKGEHFSADESAENIRTFHVYRYDPSDDSNPRVDTYEIDMDKCGPMVLDGLIKIKSDFDPSLTFRRSCREGICGSCSHNINGVNTLACIKPIKDLKGDIRIYPLPHMDVVKDLVVDLTDFYEGYSSVEPWLKSDTPAPEGSERLQSKEDQKKIDQPSACILCACCSTSCPSYWWNGDKYLGPAALLASYRWLQDSRDDAKKDRLKDLNDSSKLYRCHTIMNCSLACPKDLNPGQAIAEIKKMIATEDLNE

SEQ ID NO: 97769 - protein, 259 aa, Unknown
  Bacterial polypetide isolated from the Sargasso Sea
MVQINLPQNSKVQKGKYYKDQTGSKNIRKVNIYRWDPSTGENPRIDTYEVDMDNCPSKVLDLLNKIKNEIDPSIAYRRSCAHGVCGSCAMNMDGKNGLACTKPHKEIKGDINIYPLPHLKVQKDLIGDLSTLYKQYASVEPWLKNSKKDEDKENIQSIEDRSKLDGLYECIMCACCSTSCPSYWWNGDKYLGPAVLLQAYRWIIDSRDEERKERLKKVADELKLYRCHTIMNCTNACPKGLNPAKAIASIKKCLPQVNY

SEQ ID NO: 97770 - protein, 258 aa, Unknown
  Bacterial polypetide isolated from the Sargasso Sea
MVQFNLPDNSKLTDGDYYKLEAENKSIKKFKIYRWSPEDDKNPRMDTYEVDIDDCGPMVLDAVMKIKNEVDTSLTFRRSCREGICGSCAMNIDGTNTLACTKAISDVKGDVRIYPLPHMPVIKDLVTNLKNLYKQLKSIKPWLIKQKQEATDTENIQSRNDREKLDGLYECILCACCSTSCPSYWWNSDKYLGPAVLLQSYRWLQDSRDEERKERLKELDDTFKVYRCHTIMNCTQACPKGLNPAKAIAGIKQMIAQQ

SEQ ID NO: 97771 - protein, 231 aa, Unknown
  Bacterial polypetide isolated from the Sargasso Sea
FHIYRWEPDSGKNPRLDVYELNLDNFGPMILDAIIYIKNEIDSTLTFRRSCREGICGSCSMNIGGTNTLACTKSIASFDGDISIYPLPHMPVVKDLVPDLSNFYKQYASIKPWMQTETAAPENSERIQSKNDREKLDGLYECILCACCSTSCPSYWWNSKRYLGPAILLQAYRWIVDSRDKSTNKRLDKLEDSFSLYRCHTIMNCTNACPKGLNPAKAIAEIKKLLLSRIS

SEQ ID NO: 97772 - protein, 220 aa, Unknown
  Bacterial polypetide isolated from the Sargasso Sea
MVQFNLPQSSKIEVGKYYKDETNSKNLKKINVYRWDPSTKQNPRVDTFEVDMDNCGPKVLDILFKIKNEIDPSLTFRRSCAHGVCGSCAMNIDGVNTLACIKSHTDINGDLNVYPLPHLKVVKDLIGDLTTLYKQYESIKPWLQTEQTGKEKEEIKQSQKDREKLDGYYECILCACCSTSCPSYWWNGDKYLGPAVLLQAYRWINDSRDGDKKERLKKVA

SEQ ID NO: 97773 - protein, 256 aa, Unknown; identical to SEQ ID NO: 97764
  Bacterial polypetide isolated from the Sargasso Sea

SEQ ID NO: 97774 - protein, 253 aa, Unknown
  Bacterial polypetide isolated from the Sargasso Sea
MPNNSKIVKGEYYKDKTGSNNIKKVNVYRWNPDDGKNPRIDTFEVDMDNCGPKVLDILFKIKNEIDSSLTFRRSCAHGVCGSCAMNVDGVNTLSCIKSHSDIKGELNIYPLPHLKVVKDLIGDLSNLYKQYESIQPWLKTSKTDTEKQEILQSQKERSKLDGYYECILCACCSTSCPSYWWNGDKYLGPAVLLQAYRWISDSRDEEKKERLKKVADELKLYRCHTIMNCTNSCPKGLNPAKAIGSIKKMLATS

SEQ ID NO: 97775 - protein, 259 aa, Unknown
  Bacterial polypetide isolated from the Sargasso Sea
MVQINLPKNSQITKGRYFKDKTGSKNLRKVNIYRWDPSAGENPRIDTYEVDMENCPSKVLDILNKIKNEIDSTIAYRRSCAHGVCGSCAMNMDGKNGLACTTPHDEIKGDINIYPLPHLKVKKDLIGDLDGLYKQYQSIEPWLKTNSKSDTKEIIQSKKDREKLDGAYECIMCACCSTSCPSYWWNGDKYLGPAVLLQAYRWIIDSRDEERQARLKKVADELKLYRCHTILNCTSACPKGLNPAKAIAEIKKMLATANI

SEQ ID NO: 97776 - protein, 113 aa, Unknown
  Bacterial polypetide isolated from the Sargasso Sea
FTDEPNEEWLQSEADRKELDGLYECVMCACCSTSCPSYWWNGDKYLGPAALLHAYRWIIDSRDQDRKARLDELNDSFKLYRCHTIMNCAKACPKGLNPAKAIAEIKKLQLQNS

SEQ ID NO: 97777 - protein, 119 aa, Unknown
  Bacterial polypetide isolated from the Sargasso Sea
SVEPWLKTSKITEKENLQSKEDRAKLDGLYECIMCACCSTSCPSYWWNGEKYLGPAVLLQAYRWIIDSRDEERKQRLQKVADELKLYRCHTILNCTNACPKGLNPAKAIAEIKKMLATT

SEQ ID NO: 97778 - protein, 257 aa, Unknown
  Bacterial polypetide isolated from the Sargasso Sea
MVQINLPQNSKVQKGKYYKDKTGSKNIRKVNIYRWDPSSGENPRIDTYEVDMDNCPSKVLDLLNKIKNEIDPSISYRRSCAHGVCGSCAMNMDGKNGLACTKPHKEIKGDINIYPLPHLKVQKDLIGDLSILYKQYESVEPWLKISKKDEDKENLQSIEDRSKLDGLYECIMCACCSTSCPSYWWNGDKYLGPAVLLQAYRWIIDSRDEDRKERLKKVADELKLYRCHTIMNCTNACPKGLNPAKAIASIKKMLATG

SEQ ID NO: 97779 - protein, 231 aa, Unknown
  Bacterial polypetide isolated from the Sargasso Sea
KNFKVYRWNPDDKKNPQLDIFEINMDDCGPMVLDALIKIKNEIDPTLTFRRSCREGVCGSCAMNIDGTNTLACTKSIEDVKGEVSIFPLPHMHVVKDLVTDMKKLYEQYASIKPWLQSNSTDPSRERTQTKEERAKLDGLWECILCACCSTSCPSYWWNPDRYLGPAVLLQAYRWIADSRDEKTGERLDNLEDPFRLYRCHTIMNCTSACPKGLNPAKAIAQTKKLMHERR

SEQ ID NO: 97780 - protein, 235 aa, Unknown
  Bacterial polypetide isolated from the Sargasso Sea
VQKILEKLIFIDGIPQVGENPRIDSYEVDMDNCPQKVLDVLNKIKNEIDPSIAYRRSCAHGVCGSCAMNMDGKNGLACTKPHKEIKGEINIYPLPHLKVQKDLIGDLSTLYKQYESIEPWLKNSKKDDGKENLQTIKDRSKLDGLYECIMCACCSTSCPSYWWNGDKYLGPAVLLQAYRWIIDSRDEERKERLKKVADELKLYRCHTIMNCTNACPKGLNPAKAIASIKKMLATG

SEQ ID NO: 97781 - protein, 256 aa, Unknown
  Bacterial polypetide isolated from the Sargasso Sea
MVQLNLPANSKVEKGQYYKDKTGSKNIRKINIYRWDPSKNENPRLDTYEVDMDNCSSKVLDVLNKIKNEIDPSIAYRRSCAHGVCGSCAMNMNGKNGLACTKSHSELDGDIDIYPLPHLKVLKDLIGDLSTLYKQYESVEPWLKTSKVNDKENIQSKNDRAKLDGLYECIMCACCSTSCPSYWWNGEKYLGPAVLLQAYRWIIDSRDEDRKERLKKVADELKLYRCHTILNCTNACPKGLNPAKAIAEIKKMLATA

SEQ ID NO: 97782 - protein, 122 aa, Unknown
  Bacterial polypetide isolated from the Sargasso Sea
YESVEPWLKNKSHSSQKENLQSKEDRAKLDGLYECIMCACCSTSCPSYWWNGEKYLGPAVLLQAYRWIIDSRDEDRKERLKKVADELKLYRCHTIMNCTNACPKGLNPAKAIASIKKMLATS

SEQ ID NO: 97783 - protein, 259 aa, Unknown
  Bacterial polypetide isolated from the Sargasso Sea
MVQINLPKNSEIKKGNYYKDKTGSNNIRKINVYRWDPSTEENPRIDTYEVDMDNCPSKVLDILNKIKNEIDPTLAYRRSCAHGVCGSCAMNMGGKNGLACTKSHKEIDGDIDIYPLPHLKVKKDLIGDLDGLYKQYQSIEPWLKNNSKKERTEITQSKEDRAKLDGAYECIMCACCSTSCPSYWWNGDKYLGPAVLLQAYRWIIDSRDEERKERLKKVADELKLYRCHTILNCTSACPKGLNPAKAIAEIKKMLATTNV

SEQ ID NO: 97784 - protein, 585 aa, Unknown
  Bacterial polypetide isolated from the Sargasso Sea
MRRAVGRSTCARAARAVWDASEGRGVASASASASGTGTGTDESAHRHQRHHHHRRHDRSVATSSSSSTASAWGRANRGYASATPSCEIIDHEYDALVVGAGGAGLRAAIGLGEHGFKTACVTKLFPTRSHTVAAQGGINAALGNMTEDDWRWHAYDTVKGADWLGDQDAIQYMCREAPKAVIELEKYGMPFSRTDEGKIYQRAFGGQSLDYGKGGQAYRCAAAADRTGHAMLHTLYGAALKHDVQFFVEYFALDLIMDKGECVGVMALCLEDGTIHRFRSHQTILATGGYGRAYFSATSAHTCTGDGNAMVARAGLPLQDQEFVQFHPTGIYGAGCLITEGSRGEGGILRNSEGERFMERYAPSAKDLASRDVVSRSMTLEIREGRGVGKDKDHIYLHLNHLPPELLAERLPGISETAAIFAGVDVTKEPIPVIPTVHYNMGGIPTNYKGEVVAPKNGDPDAIVPGLLAAGEAACASVHGANRLGANSLLDIVVFGRACANTVAGKLKQGAPHRKIADDAGSNAIERLEKIRNSKGTAPTAMLRKTMQKVMQEDAAVFRTQETLANGCTRIDDVAAQLDNLKLTD

SEQ ID NO: 97785 - protein, 238 aa, Unknown
  Bacterial polypetide isolated from the Sargasso Sea
QGSKNLKKVNIYRWDPSSGENPRIDTYEVDMDNCPSKVLDILNKIKNEIDSTIAYRRSCAHGVCGSCAMNMGGKNGLACTKPHSEIDGDIDIYPLPHLKVKKDLIGDLDGLYRQYQSIEPWLKTNSKSEKTEITQSKEDRAKLDGAYECIMCACCSTSCPSYWWNGDKYLGPAVLLQAYRWIVDSRDEEREARLKKVADELKLYRCHTILNCTNACPKGLNPAKAIAEIKKMLATASL

SEQ ID NO: 97786 - protein, 218 aa, Unknown
  Bacterial polypetide isolated from the Sargasso Sea
KMKNPEIDTMKVDMDNCSSKVLDILNKIKNEIDPSIAYRRSCAHGVCGSCAMNMNGKNGLACTKSHSELDGDIDIYPLPHLKVLKDLIGDLSTLYKQYESVEPWLKTTKINDKENIQTKEDRAKLDGLYECIMCACCSTSCPSYWWNGEKYLGPAVLLQAYRWIIDSRDEDRKERLKKVADELKLYRCHTILNCTNACPKGLNPAKAIAEIKKMLATA

SEQ ID NO: 97787 - protein, 115 aa, Unknown
  Bacterial polypetide isolated from the Sargasso Sea
IKQKQEATDTENIQSRNDREKLDGLYECILCACCSTSCPSYWWNSDKYLGPAVLLQSYRWLQDSRDEERKERLKELDDTFKVYRCHTIMNCTQACPKGLNPAKAIAGIKQMIAQQ

SEQ ID NO: 97788 - protein, 256 aa, Unknown
  Bacterial polypetide isolated from the Sargasso Sea
MVQINLPKNSKIQKGKYYKDNTGSNNIRKVNVYRWDPSTEENPRIDTYEVDMNNCPSKVLDILNKIKNEIDPSLAYRRSCSHGVCGSCAMNMDGKNGLACTKSHSEIKGDINIYPLPHLKVLKDLIGDLSILYKQYESVEPWLKTSKKSEKENIQSMEDRSKLDGLYECIMCACCSTACPSYWWNGEKYLGPAVLLQAYRWIIDSRDEDRKERLKKVADELKLYRCHTIMNCTNACPKGLNPAKAIASIKKMLATS

SEQ ID NO: 97789 - protein, 258 aa, Unknown
  Bacterial polypetide isolated from the Sargasso Sea
MVQFSLPQNSKILKGKYYKDKSGSNNLKKVNVYRWDPSTKENPRIDTFEVNMNECGPKVLDILFKIKNEIDPSLTFRRSCAHGVCGSCAMNVDGVNTLSCTKSHSDIRGDLNIYPLPHLKVVKDLVGDLTTLYKQYETVEPWLKTKVGQKTNKEIKQSQEDRAKLDGYYECILCACCSTACPSYWWNGDKYLGPAVLLQAYRWINDSRDEDKKERLKKVADELKLYRCHTIMNCTNSCPKGLNPAKAIGSIKKMLATG

SEQ ID NO: 97790 - protein, 257 aa, Unknown
  Bacterial polypetide isolated from the Sargasso Sea
MVQINLPQNSKVQKGKYYKDKTGSKNIRKVNIYRWDPSTGENPRIDTYEVDMENCPSKVLDLLNKIKNEIDPSIAYRRSCAHGVCGSCAMNMDGKNGLACTKPHKDIKGDINIYPLPHLKVQKDLIGDLSTLYKQYQSVEPWLKNSKKDEGKENLQSVEDRSKLDGLYECIMCACCSTACPSYWWNGDKYLGPAVLLQAYRWIIDSRDEDRKERLKKVADELKLYRCHTIMNCTNACPKGLNPAKAIASIKKMLATS

SEQ ID NO: 97791 - protein, 258 aa, Unknown
  Bacterial polypetide isolated from the Sargasso Sea
MVQFSLPQNSKILKGKYHKDKTGSNNLKKVNVYRWSPSSNDNPRIDTFEVDLNECGPKVLDVLFKIKNEIDPTLTFRRSCAHGVCGSCAMNVDGVNTLSCIKSHSDIKGELNIYPLPHLKVIKDLVGDLTTLYKQYESVEPWLKSKVGEKTSTEIKQSQEDRAKLDGYYECILCACCSTSCPSYWWNGDKYLGPAVLLQAYRWITDSRDEERKERLKKVADELKLYRCHTIMNCTNSCPKGLNPAKAIGSIKKMLASS

SEQ ID NO: 97792 - protein, 118 aa, Unknown
  Bacterial polypetide isolated from the Sargasso Sea
TLVEVDQTGQEKTELKQSQKDREKLDGYYECILCACCSTSCPSYWWNGDKYLGPAVLLQAYRWINDSRDGDKKERLKKVADELKLYRCHTIMNCTNSCPKGLNPAKAIGSIKKMLATS

SEQ ID NO: 97793 - protein, 258 aa, Unknown
  Bacterial polypetide isolated from the Sargasso Sea
MVQFSLPQNSKILKGKYHKDKTGSNNLKKVNVYRWSPSSDENPRIDTFEIDLNECGPKVLDVLFKIKNEIDPSLTFRRSCAHGVCGSCAMNVDGVNTLSCIKSHSDIKGELNIYPLPHLKVIKDLVGDLTTLYKQYESVEPWLKAKVGEKTPTEIKQSQEDRAKLDGYYECILCACCSTSCPSYWWNGDKYLGPAVLLQAYRWITDSRDEERKERLKKVADELKLYRCHTIMNCTNSCPKGLNPAKAIGSIKKMLASS

SEQ ID NO: 97794 - protein, 305 aa, Unknown
  Bacterial polypetide isolated from the Sargasso Sea
MNNINTIEFDALIIGGGGSGMRASLELAKSGLKTAVVSKVFPTRSHTVSAQGGITCAIASADPNDDWRWHMYDTVKGADFIGDQDAIEYLCSEGPKAVFELEHMGLPFSRFENGRIYQRPFGGQSKDFGKGGQASRTCAAADRTGHALLHTLYQNNVKEGANFLNEWFAVDLVKNSKDEVTGVIAFSIENGEVAYLKAQATVLATGGAGRIYASTTNALINTGDGLAMALRAGYPAQDMEMWQFHPTGIYGAGSLVTEGCRGEGGYLINKDGERFMERYAPNVKDLAGRDVVARSMVLEILEGRG

SEQ ID NO: 97795 - protein, 201 aa, Unknown
  Bacterial polypetide isolated from the Sargasso Sea
MAQFSLPENSKIIKGDYYKDKTGSNNIKKVNVYRWNPEDGKNPRTDTFEVDMNNCGPKVLDILFKIKNEIDPSLTFRRSCAHGVCGSCAMNVDGVNTLSCIKSHSDIKGDLNIYPLPHLKVIKDLIGDLSNLYKQYESIQPWLKTSKTDSEKKEILQSQKDRSKLDGYYECILCACCSTSCPSYWWNGDKYLGPAVLYKLI

SEQ ID NO: 97796 - protein, 257 aa, Unknown
  Bacterial polypetide isolated from the Sargasso Sea
MVQINLPKNSKVQKGKFYKDKTGSKNIRKVNIYRWDPSSGENPRIDTYEVDMDNCPSKVLDLLNKIKNEIDPSIAYRRSCAHGVCGSCAMNMDGKNGLACTKPHKEIKGDINIYPLPHLKVQKDLIGDLSSLYKQYESVEPWLKISKKDEGKENLQSIEDRSKLDGLYECIMCACCSTSCPSYWWNGDKYLGPAVLLQAYRWIIDSRDEDRKERLKKVADELKLYRCHTIMNCTNACPKGLNPAKAIASIKKMLATG

SEQ ID NO: 97797 - protein, 186 aa, Unknown
  Bacterial polypetide isolated from the Sargasso Sea
MAYRRSCAHGVCGSCAMNMGGKNGLACTKPHAEIDGDIDIYPLPHLKVKRDLIGDLDGLYKQYQSIEPWLKNNSSKDTNEIFQSKEDRAKLDGAYECIMCACCSTSCPSYWWNGDKYLGPAVLLQAYRWIVDSRDDERKARLKKVADELKLYRCHTILNCTSACPKGLNPAKAIAEIKKMLATANV

SEQ ID NO: 97798 - protein, 175 aa, Unknown
  Bacterial polypetide isolated from the Sargasso Sea
MNIDGVNTLACLKPIEEVNGEIRIYPLPHMPVVKDLVPDLSKAYEQLASIKPWLQRSNDNSNTAVSISEEKKQTPEDREKLDGQWECVLCFCCTTACPSYWWNSDEYLGPAVLMQAARWVNDSRDSERKNRLKAVNDKMKLYRCHSIMNCTRSCPKGLNPAKAIADLKKAIVTEL

SEQ ID NO: 97799 - protein, 259 aa, Unknown
  Bacterial polypetide isolated from the Sargasso Sea
MVQISLPENSKTKKGKYFKDKTGSKNLRKVNIYRWDPSSGESPRVDTYEVDMNNCPSKVLDILNKIKNEIDPTLAYRRSCAHGVCGSCAMNMGGKNGLACTTPHENIDGDIDIYPLPHLKVKKDLIGDLDGLYKQYKSIEPWLKSSSKSESAELIQSKEDRAKLDGAYECIMCACCSTSCPSYWWNGDKYLGPAVLLQAYRWIIDSRDEERQARLKKVADELKLYRCHTILNCTSACPKGLNPAKAIAEIKKMLATANI

SEQ ID NO: 97800 - protein, 257 aa, Unknown
  Bacterial polypetide isolated from the Sargasso Sea
MVQINLPQNSKVQKGKYYKDKTGSKSLRKVNIYRWDPSTGENPRIDTYEVDMDNCPSKVLDLLNKIKNEIDPSLAYRRSCSHGVCGSCAMNMDGKNGLACTKPHDEIKGDINIYPLPHLKVLKDLIGDLSTLYRQYESIEPWLKNTSNKNEKENLQTKEDRSKLDGLYECIMCACCSTSCPSYWWNGEKYLGPAVLLQAYRWIIDSRDEDREERLKKVADELKLYRCHTIMNCTNACPKGLNPAKAIAEIKKMLVTG

SEQ ID NO: 97801 - protein, 259 aa, Unknown
  Bacterial polypetide isolated from the Sargasso Sea
MVQLSLPKNSEIKKGKYFKDKTGSKNLRKVNIYRWDPSTDEGPRIDTYEVDMDNCPSKVLDILNKIKNEIDSTITYRRSCAHGVCGSCAMNMGGKNGLACTTPHAEIEGDIDIYPLPHLKVKKDLIGDLDGLYKQYQSIEPWLKNNSTKETTEIYQSKEDRAKLDGAYECIMCACCSTSCPSYWWNGDKYLGPAVLLQAYRWIIDSRDEERKVRLKKVADELKLYRCHTILNCTNACPKGLNPAKAIAEIKKMLATANV

SEQ ID NO: 97802 - protein, 256 aa, Unknown
  Bacterial polypetide isolated from the Sargasso Sea
MVKFNLPQSSKIEVGKFYKDKTNSKNLKKVNVYRWDPSNGQNPRIDTFEVDMNNCGPKVLDILFKIKNEIDPSLTFRRSCAHGVCGSCAMNIDGVNTLACIKSHTDINGDLNVYPLPHLKVVKDLIGDLTTLYKQYESIKPWLQTEQTGKEKEEIRQSQKDREKLDGYYECILCACCSTSCPSYWWNGDKYLGPAVLLQAYRWINDSRDGDKKERLKKVADELKLYRCHTIMNCTNYCPKGLNPAKAIGSIKKMLQ

SEQ ID NO: 97803 - protein, 188 aa, Unknown
  Bacterial polypetide isolated from the Sargasso Sea
IDPSIAYRRSCAHGVCGSCAMNMDGKNGLACTKPHSEIKGDINIYPLPHLKVLKDLIGDLSTLYKQYESVEPWLKTSKKNDEKENLQSKKDRAKLDGLYECIMCACCSTSCPSYWWNGEKYLGPAVLLQAYRWIIDSRDEDRKARLKKVADELKLYRCHTIMNCTNACPKGLNPAKAIASIKKMLATS

SEQ ID NO: 97804 - protein, 187 aa, Unknown
  Bacterial polypetide isolated from the Sargasso Sea
RSCREGVCGSCAMNIDGVNTLACLKPIEEVSGEIRIYPLPHMPVVKDLVPDLTKAYDQLASIKPWLIRSKETTNLDKNNSEENKQSPKEREKLDGQWECVLCFCCTTSCPSYWWNSDEYLGPAVLMQAARWVNDSRDSERKSRLKAVNDSMKLYRCHSIMNCTRSCPKGLNPAKAIADLKKAIVTEL

SEQ ID NO: 97805 - protein, 257 aa, Unknown
  Bacterial polypetide isolated from the Sargasso Sea
MVQINLPQNSKVRKGKYYKDKTGSQNIRKVNIYRWDPSSDENPRIDTYEVDMDNCPSKVLDLLNKIKNEIDSSISYRRSCAHGVCGSCAMNMDGKNGLACTKPHNEIKGDINIYPLPHLKVQKDLIGDLSTLYKQYESVEPWLKISKKDEDKENLQSIEDRSKLDGLYECIMCACCSTSCPSYWWNGDKYLGPAVLLQAYRWIIDSRDEDRKERLKKVADELKLYRCHTIMNCTNACPKGLNPAKAIASIKKMLATG

SEQ ID NO: 97806 - protein, 323 aa, Unknown
  Bacterial polypetide isolated from the Sargasso Sea
MSTNEYKFIDHKYDVVVVGAGGAGLRATLGCAESGLKTACISKVFPTRSHTVAAQGGISAALGNMGEDNWRWHMYDTVKGADWLGDQDAIEYLCKNSPEAVYELEHFGVPFSRTEEGKIYQRPFGGMTTEYGEGPPAQRTCAAADRTGHAILHTLYGKSISNSADFFIEYFAIDLIMSESGKCVGVVALCMETGELHRFHSSQTILATGGYGRAYFSATSAHTCTGDGSAMVLRAGLPLQDMEFVQFHPTGIYGAGCLITEGCRGEGGYLVNSEGERFMERYAPKAKDLASRDVVSRAMTIEIREGRGVGEDKDHIFLHLDHI

SEQ ID NO: 97807 - protein, 259 aa, Unknown
  Bacterial polypetide isolated from the Sargasso Sea
MVQINLPQNSEVKKGKYFKDKTGSKNLRRINIYRWDPSSGENPRVDTYEVDMDNCPSKVLDILNKIKNEIDPTLAYRRSCAHGVCGSCAMNIGGKNGLACTTPHKEINGDIDIYPLPHLKVKKDLIGDLDGLYKQYQSIEPWLKSNSKSQTKEIIQSKEDRAKLDGAYECIMCACCSTSCPSYWWNGDKYLGPAVLLQAYRWIIDSRDEERQVRLKKVADELKLYRCHTILNCTSACPKGLNPAKAIAEIKKMLATANI

SEQ ID NO: 97808 - protein, 259 aa, Unknown
  Bacterial polypetide isolated from the Sargasso Sea
MAQISLPKNSEVKKGKYFEDKTGSKNLRKVNIYRWDPSTGENPRIDTYEVDMDNCPSKVLDILNKIKNEIDPTLAYRRSCAHGVCGSCAMNMGGKNGLACTTPHAEIDGDIDIYPLPHLKVKKDLIGDLDGLYKQYQSIEPWLKNNSTKETTEIYQSKEDRAKLDGAYECIMCACCSTSCPSYWWNGDKYLGPAVLLQAYRWIIDSRDEERKARLKKVADELKLYRCHTILNCTNACPKGLNPAKAIAEIKKMLATANV

SEQ ID NO: 97809 - protein, 259 aa, Unknown
  Bacterial polypetide isolated from the Sargasso Sea
MAQLNLPKNSEVKKGKYFKDKTSSKNLRIVNVYRWDPSTEENPRIDTYEVDMDNCPSKVLDILNKIKNEIDPTLAYRRSCAHGVCGSCAMNMGGKNGLACTTPHSEIDGDIDIYPLPHLKVKRDLIGDLDGLYKQYQSIEPWLKNNSKKETKEIYQSQEDRAKLDGAYECIMCACCSTSCPSYWWNGDKYLGPAVLLQAYRWIVDSRDEERKARLKKVADELKLYRCHTILNCTNACPKGLNPAKAIAEIKKMLATANV

SEQ ID NO: 97810 - protein, 257 aa, Unknown
  Bacterial polypetide isolated from the Sargasso Sea
MVQINLPQNSQVKKGKYYKDKTGSKNIRKVNIYRWDPSTGENPRIDTYEVDMDNCPSKVLDLLNKIKNEIDPSIAYRRSCAHGVCGSCAMNMDGKNGLACTKPHKEIKGDINIYPLPHLKVQKDLIGDLSTLYKQYESVEPWLKVSKKKQDKENFQSIEDRSKLDGLYECIMCACCSTACPSYWWNGDKYLGPAVLLQAYRWIIDSRDEDRKERLKKVADELKLYRCHTIMNCTNACPKGLNPAKAIASIKKMLATS

SEQ ID NO: 97811 - protein, 213 aa, Unknown
  Bacterial polypetide isolated from the Sargasso Sea
MAEFSLPNNSKIVKGEYFKDKTGSSNLKKVNVYRWNPDDGKNPRIDTFEVDMDNCGPKVLDILFKIKNEIDSSLTFRRSCAHGVCGSCAMNVDGINTLSCIKSHSDIKGELNIYPLPHLKVIKDLIGDLSNLYKQYESIQPWLKTSKTDTEKQEILQSQKDRSKLDGYYECILCACCSTSCPSYWWNGDKYLGPAVLLQAYRWISDSRDEEKK

SEQ ID NO: 97812 - protein, 256 aa, Unknown
  Bacterial polypetide isolated from the Sargasso Sea
MVQINLPQNSKVEKGKFFKDKTGSKNIRKVNIYRWDPSTGENPRIDTYEVDMDNCPSKVLDLLNKIKNEIDPSIAYRRSCAHGVCGSCAMNMDGKNGLACTKPHSEIKGDINIYPLPHLRVLKDLIGDLSTLYKQYESVEPWLKTTSKTEKENIQSKEDRAKLDGLYECIMCACCSTSCPSYWWNGDKYLGPAVLLQAYRWIIDSRDEDRKERLKKVADELKLYRCHTIMNCTNACPKGLNPAKAIASIKKMLATS

SEQ ID NO: 97813 - protein, 258 aa, Unknown
  Bacterial polypetide isolated from the Sargasso Sea
MVQFSLPQNSKILKGKYYKDKSGSTNIKKVNVYRWSPSSKENPRIDTFEINIKECGPKVLDILFKIKNEIDPSLTFRRSCAHGVCGSCAMNVDGVNTLSCIKSHSDIKGDLNIYPLPHLKVVKDLVGDLSTLYKQYESVEPWLKTTAGEKTSVEIQQSQEDRAKLDGYYECILCACCSTSCPSYWWNGDKYLGPAVLLQAYRWITDSRDEERKARLKKVADELKLYRCHTIMNCTNSCPKGLNPAKAIASIKKMLATS

SEQ ID NO: 97814 - protein, 259 aa, Unknown
  Bacterial polypetide isolated from the Sargasso Sea
MVQLSLPKNSEVKKGKYFKDKTGSKNLRKVNIYRWDPSTEENPRIDTYEVNMDNCSSKVLDILNKIKNEIDPTLAYRRSCAHGVCGSCAMNMGGKNGLACTTPHAEIDGDIDIYPLPHLKVKRDLIGDLDGLYKQYQSIEPWLKNNSTKQTTEIYQSKEDRAKLDGAYECIMCACCSTSCPSYWWNGDKYLGPAVLLQAYRWIIDSRDEERKARLKKVSDELKLYRCHTILNCTNACPKGLNPAKAIAEIKKMLATANV

SEQ ID NO: 97815 - protein, 259 aa, Unknown
  Bacterial polypetide isolated from the Sargasso Sea
MVQISLPENSKTKKGKYFKDKTGSKNLRKVNVYRWDPSSGEGPRIDTYEVDMENCPSKVLDILNKIKNEIDPTLAYRRSCAHGVCGSCAMNMGGKNGLACTTPHENIDGDIDIYPLPHLKVKKDLIGDLDGLYKQYKSIEPWLKSSSKSESAELIQSKEDRAKLDGAYECIMCACCSTSCPSYWWNGDKYLGPAVLLQAYRWIIDSRDEERQARLKKVADELKLYRCHTILNCTSACPKGLNPAKAIAEIKKMLATANI

SEQ ID NO: 97816 - protein, 258 aa, Unknown
  Bacterial polypetide isolated from the Sargasso Sea
MAEFSLPNNSKILKGTYYKDKTGSKNIKKVNVYRWNPDDGKNPRIDTFEVDMDDCGPKVLDILFKIKNEIDSSLTFRRSCAHGVCGSCAMNVDGVNTLSCIKSHSDIKGELNIYPLPHLKVIKDLIGDLSNLYKQYESIQPWLKTSKTDTEKQEILQSQNDRAKLDGYYECILCACCSTSCPSYWWNGDKYLGPAVLLQAYRWISDSRDEEKKERLKKVADELKLYRCHTIMNCTNSCPKGLNPAKAIGSIKKMLATS

SEQ ID NO: 97817 - protein, 258 aa, Unknown
  Bacterial polypetide isolated from the Sargasso Sea
MVQINLPENSKIQKGKYYKDKTGSKNLRKVNVYRWDPSTDEKPRIDTYEIDMDNCPSKVLDILNKIKNEIDPSLAYRRSCAHGVCGSCAMNMDGKNGLACTKSHAEIKGDINIYPLPHLKVLKDLIGDLSTLYKQYESVQPWLKTSKKPEKENLQSREDRSKLDGLYECIMCACCSTSCPSYWWNGDKYLGPAVLLQAYRWIIDSRDEDRKERLKKVADELKLYRCHTIMNCTNACPKGLNPAKAIAEIKKMLATSNI

SEQ ID NO: 97818 - protein, 359 aa, Unknown
  Bacterial polypetide isolated from the Sargasso Sea
MSNTHNINGREYTFVDHTYDVVVVGAGGAGLRATLGCSEAGLKTACVTKLFPTRSHTVAAQGGVAAALGNMGEDDWKWHMYDTVKGADWLGDQDAIEYLCKEAPQAVYELEHFGLPFSRREDGKIYQRPFGGMTTHYGEGIAQRTCAAADRTGHAMLHTLYGKAISNSAEFFIEYFAIDLIMDKNGACLGVVALCLEDGTIHRFQAQKTILATGGYGRAYFSATSAHSCTGDGNAMVLRAGLPLQDMEFVQFHPTGIYGAGCLITEGSRGEGGYLTNSEGERFMERYAPSAKDLASRDVVSRSMTIEIREGRGVGKDKDHIHLHLEHLAPEVLAERLPGISETAKIFSGVDVTKEPIPV

SEQ ID NO: 97819 - protein, 262 aa, Unknown
  Bacterial polypetide isolated from the Sargasso Sea
MAEFTLPKNSKVEKGRYFSADKSATNLRKFHVYRYDPSDDSNPCVDTYEIDMDKCGPMVLDGLIKIKSDYDSSLTFRRSCREGICGSCSHNINGVNTLACIKPIKDLKGDIRIFPLPHMDVVKDLVVDLTNFYEGYSSVEPWLKSDTPAPDGSERLQSKEDQKKIDQPSACILCACCSTSCPSYWWNGDKYLGPAALLASYRWLQDSRDDAKKERLKELNDSSKLYRCHTIMNCSLACPKDLNPGQAIAEIKKMIATEDLNE

SEQ ID NO: 97820 - protein, 116 aa, Unknown
  Bacterial polypetide isolated from the Sargasso Sea
KNNSTKQTTEIYQSKEDRAKLDGAYECIMCACCSTSCPSYWWNGDKYLGPAVLLQAYRWIIDSRDEERKARLKKVSDELKLYRCHTILNCTNACPKGLNPAKAIAEIKKMLATANV

SEQ ID NO: 97821 - protein, 256 aa, Unknown
  Bacterial polypetide isolated from the Sargasso Sea
MVQINLPQNSKIEKGKYFKDKTGSKNIRKVNIYRWDPSTGKNPRIDTYEVDMDNCPSKVLDLLNKIKNEIDPSIAYRRSCAHGVCGSCAMNMDGKNGLACTKPHAEIKGDINIYPLPHLKVLKDLIGDLSTLYKQYESVEPWLKTTSKTEKENIQSKEDRAKLDGLYECIMCACCSTSCPSYWWNGDKYLGPAVLLQAYRWIIDSRDEDRKERLKKVADELKLYRCHTIMNCTNACPKGLNPAKAIASIKKMLATS

SEQ ID NO: 97822 - protein, 108 aa, Unknown
  Bacterial polypetide isolated from the Sargasso Sea
DTERLQSIDERARLDGMWECVLCFSCSTSCPSYWWNGERYLGPAVLLQAYRWIADSRDEYTGERLDNLEDPFRLYRCHTIMNCTKTCPKGLNPAKAIAEIKKMIVMRQ

SEQ ID NO: 97823 - protein, 257 aa, Unknown
  Bacterial polypetide isolated from the Sargasso Sea
MVQINLPHNSKVLKGDYYKDKTGSKNIRKVNIYRWDPSKNENPKIDTYEVDMDNCPSKVLDILNKIKNEIDPSIAYRRSCAHGVCGSCAMNMNGKNGLACTKSHSELEGDINIYPLPHLKVLKDLIGDLSTLYKQYESIEPWLKSSNKNNETENLQSIEDREKLDGLYECIMCACCSTSCPSYWWNGEKYLGPAVLLQAYRWIIDSRDEERKERLQKVADELKLYRCHTILNCTNACPKDLNPAKAIAEIKKMLATT

SEQ ID NO: 97824 - protein, 145 aa, Unknown
  Bacterial polypetide isolated from the Sargasso Sea
FPLPHLKVVKDLVADLSILYKQYESIEPWLKIKSSKSEKKEINQSKENREKLDGLYECIMCACCSTSCPSYWWNGESYLGPAVLLQAYRWISDSRDEEKKDRLKMVADKLKLYRCHTIMNCTSSCPKGLNPAKAIASIKKMLATS

SEQ ID NO: 97825 - protein, 259 aa, Unknown
  Bacterial polypetide isolated from the Sargasso Sea
MVQLSLPKNSEIKKGKYFKDKTGSKNLRKVNIYRWDPSTDEGPRIDTYEVDMDNCPSKVLDILNKIKNEIDSTITYRRSCAHGVCGSCAMNMGGKNGLACTTPHAEIDGDIDIYPLPHLKVKKDLIGDLDGLYKQYQSIEPWLKNNSTKETTEIYQSKEDRAKLDGAYECIMCACCSTSCPSYWWNGDKYLGPAVLLQAYRWIIDSRDEERKARLKKVADELKLYRCHTILNCTNACPKGLNPAKAIAEIKKMLATANV

SEQ ID NO: 97826 - protein, 261 aa, Unknown
  Bacterial polypetide isolated from the Sargasso Sea
MADFFLPKNSKIQEGKTYSFEGNKDSTKKLIIYRWDPEENENPRLDKYEVDLKNCGPMVLDALIKIKNEIDTTLTFRRSCREGVCGSCAMNIDGVNTLACLKPIEEIKKDIKIYPLPHMRVVKDLVPDLTDAYKQLESIKPWLQNDEEKKGKNPSKNIQKPEDRAKLDGSWECVLCFCCTTSCPSYWWNGDNYLGPAVLLQASRWINDTRDTKRKERLEEINDSLKLYRCHSIMNCTRSCPKGLNPAKAIADIKKAIVTEK

SEQ ID NO: 97827 - protein, 148 aa, Unknown
  Bacterial polypetide isolated from the Sargasso Sea
MNIYPLPHLKVVKDLIGDLSNLYKQYESIQPWLKTSKTDTEKQEILQSQKERSKLDGYYECILCACCSTSCPSYWWNGDKYLGPAVLLQAYRWISDSRDEEKKERLKKVADELKLYRCHTIMNCTNSCPKGLNPAKAIGSIKKMLATS

SEQ ID NO: 97828 - protein, 258 aa, Unknown
  Bacterial polypetide isolated from the Sargasso Sea
MSQFSLPKNSKILKGEFYEDKTGSDNIKKINVYRWNPDDGRNPRVDTFEVDMNNCGPKVLDILFKIKNEFDSSLTFRRSCAHGVCGSCAMNVDGVNTLSCIKSHSDIKGEINIYPLPHLKVVKDLIGDLSNLYKQYESIQPWLKTSKTKLEKEEILQSEKDRSKLDGYYECILCACCSTSCPSYWWNGEKYLGPAVLLQAYRWIADSRDEEKKERLKKVADEFKLYRCHTIMNCANSCPKGLNPAKAIGSIKKMLATS

SEQ ID NO: 97829 - protein, 264 aa, Unknown
  Bacterial polypetide isolated from the Sargasso Sea
SLLPKNSVPVKGKSYSNVDLIDEQAQQNHDIRIVNVYRWSGEEGSPPQIDRFEIDVAKAGTMVLDILNKIKAEVDPSLTFRKSCREGVCGSCAMNIDGVNTLACQKHIEECSDEINIYPLPHMKVLKDLVVDLKKAFEQFKSIKPWLNKKSPNNERENIQSVEDRDKLDGKWECVMCFSCSTSCPSYWWNEDEYLGPAVLLQANRWIKDSRDEEKKERLNELDDSLKLYRCHSIMNCTNSCPKGLNPAKAIAEIKYEISKMDNK

SEQ ID NO: 97830 - protein, 257 aa, Unknown
  Bacterial polypetide isolated from the Sargasso Sea
MVQINLPKNSKIQKGKYFKDTTGSKNIRKVNIYRWDPSTGENPRIDTYEVDMDNCPSKVLDLLNKIKNEIDPTIAYRRSCAHGVCGSCAMNMDGKNGLACTKPHSEIKGDINIYPLPHLKVLKDLIGDLSTLYKQYESVEPWLKNSNDSSKTENLQSKEDRAKLDGLYECIMCACCSTSCPSYWWNGDKYLGPAVLLQAYRWIIDSRDEDRKARLKKVADELKLYRCHTIMNCTNACPKGLNPAKAIASIKKMLATS

SEQ ID NO: 97831 - protein, 257 aa, Unknown
  Bacterial polypetide isolated from the Sargasso Sea
MVQINLPENSKVKKGHYYKDKTGSKNIRKINVYRWDPSSGENPRIDTYEVDMDNCPSKVLDVLNKIKNEIDPSLSYRKSCAHGVCGSCAMNMDGKNGLACTTSHADINGDIDIFPLPHLKVKKDLIGDLDGLYKQYESIEPWLKNNSKDKNDEIYQSQKDREKLDGAYECIMCACCSTSCPSYWWNGDKYLGPAVLLQAYRWIIDSRDEDRKERLEKVADELKLYRCHTILNCTNACPKGLNPAKAIAEIKKMLATT

SEQ ID NO: 97832 - protein, 365 aa, Unknown
  Bacterial polypetide isolated from the Sargasso Sea
MNKVINISKKNNIKEFDALIVGGGGSGMRTSLELAKSGLNTAVISKVFPTRSHTVSAQGGITCAIQSADPNDDWRWHMYDTVKGSDYIGDQDAIEYMCSEGPKAVYELEHMGLPFSRFENGRIYQRPFGGQSKDFGKGGQAARTCAAADRTGHALLHTLYQNNVKEGTNFLNEWFAVDLVKNSKNEITGVIAFSIESGEVCYLKAQATVLATGGAGRIYASTTNALINTGDGLGMTLRAGFPAQDMEMWQFHPTGIHGAGSLVTEGCRGEGGYLINADGERFMERYAPNAKDLAGRDVVARSMVMEILEGRGCGPEKDHVYLKLDHLGADVLNSKLPGICELSKTFAHVDPIKEPIPVVPTCHYM

SEQ ID NO: 97833 - protein, 94 aa, Unknown
  Bacterial polypetide isolated from the Sargasso Sea
GAYECIMCACCSTSCPSYWWNGDKYLGPAVLLQAYRWIVDSRDDERKARLKKVADELKLYRCHTILNCTSACPKGLNPAKAIAEIKKMLATANV

SEQ ID NO: 97834 - protein, 220 aa, Unknown
  Bacterial polypetide isolated from the Sargasso Sea
MVQINLPENSKISKGKYYKDKTGSKNLRRVNIYRWDPTTGGNPRIDTYEVDMDNCPSKVLDILNKIKNEIDPSLAYRRSCAHGVCGSCAMNMDGKNGLACTKPHKEIKGDINIYPLPHLKVVKDLIGDLSTLYKQYESVEPWLKTSDNKSEKENIQTKEDRAKLDGLYECIMCACCSTSCPSYWWNGDKYLGPAVLLQAYRWIIDSRDEDRKARLEKVAD

SEQ ID NO: 97835 - protein, 229 aa, Unknown
  Bacterial polypetide isolated from the Sargasso Sea
KVNIYRWDPSTGDNPRIDTYEVDMDNCPSKVLDLLNKIKNEIDSSLAYRRSCAHGVCGSCAMNMDGKNGLACTKSHKEIKGDINIYPLPHLKVQKDLIGDLSTLYNQYKSVEPWLKNSNKDQNKENFQSIEDRSKLDGLYECIMCACCSTSCPSYWWNGDKYLGPAVLLQAYRWIIDSRDEERKERLKKVADELKLYRCHTIMNCTNACPKGLNPAKAIAAIKKMLATS

SEQ ID NO: 97836 - protein, 181 aa, Unknown
  Bacterial polypetide isolated from the Sargasso Sea
GVCGSCAMNIDGVNTLACLKPIEEIKKDIKIYPLPHMRVVKDLVPDLTDAYKQLESIKPWLQNDEEKKENNKNLSKNIQNPEDRAKLDGSWECVLCFCCTTSCPSYWWNGDNYLGPAVLLQASRWINDTRDTKRKERLEEINDSLKLYRCHSIMNCTRSCPKGLNPAKAIADIKKAIVTEK

SEQ ID NO: 97837 - protein, 207 aa, Unknown
  Bacterial polypetide isolated from the Sargasso Sea
DLRFIQGQLDGEGLSIGNELFRCIGLRKLHLEVARLGNGLQILHSVWFPDPHYDLPIFGADIVAGPAGISAAIVDLSPTSDALPEQLIQRLEARPWPAFRQVRELPAWGSAIFSNKVCFIRPDGADEEAAFQELVSHYLQVMATSVIEATPEPSTALTTVRRYEGQLNYCLQQKRNDKTRRVLEKAFDSAWADRYIDMLLFDNPPEL

SEQ ID NO: 97838 - protein, 247 aa, Unknown
  Bacterial polypetide isolated from the Sargasso Sea
MTDGSEGLHPLVHSLADCIRTSWRNLPDLQPLAVDPELESISGLLDGEQLFIRNELRRCRGLRKLHLEIARLGVGLQILHCVWFPDPRFDLPIFGADVVAGPAGISAAIVDLSPVGEALPDMLASSLSGLNRPRFRQERALPGWGTIFSPHVCFIRPDGADEERFFQCLVMDYLDVLSSAVVQAEGEQANSLETLKRYQGQLNYCIQQKRNDKTRRVLEKAFNVQWAERYITELLFDEPSHPDPVIA

SEQ ID NO: 97839 - protein, 247 aa, Unknown
  Bacterial polypetide isolated from the Sargasso Sea
MQSPPSESSSTVAPLIPSLAETIRGAWIGLPELKPLDADSDFSSIEGQLEGDDLLIRNELLCCRGVRKIHLELARLGRGLQILHCVWFPDPRFDLPIFGADIVAGPAGVSAAIVDLSPVSGTLPSGIETALADTPSPAFRQVRDLPGWGTIFSPHVCFIRPDGAEEEVLFRSRVEEVLTILRTAVLQTACEPATAASTIRRYEGQLSYCLQQKRNDKTRRVLEKAFDASWADRYIEELLFDDPLPPS

SEQ ID NO: 97840 - protein, 293 aa, Unknown
  Bacterial polypetide isolated from the Sargasso Sea
MMMKDSVKEFIDREVWPYKDRFEKKDYDFTKSLMEKAGELGFLGVSIPEEYGGMGMGFISSMLVCDYISGSTGSLSTAFGAHTGIGTLPVLLYGTEDQKKKYLPRLSSGECFGCYCLTEPGAGSDANSGKSKAVLSDDGKYYKISGQKMWISNAGFASLMIVFARIENDKNITAFLVDYDPSNGIKLGEEENKLGIHSSSTRQVFFNETVIPLENILGERNGGFKIAMNALNVGRVKLGVACLDAQRRITTESIKYANERVQFKVPISKFGAIKEKIANMASSCYIGESACYR

SEQ ID NO: 97841 - protein, 240 aa, Unknown
  Bacterial polypetide isolated from the Sargasso Sea
MKLSEEQIAFYDVAKNFAIEKMAPHAEKWDEEKILPIETLQELAQLGFAGIYVSPDLGGSGLSRLDSTLIFEGLSQGCTSTAAFLSIHNMATWMIDNFGSQELKERFVPDLCSMKKISSYCLTEPGAGSDAGGLRTKAEKSGDHYILNGTKSFISGGGFSDVYVTMVKTDENSISTLVIEKDSEGLSFGGQEKKMGWNSQPTAQVIFEDCKVPVKNLIGQEGDGFKIAMMGLDGGRLNML

SEQ ID NO: 97842 - protein, 376 aa, Unknown
  Bacterial polypetide isolated from the Sargasso Sea
MKLSEEQIAFYDVAKNFAIEKMAPHAEKWDEEKTLPVETLKELAQLGFAGIYVSPDLGGSGLSRLDSTLIFEGLSQGCTSTAAFLSIHNMATWMIDSFGSQELKERFVPDLCSMKKISSYCLTEPGAGSDAGGLRTKAEKSGDHYILNGTKSFISGGGFSDVYVTMVKTDENSISTLVIEKDSEGLSFGGQEKKMGWNSQPTAQVIFEDCKVPVENLIGQEGDGFKIAMMGLDGGRLNIAACSLGTAQSAYERAVQYVGEREQFGKKLQEFQSLQFKLADMCTDLETSRLILREAATKVDENASDKTKAAAMAKRFVTDSGFNVVNEALQIHGGYGYLKDYPLERNLRDLRVHQILEGTNEIMRVIIAREILKENK

SEQ ID NO: 97843 - protein, 376 aa, Unknown
  Bacterial polypetide isolated from the Sargasso Sea
MKLSEEQIAFYDVAKNFAIEKMAPHAEKWDEEKILPIETLQELAQLGFAGIYVSPDLGGSGLSRLDSTLIFEGLSQGCTSTAAFLSIHNMATWMIDNFGSQELKERFVPDLCSMKKISSYCLTEPGAGSDAGGLRTKAEKSGDHYILNGTKSFISGGGFSDVYVTMVKTDENSISTLVIEKDSEGLSFGGQEKKMGWNSQPTAQVIFEDCKVPVENLIGQEGDGFKIAMMGLDGGRLNIAACSLGTAQSAYERAVQYVGEREQFGKKLQEFQALQFKLADMCTELEASRLILREAAIKVDDNTSDKTKAAAMAKRFVTDAGFNIVNEALQIHGGYGYLKDYPLERNLRDLRVHQILEGTNEIMRVIIAREILKENK

SEQ ID NO: 97844 - protein, 139 aa, Unknown
  Bacterial polypetide isolated from the Sargasso Sea
MNSYKIIDHEYDVLVLGAGGSGLRAAVGLSEAGLKTACISKVFPTRSHTSAAQGGISAALGNMGEDDWRWHMYDTVKGADWLGDQDSIEYLCKEAPKAVIELEKYGVPFSRTEDGKIYQRPFGGMTKNYGNGICKELRS

SEQ ID NO: 97845 - protein, 113 aa, Unknown
  Bacterial polypetide isolated from the Sargasso Sea
FENGRIYQRPFGGQSKEFGEGGQAARTCAAADRTGHALLHTLYQANLKEGTKFLNEWFAVDLVKDAKGNVNGVSCFDMETGEISILKANAVVLATGGAGQVYEQKYYIFDMYR

SEQ ID NO: 97846 - protein, 211 aa, Unknown
  Bacterial polypetide isolated from the Sargasso Sea
VGLHGANRLGSNSLSEIVVFGKVAGEHAGEFAKTQQHGNTQALAAKAEALLKQHLSLLDIDGTENPADIRNELGMSMEAGVGIYRTEELMQGTIDKINELKARYKKIKINDKSSVFNTDLLYAIELGYMLDVAEAMAHSALNRKESRGSHQRLDGYEERDDVNFLKHTLSFYNGEGAPTIDYSDVKITKSQPAKRVYGSEGEKQDEAKKNG

SEQ ID NO: 97847 - protein, 201 aa, Unknown
  Bacterial polypetide isolated from the Sargasso Sea
CFCSGANRLGSNSLIDLVVFGRAAAKRAAELVKPGTPHEEIPDSETQKCLDRFDKLRNAQGDNSTAELRLSMQKTMQSKCAVFRTEKNLKEGVDEIKKTYDGIDSISVKDRSLVFNTDLVETLEFDNLIRQAVTTVESAYHRKESRGAHARDDFPKRDDENFMQHTLAWCDGKNTKISYREVHKSTLTNEVQYFPPQERVY

SEQ ID NO: 97848 - protein, 182 aa, Unknown
  Bacterial polypetide isolated from the Sargasso Sea
MKAYNIIDHEYDVVVLGAGGSGLRAAVGLSEAGLKTACISKVFPTRSHTSAAQGGISAALGNMGEDDWRWHMYDTVKGADWLGDQDSIEYLCKEAPKAVLELEKYGVPFSRTEEGKIYQRPFGGMTKNYGNGIVQRTCAAADRTGHAILHTLYGQALKHNTEFFIEYFALDLLMKNGECKGL

SEQ ID NO: 97849 - protein, 195 aa, Unknown
  Bacterial polypetide isolated from the Sargasso Sea
MSSYKIIDHEYDVVVLGAGGSGLRAAVGLSEAGLKTACISKVFPTRSHTSAAQGGISAALGNMGEDDWRWHMYDTVKGADWLGDQDSIEYLCKEAPKAVIELEKYGVPFSRTEDGKIYQRPFGGMTKNYGNGIVQRTCAAADRTGHAILHTLYGQALKHRNEFFIEYFALDLLMKGGECKGLIAWNLNDGTQYID

SEQ ID NO: 97850 - protein, 137 aa, Unknown
  Bacterial polypetide isolated from the Sargasso Sea
MSSYKIIDHEYDVVVLGAGGAGLRAAVGLSEAGLKTACISKVFPTRSHTSAAQGGISAALGNMGEDDWRWHMYDTVKGADWLGDQDCIEYLCKEAPRAVLELEKYGVPFSRTDDGKIYQRPFGGMTKNYGNETYKEL

SEQ ID NO: 97851 - protein, 138 aa, Unknown
  Bacterial polypetide isolated from the Sargasso Sea
MTSSYEIIDHQYDVIVIGAGGSGLRATLGVAEAGLKTACISKVFPTRSHTVAAQGGIGAALGNMGQDDWKWHMYDTVKGSDWLGDQDAIEYLCSKASEAVMELDQYGMPFSRTEDGKIYQRPFGGHLTKNGEGAPAMR

SEQ ID NO: 97852 - protein, 170 aa, Unknown
  Bacterial polypetide isolated from the Sargasso Sea
MSSYKIVNHEYDVVVLGAGGSGLRAAVGLSEAGLKTACISKVFPTRSHTSAAQGGISAALGNMGEDDWRWHMYDTVKGADWLGDQDSIEYLCKEAPKAVIELEKYGVPFSRTEDGKIYQRPFGGMTKDYGNGIVQRTCAAADRTGHAILHTLYGQALKHKTEFFIEYFAL

SEQ ID NO: 97853 - protein, 140 aa, Unknown
  Bacterial polypetide isolated from the Sargasso Sea
MINKDGERFMERYAPNVKDLAGRDVVARSMVLEILEGRGCGDKSDHIYLKLDHLGAEVLNSKLPGICELSRTFAHVDPIYEPIPVVPTCHYMMGGTPTNISGQAFTRINDEDHLIPGLFSAGEAACVSVHGANRLGGNSL

SEQ ID NO: 97854 - protein, 315 aa, Unknown
  Bacterial polypetide isolated from the Sargasso Sea
LGDQDSIEYLCANAVDSIVELEHYGMPFSRTEEGKIYQRPFGGHMTKNGKGEPASRACAAADRTGHALLHTLYQQSLKNNVDFFNEYFAIDLLKDDNEAICGLLAINIEDGSLHRFIAKMTILATGGYGRIFQSSTSAHICTGDGAGIALRAGLPLSDMEFIQFHPTGIYGVGVLISEAARGEGGILKNNEGTRFMLEYAPNAKDLAARDVISRFISKEISAGRGCGPNKDYINLHLEHLDADMLAKRLPGISESVKAFCGRDISKEPIPVIPTVHYCMGGIPTNFKAEVLKPNDSNTEEVCEGLMAIGEAACAS

SEQ ID NO: 97855 - protein, 226 aa, Unknown
  Bacterial polypetide isolated from the Sargasso Sea
MSSYEIIDHEYDVVVLGAGGSGLRAAVGLSEAGLKTACISKVFPTRSHTSAAQGGISAALGNMGEDDWRWHMYDTVKGADWLGDQDSIEYLCKEAPKAVIELEKYGVPFSRTEDGKIYQRPFGGMTKNYGNGTVQRTCAAADRTGHAILHTLYGQALKHNTKFFIEYFALDLIMKNGECKGLIAWNLNDGTIHRFRSHITIIATGGYGKIYYSATSAHTCTGEEMQ

SEQ ID NO: 97856 - protein, 154 aa, Unknown
  Bacterial polypetide isolated from the Sargasso Sea
MSSYKIIDHEYDVVVLGAGGSGLRAAVGLSESGLKTACISKVFPTRSHTSAAQGGISAALGNMGEDDWRWHMYDTVKGADWLGDQDSIEYLCKEAPKAVIELEKYGVPFSRTEDGKIYQRPFGGMTKNYGNGIVQRTCAAADRTGHAILHTLYG

SEQ ID NO: 97857 - protein, 31 aa, Unknown
  Bacterial polypetide isolated from the Sargasso Sea
VSVHGANRLGSNSLIDLVVFEELLQNERRNW

SEQ ID NO: 97858 - protein, 175 aa, Unknown
  Bacterial polypetide isolated from the Sargasso Sea
TTNALINTGDGLGMSLRAGFPAQDMEMWQFHPTGIHGAGSLVTEGCRGEGGYLINADGERFMERYAPNAKDLAGRDVVARSMVLEILEGRGCGPNKDHVLLKLDHLGEEVLNAKLPGICELSKTFAGVDPVFKPIPVVPTCHYMMGGTPTNIHGQAFTSENEIDNEVPGLFSVGE

SEQ ID NO: 97859 - protein, 126 aa, Unknown
  Bacterial polypetide isolated from the Sargasso Sea
MNSYNIIDHEYDVVVLGAGGSGLRAAVGLSEAGLKTACISKVFPTRSHTSAAQGGISAALGNMGEDDWRWHMYDTVKGADWLGDQDSIEYLCKEAPKAVLELEKYGVPFSRTDEGKIYQRPFGGMT

SEQ ID NO: 97860 - protein, 172 aa, Unknown
  Bacterial polypetide isolated from the Sargasso Sea
MNSYEYVDHTYDVVVVGAGGSGLRATLGMAEQGFKTACISKVFPTRSHTVAAQGGIAASLSNMGPDHWHWHMYDTVKGSDWLGDVDAMEYLAREAPKAVYELEHYGVPFSRTEEGKIYQRPFGGHTTEFGEGPPVQRTCAAADRTGHAILHTLYGQSLKITQSFLLSILLLI

SEQ ID NO: 97861 - protein, 154 aa, Unknown
  Bacterial polypetide isolated from the Sargasso Sea
MSSYNIIDHEYDVVVLGAGGSGLRAAVGLSEAGLKTACISKVFPTRSHTSAAQGGISAALGNMGEDDWRWHMYDTVKGADWLGDQDSIEYLCKEAPKAVLELEKYGVPFSRTDEGKIYQRPFGGMTKNYGNGVVQRTCAAADRTGHAILHTLYG

SEQ ID NO: 97862 - protein, 142 aa, Unknown
  Bacterial polypetide isolated from the Sargasso Sea
MNSYKIVDHEYDVVVLGAGGSGLRAAVGLSEAGLKTACISKVFPTRSHTSAAQGGISAALGNMGEDDWRWHMYDTVKGADWLGDQDSIEYLCKEAPKAVIELEKYGVPFSRTDDGKIYQRPFGGMTKNYGNGIVQRTCAAAD

SEQ ID NO: 97863 - protein, 247 aa, Unknown
  Bacterial polypetide isolated from the Sargasso Sea
MSAYNIIDHEYDAVVLGAGGSGLRAAVGLSEAGLKTACISKVFPTRSHTSAAQGGISAALGNMGEDDWRWHMYDTVKGADWLGDQDSIEYLCKEAPKAVLELEKYGVPFSRTEEGKIYQRPFGGMTKNYGNGIVQRTCAAADRTGHAILHTLYGQALKHNTEFFIEYFALDLLMKDGECKGLIAWNLNDGTIHRFRAHTVIIATGGYGKVYYSATSAHTCTGDGNAMVLRARFTFTRHGICSILPQE

SEQ ID NO: 97864 - protein, 131 aa, Unknown
  Bacterial polypetide isolated from the Sargasso Sea
MSAYKIIDHEYDVVVLGAGGSGLRAAVGLSEAGLKTACISKVFPTRSHTSAAQGGISAALGNMGEDDWRWHMYDTVKGSDWLGDQDAIEYLCKEAPKAVKELDKYGVPFSRTKEGKIYQRPFGGMTKNYGN

SEQ ID NO: 97865 - protein, 187 aa, Unknown
  Bacterial polypetide isolated from the Sargasso Sea
MEIGGITVSEKIFDVAIIGGGGSGLRASLEISKSGLDVAVVSKVFPTRSHTVAAQGGITCAIASADPNDDWRWHMFDTVKGSDYIGDQNAIEYMCSEGPDAIFELEHMGLPFSRFENGRIYQRPFGGQSKEFGEGGQAARTCAAADRTGHALLHTLYQANLKAGTKFLNEWFAIDLIKNDEGAIRGL

SEQ ID NO: 97866 - protein, 143 aa, Unknown
  Bacterial polypetide isolated from the Sargasso Sea
MSAYKIIDHEYDVVVLGAGGSGLRAAVGLSEAGLKTACISKVFPTRSHTSAAQGGISAALGNMGEDDWRWHMYDTVKGSDWLGDQDAIEYLCKEAPRAVVELERYGVPFSRTDDGKIYQRPFGGMTKNYGNGTAQRTCAAADR

SEQ ID NO: 97867 - protein, 161 aa, Unknown
  Bacterial polypetide isolated from the Sargasso Sea
MSSYKIIDHEYDVVVLGAGGSGLRAAVGLSEAGLKTACISKVFPTRSHTSAAQGGISAALGNMGEDDWRWHMYDTVKGSDWLGDQDSIEYLCKEAPRAVLELEKYGVPFSRTEDGKIYQRPFGGMTKNYGNEPVQRTCAAADRTGHAILHTLYGQALKHKT

SEQ ID NO: 97868 - protein, 171 aa, Unknown
  Bacterial polypetide isolated from the Sargasso Sea
MSSYEITDHHYDVVVVGAGGAGLRATLGMAASGLKTACITKVFPTRSHTVAAQGGIGAALNNMGEGDNWQYHMYDTVKGSDWLGDQDAIEYMCRNAIPSVIELENYGVPFSRTDEGKIYQRPFGGHTLDYGKSMARRACAAADRTGHAILHTLYQQCLKHQAHFHIEYFVL

SEQ ID NO: 97869 - protein, 166 aa, Unknown
  Bacterial polypetide isolated from the Sargasso Sea
MTSYEIIDHTYDVVVVGAGGAGLRATLGMTTEGLKTACITKVFPTRSHTVAAQGGVGAALDNMGEGDNWQFHMYDTVKGSDWLGDQDAIEYMCRNAIPAVIELEHYGVPFSRTEEGKIYQRPFGGHTLDNGKRMAKRACAAADRTGHAILHTLYQQCLANNAEFFI

SEQ ID NO: 97870 - protein, 241 aa, Unknown
  Bacterial polypetide isolated from the Sargasso Sea
MSRCEITKIWRNVVQTFQADLAVIGAGGAGLRAAIAAAQANPNAKIALISKVYPMRSHTVAAEGGSAAVAQDHDSFEYHFHDTVAGGDWLCEQDVVDYFVHHCPTEMTQLEQWGCPWSRRPDGSVNVRRFGGMKIERTWFAADKTGFHMLHTLFQTSLQFPQIQRFDEHFVLDILVDDGQARGLVAMNMMEGTLVQIRANAVVMATGGAGRVYRYNTNGGIVTGDGMGMAIGHGVPLRDME

SEQ ID NO: 97871 - protein, 197 aa, Unknown
  Bacterial polypetide isolated from the Sargasso Sea
MEIGGITVSEKIFDVAIIGGGGSGLRASLEISKSGLDVAVVSKVFPTRSHTVAAQGGITCAIASADPNDDWRWHMFDTVKGSDYIGDQNAIEYMCSEGPDAIFELEHMGLPFSRFENGRIYQRPFGGQSKEFGEGGQAARTCAAADRTGHALLHTLYQANLKAGTKFLNEWFAIDLIKNDEGAIRGLSCFDMETGEV

SEQ ID NO: 97872 - protein, 35 aa, Unknown
  Bacterial polypetide isolated from the Sargasso Sea
VSVHGANRLGSNSLIDLVVFGRAAAKRAAELIKPG

SEQ ID NO: 97873 - protein, 165 aa, Unknown
  Bacterial polypetide isolated from the Sargasso Sea
MTAYKIIDHEYDVVVLGAGGSGLRAAVGLSEAGLKTACISKVFPTRSHTSAAQGGISAALGNMGEDDWRWHMYDTVKGADWLGDQDSIEYLCKEAPKAVIELEKYGVPFSRTEDGKIYQRPFGGMTKNYGNGIVQRTCAAADRTGHAILHTLYGQALKHNTEFFY

SEQ ID NO: 97874 - protein, 223 aa, Unknown
  Bacterial polypetide isolated from the Sargasso Sea
MKSYKIIDHEYDVVVLGAGGSGLRAAVGLSEAGLKTACVSKVFPTRSHTSAAQGGISAALGNMGEDDWRWHMYDTVKGADWLGDQDCIEYLCKEAPRAVLELEKYGVPFSRTEDGKIYQRPFGGMTKNYGNEPVQRTCAAADRTGHAILHTLYGQALKHKTEFFIEYFALDLLMKDGQCKGLIAWNLNDGTIHRFRSHITIIATGGYGKVYYSATSAHTCTGD

SEQ ID NO: 97875 - protein, 159 aa, Unknown
  Bacterial polypetide isolated from the Sargasso Sea
MKSYKIIEHEYDVVVLGAGGSGLRAAVGLSEAGLKTACISKVFPTRSHTSAAQGGISAALGNMGEDDWRWHMYDTVKGSDWLGDQDAIEYLCKEAPKAVKELDKYGVPFSRTEDGKIYQRPFGGMTKNYGNGTVQRTCAAADRTGHAILHTLYGQALKH

SEQ ID NO: 97876 - protein, 212 aa, Unknown
  Bacterial polypetide isolated from the Sargasso Sea
MSAYEITDHYYDVVVVGAGGAGLRATLGMAATGLKTACITKVFPTRSHTVAAQGGIGAALNNMGEGDNWQYHMYDTVKGSDWLGDQDAIEYMCRNAIPSVIELENYGVPFSRTEEGKIYQRPFGGHTLDYGKSMARRACAAADRTGHAILHTLYQQCLKHQAHFHIEFFALDLLMNGDDECAGIIALCMEDGTLHRFWGQQTVLATGGYGRV

SEQ ID NO: 97877 - protein, 252 aa, Unknown
  Bacterial polypetide isolated from the Sargasso Sea
KLNLGGIREISIKFSGIDPADEPIDIRPVCHYMMGGIHTNVDGAAELQGVWAAGEAACNSVHGANRLGANSTSECIVWGKITGSLAVDYIENEHTSAQFPTHLVTAEETRIFDGIFRGRGEVNPYEVKQEVAETLNAKAYVYRNHNDLAEGLKKVRELKQKTWKHVDDSAKEYNTNFQNVMELDSMFRVAEVVLLGALNRKESRGGHARTDFPTRDDANFLHHTLAYYDPNEPIMKKHPVTITKYKPVERKY

SEQ ID NO: 97878 - protein, 140 aa, Unknown
  Bacterial polypetide isolated from the Sargasso Sea
MTSTYKIIDHEYDVVVLGAGGSGLRAAVGLSESGLKTACISKVFPTRSHTSAAQGGISAALGNMGEDDWRWHMYDTVKGSDWLGDQDAIEYLCKEAPRAVIELERYGVPFSRTDDGKIYQRPFGGMTKNYGNGTAQRTCA

SEQ ID NO: 97879 - protein, 337 aa, Unknown
  Bacterial polypetide isolated from the Sargasso Sea
MRSHTVAAEGGAAAVTLPEDSLEQHFQDTVAGSDWLADQDVVDYFVSHAYQELVQLERWGCPWSRKADGTVQVRRFGGMKTERTWFAADKTGFHILHTLFQTSLKYPNIQRFDEFFVLDLLVAEQQVAGVLAMQLSTGELFHIQAKSVVLATGGAGRVFHYNTNGGIVTGDGMALAYRHGVALRDMEFVQYHPTGLPGSGILITEACRGESGVLLNKDGYRYLQDYGLGPETPLGQPENKCMELGPRDKLSQAFWHEQQKGRTGDYQGHAVVYLDLRHLGCDKLNERLPFICDLAKSYVNVDPQHQLIPIRPAVHYTMGGIQTDVQCHTAIQGLYAA

SEQ ID NO: 97880 - protein, 157 aa, Unknown
  Bacterial polypetide isolated from the Sargasso Sea
MSAYKIIDHEYDVVVLGAGGSGLRAAVGLSESGLKTACISKVFPTRSHTSAAQGGISAALGNMGEDDWRWHMYDTVKGSDWLGDQDAIEYLCKEAPRAVVELERYGVPFSRTDDGKIYQRPFGGMTKNYGNGTAQRTCAAADRTGHAILHTLYGQAL

SEQ ID NO: 97881 - protein, 142 aa, Unknown
  Bacterial polypetide isolated from the Sargasso Sea
MEFDGIIVGGGGAGMRASLQLAESGLNTAVISKVFPTRSHTVSAQGGITCAIQSDDPDDDWRWHMFDTVKGSDYIGDQEAIEYMCSEGPKAVFELEHMGLPFSRTEEGRIYQRPFGGQSKDYGKGGQATRTCAAADRTGHSL

SEQ ID NO: 97882 - protein, 262 aa, Unknown
  Bacterial polypetide isolated from the Sargasso Sea
MSKAYNIVDHHYDVIVVGAGGSGLRATLGVAESGYKTACISKVFPTRSHTVAAQGGIGAALGNMGEDNWKWHMYDTVKGSDWLGDQDAIEFLCSKAPEAVFELEEYGMPFSRTEDGKIYQRPFGGHLTNNGEGSPAMRACAAADRTGHAMLHTLYQQCLKNKVEFYIEYFVLDLLMDDDGNCKGVLAWCLEDGTMHRFLSHQTILATGGFGRAYFSSTSAHICTGDGSAMVLRQDLPLSDMEFIQFHPTGVYGAGVLLTEGA

SEQ ID NO: 97883 - protein, 188 aa, Unknown
  Bacterial polypetide isolated from the Sargasso Sea
MSAYKIIDHEYDVVVLGAGGSGLRAAVGLSEAGLKTACVSKVFPTRSHTSAAQGGISAALGNMGEDDWRWHMYDTVKGADWLGDQDSIEYLCKEAPAAVLELEKYGVPFSRTEEGKIYQRPFGGMTKNYGNETVQRTCAAADRTGHAILHTLYGQALKHNTEFFIEYFALDLIMKDGACKGIIALEPQ

SEQ ID NO: 97884 - protein, 137 aa, Unknown
  Bacterial polypetide isolated from the Sargasso Sea
MSSYKIINHEYDVVVLGAGGSGLRAAVGLSEAGLKTACISKVFPTRSHTSAAQGGISAALGNMGEDDWRWHMYDTVKGADWLGDQDSIEYLCKEAPKAVIELEKYGVPFSRTEDGKIYQRPFGGMTKKLRQWNCTKN

SEQ ID NO: 97885 - protein, 204 aa, Unknown
  Bacterial polypetide isolated from the Sargasso Sea
QLVYQYMGANRLGSNSLIDLVVFGRAAAKRAAELVKPGMAHEEVSSSETDKCLDRFDKIRNSSGTTKTAELRLNMQKTMQSKCAVFRTEKTLKEGVDQIRKPFDGMKDISVKDKSLLFNTELVETLEFDNLIRQALTTMDSAYSRKESRGAHAREDYSKRDDKNFMKHTLAWQNDKKVEIKYRDVHSRTLTNDVQYFPPKERVY

SEQ ID NO: 97886 - protein, 177 aa, Unknown
  Bacterial polypetide isolated from the Sargasso Sea
MSAYKIIDHEYDVVVLGAGGSGLRAAVGLSEVGLKTACISKVFPTRSHTSAAQGGISAALGNMGEDDWRWHMYDTVKGADWLGDQDSIEYLCKEAPQAVIELEKYGVPFSRTEEGKIYQRPFGGMTKNYGNGIVQRTCAAADRTGHAILHTLYGQALKHNTEFFYRIFCIGFINERW

SEQ ID NO: 97887 - protein, 241 aa, Unknown
  Bacterial polypetide isolated from the Sargasso Sea
MKNKYQVIEHEYDVIVVGAGGSGLRATLGMAAEGLKTACITKVFPTRSHTVAAQGGMSAALANMGEDDWRWHMYDTIKGSDWLGDQDAIEYMCKEAIPSVIELEHYGVPFSRTETGKIYQRPFGGMTTNFGEGIAQRTCAAADRTGHAILHTLYQQSLKYDAEFFIEYFAIDLLMENGECLGVMAIELATGKLHLFKGQVTLLATGGYGRAYFSATSAHTCTGDGGGMAQRAGIPLQDMEF

SEQ ID NO: 97888 - protein, 178 aa, Unknown
  Bacterial polypetide isolated from the Sargasso Sea
MSAYKIIDHEYDVVVLGAGGSGLRAAVGLSEAGLKTACVSKVFPTRSHTSAAQGGISAALGNMGEDDWRWHMYDTVKGADWLGDQDSIEYLCKEAPAAVLELEKYGVPFSRTEDGKIYQRPFGGMTKNYGNETVQRTCAAADRTGHAILHTLYGQALKHNTEFFIEYFALDLIMRDGA

SEQ ID NO: 97889 - protein, 145 aa, Unknown
  Bacterial polypetide isolated from the Sargasso Sea
MKSYNIIDHEYDVVVLGAGGSGLRAAVGLSEAGLKTACISKVFPTRSHTSAAQGGISAALGNMGEDDWRWHMYDTVKGADWLGDQDSIEYLCKEAPKAVLELEKYGVPFSRTEDGKIYQRPFGGMTKNYGNGIVQRTCAAADRTG

SEQ ID NO: 97890 - protein, 349 aa, Unknown
  Bacterial polypetide isolated from the Sargasso Sea
MYGQALKHNTEFFIEYFALDLLMKKGECKGLIAWNLNDGTIHRFKSHITILATGGYGKVYYTATSAHTCTGDGNGMALRAGLPLQDMEFVQFHPTGIYGVGTLISEGVRGEGGFLLNSKGERFMERYAPKAKDLASRDVVSRSIAVEINEGRGVGKNKDYVNLHLDHLDPKVIEERLPGIAESAKTFCEVDVRKDPIPVVPTVHYNMGGIPTNYKAEVLTMNGKESTVPGLMAIGEAACVSVHGANRLGSNSLIDLVVFGKSAANRAAELIKPGIPHETVPQSETDKCLDRFDKLRNSSGSTKTSELRLSMQRTMQSKCAVFRTEKTLKQGMDQIREPFKGMTDISVSD

SEQ ID NO: 97891 - protein, 286 aa, Unknown
  Bacterial polypetide isolated from the Sargasso Sea
PLQDMEFVQFHPTGIYGHGTLITEGARGEGGYLTNSKGERFMERYAPKAKDLASRDVVSRSMSIEINEGRGVGKDQDHVHLNLNHLDKDIIESRLPGITDAARLFANVDVTKEPIPVVPTVHYNMGGIPTNYKAEVLTVNGSEKTVPGLMAIGEAACVSVHGANRLGSNSLIDLVVFGRAAAKRAAELIKPGTPHEEISETETQKCLDRFDKIRNSNGEIGTSELRLSMQKTMQSKCAVFRTEKTLKEGVDEIRETFDGLDSLSVKDKSLIFNTDLVETLEFDNLI

SEQ ID NO: 97892 - protein, 202 aa, Unknown
  Bacterial polypetide isolated from the Sargasso Sea
MNTSYNIIDHYYDVVVVGAGGSGLRATLGCAEAGLKTACISKVFPTRSHTVAAQGGIGAALGNMGEDNWKWHMYDTVKGSDWLGDQDAIEFLCSKAPEAVIELEEYGMPFSRTDDGKIYQRPFGGHLTNNGEGAPAMRACAAADRTGHALLHTLYQQSLKNNVEFFIEYFVLDLISDDDGNCIGVVAWCLEDVQFTVFYLIR

SEQ ID NO: 97893 - protein, 361 aa, Unknown
  Bacterial polypetide isolated from the Sargasso Sea
PTRSHTVAAQGGIGAALGNMGEDNWKWHMYDTVKGSDWLGDQDAIEYLCSKAPEAVIELEEYGMPFSRTDDGKIYQRPFGGHLTNNGEGAPAMRACAAADRTGHALLHTLYQQSLKNNVEFYIEYFVLDLISDDQGNCIGVVTWCLEDGSIHRFLSHQTILATGGYGRAYFSSTSAHICTGDGSAMALRQNLPLSDMEFIQFHPTGVYGAGVLITEGARGEGGYLTNSDGERFMERYAPNAKDLASRDVVSRAMTIEISENRGCGDNADHVLLHLEHIDANTLHKRLPGISETAKIFAGVDLTKDPIPVLPTVHYNMGGIPTNYRTEVIRPTNENPDNVCEGLMAVGEAACVSVHGANRLR

SEQ ID NO: 97894 - protein, 299 aa, Unknown
  Bacterial polypetide isolated from the Sargasso Sea
KIIDHEYDVVVLGAGGSGLRAAVGLSEAGLKTACISKVFPTRSHTSAAQGGISAALGNMGEDDWRWHMYDTVKGADWLGDQDSIEYLCKEAPKAVIELEKYGVPFSRTEDGKIYQRPFGGMTKNYGNGIVQRTCAAADRTGHAILHTLYGQALKHKTEFFIEYFALDLLMKDGACKGLIAWNLNDGTIHRFRAHSVIIATGGYGKVYYSATSAHTCTGDGNAMVLRAGLPLQDMEFVQFHPTGIYGHGTLITEGARGEGGYLTNSKGERFMERYAPKAKDLASRDVVSRSMSIEINEGR

SEQ ID NO: 97895 - protein, 165 aa, Unknown
  Bacterial polypetide isolated from the Sargasso Sea
MTKNSYNIIDHHYDVVVVGAGGSGLRATLGCAESGLKTACISKVFPTRSHTVAAQGGIGAALGNMGEDNWKWHMYDTVKGSDWLGDQDAIEYLCSKAPEAVIELEEYGMPFSRTDDGKIYQRPFGGHLTNNGEGAPAMRACAAADRTGHALLHTLYQQSLKNNVE

SEQ ID NO: 97896 - protein, 205 aa, Unknown
  Bacterial polypetide isolated from the Sargasso Sea
EAACVSVHGANRLGSNSLIDLVVFGRAAAKRAAELVKPGTPHEEISNSETDKCLERFERLRNGNGTNRTADLRLAMQKTMQSKCAVFRTEKTLKEGVEEIRKPFDGMDSISVKDKSLIFNTDLVETLEFDNLIRQAIVTIDSAYERKESRGAHAREDHPKRDDNNFMKHTLSWCKGSETKISYRDVHRSTLTNDVQYFPPQERVY

SEQ ID NO: 97897 - protein, 304 aa, Unknown
  Bacterial polypetide isolated from the Sargasso Sea
AETGLKTACISKVFPTRSHTVAAQGGIGAALGNMGEDNWKWHMYDTVKGSDWLGDQDAIEYLCSKAPEAVIELEEYGMPFSRTDDGKIYQRPFGGHLTNNGEGAPAMRACAAADRTGHALLHTLYQQSLKNNVEFYIEYFVLDLISDDQGNCIGVVTWCLEDGSIHRFLSHQTILATGGYGRAYFSSTSAHICTGDGSAMALRQNLPLSDMEFIQFHPTGVYGAGVLITEGARGEGGYLTNSDGERFMERYAPNAKDLASRDVVSRAMTIEISENRGCGENADHVLLHLEHIDADTLHKRLPGI

SEQ ID NO: 97898 - protein, 318 aa, Unknown
  Bacterial polypetide isolated from the Sargasso Sea
LPLQDMEFVQFHPTGIYGVGTLISEGVRGEGGYLLNSKGERFMEKYAPKAKDLASRDVVSRSIAVEINEGRGVGKNKDYVNLHLDHLDPKVIEERLPGIAESAKTFCEVDVRKDPIPVVPTVHYNMGGIPTNYKAEVLTLNGKESTVPGLMAIGEAACVSVHGANRLGSNSLIDLVVFGKSAANRAAELVKPGTPHEEIPQSETDKCLDRFDKLRNASGATKTSELRLSMQRTMQSKCAVFRTEKTLKEGMDQIRKPFEGMSDISVSDKSLLFNTDLVETLEFDNLIRQAMTTIDSAYHRKESRGAHAREDYKTRDDK

SEQ ID NO: 97899 - protein, 268 aa, Unknown
  Bacterial polypetide isolated from the Sargasso Sea
IDERLPGISEASKLFANVDVTKEPIPVVPTVHYNMGGIPTNYKAEVLTLNGSEKTVPGLMAIGEAACVSVHGANRLGSNSLIDLVVFGRAAAKRAAELVKPGMKHEEIDKNETDRCLDRFDKLRNSEGSNPTSELRLSMQKTMQSKCAVFRTEKTLKEGVDEIRRPYDGMDSLSVKDKSLIFNTDLVETLEFDNLIRQAITTMDSAYHRKESRGAHAREDFPKRDDENYMQHTLSWCNGSKTKINYRPVHRSTLTNDVQYFPPQERVY

SEQ ID NO: 97900 - protein, 325 aa, Unknown
  Bacterial polypetide isolated from the Sargasso Sea
WNLNDGTIHRFRAHSVIIATGGYGKVYYSATSAHTCTGDGNAMVLRAGLPLQDMEFVQFHPTGIYGHGTLITEGARGEGGYLTNSKGERFMERYAPNAKDLASRDVVSRSMSIEINEGRGVGKDQDHVHLNLSHLDKKIIESRLPGITDAARLFANVDVTKEPIPVVPTVHYNMGGIPTNYKGEVLTVNGSEKTVPGLMAIGEAACVSVHGANRLGSNSLIDLVVFGRAAAKRAAELVTPGMPHEEISESETQKCLDRFDKIRNADGDIGTAELRLSMQKTMQSKCAVFRTEKTLKEGVEEIRKTYDGLESISVKDKSLIFNTDL

SEQ ID NO: 97901 - protein, 283 aa, Unknown
  Bacterial polypetide isolated from the Sargasso Sea
MVEINEGRGVGNEKDHVHLHLNHLDPKVIEERLPGISESSRLFANVDVTKEPIPVVPTVHYNMGGIPTNYKAEVLTLNGSEKTVPGLMAIGEAACVSVHGANRLGSNSLIDLVVFGRAAAKRAAELVKPGTPHEEIPQSETDKCLERFDRLRNASGTNNTADLRLAMQKTMQSKCAVFRTEKTLKEGVNEIRKPFEGMDDLSVKDKSLIFNTDLVETLEFDNLIRQAITTMDSAYHRKESRGAHAREDFPKRNDEKFMQHTLSWCDGKKTKIDYRPVHRSTLQ

SEQ ID NO: 97902 - protein, 367 aa, Unknown
  Bacterial polypetide isolated from the Sargasso Sea
AALGNNGEDDWRWHMYDTVKGSDWLGDQDAIAYMCKEAPNAVLELERYGIPFSRTDDGKIYQRAFGGMTTHFGDGIAQRTCAAADRTGHAMLHTLYQQSIKNKAEFFIEYFALDLIMEEGECTGVVALEMATGKIHAFRAQRVILATGGHGRAYFSCTAAHTCTGDGSGMALRAGLPLQDMEFVQFHPTGIYGVGCLITEGVRGEGGYLTNSDGERFMERYAPNAKDLASRDVVSRSMTMEILEGRGVGEKKDHIHLNLQHLGPEVIEERLPGIAETARVFADVDVTKDPIPVLPTVHYNMGGVPTNMHTEVITKNSAGEMEIVPGLMAVGEAASVSVHGANRLGSNSLLDLVVFGRESAMQCQKTI

SEQ ID NO: 97903 - protein, 324 aa, Unknown
  Bacterial polypetide isolated from the Sargasso Sea
PTRSHTSAAQGGISAALGNMGEDDWRWHMYDTVKGSDWLGDQDSIEYLCKEAPRAVLELERYGVPFSRTEDGKIYQRPFGGMTKNYGNETVQRTCAAADRTGHAILHTMYGQALKHNTEFFIEYFALDLLMKNGECKGLIAWNLNDGTIHRFRSHITIIATGGYGKTYYSSTSAHTCTGDGNAMVLRAGLPLQDMEFVQFHPTGIYGHGTLISEGVRGEGGFLLNSKGERFMERYAPKAKDLASRDVVSRSIAVEINEGRGVGKEKDHVHLHLNHLDPEVIEKRLPGISESSRLFADVDVTKEPIPVVPTVHYNMGGIPTNYKA

SEQ ID NO: 97904 - protein, 278 aa, Unknown
  Bacterial polypetide isolated from the Sargasso Sea
TEGARGEGGYLTNSKGERFMERYAPNAKDLASRDVVSRSMSIEINEGRGVGKDQDHVHLNLSHLDKEIIESRLPGITDAARLFANVDVTKEPIPVVPTVHYNMGGIPTNYKAEVLTVNGSEKTVPGLMAIGEAACVSVHGANRLGSNSLIDLVVFGRAAAKRAAELIKPGTPHEEVSELETQKCLDRFDKLRNAQGDYSTADLRLSMQKTMQSKCAVFRTEKNLKEGVDEIRKTYDGIDSISVKDRSLVFNTDLVETLEFDNLIRQAVTTVDSAYHRK

SEQ ID NO: 97905 - protein, 316 aa, Unknown
  Bacterial polypetide isolated from the Sargasso Sea
MKVDEIIKGSDIPVKEFDGIIIGGGGAGMRASLQLAESGLNTAVISKVFPTRSHTVSAQGGITCAIASDDPDDDWRWHMFDTVKGSDYIGDQDAIEYMCAEGPKAVFELEHMGLPFSRTEEGRIYQRPFGGQSKDYGKGGQASRTCAAADRTGHSLLHTLYQANLKAGTNFLNEWFAIDLVLNADNAVVGVIAFEIETGEIFYIKSKATVLATGGAGRIYASTTNALINSGDGIGMSLRAGFPVQDIEMWQFHPTGIHGAGTLVTEGCRGEGGYLINKDGERFMERYAPNAKDLASRDVVARSMALEILEGKKLRP

SEQ ID NO: 97906 - protein, 165 aa, Unknown
  Bacterial polypetide isolated from the Sargasso Sea
MTNSYKIIDHHYDVVVVGAGGSGLRATLGCAESGLKTACISKVFPTRSHTVAAQGGIGAALGNMGEDNWKWHMYDTVKGSDWLGDQDAIEYLCSKAPEAVIELEEYGMPFSRTDDGKIYQRPFGGHLTNNGEGAPAMRACAAADRTGHALLHTLYQQSLKNNVEF

SEQ ID NO: 97907 - protein, 254 aa, Unknown
  Bacterial polypetide isolated from the Sargasso Sea
MSSYKIIDHEYDVVVLGAGGSGLRAAVGLSEAGLKTACISKVFPTRSHTSAAQGGISAALGNMGEDDWRWHMYDTVKGSDWLGDQDCIEYLCKEAPRAVLELEKYGVPFSRTEDGKIYQRPFGGMTKNYGNGTVQRTCAAADRTGHAILHTLYGQALKHNTEFFIEYFALDLLMKNGECKGLIAWNLNDGTIHRFRSHITIIATGGYGKVYYSATSAHTCTGDGNAMVLRAGLPLQDMEFVQFHPTGIYGHGTL

SEQ ID NO: 97908 - protein, 320 aa, Unknown
  Bacterial polypetide isolated from the Sargasso Sea
LKTACISKVFPTRSHTSAAQGGISAALGNMGEDDWRWHMYDTVKGADWLGDQDSIEYLCKEAPKAVLELEKYGVPFSRTEDGKIYQRPFGGMTKNYGNGIVQRTCAAADRTGHAILHTLYGQALKHNTEFFIEYFALDLIMKDGQCKGLIAWNLNDGTIHRFRSHITIIATGGYGKVYYSATSAHTCTGDGNAMVLRAGLPLQDMEFVQFHPTGIYGHGTLISEGVRGEGGYLVNSKGERFMERYAPNAKDLASRDVVSRSMSIEINEGRGVGKDQDHVHLYLSHLDKKVIEDRLPGITEAARLFANVDVTKEPIPVVPT

SEQ ID NO: 97909 - protein, 288 aa, Unknown
  Bacterial polypetide isolated from the Sargasso Sea
MSAYKIIDHEYDVVVLGAGGSGLRAAVGLSEAGLKTACVSKVFPTRSHTSAAQGGISAALGNMGEDDWRWHMYDTVKGADWLGDQDSIEYLCKEAPAAVLELEKYGVPFSRTEEGKIYQRPFGGMTKNYGNETVQRTCAAADRTGHAILHTLYGQALKHNTEFFIEYFALDLIMKDGACKGIIAWNLNDGTIHRFKSHTTIIATGGYGKVYYSATSAHTCTGDGNAMALRAGLPLQDMEFVQFHPTGIYGHGTLISEGVRGEGGYLVNSKGERFMERYAPKAKDLASR

SEQ ID NO: 97910 - protein, 350 aa, Unknown
  Bacterial polypetide isolated from the Sargasso Sea
EWYAVDLVKNQDGCVVGVIAIEIESGEIVYINSKSTVLATGGAGRIYASTTNALICTGDGAGMALRAGYPMQDMEMWQFHPTGIYGAGTLVTEGCRGEGGYLINKDGERFMERYAPNAKDLAGRDVVARSMILEIIEGRGCGEKGDHVMLKLDHLGEDVLNAKLPGILELSRTFAHVDPVKEPIPVVPTCHYMMGGIPTNVHGQALTQNSDGEDVEIPGLFAVGEAACVSVHGANRLGGNSLLDLVVFGRAAGKHIEKMLSDGIEQRVASDADVEVALARLNRLNESKGGEDVVSLRSELQEIMQNHFGVFRKGDFMKTGIERLQEIGERIKNIFLKDKSKTFNTARIEA

SEQ ID NO: 97911 - protein, 315 aa, Unknown
  Bacterial polypetide isolated from the Sargasso Sea
ECKGLIAWNLNDGTIHRFRAHSVIIATGGYGKVYYSATSAHTCTGDGNAMVLRAGLPLQDMEFVQFHPTGIYGHGTLITEGARGEGGYLTNSKGERFMERYAPKAKDLASRDVVSRSMSIEINEGRGVGKDQDHVHLNLSHLDKEIIESRLPGITDAARLFANVDVTKEPIPVVPTVHYNMGGIPTNYKGEVLTVNGSEKTVPGLMAIGEAACVSVHGANRLGSNSLIDLVVFGRAAAKRASELIKPGTPHDEISEQETEKCLDRFDKIRNANGDIGTAELRLSMQKTMQSKCAVFRTEKTLKEGVDEIRKTYDG

SEQ ID NO: 97912 - protein, 181 aa, Unknown
  Bacterial polypetide isolated from the Sargasso Sea
MSSYKIIDHEYDVVVLGAGGSGLRAAVGLSEAGLKTACISKVFPTRSHTSAAQGGISAALGNMGEDDWRWHMYDTVKGSDWLGDQDCIEYLCKEAPRAVLELEKYGVPFSRTEDGKIYQRPFGGMTKNYGNGTVQRTCAAADRTGHAILHTLYGQALKHNTEFFIEYFALDLLMKNGECKG

SEQ ID NO: 97913 - protein, 237 aa, Unknown
  Bacterial polypetide isolated from the Sargasso Sea
MSAYKIIDHEYDVVVLGAGGSGLRAAVGLSEAGLKTACISKVFPTRSHTSAAQGGISAALGNMGEDDWRWHMYDTVKGSDWLGDQDAIEYLCKEAPRAVVELERYGVPFSRTDDGKIYQRPFGGMTKNYGNGTAQRTCAAADRTGHAILHTLYGQALKQQTEFFIEYFALDLLMKNGECKGVIAWNLTDGTIHRFRSHITIIATGGYGKVYYSATSAHTCTGDGNAMVLRAGLPLQD

SEQ ID NO: 97914 - protein, 316 aa, Unknown
  Bacterial polypetide isolated from the Sargasso Sea
ACISKVFPTRSHTVAAQGGIGAALGNMGEDNWKWHMYDTVKGSDWLGDQDAIEYLCSKAPEAVIELEEYGMPFSRTDDGKIYQRPFGGHLTNNGEGAPAMRACAAADRTGHALLHTLYQQSLKNNVEFYIEYFVLDLISDDQGNCIGVVTWCLEDGSIHRFLSHQTILATGGYGRAYFSSTSAHICTGDGSAMALRQNLPLSDMEFIQFHPTGVYGAGVLITEGARGEGGYLTNSDGERFMERYAPNAKDLASRDVVSRAMTIEISENRGCGDNADHVLLHLEHIDADTLHKRLPGISETAKIFAGVDLTKDPIPV

SEQ ID NO: 97915 - protein, 239 aa, Unknown
  Bacterial polypetide isolated from the Sargasso Sea
MTAYKIIDHEYDVVVLGAGGSGLRAAVGLSEAGLKTACISKVFPTRSHTSAAQGGISAALGNMGEDDWRWHMYDTVKGADWLGDQDSIEYLCKEAPKAVIELEKYGVPFSRTEDGKIYQRPFGGMTKNYGNGIVQRTCAAADRTGHAILHTLYGQALKHNTEFFIEYFALDLLMKDGECKGLIAWNLNDGTIHRFRSHITIIATGGYGKVYYSATSAHTCTGDGNAMGIRAGLPLPDMG

SEQ ID NO: 97916 - protein, 320 aa, Unknown
  Bacterial polypetide isolated from the Sargasso Sea
AGFPAQDMEMWQFHPTGIYGAGSLVTEGCRGEGGYLINADGERFMERYAPNAKDLAGRDVVARSMVMEILEGRGCGPQKDHVHLKLDHLGADVLNSKLPGICELSKTFAHVDPIKEPIPVVPTCHYMMGGTPTNINGQAFSRNDGNDFMLSGLFSVGEAACVSVHGANRLGGNSLLDLVVFGRAAGKHINEELKSGGGVDNASNEDIELATSRLNRLNESESGYEVADIKKQLQTCMQNYFGVFRRGEFMEKGVKELEEIREKSENLYLKDKSIAFNTNRVEALELQNLLEVAEATAISAMMRDESRGAHARDDFPEKMM

SEQ ID NO: 97917 - protein, 287 aa, Unknown
  Bacterial polypetide isolated from the Sargasso Sea
ESGYKTACISKVFPTRSHTVAAQGGIGAALGNMGEDDWKWHMFDTVKGSDWLGDQDAIEYLCSKAPEAVIELEEYGMPFSRTEDGRIYQRPFGGHLTNNGEGAPALRACAAADRTGHALLHTLYQQSLKNNVEFFIEYFVLDLLMDNDGNCKGVLAWSLEDGKMHRFISHQTILATGGYGRAYFSSTSAHICTGDGSAMALRQDLPLSDMEFIQFHPTGIYGAGVLITEGARGEGGYLTNKDGERFMERYAPNAKDLASRDVVSRAMTIEINENRGCGENSDYILMH

SEQ ID NO: 97918 - protein, 294 aa, Unknown
  Bacterial polypetide isolated from the Sargasso Sea
GTLISEGVRGEGGYLLNSKGERFMERYAPKAKDLASRDVVSRSIAVEINEGRGVGKEKDHVHLHLDHLDPKVIEKRLPGISESSRLFADVDVTKEPIPVVPTVHYNMGGIPTNYKAEVLTVNGSEKIVPGLMAIGEAACVSVHGANRLGSNSLIDLVVFGRAAAKRAAELVKPGTPHEEISNSETDKCLERFEKLRNGNGTNRTADLRLAMQKTMQSKCAVFRTEKTLKEGVEEIRKPFEGMDSISVKDKSLVFNTDLVETLEFDNLIRQAIVTLDSAYERKESRGAHAREDHP

SEQ ID NO: 97919 - protein, 223 aa, Unknown
  Bacterial polypetide isolated from the Sargasso Sea
VLTSNGKDTVVQGLMAIGEAACVSVHGANRLGSNSLIDLVVFGKSAATRAAEIIQPGSPHEDLTQSETDKCLDRFDKLRNSNGSTKTSELRVLMQKTMQSKCAVFRTEKTLKEGMNEIRKPFEGMEDISVKDKSLLFNTDLVETLEFDNLIRQAMTTIDSAYHRKESRGAHAREDFKKRDDKSYMTHTLAWQKGNEVEIAYRPVHAKTLTNDVQYFPPKERVY

SEQ ID NO: 97920 - protein, 290 aa, Unknown
  Bacterial polypetide isolated from the Sargasso Sea
GAGVLVTEGCRGEGGYLINKHGERFMERYAPNAKDLAGRDVVARSMVKEILAGNGCGPDGDHVMLKLDHLGEEVLHSRLPGICELSKTFAHVDPVTAPVPVVPTCHYMMGGIATNIHGQAITQDANGNDTIIDGLFAVGEVACVSVHGANRLGGNSLLDLVVFGRAAGLHLEKALKEGIEHRGASETDLDVALSRLAGLNERTTGEDVAPLRKELQNCMQNYFGVFRTGEYMQKGIAQLVDLRQRIANVKISDKSQAFNTARIEALELQNLLEVAEATAIAAENRKESRG

SEQ ID NO: 97921 - protein, 206 aa, Unknown
  Bacterial polypetide isolated from the Sargasso Sea
MEFVQFHPTGIYGHGTLITEGARGEGGYLTNSKGERFMERYAPNAKDLASRDVVSRSMSIEINEGRGVGKDQDHVHLNLSHLDKDIIESRLPGITDAARLFANVDVTKEPIPVVPTVHYNMGGIPTNYKAEVLTVNGSEKTVPGLMAIGEAACVSVHGANRLGSNSLIDLVVFGRAAAKRAAELVKPGTPHEEIPESETQKCLDRF

SEQ ID NO: 97922 - protein, 291 aa, Unknown
  Bacterial polypetide isolated from the Sargasso Sea
EGRGVGNEKDHVHLHLNHLDPKVIEERLPGISESSRLFANVDVTKEPIPVVPTVHYNMGGIPTNYKAEVLTLNGSEKTVPGLMAIGEAACVSVHGANRLGSNSLIDLVVFGRAAAKRAAELVKPGTPHEEISQSETDKCLERFDRLRNASGSNSTADLRLAMQKTMQSKCAVFRTEKTLKEGVNEIRKPYEGMDDLSVKDKSLIFNTDLVETLEFDNLIRQAITTMDSAYHRKESRGAHAREDFPKRNDEKFMQHTLSWCDGKKTKIDYRPVHRSTLSNDVQYFPPQERVY

SEQ ID NO: 97923 - protein, 289 aa, Unknown
  Bacterial polypetide isolated from the Sargasso Sea
KVKDLLERYAPNAKDFSSRDVVSRSMEMEINEGRGAGKDKDHINLHLDHIDKKVIDERLPGISEAAKTFANVDVSKEPIPVVPTVHYNMGGIPTNYKAEVLTLNGSEKTVPGLMAIGEAACVSVHGANRLGSNSLIDLVVFGRAAAKRAAELVKPGSPHEEVSSSETDKCLNRFDRIRNSNGSTKTSELRLKMQKTMQSKCAVFRTEKTLKEGVDQIRKPFEGMSDVSVKDKSLLFNTDLVETLEFDNLISQALTTMDSAYNRKESRGAHAREDFTKRDDKNFMKHTLA

SEQ ID NO: 97924 - protein, 160 aa, Unknown
  Bacterial polypetide isolated from the Sargasso Sea
MNKAYQVIDHHYDVVVVGAGGSGLRATLGSAEAGLKTACISKVFPTRSHTVAAQGGIGAALGNMGDDNWKWHMYDTVKGSDWLGDQDAIEYLCANAPEAVIELEEYGMPFSRTDEGKIYQRPFGGHLTNNGEGAPAMRACAAADRTGHALLHTLYQQSLK

SEQ ID NO: 97925 - protein, 300 aa, Unknown
  Bacterial polypetide isolated from the Sargasso Sea
TVAAQGGIGAALGNMGDDNWKWHMYDTVKGSDWLGDQDAIEYLCANAPEAVIELEEYGMPFSRTEDGRIYQRPFGGHLTNNGEGAPAMRACAAADRTGHALLHTLYQQSLKHKVEFYIEYFVLDLVMDKDGNCKGVVAWCLEDGTIHRFLSHQTILATGGYGRAYFSSTSAHICTGDGSAMALRQNLPLSDMEFIQFHPTGVYGAGVLITEGARGEGGYLTNSDGERFMERYAPNAKDLASRDVVSRAMTIEINEKRGCGENADHVLLHLEHIDSSTLHKRLPGISETAKIFAGVDLTKE

SEQ ID NO: 97926 - protein, 289 aa, Unknown
  Bacterial polypetide isolated from the Sargasso Sea
MKSYNIIDHKYDVVVLGAGGSGLRAAVGLSEAGLKTACISKVFPTRSHTSAAQGGISAALGNMGEDDWRWHMYDTVKGSDWLGDQDSIEYLCKEAPRAVLELEQYGVPFSRTEDGKIYQRPFGGMTKNYGNEPVERTCAAADRTGHAILHTLYGQALKHNTEFFIEYFALDLLMKNGECKGLIAWNLKDGTIHRFRSHITIIATGGYGKIYYSATSAHTCTGDGNAMILRAGLPLQDMEFVQFHPTGIYGHGTLISEGVRGEGGYLLNSKGERFMERYAPKAKDLASRD

SEQ ID NO: 97927 - protein, 260 aa, Unknown
  Bacterial polypetide isolated from the Sargasso Sea
TEAARLFANVDVTKEPIPVVPTVHYNMGGIPTNYKAEVLTVNGSEKTVPGLMAIGEAACVSVHGANRLGSNSLIDLVVFGRAAAKRASELVTPGSPHEEISETETQKCLDRFDKLRNAQGDNSTAELRLAMQKTMQSKCAVFRTEKNLEEGVNEIRKTYDCMDSISVKDRSLVFNTDLVETLEFDNLIRQAVTTVDSAYHRKESRGAHAREDYPKRDDEKFMQHTLAWCDGKNTKITYRPVHKSTLTNEVQYFPPQERVY

SEQ ID NO: 97928 - protein, 312 aa, Unknown
  Bacterial polypetide isolated from the Sargasso Sea
SPTGIYGAGTLVTEGCRGEGGYLINKDGERFMERYAPNAKDLAGRDVVARSMVLEILEGRGCGPNGDHVKLKLDHLGEEVLESRLPGICELSRTFAHVDPVKEPIPVVPTCHYMMGGIPTNVHGQALTVDDSGNDVIIPGLYACGEVACVSVHGANRLGGNSLLDLVVFGRASGLYIEKALREGIELRDASQTDIEEAGSRLNALNQRETGEQVAPLRHELQEIMQNYFGVFRTGEFMREGIAKLAELRGRVEDVALADRSSAFNTSRIECLELQNLFETAEATAIVAEARGESRGAHAREDFTERDDENWL

SEQ ID NO: 97929 - protein, 269 aa, Unknown
  Bacterial polypetide isolated from the Sargasso Sea
LRAAVGLAEAGLKTACISKVFPTRSHTAAAQGGISAALGNMGEDDWRWHMYDTVKGADWLGDQDAIEYLCKEAPEAVIELEKYGVPFSRTEEGKIYQRPFGGMTKNYGNGVAQRTCAAADRTGHAILHTLYGQALKKKTEFFIEHFALDLLMHNDKCQGVLTWSLQDGTINRFRSKITILATGGYGRAYFSATSAHTCTGDGGGMVLRAGLPLQDMEFVQFHPTGIYGVGCLITEGSRGEGGFLVNSEGERFMERYAPSAKDLASRDVV

SEQ ID NO: 97930 - protein, 228 aa, Unknown
  Bacterial polypetide isolated from the Sargasso Sea
NYKAEVLTLNGSEKIVPGLMAIGEAACVSVHGANRLGSNSLIDLVVFGRAAAKRAAELVKPGQPHEEVSNSETDKCLDRFDKIRNSSGSTKTSELRLKMQKTMQSKCAVFRTEKTLKEGVEEIRKPYDGMKDISVKDKSLLFNTDLVETLEFDNLIRQALTTMDSAYSRKESRGAHAREDFAKRDDKNFMKHTLAWQNENKVHIKYRDVHSRTLTNDVQYFPPKERVY

SEQ ID NO: 97931 - protein, 287 aa, Unknown
  Bacterial polypetide isolated from the Sargasso Sea
MEMWQFHPTGLYGNGSLMTEGCRGEGGYLINSEGERFMPNYAPKAKDLASRDVVSRCIVQEILAGRGCGENKDHVLLKIDHLGADAIMKKLPEIREISMTFADVDPIEAPIPVVPTCHYMMGGIPTNVHGQVITTKNGTDSVIDGLYSIGEAANVSVHGANRLGGNSLLDLVVFGRAAGRHINENAKESSSLNLSKSNIEESLNVFNKIQSTKKGETVFNLRSEMQNVMQNYFGVYRNEKLMKEGISKLEEITDRTKKIHLMDKSNQFNSERVEVLEYLNLLDIANA

SEQ ID NO: 97932 - protein, 225 aa, Unknown
  Bacterial polypetide isolated from the Sargasso Sea
NSYKIIDHHYDVVLFGAGGSGLRATLGCAEAGLKTACISKVFPTRSHTVAAQGGIGAALGNMGEDNWKWHMYDTVKGSDWLGDQDAIEYLCSNAPEAVIELEEYGMPFSRTDDGKIYQRPFGGHLTNNGEGAPAMRACAAADRTGHALLHTLYQQSLKNNVEFYIEYFVLDLISDDQGNCIGVVTWCLEDGSIHRFLSHQTILATGGYGRAYFSSTSAHICTGDG

SEQ ID NO: 97933 - protein, 175 aa, Unknown
  Bacterial polypetide isolated from the Sargasso Sea
KAEVLTVNGSEKTVPGLMAIGEAACVSVHGANRLGSNSLIDLVVFGRAAAKRAAELIKPGAPHEKISETETQKCLDRFDKLRNAQGDNSTAELRLAMQKTMQSKCAVFRTEKNLEEGVNEIRKTYDGMDSISVKDRSLVFNTDLVETLEFDNLIRQAVTTVDSAYHRKESRGAHT

SEQ ID NO: 97934 - protein, 256 aa, Unknown
  Bacterial polypetide isolated from the Sargasso Sea
MEFVQFHPTGIYGHGTLISEGVRGEGGYLLNSKGERFMEKYAPKAKDLASRDVVSRSIAVEINEGRGVGKEKDHVHLHLDHLDPDVIEKRLPGISESSRLFADVDVTKEPIPVVPTVHYNMGGIPTNYKAEVLTVNGSEKIVPGLMAIGEAACVSVHGANRLGSNSLIDLVVFGRAAAKRAAELVKSGTPHEEISKSETEKCLNRFEKLRNGNGTNRTADLRLAMQKTMQSKCAVFRTEKTLKEGVEDIRKPFEGM

SEQ ID NO: 97935 - protein, 255 aa, Unknown
  Bacterial polypetide isolated from the Sargasso Sea
TFSGVDVTKEPIPVVPTVHYNMGGIPTNYKAEVLTLNGSEQTVPGLMAIGEAACVSVHGANRLGSNSLIDLVVFGKAAAKRAAEIVKVGSSHESVSNSETDKCLDRFDKIRNSNGTTKTSELRLSMQKTMQSKCAVFRTEETLQQGVNDIRKPLEGMKDLNVKDKSLLFNTDLVESLEFDNLIRQAMTTMDSAFHRKESRGAHAREDFTKRDDKNFMKHTLAWQKENEVKVRYRDVHSRTLTNDVQYFPPKERVY

SEQ ID NO: 97936 - protein, 241 aa, Unknown
  Bacterial polypetide isolated from the Sargasso Sea
MKSYKIIDHNYDVVVLGAGGSGLRAAVGLSEAGLKTACISKVFPTRSHTSAAQGGISAALGNMGEDDWRWHMYDTVKGSDWLGDQDSIEYLCKEAPRAVLELEQYGVPFSRTEDGKIYQRPFGGMTKNYGNETVQRTCAAADRTGHAILHTLYGQALKHNTEFFIEYFALDLLMKDGQCKGLIAWNLNDGTLHRFRSHITIIATGGYGKVYYSATSAHTCTGDGNAMVLRAGLPLPRYGIC

SEQ ID NO: 97937 - protein, 196 aa, Unknown
  Bacterial polypetide isolated from the Sargasso Sea
MSSYKIIDHNYDVVVLGAGGSGLRAAVGLSEAGLKTACISKVFPTRSHTSAAQGGISAALGNMGEDDWRWHMYDTVKGSDWLGDQDAIEYLCKEAPRAVVELERYGVPFSRTDDGKIYQRPFGGMTKNYGNGTAQRTCAAADRTGHAILHTLYGQALKQQTEFFIEYFALDLIMKNGECKGVIAWNLTDGTIHRFR

SEQ ID NO: 97938 - protein, 265 aa, Unknown
  Bacterial polypetide isolated from the Sargasso Sea
ERFMERYAPNAKDLASRDVVSRSMEMEINEGRGAGKNKDHINLHLDHIDKKVIDERLPGISEAAKTFANVDVSKEPIPVVPTVHYNMGGIPTNYKAEVLTLNGAEKTVPGLMAIGEAACVSVHGANRLGSNSLIDLVVFGRAAAKRAAELVKPGSPHEEVSSSETDKCLDRFDKIRNSNGSTKTSELRLKMQKTMQTKCAVFRTEKTLKEGVDQIRKPYEGMSDISVKDKSLLFNTDLVETLEFDNLISQALTTMDSAYNRKESR

SEQ ID NO: 97939 - protein, 284 aa, Unknown
  Bacterial polypetide isolated from the Sargasso Sea
NKDHIHLHINHIDPKIIENRLPGISESVETFVHRDVTKDPIPVVPTVHYNMGGIPANYKAEVITSNGSDKIVPGLMAIGEAACVSVHGANRLGSNSLIDLVVFGKSAANRASELIKPNSPHDEISKSETEKSLNRFDRLRNGDGSNRTSELRLSMQKTMQAKCAVFRTEKTLKEGVSEIKKTFEGMESIAVKDRSLIFNTDLMETLEFDNLIRQAITTMESAYNRKESRGAHAREDFPKRDDKNFMKHTLSWHNGKEVKINYRQVNLSTLTNDVQTFPPKERVY

SEQ ID NO: 97940 - protein, 303 aa, Unknown
  Bacterial polypetide isolated from the Sargasso Sea
RTDDGKIYQRAFGGMTTHFGDGIAQRTCAAADRTGHAMLHTLYQQSIKNQAEFFIEFFALDLIMEDGVCTGVVALEMATGKIHAFRSQRVILATGGHGRAYFSCTAAHTCTGDGSGMALRAGLPLQDMEFVQFHPTGIYGVGCLITEGVRGEGGYLTNSDGERFMERYAPNAKDLASRDVVSRSMTMEIIEGRGVGEKKDHIHLNLQHLGPDVIEERLPGIAETARVFADVDVTKDPIPVLPTVHYNMGGVPTNMHTEVITKNSSGDMEIVPGLMAVGEAASVSVHGANRLGSNSLLDLVVLA

SEQ ID NO: 97941 - protein, 250 aa, Unknown
  Bacterial polypetide isolated from the Sargasso Sea
VIEERLPGIAETARVFADVDVTRDPIPVLPTVHYNMGGVPTNMHTEVITKNSSGDMEIVPGLMAVGEAASVSVHGANRLGSNSLLDLVVFGRESSIQCQKTIKPMETQNKVNQNELDKIIDKFDSIRFSKGSLPTAEIRAEMQSIMQKHASVFRTEELMKEGVEKLSSCIDSFKDVSVSDRGLVWNTDLIETLELENLLGQAIITIQSGQVRKESRGAHARDDYPDRDDENWLIHSLGWMDANNNVTIGS

SEQ ID NO: 97942 - protein, 293 aa, Unknown
  Bacterial polypetide isolated from the Sargasso Sea
GLRAAVGLSEAGLKTACILKVFPTRSHTSAAQGGISAALGNMGEDDWRWHMYDTVKGSDWLGDQDAIEYLCKEAPRAVVELERYGVPFSRTEDGKIYQRPFGGMTKNYGNGTAQRTCAAADRTGHAILHTLYGQALKHKTEFFIEYFALDLIMKNGECKGVIAWNLTDGTIHRFRSHITIIATGGYGKVYYSATSAHTCTGDGNAMVLRAGLPLQDMEFVQFHPTGIYGVGCLITEGARGEGGFLVNGKGERFMERYAPNAKDLASRDVVSRSMEMEINEGRGVGKDKDHINL

SEQ ID NO: 97943 - protein, 194 aa, Unknown
  Bacterial polypetide isolated from the Sargasso Sea
MNKAYQVVDHHYDVVVVGAGGSGLRSTLGLAEAGLKTACISKVFPTRSHTVAAQGGIGAALGNMGEDNWKWHMYDTVKGSDWLGDQDAIEYLCANAPEAVIELEEYGMPFSRTDDGKIYQRPFGGHLTNNGEGAPAMRACAAADRTGHALLHTLYQQSLKYNVEFFIEYFVLDLVMDKDGNCKGIVAWCLEDGT

SEQ ID NO: 97944 - protein, 322 aa, Unknown
  Bacterial polypetide isolated from the Sargasso Sea
MKAYSHETHEYDVVVVGAGGSRLRATLGMAEQGLKTACITKVFPTRSHTVAAQGGIAASLGNMGPDHWQWHMYDTVKGSDWLGDTDAMEYLAREAPKAVYELEHYGVPFSRTEKGEIYQRPFGGHTTEFGDGPPVQRTCAAADRTGHAILHTLYGQSLKQNAEFYIEYFAVDLIMAEDGRCQGVVCWKLDDGSFHVFNSKMVVLATGGYGRAYFSATSAHTCTGDGGGMIARAGLPLQDMEFVQFHPTGIYGSGCLITEGARGEGGYLTNSEGERFMERYAPHYKDLAPRDYVSRCMTMEIREGRGAGKSGDHIHLNLSHLS

SEQ ID NO: 97945 - protein, 322 aa, Unknown
  Bacterial polypetide isolated from the Sargasso Sea
TGDGNAMVLGAVLPLQDMEFVQFHPTGIYGVGCLITEGVRGEGGFLVNGKGERFMERYAPNAKDLASRDVVSRSMEMEINEGRGAGKDKDHINLHLDHIDKKVIDERLPGISEAAKTFANVDVSKEPIPVVPTVHYNMGGIPTNYKAEVLTLNGSEKTVPGLMAIGEAACVSVHGANRLGSNSLIDLVVFGRAAAKRAAEILKPGSPHEDVSNSETDKCLNRFDKIRNSNGSTKTSELRLKMQKTMQSKCAVFRTEKTLKEGVDQIRKPYEGMSDVSVKDKSLLFNTDLVETLEFDNLISQALTTMDSAYNRKESRGAHARE

SEQ ID NO: 97946 - protein, 207 aa, Unknown
  Bacterial polypetide isolated from the Sargasso Sea
MSAYKIIDHEYDVVVLGAGGSGLRAAVGLSEAGLRTACISKVFPTRSHTSAAQGGISAALGNMGEDDWRWHMYDTVKGSDWLGDQDAIEYLCKEAPRAVVELERYGVPFSRTDDGKIYQRPFGGMTKNYGNGTAQRTCAAADRTGHAILHTLYGQALKHNTEFFIEYFALDLIMKNGECKGVIAWNLTDGTIHRFRSHITIIATGGY

SEQ ID NO: 97947 - protein, 242 aa, Unknown
  Bacterial polypetide isolated from the Sargasso Sea
DGTIHRFKSHITIIATGGYGKIYYSATSAHTCTGDGNGMVLRAGLPLQDMEFVQFHPTGIYGVGCLISEGVRGEGGFLLNSKGERFMERYAPNAKDLASRDVVSRSIAIEINEGRGVGKEKDHVHLHLDHLDPKVIDDRLPGIAESAKTFSGVDVTKDPIPVVPTVHYNMGGIPTNYKAEVLTLNGSEKTVPGLMAIGEAACVSVHGANRLGSNSLIDLVVFGKAAAKRAAELIKPNTAHDI

SEQ ID NO: 97948 - protein, 275 aa, Unknown
  Bacterial polypetide isolated from the Sargasso Sea
AAADRTGHAILHTLYGQALKHKTEFFIEYFALDLLMKDGACKGLIAWNLNDGTIHRFRAHTVIIATGGYGKVYYSATSAHTCTGDGNAMVLRAGLPLQDMEFVQFHPTGIYGHGTLITEGARGEGGYLTNSKGERFMERYAPKAKDLASRDVVSRSMSIEINEGRGVGKDLDHVHLNLSHLDKDIIESRLPGITDAARLFANVDVTKEPIPVVPTVHYNMGGIPTNYKAEVLTVNGSEKTVPGLMAIGEAACVSVHGANRLGSNSLIDLVVFGRA

SEQ ID NO: 97949 - protein, 240 aa, Unknown
  Bacterial polypetide isolated from the Sargasso Sea
DGKIYQRPFGGMTKNYGNGIVQRTCAAADRTGHAILHTLYGQALKHKTEFFIEYFALDLLMKDGECKGLIAWNLNDGTIHRFRAHSVIIATGGYGKVYYSATSAHTCTGDGNAMVLRAGLPLQDMEFVQFHPTGIYGHGTLITEGARGEGGYLTNSKGERFMERYAPNAKDLASRDVVSRSMSIEINEGRGVGKDQDHVHLNLSHLDKKIIESRLPGITDAARLFANVDVTKEPIPVVPT

SEQ ID NO: 97950 - protein, 263 aa, Unknown
  Bacterial polypetide isolated from the Sargasso Sea
MPFSRTDDGKIYQRPFGGHLTNNGEGAPAMRACAAADRTGHALLHTLYQQSLKNNVEFYIEYFVLDLISDDQGNCIGVVTWCLEDGSIHRFLSHQTILATGGYGRAYFSSTSAHICTGDGSAMALRQNLPLSDMEFIQFHPTGVYGAGVLITEGARGEGGYLTNSDGERFMERYAPNAKDLASRDVVSRAMTIEISENRGCGDNADHVLLHLEHIDADTLHKRLPGISETAKIFAGVDLTKDPIPVLPTVHYNMGGIPTNYRT

SEQ ID NO: 97951 - protein, 278 aa, Unknown
  Bacterial polypetide isolated from the Sargasso Sea
HTVIIATGGYGKVYYSATSAHTCTGDGNAMVLRAGLPLQDMEFVQFHPTGIYGHGTLITEGARGEGGYLTNSKGERFMERYAPKAKDLASRDVVSRSMSIEINEGRGVGKDLDHVHLNLSHLDKDIIESRLPGITDAARLFANVDVTKEPIPVVPTVHYNMGGIPTNYKAEVLTVNGSEKTVPGLMAIGEAACVSVHGANRLGSNSLIDLVVFGRAAAKRAAELIKPGAPHEELSDTETQKCLDRFDKIRNAKGDIGTAELRLSMQKTMQSKCAVFRT

SEQ ID NO: 97952 - protein, 176 aa, Unknown
  Bacterial polypetide isolated from the Sargasso Sea
MTNSYKIIDHHYDVVVVGAGGSGLRATLGCAEAGLKTACISKVFPTRSHTVAAQGGIGAALGNMGEDNWKWHMYDTVKGSDWLGDQDAIEYLCSKAPEAVIELEEYGMPFSRTDDGKIYQRPFGGHLTNNGEGAPAMRACAAADRTGHALLHTLYQQSLKNNVEFYIEYFVLDLIS

SEQ ID NO: 97953 - protein, 236 aa, Unknown
  Bacterial polypetide isolated from the Sargasso Sea
AHTCTGDGNAMVLRAGLPLQDMEFVQFHPTGIYGHGTLISEGVRGEGGYLVNAKGERFMERYAPNAKDLASRDVVSRSMSIEINEGRGVGDEKDHVHLHLSHLDKSIIENKLPGITEAARLFANVDVTKDPIPVVPTVHYNMGGIPTNYKAEVLTVNGSEKTVPGLMAIGEAACVSVHGANRLGSNSLIDLVVFGRAAAKRAAELIKPGEPHEDIDETETQKCLDRFDKLRNAQGS

SEQ ID NO: 97954 - protein, 232 aa, Unknown
  Bacterial polypetide isolated from the Sargasso Sea
GIPTNYKAEVLTVNGSEKTVPGLMAIGEAACVSVHGANRLGSNSLIDLVVFGRAAAKRAAELIKPGMPHEEISELETQKCLDRFDKIRNSEGNVGTAELRLSMQKTMQSKCAVFRTEKTLKEGVDEIKKTFDGLETISVKDKSLIFNTDLVETLEFDNLIRQAVVTVDSAFNRKESRGAHAREDYPKRDDDKFMQHTLAWCDGKNTKISYREVHKSTLTNDVQYFPPQERIY

SEQ ID NO: 97955 - protein, 311 aa, Unknown
  Bacterial polypetide isolated from the Sargasso Sea
MFKAPEAIEDLEEYGMPFSRTEEGKIYQRPFGGHLTSNGEGPPAMRACAAADRTGHALLHTLYQQSLKNSVKFFIEYFVLDLLIDDDGTCKGVIAWSLEDGTLHRFLSHQTIIATGGYGRAYFSSTSAHICTGDGSAMVLRQGLPLSDMEFIQFHPTGVYGAGVLITEGARGEGGYLTNSDGERFMERYAPNAKDLASRDVVSRAMTIEINENRGCGENFDHVLLHLEHINSNTIHKRLPGISETAKIFAGVDLTKDPIPVLPTVHYNMGGIPTNYRTEVLNPTTDNPDKICEGLMAVGEAACVSVHGANR

SEQ ID NO: 97956 - protein, 297 aa, Unknown
  Bacterial polypetide isolated from the Sargasso Sea
ASRDVVSRSIATEINEGRGVGKEKDHVYLHLNHLDPKVIDERLPGIAESSRLFANVDVTKDPIPVVPTVHYNMGGIPTNYKAEVLTVNGSESTVPGLMAIGEAACVSVHGANRLGSNSLIDLVVFGRSAARRAAELVKPGMAHEEISTAETDKCLDRFDKLRNGAGENRTADLRLSMQKTMQSKCAVFRTEKTLKEGVEEIRKPFEGIKSINVKDKSLIFNTDLVETLEFDNLIRQAIVTMDSAYSRKESRGAHAREDYPNRNDKNYMKHTLSWCEGAKSKITYRDVHKSTLTNEVQ

SEQ ID NO: 97957 - protein, 281 aa, Unknown
  Bacterial polypetide isolated from the Sargasso Sea
ISEGVRGEGGYLVNSKGERFMERYAPKAKDLASRDVVSRSIAVEINEGRGVGNEKDHVHLHLNHLDPKVIEERLPGISESSRLFANVDVTKEPIPVVPTVHYNMGGIPTNYKAEVLTLNGSEKTVPGLMAIGEAACVSVHGANRLGSNSLIDLVVFGRAAAKRAAELVKPGTPHEEIPQSETDKCLERFDRLRNASGTNNTADLRLAMQKTMQSKCAVFRTEKTLKEGVNEIRKPYEGMDDLSVKDKSLIFNTDLVETLEFDNLIRQAITTMDSAYHRKES

SEQ ID NO: 97958 - protein, 277 aa, Unknown
  Bacterial polypetide isolated from the Sargasso Sea
EGVRGEGGYLLNSKGERFMEKYAPKAKDLASRDVVSRSIAIEINEGRGVGKDKDHVHLHLNHLDPKVIDERLPGIAESSRLFANVDVTKEPIPVVPTVHYNMGGIPTNYKAEVLTVNGSEKTVPGLMAIGEAACVSVHGANRLGSNSLIDLVVFGRAAAKRAAELIKPGTPHEDIPISETEKCLERFDSLRNGSGDNRTADLRLSMQKTMQSKCAVFRTDKTLKEGVEEIRKPYEGMDNINVKDKSLIFNTDLVETLEFDNLIRQAITTMDSAYSRK

SEQ ID NO: 97959 - protein, 252 aa, Unknown
  Bacterial polypetide isolated from the Sargasso Sea
MSAYKIIEHEYDVVVLGAGGSGLRAAVGLSEAGLKTACISKVFPTRSHTSAAQGGISAALGNMGEDDWRWHMYDTVKGSDWLGDQDAIEYLCKEAPRAVVELERYGVPFSRTEDGKIYQRPFGGMTKNYGNGTAQRTCAAADRTGHAILHTLYGQALKQNTEFFIEYFALDLIMKNGECKGVIAWNLTDGTIHRFRSHITIIATGGYGKVYYSATSAHTCTGDGNAMVLRAGLPLQDMEFVQFHPTGIYGVG

SEQ ID NO: 97960 - protein, 180 aa, Unknown
  Bacterial polypetide isolated from the Sargasso Sea
MSSSYNIIDHHYDVVVVGAGGSGLRATLGCAESGLKTACISKVFPTRSHTVAAQGGIGAALGNMGEDNWKWHMYDTVKGSDWLGDQDAIEYLCSKAPEAVIELEEYGMPFSRTDDGKIYQRPFGGHLTNNGEGAPAMRACAAADRTGHALLHTLYQQSLKNNVEFFIEYFVLDLISDDSG

SEQ ID NO: 97961 - protein, 327 aa, Unknown
  Bacterial polypetide isolated from the Sargasso Sea
IYQRPFGGMTKNYGNGVAQRTCAAADRTGHAILHTLYGQALKKKTEFFIEHFALDLLMHNDKCQGVLTWSLQDGTINRFRSKITILATGGYGRAYFSATSAHTCTGDGGGMVLRAGLPLQDMEFVQFHPTGIYGVGCLITEGSRGEGGFLVNSEGERFMERYAPSAKDLASRDVVSRSMTVEINEGRGVGKNKDHIYLHLNHLDPKVLSERLPGISESAKVFAGVDVTKEPIPVLPTVHYNMGGISTNYHGQVLTKDVNGSDKIVDGLMAVGEAACVSVHGANRLGSNSLIDLVVFGKAASKKAAELVKPNSKHEIIPDSETQKSWT

SEQ ID NO: 97962 - protein, 216 aa, Unknown
  Bacterial polypetide isolated from the Sargasso Sea
SEKTVPGLMAIGEAACVSVHGANRLGSNSLIDLVVFGRAAAKRAAELVKPGTPHEEINESETQKCLDRFDKIRNSDGDIGTAELRLSMQKTMQSKCAVFRTEKTLKEGVDEIRQTFDGLDSLSVKDKSLIFNTDLVETLEFDNLIRQAVVTVDSAYNRKESRGAHAREDYPKRDDEKFMQHTLAWCDGKKSKISYRDVHKSTLTNEVQYFPPQERV

SEQ ID NO: 97963 - protein, 245 aa, Unknown
  Bacterial polypetide isolated from the Sargasso Sea
RSRVVPTCHYMMGGFPTNVHGQALKLTGGHEGEEQFVNGLFAVGEVACVSVHGANRLGGNSLLDLVVFGRAAGLYIEDALRQGMTQYEPRDADIDEALSRVRRWDDSKGGESVSALRKELQSVMQNHFGVFRKGDLMAEGVAKLADLRERIANAHLDDKSKPFNTARIEALELDNLLEVAEATAIAAEGRTESRGAHSRYDYPDRDDENWLCHSIFDPTAKKLGKRDVNFKPKTVDTFQPKARTY

SEQ ID NO: 97964 - protein, 285 aa, Unknown
  Bacterial polypetide isolated from the Sargasso Sea
KNKDHIHLHINHIDPKIIESRLPGISESVETFVHRDVTKDPIPVVPTVHYNMGGIPTNYKAEVITSNGSDKTVPGLMSIGEAACVSVHGANRLGSNSLIDLVVFGKAAAKRATEIIKPNSSHENISTSETDKCLDRFDKLRNGSGSIKTSELRLSMQKTMQSKCAVFRNEKTLSEGVKEIKKPLEEMQKIAIKDRSMIFNTDLMEALEFDNLIRQAVTTIESAYHRKESRGAHAREDFPKRDDKNFMKHTLSWHNGKEVKIGYRKVNLSTLTNEVQTFPPKERIY

SEQ ID NO: 97965 - protein, 262 aa, Unknown
  Bacterial polypetide isolated from the Sargasso Sea
GIAESSRLFANVDVTKEPIPVVPTVHYNMGGIPTNYKAEVLTVNGSEKTVPGLMAIGEAACVSVHGANRLGSNSLIDLVVFGRAAAKRAAELVKPGMSHEDISNSETERCIERFDNLRNGNGDNRTADLRISMQKTMQSKCAVFRTEKTLKEGVNEIRKPFQGMDNINVKDKSLIFNTDLVETLEFDNLIRQAITTMDSAYNRKESRGAHAREDFPSRDDQKYMKHTLSWCEGSKSKIVYRDVHKSTLTNEVQYFPPQERIY

SEQ ID NO: 97966 - protein, 344 aa, Unknown
  Bacterial polypetide isolated from the Sargasso Sea
EFVQFHPTGIYGHGTLISEGVRGEGGYLLNSKGERFMERYAPKAKDLASRDVVSRSIAIEINEGRGVGNEKDHVHLHLDHLDPKVIESRLPGISESSRLFANVDVTKEPIPVVPTVHYNMGGIPTNYKAEVITLNGSEKVVPGLMAIGEAACVSVHGANRLGSNSLIDLVVFGRAAAKRAAELVKPRSPHEDISDNETKKCIDRFHELRNAKGENKTADLRLAMQKTMQSKCAVFRTEKTLKEGVEEIRKPYDGMESISVKDKSLIFNTDLVETLEFDNLIRQAIVTMDSAYERRESRGAHAREDYPKRDDNHFMKHTLSWCEGSKTKIDYKESNRSTLSNDVS

SEQ ID NO: 97967 - protein, 329 aa, Unknown
  Bacterial polypetide isolated from the Sargasso Sea
KEKIYQRPLGGMTTEYEKGIAQRTCAAADATGHAILHTLYNQSLKNDVDFFVEYFVIDLIFEEGKCVGVLAWCLEDGKIHLFQSHMVILATGGYGRAYLSSTSAHTCTGDGNGMVLRANLPLQDMEFIQFHPTGIYGAGCLITEGARGEGGYLTNSEGDRFMPKYAPNAKDLASRDVVSRAIQMEVNAGRGVGAEKDHAHLHLEHLDVDTINNKLPGIAETARIFAGVDVTKDPIPVIPTVHYNMGGTPTNINTEVLDADNNVVPGLMAIGEGACVSVHGANRLGSNSLLDLVVFGRSAANRTLEVLKDKPDSHIEVSKSTIDKILSKI

SEQ ID NO: 97968 - protein, 288 aa, Unknown
  Bacterial polypetide isolated from the Sargasso Sea
CISKVFPTRSHTSAAQGGISAALGNMGEDDWRWHMYDTVKGSDWLGDQDCIEYLCKEAPRAVLELERYGVPFSRTEDGKIYQRPFGGMTKNYGNETVQRTCAAADRTGHAILHTMYGQALKHNTEFFIEYFALDLLMKNGECKGLIAWNLNDGTIHRFRSHITIIATGGYGKTYYSSTSAHTCTGDGNAMVLRAGLPLQDMEFVQFHPTGIYGHGTLISEGVRGEGGYLLNSKGERFMERYAPKAKDLASRDVVSRSIALEINEGRGVGKEKDHVHLHLDHLDKEVIE

SEQ ID NO: 97969 - protein, 265 aa, Unknown
  Bacterial polypetide isolated from the Sargasso Sea
PFSRTKDGKIYQRPFGGMTKNYGNETVQRTCAAADRTGHAILHTMYGQALKHNTEFFIEYFALDLLMKNGECKGLIAWNLNDGTIHRFRSHITIIATGGYGKTYYSSTSAHTCTGDGNAMVLRAGLPLQDMEFVQFHPTGIYGHGTLISEGVRGEGGYLLNSKGERFMERYAPKAKDLASRDVVSRSIAVEINEGRGVGKEKDHVHLHLDHLDPEVIEKRLPGISESSKLFADVDVTKEPIPVVPTVHYNMGGIPTNYKAEVLTV

SEQ ID NO: 97970 - protein, 236 aa, Unknown
  Bacterial polypetide isolated from the Sargasso Sea
MRATLGMPAAGLKTACISKVFPTRSHTVAAQGGIGAALGNMSEDHWEWHMFDTVKGADWLGDQDAIEYMCREAVPAVVELEHFGVPFSRNDEGKIYQRPFGGHMRNYGEAPVQRACAAADRTGHAILHTLYQQCLKNEAEFYIEYFVLDLIMGADGVCEGVITWNLDDGTIHVFRSHQIVLATGGYGRAYFSATSAHTCTGDGNGMVARAGIPLQDHEFVQFHPTGIYGSGCLITE

SEQ ID NO: 97971 - protein, 195 aa, Unknown
  Bacterial polypetide isolated from the Sargasso Sea
MNAYKIIDHEYDVVVLGAGGSGLRAAVGLSEAGLKTACISKVFPTRSHTSAAQGGISAALGNMGEDDWRWHMYDTVKGSDWLGDQDAIEYLCKEAPRAVVELERYGVPFSRTDDGKIYQRPFGGMTKNYGNGTAQRTCAAADRTGHAILHTLYGQALKQKTEFFIEYFALDLIMKNGECKGVIAWNLTDGTIHRF

SEQ ID NO: 97972 - protein, 281 aa, Unknown
  Bacterial polypetide isolated from the Sargasso Sea
HINLHLDHLDKKVIDERLPGISEAAKTFANVDVNKDPIPVVPTVHYNMGGIPTNYKAEVLTLNGSEKTVPGLMAIGEAACVSVHGANRLGSNSLIDLVVFGKAAAKRAAEIVKPGMPHEEVSSYETEKCLSRFDKIRNSNGTTKTSELRLKMQKTMQTKCAVFRTEKTLKEGVDQIRKPYEGMQDISVKDKSLLFNTDLVETLEFDNLISQALTTMDSAYHRKESRGAHAREDFTKRDDKNYMKHTLAWQKGKKVEIKYRDVHSRTLTNDVQYFPPKERVY

SEQ ID NO: 97973 - protein, 325 aa, Unknown
  Bacterial polypetide isolated from the Sargasso Sea
KVYYSATSAHTCTGDGNAMVLRAGLPLQDMEFVQFHPTGIYGHGTLITEGARGEGGYLTNSKGERFMERYAPNAKDLASRDVVSRSMSIEINEGRGVGKDQDHVHLNLSHLDKEIIESRLPGITEASRLFANVDVTKEPIPVVPTVHYNMGGIPTNYKAEVLTVNGSEKTVPGLMAIGEAACVSVHGANRLGSNSLIDLVVFGRSAAKRAAELITPGTPHEEIPESETQKSLDRFDKLRNAKGENSTADLRLSMQKTMQSKCAVFRTEKNLKEGVDEIRKTYDSIDSISVKDRSLVFNTDLVETLEFDNLIRQAVTTVDSAYQRK

SEQ ID NO: 97974 - protein, 183 aa, Unknown
  Bacterial polypetide isolated from the Sargasso Sea
MTNSYKIIDHHYDVVVVGAGGSGLRATLGCAEAGLKTACISKVFPTRSHTVAAQGGIGAALGNMGEDNWKWHMYDTVKGSDWLGDQDAIEYLCSKAPEAVIELEEYGMPFSRTDDGKIYQRPFGGHLTNNGEGAPAMRACAAADRTGHALLHTLYQQSLKNNVEFYIEYFVLDLITDDQGNCI

SEQ ID NO: 97975 - protein, 313 aa, Unknown
  Bacterial polypetide isolated from the Sargasso Sea
NADKAVVGVIAFKIETGEIYYIKSKATVLATGGAGRIYSSTTNALINSGDGIGMALRAGMPVQDIEMWQFHPTGIHGAGTLVTEGCRGEGGYLLNKDGERFMERYAPNAKDLASRDVVARSMALEILEGRGCGPNADHIFLRLDHLGPEVVHKRLPGITELSKTFAGVDPAVQPIPVVPTCHYMMGGIPTNINGQVISVEHGEDKIVDGLYAAGEVACVSVHGGNRLGGNSLLDLVVFGRAAGLYIEESMKQGVELKDASKDDIEKALERLNRLNASTEGDQVAVLKEKMQQNMQNNFGVFRRGGSDEKGIEE

SEQ ID NO: 97976 - protein, 309 aa, Unknown
  Bacterial polypetide isolated from the Sargasso Sea
FPTRSHTVAAQGGIGAALNNMGEGDNWQFHMYDTVKGSDWLGDQDAIEYMCRNAIPAVIELENYGVPFSRTEEGKIYQRPFGGHTLDHGKSMARRACAAADRTGHAILHTLYQQCLKHAAHFHIEYYVLDLLMTDAGECAGVIALCMEDGKLHRFWGQQTVLATGGYGRVYFSCTSAHTCTGDGNAMALRAGLPLQDMEFVQFHPTGVYGAGVLITEGARGEGGYLTNSEGERFMERFAPTAKDLASRDVVSRAMTIEINEGRGVGPNKDHIMLHLEHIDPDTLHVRLPGITETARIFCGVDVTREPIP

SEQ ID NO: 97977 - protein, 213 aa, Unknown
  Bacterial polypetide isolated from the Sargasso Sea
VKGSDWLGDQDSIEYLCKEAPRAVLELEKYGVPFSRTDEGKIYQRPFGGMTKNYGNEPVQRTCAAADRTGHAILHTLYGQALKHNTEFFIEYFALDLLMKDGACKGLIAWNLNDGTIHRFRSHITIIATGGYGKVYYSATSAHTCTGDGNAMVLRAGLPLQDMEFVQFHPTGIYGHGTLISEGVRGEGGFLLNSKGERFMERYAPKAKDWHQE

SEQ ID NO: 97978 - protein, 266 aa, Unknown
  Bacterial polypetide isolated from the Sargasso Sea
MALRAGLPLQDMEFVQFHPTGIYGVGTLISEGVRGEGGFLLNSKGERFMEKYAPKAKDLASRDVVSRSIAVEINEGRGVGKNKDYVNLHLDHLDPKVIEERLPGIAESAKTFCEVDVRKDPIPVVPTVHYNMGGIPTNYKAEVLTLNGKESTVPGLMAIGEAACVSVHGANRLGSNSLIDLVVFGKSAANRAAELIKPGTPHEEIPQSETDKCLNRFDKLRNASGATKTSELRLSMQRTMQSKCAVFRTEKTLKEGMDQIRKPFEG

SEQ ID NO: 97979 - protein, 280 aa, Unknown
  Bacterial polypetide isolated from the Sargasso Sea
AGGAGLRAAVGLSEAGLKTACISKVFPTRSHTSAAQGGISAALGNMGEDDWRWHMYDTVKGSDWLGDQDSIEYLCKEAPRAVLELERYGVPFSRTEDGKIYQRPFGGMTKNYGNETVQRTCAAADRTGHAILHTMYGQALKHNTEFFIEYFALDLLMKDGECKGLIAWNLNDGTIHRFRSHITIIATGGYGKTYYSSTSAHTCTGDGNAMVLRAGLPLQDMEFVQFHPTGIYGHGTLISEGVRGEGGYLLNSKGERFMERYAPKAKDLASRDVVSRSIAV

SEQ ID NO: 97980 - protein, 301 aa, Unknown
  Bacterial polypetide isolated from the Sargasso Sea
EDNWKWHMYDTVKGSDWLGDQDAIEYLCSKAPEAVIELEEYGMPFSRTDDGKIYQRPFGGHLTNNGEGAPAMRACAAADRTGHALLHTLYQQSVKNNVEFYIEYFVLDLISDDQGNCIGVVTWCLEDGSIHRFLSHQTILATGGYGRAYFSSTSAHICTGDGSAMALRQNLPLSDMEFIQFHPTGVYGAGVLITEGARGEGGYLTNSDGERFMERYAPNAKDLASRDVVSRAMTIEISENRGCGDNADHVLLHLEHIDADTLHKRLPGISETAKIFAGVDLTKDPIPVLPTVHYNMGGIPT

SEQ ID NO: 97981 - protein, 282 aa, Unknown
  Bacterial polypetide isolated from the Sargasso Sea
DHVHLHLSHLDPKIIEKRLPGISESSRLFANVDVTKEPIPVVPTVHYNMGGIPTNYKAEVLTLNGSEKTVPGLMAIGEAACVSVHGANRLGSNSLIDLVVFGRAAAKRASELVRSNMPHESIGESETEKCLERFDKLRNANGENATAELRVNMQKTMQSKCAVFRSEKTLKEGVDEIRKTYDGMGSLSVKDKSLIFNTDLVETLEFDNLIRQAITTIESAYHRKESRGAHAREDYPKRDDEKFMQHTLAWYNGKETKIDYRPVHKNTLTNEVQYFPPQERVY

SEQ ID NO: 97982 - protein, 289 aa, Unknown
  Bacterial polypetide isolated from the Sargasso Sea
MRAYKIIDHEYDVVVLGAGGSGLRAAVGLSEAGLKTACISKVFPTRSHTSAAQGGISAALGNMGEDDWRWHMYDTVKGSDWLGDQDAIEYLCKEAPRAVVELEKYGVPFSRTEDGKIYQRPFGGMTKNYGNGTAQRTCAAADRTGHAILHTLYGQALKHQTEFFIEYFALDLIMKNGECKGIIAWNLNDGTIHRFRAHMTIIATGGYGKIYYSATSAHTCTGDGNAMVLRAGLPLQDMEFVQFHPTGIYGVGCLISEGVRGEGGYLLNSKGERFMERYAPNAKDLASRR

SEQ ID NO: 97983 - protein, 234 aa, Unknown
  Bacterial polypetide isolated from the Sargasso Sea
MGGIPTNYKAEVIISNGDDKIVPGLMAIGEAACVSVHGANRLGSNSLIDLVVFGKAAANRAIELIKPNSPHDEISKNETEKCLDRFDKLRNGNGSNKTSELRLSMQKTMQAKCAVFRTEKTLKEGVNEIKKPFEGMKTISVKDRSMIFNTDLMETLEFDNLIRQAITTMESAYHRKESRGAHAREDFPKRDDQNYMKHTLSWHNDKEVKINYRKVNLSTLTNEVQTFPPKERVY

SEQ ID NO: 97984 - protein, 230 aa, Unknown
  Bacterial polypetide isolated from the Sargasso Sea
MHTEVITKNSAGEMEIVPGLMAVGEAASVSVHGANRLGSNSLLDLVVFGRESAIQCQKTIKPMDIQGKVNQSELDKIIDKFDSIRFSKGSLPTAEIRAEMQSIMQKHASVFRTEELMQEGVEKLSSCIESFKDVSVSDRGLIWNTDLIETLELENLLGQAIITMQSGQVRKESRGAHARDDYPDRDDENWLIHSMGWMDENNNVAIGSSPVHLDTQTDEVESIPLKARVY

SEQ ID NO: 97985 - protein, 283 aa, Unknown
  Bacterial polypetide isolated from the Sargasso Sea
RDMEFVQYHPTGLPGSGILMTEGCRGEGGILVNKNGYRYLQDYGMGPETPLGEPKNKYMELGPRDKVSQAFWHEWRKGNTIPTPRGDVVYLDLRHLGEKKLLERLPFICELSKAYVGVDPVKEPIPVRPTAHYTMGGIETDQQCETRIKGLFAVGECSSVGLHGANRLGSNSLAELVVFGRLAGEQAMQRATEAGEANSAALDAQVVDIEKRLKDLVNQEGNENWAKIRDEMGLSMEEGCGIYRTPELMQKTVDKLAELQERFKRVRITDTSSVFNTDLLYTI

SEQ ID NO: 97986 - protein, 222 aa, Unknown
  Bacterial polypetide isolated from the Sargasso Sea
MTVNGSEKTVPGLMAIGEAACVSVHGANRLGSNSLIDLVVFGRAAAKRAAELIKPGTPHEDINESETQKCLDRFDKIRNSDGDIGTAELRLSMQKTMQSKCAVFRTEKTLKEGVDEIRQTFDGLDSLSVKDKSLIFNTDLVETLEFDNLIRQAVVTVDSAYNRKESRGAHAREDYPKRDDEKFMQHTLAWCDGKKSKISYRDVHKSTLTNEVQYFPPQERVY

SEQ ID NO: 97987 - protein, 284 aa, Unknown
  Bacterial polypetide isolated from the Sargasso Sea
DVVSRSMTMEIIEGRGVGEKKDHIHLNLQHLGPDVIEERLPGIAETARVFADVDVTRDPIPVLPTVHYNMGGVPTNMHTEVITKNSSGDMEIVPGLMAVGEAASVSVHGANRLGSNSLLDLVVFGRESSIQCQKTIKPMETQNKVNQNELDKIIDKFDSIRFSKGSLPTAEIRAEMQSIMQKHASVFRTEELMKEGVEKLSSCIDSFKDVSVSDRGLVWNTDLIETLELENLLGQAIITIQSGQVRKESRGAHARDDYPDRDDENWLIHSLGWMDANNNVTIGS

SEQ ID NO: 97988 - protein, 281 aa, Unknown
  Bacterial polypetide isolated from the Sargasso Sea
KGERFMERYAPNAKDLSSRDVVSRSMSIEINEGRGVGAEKDHVHLYLSHLDKKVIENRLPGITEAARLFANVDVTKEPIPVVPTVHYNMGGIPTNYKAEVLTVNGSEKTVPGLMAIGEAACVSVHGANRLGSNSLIDLVVFGRAAAKRAAELIKPNTPHEEISETETERCMDRFDNLRNANGSNSTAELRLEMQKTMQSKCAVFRTEKNLKEGVTDIRKTYDGMDSISVKDKSMVFNTDLVETLEFDNLIRQAITTVDSAYNRKESRGAHAREDFPKRDDQ

SEQ ID NO: 97989 - protein, 298 aa, Unknown
  Bacterial polypetide isolated from the Sargasso Sea
NGRIYQRPFGGQSKEFGEGGQAARTCAAADRTGHALLHTLYQANLKAGTKFLNEWFAVDLIENSEGAIGGISCFDMETGEISIVRSSAVVLATGGAGQVYEQNTTSLICTGDGLGMVLRNGLPLQDMEMWQFHPTGLYGNGSLMTEGCRGEGGYLINSEGERFMPNYAPKAKDLASRDVVSRCIVQELIAGRGCGEKKDHVLLKIDHLGEEAIKSKLPEIREISMTFAGVDPIKDPIPVVPTCHYMMGGIPTNVNGQVLTTDVKGKDQIVQGLYSIGEAANVSVHGANRLGGNSLLDL

SEQ ID NO: 97990 - protein, 297 aa, Unknown
  Bacterial polypetide isolated from the Sargasso Sea
RSHTVSAQGGITCAIASADPNDDWRWHMYDTVKGSDYIGDQDAIEYMCSTGPQAVFELEHMGLPFSRTEQGRIYQRPFGGQSKGPDNPTQAARTCAAADRTGHALLHTLYQANLKGGTSFLNEWYAVDLVKNSKNEVVGVVAIEIETGEVCYIKSRATVLATGGAGRIYASTTNALINTGDGVGMALRAGFPVQDIEMWQFHPTGIYGAGTLVTEGCRGEGGYLINSEGERFMERYAPNAKDLAGRDVVARSMVLEILEGRGCGPDKDHVLLKLDHLGEETLNLRLPGICELHAPCP

SEQ ID NO: 97991 - protein, 256 aa, Unknown
  Bacterial polypetide isolated from the Sargasso Sea
AAVGLSEAGLKTACISKVFPTRSHTSAAQGGISAALGNMGEDDWRWHMYDTVKGADWLGDQDCIEYLCKEAPRAVLELEKYGVPFSRTDDGKIYQRPFGGMTKNYGNEPVQRTCAAADRTGHAILHTLYGQALKHNTEFFIEYFALDLLMKDGACKGLIAWNLNDGTIHRFRSHITIIATGGYGKVYYSATSAHTCTGDGNAMVLRAGLPLQDMEFVQFHPTGIYGHGTLISEGVRGEGGYLLNSKGERFMERYAP

SEQ ID NO: 97992 - protein, 257 aa, Unknown
  Bacterial polypetide isolated from the Sargasso Sea
MGEDDWRWHMYDTVKGADWLGDQDCIEYLCKEAPKAVIELEKYGVPFSRTEDGKIYQRPFGGMTKNYGNGIVQRTCAAADRTGHAILHTLYGQALKHKTEFFIEYFALDLLMKDGECKGLIAWNLNDGTIHRFRAHSVIIATGGYGKVYYSATSAHTCTGDGNAMILRAGLPLQDMEFVQFHPTGIYGHGTLITEGARGEGGYLTNSKGERFMERYAPKAKDLASRDVVSRSMSIEINEGRGVGKDQDHVHLNLSHL

SEQ ID NO: 97993 - protein, 256 aa, Unknown
  Bacterial polypetide isolated from the Sargasso Sea
MKSYKIIDHSYDVVVLGAGGSGLRAAVGLSEAGLRTACISKVFPTRSHTSAAQGGISAALGNMGEDDWRWHMYDTVKGSDWLGDQDSIEYLCKEAPRAVLELEQYGVPFSRTEDGKIYQRPFGGMTKNYGNGTVQRTCAAADRTGHAILHTLYGQALKHNTEFFIEYFALDLLMKDGQCKGLIAWNLNDGTLHRFRSHITIIATGGYGKVYYSATSAHTCTGDGNAMVLRAGLPLQDMEFVQFHPTGIYGHGTLIS

SEQ ID NO: 97994 - protein, 259 aa, Unknown
  Bacterial polypetide isolated from the Sargasso Sea
EAARLFANVDVAKEPIPVVPTVHYNMGGIPTNYKAEVLTVNGSEKTVPGLMAIGEAACVSVHGANRLGSNSLIDLVVFGRAAAKRAAELVKPGTPHEEIPESETQKCLDRFDKLRNAKGENSTAELRLSMQKTMQSKCAVFRTEKNLKEGVDEIRKTYDGMDSISVQDRSLVFNTDLVETLEFDNLIRQAVTTVESAYHRKESRGAHARDDYPKRDDEKFMQHTLAWCDGKNTKISYRAVHKSTLTNEVQYFPPQERVY

SEQ ID NO: 97995 - protein, 289 aa, Unknown
  Bacterial polypetide isolated from the Sargasso Sea
RTCAAADRTGHAILHTLYGQALKHNTEFFIEYFALDLLMKDGECKGLIAWNLNDGTIHRFRSHITIIATGGYGKVYYTATSAHTCTGDGNAMALRAGLPLQDMEFVQFHPTGIYGVGTLISEGVRGEGGFLLNSKGERFMERYAPKAKDLASRDVVSRSIAVEINEGRGVGKNKDYVNLHLDHLDPKVIEQRLPGIAESAKTFCEVDVRKDPIPVVPTVHYNMGGIPTNYKAEVLTLNGKESTVPGLMAIGEAACVSVHGANRLGSNSLIDLVVFGKSAANRAAELIKP

SEQ ID NO: 97996 - protein, 302 aa, Unknown
  Bacterial polypetide isolated from the Sargasso Sea
AGRDVVARSMMTEIREGRGCEGPWGTHIKLKLDHLGKDVLESRLPGILELSRTFAHVDPVKEPIPVIPTCHYMMGGIPTNVDGQCLTVDENGNDKVVNGLFACGEIACVSVHGANRLGGNSLLDLVVFGRATGLHLGKTLSEMAPTRDASESDLEASMTRFNRWENSEKGKGEDPVQIKKDLQECMQLNFSVFREGEAMAEGLKELSEIRERLKHARLDDKSSDFNTQRIECLELDNLMETAYSTAVAANFRTESRGAHSRFDFPERDDDNWLCHSIYDPNTDKMLKREVNMAPKLREAFPP

SEQ ID NO: 97997 - protein, 200 aa, Unknown
  Bacterial polypetide isolated from the Sargasso Sea
SVHGANRLGSNSLIDLVVFGKSAANRAAEIVKPGTPHESLSQTETDKCLDRFDKLRNSNGSTKTAELRLSMQKTMQSKCAVFRTEKTLKEGIEQIRRPFEGMQDISVSDQSLLFNTDLVETLEFDNLIRQAMTTIDSAYHRKESRGAHAREDFKNRDDKKYMTHTLAWQKGNEVKIAYRPVHSKTLTNDVQYFPPRERVY

SEQ ID NO: 97998 - protein, 299 aa, Unknown
  Bacterial polypetide isolated from the Sargasso Sea
KVYYSATSAHTCTGDGNAMVLRAGLPLQDMEFVQFHPTGIYGHGTLITEGARGEGGYLTNSKGERFMERYAPNAKDLASRDVVSRSMSIEINEGRGVGKDQDHVHLNLSHLDKEIIESRLPGITEAARLFANVNVTKEPIPVVPTVHYNMGGIPTNYKAEVLTVNGSEKTVPGLMAIGEAACVSVHGANRLGSNSLIDLVVFGRSAAKRAAELIIPETPHEEIPESETQKCLDRFDKLRNAKGENSTADLRLSMQKTMQSKCAVFRTEKNLKEGVDEIRKTYDSIDSISVKDRSLVFNT

SEQ ID NO: 97999 - protein, 209 aa, Unknown
  Bacterial polypetide isolated from the Sargasso Sea
MAIGEAACVSVHGANRLGSNSLIDLVVFGKSAANRAAELVKPGTPHEEIPQSETDKCLDRFDKLRNASGATKTSELRLSMQRTMQSKCAVFRTEKTLKEGMDQIRKPFEGMSDISVSDKSLLFNTDLVETLEFDNLIRQAMTTIDSAYHRKESRGAHAREDYKTRDDKKYMTHTLAWQKGNEVKVAYRPVHAKTLTNDVQYFPPRERVY

SEQ ID NO: 98000 - protein, 259 aa, Unknown
  Bacterial polypetide isolated from the Sargasso Sea
MGKAYEIIDHHYDVVIVGAGGSGLRATLGAAEAELKTACISKVFPTRSHTVAAQGGIGAALGNMSDDNWKWHMYDTVKGSDWLGDQDAIEYLCANAPEAVIELEEYGMPFSRTEDGKIYQRPFGGHLTNNGEGAPAMRACAAADRTGHALLHTLYQQSLKHSVKFFIEYFVLDLVMDKNGNCKGVVAWCLEDGTIHRFLSHQTVLATGGYGRAYLSSTSAHICTGDGSAMALRQNLPLSDMEFIQFHPTGVYGARCFNN

SEQ ID NO: 98001 - protein, 309 aa, Unknown
  Bacterial polypetide isolated from the Sargasso Sea
TACISKVFPTRSHTSAAQGGISAALGNMGEDDWRWHMYDTVKGSDWLGDQDSIEYLCKEAPRAVLELEKYGVPFSRTKEGKIYQRPFGGMTKNYGNETVQRTCAAADRTGHAILHTLYGQALKHNTEFFIEYFALDLLMKDGACKGLLAWNLNDGTIHRFRSHITIIATGGYGKVYYSATSAHTCTGDGNAMVLRAGLPLQDMEFVQFHPTGIYGHGTLISEGVRGEGGYLLNSKGERFMERYAPKAKDLASRDVVSRSIAIEINEGRGVGTEKDHVHLHLDHLDPKVIEKKITRNLRVIKTICKCRRN

SEQ ID NO: 98002 - protein, 315 aa, Unknown
  Bacterial polypetide isolated from the Sargasso Sea
VVVLGAGGSGLRAAVGLSEAGLKTACISKVFPTRSHTSAAQGGISAALGNMGEDDWRWHMYDTVKGSDWLGDQDAIEYLCKEAPRAVVELERYGVPFSRTDDGKIYQRPFGGMTKNYGNGTAQRTCAAADRTGHAILHTLYGQALKQNTEFFIEYFALDLIMKNGECKGVIAWNLTDGTIHRFRSHITIIATGGYGKVYYSATSAHTCTGDGNAMVLRAGLPLQDMEFVQFHPTGIYGVGCLITEGVRGEGGFLVNGKGERFMERYAPNAKDLASRDVVSRSMEMEINEGRGAGKNKDHINLHLDHIDKKVIDER

SEQ ID NO: 98003 - protein, 258 aa, Unknown
  Bacterial polypetide isolated from the Sargasso Sea
LKQPVFQKYFPQEVILSAAQGGISAALGNMGEDDWRWHMYDTVKGADWLGDQDSIEYLCKEAPAAVLELEKYGVPFSRTEDGKIYQRPFGGMTKNYGNETVQRTCAAADRTGHAILHTLYGQALKHNTEFFIEYFALDLIMKDGACKGLIAWNLNDGTIHRFRSHITIIATGGYGKVYYSATSAHTCTGDGNAMVLRAGLPLQDMEFVQFHPTGIYGHGTLISEGVRGEGGYLVNSKGERFMERYAPKAKDLASRDVV

SEQ ID NO: 98004 - protein, 234 aa, Unknown
  Bacterial polypetide isolated from the Sargasso Sea
MYKSYQIIDHHYDVVVIGAGGSGLRATLGCAEAGLRTACISKVFPTRSHTVAAQGGIGAALGNMGEDNWKWHMYDTVKGSDWLGDQDAIEYLCSKAPEAVIELEEYGMPFSRTEDGKIYQRPFGGHLTNNGEGAPAMRACAAADRTGHALLHTLYQQSLKNNVEFFIEYFVIDLISDENGNCIGVVAWCLEDGSIHRFLSHQTILATGGYGRAYFSSTSAHICTGDGSAMALRQ

SEQ ID NO: 98005 - protein, 273 aa, Unknown
  Bacterial polypetide isolated from the Sargasso Sea
MSSYNIINHEYDVVVLGAGGSGLRAAVGLSEAGLKTACISKVFPTRSHTSAAQGGISASLGNMGEDDWRWHMYDTVKGADWLGDQDSIEYLCKEAPKAVIELEKYGVPFSRTEDGKIYQRPFGGMTKNYGNGIVQRTCAAADRTGHAILHTLYGQALKHKTEFFIEYFALDLLMKDGECKGLIAWNLNDGTIHRFRAHSVIIATGGYGKVYYSATSAHTCTGDGNAMVLRAGLPLQDMEFVQFHPTGIYGHGTLITEGARGEGGYLTNSKGER

SEQ ID NO: 98006 - protein, 301 aa, Unknown
  Bacterial polypetide isolated from the Sargasso Sea
GNGIVQRTCAAADRTGHAILHTLYGQALKHNTEFFIEYFALDLLMKNGECKGLIAWNLNDGTIHRFRAHTVIIATGGYGKVYYSATSAHTCTGDGNAMVLRAGLPLQDMEFVQFHPTGIYGHGTLITEGARGEGGYLTNSKGERFMERYAPNAKDLASRDVVSRSMSIEINEGRGVGKDQDHVHLNLSHLDKEVIESRLPGITDAARLFANVDVTKEPIPVVPTVHYNMGGIPTNYKAEVLTVNGSEKTVPGLMAIGEAACVSVHGANRLGSNSLIDLVVFGRAAAKRAAELVKPGTPHEE

SEQ ID NO: 98007 - protein, 254 aa, Unknown
  Bacterial polypetide isolated from the Sargasso Sea
FADVDVTKEPIPVVPTVHYNMGGIPTNYKAEVLTVNGSEKTVPGLMAIGEAACVSVHGANRLGSNSLIDLVVFGRAAAKRAAEIVKPGTPHEEISKSETDKCLDRFEKLRNGNGNNRTADLRLAMQKTMQSKCAVFRTEKTLKEGVEEIRKPYEGMNSISVKDKSLIFNTDLVETLEFDNLIRQAIVTIDSAYERKESRGAHAREDHPKRDDNNFMKHTLSWCKGSKTKITYRDVHRSTLSNDVQYFPPQERVY

SEQ ID NO: 98008 - protein, 193 aa, Unknown
  Bacterial polypetide isolated from the Sargasso Sea
MSEYKIIDHEYDVVVLGAGGSGLRAAVGLSEAGLKTACISKVFPTRSHTSAAQGGISAALGNMGEDDWRWHMYDTVKGSDWLGDQDCIEYLCKEAPRAVLELEKYGVPFSRTKDGKIYQRPFGGMTKNYGNETVQRTCAAADRTGHAILHTLYGQALKHNTEFFIEYFALDLLMKNGTCKGLIAWNLNDGTIH

SEQ ID NO: 98009 - protein, 282 aa, Unknown
  Bacterial polypetide isolated from the Sargasso Sea
APNAKDLAGRDVVARSMVMEILEGRGCGPEKDHVYLKLDHLGADVLNSKLPGICELSKTFAHVDPIKEPIPVVPTCHYMMGGTPTNIHGQAFSRNDGNDFMVSGLFSVGEAACVSVHGANRLGGNSLLDLVVFGRAAGKHINEELKSGGGVDNASNEDIELAMSRLNKLNESESGYEVADVKKQLQTCMQNYFGVFRRGEFMEKGVKELEEIREKSENLYLKDKSIAFNTNRVEALELQNLLEVAEATAISAMMRDESRGAHARDDFPERDDENWLCHSLYD

SEQ ID NO: 98010 - protein, 246 aa, Unknown
  Bacterial polypetide isolated from the Sargasso Sea
MSGHLRVGNYDVIDHEYDVVVVGAGGAGLRATFGMAQKGLKTACVSKVFPTRSHTVAAQGGISAALGNMGEDDWRWHAYDTIKGSDWLGDQDCIEYMCREAPDAIIELEHYGVPFSRNKEGKIYQRPFGGMTTKYGEGGAAQRTCAAADRTGHAILHTLYQQSLRHDAEFFIEYFALDLIMEDGVCRGIIALSLVDGTIHRFKAQMVVLATGGYGRAYFSATSAHTCTGDGNAMVIRAGLPLQDME

SEQ ID NO: 98011 - protein, 244 aa, Unknown
  Bacterial polypetide isolated from the Sargasso Sea
YLQYITTWGGIPTNYHGEVVTIKDDNPDSVVPGLMAIGEAACVSVHGANRLGSNSLLDIVVFGRACAKRCAELIKPETKHCDLEKESTDKIIHRLDRLRHANGSESTAKLRMEMQRAMQTHAAVFRTGDNLLEGRNKIVDIANRFKDVKVADRSLIWNTDLVETLELDNLLGNSVTSMFAAENRTESRGAHAREDFPDRDDENWMKHTMTWLNKDNSVDFDYRPVHMYTLTDEVEVVPPKKRVY

SEQ ID NO: 98012 - protein, 311 aa, Unknown
  Bacterial polypetide isolated from the Sargasso Sea
MQRGTKSCFELEKYGVPFSRTEDGKIYQRPFGGMTKNYGNETVQRTCAAADRTGHAILHTMYGQALKHNTEFFIEYFALDLLMKNGECKGLIAWNLNDGTIHRFRSHITIIATGGYGKTYYSSTSAHTCTGDGNAMVLRAGLPLQDMEFVQFHPTGIYGHGTLISEGVRGEGGYLLNSKGERFMERYAPKAKDLASRDVVSRSIAVEINEGRGVGKEKDHVHLHLNHLDPKVIEERLPGISESSRLFADVDVTKEPIPVVPTVHYNMGGIPTNYKAEVLTLNGSDKVVPGLMAIGEAACVSVHGANRLGSN

SEQ ID NO: 98013 - protein, 275 aa, Unknown
  Bacterial polypetide isolated from the Sargasso Sea
MERLPGISESAKIFAGVDVTKEPIPVLPTVHYNMGGIPTNYWGEVINPTANDQNAIVPGLMAVGEAGCASVHGANRLGSNSLIDLVVFGRAAGLRAGEIVDPNSHIPPTNVFAVEAALDRFDNLRHAKGSLSTSELRLEMQKTMQRDAAVFRASETMSQGLNEMVNLAGKITDLSVTDRSLVWNSDLMETLELTNLMPNALATIAGAEARKESRGAHAHEDFTVRDDEKWRVHSLAKVDGPEIKLSYRDVIRDPLSDESEGGIELKKIAPKERTF

SEQ ID NO: 98014 - protein, 308 aa, Unknown
  Bacterial polypetide isolated from the Sargasso Sea
HPTGIYGHGTLISEGVRGEGGYLVNAKGERFMERYAPKAKDLASRDVVSRSIAVEINEGRGVGKEKDHVHLHLNHLDPKVIEERLPGISESSKLFANVDVTKEPIPVVPTVHYNMGGIPTNFKAEVLTMNGSEKTVPGLMAIGEAACVSVHGANRLGSNSLIDLVVFGRAAAKRAAEIVKPGMNHDDISESETEKCLQRFDKLRNSNGSNPTADLRLSMQKTMQSKCAVFRTDKTLKEGVEEIRKPFDGMENISIKDKSLIFNTDLVETLEFDNLIRQAITTMDSAYYRKESRSAHAREDFPKRDDEK

SEQ ID NO: 98015 - protein, 208 aa, Unknown
  Bacterial polypetide isolated from the Sargasso Sea
MSNYKIIDHEYDVVVLGAGGSGLRAAVGLSEAGLKTACISKVFPTRSHTSAAQGGISAALGNMGEDDWRWHMYDTVKGSDWLGDQDSIEYLCKEAPRAVLELEKYGVPFSRTEDGKIYQRPFGGMTKNYGNETVQRTCAAADRTGHAILHTLYGQALKHNTEFFIEYFALDLLMKNGECKGLIAWNLNDGTIHRFRSHITIIATGGYG

SEQ ID NO: 98016 - protein, 235 aa, Unknown
  Bacterial polypetide isolated from the Sargasso Sea
TWGGIPTNYKAEVLTVNGSEKTVPGLMAIGEAACVSVHGANRLGSNSLIDLVVFGRAAAKRAAELIKPGSPHEEISDLETQKCLDRFDKIRNAQGDIGTAELRLSMQKTMQSKCAVFRTEKTLKEGVDEIRKTYDGLDSISVKDKSLIFNTDLVETLEFDNLIRQAVVTVDSAYHRKESRGAHAREDYPKRNDQKFMQHTLAWCNGKNTKISYREVHKSTLTNEVQYFPPQERVY

SEQ ID NO: 98017 - protein, 292 aa, Unknown
  Bacterial polypetide isolated from the Sargasso Sea
LQDMEFVQFHPTGIYGHGTLITEGARGEGGYLTNSKGERFMERYAPKAKDLASRDVVSRSMSIEINEGRGVGKDQDHVHLNLSHLDRDIIESRLPGITDAARLFANVDVTKEPIPVVPTVHYNMGGIPTNYKAEVLTVNGSEKTVPGLMAIGEAACVSVHGANRLGSNSLIDLVVFGRAAAKRAAELIKPGTPHEEISETETQKCLDRFDKIRNSNGEVGTAELRLSMQKTMQSKCAVFRTEKNLKEGVDEIKKTYDGLNNLSVKDKSLIFNTDLVETLEFDNLIRQAVVTV

SEQ ID NO: 98018 - protein, 237 aa, Unknown
  Bacterial polypetide isolated from the Sargasso Sea
MTNSYKIIDHHYDVVVVGAGGSGLRATLGCAEAGLKTACISKVFPTRSHTVAAQGGIGAALGNMGEDNWKWHMYDTVKGSDWLGDQDAIEYLCSKAPEAVIELEEYGMPFSRTDDGKIYQRPFGGHLTNNGEGAPAMRACAAADRTGHALLHTLYQQSLKNNVEFYIEYFVLDLISDDQGNCIGVVTWCLEDGSIHRFLSHQTILATGGYGRAYFSSTSAHICTGDGSANGFKTKPT

SEQ ID NO: 98019 - protein, 234 aa, Unknown
  Bacterial polypetide isolated from the Sargasso Sea
MGGIPTNYKAEVLTVNGSEKTVPGLMAIGEAACVSVHGANRLGSNSLIDLVVFGRAAAKRAAELIKPGTPHEEISESETQKCLDRFDKIRNSDGDIGTAELRLSMQKTMQSKCAVFRTEKTLKEGVDEIRQTFDGLDSLSVKDKSLIFNTDLVETLEFDNLIRQAVVTVDSAYNRKESRGAHAREDYPKRDDEKFMQHTLAWCDGKKSKISYRDVHKSTLTNEVQYFPPQERVY

SEQ ID NO: 98020 - protein, 247 aa, Unknown
  Bacterial polypetide isolated from the Sargasso Sea
IIATGGYGKVYYSATSAHTCTGDGNAMVLRAGLPLQDMEFVQFHPTGIYGHGTLISEGVRGEGGYLVNSKGERFMEKYAPKAKDLASRDVVSRSIAVEINEGRGVGKDKDHVHLHLNHLDQKVIEDRLPGISEASRLFANVDVTKEPIPVVPTVHYNMGGIPTNYKAEVITMNGSEKTVPGLMAIGEAACVSVHGANRLGSNSLIDLVVFGRAAAKRAAELVKPGMKHEDIPQSETDKCLDRFDKLR

SEQ ID NO: 98021 - protein, 325 aa, Unknown
  Bacterial polypetide isolated from the Sargasso Sea
RSTKELFLELERYGVPFSRTKDEKIYQRSFGGMTKNYGNETVQRTCAAADRTGHAILHTMYGQALKHNTEFFIEYFALDLLMKNGECKGLIAWNLNDGTIHRFRSHITIIATGGYGKTYYSSTSAHTCTGDGNAMALRAGLPLQDMEFVQFHPTGIYGHGTLISEGVRGEGGYLLNSKGERFMERYAPKAKDLASRDVVSRSIAIEINEGRGVGNEKDHVHLHLDHLDPKVIESRLPGISESSRLFANVDVTKEPIPVVPTVHYNMGGIPTNYKAEVITLNGSEKVVPGLMAIGEAACVSVHGANRLGSNSLIDLVVLEEQQQKE

SEQ ID NO: 98022 - protein, 172 aa, Unknown
  Bacterial polypetide isolated from the Sargasso Sea
MSSYKIIEHEYDVVVLGAGGAGLRAAVGLSEAGLKTACISKVFPTRSHTSAAQGGISAALGNMGEDDWRWHMYDTVKGSDWLGDQDCIEYLCKEAPRAVLELERYGVPFSRTEDGKIYQRPFGGMTKNYGNETVQRTCAAADRTGHAILHTMYGQALKHNTEFFIEYFALDY

SEQ ID NO: 98023 - protein, 172 aa, Unknown
  Bacterial polypetide isolated from the Sargasso Sea
GISAALGNMCEDDWRWHMYDTVKGADWLGDQDAIEFLCKEAPQAVIELEKYGVPFSRTEEGKIYQRPFGGMTKNYGNGVVQRTCAAADRTGHAILHTLYGQALKRDTEFFIEYFALDLIMENDKCQGVIAWNLQDGSIHRFRSKTVILATGGYGRAYFSATSAHTCTGDGGG

SEQ ID NO: 98024 - protein, 241 aa, Unknown
  Bacterial polypetide isolated from the Sargasso Sea
MKLPVREFDAVVIGAGGAGMRAALQISQSGQTCALLSKVFPTRSHTVSAQGGITVALGNTHEDNWEWHMYDTVKGSDYIGDQDAIEYMCKTGPEAILELDHMGLPFSRLENGTIYQRPFGGQSKNFGGEQAARTAAAADRTGHALLHTLYQQNLKNHTTIFSEWYALDLVKNADGAVVGCTALCIETGEVVYFKARATVLATGGAGRIYQSTTNAHINTGDGVGMAIRAGVPVQDMEMWQF

SEQ ID NO: 98025 - protein, 265 aa, Unknown
  Bacterial polypetide isolated from the Sargasso Sea
PEVVHKRLPGITELSKTFAGVDPAVQPIPVVPTCHYMMGGIPTNINGQVITIQDGHDKVIEGLYAAGEVACVSVHGGNRLGGNSLLDLVVFGRAAGIYIEESMKQGVELKNASHEDIDKALERLNKLNASSEGEQVSALKERMQQNMQNNFGVFRTKDLMEKGIEDLSQVRDEVENMHLKDKSATFNTARIEALEMQNLFEVAEATAVTANSRKESRGAHSRDDYPDRDDENWLKHSIYFSENKEVSKRDVNYRPKTVQAFQPNG

SEQ ID NO: 98026 - protein, 222 aa, Unknown
  Bacterial polypetide isolated from the Sargasso Sea
MSSYKIIEHEYDVVVLGAGGAGLRAAVGLSEAGLKTACISKVFPTRSHTSAAQGGISAALGNMGEDDWRWHMYDTVKGADWLGDQDCIEYLCKEAPRAVLELEKYGVPFSRTEDGKIYQRPFGGMTKNYGNETVQRTCAAADRTGHAILHTMYGQALKHKTEFFIEYFALDLLMKNGECKGLIAWNLNDGTIHRFRSHITIVATGGYGKTYYSSTSAHTCTG

SEQ ID NO: 98027 - protein, 244 aa, Unknown
  Bacterial polypetide isolated from the Sargasso Sea
MTNSYKIIDHHYDVVVVGAGGSGLRATLGCAEAGLKTACISKVFPTRSHTVAAQGGIGAALGNMGEDNWKWHMYDTVKGSDWLGDQDAIEYLCSKAPEAVIELEEYGMPFSRTDDGKIYQRPFGGHLTNNGEGAPAMRACAAADRTGHALLHTLYQQSLKNNVEFYIEYFVLDLISDDQGNCIGVVTWCLEDGSIHRFLSHQTILATGGYGRAYFSSTSAHICTGDGSAMALRQNLPLSDMEFI

SEQ ID NO: 98028 - protein, 290 aa, Unknown
  Bacterial polypetide isolated from the Sargasso Sea
ITEGARGEGGFLVNGKGERFMERYAPNAKDLASRDVVSRSMEMEINEGRGVGKNKDHISLHLDHLDKDVLNERLPGITEAAKTFANVDVNKEPIPVVPTVHYNMGGIPTNYKAEVLTLNGSEKIVPGLMAIGEAACVSVHGANRLGSNSLIDLVVFGRAAAKRAAEIIKPGAPHEEVSNTETDKCLDRFDKIRNSKGSTKTSELRLKMQKTMQSKCAVFRTEKTLKEGVDQIRKPYEGMEDISVKDKSLLFNTDLVETLEFDNLIRQALTTMDSAYSRKESRGAHAREDF

SEQ ID NO: 98029 - protein, 276 aa, Unknown
  Bacterial polypetide isolated from the Sargasso Sea
GDGLGMTLRAVFPAQDMEMWQFHPTGIHGAGSLVTEGCRGEGGYLINADGERFMERYAPNAKDLAGRDVVARSMVMEILEGRGCGPEKDHVYLKLDHLGADVLNSKLPGICELSKTFAHVDPIKEPIPVVPTCHYMMGGTPTNIHGQAFSRNDGNDFMVSGLFSVGEAACVSVHGANRLGGNSLLDLVVFGRAAGKHINEELKSGGGVDNASNEDIELAMSRLNKLNESESGYEVADVKKQLQTCMQNYFGVFRRGEFMEKGVKELEEIREKSENL

SEQ ID NO: 98030 - protein, 261 aa, Unknown
  Bacterial polypetide isolated from the Sargasso Sea
ITDAARLFANVDITKEPIPVVPTVHYNMGGIPTNYKGEVLTLNGSEKIVPGLMAIGEAACVSVHGANRLGSNSLIDLVVFGRAAAKRASDLIKPGTPHEEIGQSETQKCLDRFDKIRNSDGDTGTAELRLSMQKTMQSKCAVFRTEKTLKEGVEEIKKTYDGLESLSVKDKSLIFNTDLVETLEFDNLIRQAVTTVDSAYHRKESRGAHAREDYPKRDDEKFMQHTLAWCDGKETKISYREVHKSTLTNEVQYFPPQERVY

SEQ ID NO: 98031 - protein, 311 aa, Unknown
  Bacterial polypetide isolated from the Sargasso Sea
MSAYKIIDHEYDVVVLGAGGSGLRAAVGLSEAGLKTACISKVFPTRSHTSAAQGGISAALGNMGEDDWRWHMYDTVKGSDWLGDQDAIEYLCKEAPKAVQELDKYGVPFSRTKEGKIYQRPFGGMTKNYGNGTVQRTCAAADRTGHAILHTLYGQALKHNTEFFIEYFALDLIMKNGECKGLIAWNLNDGTIHRFKSHITIIATGGYGKIYYSATSAHTCTGDGNGMVLRAGLPLQDMEFVQFHPTGIYGVGCLISEGVRGEGGFLLNSKGERFMERYAPNAKDLASRDVVSRSIAIEINEGRGVGKEKDH

SEQ ID NO: 98032 - protein, 312 aa, Unknown
  Bacterial polypetide isolated from the Sargasso Sea
LKQKILASRDVVSRSMSIEINEGRGVGKEHDHVHLNLNHLDKDIIESRLPGITEAARLFANVDVTKEPIPVVPTVHYNMGGIPTNYKAEVLTVNGSEKTVPGLMAIGEAACVSVHGANRLGSNSLIDLVVFGRAAAKRAAELIKPGTPHEEISETETQKCLDRFDKIRNAKGEIGTAELRLSMQKTMQSKCAVFRTEKTLKEGVNEIGKTYDGLQSISVKDKSLIFNTDLVETLEFDNLIRQAVVTVNSAYNRKESRGAHAREDYPKRDDEKFMQHTLAWCNGKETKIGYREVHKSTLTNDVQYFPPQERVY

SEQ ID NO: 98033 - protein, 259 aa, Unknown
  Bacterial polypetide isolated from the Sargasso Sea
TRSHTSAAQGGISAALGNMGEDDWRWHMYDTVKGADWLGDQDSIEYLCKEAPAAVLELEKYGVPFSRTEDGKIYQRPFGGMTKNYGNETVQRTCAAADRTGHAILHTLYGQALKHNTEFFIEYFALDLIMKDGACKGLIAWNLNDGTIHRFRSHITIIATGGYGKVYYSATSAHTCTGDGNAMVLRAGLPLQDMEFVQFHPTGIYGHGTLISEGVRGEGGYLVNSKGERFMERYAPKAKDLASRDVVSRSIAVEINEGR

SEQ ID NO: 98034 - protein, 262 aa, Unknown
  Bacterial polypetide isolated from the Sargasso Sea
GISESAKTFADVDVTKEPIPVVPTVHYNMGGIPTNYKAEVLTINGSEKIVPGLMAIGEAACVSVHGANRLGSNSLIDLVVFGKAASKRAAEIVKPGKPHEKISNSETDKCLERFDKLRNGNGNNKTADLRLAMQKTMQSRCSVFRDEKNLKQGANEIQKSFEGMDSIFVKDKSLIFNTDLVETLEFDNLIRQAITTIESASHRKESRGAHAREDYPKRDDEKFMQHTLSWHDGKQTKINYRPVHRSTLTNDVQYFPPQERVY

SEQ ID NO: 98035 - protein, 166 aa, Unknown
  Bacterial polypetide isolated from the Sargasso Sea
MSKSYEIVNHNYDVIIIGAGGSGLRATLGVAEAGLKTACITKVFPTRSHTVAAQGGIGAALGNMGEDDWRWHMYDTVKGSDWLGDQDAIEYLCSNASEAVIELEQYGMPFSRTEDGKIYQRPFGGHLTNNGEGAPAMRACAAADRTGHALLHTLYQQALKHNVEFF

SEQ ID NO: 98036 - protein, 266 aa, Unknown
  Bacterial polypetide isolated from the Sargasso Sea
INEGRGIGENKDHVHLHIDHIDPKIIEARLPGISESVSTFVDRDVTKDPIPVVPTVHYNMGGIPTNHKAEVLNSNGKDKTVPGLMAIGEAACVSVHGANRLGSNSLIDLVVFGKAAAMRAAELVKPNSSHVEISKSETDKSLDRFDKLKNGNGSNKTSELRLSMQKTMQSKCAVFRTEKTLKEGVKEIKKPHEGMQSILVKDKSLIFNTDLMETLEFDNLIRQAVTTMESAYQRKESRGAHAREDYPKRDDENFMKHTLSWYNEKE

SEQ ID NO: 98037 - protein, 259 aa, Unknown
  Bacterial polypetide isolated from the Sargasso Sea
MKAYNIIDHEYDVVVLGAGGSGLRAAVGLSEAGLKTACISKVFPTRSHTSAAQGGISAALGNMGEDDWRWHMYDTVKGADWLGDQDSIEYLCKEAPKAVLELEKYGVPFSRTDEGKIYQRPFGGMTKNYGNGIVQRTCAAADRTGHAILHTLYGQALKHNTEFFIEYFALDLLMKDGECKGLIAWNLNDGTIHRFRAHTVIIATGGYGKVYYSATSAHTCTGDGNAMVLRAGLPLQDMEFVQFHPTGIYGHGTLISEGV

SEQ ID NO: 98038 - protein, 270 aa, Unknown
  Bacterial polypetide isolated from the Sargasso Sea
VGLQLSHLPEAVFREKLPGITELSNVYAGVDPRVDPIPVVPTCHYMMGGIPTNKYGQVIDYSLKTGDRVVEGLYAVGEAANVSVHGANRLGANSLLDLVVFGRSAGLDVKDKLEQGVDDVPVSSDNIQQAAERYLSYENRDNVGTTHTVASVRERMQEIMQSDFGVFRTQESMESGLQQLVETKELMKTVSLADRSPSYNTARIELLELDNMLDIAVSTARSANFREESRGAHSRVDFEKRDDKNWHCHTIDIAGGDLLKRPIDMSPETV

SEQ ID NO: 98039 - protein, 240 aa, Unknown
  Bacterial polypetide isolated from the Sargasso Sea
PTVHYNMGGIPTNYKAEVLTMNGSEKTVPGLMAIGEAACVSVHGANRLGSNSLIDLVVFGRAAAKRAAELVKPGTPHEEIPETETQKCLDRFDKLRNAQGNNSTAELRLSMQKTMQSKCAVFRTEKNLKQGVDEIGKTYDGMDSISVKDKSLVFNTDLVETLEFDNLIRQAVATVDSAYHRKESRGAHAREDYPKRDDQKFMQHTLAWCDGKKTKISYRPVHQSTLTNEVQYFPPQERVY

SEQ ID NO: 98040 - protein, 260 aa, Unknown
  Bacterial polypetide isolated from the Sargasso Sea
GGSGLRAAVGLSEAGLKTACISKVFPTRSHTSAAQGGISAALGNMGEDDWRWHMYDTVKGSDWLGDQDCIEYLCKEAPRAVLELEKYGVPFSRTEDGKIYQRPFGGMTKNYGNGTVQRTCAAADRTGHAILHTLYGQALKHNTEFFIEYFALDLLMKNGECKGLIAWNLNDGTIHRFRSHITIIATGGYGKVYYSATSAHTCTGDGNAMVLRAGLPLQDMEFVQFHPTGIYGHGTLISEGVRGEGGYLVNSKGERFMKNT

SEQ ID NO: 98041 - protein, 333 aa, Unknown
  Bacterial polypetide isolated from the Sargasso Sea
GMTKNYVNEAVQRTCAAADRTGHAILHTMYGQALKHNTEFFIEYFALDLLMKNGECKGLIAWNLNDGTIHRFRAHITIVATGGYGKTYYSSTSAHTCTGDGNAMVLRAGLPLQDMEFVQFHPTGIYGHGTLISEGVRGEGGYLLNSKGERFMERYAPKAKDLASRDVVSRSIAIEINEGRGVGKEKDHVHLHLNHLDPKVIEKRLPGISESSRLFADVDVTKEPIPVVPTVHYNMGGIPTNYKAEVITVDGSERVVPGLMAIGEAACVSVHGANRLGSNSLIDLVVFGRAAAKRAAELVKSGTPHEQISNSETDKCLERFEKLRNGNGNNRTA

SEQ ID NO: 98042 - protein, 290 aa, Unknown
  Bacterial polypetide isolated from the Sargasso Sea
NYGNGTAQRTCAAADRTGHAILHTLYGQALKHNTEFFIEYFALDLIMKNGECKGVIAWNLTDGTIHRFRSHITIIATGGYGKVYYSATSAHTCTGDGNAMVLRAGLPLQDMEFVQFHPTGIYGVGCLITEGARGEGGFLVNGKGERFMERYAPNAKDLASRDVVSRSMEMEINEGRGVGKDKDHINLHLDHLDKEVLEERLPGITEAAKTFANVDVNKQPIPVVPTVHYNMGGIPTNYKAEVLTLNGSEKTVPGLMAIGEAACVSVHGANRLGSNSLIDLVVFGRAAAKR

SEQ ID NO: 98043 - protein, 274 aa, Unknown
  Bacterial polypetide isolated from the Sargasso Sea
HLDPKVMMKRLPGIAESSRLFANVDVTKEPIPVVPTVHYNMGGIPTNYKAEVLTVNGSEKTVPGLMAIGEAACVSVHGANRLGSNSLIDLVVFGRAAAKRAAELVKPGMPHEDIPISETEKCLERFDSLRNGSGDNRTADLRLSMQKTMQSKCAVFRTDKTLKEGVEEIRKPFEGMDNINVKDKSLIFNTDLVETLEFDNLIRQAITTMDSAYSRKESRGAHAREDYPTRDDNNYMKHTLSWCEGSKSKIAYREVHKSTLSNEVQYFPPQERVY

SEQ ID NO: 98044 - protein, 283 aa, Unknown
  Bacterial polypetide isolated from the Sargasso Sea
WQFHPTGIAGAGTLVTEGCRGEGGYLINRDGERFMERYAPTAKDLAGRDVVARSMILEILDGKGCDPENPANDHVLLKLDHLGEEVLNSKLPGILELSRTFAHVDPVKEPIPVIPTCHYMMGGIATQVSGQALTQVNGTDQEVQGLYAAGEAACVSVHGANRLGGNSLLDLVVFGRAAGIHIEEVMRQGVSYRDASDSDIESSLARLSRWNDSSSGESISDLKKELQTTMQNSFGVFRTEKNMQEGIVKLQDLRQRIDSAHLPDKSDSFNTARLEALELDNLL

SEQ ID NO: 98045 - protein, 302 aa, Unknown
  Bacterial polypetide isolated from the Sargasso Sea
SYKIINHEYDVVVLGAGGSGLRAAVGLSEAGLKTACISKVFPTRSHTSAAQGGISAALGNMGEDDWRWHMYDTVKGADWLGDQDSIEYLCKEAPKAVIELEKYGVPFSRTEDGKIYQRPFGGMTKNYGNGTVQRTCAAADRTGHAILHTLYGQALKHNTEFFIEYFALDLIMKNGECKGLIAWNLNDGTIHRFRSHITIIATGGYGKIYYSATSAHTCTGDGNAMILRAGLPLQDMEFVQFHPTGIYGHGTLISEGVRGEGGYLVNSKGEKFMERYAPKAKDLASRDVVSRSIAVEINEGRG

SEQ ID NO: 98046 - protein, 271 aa, Unknown
  Bacterial polypetide isolated from the Sargasso Sea
INHYYDVVVIGAGGSGLRATLSSAESGLKTACITKVFPTRSHTVAAQGGIGAALGNMSEDNWKWHMFDTVKGSDWLGDQDAIEYLCSNAPEAVIELENYGMPFTRTKDGKIYQRPFGGHLMKNGEGPPAMRACAAADRTGHALLHTLYQQSLKNNVEFYIEYFVLDLLMDDNNNCFGVLAWSLEDGSIHRFLSHQTIIATGGYGRAYFSSTSAHICTGDGNAMVLRQNLPLSDMEFIQFHPTGIYGAGVLITEGARGEGGYLTNSDGERFM

SEQ ID NO: 98047 - protein, 231 aa, Unknown
  Bacterial polypetide isolated from the Sargasso Sea
IPTNYKAEVLTVNGSEKTVPGLMAIGEAACVSVHGANRLGSNSLIDLVVFGRAAAKRAAELIKPGTPHEEISESETQKCLDRFDKIRNSDGDIGTAELRLSMQKTMQSKCAVFRTEKTLKEGVDEIRQTFDGLDSLSVKDKSLIFNTDLVETLEFDNLIRQAVVTVDSAYNRKESRGAHAREDYPKRDDEKFMQHTLAWCDGKKSKISYRDVHKSTLTNEVQYFPPQERVY

SEQ ID NO: 98048 - protein, 269 aa, Unknown
  Bacterial polypetide isolated from the Sargasso Sea
ESAKIFAGVDVPKEPIPVLPTVHYNMGGIPTNYWGEVLSPKPENPNEIVPGLMAVGEAGCASVHGANRLGSNSLIDLVVFGRAAAIKAGEVVDSSSSNPELNKLSIDQAFDRFDNLRYAKGEIPTADLRLQMQKTMQEDAAVFRTSETLANGVKKMNKIASDVKDLSVTDRSLVWNSDLMETLELTNLMPNALSTIWGAEARKESRGAHAHEDFASRDDEKWRVHTIARFSDNANSIDLSYRPVIKEPLSSEEQGGISLEKIAPKERTF

SEQ ID NO: 98049 - protein, 251 aa, Unknown
  Bacterial polypetide isolated from the Sargasso Sea
GQTCALLSKVFPTRSHTVSAQGGITVALGNTHEDNWEWHMYDTVKGSDYIGDQDAIEYMCKTGPEAILELDHMGLPFSRLDNGTIYQRPFGGQSKNFGGEQAARTAAAADRTGHALLHTLYQQNLKNHTTIFSEWYALDLVKNADGAIVGCTALCIETGEVVYFKARATVLATGGAGRIYQSTTNAHINTGDGVGMAIRAGVPVQDMEMWQFHPTGIAGAGVLVTEGCRGEGGYLLNKHGERFMERYAPNA

SEQ ID NO: 98050 - protein, 292 aa, Unknown
  Bacterial polypetide isolated from the Sargasso Sea
RGEGGYLTNSDGERFMERYAPNAKDLASRDVVSRSMTMEIIEGRGVGEKKDHIHLNLQHLGPDVIEERLPGIAETARVFADVDVTKDPIPVLPTVHYNMGGVPTNMHTEVITKNSSGDMEIVPGLMAVGEAASVSVHGANRLGSNSLLDLVVFGRESSIQCQKTIKPMQTQNKVNQNELDKIIDKFDSIRFSKGSLPTAEIRAEMQSIMQKHASVFRTEELMKEGVEKLSSCIDSFKDVSVSDRGLVWNTDLIETLELENLLGQAIITIQSGQVRKESRGAHARDDYPDRDD

SEQ ID NO: 98051 - protein, 238 aa, Unknown
  Bacterial polypetide isolated from the Sargasso Sea
LEHLGPEILAERLPGISETAQIFAGIDVCKQPIPVIPTVHYNMGGIPTNIHGEYVGNSKDGAVPNVPGLMAIGEAACVSVHGANRLGSNSLLDLIVFGRAAGQHAAKTVSTADTPLQGDLSTVDNILERFDRIRFSKGPASTAAIRLRMQRVMQTNCAVFRNEQVLSEGVTQIDETVGMFGEVGVTDRSLIWNTDLVETLELENLLAQAQVTVHSARARTESRGAHARDDYPDRDDSE

SEQ ID NO: 98052 - protein, 227 aa, Unknown
  Bacterial polypetide isolated from the Sargasso Sea
YKAEVLTLNGSEKTVPGLMAIGEAACVSVHGANRLGSNSLIDLVVFGRAAAKRAAEIVKPGSPHEEVSNSETEKCLERFDKIRNSHGTTKTSELRLQMQKTMQSKCAVFRTEKTLKEGVEQIRKPYEGMSDISVKDKSLLFNTDLVETLEFDNLISQALTTMDSAYNRKESRGAHAREDFTKRDDKNFMKHTLAWQNGKKVEIKYRDVHSRTLTNDVQYFPPKERVY

SEQ ID NO: 98053 - protein, 218 aa, Unknown
  Bacterial polypetide isolated from the Sargasso Sea
MTSAYNFIDHQYDVVVVGAGGSGLRATLGSAEAGLKTACISKVFPTRSHTVAAQGGIGAALGNMGDDNWKWHMYDTVKGSDWLGDQDAIEYLCSNAPEAVIELEEYGMPFSRTDDGRIYQRPFGGHLTDNGEGAPAMRACAAADRTGHALLHTLYQQSLKHKVEFYIEYFVLDLLMDKDGNCKGVVAWCLEDGTIHRFLSHQTILATRWLWESIFFFN

SEQ ID NO: 98054 - protein, 315 aa, Unknown
  Bacterial polypetide isolated from the Sargasso Sea
FGGMTKNYGNETVQRTCAAADRTGHAILHTMYGQALKHNTEFFIEYFALDLLMKDGECKGLIAWNLNDGTIHRFRSHITIIATGGYGKTYYSSTSAHTCTGDGNAMVLRAGLPLQDMEFVQFHPTGIYGHGTLISEGVRGEGGYLLNSKGERFMERYAPKAKDLASRDVVSRSIAIEINEGRGVGKEKDHVHLHLNHLDPKVIEKRLPGISESSKLFADVDVTKEPIPVVPTVHYNMGGIPTNYKAEVLTVNGSEKTVPGLMAIGEAACVSVHGANRLGSNSLIDLVVFGRAAAKRAAEIVKPRTPHEEISKSET

SEQ ID NO: 98055 - protein, 197 aa, Unknown
  Bacterial polypetide isolated from the Sargasso Sea
MSAYKIIDHEYDVVVLGAGGSGLRAAVGLSEAGLKTACISKVFPTRSHTSAAQGGISAALGNMGEDDWRWHMYDTVKGSDWLGDQDAIEYLCKEAPRAVVELERYGVPFSRTDDGKIYQRPFGGMTKNYGNGTAQRTCAAADRTGHAILHTLYGQALKHNTEFFIEYFALDLIMKNGECKGVIAWNLTDGTIHRFRS

SEQ ID NO: 98056 - protein, 291 aa, Unknown
  Bacterial polypetide isolated from the Sargasso Sea
REEEFGKEKDHVHLHLDHFFPDVIEKRLPGISESSRLFADVDVTKEPIPVVPTVHYNMGGIPTNYKAEVLTVNGSEKIVPGLMAIGEAACVSVHGANRLGSNSLIDLVVFGRAAAKRAAELVKPGTPHEKISDSETEKCLDRFEKLRNGNGTNRTADLRLAMQKTMQSKCAVFRTEKTLKEGVEEIRKPFEGMESISVKDKSLIFNTDLVETLEFDNLIRQAIVTLDSAYERKESRGAHAREDHPKRDDNNFMKHTLSWCNGSETKISYREVHRSTLNNDVQYFPPQERVY

SEQ ID NO: 98057 - protein, 323 aa, Unknown
  Bacterial polypetide isolated from the Sargasso Sea
MTKNYGNGIVQRTCAAADRTGHAILHTLYGQALKHKTEFFIEYFALDLLMKDGECKGLIAWNLNDGTIHRFRAHTVIIATGGYGKVYYSATSAHTCTGDGNAMVLRAGLPLQDMEFVQFHPTGIYGHGTLITEGVRGEGGYLTNSKGERFMERYAPKAKDLASRDVVSRSMSIEINEGRGVGKDKDHVHLNLSHLDKEVIESRLPGITDAARLFANVDVTQEPIPVVPTVHYNMGGIPTNYKGEVLTVNGSEKTVPGLMAIGEAACVSVHGANRLGSNSLIDLVVFGRAAAKRAAELIKPGTPHEEIGESETKKCIDRFDRIR

SEQ ID NO: 98058 - protein, 197 aa, Unknown
  Bacterial polypetide isolated from the Sargasso Sea
ISEGVRGEGGYLLNSKGERFMERYAPKAKDLASRDVVSRSIAMEINEGRGVGKEKDHVHLRLDHLDSKIIEERLPGISESSRLFANVDVTKEPIPVVPTVHYNMGGIPTNYKAEVIAMNGSEKTVPGLMAIGEAACVSVHGANRLGSNSLIDLVVFGKAAANRASDLIKPGMAHEEISKSETDKSLERFDNLRNGNG

SEQ ID NO: 98059 - protein, 224 aa, Unknown
  Bacterial polypetide isolated from the Sargasso Sea
MKSYKIIDHEYDVVVLGAGGSGLRAAVGLSEAGLKTACISKVFPTRSHTSAAQGGISAALGNMGEDDWRWHMYDTVKGSDWLGDQDAIEYLCKEAPLAVKELDKYGVPFSRTEDGKIYQRPFGGMTKNYGNGTVQRTCAAADRTGHAILHTLYGQALKHNTEFFIEYFALDLIMKKGECKGLIAWNLNDGTIHRFKSHITIIATGGYGKIYYSATSAHTCTGDG

SEQ ID NO: 98060 - protein, 188 aa, Unknown
  Bacterial polypetide isolated from the Sargasso Sea
MSKAYQVIDHHYDVVVVGAGGSGLRATLGSAEVGLKTACISKVFPTRSHTVAAQGGIGAALGNMGDDNWKWHMYDTVKGSDWLGDQDAIEYLCTNAPEAVIELEEYGMPFSRTDDGKIYQRPFGGHLTNNGEGAPAMRACAAADRTGHALLHTLYQQSLKHKVEFFIEYFVLDLVMDKDGNCKGVVAW

SEQ ID NO: 98061 - protein, 256 aa, Unknown
  Bacterial polypetide isolated from the Sargasso Sea
MKAYKIIDHEYDVVVLGAGGSGLRAAVGLSEAGLKTACISKVFPTRSHTSAAQGGISAALGNMGEDDWRWHMYDTVKGSDWLGDQDAIEYLCKEAPRAVVELERYGVPFSRTDDGKIYQRPFGGMTKNYGNGTAQRTCAAADRTGHAILHTLYGQALKQNTEFFIEYFALDLIMNNGECKGVIAWNLTDGTIHRFRSHITIIATGGYGKVYYSATSAHTCTGDGNAMVLRAGLPLQDMEFVQFHPTGIYGVGCLIQ

SEQ ID NO: 98062 - protein, 290 aa, Unknown
  Bacterial polypetide isolated from the Sargasso Sea
EILTIEIREGRGVGKEKDHIHLHLEHLAPEVLAERLPGISETAKIFSGVDVTKEPIPVLPTVHYNMGGIPTNFHGEVLTKINGDPDCVVDGLMAIGEAACVSVHGANRLGSNSLIDLVVFGRAAGLRAADTTTASANQPPLPDNAGLNALERLDKFRYADGNTSTSELRSQMQKIMQNNCAVFRTGEVLDEGKDLINKTWNGLDDIKINDRSLIWNTDLVEALEWDNLIVQSVVTVESAANRKESRGSHAREDYTERDDKNWMKHTLAWIDNDERTTTIDYRPVHEYTLS

SEQ ID NO: 98063 - protein, 270 aa, Unknown
  Bacterial polypetide isolated from the Sargasso Sea
KVIDERLPGIAESSKLFANVDVTKEPIPVVPTVHYNMGGIPTNYKAEVLTVNGSESTVPGLMAIGEAACVSVHGANRLGSNSLIDLVVFGRSAARRAAELVKPGMTHEEISTSETDKCLDRFDKLRNGVGENRTADLRLYMQKTMQSKCAVFRTEKTLKKGVEEIRKPFEGMKSINVKDKSLIFNTDLVETLEFDNLIRQAIVTMDSAYSRKESRGAHAREDYPNRNDQNYMKHTLSWCDGDKSKITYRDVHKSTLTNEVQYFPPQERVY

SEQ ID NO: 98064 - protein, 263 aa, Unknown
  Bacterial polypetide isolated from the Sargasso Sea
SAAQGGISAALGNMGEDDWRWHMYDTVKGADWLGDQDCIEYLCKEAPRAVLELEKYGVPFSRTEDGKIYQRPFGGMTKNYGNEPVQRTCAAADRTGHAILHTLYGQALKHNTEFFIEYFALDLLMKNGECKGLIAWNLNDGTIHRFKSHITIIATGGYGKVYYSATSAHTCTGDGNAMVLRAGLPLQDMEFVQFHPTGIYGHGTLISEGVRGEGGYLLNSEGERFMERYAPKAKDLASRDVVSRSIAIEINEGRGVGKEKDHV

SEQ ID NO: 98065 - protein, 270 aa, Unknown
  Bacterial polypetide isolated from the Sargasso Sea
MSGYQGIAESAEIFAGVDVTKEPIPVLPTVHYNMGGIPTNYHGEVVTIKGDNPDSVVPGLMAIGEAACVSVHGANRLGSNSLLDIVVFGRACAKRCAELIKPETKHCDLDKESTDKIIDRLDRLRYANGSESTAKLRMEMQRAMQTHAAVFRTGDNLLEGRNKIVDIANRFKNVKVADRSLIWNTDLVETLELDNLLGNSVTSMFAAENRTESRGAHAREDFPDRDDENWMKHTMTWLNKDNSVDFDYRPVHMYTLTDDVEVVPPKKRVY

SEQ ID NO: 98066 - protein, 309 aa, Unknown
  Bacterial polypetide isolated from the Sargasso Sea
KDLASRDVVSRSIAIEINEGRGVGKEKDHVHLHLNHLDPKVIEERLPGIAESSRLFANVDVTREPIPVVPTVHYNMGGIPTNYKAEVLTVNGSEKTVPGLMAIGEAACVSVHGANRLGSNSLIDLVVFGRAAAKRAAELVKPGTTHENISNSETEKCLERFDNLRNGNGDNRTADLRISMQKTMQSKCAVFRTDKTLKEGVEEIRKSYDGMDKINVKDKSLIFNTDLVETLEFDNLIRQAITTMDSAYSRKESRGAHAREDYPKRDDQNYMKHTLSWCHGSKSKITYREVHKSTLTNEVQYFPPQERVY

SEQ ID NO: 98067 - protein, 209 aa, Unknown
  Bacterial polypetide isolated from the Sargasso Sea
MSSYKIIDHEYDVVVLGAGGAGLRAAVGLSEAGLKTACISKVFPTRSHTSAAQGGISAALGNMGEDDWRWHMYDTVKGSDWLGDQDCIEYLCKEAPRAVLELERYGVPFSRTEDGKIYQRPFGGMTKNYGNETVQRTCAAADRTGHAILHTMYGQALKHNTEFFIEYFALDLLMKEGECKGLIAWNLNDGTIHRFRSHITIIATGGYGK

SEQ ID NO: 98068 - protein, 311 aa, Unknown
  Bacterial polypetide isolated from the Sargasso Sea
VLGAGGAGLRAAVGLSEAGLKTACISKVFPTRSHTSAAQGGISAALGNMGEDDWRWHMYDTVKGSDWLGDQDSIEYLCKEAPRAVLELERYGVPFSRTEDGKIYQRPFGGMTKNYGNETVQRTCAAADRTGHAILHTMYGQALKHNTEFFIEYFALDLLMKDGECKGLIAWNLNDGTIHRFRSHITIIATGGYGKTYYSSTSAHTCTGDGNAMVLRAGLPLQDMEFVQFHPTGIYGHGTLISEGVRGEGGYLLNSKGERFMERYAPKAKDLASRDVVSRSIAVEINEGRGVGKEKDHVHLHLDHLDPKVIE

SEQ ID NO: 98069 - protein, 313 aa, Unknown
  Bacterial polypetide isolated from the Sargasso Sea
IDHHYDVVVVGAGGSGLRATLGSAEAGLKTACISKVFPTRSHTVAAQGGIGAALGNMGDDNWKWHMYDTVKGSDWLGDQDAIEYLCSNAAEAVIELEDYGMPFTRTDDGKIYQRPFGGHLTNNGEGAPAMRSCAAADRTGHALLHTLYQQSLKHNVEFFIEYFVLDLVMDEDGNCKGVVAWCLEDGTIHRFLSHQTVLATGGYGRAYLSSTSAHICTGDGSAMALRQNLPLSDMEFIQFHPTGVYGAGVLITEGARGEGGYLANSDGERFMERYAPNAKDLASRDIVSRAMTIEINENRGCGEDADHVFYIRA

SEQ ID NO: 98070 - protein, 315 aa, Unknown
  Bacterial polypetide isolated from the Sargasso Sea
RYAPSAKDLASRDVVSRSIAIEINEGRGVGKEKDHVHLHLDHLDPKVIDNRLPGIAESAKTFSGVDVTKDPIPVVPTVHYNMGGIPTNYKAEVLTLNGSEKTVPGLMAIGEAACVSVHGANRLGSNSLIDLVVFGKAAAKRAAELVKPNTPHESSPQSETDKCLDRFDKIRNSNGGTRTSQLRLSMQKTMQSKCAVFRTEKTLKEGVDEIRKSFDGLEDISTKDKSLLFNTDLVESLEFDNLIRQAMTTMDSAYHRKESRGAHAREDFSKRDDKKFMKHTLAWQKGKEVKVRYRDVHARTLTNDVQYFPPKERVY

SEQ ID NO: 98071 - protein, 308 aa, Unknown
  Bacterial polypetide isolated from the Sargasso Sea
ERYAPSAKDLASRDVVSRSITKEILEGRGVGKDKDHAYLHLDHIDSDILEERLPGISESAKVFAGVDVTKEPIPIIPTVHYNMGGIPTNFHGEVMNLEKGNETVVRGLMAVGEAACVSVHGANRLGSNSLIDLVVFGKAAADRINDTVNKDEPNKEIPSNIIDEVIARFDSTRSSDGDISTSELRSQMQRVMQKHCAVFRDDEIMSEGKKLIEETWLNSENIKIKDKSLIWNTDLLETLEYKNLIAQAVVTMNSALNRKESRGAHAREDFKKRDDKNWMKHTMSWLNDKSCELDYRSVHEYTFINEVK

SEQ ID NO: 98072 - protein, 273 aa, Unknown
  Bacterial polypetide isolated from the Sargasso Sea
FPTRSHTSAAQGGISAALGNMGEDDWRWHMYDTVKGSDWLGDQDAIEYLCKEAPKAVKELDKYGVPFSRTEDGKIYQRPFGGMTKNYGNGTVQRTCAAADRTGHAILHTLYGQALKHNTEFFIEYFALDLIMKNGECKGLIAWNLNDGTIHRFKSHITIIATGGYGKIYYSATSAHTCTGDGNGMVLRAGLPLQDMEFVQFHPTGIYGVGCLISEGVRGEGGFLLNSKGERFMERYAPNAKDLASRDVVSRSIAIEINEGRGVEKKKITFISI

SEQ ID NO: 98073 - protein, 298 aa, Unknown
  Bacterial polypetide isolated from the Sargasso Sea
VYYSATSAHTCTGDGNAMVLRAGLPLQDMEFVQFHPTGIYGHGTLISEGVRGEGGYLVNSKGERFMERYAPNAKDLASRDVVSRSMSIEINEGRGVGKDQDHVHLHLSHLDKSVIENRLPGITEAARLFANVDVTKEPIPVVPTVHYNMGGIPTNYKAEVLTVNGSEKTVPGLMAIGEAACVSVHGANRLGSNSLIDLVVFGRAAAKRAAELIKPGAPHEEIPDTETQKCLDRFDKLRNAQGDNSTAELRLAMQKTMQSKCAVFRTEKNLEEGVNEIRKTYDSMDSISVKDRSLVFNT

SEQ ID NO: 98074 - protein, 305 aa, Unknown
  Bacterial polypetide isolated from the Sargasso Sea
GGMTKNYGNGTAQRTCAAADRTGHAILHTLYGQALKHNTEFFIEYFALDLIMKNGECKGVIAWNLTDGTIHRFRSHITIIATGGYGKVYYSATSAHTCTGDGNAMVLRAGLPLQDMEFVQFHPTGIYGVGCLITEGARGEGGFLVNGKGERFMERYAPNAKDLASRDVVSRSMEMEINEGRGVGKDKDHINLHLDHLDKEVLDERLPGITEAAKTFANVDVNKQPIPVVPTVHYNMGGIPTNYKAEVLTLNGSEKTVPGLMAIGEAACVSVHGANRLGSNSLIDLVVFGRAAAKRAAELVKPGMA

SEQ ID NO: 98075 - protein, 311 aa, Unknown
  Bacterial polypetide isolated from the Sargasso Sea
VVLGAGGSGLRAAVGLSEAGLKTACISKVFPTRSHTSAAQGGISAALGNMGEDDWRWHMYDTVKGSDWLGDQDSIEYLCKEAPRAVLELEKYGVPFSRTEDGKIYQRPFGGMTKNYGNEPVERTCAAADRTGHAILHTLYGQALKHNTEFFIEYFALDLLMKNGECKGLLAWNLNDGTIHRFRSHITIIATGGYGKIYYSATSAHTCTGDGNAMILRAGLPLQDMEFVQFHPTGIYGHGTLISEGVRGEGGFLLNSKGERFMERYAPKAKDLASRDVVSRSIALEINEGRGVGKEKDHVHLHLDHLDPNVI

SEQ ID NO: 98076 - protein, 317 aa, Unknown
  Bacterial polypetide isolated from the Sargasso Sea
QEAPRAVVELERYGVPFSRTDDGKIYQRPFGGMTKNYGNGTAQRTCAAADRTGHAILHTLYGQALKQNTEFFIEYFALDLIMKNGECKGVIAWNLTDGTIHKFRSHMTIIATGGYGKVYYSATSAHTCTGDGNAMVLRAGLPLQDMEFVQFHPTGIYGVGCLITEGVRGEGGFLVNGKGERFMERYAPNAKDLASRDVVSRSMEMEINEGRGAGKNKDHINLHLDHLDKKVIDERLPGISEAAKTFANVDVSKEPIPVVPTVHYNMGGIPTNYKAEVLTLNGSEKTVPGLMAIGEAACVSVHGANRLGSNSLIDFSG

SEQ ID NO: 98077 - protein, 302 aa, Unknown
  Bacterial polypetide isolated from the Sargasso Sea
GAGGAGLRATLGMTAAGFKTACITKVFPTRSHTVAAQGGVGAALNNMGEGDNWQYHMYDTVKGSDWLGDQDAIEYMCRNAIPSVIELEHYGVPFSRTEEGKIYQRPFGGHTLEHGKAMARRGCAAADRTGHAILHTLYQQCLKYKAEFFIEYFALDLLMDDEGRCCGVLALCMEDGTLHRFRAQKTVLATGGYGRVYFSCTSAHTCTGDGNAMVLRAGLPLQDMEFVQFHPTGVYGAGVLITEGARGEGGYLTNSEGERFMERYAPTAKDLASRDVVSRAMTLEINEGRGVGNDNDHIMLHL

SEQ ID NO: 98078 - protein, 258 aa, Unknown
  Bacterial polypetide isolated from the Sargasso Sea
SSRLFADVDVTKEPIPVVPTVHYNMGGIPTNYKAEVLTLNGSEKIVPGLMAIGEAACVSVHGANRLGSNSLIDLVVFGRAAAKRAAEIIKPGTPHEEISNSETDKCLDRFEKLRKGNGTNRTADLRLAMQKTMQSKCAVFRTEKTLKEGVEEIRKPFEGMESISVKDKSLVFNTDLVETLEFDNLIRQAIVTIDSAYERKESRGAHAREDHPKRDDDNFMKHTLSWCKGSETTISYRDVHKSTLTNDVQYFPPQERVY

SEQ ID NO: 98079 - protein, 292 aa, Unknown
  Bacterial polypetide isolated from the Sargasso Sea
LHTLYGQALKHKTEFFIEYFALDLLMKDGECKGLIAWNLNDGTINRFRAHTVIVATGGYGKVYYSATSAHTCTGDGNAMVLRAGLPLQDMEFVQFHPTGIYGHGTLITEGARGEGGYLTNSKGERFMERYAPKAKDLASRDVVSRSMSIEINEGRGVGKDQDHVHLNLSHLDKKIIESRLPGITDAARLFANVDVTKEPIPVVPTVHYNMGGIPTNYKGEVLTVNGSEKTVPGLMAIGEAACVSVHGANRLGSNSLIDLVVFGRAAAKRAAELIKPGTPHEEISETETPKCI

SEQ ID NO: 98080 - protein, 323 aa, Unknown
  Bacterial polypetide isolated from the Sargasso Sea
VIELEKYGVPFSRTEDGKIYQRPFGGMTKNYGNGIVQRTCAAADRTGHAILHTLYGQALKHKTEFFIEYFALDLLMKDGACKGLIAWNLNDGTIHRFRAHTVIIATGGYGKVYYSATSAHTCTGDGNAMVLRAGLPLQDMEFVQFHPTGIYGHGTLITEGARGEGGYLTNSKGERFMERYAPKAKDLASRDVVSRSMSIEINEGRGVGKDQDHVHLNLSHLDNDIIESRLPGITDAARLFANVDVTKDPIPVVPTVHYNMGGIPTNYKAEVLTVNGSEKTVPGLMAIGEAACVSVHGANRLGSNSLIDLVVFGRAAAKRAAEL

SEQ ID NO: 98081 - protein, 242 aa, Unknown
  Bacterial polypetide isolated from the Sargasso Sea
MFRQFIITWGGIPTNYKAEVITSNGSDKIIPGLMAIGEAACVSVHGANRLGSNSLIDLVVFGKSAAKRAAELVKPNTKHEEISKSETDKSLERFDKLRNGNGSNKTSELRLSMQKTMQSKCAVFRSEKTLKEGLDEIKKPFNGMESISVKDRSLIFNTDLMETLEFDNLIRQAITTMESAYQRKESRGAHAREDFPKRDDENYMKHTLSWHDGKEVKINYRKVNLSTLTNDVQTFPPKERVY

SEQ ID NO: 98082 - protein, 269 aa, Unknown
  Bacterial polypetide isolated from the Sargasso Sea
LDPKVIDERLPGIAESSRLFANVDVTKEPIPVVPTVHYNMGGIPTNYKAEVLTVNGSENTVPGLMAIGEAACVSVHGANRLGSNSLIDLVVFGRAAAKRAAELVKPGMSHEDISNSETDKCLERFDSLRNGNGDNRTADLRVSMQKTMQSKCAVFRTDKTLKEGIEEIRKPFEGMEKINVKDKSLIFNTDLVETLEFDNLIRQAITTMDSAYNRKESRGAHAREDYPNRDDQNFMKHTLSWCNGSKSKIAYREVHKSTLTNEVQYFPPQ

SEQ ID NO: 98083 - protein, 290 aa, Unknown
  Bacterial polypetide isolated from the Sargasso Sea
YDTVKGADWLGDQDSIEYLCKEAPKAVLELEKYGVPFSRTEEGKIYQRPFGGMTKNYGNGIVQRTCAAADRTGHAILHTLYGQALKHNTEFFIEYFALDLLMKDGECKGLIAWNLNDGTIHRFRAHTVIIATGGYGKVYYSATSAHTCTGDGNAMVLRAGLPLQDMEFVQFHPTGIYGHGTLISEGVRGEGGYLVNSEGERFMERYAPNAKDLASRDVVSRSMSIEINEGRGVGKDQDHVHLHLSHLDKSVIENRLPGITEAARLFANVDVTKDPIPVVPTVHYNMGGIQ

SEQ ID NO: 98084 - protein, 307 aa, Unknown
  Bacterial polypetide isolated from the Sargasso Sea
SHTVSAQRGITCAIQSDDPDDDWRWHMFDTVKGSDYIGDQEAIEYMCSEGPKAVFELEHMGLPFSRTEEGRIYQRPFGGQSKDYGKGGQATRTCAAADRTGHSLLHTLYQANLKAGTNFLNEWFAVDLVLNADKAVVGVIAFKIETGEIYYIKSKATVLATGGAGRIYASTTNALINSGDGIGMALRAGMPVQDIEMWQFHPTGIHGAGTLVTEGCRGEGGYLLNKDGERFMERYAPNAKDLASRDVVARSMALEILEGRGCGPNADHIFLRLDHLGPDVVHKRLPGITELSKTFAGVDPAVQPIPL

SEQ ID NO: 98085 - protein, 193 aa, Unknown
  Bacterial polypetide isolated from the Sargasso Sea
MSAYKIIDHEYDVVVLGAGGSGLRAAVGLSEAGLKTACISKVFPTRSHTSAAQGGISAALGNMGEDDWRWHMYDTVKGSDWLGDQDAIEYLCKEAPRAVVELERYGVPFSRTDDGKIYQRPFGGMTKNYGNGTAQRTCAAADRTGHAILHTLYGQALKQKTEFFIEYFALDLIMKNGECKGVIAWNLTDGYNT

SEQ ID NO: 98086 - protein, 224 aa, Unknown
  Bacterial polypetide isolated from the Sargasso Sea
MLVYQKFFLTRSHTSAAQGGISAALGNMGEDDWRWHMYDTVKGSDWLGDQDSIEYLCKEAPRAVLELERYGVPFSRTEDGKIYQRPFGGMTKNYGNETVQRTCAAADRTGHAILHTMYGQALKHNTEFFIEYFALDLLMKNGECKGLIAWNLNDGTIHRFRSHITIIATGGYGKTYYSSTSAHTCTGDGNAMVLRAGLPLQDMEFVQFHPTGIYGHGTLISEGV

SEQ ID NO: 98087 - protein, 263 aa, Unknown
  Bacterial polypetide isolated from the Sargasso Sea
MTSYEIIDHTYDAVVVGAGGAGLRATLGMTAEGLKTACITKVFPTRSHTVAAQGGVGAALDNMGEGDNWQFHMYDTVKGSDWLGDQDAIEYMCRNAIPAVIELEHYGVPFSRTEEGKIYQRPFGGHTLDNGKRMAKRACAAADRTGHAILHTLYQQCLANNAEFFIEYFALDLIMDEEGACRGVMAMDLATGTIHRFRAHQTVLATGGYGRAYFSCTSAHTCTGDGNGMVLRAGLPLQDMEFVQFHPTGVYGAGCLITEGARG

SEQ ID NO: 98088 - protein, 177 aa, Unknown
  Bacterial polypetide isolated from the Sargasso Sea
MSAYKIIDHEYDVVVLGAGGSGLRAAVGLSEAGLKTACISKVFPTRSHTSAAQGGISAALGNMGEDDWRWHMYDTVKGSDWLGDQDAIEYLCKEAPRAVVELERYGVPFSRTDDGKIYQRPFGGMTKNYGNGTAQRTCAAADRTGHAILHTLYGQALKQQTEFFIEYFALDLIMKNG

SEQ ID NO: 98089 - protein, 248 aa, Unknown
  Bacterial polypetide isolated from the Sargasso Sea
SRTEEGKIYQRPFGGHTLDHGKSMARRACAAADRTGHAILHTLYQQCLKYQAHFHIEYFVLDLLMTDEGECAGVLALCMEDGSLHRFWGQQTVLATGGYGRVYFSCTSAHTCTGDGNAMALRAGLPLQDMEFVQFHPTGVYGAGVLITEGARGEGGYLTNSEGERFMERFAPTAKDLASRDVVSRAMTIEINEGRGVGPNKDHIMLHLEHIDPATLHTRLPGITETAKIFCGVDVTREPIPVLPTVHY

SEQ ID NO: 98090 - protein, 247 aa, Unknown
  Bacterial polypetide isolated from the Sargasso Sea
MSAYKIIDHEYDVVVLGAGGSGLRAAVGLSEAGLKTACISKVFPTRSHTSAAQGGISAALGNMGEDDWRWHMYDTVKGSDWLGDQDAIEYLCKEAPRAVVELERYGVPFSRTEDGKIYQRPFGGMTKNYGNGTAQRTCAAADRTGHAILHTLYGQALKQNTEFFIEYFALDLIMKNGECKGLIAWNLTDGTIHRFRSHITIIATGGYGKVYYSATSAHTCTGDGNAMVLRAGLPLQDMEFVQFHPTG

SEQ ID NO: 98091 - protein, 263 aa, Unknown
  Bacterial polypetide isolated from the Sargasso Sea
GIYGVGCLITEGSRGEGGFLVNSEGERFMERYAPSAKDLASRDVVSRSMTVEINEGRGVGKNKDHIYLHLNHLDPKVLSERLPGISESAKVFAGVDVTKEPIPVLPTVHYNMGGISTNYHGQVLTKDVNGSDKIVDGLMAVGEAACVSVHGANRLGSNSLIDLVVFGKAASKKAAELVKPNSKHEIIPDSETQKSLDRFDKLRNSNGSTSTAHLRSLMQKTMQNKCAVFRTNKTLQEGVNEIRKPWDGLSDLSVKDRSLIFNT

SEQ ID NO: 98092 - protein, 307 aa, Unknown
  Bacterial polypetide isolated from the Sargasso Sea
EKWRVQSLIAWNLNDGTIHRFRSHITIIATGGYGKTYYSSTSAHTCTGDGNAMVLRAGLPLQDMEFVQFHPTGIYGHGTLISEGVRGEGGYLLNSKGERFMERYAPKAKDLASRDVVSRSIAIEINEGRGVGKEKDHVHLHLDHLDKEVIEKRLPGISESSRLFADVDVTKEPIPVVPTVHYNMGGIPTNYKAEVLTVNGSEKIVPGLMAIGEAACVSVHGANRLGSNSLIDLVVFGRAAAKRAAELVKPGDPHEEISDTETDKCLERFEKLRNGNGSNRTADLRLSMQKTMQTKCAVFRTEKTLKE

SEQ ID NO: 98093 - protein, 268 aa, Unknown
  Bacterial polypetide isolated from the Sargasso Sea
KDLASRDVVSRCIVQEILAGRGCGENKDHVLLKIDHLGADAIMKKLPEIREISMTFADVDPIEAPIPVVPTCHYMMGGIPTNVHGQVITTKNGTDSVIDGLYSIGEAANVSVHGANRLGGNSLLDLVVFGRAAGRHINENAKESSSLNLSKSNIEESLNVFNKIQSTKKGETVFNLRSEMQNVMQNYFGVYRNEKLMKEGISKLEEITDRTKKIHLMDKSNQFNSERVEVLEYLNLLDIANATAYSAMERKESRGAHAREDFPERDDQ

SEQ ID NO: 98094 - protein, 227 aa, Unknown
  Bacterial polypetide isolated from the Sargasso Sea
EDDWRWHMYDSVKGSDWLGDQDAIEYLCKEAPKAVIELERYGVPFSRTEDGKIYQRPFGGMTKNYGNGTVQRTCAAADRTGHAILHTLYGQALKHNTEFFIEYFALDLIMNKGQCKGIIAWNLNDGTIHRFRSHITIIATGGYGKIYYSATSAHTCTGDGNGMILRAGLPLQDMEFVQFHPTGIYGVGCLISEGVRGEGGYLLNSEGDRFMERYAPNAKDLASRDVV

SEQ ID NO: 98095 - protein, 280 aa, Unknown
  Bacterial polypetide isolated from the Sargasso Sea
CAESGLKTACISKVFPTRSHTVAAQGGIGAALGNMGDDNWKWHMYDTVKGSDWLGDQDAIEYLCSNAPEAVIELEEYGMPFSRTDDGRIYQRPFGGHLTKNGEGAPAMRACAAADRTGHALLHTLYQQSLKHKVEFHIEYFVLDLVMDKDGNCKGVVAWCLEDGTIHRFLSHQTILATGGYGRAYFSSTSAHICTGDGSAMALRQDLPLSDMEFIQFHPTGVYGAGVLITEGARGEGGYLTNSDGERFMERYAPNAKDLASRDVVSRAMTIEINENRGWW

SEQ ID NO: 98096 - protein, 276 aa, Unknown
  Bacterial polypetide isolated from the Sargasso Sea
FSHLDKEIIENRLPGITDAARLFANVDVTKEPIPVVPTVHYNMGGIPTNYKAEVLTVNGSEKTVPGLMAIGEAACVSVHGANRLGSNSLIDLVVFGRAAAKRAAELIKPGAPHEEISESETQKCLDRFDKIRNSDGDIGTAELRLSMQKTMQSKCAVFRTEKTLKEGVDEIRQTFDGLNSLSVKDKSLIFNTDLVETLEFDNLIRQAVVTVDSAYNRKESRGAHAREDYPKRDDEKFMQHTLAWCDGNKSKVSYRDVHKSTLTNEVQYFPPQERVY

SEQ ID NO: 98097 - protein, 307 aa, Unknown
  Bacterial polypetide isolated from the Sargasso Sea
QRTCAAADRTGHAILHTLYGQALKHNTEFFIEYFALDLLMKDGACKGLIAWNLNDGTIHRFRSHITIIATGGYGKVYYSATSAHTCTGDGNAMVLRAGLPLQDMEFVQFHPTGIYGHGTLISEGVRGEGGYLLNSKGERFMERYAPKAKDLASRDVVSRSIAIEINEGRGVGKEKDHVHLHLDHLDPKVIENRLPGISESSRLFANVDVTKEPIPVVPTVHYNMGGIPTNYKAEVLTLNGSEKVVPGLMAIGEAACVSVHGANRLGSNSLIDLVVFGKAAAKRASELIKTGMKHEEIDNSETDKCLW

SEQ ID NO: 98098 - protein, 277 aa, Unknown
  Bacterial polypetide isolated from the Sargasso Sea
KGGISAALGNMGEDDWKWHMYDTIKGSDWLGDQDAIAFMCKEAPEAVIELEHYGVPFSRTEEGKIYQRPFGGMTTHFGEGIAQRTCAAADRTGHAMLHTLYQQSLSHDAEFFVEYLVLDLIMNDKKECRGVLAWNLHDGKLYCFNSKMVILATGGYGRAYFSCTSAHTCTGDGGAMVLRAGLPLQDMEFTQFHPTGIYGAGVLITEGARGEGGFLTNSIGERFMEKYAPNAKDLASRDVVSRSMTTEIMEGRGCGPKKDHIHLNLSHLEKSVLEEKL

SEQ ID NO: 98099 - protein, 269 aa, Unknown
  Bacterial polypetide isolated from the Sargasso Sea
DGECKGLIAWNLNDGTIHRFRSHITIIATGGYGKTYYSSTSAHTCTGDGNAMVLRAGLPLQDMEFVQFHPTGIYGHGTLISEGVRGEGGYLLNSKGERFMERYAPKAKDLASRDVVSRSIAVEINEGRGVGKEKDHVHLHLDHLDPEVIEKRLPGISESSRLFADVDVTKEPIPVVPTVHYNMGGIPTNYKAEVLTVNGSEKIVPGLMAIGEAACVSVHGANRLGSNSLIDLVVFGRAAAKRASELVKPGTPHEKISNSETDKSLDRFE

SEQ ID NO: 98100 - protein, 330 aa, Unknown
  Bacterial polypetide isolated from the Sargasso Sea
LRAGLPLQDMEFVQFHPTGIYGVGCLITEGARGEGGYLVNSEGERFMERYAPSAKDLASRDVVSRSITKEIIDGRGVGKDKDHMYLHLDHIDSNILEERLPGISESAKVFAGVDVTKDPIPIIPTVHYNMGGIPTNFHGEVMNLVKGDETVVPGLMAVGESACVSVHGANRLGSNSLIDLVVFGKAAADRINDIVPKGKKNKDIPKPVIDDVIARFDATRNSDGDVTTAELRSQMQKVMQKHCAVFRDDEIMTEGKKLIEETWLDSENLKIKDKSLVWNTDLLETLEYKNLIAQAVVTMNSAHNRKESRGAHAREDFRERDDKNLDETYT

SEQ ID NO: 98101 - protein, 309 aa, Unknown
  Bacterial polypetide isolated from the Sargasso Sea
HTLYDQALKHNTEFFIEYFALDLLMKDGACKGLIAWNLNDGTIHRFRSHTTIIATGGYGKVYYSATSAHTCTGDGNAMVLRAGLPLQDMEFVQFHPTGIYGHGTLISEGVRGEGGYLLNSKGERFMERYAPKAKDLASRDVVSRSIAVEINEGRGVGKEKDHVHLHLNHLDPKVIEERLPGISESSRLFANVDVTKEPIPVVPTVHYNMGGIPTNYKAEVLTVNGSEKTVPGLMAIGEAACVSVHGANRLGSNSLIDLVVFGRAAAKRAAELIKPGTPHEDIPVSETEKCLERFDKLRNGNGDNNTAEL

SEQ ID NO: 98102 - protein, 236 aa, Unknown
  Bacterial polypetide isolated from the Sargasso Sea
CISKYFQQEVILSAAQGGISAALGNMGEDDWRWHMYDTVKGSDWLGDQDAIEYLCKEAPRAVVELERYGVPFSRTDDGKIYQRPFGGMTKNYGNGTAQRTCAAADRTGHAILHTLYGQALKHNTEFFIEYFALDLIMKNGECKGVIAWNLTDGTIHRFRSHITIIATGGYGKVYYSATSAHTCTGDGNAMVLRAGLPLQDMEFVQFHPTGIYGVGCLITEGARGEGGFLVNGKGER

SEQ ID NO: 98103 - protein, 246 aa, Unknown
  Bacterial polypetide isolated from the Sargasso Sea
QFHPTGIYGHGTLISEGVRGEGGYLVNSKGERFMEKYAPKAKDLASRDVVSRSIAVEINEGRGVGKDKDHVHLHLNHLDQKVIEDRLPGISEASRLFANVDVTKEPIPVVPTVHYNMGGIPTNYKAEVITMNGSEKTVPGLMAIGEAACVSVHGANRLGSNSLIDLVVFGRAAAKRAAELVKPGMKHEDIPQSETDKCLDRFDKLRNSKGSNPTAELRLAMQKTMQSKCAVFRTEKTLTEGVNEIR

SEQ ID NO: 98104 - protein, 260 aa, Unknown
  Bacterial polypetide isolated from the Sargasso Sea
TEAAKTFANVDVNKEPIPVVPTVHYNMGGIPTNYKAEVLTLNGSEKTVPGLMAIGEAACVSVHGANRLGSNSLIDLVVFGRAAAKRAAELVKPGMPHEEVPKSETDKCLERFDRIRNSNGSTKTSELRLKMQKTMQSKCAVFRTEKTLKEGVKEIRRPYDGLQDISVKDKSLLFNTDLVETLEFDNLIRQALTTMDSAYNRKESRGAHAREDYGKRDDKNFMKHTLAWQSDKKVEIKYRDVHSRTLTNDVQYFPPKERVY

SEQ ID NO: 98105 - protein, 294 aa, Unknown
  Bacterial polypetide isolated from the Sargasso Sea
LPFSRFENGRIYQRPFGGQSKDYGKGGQAARTCAAADRTGHALLHTLYQNNIKEGTQFLNEWFAVDLVLNGKDEITGVIAFSIESGKVCYLKAQATVLATGGAGRIYASTTNALINTGDGLGMTLRAGFPAQDMEMWQFHPTGIYGAGSLVTEGCRGEGGYLINADGERFMERYAPNAKDLAGRDVVARSMVLEILEGRGCGEKKDHVFLKLDHLGADVLNSKLPGICELSKTFAHVDPIFDPIPVVPTCHYMMGGTPTNIHGQAFGRDNDIDYLIPGLFSVGEAACVSVHGAN

SEQ ID NO: 98106 - protein, 296 aa, Unknown
  Bacterial polypetide isolated from the Sargasso Sea
IIDHEYDVVVLGAGGSGLRAAVGLSEAGLKTACISKVFPTRSHTSAAQGGISAALGNMGEDDWRWHMYDTVKGADWLGDQDSIEYLCKEAPKAVIELEKYGVPFSRTDDGKIYQRPFGGMTKNYGNGIVQRTCAAADRTGHAILHTLYGQALKHKTEFFIEYFALDLLMKDGACKGLIAWNLNDGTIHRFRAHTVIIATGGYGKVYYSATSAHTCTGDGNAMVLRAGLPLQDMEFVQFHPTGIYGHGTLITEGARGEGGYLTNSKGERFMERYAPKAKDLASRDVVSRSMSIEINE

SEQ ID NO: 98107 - protein, 268 aa, Unknown
  Bacterial polypetide isolated from the Sargasso Sea
IDERLPGISEASKLFANFDVTKEPIPVVPTVHYNMGGIPTNYKAEVLTLNGSEKTVPGLMAIGEAACVSVHGANRLGSNSLIDLVVFGRAAAKRAAELVKPGMKHEEIDKNETDRCLDRFDKLRNSEGSNPTSELRLSMQKTMQSKCAVFRTEKTLKEGVDEIRKPYDGMDSLSVKDKSLIFNTDLVETLEFDNLIRQAITTMDSAYHRKESRGAHAREDFPKRDDENYMQHTLSWCNGSKTKINYRPVHRSTLTNDVQYFPPQERVY

SEQ ID NO: 98108 - protein, 268 aa, Unknown
  Bacterial polypetide isolated from the Sargasso Sea
HTSAAQGGISAALGNMGEDDWRWHMYDTVKGSDWLGDQDSIEYLCKEAPRAVLELERYGVPFSRTEDGKIYQRPFGGMTKNYGNETVQRTCAAADRTGHAILHTMYGQALKHNTEFFIEYFALDLLMKDGECKGLIAWNLNDGTIHRFRSHITIIATGGYGKTYYSSTSAHTCTGDGNAMVLRAGLPLQDMEFVQFHPTGIYGHGTLISEGVRGEGGYLLNSKGERFMERYAPKAKDLASRDVVSRSIAVEINEGRGVEKKKIMFIFI

SEQ ID NO: 98109 - protein, 194 aa, Unknown
  Bacterial polypetide isolated from the Sargasso Sea
MSSYKIIDHEYDVVVLGAGGAGLRAAVGLSEEGLKTACISKVFPTRSHTSAAQGGISAALGNMGEDDWRWHMYDTVKGSDWLGDQDSIEYLCKEAPRAVLELERYGVPFSRTEDGKIYQRPFGGMTKNYGNETVQRTCAAADRTGHAILHTMYGQALKHNTEFFIEYFALDLLMKNGECKGLIAWNLNDGTIHR

SEQ ID NO: 98110 - protein, 313 aa, Unknown
  Bacterial polypetide isolated from the Sargasso Sea
PTRSHTVAAQGGIGAALGNMGEDNWKWHMFDTVKGSDWLGDQDAIEYLCSKAPEAIEDLEEYGMPFSRTEEGKIYQRPFGGHLTSNGEGPPAMRACAAADRTGHALLHTLYQQSLKNAVEFFIEYFVLDLLIDDDGTCKGVIAWSLEDGTLHRFLSHQTIIATGGYGRAYFSSTSAHICTGDGSAMALRQGLPLSDMEFIQFHPTGVYGAGVLITEGARGEGGYLTNSDGERFMERYAPNAKDLASRDVVSRAMTIEINENRGCGKNSDHVLLHLEHINSNTIHKRLPGISETAKIFAGVDLTKDPIPVLPTV

SEQ ID NO: 98111 - protein, 257 aa, Unknown
  Bacterial polypetide isolated from the Sargasso Sea
DGECKGLIAWNLNDGTIHRFRSHITIIATGGYGKTYYSSTSAHTCTGDGNAMVLRAGLPLQDMEFVQFHPTGIYGHGTLISEGVRGEGGYLLNSKGERFMERYAPKAKDLASRDVVSRSIAVEINEGRGVGKEKDHVHLHLDHLDPDVIEKRLPGISESSRLFADVDVTKEPIPVVPTVHYNMGGIPTNYKAEVLTVNGSEKIVPGLMAIGEAACVSVHGANRLGSNSLIDLVVFGRAAAKRAAELVKPGTPHEKIS

SEQ ID NO: 98112 - protein, 299 aa, Unknown
  Bacterial polypetide isolated from the Sargasso Sea
LGDQDSIEYMCKNAVESIIELEHFGVPFSRTEEGKIYQRPFGGMTTEYGKGIAQRTCAAADRTGHAILHTLYTQSLKNNVDFYIEYFVIDLVFEEDKCVGVLAWCLDDGSIHLFQAHIVILATGGHGRTYLSSTSAHTCTGDGNGMVLRAGLPLMDMEFIQFHPTGIYGAGCLITEGARGEGGYLTNSEGERFMPKYAPNAKDLASRDVVSRAIQMEVNAGRGVGPEKDHVLLHLEHLDDKVIHDKLPGITETAKIFSGVDATKEPIPVIPTVHYNMGGTPTNHYTEVISSGRWVNCRR

SEQ ID NO: 98113 - protein, 285 aa, Unknown
  Bacterial polypetide isolated from the Sargasso Sea
KDQDHVHLNLSHLDKEIIESRLPGITEAARLFANVDVTKEPIPVVPTVHYNMGGIPTNYKAEVLTVNGSEKTVPGLMAIGEAACVSVHGANRLGSNSLIDLVVFGRSAAQRAAELVKPGTPHEEIPESETQKCLDRFDKLRNAKGENSTADLRLSMQKTMQSKCAVFRTEKNLKEGVDEIRKTYDGMDSISVQDRSLVFNTDLVETLEFDNLIRQAVTTVDSAYQRKESRGAHAREDYPKRDDQKFMQHTLAWFDGKNTKISYRPVHQSTLTNEVQYFPPQERVY

SEQ ID NO: 98114 - protein, 248 aa, Unknown
  Bacterial polypetide isolated from the Sargasso Sea
PNAKDLASRDVVSRSMALEILEGRGCGPNADHIKLRLDHLGPEVVHKRLPGITELSKTFAHVDPAVEPIPVVPTCHYMMGGIPTNIHGQVITVDKGEDKIVKGLYAAGEVACVSVHGGNRLGGNSLLDLVVFGRAAGIHIEESLKDGIDVQKSSNEDVDQALKRLNKLNASKEGLETAYLKKEMQDNMQNNFGVFRTQDLMEKGIKDLSNSRESVDNIYLSDKSASFNTARIEALEMQNLFEVAEATA

SEQ ID NO: 98115 - protein, 292 aa, Unknown
  Bacterial polypetide isolated from the Sargasso Sea
AKDLAGRDVVARSMVMEILEGRGCGPEKDHVYLKLDHLGADVLNSKLPGICELSKTFAHVDPIMEPIPVVPTCHYMMGGTPTNIHGQAFSRNDGNDFMVSGLFSVGEAACVSVHGANRLGGNSLLDLVVFGRAAGKHINEELKSGGGVDNASNEDIELAMSRLNTLNESESGYEVADVKKQLQTCMQNYFGVFRRGEFMEKGVKELEEIREKSENLYLKDKSIAFNTNRVEALELQNLLEVAEATAISAMMRDESRGAHARDDFPERDDENWLCHSLYDPVEKKWAKEMLIF

SEQ ID NO: 98116 - protein, 280 aa, Unknown
  Bacterial polypetide isolated from the Sargasso Sea
LHTMYGQALKHNTEFFIEYFALDLLMKNGECKGLLAWNLNDGTIHRFRSHITIIATGGYGKTYYSSTSAHTCTGDGNAMALRAGLPLQDMEFVQFHPTGIYGHGTLISEGVRGEGGYLVNSKGERFMERYAPKAKDLASRDVVSRSIAVEINEGRGVGNEKDHVHLHLDHLDPKVIESRLPGISESSRLFANVDVTKEPIPVVPTVHYNMGGIPTNYKAEVITLNGSEKVVPGLMAIGEAACVSVHGANRLGSNSLIDLVVFGRAAAKRAAELVKPGSPH

SEQ ID NO: 98117 - protein, 253 aa, Unknown
  Bacterial polypetide isolated from the Sargasso Sea
KGSDWLGDQDAIEYLCKEAPRAVVELERYGVPFSRTDDGKIYQRPFGGMTKNYGNGTAQRTCAAADRTGHAILHTLYGQALKQNTEFFIEYFALDLIMKNGECKGVIAWNLTDGTIHRFRSHITIIATGGYGKVYYSATSAHTCTGDGNAMVLRAGLPLQDMEFVQFHPTGIYGVGCLITEGVRGEGGFLVNGKGERFMERYAPNAKDLASRDVVSRSMEMEINEGRGVGKNKDHINLHLDHIDKKVIDERLP

SEQ ID NO: 98118 - protein, 274 aa, Unknown
  Bacterial polypetide isolated from the Sargasso Sea
SHTSAAQGGISAALGNMGEDDWRWHMYDTVKGSDWLGDQDSIEYLCKEAPRAVLELERYGVPFSRTEDGKIYQRPFGGMTKNYGNETVQRTCAAADRTGHAILHTMYGQALKHNTEFFIEYFALDLLMKNGECKGLIAWNLNDGTIHRFRAHITIIATGGYGKTYYSSTSAHTCTGDGNAMVLRAGLPLQDMEFVQFHPTGIYGHGTLISEGVRGEGGYLLNSKGERFMERYAPKAKDLASRDVVSRSIAVEINEGRGVGKEKDHVHLHLDHLD

SEQ ID NO: 98119 - protein, 329 aa, Unknown
  Bacterial polypetide isolated from the Sargasso Sea
CTAAHTCTGDGSGMVLRAGLPLQDMEFVQFHPTGIYGVGCLITEGVRGEGGFLTNSEGERFMEKYAPNAKDLASRDVVSRSITLEILEGRGVGPNKDRMDLNLQHLDPKVIEERLPGISETARIFADVDVTKEPIPVIPTVHYDMGGIPTNKHTEVVTKNKNGEMEVVEGLMAVGEAASVSVHGANRLGSNSLLDLVVFGKEAAEQCARTINKDDKEESLPQDEIDRIVDKFDSIRFAKGSLATADIRLEMQQIMQNHASVFRTEEILSEGVKKLSACLDSFKDVSVTDRGLIWNTDLIETLELENLLGQAIITMESALARKESRGAHA

SEQ ID NO: 98120 - protein, 251 aa, Unknown
  Bacterial polypetide isolated from the Sargasso Sea
MSEYKIIDHEYDVVVLGAGGSGLRAAVGLSESGLKTACISKVFPTRSHTSAAQGGISAALGNMGEDDWRWHMYDTVKGADWLGDQDCIEYLCKEAPRAVLELEKYGVPFSRTKDGKIYQRPFGGMTKNYGNEPVQRTCAAADRTGHAILHTLYGQALKHNTEFFIEYFALDLLMKNGECKGLIAWNLNDGTIHRFRSHITIIATGGYGKVYYSATSAHTCTGDGNAMVLRAGLPLQDMEFVQFHPTGIYGP

SEQ ID NO: 98121 - protein, 299 aa, Unknown
  Bacterial polypetide isolated from the Sargasso Sea
GLSESGLKTACISKVFPTRSHTSAAQGGISAALGNMGEDDWRWHMYDTVKGSDWLGDQDAIEYLCKEAPRAVVELERYGVPFSRTDDGKIYQRPFGGMTKNYGNGTAQRTCAAADRTGHAILHTLYGQALKQNTEFFIEYFALDLIMKNGECKGVIAWNLTDGTIHRFRSHITIIATGGYGKVYYSATSAHTCTGDGNAMVLRAGLPLQDMEFVQFHPTGIYGVGCLITEGVRGEGGFLVNGKGERFMERYAPNAKDLASRDVVSRSMEMEINEGRGAGKDKDHINLHLDHIDKKVIDE

SEQ ID NO: 98122 - protein, 313 aa, Unknown
  Bacterial polypetide isolated from the Sargasso Sea
ATVLATGGAGRIYASTTNALINTGDGLGMTLRAGFPAQDMEMWQFHPTGIHGAGSLVTEGCRGEGGYLINADGERFMERYAPNAKDLAGRDVVARSMVMEILEGRGCGPEKDHVYLKLDHLGADVLNSKLPGICELSKTFAHVDPIKEPIPVVPTCHYMMGGTPTNIHGQAFSRNDGNDFMVSGLFSVGEAACVSVHGANRLGGNSLLDLVVFGRAAGKHINEELKSGGGVDNASNEDIELAMSRLNKLNESESGYEVADVKKQLQTCMQNYFGVFRRGEFMEKGVKELEEIREKSENLYLKDKKYCFQHKQS

SEQ ID NO: 98123 - protein, 267 aa, Unknown
  Bacterial polypetide isolated from the Sargasso Sea
TVLATGGAGRIYASTTNALICTGDGVGMALRAGYPMQDMEMWQFHPTGIYGAGTLVTEGCRGEGGYLINKDGERFMERYAPNAKDLAGRDVVARSMILEIIEGRGCGEKGDHVMLKLDHLGEDVLNAKLPGILELSRTFAHVDPVVEPIPVVPTCHYMMGGMPTNVNGQALTQDSKGQDIEIPGLFGVGEVACVSVHGANRLGGNSLLDLVVFGRAAGKHIEKMLSDGLEQRSASQSDVELSLQRLNRLNDSSGGEDLVSLRTELQS

SEQ ID NO: 98124 - protein, 240 aa, Unknown
  Bacterial polypetide isolated from the Sargasso Sea
PTVHYNMGGIPTNYKAEVLTLNGSEKTVPGLMAIGEAACVSVHGANRLGSNSLIDLVVFGRAAAKRAAELVKPGTPHEEISQSETDKCLERFDRLRNASGTNNTADLRLAMQKTMQSKCAVFRTEKTLKEGVNEIRKPYEGMDDLSVKDKSLIFNTDLVETLEFDNLIRQAITTMDSAYHRKESRGAHAREDFPKRNDEKFMQHTLSWCDGKKTKIDYRPVHRSTLSNDVQYFPPQERVY

SEQ ID NO: 98125 - protein, 284 aa, Unknown
  Bacterial polypetide isolated from the Sargasso Sea
TGHAILHTLYGQALKHNTEFFIEYFALDLLMKNGECKGLIAWNLNDGTIHRFRSHITILATGGYGKIYYTATSAHTCTGDGNGMALRAGLPLQDMEFVQFHPTGIYGVGTLISEGVRGEGGFLLNSKGERFMERYAPKAKDLASRDVVSRSIAVEINEGRGVGKNKDYVNLHLNHLDPKVIDERLPGIAESAKTFCEVDVKKDPIPVVPTVHYNMGGIPTNYKAEVLTLNGKESTVPGLMAIGEAACVSVHGANRLGSNSLIDLVVFGKSAANRAAELVKPGTP

SEQ ID NO: 98126 - protein, 304 aa, Unknown
  Bacterial polypetide isolated from the Sargasso Sea
RDVVSRSMSIEINEGRGVGKDQDHVHLNLNHLDKDIIESRLPGITDAARLFANVDVTKEPIPVVPTVHYNMGGIPTNYKAEVLTVNGSEKTVPGLMAIGEAACVSVHGANRLGSNSLIDLVVFGRAAAKRAAELIKPGTPHEEISEAETQKCLDRFDKIRNSNGEIGTAELRLSMQKTMQSKCAVFRTEKTLKEGVEEIRKTFDGLDSLSVKDKSLIFNTDLVETLEFDNLIRQAVVTVDSAYNRKESRGAHAREDFPKRDDEKFMQHTLAWCDGKDTTISYRDVHKSTLTNEVQYFPPQERVY

SEQ ID NO: 98127 - protein, 221 aa, Unknown
  Bacterial polypetide isolated from the Sargasso Sea
MKSYEVIDHTYDVVVVGAGGAGLRATLGMTMEGLKTACITKVFPTRSHTVAAQGGVGAALDNMGEGDNWQFHMYDTVKGSDWLGDQDAIEYMCRNAIPAVIELEHYGVPFSRTEEGKIYQRPFGGHTLDNGKRMAKRACAAADRTGHAILHTLYQQCLANNAEFYIEYFALDLIMDDTGACRGVMALDLATGTLHRFRAHQTVLATGGYGRAYFSCTSAHT

SEQ ID NO: 98128 - protein, 243 aa, Unknown
  Bacterial polypetide isolated from the Sargasso Sea
PFSRTDDGKIYQRPFGGMTKNYGNGTAQRTCAAADRTGHAILHTLYGQALKQQTEFFIEYFALDLIMKNGECKGVIAWNLTDGTIHRFRSHITIIATGGYGKVYYSATSAHTCTGDGNAMVLRAGLPLQDMEFVQFHPTGIYGVGCLITEGVRGEGGFLVNGKGERFMERYAPNAKDLASRDVVSRSMEMEINEGRGAGKNKDHINLHLDHIDKKVIDERLPGISEAAKTFANVDVSKEPIPV

SEQ ID NO: 98129 - protein, 229 aa, Unknown
  Bacterial polypetide isolated from the Sargasso Sea
TNYKAEVLTLNGKETTVPGLMAIGEAACVSVHGANRLGSNSLIDLVVFGKSAANRAAELIKPGTPHEEIPQSETDKCLDRFDKLRNSSGATKTSELRLSMQKTMQSKCAVFRTEKTLKEGMGQIRKPFEGMSDISVSDKSLLFNTDLVETLEFDNLIRQAMTTIDSAYHRKESRGAHAREDYKNRDDKKYMTHTLAWQKGNDVKVAYRPVHAKTLTNDVQYFPPRERVY

SEQ ID NO: 98130 - protein, 320 aa, Unknown
  Bacterial polypetide isolated from the Sargasso Sea
MGAGGSGLRAAVGLSEAGLKTACISKVFPTRSHTSAAQGGISAALGNMGEDDWRWHMYDTVKGSDWLGDQDCIEYLCKEAPRAVLELEKYGVPFSRTKDGKIYQRPFGGMTKNYGNEPVQRTCAAADRTGHAILHTLYGQALKHNTEFFIEYFALDLLMKNGECKGLIAWNLNDGTIHRFRAHITIIATGGYGKIYYSATSAHTCTGDGNGMILRAGLPLQDMEFVQFHPTGIYGHGTLISEGVRGEGGFLVNSNNERFMEHYAPKAKDLASRDVVSRSIAIEIKEGRGVGKDKDHVHLHLDHLDPKVIEERLPGISESS

SEQ ID NO: 98131 - protein, 282 aa, Unknown
  Bacterial polypetide isolated from the Sargasso Sea
YSSTSAHTCTGDGNAMILRAGLPLQDMEFVQFHPTGIYGHGTLISEGVRGEGGYLLNSKGERFMERYAPKAKDLASRDVVSRSIAIEINEGRGVGKEKDHVHLHLDHLDPEVIEKRLPGISESSRLFADVDVTKEPIPVVPTVHYNMGGIPTNYKAEVLTVNGSEKVVPGLMAIGEAACVSVHGANRLGSNSLIDLVVFGRAAAKRAAELIKPGAPHEEMSNSETDKILDRFEKLRNGNGDNRTADLRLSMQKTMQSKCAVFRTEKTLKEGVEEIRKPYDGM

SEQ ID NO: 98132 - protein, 432 aa, Unknown
  Bacterial polypetide isolated from the Sargasso Sea
MSAYKIIDHEYDVVVLGAGGSGLRAAVGLSEAGLKTACISKVFPTRSHTSAAQGGISAALGNMGEDDWRWHMYDTVKGSDWLGDQDAIEYLCKEAPRAVVELERYGVPFSRTDDGKIYQRPFGGMTKNYGNGTAQRTCAAADRTGHAILHTLYGQALKQQTEFFIEYFALDLIMKNGECKGVIAWNLTDGTIHRFRSHITIIATGGYGKVYYSATSAHTCTGDGNAMVLRAGLPLQDMEFVQFHPTGIYGVGCLITEGVRGEGGFLVNGKGERFMERYAPNAKDLASRDVVSRSMEMEINEGRGAGKNKDHINLHLDHIDKKVIDERLPGISEAAKTFANVDVSKEPIPVVPTVHYNMGGIPTNYKAEVLTLNGSEKTVPGLMAIGEAACVSVHGANRLGSNSLIDLVVFGRAAAKRAAELVKPGSPHEEVS

SEQ ID NO: 98133 - protein, 591 aa, Unknown
  Bacterial polypetide isolated from the Sargasso Sea
MSSYKIIDHEYDVVVLGAGGSGLRAAVGLSEAGLKTACISKVFPTRSHTSAAQGGISAALGNMGEDDWRWHMYDTVKGADWLGDQDSIEYLCKEAPKAVIELEKYGVPFSRTDDGKIYQRPFGGMTKNYGNGIVQRTCAAADRTGHAILHTLYGQALKHKTEFFIEYFALDLLMKDGECKGLIAWNLNDGTIHRFRAHSVIIATGGYGKVYYSATSAHTCTGDGNAMVLRAGLPLQDMEFVQFHPTGIYGHGTLITEGARGEGGYLTNSKGERFMERYAPNAKDLASRDVVSRSMSIEINEGRGVGKDQDHVHLNLSHLDKEIIESRLPGITDAARLFANVDVTKEPIPVVPTVHYNMGGIPTNYKGEVLTVNGSEKTVPGLMAIGEAACVSVHGANRLGSNSLIDLVVFGRAAAKRAAELVTPGMPHEEISESETQKCLDRFDKIRNADGDIGTAELRLSMQKTMQSKCAVFRTEKTLKEGVEEIRKTYDGLESISVKDKSLIFNTDLVETLEFDNLIRQAVVTVDSAYNRKESRGAHAREDYPKRDDEKFMQHTLAWCDGKETKISYREVHKTTLTNEVQYFPPQERVY

SEQ ID NO: 98134 - protein, 338 aa, Unknown
  Bacterial polypetide isolated from the Sargasso Sea
LISEGVRGEGGYLVNSKGERFMERYAPKAKDLASRDVVSRSIAIEINEGRGVGKEQDHVHLHLDHLDPKVIDERLPGISESSRLFANVDVTKEPIPVVPTVHYNMGGIPTNYKAEVLTLNGSEKTVPGLMAIGEAACVSVHGANRLGSNSLIDLVVFGRAAAKRASELIKPGMKHEDIDQSETDKSLNRFDKLRNSEGSNPTSELRLSMQKTMQSKCAVFRTEKTLKEGVNEIRKPYEGMDSISVKDKSLIFNTDLVETLEFDNLIRQAITTMDSAYYRKESRGAHAREDFPSRDDEKFMQHTLSWCDGTKTKIDYRPVHRSTLTNEVQYFPPQERIY

SEQ ID NO: 98135 - protein, 346 aa, Unknown
  Bacterial polypetide isolated from the Sargasso Sea
MSKYKIIDHEYDVVVLGAGGSGLRAAVGLSEAGLKTACISKVFPTRSHTSAAQGGISAALGNMGEDDWRWHMYDTVKGSDWLGDQDCIEYLCKEAPRAVLELEKYGVPFSRTKEGKIYQRPFGGMTKNYGNEPVQRTCAAADRTGHAILHTLYGQALKHNTEFFIEYFALDLLMKNGQCKGLIAWNLNDGTIHRFRSHITIIATGGYGKVYYSATSAHTCTGDGNAMVLRAGLPLQDMEFVQFHPTGIYGHGTLISEGVRGEGGYLLNSKGERFMERYAPKAKDLASRDVVSRSIAVEINEGRGVGKEKDHVHLHLNHLDPKVIEERLPGISESSRLFANVDVPKN

SEQ ID NO: 98136 - protein, 510 aa, Unknown
  Bacterial polypetide isolated from the Sargasso Sea
MGDQDAIEYLCKEAPKAVIELESYGVPFSRTKDGKIYQRAFGGMTKDYGNESVQRTCAAADRTGHAILHTLYGQALKHNTEFFIEYLALDLLMKNGECKGLIAWNLNDGTIHRFRSHITILATGGYGKIYYSATSAHTCTGDGNGMVLRAGLPLQDMEFVQFHPTGIYGNGTLISEGVRGEGGFLLNSKGERFMEKYAPKAKDLASRDVVSRSIAIEINEGRGVGKNKDHVNLHLDHIDPKIIEKRLPGIAESAKTFCEVDVTKEPIPVVPTVHYNMGGIPTNYKAEVLTSNGKDTTVQGLMAIGEAACVSVHGANRLGSNSLIDLVVFGKSAATRAAEIIKPGSPHEELAQTETDKCLDRFDKLRNSNGSSKTSELRLSMQKTMQSKCAVFRTEKTLKEGMSEIRKPFEGMKDISVKDKSLLFNTDLVETLEFDNLIRQAMTTIDSAYHRKESRGAHAREDFQKRDDKSYMTHTLAWQKGNEVKIAYRPVHAKTLTNDVQYFPPKERVY

SEQ ID NO: 98137 - protein, 386 aa, Unknown
  Bacterial polypetide isolated from the Sargasso Sea
GYGKVYYSATSAHTCTGDGNAMVLRAGLPLQDMEFVQFHPTGIYGHGTLITEGARGEGGYLTNSKGERFMERYAPNAKDLASRDVVSRSMSIEINEGRGVGKDQDHVHLNLSHLDKDIIESRLPGITDAARLFANVDVTKEPIPVVPTVHYNMGGIPTNYKAEVLTVNGSEKTVPGLMAIGEAACVSVHGANRLGSNSLIDLVVFGRAAAKRAAELVKPGTPHEEMPESETQKCLDRFDKLRNANGNNSTAELRLSMQKTMQSKCAVFRTEKNLKEGVDDIRKAYDGMDSISVKDRSLVFNTDLVETLEFDNLIRQAVTTVESAYHRKESRGAHARDDYPKRNDEKFMQHTLAWCDGKNTKISYRPVHKSTLTNDVQYFPPQERVY

SEQ ID NO: 98138 - protein, 260 aa, Unknown
  Bacterial polypetide isolated from the Sargasso Sea
SEAAKTFANVDVNKQPIPVVPTVHYNMGGIPTNYKAEVLTLNGSEKTVPGLMAIGEAACVSVHGANRLGSNSLIDLVVFGRAAAKRAAELVKPGMAHEEVSSSETDKCLSRFDKIRNSTGSTKTSELRLNMQKTMQSKCAVFRTEKTLKEGVDQIRKPYEGIEDISVKDKSLLFNTDLVETLEFDNLIRQALTTMDSAYSRKESRGAHAREDYSKRDDKNFMKHTLAWQNGKKVEIKYRDVHSRTLTNDVQYFPPKERVY

SEQ ID NO: 98139 - protein, 447 aa, Unknown
  Bacterial polypetide isolated from the Sargasso Sea
LHTLINQSISHSAEFFIEHFVIDLIMNKKKECVGVLTINLHDGKYYLFSSKMVILATGGYGRAYFSCTSAHTCTGDGGGMVLRADLPLQDMEFTQFHPTGIYGVGVLITEGARGEGGYLTNSKGERFMERYAPNAKDLASRDVVSRSMTNEIIEGRGCGQKKDHIHLNLSHLNHKILEEKLPGITESAKIFAGVDVRKEPIPVQPTVHYNMGGIPTNINGEVIKTNTKGEEQIVPGLMSVGEAACVSVHGANRLGSNSLLDLVVFGKSAATQCAKIIKSSKKNYKILKEDYEKIILRFEKIKNSNGKSSISKIRAEMQQTMQNYCPVYRSEKKMREGKKIIQSLLKKFNDIKINDKTTVWNTEIIEALELHNLLLQSLASIECALNRKESRGAHSRVDFKNRNDKKWLKHSLVWVDSNEKSKIGYRRVNLETKSKEIKTIEPKARVY

SEQ ID NO: 98140 - protein, 364 aa, Unknown
  Bacterial polypetide isolated from the Sargasso Sea
RPFGGMTKNYGNETVQRTCAAADRTGHAILHTLYGQALKHNTEFFIEYFALDLLMKNGECKGLIAWNLNDGTIHRFRSHITIIATGGYGKVYYSATSAHTCTGDGNAMVLRAGLPLQDMEFVQFHPTGIYGHGTLISEGVRGEGGYLLNSKGERFMERYAPKAKDLASRDVVSRSIAIEINEGRGVGKEKDHVHLHLDHLDPKVIEDRLPGISESSKLFADVDVTKEPIPVVPTVHYNMGGIPTNYKAEVLSASGSNQTVPGLMAIGEAACVSVHGANRLGSNSLIDLVVFGRAAAKRASELVKPGTPHEVISQSETDKCLKRFDKLRNSSGKNTTAELRISMQKTMQSKCAVFRTEKTLSEGV

SEQ ID NO: 98141 - protein, 392 aa, Unknown
  Bacterial polypetide isolated from the Sargasso Sea
IYQRAFGGMTKDYGNESVQRTCAAADRTGHAILHTLYGQALKHNTEFFIEYLALDLLMKNGECKGLIAWNLNDGTIHRFRSHITILATGGYGKVYYTATSAHTCTGDGNGMILRAGLPLQDMEFVQFHPTGIYGNGTLISEGVRGEGGFLLNSKGERFMEKYAPKAKDLASRDVVSRSIAIEINEGRGVGKNKDHVNLHLDHIDPNIIEKRLPGIAESAKTFCEVDVTKDPIPVVPTVHYNMGGIPTNYKAEVLTSNGKDTVVPGLMAIGEAACVSVHGANRLGSNSLIDLVVFGKSAATRAAEIIKPGSPHEELSQSETDKCLDRFDKLRNSNGSTKTSELRLLMQKTMQSKCAVFRTEKTLKEGMNEIRKPFEGMENISVKDKSLLFNTD

SEQ ID NO: 98142 - protein, 256 aa, Unknown
  Bacterial polypetide isolated from the Sargasso Sea
AGVDVTKAPIPVIPTVHYNMGGIPTNYLGEVLKPKDINDETVVPGLMAIGEASCVSVHGANRLGSNSLLDLIVFGRAAAKQASKLVKPGAKHMDENKTAVDKIVGRLDKIRYSSGKNLPSKLRLRLQKEMQRSVAVFRTEKTLDEGRKIIHNIYKDFSDINLSDNSLKWNTELLETLELENLLTQGIASVESAYNRKESRGAHARDDYPERNDKDWMKHTIASIDDDGIVDIGYRKVVLTTLTDEVEAVPPKKRVY

SEQ ID NO: 98143 - protein, 294 aa, Unknown
  Bacterial polypetide isolated from the Sargasso Sea
EINEGRGIGKEQDHVHLHIDHLDPKVIDERLPGISEASKLFANVDVTKDPIPVVPTVHYNMGGIPTNYKAEVLTVNGSEKTVPGLMAIGEAACVSVHGANRLGSNSLIDLVVFGRAAAKRAAELVKPGMKHDEIDKSENDRCLDRFDKLRNSEGSNPTSELRLSMQKTMQSKCAVFRTEKTLKEGVDEIRKPFEGMDSLSVKDKSLIFNTDLVETLEFDNLIRQAITTMDSAYHRKESRGAHAREDFPKRDDENYMQHTLSWCSGSKTKINYRPVHRSTLTNDVQYFPPQERVY

SEQ ID NO: 98144 - protein, 590 aa, Unknown
  Bacterial polypetide isolated from the Sargasso Sea
MSSYKIIDHEYDVVVLGAGGSGLRAAVGLSEAGLKTACISKVFPTRSHTSAAQGGISAALGNMGEDDWRWHMYDTVKGSDWLGDQDSIEYLCKEAPKAVLELEQYGVPFSRTEDGKIYQRPFGGMTKNYGNGTVQRTCAAADRTGHAILHTLYGQALKHNTEFFIEYFALDLLMKDGECKGLIAWNLNDGTIHRFRSHITIIATGGYGKVYYSATSAHTCTGDGNAMVLRAGLPLQDMEFVQFHPTGIYGHGTLISEGVRGEGGYLLNSKGERFMERYAPKAKDLASRDVVSRSIAVEINEGRGVGNEKDHVHLHLDHLDPKVIEERLPGISESSRLFADVDVTKEPIPVVPTVHYNMGGIPTNYKAEVLSANGADTVPGLMAIGEAACVSVHGANRLGSNSLIDLVVFGRAAAKRAAEIIKPGTPHEEISQSETDKCLERFDKLRNSDGSNNTADLRISMQKTMQSKCAVFRTEKTLSEGVNEIRKPFEGMESIKVKDKSLIFNTDLVETLEFDNLIRQAITTMDSAYYRKESRGAHAREDFPNRDDDKFMQHTLSWCNGDKTEIKYRPVTRSTLTNDVQYFPPQERVY

SEQ ID NO: 98145 - protein, 462 aa, Unknown
  Bacterial polypetide isolated from the Sargasso Sea
MSSYKIIEHEYDVVVLGAGGAGLRAAVGLSEAGLKTACISKVFPTRSHTSAAQGGISAALGNMGEDDWRWHMYDTVKGSDWLGDQDSIEYLCKEAPRAVLELERYGVPFSRTEDGKIYQRPFGGMTKNYGNETVQRTCAAADRTGHAILHTMYGQALKHNTEFFIEYFALDLLMKDGECKGLIAWNLNDGTIHRFRSHITIIATGGYGKTYYSSTSAHTCTGDGNAMVLRAGLPLQDMEFVQFHPTGIYGHGTLISEGVRGEGGYLLNSKGERFMERYAPKAKDLASRDVVSRSIAVEINEGRGVGKEKDHVHLHLDHLDPEVIEKRLPGISESSRLFADVDVTKEPIPVVPTVHYNMGGIPTNYKAEVLTVNGSEKIVPGLMAIGEAACVSVHGANRLGSNSLIDLVVFGRAAAKRAAELVKPGTPHEEISNSETDKCLDRFEKLRNGNGTNRTADLRLAM

SEQ ID NO: 98146 - protein, 381 aa, Unknown
  Bacterial polypetide isolated from the Sargasso Sea
YYTATSAHTCTGDGNGMVLRAGLPLQDMEFVQFHPTGIYGVGTLISEGVRGEGGFLLNSKGERFMERYAPKAKDLASRDVVSRSIAIEVNEGRGVGKNKDHVNLHLDHIDPKIIEKRLPGIAESAKTFCEVDVTKEPIPVVPTVHYNMGGIPTNYKAEVLTSNGKDTTVPGLMAIGEAACVSVHGANRLGSNSLIDLVVFGKSAATRAAEIVKPGTPHEELSQSETDKCLDRFDKLRNSSGSTKTSELRLQMQKTMQSKCAVFRTEKTLKEGMNEIRKPFEGMENISVKDKSLLFNTDLVETLEFDNLIRQAMTTIDSAYHRKESRGAHAREDFKKRDDKTYMSHTLAWQKGNEVKVGYRPVHANTLTNDVQYFPPKERVY

SEQ ID NO: 98147 - protein, 515 aa, Unknown
  Bacterial polypetide isolated from the Sargasso Sea
MGAGGSGLRAAVGLSEAGLKTACISKVFPTRSHTSAAQGGISAALGNMGEDDWRWHMYDTVKGSDWLGDQDAIEYLCKEAPKAVKELDRYGVPFSRTKDGKIYQRPFGGMTKNYGNGTVQRTCAAADRTGHAILHTLYGQALKHNTEFFIEYFALDLIMKNGECRGLIAWNLNDGTIHRFKSHITIIATGGYGKIYYSATSAHTCTGDGNGMVLRAGLPLQDMEFVQFHPTGIYGVGCLISEGVRGEGGFLLNSKGERFMERYAPTAKDLASRDVVSRSIAIEINEGRGVGKEKDHVHLHLDHLDPKVIDDRLPGIAESAKTFSGVDVTKDPIPVVPTVHYNMGGIPTNYKAEVLTLNGTEKTVPGLMAIGEAACVSVHGANRLGSNSLIDLVVFGKAAAKRAAELVKPNTPHDISPKSEADKCLDRFDKIRNSKGETSTAKLRLSMQKTMQSKCAVFRTEKTLKQGVDEIRKPFEGLEDISVKDKSLLFNTDLVESLEFDNLIRQAMTTMDSAY

SEQ ID NO: 98148 - protein, 468 aa, Unknown
  Bacterial polypetide isolated from the Sargasso Sea
KQFDVVIVGGGGSGLRASLEISKSGLNVAVISKVFPTRSHTVAAQGGITCAIASADPNDDWRWHMFDTIKGSDYIGDQDAIEYMCSEGPETVFELEHMGLPFSRFENGRIYQRPFGGQSKEFGEGGQAARTCAAADRTGHALLHTLYQANLKAGTNFLNEWFAADIIKNDSGVVSGISCFDMETGEISVIKCNAIVLATGGAGQVYEQNTTSLICTGDGLGMVLRQDLPLQDMEMWQFHPTGLYGNGSLMTEGCRGEGGYLINSEGKRFMPDYAPKAKDLASRDVVSRCIVQEILAGRGCGEKKDHVLLKIDHLGAEAITKKLPEIREISMTFANVDPIENPIPVVPTCHYMMGGIPTNINGQVITQDNAGNDSVVKGLYSIGEAANVSVHGANRLGGNSLLDLVVFGRAAGKHINEELSNQSSPEISNTNIEESLETLIRIQETVKGESVFQLRSEMQSIMQNYFGV

SEQ ID NO: 98149 - protein, 351 aa, Unknown
  Bacterial polypetide isolated from the Sargasso Sea
MSSYKIVDHEYDVVVLGAGGSGLRAAVGLSEAGLKTACVSKVFPTRSHTSAAQGGISAALGNMGEDDWRWHMYDTVKGADWLGDQDCIEYLCKEAPRAVLELEKYGVPFSRTEDGKIYQRPFGGMTKNYGNGTVQRTCAAADRTGHAILHTLYGQALKHNTEFFIEYFALDLLMKDGECKGLIAWNLNDGTIHRFRSHITIIATGGYGKVYYSATSAHTCTGDGNAMVLRAGLPLQDMEFVQFHPTGIYGHGTLISEGVRGEGGYLVNSNGERFMERYAPKAKDLASRDVVSRSIAVEINEGRGVGKEKDHVHLHLDHLDPNVIEERLPGISESSRLFANVDVTKEPIPVV

SEQ ID NO: 98150 - protein, 591 aa, Unknown
  Bacterial polypetide isolated from the Sargasso Sea
MSSYNIIDHEYDVVVLGAGGSGLRAAVGLSEAGLKTACISKVFPTRSHTSAAQGGISAALGNMGEDDWRWHMYDTVKGADWLGDQDSIEYLCKEAPKAVLELEKYGVPFSRTDEGKIYQRPFGGMTKNYGNGIVQRTCAAADRTGHAILHTLYGQALKHNTEFFIEYFALDLLMKDGECKGLIAWNLNDGTIHRFRAHTVIIATGGYGKVYYSATSAHTCTGDGNAMVLRAGLPLQDMEFVQFHPTGIYGHGTLISEGVRGEGGYLVNSKGERFMERYAPNAKDLASRDVVSRSMSIEINEGRGVGKDQDHVHLHLSHLDKSVIENRLPGITEAARLFANVDVTKEPIPVVPTVHYNMGGIPTNYKAEVLTVNGSEKTVPGLMAIGEAACVSVHGANRLGSNSLIDLVVFGRAAAKRAAELVKPGAPHEEISETETQKCLDRFDKLRNAQGDNSTAELRLAMQKTMQSKCAVFRTEKNLEEGVNEIRKTYDGIDSISVKDRSLVFNTDLVETLEFDNLIRQAVTTVDSAYHRKESRGAHAREDYPNRDDKKFMQHTLAWCDGKDTKITYRPVHNSTLTNEVQYFPPQERVY

SEQ ID NO: 98151 - protein, 445 aa, Unknown
  Bacterial polypetide isolated from the Sargasso Sea
MNSYKIIDHEYDVVVLGAGGSGLRAAVGLSEAGLKTACISKVFPTRSHTSAAQGGISAALGNMGEDDWRWHMYDTVKGADWLGDQDSIEYLCKEAPKAVIELEKYGVPFSRTEDGKIYQRPFGGMTKNYGNGIVQRTCAAADRTGHAILHTLYGQALKHNTEFFIEYFALDLIMKNGECKGLIAWNLNDGTIHRFKSHITIIATGGYGKIYYSATSAHTCTGDGNGMVLRAGLPLQDMEFVQFHPTGIYGVGCLISEGVRGEGGFLLNSKGERFMERYAPSAKDLASRDVVSRSIAIEINEGRGVGKEKDHVHLHLDHLDPKVIDDRLPGIAESAKTFSGVDVTKEPIPVVPTVHYNMGGIPTNYKAEVLTLNGSEKTVPGLMAIGEAACVSVHGANRLGSNSLIDLVVFGKAAAKRAAELVKPNTPHENSPKSELDKCLDRFDR

SEQ ID NO: 98152 - protein, 456 aa, Unknown
  Bacterial polypetide isolated from the Sargasso Sea
SHTSAAQGGISAALGNMGEDDWRWHMYDTVKGSDWLGDQDSIEYLCKEAPRAVLELEKYGVPFSRTEDGKIYQRPFGGMTKNYGNETVQRTCAAADRTGHAILHTLYGQALKHNTEFFIEYFALDLLMKNGECKGLIAWNLNDGTIHRFRSHITIIATGGYGKVYYSATSAHTCTGDGNAMVLRAGLPLQDMEFVQFHPTGIYGHGTLISEGVRGEGGYLVNSKAERFMERYAPKAKDLASRDVVSRSIAIEINEGRGVGKEKDHVFLHLDHLDPEVIEKRLPGISESSKLFANVDVTKEPIPVVPTVHYNMGGIPTNYKAEVLTVNGSEKVVPGLMAIGEAACVSVHGANRLGSNSLIDLVVFGRAAAARASSIVKPGTPHEEISQSETEKCLQRFDKLRNGNGTNTTAELRLSMQKTMQSKCAVFRNEKTLKEGIEEIRKPYKGMENISVKDKS

SEQ ID NO: 98153 - protein, 337 aa, Unknown
  Bacterial polypetide isolated from the Sargasso Sea
MKSYKIIDHTYDVVVLGAGGSGLRAAVGLSEAGLKTACISKVFPTRSHTSAAQGGISAALGNMGEDDWRWHMYDTVKGSDWLGDQDSIEYLCKEAPRAVLELEQYGVPFSRTEDGKIYQRPFGGMTKNYGNGTVQRTCAAADRTGHAILHTLYGQALKHNTEFFIEYFALDLLMKDGQCKGLIAWNLNDGTLHRFKSHITIIATGGYGKVYYSATSAHTCTGDGNAMVLRAGLPLQDMEFVQFHPTGIYGHGTLISEGVRGEGGYLLNSKGERFMEKYAPKAKDLASRDVVSRSIAIEINEGRGVGKEKDHVHLHLNHLDPKVIDERLPGIAESSRL

SEQ ID NO: 98154 - protein, 526 aa, Unknown
  Bacterial polypetide isolated from the Sargasso Sea
MSSYKIIDHEYDVVVLGAGGSGLRAAVGLSEAGLKTACISKVFPTRSHTSAAQGGISAALGNMGEDDWRWHMYDTVKGADWLGDQDSIEYLCKEAPKAVIELEKYGVPFSRTEDGKIYQRPFGGMTKNYGNGIVQRTCAAADRTGHAILHTLYGQALKHKTEFFIEYFALDLLMKNGACKGLIAWNLNDGTIHRFRAHTVIIATGGYGKVYYSATSAHTCTGDGNAMVLRAGLPLQDMEFVQFHPTGIYGHGTLITEGARGEGGYLTNSKGERFMERYAPKAKDLASRDVVSRSMSIEINEGRGVGKDQDHVHLNLSHLDKDIIESRLPGITDAARLFANVDVTKEPIPVVPTVHYNMGGIPTNYKAEVLTVNGSEKTVPGLMAIGEAACVSVHGANRLGSNSLIDLVVFGRAAAKRAAELIKPGTAHEEISETETQKCLDRFDKIRNANGDIGTAELRLSMQKTMQSKCAVFRTEKTLKEGVDEIRKTYDGLNNLSVKDKSLIFNTDLVETLEFDNLIRQAVVTV

SEQ ID NO: 98155 - protein, 591 aa, Unknown
  Bacterial polypetide isolated from the Sargasso Sea
MSAYKIIDHEYDVVVLGAGGSGLRAAVGLSEAGLKTACISKVFPTRSHTSAAQGGISAALGNMGEDDWRWHMYDTVKGSDWLGDQDAIEYLCKEAPRAVVELERYGVPFSRTDDGKIYQRPFGGMTKNYGNGTAQRTCAAADRTGHAILHTLYGQALKQQTEFFIEYFALDLIMKNGECKGVIAWNLTDGTIHRFRSHITIIATGGYGKVYYSATSAHTCTGDGNAMVLRAGLPLQDMEFVQFHPTGIYGVGCLITEGVRGEGGFLVNGKGERFMERYAPNAKDLASRDVVSRSMEMEINEGRGAGKDKDHINLHLDHIDKKVIDERLPGISEAAKTFANVDVSKEPIPVVPTVHYNMGGIPTNYKAEVLTLNGSEKTVPGLMAIGEAACVSVHGANRLGSNSLIDLVVFGRAAAKRAAELVKPGSPHEDVSKSETDKCLDRFDKIRNSDGSTKTSELRLQMQKTMQTKCAVFRTEKTLKEGVEQIRKPYDGISDISVKDKSLLFNTDLVETLEFDNLISQALTTMDSAYNRKESRGAHAREDFTKRDDKNFMKHTLAWQNGKKVEIKYRDVHSRTLTNDVQYFPPKERVY

SEQ ID NO: 98156 - protein, 591 aa, Unknown
  Bacterial polypetide isolated from the Sargasso Sea
MSEYNIIDHEYDVVVLGAGGSGLRAAVGLSEAGLKTACISKVFPTRSHTSAAQGGISAALGNMGEDDWRWHMYDTVKGADWLGDQDSIEYLCKEAPKAVIELEKYGVPFSRTEDGKIYQRPFGGMTKNYGNGIVQRTCAAADRTGHAILHTLYGQALKHQTEFFIEYFALDLLMKNGECKGVIAWNLNDGTIHRFRSHITIIATGGYGKVYYSATSAHTCTGDRNAMVLRAGLPLQDMEFVQFHPTGIYGHGTLISEGVRGEGGYLVNSKGERFMERYAPNAKDLASRDVVSRSMSIEINEGRGVGKEKDHVHLHLSHLDKNVIEDRLPGITEAARLFANVDVTKEPIPVVPTVHYNMGGIPTNYKTEVITVNGSEKVVPGLMAIGEAACVSVHGANRLGSNSLIDLVVFGRAAAKRAAEIVKPGTPHESISESETEKCIDRFDKLRNAKGENLTAGLRLEMQKTMQSKCAVFRTEKNLKEGVEEIRKTYDGMKSISVKDRSLIFNTDLVETLEFDNLIRQAITTVDSAYYRKESRGAHAREDFPKRDDEKFMKHTLAWCDGKETKIEYRDVHNSTLTNDVQYFPPQERVY

SEQ ID NO: 98157 - protein, 583 aa, Unknown
  Bacterial polypetide isolated from the Sargasso Sea
MEFDGIIVGGGGAGMRASLQLAESGLNTAVISKVFPTRSHTVSAQGGITCAIQSDDPDDDWRWHMFDTVKGSDYIGDQEAIEYMCSEGPKAVFELEHMGLPFSRTEEGRIYQRPFGGQSKDYGKGGQATRTCAAADRTGHSLLHTLYQANLKAGTNFLNEWFAVDMVLNTDGAVVGVIAFKIETGEIYYIKSKATVLATGGAGRIYASTTNALINSGDGIGMALRAGMPVQDIEMWQFHPTGIHGAGTLVTEGCRGEGGYLLNKDGERFMERYAPNAKDLASRDVVARSMALEILEGRGCGPNADHIFLRLDHLGPEVVHKRLPGITELSKTFAGVDPAVQPIPVVPTCHYMMGGIPTNINGQVITVQDGQDKVVDGLYAAGEVACVSVHGGNRLGGNSLLDLVVFGRAAGIYIEESMKQGVELKNASHDDIDKALERLNKLNASSEGEQVTSLKERMQQNMQSNFGVFRTKDLMEKGIEDLSKVRDEVENMHLKDKSATFNTARIEALEMQNLFEVAEATAVTANSRKESRGAHSRDDYPDRDDENWLKHSIYFSENKEVSKRDVNYRPKTVQAFQPMVRSY

SEQ ID NO: 98158 - protein, 504 aa, Unknown
  Bacterial polypetide isolated from the Sargasso Sea
MNIYVKRHPRAVLELEKYGVPFSRTEDGKIYQRPFGGMTKNYGNETVQRTCAAADRTGHAILHTMYGQALKHNTEFFIEYFALDLLMKNGECKGLIAWNLNDGTIHRFRSHITIIATGGYGKTYYSSTSAHTCTGDGNAMVLRAGLPLQDMEFVQFHPTGIYGHGTLISEGVRGEGGYLLNSKGERFMERYAPKAKDLASRDVVSRSIAVEINEGRGVGKEKDHVHLHLNHLDPKVIEERLPGISESSRLFADVDVTKEPIPVVPTVHYNMGGIPTNYKAEVLTLNESEKIVPGLMAIGEAACVSVHGANRLGSNSLIDLVVFGRAAAKRASEIVKPGTAHEEIPQSETDKCLDRFEKLRNGNGSNRTADLRLSMQKTMQSKCAVFRTEKTLKEGIEEIRKPYEGIESISVKDKSLIFNTDLVETLEFDNLIRQAIVTIDSAYERKESRGAHAREDHPKRDDNNFMKHTLSWCEGSKTKIAYRDVHRSTLSNDVQYFPPQERVY

SEQ ID NO: 98159 - protein, 382 aa, Unknown
  Bacterial polypetide isolated from the Sargasso Sea
MSSYKIIDHEYDVVVLGAGGSGLRAAVGLSEAGLKTACISKVFPTRSHTSAAQGGISAALGNMGEDDWRWHMYDTVKGSDWLGDQDCIEYLCKEAPKAVLELEKYGVPFSRTKEGKIYQRPFGGMTKNYGNEPVQRTCAAADRTGHAILHTLYGQALKHNTEFFIEYFALDLLMKDGECKGLIAWNLNDGTIHRFRAHITIIATGGYGKVYYSATSAHTCTGDGNAMVLRAGLPLQDMEFVQFHPTGIYGHGTLISEGVRGEGGYLLNSKGERFMERYAPKAKDLASRDVVSRSIAIEINEGRGVRQQKDHVHLHLNHLDPKVIEQRLPGISESSKLFANVDVTKEPIPVVPTVHYNMGGIPTNFKAEVLTMNGSDKIVPGL

SEQ ID NO: 98160 - protein, 591 aa, Unknown
  Bacterial polypetide isolated from the Sargasso Sea
MNYEIEYHDYDVVVVGAGGSGLRATVGAVENGYKTACISKVFPTRSHTVAAQGGISAALGNMGDDDWRWHMYDTVKGSDWLGDQDAIEYLCKNAPKAVLELENYGVPFSRTEDGKIYQRAFGGMTKNYGEGTAQRTCAAADRTGHAIIHTLYGQSLKHDVDYYIEYFVLDLLMVEGECRGVVAWCLEDGKLHVFNSKQTILASGGYGRVYFSATSAHTCTGDGNAMVLRAGLPLQDMEFVQFHPTGIYGVGCLITEGARGEGGYLVNSEGERFMERYAPSAKDLASRDVVSRSITKEILEGRGVGKDKDHAYLHLDHIDSDILEERLPGISESAKVFAGVDVTKEPIPIIPTVHYNMGGIPTNFHGEVMNLEKGNETIVQGLMAVGEAACVSVHGANRLGSNSLIDLVVFGKAAADRINDTVNKDEPNKEIPSHVIDEVIARFDSTRSSDGDISTSELRSQMQRVMQKHCAVFRDDEIMSEGKKLIEETWLNSENIKIKDKSLIWNTDLLETLEYKNLIAQAVVTMNSALNRKESRGAHAREDYKERDDKNWMKHTMSWLNDKSCELDYRSVHEYTLSNEVKYIAPKARVY

SEQ ID NO: 98161 - protein, 318 aa, Unknown
  Bacterial polypetide isolated from the Sargasso Sea
MNKAYNIIDHNYDVVVIGAGGSGLRSTLGLAESGLNVACISKVFPTRSHTVAAQGGIGAALGNMGEDNWKWHMFDTVKGSDWLGDQDAIEYLCSKAPEAIEDLEEYGMPFSRTEEGKIYQRPFGGHLTSNGEGPPAMRACAAADRTGHALLHTLYQQSLKNSVEFFIEYYVLDLLIDDDGTCKGVIAWCLEDGTLHRFLSHQTIIATGGYGRAYFSSTSAHICTGDGSAMALRQGLPLSDMEFIQFHPTGVYGAGVLITEGARGEGGYLTNSDGERFMERYAPNAKDLASRDVVSRAMTIEINENRGCGEILIMYYFT

SEQ ID NO: 98162 - protein, 418 aa, Unknown
  Bacterial polypetide isolated from the Sargasso Sea
MKNGQCKGLIAWNLNDGTIHRFRSHITILATGGYGKVYYTATSAHTCTGDGNGMALRAGLPLQDMEFVQFHPTGIYGVGTLISEGVRGEGGYLLNSKGERFMERYAPKAKDLASRDVVSRSIAVEINEGRGVGKNKDYVNLHLDHLDPKVIEERLPGIAESAKTFCEVDVRKDPIPVVPTVHYNMGGIPTNYKAEVLTLNGKESTVQGLMAIGEAACVSVHGANRLGSNSLIDLVVFGKSAANRAAELVKPGTPHETISQSETDKCLERFDRLRNSSGSTKTAELRLSMQKTMQSKCAVFRTEKTLKEGMDQIRKPFDGMADISVSDKSLLFNTDLVETLEFDNLIRQAMTTIDSAYHRKESRGAHAREDFKNRDDKKFMTHTLAWQKDNKVKVAYRPVHSKTLTNDVQYFPPRERVY

SEQ ID NO: 98163 - protein, 590 aa, Unknown
  Bacterial polypetide isolated from the Sargasso Sea
MSKIPFSEKTYDVVIIGGGGSGLRASLEIAKSGLDVAVISKVFPTRSHTVAAQGGITCAIASADPNDDWRWHMFDTVKGSDYIGDQDAIEYMCSEGPETVFELEHMGLPFSRFENGRIYQRPFGGQSKEFGEGGQAARTCAAADRTGHALLHTLYQANLKAGTNFLNEWFAVDLIEGKSGCIAGVSCFDMETGEVSIIKTQAVVLATGGAGQVYEQNTTSLICTGDGLGMVLRKNFALQDMEMWQFHPTGLYGNGSLMTEGCRGEGGYLINSEGERFMPTYAPKAKDLASRDVVSRCIVQEIMAGRGCGDKKDHVLLKIDHLGAEAIMKKLPEIREISMTFANVDPINEPIPVVPTCHYMMGGIPTNINGQVITQENGNDRVVDGLYSIGEAANVSVHGANRLGGNSLLDLVVFGRSAGKHINKQFKKGEVSDISNAEIEKSLSILQTLEDTKKGETVYALRSEMQSIMQNYFGVYRNEKLIKEGIKKLEDVNVRTKNLHMNDKSKQFNSEKVEILEYLNLIEIANATAYSALERKESRGAHAREDYPERDDTNWLCHSLFFKDGNKVSKRDVNLNPKEVEAFKPKARVY

SEQ ID NO: 98164 - protein, 396 aa, Unknown
  Bacterial polypetide isolated from the Sargasso Sea
MTTHFGDGIAQRTCAAADRTGHAMLHTLYQQSIKNKAEFFIEYFALDLIMEEGECTGVVALEMATGKIHAFRAQRVILATGGHGRAYFSCTAAHTCTGDGSGMALRAGLPLQDMEFVQFHPTGIYGVGCLITEGVRGEGGYLTNSDGERFMERYAPNAKDLASRDVVSRSMTMEILEGRGVGEKKDHIHLNLQHLGPEVIEERLPGIAETARVFADVDVTKDPIPVLPTVHYNMGGVPTNMHTEVITKNSAGEMEIVPGLMAVGEAASVSVHGANRLGSNSLLDLVVFGRESAIQCQKTIKPMDIQGKVNQNQLDKIIDKFDSIRFSKGSLPTAEIRAEMQSIMQKHASVFRTEELMQEGVEKLSSCIESFKDVSVSDRGLIWNTDLIETLELENL

SEQ ID NO: 98165 - protein, 217 aa, Unknown
  Bacterial polypetide isolated from the Sargasso Sea
MEIVPGLMAVGEAASVSVHGANRLGSNSLLDLVVFGRESAMQCQKTIKPMDIQGKVNQSELDKIIDKFDSIRFSKGSLPTSEIRAEMQSIMQKHASVFRTEELMKEGVEKLSSCIESFKDVSVSDRGLIWNTDLIETLELENLLGQAIITMQSGQVRKESRGAHARDDYPDRDDENWLIHSMGWMDENNNVTIGSSPVHLDTQTDEVESIPLKARVY

SEQ ID NO: 98166 - protein, 591 aa, Unknown
  Bacterial polypetide isolated from the Sargasso Sea
MSQYKIIEHEYDVVVLGAGGAGLRAAVGLSEAGLKTACISKVFPTRSHTSAAQGGISAALGNMGEDDWRWHMYDTVKGSDWLGDQDCIEYLCKEAPRAVLELEKYGVPFSRTEDGKIYQRPFGGMTKNYGNETVQRTCAAADRTGHAILHTMYGQALKHNTEFFIEYFALDLLMKNGECKGLIAWNLNDGTIHRFRSHITIIATGGYGKTYYSSTSAHTCTGDGNAMVLRAGLPLQDMEFVQFHPTGIYGHGTLISEGVRGEGGYLLNSKGERFMERYAPKAKDLASRDVVSRSIAVEINEGRGVGKEKDHVHLHLNHLDPKVIEERLPGISESSRLFADVDVTKEPIPVVPTVHYNMGGIPTNYKAEVLTLNGSDKIVPGLMAIGEAACVSVHGANRLGSNSLIDLVVFGRAAAKRASEIVKPGTPHEEIPKSETDKCLDRFEKLRNGNGSNRTADLRLAMQKTMQSKCAVFRTEKTLKEGVEEIRKPYEGMESISVKDKSLIFNTDLVETLEFDNLIRQAIVTIDSAYERKESRGAHAREDHPKRDDNNFMKHTLSWCQGSKTKIAYRDVHRSTLSNDVQYFPPQERVY

SEQ ID NO: 98167 - protein, 311 aa, Unknown
  Bacterial polypetide isolated from the Sargasso Sea
DLASRDVVSRSMTMEIIEGRGVGEKKDHIHLNLQHLGPDVIEERLPGIAETARVFADVDVTKDPIPVLPTVHYNMGGVPTNMHTEVITKNSSGDMQIVPGLMAVGEAASVSVHGANRLGSNSLLDLVVFGRESSIQCQKTIKPMETQNKVKQNELDKIIDKFDSIRFSKGSLPTAEIRAEMQSIMQKHASVFRTEELMQEGVKKLSSCIDSFKDVSVSDRGLIWNTDLIETLELENLLGQAIITIQSGQVRKESRGAHARDDYPDRDDENWLIHSLGWMDANNNVTIGSSPVHLDTQTDEVESIPLKARVY

SEQ ID NO: 98168 - protein, 591 aa, Unknown
  Bacterial polypetide isolated from the Sargasso Sea
MSYEIEYHDYDVVVVGAGGSGLRATVGAVENGYKTACISKVFPTRSHTVAAQGGISAALGNMGEDDWRWHMYDTVKGSDWLGDQDAIEYLCKNAPKAVLELENYGVPFSRTEDGKIYQRAFGGMTKNYGDGTAQRTCAAADRTGHAIIHTLYGQSLKHDVDYYIEYFVLDLLMVEGECRGVVAWCLEDGKLHVFNSKQTVLASGGYGRVYFSATSAHTCTGDGNAMVLRAGLPLQDMEFVQFHPTGIYGVGCLITEGARGEGGYLVNSEGERFMERYAPSAKDLASRDVVSRSITKEIIDGRGVGKDKDHMYLHLDHIDSNILEERLPGISESAKVFAGVDVTKDPIPIIPTVHYNMGGIPTNFHGEVMNLVKGDETVVPGLMAVGESACVSVHGANRLGSNSLIDLVVFGKAAADRIDDIVPKGEKNKEIPKSVIDDVIARFDATRNSDGDVTTAELRSQMQKVMQKHCAVFRDDEIMSEGKKLIEETWLDSENLKIKDKSLVWNTDLLESLEYKNLIAQAVVTMNSAHNRKESRGAHAREDFKERDDKNWMKHTLSWLDDEKCKLEYRSVHEYTLSNEVKYIEPKARVY

SEQ ID NO: 98169 - protein, 601 aa, Unknown
  Bacterial polypetide isolated from the Sargasso Sea
MRRFSGECKRMAAIKNSLPRRKFDVVIVGAGGSGMRASLQLARAGLSVCVLSKVFPTRSHTVAAQGGIGASLGNMSEDNWHYHFYDTIKGSDWLGDQDAIEFMCREAPNAVYELEHFGMPFDRNADGTIYQRPFGGHTANYGEKPVQRACAAADRTGHALLHTLYQQNVAAKTQFFVEWMALDLIRDADGDVLGVTALEMETGDVYILEGKTTLFATGGAGRIFAASTNAFINTGDGLGMAARSGIALQDMEFWQFHPTGVAGAGVLITEGVRGEGGILRNSNGERFMERYAPTLKDLAPRDFVSRSMDQEIKEGRGVGPNKDHVLLDLSHIGAETIMKRLPSIREIAMKFANVDCIKEPIPVVPTIHYQMGGIPTNINGQVVGTSRDHKEVVNGFYAVGECSCVSVHGANRLGTNSLLDLVVFGRAAGNHIVKHVKDIKEHKPLPADAGDFSLARLNKLDKSTSGEYSQTVAADIRSTMQAHAGVFRTSKLLAEGVERIREVADRVDNIYLKDKSKVFNTARIEALEVENLIEVARATMVSAEARKESRGAHAQNDFEHRDDENWLRHTLWFSEGDRLDYKPVQMQPLTVESVPPKARTF

SEQ ID NO: 98170 - protein, 294 aa, Unknown
  Bacterial polypetide isolated from the Sargasso Sea
MVLEILEGRGCGDKSDHIYLKLDHLGAEVLNSKLPGICELSRTFAHVDPIYEPIPVVPTCHYMMGGTPTNISGQAFTRINDEDHLIPGLFSAGEAACVSVHGANRLGGNSLLDLVVFGRATGKHIQSELKSGGGVDSATKSDIEKSLERLNKLNDSSNGHDPADVKKELQECMQNYFGVFRRGEFMKKGLDQLNELKEKVDNLHLKDKSDAFNTSRVEAIELQNLFEVAESTAISAYQRTESRGAHARDDYPDRDDENWLCHTIYDPISKKVSKRGVNFEPNKVEAFPPKVRTY

SEQ ID NO: 98171 - protein, 595 aa, Unknown
  Bacterial polypetide isolated from the Sargasso Sea
MSKDYDIIQHQYDVVVVGAGGSGLRATLGLVESGFKTACITKVFPTRSHTVAAQGGISAALGNNGEDDWRWHMYDTVKGSDWLGDQDAIAYMCKEAPNAVLELERYGIPFSRTDDGKIYQRAFGGMTTHFGDGIAQRTCAAADRTGHAMLHTLYQQSIKNKAEFFIEYFALDLIMEEGECTGVVALEMATGKIHAFRAQRVILATGGHGRAYFSCTAAHTCTGDGSGMALRAGLPLQDMEFVQFHPTGIYGVGCLITEGVRGEGGYLTNSDGERFMERYAPNAKDLASRDVVSRSMTMEILEGRGVGEKKDHIHLNLQHLGPEVIEERLPGIAETARVFADVDVTKDPIPVLPTVHYNMGGVPTNMHTEVITKNSAGEMEIVPGLMAVGEAASVSVHGANRLGSNSLLDLVVFGRESAIQCQKTIKPMDIQGKVNQSELDKIIDKFDSIRFSKGSLPTAEIRAEMQSIMQKHASVFRTEELMQEGVEKLSSCIESFKDVSVSDRGLIWNTDLIETLELENLLGQAIITMQSGQVRKESRGAHARDDYPDRDDENWLIHSMGWMDENNNVSIGSSPVHLDTQTDEVESIPLKARVY

SEQ ID NO: 98172 - protein, 595 aa, Unknown
  Bacterial polypetide isolated from the Sargasso Sea
MYCGGCKVTIPTREFDAVVIGAGGAGMRAALQIAQSGKSCALLSKVFPTRSHTVSAQGGITVALGNAHDDNWQWHMYDTVKGSDYIGDQEAIEYMCKTGPEAVYELENMGLPFSRFDNGTVYQRPFGGQSKNFGGEQAARTAAAADRTGHALLHTLYQQNVKNKTTVFSEWYALDLVKNQDGHIVGCTAIDMESGEVVYFKAKATVLATGGAGRIYQSTTNAHINTGDGVGMALRAGVGVQDMEFWQFHPTGIAGAGVLVTEGCRGEGGYLLNKDGERFMERYAPNAKDLAGRDVVARSIMIEIREGRGCDGPWGPHIKLKLDHLGKEVLESRLPGICELSRTFAHVDPVKEPIPIIPTCHYMMGGVPTNVNGQCLTQDKDGNDVPVVGLFAVGEIACVSVHGANRLGGNSLLDLVVFGRAAGMHLVNTLSEMEHGRAASDADIDAALSRFNRWENCRDGEDPVQIRKDLQRCMQNNFSVFREGDAMAEGLAELKLIRERLKNARLDDTSKEFNTQRIECLELDNLMETAYATAVAANFRTESRGAHSRFDFPERDDESWLCHSLYHPDTESMTRRAVNMSPKTREAFPPKVRTY

SEQ ID NO: 98173 - protein, 472 aa, Unknown
  Bacterial polypetide isolated from the Sargasso Sea
MFSDQDAIEHLCKEAPKAVIELEKYGVPFSRTKEGKIYQRAFGGMTKNYGNDSVQRTCAAADRTGHAILHTLYGQALKHNTEFFIEYFALDLLMKNGQCKGLIAWNLNDGTIHRFRSHITILATGGYGKVYYTATSAHTCTGDGNGMVLRAGLPLQDMEFVQFHPTGIYGVGTLISEGVRGEGGYLLNSKGERFMEKYAPKAKDLASRDVVSRSIAVEINEGRGVGKNKDYVNLHLDHLDPKVIEERLPGIAESAKTFCEVDVRKDPIPVVPTVHYNMGGIPTNYKAEVLTLNGKESTVPGLMAIGEAACVSVHGANRLGSNSLIDLVVFGKSAANRAAELVKPGTPHETIPESETDKCLDRFDKLRNSSGSTKTSELRLSMQKTMQSKCAVFRTEKTLKEGMDQIRKPFEGMGDISVSDKSLLFNTDLVETLEFDNLIRQAMTTIDSAYHRKESRGAHAREDFKIEMTRNI

SEQ ID NO: 98174 - protein, 347 aa, Unknown
  Bacterial polypetide isolated from the Sargasso Sea
MSSYKIIDHEYDVVVLGAGGSGLRAAVGLSEAGLKTACISKVFPTRSHTSAAQGGISAALGNMGEDDWRWHMYDTVKGSDWLGDQDSIEYLCKEAPRAVLELEKYGVPFSRTEDGKIYQRPFGGMTKNYGNETVQRTCAAADRTGHAILHTLYGQALKHNTEFFIEYFALDLLMKDGACKGLIAWNLNDGTIHRFRSHITIIATGGYGKVYYSATSAHTCTGDGNAMVLRAGLPLQDMEFVQFHPTGIYGHGTLISEGVRGEGGYLVNSKGERFMERYAPKAKDLASRDVVSRSIAIEINEGRGVGKEQDHVHLHLDHLDPKVIDERLPGISESSRLFANVDVTKEP

SEQ ID NO: 98175 - protein, 594 aa, Unknown
  Bacterial polypetide isolated from the Sargasso Sea
MSEYDFIDHDYDVIVVGAGGSGLRATFGLSQSGLKTGCITKVFPTRSHTVAAQGGISAALGNMGEDDWRWHMYDTVKGGDWLGDQDAIEYMCKEAPDAVIELEHYGVPFSRTEDGLIYQRPFGGMTTHYGEGIAQRTCAAADRTGHAMLHTLYQQSLKYSAEFFIEFFAIDLIMIDGECRGVVALEMATGKLHRFRSHKVILATGGYGRSYFSCTSAHTCTGDGNAMVTRAGLPLQDMEFVQFHPTGIYGAGMLITEGARGEGGYLTNSDGERFMERYAPNAKDLASRDVVSRSMTIEIQEGRGVGPDKDHIFLHLEHLGSDVIDERLPGIAESAKVFADVDVTESPIPVLPTVHYNMGGIPTNYNGEVVTLHNGDPEHVVPGLIAVGEAGCVSVHGANRLGSNSLLDLVVFGRAAAKFCINDLENKGSLEPFPKDAGENSISRLDKIRNAKGSVSTSELRLEMQKIMQNFAAVFRSGDSLKKGVSLLSESYEKFEDISVSDRSLIWNTDIIETMELENLLINATATIDSAEHRKESRGAHAREDFTERDDQNWMKHTLCWINGPGKVSFGYRPVHQETLTEEVEAIPPKARVY

SEQ ID NO: 98176 - protein, 591 aa, Unknown
  Bacterial polypetide isolated from the Sargasso Sea
MGNIEFSEKQFDVVIVGGGGSGLRASLEISKSGLNVAVISKVFPTRSHTVAAQGGITCAIASADPNDDWRWHMFDTVKGSDYIGDQDAIEYMCSEGPETVFELEHMGLPFSRFENGRIYQRPFGGQSKEFGEGGQAARTCAAADRTGHALLHTLYQANLKAGTNFLNEWFAADIIKNDSGLISGISCFDMETGEISIIKCNAIVLATGGAGQVYEQNTTSLICTGDGLGMALRKDLPLQDMEMWQFHPTGLYGNGSLMTEGCRGEGGYLINSEGKRFMPDYAPKAKDLASRDVVSRCIVQEILAGRGCGDKKDHVLLKIDHLGAEAITKKLPEIREISMTFANVDPIENPIPVVPTCHYMMGGIPTNINGQVITQDNDGNDSVVNGLYSIGEAANVSVHGANRLGGNSLLDLVVFGRAAGKHINEELSEQSSPAMSDTNIEESLETLIRIQETEKGESVFNLRSEMQNVMQNYFGVYRNEDLMKEGTSKLEEITERTKNIHLNDKSDQFNSERVEVLEYLNLLDIANATAYSALERKESRGAHAREDFPERDDENWLCHSLFFKDNNRVSKRAVNLKPKTVETFKPKPRVY

SEQ ID NO: 98177 - protein, 224 aa, Unknown
  Bacterial polypetide isolated from the Sargasso Sea
MSSYKIIDHEYDVVVLGAGGSGLRAAVGLSEVGLKTACISKVFPTRSHTSAAQGGISAALGNMGEDDWRWHMYDTVKGSDWLGDQDSIEYLCKEAPRAVLELEKYGVPFSRTEDGKIYQRPFGGMTKNYGNETVQRTCAAADRTGHAILHTLYGQALKHNTEFFIEYFALDLLMKDGACKGLIAWNLNDGTIHRFRSHITIIATGGYGKVYYSATSAHTCTGDG

SEQ ID NO: 98178 - protein, 208 aa, Unknown
  Bacterial polypetide isolated from the Sargasso Sea
MLAYSYDTHDYDVVVVGAGGAGLRATLGMAEQGLKTACVTKVFPTRSHTVAAQGGIAASLSNMGPDHWQWHMYDTVKGSDWLGDTDAMEYLAREAPKAVYELEHYGVPFSRTEEGKIYQRPFGGHTTEFGEGPPVQRTCAAADRTGHAILHTLYGQSLKNEAEFYIEYFALDLMFSDDGICTGVVCWKLDDGSIHVFNAKMVVLATGG

SEQ ID NO: 98179 - protein, 225 aa, Unknown
  Bacterial polypetide isolated from the Sargasso Sea
MSAYKIIDHEYDVVVLGAGGSGLRAAVGLSEAGLKTACISKVFPTRSHTSAAQGGISAALGNMGEDDWRWHMYDTVKGSDWLGDQDAIEYLCKEAPRAVVELERYGVPFSRTDDGKIYQRPFGGMTKNYGNGTAQRTCAAADRTGHAILHTLYGQALKHNTEFFIEYFALDLIMKNGECKGVIAWNLTDGTIHRFKSHITIIATGGYGKVYYSATSAHTCTGDGN

SEQ ID NO: 98180 - protein, 581 aa, Unknown
  Bacterial polypetide isolated from the Sargasso Sea
MSAYEITDHQYDVVVVGAGGAGLRATLGMAAGGLKTACITKVFPTRSHTVAAQGGIGAALNNMGEGDNWQFHMYDTVKGSDWLGDQDAIEYMCRNAIPSVIELENYGVPFSRTEEGKIYQRPFGGHTLDHGKSMARRACAAADRTGHAILHTLYQQCLKYQAHFHIEYFVLDLLMTDEAECAGVLALCMEDGSLHRFWGQQTVLATGGYGRVYFSCTSAHTCTGDGNAMALRAGLPLQDMEFVQFHPTGVYGAGVLITEGARGEGGYLTNSEGERFMERFAPTAKDLASRDVVSRAMTIEINEGRGVGPNKDHIMLHLEHIDSATLHTRLPGITETAKIFCGVDVTREPIPVLPTVHYNMGGIPTNYNGEVVAPTKDNENAVVPGLMAIGEAACVSVHGANRLGTNSLLDIVVFGRAAAHRATEIVTPDATLKRAPQHATDKAIARFDRMRNANGSKSAASIRLEMQHAMQRHAAVFRSSESLERGVGTMDQIAGKMGHIGVADKSLIWNTDLIEALELENLMGQALVSIRSAAQRQESRGAHAHEDWPERDDEKWMKHTVMWLDEQNKSKLDYRRVGMTT

SEQ ID NO: 98181 - protein, 404 aa, Unknown
  Bacterial polypetide isolated from the Sargasso Sea
YDTVKGSDWLGDQDAIEYLCKNAPKAVLELENYGVPFSRTEDGKIYQRAFGGMTKNYGDGTAQRTCAAADRTGHAIIHTLYGQSLKHDVDYYIEYFVLDLLMVQGECRGVVAWCLEDGKLHVFNSKQTVLASGGYGRVYFSATSAHTCTGDGNAMVLRAGLPLQDMEFVQFHPTGVYGVGCLITEGARGEGGYLVNSEGERFMERYAPSAKDLASRDVVSRSITKEIIDGRGVGKDKDHMYLHLDHIDSKILEERLPGISESAKVFAGVDVTKDPIPIIPTVHYNMGGIPTNFHGEVMNLVKGDETVVPGLMAVGESACVSVHGANRLGSNSLIDLVVFGKAAADRIDDIVPKGEKNKDIPKSVIDDVVARFDATRNSDGDVTTAELRSQMQKVMQKHCAVFRD

SEQ ID NO: 98182 - protein, 495 aa, Unknown
  Bacterial polypetide isolated from the Sargasso Sea
MDLVKHEHDVLVVGAGGSGLRASMGLSQSDLSVACISKVFPTRSHTVAAQGGISGALGNMGEDDWRWHMYDTVKGSDWLGDQDSIEYMCKNAVESIIELEHYGVPFSRTEEGKIYQRPFGGMTTEYGKGIAQRTCAAADATGHAILHTLYNQSLKNDVDFFVEYFVIDLIFEEGKCVGVLAWCLEDGKIHLFQSHMVILATGGYGRAYLSSTSAHTCTGDGNGMVLRANLPLQDMEFIQFHPTGIYGAGCLITEGARGEGGYLTNSEGDRFMPKYAPNAKDLASRDVVSRAIQMEVNAGRGVGAEKDHAHLHLEHLDVDTINNKLPGIAETARIFAGVDVTKDPIPVIPTVHYNMGGTPTNINTEVLDSDNNVVPGLMAIGEGACVSVHGANRLGSNSLLDLVVFGRSAANRTLEVLKNKPDSHIEVSESTIDKILSRFNSVRNASGDINPSEIRDSMQKTMQRYAPVYRDQATLDKGIEIMKNLFDDFSNIKLS

SEQ ID NO: 98183 - protein, 596 aa, Unknown
  Bacterial polypetide isolated from the Sargasso Sea
MPKYPITDHEYDVLVVGAGGAGLRATLGMTAAGFKTACITKVFPTRSHTVAAQGGVGAALNNMGEGDNWQYHMYDTVKGSDWLGDQDAIEYMCRNAIPSVIELEHYGVPFSRTEEGKIYQRPFGGHTLEHGKAMARRACAAADRTGHAILHTLYQQCLKYKAEFFIEYFALDLLMDDEGRCCGVLALCMEDGTLHRFRAQKTVLATGGYGRVYFSCTSAHTCTGDGNAMVLRAGLPLQDMEFVQFHPTGVYGAGVLITEGARGEGGYLTNSEGERFMERYAPTAKDLASRDVVSRAMTLEINEGRGVGNDNDHIMLHLEHIEPETLHKQLPGITETAKIFCGVDVTRAPIPVLPTVHYNMGGIPTNYHGEVLSPTAKDQHRTAPGLMAIGEAACVSVHGANRLGTNSLLDIVVFGRAAAHRAVDTMKPGESLPPLPESVTQKAIDRFDRIRHSKGDVSTAELRLDMQKAMQKHAAVFRNTEILDEGVKKLGDIAMDMNNVRIQDKSLIWNTELIETLELDNLMGQALVTIRSASERKESRGAHAHEDYPERDDKDWMKHTVMWLDEKNKSKLGYRDVTLSTLTNEVQSIAPVARVY

SEQ ID NO: 98184 - protein, 583 aa, Unknown
  Bacterial polypetide isolated from the Sargasso Sea
MEFDGIIVGGGGAGMRASLQLAESGLNTAVISKVFPTRSHTVSAQGGITCAIQSDDPDDDWRWHMFDTVKGSDYIGDQEAIEYMCSEGPKAVFELEHMGLPFSRTEEGRIYQRPFGGQSKDYGKGGQATRTCAAADRTGHSLLHTLYQANLKAGTNFLNEWFAVDMVLNADGAVVGVIAFEIETGEIYYIKSKATVLATGGAGRIYASTTNALINSGDGIGMALRAGMPVQDIEMWQFHPTGIHGAGTLVTEGCRGEGGYLLNKDGERFMERYAPNSKDLASRDVVARSMALEILEGRGCGPNEDHIFLRLDHLGPEVVHKRLPGITELSKTFAGVDPAVQPIPVVPTCHYMMGGIPTNINGQVITVKEGKDEVVEGLYAAGEVACVSVHGGNRLGGNSLLDLVVFGRAAGIYIEESMKQGVELKDASTDDIDKALERLNKLNSSTEGEQVGVLKERMQQNMQNNFGVFRTKDLMEKGIEDLSKVRGEVENMHLKDKSATFNTARIEALEMQNLFEVAEATAITANTRKESRGAHSRDDYPDRDDENWLKHSIFFSETKEVSKRDVNYRPKTVQAFQPTVRSY

SEQ ID NO: 98185 - protein, 330 aa, Unknown
  Bacterial polypetide isolated from the Sargasso Sea
EGGYLVNAKGERFMERYAPKAKDLASRDVVSRSIAVEINEGRGIGKEQDHVHLHIDHLDPKVIDERLPGISEASKLFANVDVTKEPIPVVPTVHYNMGGIPTNYKAEVLTLNGSEKTVPGLMAIGEAACVSVHGANRLGSNSLIDLVVFGRAAAKRAAELVKPGMKHDEIDKNETDRCLDRFDKLRNSEGSNPTSELRLSMQKTMQSKCAVFRTEKTLKEGVDEIRKPYDGMDSLSVKDKSLIFNTDLVETLEFDNLIRQAITTMDSAYHRKESRGAHAREDFPKRDDENYMQHTLSWCNGSKTKINYRPVHRSTLTNDVQYFPPQERVY

SEQ ID NO: 98186 - protein, 290 aa, Unknown
  Bacterial polypetide isolated from the Sargasso Sea
GRGVGKEKDHVHLHLSHLDKNVIENRLPGISEAARLFANVDVTKDPIPVVPTVHYNMGGIPTNYKAEVLTINGSEKTVPGLMAIGEAACVSVHGANRLGSNSLIDLVVFGRAAAKRAAELIKPGTPHEDISEIETQKCLDRFDKLRNAKGENSTAELRLSMQKTMQSKCAVFRTEKNLKEGVDEIRKTYDCMDSISVKDRSLVFNTDLVETLEFDNLIRQAVTTVDSAYHRKESRGAHAREDYPKRDDENFMQHTLAWCDGKNTKISYRAVHKSTLTNEVQYFPPQERVY

SEQ ID NO: 98187 - protein, 423 aa, Unknown
  Bacterial polypetide isolated from the Sargasso Sea
FLLLIFVKNSKNEITGVIAFSIESGEVCYLKAQATVLATGGAGRIYASTTNALINTGDGLGMTLRAGFPAQDMEMWQFHPTGIYGAGSLVTEGCRGEGGYLINSDGERFMERYAPNAKDLAGRDVVARSMVMEILEGRGCGPEKDHVFLKLDHLGADVLNSKLPGICELSKTFAHVDPIKEAIPVVPTCHYMMGGTPTNIHGQAFNRNDGNDFMVSGLFSVGEAACVSVHGANRLGGNSLLDLVVFGRAAGKHINEELKSGGGVDNASSEDIELAMSRLNSLNESESGYEVADVKKQLQTCMQNYFGVFRRGEFMEKGVKELEEIREKSENLYLKDKSIAFNTNRVEALELQNLLEVAEATAISAMMRDESRGAHARDDFPERDDENWLCHSLYDPVEKKLGKRDVNFVPKEVEAFPPKMRSY

SEQ ID NO: 98188 - protein, 388 aa, Unknown
  Bacterial polypetide isolated from the Sargasso Sea
MVVTEKVYYSATSAHTCTGDGNAMVLRAGLPLQDMEFVQFHPTGIYGVGCLITEGVRGEGGFLVNGKGERFMERYAPNAKDLASRDVVSRSMEMEINEGRGAGKNKDHINLHLDHIDKKVIEERLPGISEAAKTFANVDVSKEPIPVVPTVHYNMGGIPTNYKAEVLTLNGSEKIVPGLMAIGESACVSVHGANRLGSNSLIDLVVFGRAAAKRAAELIKPGSPHEEISNSETDKCLGRFDKIRNSNGSTKTSELRLKMQKTMQSKCAVFRTEKTLKEGVEQIRKPFEGMNDLSVKDKSLLFNTDLVETLEFDNLISQALTTMDSAYNRRESRGAHAREDFTKRDDKNFMKHTLAWQKGKKVEIKYRDVHSRTLTNDVQYFPPKERVY

SEQ ID NO: 98189 - protein, 352 aa, Unknown
  Bacterial polypetide isolated from the Sargasso Sea
FVQFHPTGIYGHGTLISEGVRGEGGYLVNSKGERFMERYAPKAKDLASRDVVSRSIAVEINEGRGIGKEQDHVHLHIDHLDPKVIDERLPGISEASKLFANVDVTKEPIPVVPTVHYNMGGIPTNYKAEVLTLNGSEKTVPGLMAIGEAACVSVHGANRLGSNSLIDLVVFGRAAAKRAAELVKPGMKHDEIDKNETDRCLDRFDKLRNSEGSNPTSELRLSMQKTMQSKCAVFRTEKTLKEGVDEIRKPYDGMDSLSVKDKSLIFNTDLVETLEFDNLIRQAITTMDSAYHRKESRGAHAREDFPKRDDENYMQHTLSWCNGSKTKINYRPVHRSTLTNDVQYFPPQERVY

SEQ ID NO: 98190 - protein, 236 aa, Unknown
  Bacterial polypetide isolated from the Sargasso Sea
MSLPVHEFDAVVIGAGGAGMRAALQISQSGKSCALLSKVFPTRSHTVSAQGGITVALGNSHEDNWEWHMYDTVKGSDYIGDQDAIEYMCKTGPEAIIEMENMGLPFSRFENGKIYQRPFGGQSKNFGGEQGARTAAAADRTGHALLHLLYQQNVKNKTKVFSEWYALDLVKNQDGDVVGCTAIDIESGEVVYFKSRAVVLATGGAGRIYASTTNAHINTGDGVGMALRAGVAVQDR

SEQ ID NO: 98191 - protein, 324 aa, Unknown
  Bacterial polypetide isolated from the Sargasso Sea
NSKVKGLWERYAPKAKDLASRDVVSRSIAIEIKEGRGIGKNKDYVNLHLDHIDPKIIEKRLPGIAESAKTFCDVDVTKDPIPVVPTVHYNMGGIPTNYKAEVLTSNGKDTTVPGLMAIGEAACVSVHGANRLGSNSLIDLVVFGKSAANRAAEIVKPGSNHEELPQSETDKCLDRFDKLRNSNGSTKTSELRLSMQKTMQSKCAVFRTEKTLKEGMSDIRKPFEGMKDISVSDKSLLFNTDLVETLEFDNLIRQAMTTIDSAYHRKESRGAHAREDFKKRDDESYMTHTLAWQKGNDVKVAYRPVHAKTLTNDVQYFPPKERVY

SEQ ID NO: 98192 - protein, 143 aa, Unknown
  Bacterial polypetide isolated from the Sargasso Sea
MSSYKIVDHEYDVVVLGAGGAGLRAAVGLSEAGLKTACISKVFPTRSHTSAAQGGISAALGNMGEDDWRWHMYDTVKGSDWLGDQDCIEYLCKEAPRAVLELERYGVPFSRTEDGKIYQRPFGGMTKNYGKKLCKELVLQQTE

SEQ ID NO: 98193 - protein, 225 aa, Unknown
  Bacterial polypetide isolated from the Sargasso Sea
MTNSYKIIDHHYDVVVVGAGGSGLRATLGCAEAGLKTACISKVFPTRSHTVAAQGGIGAALGNMGEDNWKWHMYDTVKGSDWLGDQDAIEYLCSKAPEAVIELEEYGMPFSRTDDGKIYQRPFGGHLTNNGEGAPAMRACAAADRTGHALLHTLYQQSLKNNVEFYIEYFVLDLITDDQGNCIGVVTWCLEDGINPSIFISSNNSSYWWIWKSLLLIYKCSYMYW

SEQ ID NO: 98194 - protein, 359 aa, Unknown
  Bacterial polypetide isolated from the Sargasso Sea
LPLQDMEFVQFHPTGIYGVGTLISEGVRGEGGYLLNSKGERFMEKYAPKAKDLASRDVVSRSIAVEINEGRGVGKNKDYVNLHLDHLDPKVIEERLPGIAESAKTFCEVDVRKDPIPVVPTVHYNMGGIPTNYKAEVLTLNGKESTVPGLMAIGEAACVSVHGANRLGSNSLIDLVVFGKSAANRAAELVKPGTPHEEIPQSETDKCLDRFDKLRNASGGTKTSELRLSMQRTMQSKCAVFRTEKTLKEGMDQIRKPFEGMSDISVSDKSLLFNTDLVETLEFDNLIRQAMTTIDSAYHRKESRGAHAREDFKTRDDKKYMTHTLAWQKGNEVKVAYRPVHAKTLTNDVQYFPPRERVY

SEQ ID NO: 98195 - protein, 383 aa, Unknown
  Bacterial polypetide isolated from the Sargasso Sea
FSCTSAHTCTGDGNGMILLAGLPLQDMEFTQFHPTGIYGAGCLITEGVRGEGGYLTNSDGERFMERYAPNAKDLASRDVVSRSMTMEIRDGRGVGNLNDHIHLHLEHLGPEVINERLPGIAESAEIFAGVDVTKEPIPVLPTVHYNMGGIPTNYHGEVVTLRNGDPDSIVPGLMSIGEAACVSVHGANRLGSNSLLDLVVFGRAAAKRLSETITPGAKHPPLQKNATEQIISRFDGLRYADGSESTASLRLEMQRVMQNHAAVFRTGDVLEEGKQKIREIYNKFNHVKVADRSMIWNTDLVETLELANLLGSSLTSMDAAANRTESRGAHAREDFPDRDDENWMKHTLTWVDEQGEVSFDYRPVHLYTLTDEVEVIPPKARVY

SEQ ID NO: 98196 - protein, 591 aa, Unknown
  Bacterial polypetide isolated from the Sargasso Sea
MNSYKIIEHEYDVVVLGAGGAGLRAAVGLSEAGLKTACISKVFPTRSHTSAAQGGISAALGNMGEDDWRWHMYDTVKGSDWLGDQDCIEYLCKEAPRAVLELERYGVPFSRTKDGKIYQRPFGGMTKNYGNETVQRTCAAADRTGHAILHTMYGQALKHNTEFFIEYFALDLLMQNGECKGLIAWNLNDGTIHRFRAHITIIATGGYGKTYYSSTSAHTCTGDGNAMVLRAGLPLQDMEFVQFHPTGIYGHGTLISEGVRGEGGYLLNSKGERFMERYAPKAKDLASRDVVSRSIALEINEGRGVGKEKDHVHLHLNHLDPKVIEERLPGISESSRLFADVDVTKEPIPVVPTVHYNMGGIPTNYKAEVMTVNGSEKIVPGLMAIGEAACVSVHGANRLGSNSLIDLVVFGRAAAKRASELVKPGTPHEKISNSETDKCLERFEKLRNSNGDNRTADLRLEMQKTMQSKCAVFRTEKTLKEGVEEIRKPYEGMESISVKDKSLIFNTDLVETLEFDNLIRQAIVTLDSAYERKESRGAHAREDHPKRDDNNFMKHTLSWCEGSKTKISYRDVHRSTLSNDVQYFPPQERVY

SEQ ID NO: 98197 - protein, 486 aa, Unknown
  Bacterial polypetide isolated from the Sargasso Sea
WKWHMYDTVKGSDWLGDQDAIEYLCSNAPEAVIELEEYGMPFSRTDDGRIYQRPFGGHLTNNGKGAPAMRACAAADRTGHALLHTLYQQSLKHKVEFYIEYFVLDLIMDKDGNCKGVVAWCLEDGTIHRFLSHQTILATGGYGRAYFSSTSAHICTGDGSAMALRQDLPLSDMEFIQFHPTGVYGAGVLITEGARGEGGYLTNSDGERFMERYAPNAKDLASRDVVSRAMTIEINEKRGCGENADHVLLHLEHIDSSTLHKRLPGISETAKIFAGVDLTKEPIPVLPTVHYNMGGIPTNHRTEVLRPTADNPDNVCEGLLAVGEAACVSVHGANRLGTNSLIDLVVFGKASSITAKEKIKIKSKDIEINKSSLDPILERFDKIRHNKGDSSTGEVRTAMQKVMQEKCAVFRNDDLISKGIEEFNEIESSMDNIDVKDKSMIFNTDLTESLELHNLMAQSKVTLHSALNRTESRGAHAREDFKERDD

SEQ ID NO: 98198 - protein, 323 aa, Unknown
  Bacterial polypetide isolated from the Sargasso Sea
MSSYKIIDHEYDVVVLGAGGSGLRAAVGLSEAGLKTACVSKVFPTRSHTSAAQGGISAALGNMGEDDWRWHMYDTVKGADWLGDQDCIEYLCKEAPRAVLELEKYGVPFSRTEDGKIYQRPFGGMTKNYGNGTVQRTCAAADRTGHAILHTLYGQALKHNTEFFIEYFALDLLMKNGECKGLIAWNLNDGTIHRFRSHITIIATGGYGKVYYSATSAHTCTGDGNAMVLRAGLPLQDMEFVQFHPTGIYGHGTLISEGVRGEGGYLVNSKGERFMERYAPKAKDLASRDVVSRSIAVEINEGRGVGKEKDHVHIHLDHLDQNV

SEQ ID NO: 98199 - protein, 583 aa, Unknown
  Bacterial polypetide isolated from the Sargasso Sea
MEFDGIIVGGGGAGMRASLQLAESGLNTAVISKVFPTRSHTVSAQGGITCAIQSDDPDDDWRWHMFDTVKGSDYIGDQEAIEYMCSEGPKAVFELEHMGLPFSRTEEGRIYQRPFGGQSKDYGKGGQATRTCAAADRTGHSLLHTLFQANLKAGTNFLNEWFAVDLVLNADKAVVGVIAFKIETGEIYYIKSKATVLATGGAGRIYSSTTNALINSGDGIGMALRAGMPVQDIEMWQFHPTGIHGAGTLVTEGCRGEGGYLLNKDGERFMERYAPNAKDLASRDVVSRSMALEILEGRGCGPNADHIFLRLDHLGPEVVHKRLPGITELSKTFAGVDPAVQPIPVVPTCHYMMGGIPTNINGQVISVEHGEDKIVDGLYAAGEVACVSVHGGNRLGGNSLLDLVVFGRAAGLYIEESMKQGIEVKDASNDDIEKALERLNRLNASTEGDQVSVLKEKMQQNMQNNFGVFRRGDLMEKGIEELAKTREEVNDIFLQDKSATFNTARIEALEMQNLFEVAEATAITANERKESRGAHARDDFTERDDENWLKHSIYYADTKEVSKRDVNYRPKTVQAFQPMVRSY

SEQ ID NO: 98200 - protein, 601 aa, Unknown
  Bacterial polypetide isolated from the Sargasso Sea
MLAYSYETHEYDVVVVGAGGAGLRATLGMAEQGLKTACVTKVFPTRSHTVAAQGGIAASLSNMGPDHWQWHMYDTVKGSDWLGDTDAMEYLAREAPKAVYELEHYGVPFSRTEEGKIYQRPFGGHTTEFGEGPPVQRTCAAADRTGHAILHTLYGQSLKNEAEFYIEYFALDLMFSDDGVCTGVVCWKLDDGSIHVFNAKMVVLATGGYGRAYFSATSAHTCTGDGGGMVARAGLPLQDMEFVQFHPTGIYGSGCLITEGARGEGGYLTNSEGERFMERYAPHYKDLAPRDYVSRCMTMEIREGRGVGKDGDHIHLNLSHLPPDALAERLPGISESAKIFAGVDVTKEPIPVLPTVHYNMGGIPTNYWGEVINPSAKDQNAIVPGLMAVGEAGCASVHGANRLGSNSLIDLVVFGRAAGLRAGKVIDRKSKIPSTNVFAVESALGRFDKLRYANGSIPTSDLRLEMQKTMQKDAAVFRTSETMSQGLKDMVSLAEKVDDLNVTDRSLVWNSDLMETLELTNLMPNALATIAGAEARKESRGAHAHEDYTTRDDEKWRVHTLAQMDGPNIKLSYRDVIRDPLTNETQGGIEIKKIAPKERTF

SEQ ID NO: 98201 - protein, 292 aa, Unknown
  Bacterial polypetide isolated from the Sargasso Sea
NEGRGVGKNKDHINLHLDHLDKKVIDERLPGISEAAKTFANVDVNKEPIPVVPTVHYNMGGIPTNYKAEVLTLNGSEKTVPGLMAIGEAACVSVHGANRLGSNSLIDLVVFGRAAAKRAAELVKPGTPHEKISKTETDKCLDRFDKIRNSNGSTKTSDLRIKMQKTMQSKCAVFRTENTLKEGVEQIRKPFEGMKDLSVKDKSLLFNTDLVETLEFDNLIRQALTTMDSAYNRKESRGAHAREDFSKRDDKNFMKHTLAWLNDDKVEIKYRDVHSTTLTNDVQYFPPKERVY

SEQ ID NO: 98202 - protein, 234 aa, Unknown
  Bacterial polypetide isolated from the Sargasso Sea
MGGIPTNYRAEVLTLNGSEKTVPGLMAIGEAACVSVHGANRLGSNSLIDLVVFGKAAAKRAAELVKPGMSHESISENETDKCLQRFDKIRNSKGKTKTSELRLSMQKTMQSKCAVFRTEKTLKEGIEDIRKSLDGMNDISVKDKSLLFNTDLVESLEFDNLIRQAMTTMDSAFHRKESRGAHAREDFSKRDDKNFMKHTLAWQNGKEVKVRYRDVHARTLTNEVQYFPPKERVY

SEQ ID NO: 98203 - protein, 400 aa, Unknown
  Bacterial polypetide isolated from the Sargasso Sea
SGEVAYLKAQATVLLQGGAGRINASTTNALINTGDGLAMALRAGFPAQDMEMWQFHPTGIYGAGSLVTEGCRGEGGYLINKDGERFMERYAPNVKDLAGRDVVARSMVLEILEGRGCGENNDHIFLKLDHLGSEVLNSKLPGICELSRTFAHVDPVYEPIPVVPTCHYMMGGTPTNVSGQAFTRTNNEDHLINGLFSAGEAACVSVHGANRLGGNSLLDLVVFGRATGMHIQSELKSGGGVSSASKSDIDQSLERLNKLNESTKGFDTAEVKKELQECMQNYFGVFRRGDFMKKGLDQLSTLKEKVYNLHLTDKSDAFNTSRVEAIELQNLFEVAESTAISAYERTESRGAHARDDFPDRDDENWLCHTIYDPQNKIVSKREVNFKPEKVEAFPPIVRTY

SEQ ID NO: 98204 - protein, 591 aa, Unknown
  Bacterial polypetide isolated from the Sargasso Sea
MSSYKIIEHEYDVVVLGAGGAGLRAAVGLSEAGLKTACISKVFPTRSHTSAAQGGISAALGNMGEDDWRWHMYDTVKGSDWLGDQDSIEYLCKEAPRAVLELERYGVPFSRTEDGKIYQRPFGGMTKNYGNETVQRTCAAADRTGHAILHTMYGQALKHNTEFFIEYFALDLLMKDGECKGLIAWNLNDGTIHRFRSHITIIATGGYGKTYYSSTSAHTCTGDGNAMVLRAGLPLQDMEFVQFHPTGIYGHGTLISEGVRGEGGYLLNSKGERFMERYAPKAKDLASRDVVSRSIAVEINEGRGVGKEKDHVHLHLDHLDPEVIEKRLPGISESSRLFADVDVTKEPIPVVPTVHYNMGGIPTNYKAEVLTVNGSEKIVPGLMAIGEAACVSVHGANRLGSNSLIDLVVFGRAAAKRAAELVKPGTPHEKISDSETEKCLDRFEKLRKGNGTNRTADLRLAMQKTMQSKCAVFRTEKTLKEGVEEIRKPFEGMESISVKDKSLIFNTDLVETLEFDNLIRQAIVTLDSAYERKESRGAHAREDHPKRDDNNFMKHTLSWCKGSETKISYRDVHRSTLTNDVQYFPPQERVY

SEQ ID NO: 98205 - protein, 436 aa, Unknown
  Bacterial polypetide isolated from the Sargasso Sea
AAADRTGHAMLHTLYQQSISNDAEFFIEYFAIDLIMNEKKECCGVLTINLHDGKFYLFSSKMVILATGGYGRAYFSCTSAHTCTGDGGGMILRAGLDLQDMEFTQFHPTGIYGVGVLITEGARGEGGFLTNSKGERFMERYAPSAKDLASRDVVSRSMTTEIMEGRGCGQKKDHIHLNLNHLDHKVLEERLPGITESAKIFAGVDVRKDPIPVQPTVHYNMGGIPTNVHGEVLYCSKNGSEKIVPGLMSVGEAACVSVHGANRLGSNSLLDLVVFGKSAANRCKEILNTKSKNKDIKETYYGNAIENFEKIKNSKGNKSVSKIRGKMQEIMQNYCPVYRSGELMKEGKKKLNSLIDEFKNIKISDKSTIWNTEIIEAYELQNLLLQSMASIESAFNRKESRGAHARMDYQKRDDKKWMKHTMISVNTEGNSKINYR

SEQ ID NO: 98206 - protein, 349 aa, Unknown
  Bacterial polypetide isolated from the Sargasso Sea
FHPTRIYGVGTLISEGVRGEGGYLLNSKGERFMEKYAPKAKDLASRDVVSRSIAVEINEGRGVGKNKDYVNLHLDHLDPKVIEERLPGIAESAKTFCEVDVRKDPIPVVPTVHYNMGGIPTNYKAEVLTLNGKESTVPGLMAIGEAACVSVHGANRLGSNSLIDLVVFGKSAANRAAELVKPGTPHEEISQSETDKCLDRFDKIRNASGGTKTSELRLSMQRTMQSKCAVFRTEKTLKEGMDQIRKPFEGMSDISVSDKSLLFNTDLVETLEFDNLIRQAMTTIDSAYHRKESRGAHAREDYKTRDDKKYMTHTLAWQKGNEVKVAYRPVHAKTLTNDVQYFPPRERVY

SEQ ID NO: 98207 - protein, 592 aa, Unknown
  Bacterial polypetide isolated from the Sargasso Sea
MAAIKTSLPRRKFDVVIVGAGGSGLRAALQLSRAGLSVGVLSKVFPTRSHTVAAQGGIGASLGNMSEDNWHYHFYDTIKGSDWLGDQDAIEFMCREAPNVVYELEHFGMPFDRNADGTIYQRPFGGHTANYGEKPVQRACAAADRTGHALLHTLYQQNVEAKTQFFVEWMALDLIRDAEGDVLGVTALEMETGDVYIMEGKTTLFATGGAGRIFAASTNAFINTGDGLGMAARSGIALQDMEFWQFHPTGVAGAGVLITEGVRGEGGILRNANGERFMERYAPTLKDLAPRDFVSRSMDQEIKEGRGVGPNKDHVLLDLSHIGAETIMKRLPSIREIALKFANVDAIKEPIPVVPTIHYQMGGIPTNIHGQVVGTTRGGHKDPVNGFYAVGECSCVSVHGANRLGTNSLLDLVVFGRAAGNHIVEHVKNQKEHKPLPADAGEFSLARLAKLDKSTSGEYTQDVANDIRSTMQKHAGVFRTSELLKEGVDQMAGLKARVENIHLKDKSKVFNTARVEALELENLIEVARATMVSAEARKESRGAHAHSDYEHRDDENWLRHTLWYSEGDRLDYKPVQMKPLTVESVPPKPRTF

SEQ ID NO: 98208 - protein, 224 aa, Unknown
  Bacterial polypetide isolated from the Sargasso Sea
MSSYKIIDHEYDVVVLGAGGSGLRAAVGLSEVGLKTACISKVFPTRSHTSAAQGGISAALGNMGEDDWRWHMYDTVKGSDWLGDQDCIEYLCKEAPRAVLELEKYGVPFSRTEDGKIYQRPFGGMTKNYGNGTVQRTCAAADRTGHAILHTLYGQALKHNTEFFIEYFALDLLMKNGECKGLIAWNLNDGTIHRFRSHITIIATGGYGKVYYSATSAHTCTGDG

SEQ ID NO: 98209 - protein, 309 aa, Unknown
  Bacterial polypetide isolated from the Sargasso Sea
PNVKDLAGRDVVARSMVLEILEGRGCGENKDHIYLKLDHLGADVLNSKLPGICELSKTFAHVDPIYEPIPVVPTCHYMMGGTPTNVSGQAFTRINDRDELVPGLFSAGEAACVSVHGANRLGGNSLLDLVVFGRATGQHIQNELKSGGGVDAATKSDIDNSLERLNKLNESEEGFDTAEVKKELQDCMQNYFGVFRRGEFMEKGLEKLEELRDKVSNLHLKDKSDAFNTSRVEAIELQNLFEVAEATAISAYKRTESRGAHARDDYPDRDDENWLCHTIYDPVSKEVTKREVNFNPKEVEAFPPKIRSY

SEQ ID NO: 98210 - protein, 352 aa, Unknown
  Bacterial polypetide isolated from the Sargasso Sea
SAHTCTGDGNGMVLRAGIPLQDMEFTQFHPTGIYGSGCLITEGVRGEGGYLTNSEGERFMERYAPSAKDLASRDVVSRAMTMEIIEGRGIGKDKDHIELHLEHLGSDVINERLPGIAESAEIFAGVDVTKQPIPVIPTVHYNMGGIQTNYQGRVVTLKDNDPDSIIEGLMAIGEAGCVSVHGANRLGSNSLLDLIVFGRAAANYCAENIKSGSPHKPLPNACEQGLSRLDKLRHNKGTIKTAEIRDNMQKTLQRDAAVFRTGETLERGINTMSEIWDSFSDVVVADKGMVWNSDLVETLELDNLLGCAMVSIHSAYNREESRGAHAREDFPERDDENWMKHTLSTLNDDGSV

SEQ ID NO: 98211 - protein, 256 aa, Unknown
  Bacterial polypetide isolated from the Sargasso Sea
MKNAYNIVDHYYDVVVIGAGGSGLRATLGCAEAGLRTACISKVFPTRSHTVAAQGGIGAALGNMGEDNWKWHMYDTVKGSDWLGDQDAIEYLTSKAPEAVVELEEYGMPFSRTDDGKIYQRPFGGHLTNNGEGAPAMRACAAADRTGHALLHTLYQQSLKNNVEFFIEYFVLDLINDNDGNCIGAVAWCLEDGTIHRFLSHQTILATGGYGRAYFSSTSAHICTGDGSAMALDKTYLYQIWNLFNFIQLVFTEQAF

SEQ ID NO: 98212 - protein, 206 aa, Unknown
  Bacterial polypetide isolated from the Sargasso Sea
GEAACVSVHGANRLGSNSLIDLVVFGRAAAKRAAELVKPGTPHEEISETETQKCLDRFDKLRNAQGDNSTAELRLAMQKTMQSKCAVFRTEKNLKQGVDEIGKTFDGMDSISVNDKSLVFNTDLVETLEFDNLIRQAVATVDSAYHRKESRGAHAREDYPKRDDEKFMQHTLAWCDGKNTKISYRPVHQSTLTNEVQYFPPQERVY

SEQ ID NO: 98213 - protein, 285 aa, Unknown
  Bacterial polypetide isolated from the Sargasso Sea
KDKDHINLHLDHLDKEVLEERLPGITEAAKTFANVDVNRQPIPVVPTVHYNMGGIPTNYKAEVLTLNGSEKTVPGLMAIGEAACVSVHGANRLGSNSLIDLVVFGRAAAKRAAELVKPGMPHEEVSSAETDKCLGRFDKIRNSKGSSKTAELRLNMQKTMQSKCAVFRTEKTLKEGVDQIRKPYEGMEDISVKDKSLLFNTELVETLEFDNLIRQALTTMDSAYSRKESRGAHAREDYSERDDKNFMKHTLAWQKDKKVEIKYRDVHSRTLTNDVQYFPPKERVY

SEQ ID NO: 98214 - protein, 416 aa, Unknown
  Bacterial polypetide isolated from the Sargasso Sea
RATLGMTAEGLKTACITKVFPTRSHTVAAQGGVGAALDNMGEGDNWQFHMYDTVKGSDWLGDQDAIEYMCRNAIPAVIELEHYGVPFSRTEEGKIYQRPFGGHTLDNGKRMAKRACAAADRTGHAILHTLYQQCLANNAEFFIEYFALDLIMDEEGACRGVMAMDLATGTIHRFRAHQTVLATGGYGRAYFSCTSAHTCTGDGNGMVLRAGLPLQDMEFVQFHPTGVYGAGCLITEGARGEGGYLTNSEGERFMERYAPTAKDLASRDVVSRSMTIEINEGRGVGPKNDHINLHLEHIDPDVLALRLPGISETAKVFAGVDVTREPIPIMPTVHYNMGGIPTNYHGEVLAPSSDDPDRVCPGLMAIGEAACVSVHGANRLGTNSLLDIVVFGRAAAYRAVETISPGAAHKPLQEAL

SEQ ID NO: 98215 - protein, 409 aa, Unknown
  Bacterial polypetide isolated from the Sargasso Sea
IAICIETGEVVYVSSKATVLATGGAGRIYASTTNALMNTGDGTGMALRAGVPMQDMEMWQFHPTGIAGAGTLVTEGCRGEGGYLINRDGERFMERYAPTAKDLAGRDVVARSMILEILDGKGCDPENPANDHVLLKLDHLGEEVLNSKLPGILELSRTFAHVDPVKEPIPVIPTCHYMMGGIATQVSGQALTQVNGTDQEVQGLYAAGEAACVSVHGANRLGGNSLLDLVVFGRAAGIHIEEVMRQGVSYRDASDSDLESSLARLSRWDDSSSGESISDLKKELQTTMQNSFGVFRTEKNMQEGIVKLQDLRQRIDSAHLPDKSDSFNTARLEALELDNLLEVAEATAVAAEERKESRGAHARDDYGERDDDNWLCHSMYFPEEKRVGKRDVNFTPKTVETFEPKERVY

SEQ ID NO: 98216 - protein, 295 aa, Unknown
  Bacterial polypetide isolated from the Sargasso Sea
SMALEILEGRGCGPNADHIFLRLDHLGPEVVHKRLPGITELSKTFAGVDPAMQPIPVVPTCHYMMGGIPTNINGQVITVQDGQDKVVEGLYAAGEVACVSVHGGNRLGGNSLLDLVVFGRAAGIYIEESMKQGVELKNASYEDIDKALERLNKLNASSEGEQVTALKERMQQNMQSNFGVFRTKDLMEKGIEDLSKVRDEVENMHLKDKSATFNTARIEALEMQNLFEVAEATAVTANSRKESRGAHSRDDYPDRDDENWLKHSIYFSETKEVSKRDVNYRPKTVQAFQPTVRSY

SEQ ID NO: 98217 - protein, 220 aa, Unknown
  Bacterial polypetide isolated from the Sargasso Sea
LNGSEKVVPGLMAIGEAACVSVHGANRLGSNSLIDLVVFGRAAAKRASELIKTGMKHEEIDKNETDKCLDRFDKLRNSNGTSPTSELRLSMQKTMQSKCAVFRNEKTLKEGVEEIRKPFEGMESLSVKDKSLIFNTDLVETLEFDNLIRQAITTIDSAYNRKESRGAHAREDFPNRDDKKFMQHTLTWLNGMNTKIDYRPVHTSTLTNEVQYFPPQERIY

SEQ ID NO: 98218 - protein, 147 aa, Unknown
  Bacterial polypetide isolated from the Sargasso Sea
MSSYKIIEHEYDVVVLGAGGAGLRAAVGLSEAGLKTACISKVFPTRSHTSAAQGGISAALGNMGEDDWRWHMYDTVKGSDWLGDQDSIEYLCKEAPRAVLELERYGVPFSRTEDGKIYQRPFGGMTKNYGNETVQRTCAAADRTGHA

SEQ ID NO: 98219 - protein, 593 aa, Unknown
  Bacterial polypetide isolated from the Sargasso Sea
MKLGNIEFSEQQFDVVIIGGGGSGLRASLEISKSGLNVGVVSKVFPTRSHTVAAQGGITCAIASADPNDDWRWHMFDTVKGSDYIGDQDAIEYMCSEGPETVFELEHMGLPFSRFENGRIYQRPFGGQSKEYGEGGQAARTCAAADRTGHALLHTLYQANLKAGTNFLNEWFAVDIVKNDSGLVSGVSCFDMETGEISIIKCNAIVLATGGAGQVYEQNTTSLICTGDGLGMVLRKDLPLQDMEMWQFHPTGLYGNGSLMTEGCRGEGGYLINSEGKRFMPDYAPKAKDLASRDVVSRCIVQEILAGRGCGAKKDHVLLKIDHLGSETITKKLPEIREISMTFANVDPIENPIPVVPTCHYMMGGIPTNINGQVITQDNNGNDSVVNGLYSIGEAANVSVHGANRLGGNSLLDLVVFGRAAGKHINEELSEQSSPDISNTNIEESLETLIRIQETEKGESVFSLRSEMQNVMQNYFGVYRNEDLMREGINKLEEITERTKNIHLNDKSHQFNSERVEVLEYLNLLDIANATAYSALERKESRGAHAREDFPDRDDENWLCHSLFFKNKNIVSKRAVNLKPKTVETFKPKPRVY

SEQ ID NO: 98220 - protein, 242 aa, Unknown
  Bacterial polypetide isolated from the Sargasso Sea
MKSYKIIDHEYDVVVLGAGGSGLRAAVGLSEAGLKTACVSKVFPTRSHTSAAQGGISAALGNMGEDDWRWHMYDTVKGADWLGDQDCIEYLCKEAPRAVLELEKYGVPFSRTEDGKIYQRPFGGMTKNYGNEPVQRTCAAADRTGHAILHTLYGQALKHKTEFFIEYFALDLLMKDGQCKGLIAWNLNDGTIHRFRSHITIIATGGYGKVYYSATSAHTCTGDGNAMVLRAGLPLQDMEFVQ

SEQ ID NO: 98221 - protein, 329 aa, Unknown
  Bacterial polypetide isolated from the Sargasso Sea
GGYLVNSKGERFMEKYAPKAKDLASRDVVSRSIAVEINEGRGVGKDKDHVHLHLNHLDQKVIEDRLPGISEASRLFANVDVTKEPIPVVPTVHYNMGGIPTNYKAEVITMNGSEKTVPGLMAIGEAACVSVHGANRLGSNSLIDLVVFGRAAAKRAAELVKPGMKHEDIPQSETDKCLDRFDKLRSSKGSNPTAELRLAMQKTMQSKCAVFRTEKTLTEGVNEIRKPFEGMENISVKDSSLIFNTDLVETLEFDNLIRQAITTMDSAYSRKESRGAHAREDFPKRDDKSFMKHTLSWCDGTKTKIDYRPVNISTLTSDVQYFPPRERVY

SEQ ID NO: 98222 - protein, 588 aa, Unknown
  Bacterial polypetide isolated from the Sargasso Sea
MSKDYEIIQHQYDVVVVGAGGSGLRSTLGLVESGFRTACITKVFPTRSHTVAAQGGISAALGNNGEDDWRWHMYDTVKGSDWLGDQDAIAYMCKEAPNAVLELEQYGIPFSRTDDGKIYQRAFGGMTTHFGDGIAQRTCAAADRTGHAMLHTLYQQSIKNQAEFFIEFFALDLIMEDGVCTGVVALEMATGKIHAFRSQRVILATGGHGRAYFSCTAAHTCTGDGSGMALRAGLPLQDMEFVQFHPTGIYGVGCLITEGVRGEGGYLTNSDGERFMERYAPNAKDLASRDVVSRSMTMEIIEGRGVGEKKDHIHLNLQHLGPDVIEERLPGIAETARVFADVDVTRDPIPVLPTVHYNMGGVPTNMHTEVITKNSSGDMEIVPGLMAVGEAASVSVHGANRLGSNSLLDLVVFGRESSIQCQKTIKPMETQNKVNQNELDKIIDKFDSIRFSKGSLPTAEIRAEMQSIMQKHASVFRTEELMKEGVEKLSSCIDSFKDVSVSDRGLVWNTDLIETLELENLLGQGIITIQSGQVRKESRGAHARDDYPDRDDENWLIHSLGWMDANNNVTIGSSPVHLDTQTDEVESI

SEQ ID NO: 98223 - protein, 400 aa, Unknown
  Bacterial polypetide isolated from the Sargasso Sea
MSEYNIIDHEYDVVVLGAGGSGLRAAVGLSEAGLKTACISKVFPTRSHTSAAQGGISAALGNMGEDDWRWHMYDTVKGADWLGDQDSIEYLCKEAPKAVIELEKYGVPFSRTEEGKIYQRPFGGMTKNYGNGIVQRTCAAADRTGHAILHTLYGQALKHKTEFFIEYFALDLLMKNGECKGLIAWNLNDGTIHRFRSHITIIATGGYGKVYYSATSAHTCTGDGNAMVLRAGLPLQDMEFVQFHPTGIYGHGTLISEGVRGEGGYLVNSKGERFMERYAPNAKDLASRDVVSRSMSIEINEGRGVGKDKDHVHLHLSHLDKNVIEDRLPGITEAARLFANVDVTKEPIPVVPTVHYNMGGIPTNYKAEVITVNGSEKVVPGLMAIGEAACVSVHGANRLG

SEQ ID NO: 98224 - protein, 341 aa, Unknown
  Bacterial polypetide isolated from the Sargasso Sea
CLITEGVRGEGGYLTNSEGERFMERYAPNAKDLASRDVVSRSMTIEINEGRGVGKDKDHIFLHLEHLGKETINERLPGIAESAKIFAGVDVAKSPIPVLPTVHYNMGGIPTNYHGEVVSPKDLNDQSVVPGLMAIGEAACVSVHGANRLGSNSLLDLIVFGRAAAKRAANIIKKDSKAKEPKKQTVDKIINKLDNLLHSEGENNPFEIRAELQKAMQTYAAVFRTGDTLNTGFDKVKDLSDSFQDIKINDKSLLWNTELVETLELENLLSQGLITVASALNRTESRGAHARDDFPERDDAEWLKHSLVKLDGNDISVSYRKVNLETMTDEVESVPPKRRVY

SEQ ID NO: 98225 - protein, 446 aa, Unknown
  Bacterial polypetide isolated from the Sargasso Sea
TGHALLHTLYQNNVKEGTNFLNEWFAVDLVKNSKNEITGVIAFSIESGEVCYLKAQATVLATGGAGRIYASTTNALINTGDGLGMTLRAGFPAQDMEMWQFHPTGIHGAGSLVTEGCRGEGGYLINADGERFMERYAPNAKDLAGRDVVARSMVMEILEGRGCGPEKDHVYLKLDHLGADVLNSKLPGICELSKTFAHVDPIKEPIPVVPTCHYMMGGTPTNIHGQAFSRNDGNDFMVSGLFSVGEAACVSVHGANRLGGNSLLDLVVFGRAAGKHINEELKSGGGVDNASNEDIELAMSRLNTLNESESGYEVADVKKQLQTCMQNYFGVFRRGEFMEKGVKELEEIREKSENLYLKDKSIAFNTNRVEALELQNLLEVAEATAISAMMRDESRGAHARDDFPERDDENWLCHSLYDPVEKKLDKRDVNFVPKEVEAFPPKMRSY

SEQ ID NO: 98226 - protein, 353 aa, Unknown
  Bacterial polypetide isolated from the Sargasso Sea
EFVQFHPTGIYGHGTLITEGARGEGGYLTNSKGERFMERYAPNAKDLASRDVVSRSMSIEINEGRGVGKDQDHVHLNLSHLDKEIIESRLPGITEAARLFANVNVTKEPIPVVPTVHYNMGGIPTNYKAEVLTVNGSEKTVPGLMAIGEAACVSVHGANRLGSNSLIDLVVFGRSAAKRAAELITPGTPHEEIPKSETQKCLDRFDKLRNAKGENSTADLRLSMQKTMQSKCAVFRTEKNLKEGVDEIRKTYDGKDSISVKDRSLVFNTDLVETLEFDNLIRQAVTTVDSAYQRKESRGAHAREDYPKRDDQKFMQHTLAWFDGKNTKISYRPVHQSTLTTDVQYFPPQERVY

SEQ ID NO: 98227 - protein, 274 aa, Unknown
  Bacterial polypetide isolated from the Sargasso Sea
MSSHKIIEHEYDVVVLGAGGAGLRAAVGLSEAGLKTACISKVFPTRSHTSAAQGGISAALGNMGEDDWRWHMYDTVKGSDWLGDQDSIEYLCKEAPRAVLELERYGVPFSRTEDGKIYQRPFGGMTKNYGNETVQRTCAAADRTGHAILHTMYGQALKHNTEFFIEYFALDLLMKNGECKGLIAWNLNDGTIHRFRSHITIIATGGYGKTYYSSTSAHTCTGDGNAMVLRAGLPLQDMEFVQFHPTGIYGHGTLISEGVRGEGGYLLNSKGERF

SEQ ID NO: 98228 - protein, 591 aa, Unknown
  Bacterial polypetide isolated from the Sargasso Sea
MSTYNIIDHEYDVVVLGAGGSGLRAAVGLSEAGLKTACISKVFPTRSHTSAAQGGISAALGNMGEDDWRWHMYDTVKGADWLGDQDSIEYLCKEAPKAVLELEKYGVPFSRTEEGKIYQRPFGGMTKNYGNGIVQRTCAAADRTGHAILHTLYGQALKHNTEFFIEYFALDLLMKDGACKGLIAWNLNDGTIHRFRAHTVIIATGGYGKVYYSATSAHTCTGDGNAMVLRAGLPLQDMEFVQFHPTGIYGHGTLITEGARGEGGYLTNSKGERFMERYAPNAKDLASRDVVSRSMSIEINEGRGVGKDQDHVNLNLSHLEKDIIESRLPGITDAARLFANVDVTKEPIPVVPTVHYNMGGIPTNYKAEVLTVNGSEKTVPGLMAIGEAACVSVHGANRLGSNSLIDLVVFGRAAAKRAAEVVKPGTPHEEIPESETQKCLDRFDKLRNADGSNSTAELRLSMQKTMQSKCAVFRTEKNLKEGVDDIRKTYDGMDSISVKDRSLVFNTDLVETLEFDNLIRQAVTTVESAYHRKESRGAHARDDYPKRDDEKFMQHTLAWCDGKNTKISYRPVHKSTLTNEVQYFPPQERVY

SEQ ID NO: 98229 - protein, 591 aa, Unknown
  Bacterial polypetide isolated from the Sargasso Sea
MKSYKIIDHEYDVVVLGAGGSGLRAAVGLSEAGLKTACISKVFPTRSHTSAAQGGISAALGNMGEDDWRWHMYDTVKGSDWLGDQDAIEYLCKEAPKAVKELDKYGVPFSRTEDGKIYQRPFGGMTKNYGNGTVQRTCAAADRTGHAILHTLYGQALKHNTEFFIEYFALDLIMKNGECKGLIAWNLNDGTIHRFKSHITIIATGGYGKIYYSATSAHTCTGDGNGMVLRAGLPLQDMEFVQFHPTGIYGVGCLISEGVRGEGGFLLNSKGERFMERYAPNAKDLASRDVVSRSIAIEINEGRGVGKEKDHVHLHLDHLDPKVIDDRLPGIAESAKTFSGVDVTKDPIPVVPTVHYNMGGIPTNYKAEVLTLNGSEKVVPGLMAIGEAACVSVHGANRLGSNSLIDLVVFGKAAAKRAAELVKPNTPHEDSPQSEVDKCLDRFDKIRNSKGETNTSQLRLSMQKTMQSKCAVFRTEKTLKEGVDEIRKPFEGLEDISVKDKSLLFNTDLVESLEFDNLIRQAMTTMDSAYHRKESRGAHAREDFSKRDDKKFMKHTLAWQNGKEVKVKYRDVHARTLTNDVQYFPPKERVY

SEQ ID NO: 98230 - protein, 312 aa, Unknown
  Bacterial polypetide isolated from the Sargasso Sea
SKAKDLASRDVVSRSIAVEINEGRGVGNEKDHVHLHLNHLDPKVIEERLPGISESSRLFANVDVTKEPIPVVPTVHYNMGGIPTNYKAEVLTLNGSEKTVPGLMAIGEAACVSVHGANRLGSNSLIDLVVFGRAAAKRAAELVKPGTPHEEISQSETDKCLERFDRLRNASGTNNTADLRLAMQKTMQSKCAVFRTEKTLKEGVNEIRKPFEGMDDLSVKDKSLIFNTDLVETLEFDNLIRQAITTMDSAYHRKESRGAHAREDFPKRNDEKFMQHTLSWCDGKKTKIDYRPVHRSTLSNDVQYFPPQERVY

SEQ ID NO: 98231 - protein, 536 aa, Unknown
  Bacterial polypetide isolated from the Sargasso Sea
ISAALGNMGEDDWRWHMYDTVKGSDWLGDQDCIEYLCKEAPRAVLELERYGVPFSRTKDGKIYQRSFGGMTKNYGNETVQRTCAAADRTGHAILHTMYGQALKHNTEFFIEYFALDLIMKNGECKGLIAWNLNDGTIHRFRSHITIIATGGYGKTYYSSTSAHTCTGDGNAMVLRAGLPLQDMEFVQFHPTGIYGHGTLISEGVRGEGGYLLNSKGERFMERYAPKAKDLASRDVVSRSIAVEINEGRGVGNEKDHVHLHLDHLDPKVIESRLPGISESSRLFANVDVTKEPIPVVPTVHYNMGGIPTNYKAEVITLNGSEKVVPGLMAIGEAACVSVHGANRLGSNSLIDLVVFGRAAAKRAAELVKPGSPHENIPDNETEKCIDRFHKLRNANGENKTADLRLAMQKTMQSKCAVFRTEKTLKEGVDEIRKPFDGMDSISVKDKSLIFNTDLVETLEFDNLIRQAIVTMDSAYERKESRGAHAREDYPKRDDNQFMKHTLSWCEGSKTKIDYKEVNRSTLSNDVQYFPPQERVY

SEQ ID NO: 98232 - protein, 591 aa, Unknown
  Bacterial polypetide isolated from the Sargasso Sea
MSKYKIIDHEYDVVVLGAGGSGLRAAVGLSEEGLKTACISKVFPTRSHTSAAQGGISAALGNMGEDDWRWHMYDTVKGSDWLGDQDAIEHLCKEAPKAVIELEKYGVPFSRTKEGKIYQRAFGGMTKNYGNDSVQRTCAAADRTGHAILHTLYGQALKHNTEFFIEYFALDLLMKNGECKGLIAWNLNDGTIHRFRSHITILATGGYGKVYYTATSAHTCTGDGNAMALRAGLPLQDMEFVQFHPTGIYGVGTLISEGVRGEGGFLLNSKGERFMEKYAPKAKDLASRDVVSRSIAVEINEGRGVGKNKDYVNLHLDHLDPKVIEERLPGIAESAKTFCEVDVRKDPIPVVPTVHYNMGGIPTNYKAEVLTLNGKESTVPGLMAIGEAACVSVHGANRLGSNSLIDLVVFGKSAANRAAELVKPGTPHEELSQSETDKCLDRFDKLRNSNGSTKTSELRLAMQKTMQSKCAVFRTEKTLKEGMDQIRKPFQGMEDISVTDKSLLFNTDLVETLEFDNLIRQAMTTIDSAYHRKESRGAHAREDYKKRDDKKYMTHTLAWQKGNNVKVDYRPVHSKTLTNDVQYFPPRERVY

SEQ ID NO: 98233 - protein, 527 aa, Unknown
  Bacterial polypetide isolated from the Sargasso Sea
PDDDWRWHMFDTVKGSDYIGDQEAIEYMCSEGPKAVFELEHMGLPFSRTEEGRIYQRPFGGQSKDYGKGGQATRTCAAADRTGHSLLHTLFQANLKAGTNFLNEWFAVDLVLNADKAVVGVIAFKIETGEIYYIKSKATVLATGGAGRIYSSTTNALINSGDGIGMALRAGMPVQDIEMWQFHPTGIHGAGTLVTEGCRGEGGYLLNKDGERFMERYAPNAKDLASRDVVARSMALEILEGRGCGPNADHIFLRLDHLGPEVVHKRLPGITELSKTFAGVDPAVQPIPVVPTCHYMMGGIPTNINGQVISVEHGEDKIVNGLYAAGEVACVSVHGGNRLGGNSLLDLVVFGRAAGLYIEETMKQGVELKDASNDDIGKALERLNKLNASKEGDQVAVLKEKMQQNMQNNFGVFRRGDLMEKGIEELAKTREEVNDIFLQDKSAAFNTARIEALEMQNLFEVAEATAITANERKESRGAHARDDFTERDDENWLKHSIYYADTKEVSKRDVNYRPKTVQAFQPMVRSY

SEQ ID NO: 98234 - protein, 317 aa, Unknown
  Bacterial polypetide isolated from the Sargasso Sea
MERYAPNAKDLASRDVVSRSMSIEINEGRGVGKDQDHVHLHLSHLDKSVIENRLPGITEAARLFANVDVTKEPIPVVPTVHYNMGGIPTNYKAEVLTVNGSEKTVPGLMAIGEAACVSVHGANRLGSNSLIDLVVFGRAAAKRAAELVKPGAPHEEISETETQKCLDRFDKLRNAQGDNSTAELRLAMQKTMQSKCAVFRTEKNLEEGVNEIRKTYDGMDSLSVKDRSLVFNTDLVETLELDNLIRQAVTTVDSAYHRKESRGAHAREDYPTRDDQKFMQHTLAWCDGKDTKITYRPVHNSTLTNEVQYFPPQERVY

SEQ ID NO: 98235 - protein, 591 aa, Unknown
  Bacterial polypetide isolated from the Sargasso Sea
MSSYKIVDHEYDVVVLGAGGSGLRAAVGLSEAGLKTACISKVFPTRSHTSAAQGGISAALGNMGEDDWRWHMYDTVKGADWLGDQDSIEYLCKEAPKAVIELEKYGVPFSRTEDGKIYQRPFGGMTKNYGNGIVQRTCAAADRTGHAILHTLYGQALKHKTEFFIEYFALDLLMKDGECKGLIAWNLNDGTIHRFRSHIVIIATGGYGKVYYSATSAHTCTGDGNAMVLRAGLPLQDMEFVQFHPTGIYGHGTLITEGARGEGGYLTNSKGERFMERYAPKAKDLASRDVVSRSMSIEINEGRGVGKDQDHVHLNLSHLDKEIIESRLPGITDAARLFANVDVTKEPIPVVPTVHYNMGGIPTNYKAEVLTVNGSEKTVPGLMAIGEAACVSVHGANRLGSNSLIDLVVFGRAAAKRAAELIKPGTPHEEISESETQKCLDRFDKIRNSDGDIGTAELRLSMQKTMQSKCAVFRTEKTLKEGVDEIRQTFDGLDSLSVKDKSLIFNTDLVETLEFDNLIRQAVVTVDSAYNRKESRGAHAREDYPKRDDEKFMQHTLAWCDGKKSKISYRDVHKSTLTNEVQYFPPQERVY

SEQ ID NO: 98236 - protein, 591 aa, Unknown
  Bacterial polypetide isolated from the Sargasso Sea
MKAYNIIDHEYDVVVLGAGGSGLRAAVGLSEAGLKTACISKVFPTRSHTSAAQGGISAALGNMGEDDWRWHMYDTVKGADWLGDQDSIEYLCKEAPKAVLELEKYGVPFSRTEEGKIYQRPFGGMTKNYGNGIVQRTCAAADRTGHAILHTLYGQALKHNTEFFIEYFALDLLMKNGECKGLIAWNLNDGTIHRFRAHTVIIATGGYGKVYYSATSAHTCTGDGNAMVLRAGLPLQDMEFVQFHPTGIYGHGTLITEGARGEGGYLTNSKGERFMERYAPNAKDLASRDVVSRSMSIEINEGRGVGKDQDHVHLNLSHLDKDIIESRLPGITDAARLFANVDVTKEPIPVVPTVHYNMGGIPTNYKAEVLTVNGSEKTVPGLMAIGEAACVSVHGANRLGSNSLIDLVVFGRAAAKRAAELVKPGTPHEEIPESETQKCLDRFDKLRNAQGNNSTAELRLSMQKTMQSKCAVFRTEKNLKEGVDEIKKTYDGMDSISVKDRSLVFNTDLVETLEFDNLIRQAVTTVESAYHRKESRGAHARDDYPKRDDEKFMQHTLAWCDGKNTKISYRAVHKSTLTNEVQYFPPQERVY

SEQ ID NO: 98237 - protein, 517 aa, Unknown
  Bacterial polypetide isolated from the Sargasso Sea
MSSYKIIDHEYDVVVLGAGGSGLRAAVGLSEAGLKTACISKVFPTRSHTSAAQGGISAALGNMGEDDWRWHMYDTVKGSDWLGDQDCIEYLCKEAPRAVLELEKYGVPFSRTDDGKIYQRPFGGMTKNYGNEPVQRTCAAADRTGHAILHTLYGQALKHNTEFFIEYFALDLLMKDGECKGLIAWNLNDGTIHRFRSHITIIATGGYGKVYYSATSAHTCTGDGNAMVLRAGLPLQDMEFVQFHPTGIYGHGTLISEGVRGEGGYLLNSKGERFMERYAPKAKDLASRDVVSRSIAIEINEGRGVGKDKDHVHLHLNHLDPNVIEERLPGISESSRLFANVDVTKEPIPVVPTVHYNMGGIPTNYKAEVLTLNGSEKTVPGLMAIGEAACVSVHGANRLGSNSLIDLVVFGRAAAKRASELIKPGMPHEEISQSETDKCLERFDKLRNANGSNNTADLRLNMQKTMQSKCAVFRTEKTLKEGVEEIRKPFEGMDNISVKDKSLIFNTDLVETLEFDN

SEQ ID NO: 98238 - protein, 455 aa, Unknown
  Bacterial polypetide isolated from the Sargasso Sea
TCAAADRTGHAILHTLYGQALKHNTEFFIEYFALDLLMKDGECKGLIAWNLNDGTIHRFRAHTVIIATGGYGKVYYSATSAHTCTGDGNAMVLRAGLPLQDMEFVQFHPTGIYGHGTLISEGVRGEGGYLVNAKGERFMERYAPNAKDLASRDVVSRSMSIEINEGRGVGKEKDHVHLHLSHLDKSVIENRLPGITEAARLFANVDVTKEPIPVVPTVHYNMGGIPTNYKAEVLTVNGSEKTVPGLMAIGEAACVSVHGANRLGSNSLIDLVVFGRAAAKRAAELIKPATPHEDISETETQKCLDRFDKLRNAKGENSTAELRLSMQKTMQSKCAVFRTEKNLKEGVDEIRKTYDGMDSISVKDRSLVFNTDLVETLEFDNLIRQAVTTVDSAYHRKESRGAHAREDYPKRDDEKFMQHTLAWYDGKNTKISYRAVHNSTLTNDVQYFPPQERVY

SEQ ID NO: 98239 - protein, 338 aa, Unknown
  Bacterial polypetide isolated from the Sargasso Sea
MKSYNIIDHEYDVVVLGAGGSGLRAAVGLSEAGLKTACISKVFPTRSHTSAAQGGISAALGNMGEDDWRWHMYDTVKGADWLGDQDSIEYLCKEAPKAVLELEKYGVPFSRTEDGKIYQRPFGGMTKNYGNGIVQRTCAAADRTGHAILHTLYGQALKHNTEFFIEYFALDLIMKDGQCKGLIAWNLNDGTIHRFRSHITIIATGGYGKVYYSATSAHTCTGDGNAMVLRAGLPLQDMEFVQFHPTGIYGHGTLISEGVRGEGGYLVNSKGERFMERYAPNAKDLASRDVVSRSMSIEINEGRGVGKDQDHVHLYLSHLDKKVIEDRLPGITEAARLL

SEQ ID NO: 98240 - protein, 251 aa, Unknown
  Bacterial polypetide isolated from the Sargasso Sea
MTNSYKIIDHHYDVVVVGAGGSGLRATLGCAEAGLKTACISKVFPTRSHTVAAQGGIGAALGNMGEDNWKWHMYDTVKGSDWLGDQDAIEYLCSKAPEAVIELEEYGMPFSRTEDGKIYQRPFGGHLTNNGEGAPAMRACAAADRTGHALLHTLYQQSLKNNVEFYIEYFVLDLISDDLGNCIGVVTWCLEDGSIHRFLSHQTILATGGYGRAYFSSTSAHICTGDGSAMALRQNLPLSDMEFIQFHPTGV

SEQ ID NO: 98241 - protein, 341 aa, Unknown
  Bacterial polypetide isolated from the Sargasso Sea
VGCLISEGVRGEGGFLLNSKGERFMERYAPNAKDLASRDVVSRSIAIEINEGRGVGKEKDHVHLHLDHLDPKVIDDRLPGIAESAKTFSGVDVTKEPIPVVPTVHYNMGGIPTNYKAEVLTLNGSEKVVPGLMAIGEAACVSVHGANRLGSNSLIDLVVFGKAAAKRAAEIVKPNTPHENSPQSEIDKCLDRFDKIRNSKGETNTSQLRLSMQKTMQSKCAVFRTEKTLKEGVNEIRKPFEGLEDISVKDKSLLFNTDLVESLEFDNLIRQAMTTMDSAYHRKESRGAHAREDFSKRDDKKFMKHTLAWQNGKEVKVKYRDVHARTLTNDVQYFPPKERVY

SEQ ID NO: 98242 - protein, 339 aa, Unknown
  Bacterial polypetide isolated from the Sargasso Sea
MKSYKIIDHEYDVVVLGAGGSGLRAAVGLSEAGLKTACISKVFPTRSHTSAAQGGISAALGNMGEDDWRWHMYDTVKGSDWLGDQDAIEYLCKEAPRAVIELEKYGVPFSRTKEGKIYQRPFGGMTKNYGNGTVQRTCAAADRTGHAILHTLYGQALKHNTEFFIEYFALDLIMKNGECKGLIAWNLNDGTIHRFRSHITIIATGGYGKIYYSATSAHTCTGDGNAMVLRAGLPLQDMEFVQFHPTGIYGVGCLISEGVRGEGGFLLNSKGERFMERYAPTAKDLASRDVVSRSIAIEINEGRGVGKEKDHVHLHLDHLDQKVIDERLPGIAESGKTFS

SEQ ID NO: 98243 - protein, 296 aa, Unknown
  Bacterial polypetide isolated from the Sargasso Sea
MNSYKIIDHNYDVVVLGAGGSGLRAAVGLSESGLKTACISKVFPTRSHTSAAQGGISAALGNMGEDDWRWHMYDTVKGSDWLGDQDSIEYLCKEAPRAVLELEQYGVPFSRTEDGKIYQRPFGGMTKNYGNGTVQRTCAAADRTGHAILHTLYGQALKHNTEFFIEYFALDLLMKDGQCKGLIAWNLNDGTLHRFRSHITIIATGGYGKVYYSATSAHTCTGDGNAMVLRAGLPLQDMEFVQFHPTGIYGHGTLISEGVRGEGGYLLNSKGERFMEKYAPKTKDLASRDVVSRSIA

SEQ ID NO: 98244 - protein, 520 aa, Unknown
  Bacterial polypetide isolated from the Sargasso Sea
WLGDQDAIEFMCREAPKVVYDLEHMGMPFDRNTDGTIYQRPFGGHTANYGEKPVQRACAAADRTGHAMLHTLYQQNVKARTNFFVEWMALDLIRDADGDVVGVTALEMETGDLHILEAKTTLLATGGAGRIFAASTNAFINTGDGLGMAARAGIPLEDMEFWQFHPTGVAGAGVLLTEGCRGEGAILLNSNGERFMERYAPTLKDLAPRDFVSRSMDQEIKEGRGCGPNKDYVLLKLDHLGADTIHKRLPSVYEIGVNFANVDITKEPIPVVPTIHYQMGGIPTNINGQVVVQQGGNDNLVVNGLYAVGECSCVSVHGANRLGTNSLLDLLVFGRAAGNHIVEFNDKNKNHKPLPKDAADRTLERLNRLQGASSGEYAQDVANDIRASMQLHAGVFRTQASMDEGVKKIAELRNRVNSVGLKDHSKVFNTARIEALEVENLIEAAQATMVSAAARKECRGAHTVSDYERPADDPVAPLGRDDANWMKHTLWHSESNSLTYKPVKLKPLTVDSVPPKVRTF

SEQ ID NO: 98245 - protein, 390 aa, Unknown
  Bacterial polypetide isolated from the Sargasso Sea
IFVQRSSKAVLELEKYGVPFSRTKEGKIYQRPFGGMTKNYGNEPVQRTCAAADRTGHAILHTLYGQALKHNTEFFIEYFALDLLMSNGECKGLIAWNLNDGTIHRFRAHITIIATGGYGKVYYSATSAHTCTGDGNAMVLRAGLPLQDMEFVQFHPTGIYGHGTLISEGVRGEGGYLLNSKGERFMERYAPKAKDLASRDVVSRSIAIEINEGRGLGQQKDHVHLHLNHLDPKVIEQRLPGISESSKLFANVDVTKEPIPVVPTVHYNMGGIPTNFKAEVLTMNGSEKIVPGLMAIGEAACVSVHGANRLGSNSLIDLVVFGRSAAKRASEIIKSGTPHQEISKSETDKCIDRFDKLRNGNGENRTADLRLSMQKTMQSKCAVFRTEKTL

SEQ ID NO: 98246 - protein, 285 aa, Unknown
  Bacterial polypetide isolated from the Sargasso Sea
MTNSEGERFMERYAPQYKDLAPRDYVSRSMTMEIREGRGVGEHGDHIHLNLSHLPPEALAERLPGISESAKIFAGVDVTKEPIPVLPTVHYNMGGIPTNYWGEVLNPTAEEPNAVVPGLMAVGEAGCASVHGANRLGSNSLIDLVVFGRAAAIRAGKVVDAEGANPVLNQASIDSAFDRFDGLRNANGGTPTAELRLEMQRTMQSDAAVFRTAETMKEGVDKMTEIAAKLGDLKVTDRSLVWNSDLMETLELTNLMPNALATIVGAEAREESRGAHAHEDFATRD

SEQ ID NO: 98247 - protein, 591 aa, Unknown
  Bacterial polypetide isolated from the Sargasso Sea
MKAYNIIDHEYDVVVLGAGGSGLRAAVGLSEAGLKTACISKVFPTRSHTSAAQGGISAALGNMGEDDWRWHMYDTVKGADWLGDQDSIEYLCKEAPKAVLELEKYGVPFSRTEEGKIYQRPFGGMTKNYGNGIVQRTCAAADRTGHAILHTLYGQALKHNTEFFIEYFALDLLMKDGECKGLIAWNLNDGTIHRFRAHTVIIATGGYGKVYYSATSAHTCTGDGNAMVLRAGLPLQDMEFVQFHPTGIYGHGTLISEGVRGEGGYLVNSKGERFMERYAPNAKDLASRDVVSRSMSIEINEGRGVGKDQDHVHLHLSHLDKSVIENRLPGITEAARLFANVDVTKDPIPVVPTVHYNMGGIPTNYKAEVLTMNGSEKTVPGLMAIGEAACVSVHGANRLGSNSLIDLVVFGRAAAKRAAELVKPGTPHEEIPETETQKCLDRFDKLRNAQGDNSTAELRLSMQKTMQSKCAVFRTEKNLKQGVDEIGKTYDGMDSISVKDKSLVFNTDLVETLEFDNLIRQAVATVDSAYHRKESRGAHAREDYPKRDDEKFMQHTLAWCDGKNTKISYRPVHQSTLTNEVQYFPPQERVY

SEQ ID NO: 98248 - protein, 502 aa, Unknown
  Bacterial polypetide isolated from the Sargasso Sea
YLCKEAPRAVLELQKYGVPFSRTEDGKIYQRPFGGMTKNYGNEPVQRTCAAADRTGHAILHTLYGQALKHKTEFFIEYFALDLLMKDGACKGLIAWNLNDGTIHRFRSHITIIATGGYGKVYYSATSAHTCTGDGNAMVLRAGLPLQDMEFVQFHPTGIYGHGTLISEGVRGEGGYLLNSKGERFMERYAPKAKDLASRDVVSRSIAIEINEGRGVGKEKDHVHLHLDHLDPKVIENRLPGISESSRLFANVDVTKEPIPVVPTVHYNMGGIPTNYKAEVLTLNGSEKVVPGLMAIGEAACVSVHGANRLGSNSLIDLVVFGRAAAKRASELIKTGMKHEEIDKSETDKCLERFDKLRNSNGTSPTSELRISMQKTMQSKCAVFRNEKTLKEGVDEIRKPFEAMESLSVKDKSLIFNTDLVETLEFDNLIRQAITTMDSAYHRKESRGAHAREDYPSRDDDKFMQHTLSWCEGIKTKIDYRPVHRSTLTNDVQYFPPQERIY

SEQ ID NO: 98249 - protein, 384 aa, Unknown
  Bacterial polypetide isolated from the Sargasso Sea
MKSYKIIDHEYDVVVLGAGGSGLRAAVGLSEAGLKTACVSKVFPTRSHTSAAQGGISAALGNMGEDDWRWHMYDTVKGSDWLGDQDCIEYLCKEAPRAVLELEKYGVPFSRTEDGKIYQRPFGGMTKNYGNEPVQRTCAAADRTGHAILHTLYGQALKHNTEFFIEYFALDLLMKDGQCKGLIAWNLNDGTIHRFRSHITIIATGGYGKVYYSATSAHTCTGDGNAMVLRAGLPLQDMEFVQFHPTGIYGHGTLISEGVRGEGGYLVNSKGERFMERYAPKAKDLASRDVVSRSIAVEINEGRGVGNEKDHVHLHLNHLDPKVIEERLPGISESSRLFANVDVTKEPIPVVPTVHYNMGGIPTNYKAEVLTLNGSEKTVPGLMA

SEQ ID NO: 98250 - protein, 401 aa, Unknown
  Bacterial polypetide isolated from the Sargasso Sea
MKSYKIIDHEYDVVVLGAGGSGLRAAVGLSEAGLKTACVSKVFPTRSHTSAAQGGISAALGNMGEDDWRWHMYDTVKGSDWLGDQDCIEYLCKEAPRAVLELEKYGVPFSRTEDGKIYQRPFGGMTKNYGNEPVQRTCAAADRTGHAILHTLYGQALKHNTEFFIEYFALDLLMKDGQCKGLIAWNLNDGTIHRFRSHITIIATGGYGKVYYSATSAHTCTGDGNAMVLRAGLPLQDMEFVQFHPTGIYGHGTLISEGVRGEGGYLVNSKGERFMERYAPKAKDLASRDVVSRSIAVEINEGRGVGNEKDHVHLHLNHLDPKVIEERLPGISESSRLFANVDVTKEPIPVVPTVHYNMGGIPTNYKAEVLTLNGSEKTVPGLMAIGEAACVSVHGANRLGS

SEQ ID NO: 98251 - protein, 331 aa, Unknown
  Bacterial polypetide isolated from the Sargasso Sea
MSSYKIIEHEYDVVVLGAGGAGLRAAVGLSEAGLKTACISKVFPTRSHTSAAQGGISAALGNMGEDDWRWHMYDTVKGSDWLGDQDCIEYLCKEAPRAVLELERYGVPFSRTEDGKIYQRPFGGMTKNYGNETVQRTCAAADRTGHAILHTMYGQALKHNTKFFIEYFALDLLMKNGECKGLIAWNLNDGTIHRFRAHITIIATGGYGKTYYSSTSAHTCTGDGNAMVLRAGLPLQDMEFVQFHPTGIYGHGTLISEGVRGEGGYLLNSKGERFMERYAPKAKDLASRDVVSRSIAVEINEGRGVGNDKDHVHLHLNHLDPKVIEERLPGI

SEQ ID NO: 98252 - protein, 591 aa, Unknown
  Bacterial polypetide isolated from the Sargasso Sea
MKSYKIIDHEYDVVVLGAGGSGLRAAVGLSEAGLKTACISKVFPTRSHTSAAQGGISAALGNMGEDDWRWHMYDTVKGADWLGDQDCIEYLCKEAPRAVLELEKYGVPFSRTDDGKIYQRPFGGMTKNYGNEPVQRTCAAADRTGHAILHTLYGQALKHNTEFFIEYFALDLLMKNGECKGLVAWNLNDGTIHRFRSHITIIATGGYGKIYYSATSAHTCTGDGNAMVLRAGLPLQDMEFVQFHPTGIYGHGTLISEGVRGEGGYLVNSKGERFMERYAPKAKDLASRDVVSRSIAVEINEGRGVGKDKDHVHLHLDHLDKNVIEERLPGISESSKLFANVDVTKEPIPVVPTVHYNMGGIPTNYKAEVLTLNGSEKTVPGLMAIGEAACVSVHGANRLGSNSLIDLVVFGRAAAKRASELVKPGQPHEDIPDSETDKCLSRFDKLRNSSGSNSTADLRLSMQKTMQSKCAVFRTEKTLKEGIEQIRKPFEGMENLSVKDKSLIFNTDLVETLEFDNLIRQAITTMDSAYYRKESRGAHAREDYPKRDDEKYMQHTLSWCEGKKTKIDYRPVHRSTLTNDVQYFPPQERVY

SEQ ID NO: 98253 - protein, 234 aa, Unknown
  Bacterial polypetide isolated from the Sargasso Sea
MGGIPTNYKAEVLTVNESEKTVPGLMAIGEAACVSVHGANRLGSNSLIDLVVFGRAAAKRAAELIKPGMKHDEIDKSETDRCLDRFDKLRNSQGSNPTSELRLSMQKTMQSKCAVFRSEKTLKEGVDEIRKPFEGMESLSVKDKSLIFNTDLVETLEFDNLIRQAITTMDSAYHRKESRGAHAREDFPKRDDENYMQHTLSWCNGSKTKINYRPVHRSTLTNDVQYFPPQERVY

SEQ ID NO: 98254 - protein, 371 aa, Unknown
  Bacterial polypetide isolated from the Sargasso Sea
SHTSAAQGGISAALGNMGEDDWRWHMYDTVKGADWLGDQDCIEYLCKEAPRAVLELEKYGVPFSRTEDGKIYQRPFGGMTKNYGNDTVQRTCAAADRTGHAILHTLYGQALKHNTEFFIEYFALDLLMKNGACKGLIAWNLNDGTIHRFRSHITIIATGGYGKTYYSSTSAHTCTGDGNAMVLRAGLPLQDMEFVQFHPTGIYGHGTLISEGVRGEGGYLLNSKGERFMERYAPKAKDLASRDVVSRSIAIEINEGRGVGKEKDHVHLHLDHLDPEVIEKRLPGISESSRLFADVDVTKEPIPVVPTVHYNMGGIPTNYKAEVLTGNGSEKVVPGLMAIGEAACVSVHGANRLGSNSLIDLVVFGRAAAKR

SEQ ID NO: 98255 - protein, 397 aa, Unknown
  Bacterial polypetide isolated from the Sargasso Sea
FKSHITIIATGGYGKIYYSATSAHTCTGDGNGMVLRAGLPLQDMEFVQFHPTGIYGVGCLISEGVRGEGGFLLNSKGERFMERYAPNAKDLASRDVVSRSIAVEINEGRGVGKEKDHVHLHLDHLDPKVIDERLPGIAESAKTFSGVDVTKDPIPVVPTVHYNMGGIPTNYKAEVLTLNGSEKTVPGLMAIGEAACVSVHGANRLGSNSLIDLVVFGKAAAKRASELVKPNSPHENSPQSEVDRCLERFDKIRNSKGKTNTSKLRLSMQKTMQSKCAVFRTEKTLKEGVDAIRKPFDGLEDILVKDKSLLFNTDLVESLEFDNLIRQAMTTMDSAYHRKESRGAHAREDFSKRDDKNFMKHTLAWQDGKSVKVKYRDVHARTLTNDVQYFPPKERVY

SEQ ID NO: 98256 - protein, 287 aa, Unknown
  Bacterial polypetide isolated from the Sargasso Sea
VGEEKDHVHLHLDHLDPKVIEERLPGISESSRLFANVDVTKEPIPVVPTVHYNMGGIPTNYKAEVLTLNGSEKIVPGLMAIGEAACVSVHGANRLGSNSLIDLVVFGRAAAKRASELVKPGKPHEIISKNETDKCLDRFDRLRNSNGTNPTSELRKSMQKTMQSKCAVFRTEKTLKEGVEEIRKSYDGIKSISVKDKSLIFNTDLVETLEFDNLIRQAITTMDSAYHRKESRGAHAREDFPKRNDEKFMQHTLSWCDGSKTKINYRPVHKSTLTNDVQYFPPQERIY

SEQ ID NO: 98257 - protein, 421 aa, Unknown
  Bacterial polypetide isolated from the Sargasso Sea
TACISKVFPTRSHTVAAQGGISAALGNMGEDDWRWHMYDTVKGSDWLGDQDAIEYLCKNAPKAVLELENYGVPFSRTEDGKIYQRAFGGMTKNYGESTAQRTCAAADRTGHAIIHTLYGQSLKHGADYYIEYFVLDLLMVEGECRGVLAWCLEDGKLHVFNSKQTVLATGGYGRVYFSATSAHTCTGDGNAMVLRAGLPLQDMEFVQFHPTGIYGVGCLITEGARGEGGYLVNSEGERFMERYAPSAKDLASRDVVSRSITKEVLEGRGVGKDKDHVFLHLDHIDSKILEERLPGISESAKIFAGVDVTQSPIPVIPTVHYNMGGIPTNFHGEVMDLVKGDEKNVHGLMAVGEAACVSVHGANRLGSNSLIDLVVFGKAAADRINDTTSKDTSNSDIPQNIVDEAVARFDKTRNSNGEVST

SEQ ID NO: 98258 - protein, 332 aa, Unknown
  Bacterial polypetide isolated from the Sargasso Sea
RGEGGYLINRDGERFMERYAPTAKDLAGRDVVARSMILEILDGKGCDPENPANDHVLLKLDHLGEEVLNSKLPGILELSRTFAHVDPVKEPIPVIPTCHYMMGGIATQVSGQALTQVNGTDQEVQGLYAAGEAACVSVHGANRLGGNSLLDLVVFGRAAGIHIEEVMRQGVSYRDASDSDIESSLARLSRWDDSSSGESISDLKKELQTTMQNSFGVFRTEKNMQEGIVKLQDLRQRIDSAHLPDKSDSFNTARLEALELDNLLEVAEATAIAAEERKESRGAHARDDYGERDDDNWLCHSMYFPEEKRVGKRDVNFTPKTVETFEPKERVY

SEQ ID NO: 98259 - protein, 498 aa, Unknown
  Bacterial polypetide isolated from the Sargasso Sea
AVDSIIELEHYGVPFSRTEEGKIYQRPFGGMTTEYGKGIAQRTCAAADRTGHAILHTLYTQSLKNNVDFFIEYFVIDLVFKNGNCIGVLAWCLDDGSIHFFQSHIVILATGGYGRAYLSSTSAHTCTGDGNGMILRSGLPLQDMEFIQFHPTGIYGAGCLITEGARGEGGYLTNSEGERFMPKYAPNAKDLASRDVVSRAIQIEVNEGRGVGEEKDHALLHLEHLDSEIINNKLPGISETAKIFAGVDVTKEPIPVIPTVHYNMGGTPTNYNTEVLQSGDSAVVPGLMAVGEGACVSVHGANRLGSNSLLDLIVFGRSAADRAISILNDKPKNHQAVSSSDLDEILGRFDQTRHSSGDIATSELRNKMQKTMQRYAPVYRDEKTLKEGIAIMQGIFKDYEQVKTSDKSLIWNTDLAETFELNNLLYQSLATLYSANERTESRGSHARDDYPDRNDEDWLKHTMVWVNKDGTSKFDFKPVELNTLTDEVETVQLKARTY

SEQ ID NO: 98260 - protein, 403 aa, Unknown
  Bacterial polypetide isolated from the Sargasso Sea
DGTIHRFRSHITIIATGGYGKVYYSATSAHTCTGDGNAMVLRAGLPLQDMEFVQFHPTGIYGHGTLISEGVRGEGGYLVNSKGERFMERYAPNAKDLASRDVVSRSMSIEINEGRGVGKDQDHVHLYLSHLDKKVIEDRLPGITEAARLFANVDVTKEPIPVVPTVHYNMGGIPTNYKAEVLTVNGSQKTVPGLMAIGEAACVSVHGANRLGSNSLIDLVVFGRAAAKRAAELVKPGTPHEEVSESETEKCLNRFDKLRYAEGDNGTAELRLAMQKTMQSKCAVFRTEKNLKEGVDEIRKTYDGMESISVKDKSLVFNTDLVETLEFDNLIRQAITTVDSAYHRKESRGAHAREDYPKRNDEKFMKHTLSWCDGKNTKIEYRDVHTSTLTNEVQYFPPQERVY

SEQ ID NO: 98261 - protein, 201 aa, Unknown
  Bacterial polypetide isolated from the Sargasso Sea
VSVHGANRLGSNSLIDLVVFGRAAAKRAAELIKPNTPHENIGESETEKCLERFDKLRNANGENSTAELRVNMQKTMQSKCAVFRTEKTLDEGVNEIRKTYDGMGSLSVKDKSLIFNTDLVETLEFDNLIRQAITTIDSAFNRKESRGAHAREDFPKRDDKKYMKHTLSWFDGKETKIDYREVHRNTLTNEVQYFPPQERVY

SEQ ID NO: 98262 - protein, 234 aa, Unknown
  Bacterial polypetide isolated from the Sargasso Sea
MGSVYSSLNFELGSEVDMLRDSVYLFCQKELSPQAEHIDRSNEFPMEVWKKLGDLGLLGITISEEYGGSGMGYLAHCVAMEEISRASAAVGLSYGAHSNLCVNQLFRNGTAKQKETYLPPLCSGDHIGALAMSEPNAGSDVVSMSLRAERKGDHYSLTGNKMWITNGPDADTYIIYAKTNPEAGSKGITAFIVERDYPGFSRHQKLDKLGMRGSNTCELVFENCLVPIENVLGS

SEQ ID NO: 98263 - protein, 260 aa, Unknown
  Bacterial polypetide isolated from the Sargasso Sea
DVGASAGSDVVSMKLKAEKRNDYYLLNGSKMWITNGPDADTLVVYAKTDVSAGPRGITAFLIEKDMEGFSTGKKLDKLGMRGSNTSELIFENCEVPYENVLGEEGKGVNVLMSGLDYERVVLAAGPVGIMAGAMDVVVPYIHEREQFGKPIGTFQLMQGKIADMYTTMNACRSYVYAVAKACDEGQTTRKDSAGCILYAAEKATLIALDAIQCLGGNGYINDYPTGRLLRDAKLYEIGAGTSEIRRMLIGRELFEETKLS

SEQ ID NO: 98264 - protein, 248 aa, Unknown
  Bacterial polypetide isolated from the Sargasso Sea
  misc_feature (233)..(233): Xaa can be any naturally occurring amino acid
MISTYKTLNYDLGETVDMIREQVNSFARDEIAPRAAQIDHDNEFPNDLWRKFGDLGLLGITVDEQYGGSGLGYLEHVVAMEEISRASASVALSYGAHSNLCVNQIARNGNEAQKQKYLPKLCSGEHIGALAMSEPNAGSDVVSMKLRADKQGDRYILNGNKMWITNGPDAHTYVIYAKTDINAGSKGMTAFIVERGFKGFSQAQKLDKLGMRGSNTCELVFEDCEVPEENVLXSIGTGARVLMSGLDY

SEQ ID NO: 98265 - protein, 220 aa, Unknown
  Bacterial polypetide isolated from the Sargasso Sea
AHTYVIYAKTDTSAGPRGITAFIVERDFPGFSRAQKLDKLGMRGSNTCELVFENCEVPAENILGKENEGVKVLMSGLDYERTILSGGPVGVMQACMDEVVPYIHERKQFGQAIGEFQLMQGKIADMYVMLNTSRSYLYHVAQACDRGGTNRKDAAGVILYCAENATKMALEAIQTLGGNGYINDYNTGRLLRDAKLYEIGAGTSEIRRMLIGRELFNETA

SEQ ID NO: 98266 - protein, 278 aa, Unknown
  Bacterial polypetide isolated from the Sargasso Sea
ASTRSTATARAEQKARYLPPLVSGEHVGALAMSEPGAGSDVVSMRLSAVREGDHFVLNGNKMWITNGPDADTFVIYAKTDPAAGPKGISAFIVEAGTPGFSTAQKLDKLGMRGSSTCELVFDNCRVPQENLLGPLHGGVKVLMSGLDYERVVLAAGPLGIMQACMDVVLPYVRERKQFGQAIGEFQLVQGKLADMYTRLASSRALVYSVASACDQGRTSRKDCAAAILFAAENATQMALDAIQLLGGNGYINEYPTGRLLRDAKLYEIGAGTSEIRRW

SEQ ID NO: 98267 - protein, 283 aa, Unknown
  Bacterial polypetide isolated from the Sargasso Sea
MNSLYTSLNFGLGEDVDMLRDAVQDFAANEIAPIAAKVDHDNAFPNELWPVLGGMGLLGVTVPEEFGGANMGYLAHVVAMEEISRASASIGLSYGAHSNLCVNQINRNGNAAQKAKYLPKLVSGEHIGALAMSEPNAGSDVVSMKLHARKEGDRYILNGNKMWITNGPDANTYVIYAKTDLTKGAHGITAFIVERGFKGFSQAQKLDKLGMRGSNTCELVFEEVEVPEENILGGLNNGVKVLMSGLDYERVVLSGGPLGIMNACMDIVVPYIHEREQFGKSIG

SEQ ID NO: 98268 - protein, 364 aa, Unknown
  Bacterial polypetide isolated from the Sargasso Sea
FAAREISPLAGKIDRENAFPAELWSRLGEMGLLGVTIDPKFGGAGMGYLEHTIAMEEISRASGSVGLSYGAHSNLCVNQIFRNGTDAQKSQFLPDLISGAKVGALAMSEHTSGSDVVSMQLRAEKSGDHFVLNGSKMWITNGPDADTLVVYAKTDPAAKAHGITAFIIEKGLEGFSTGPKLDKLGMRGSNTCELIFENCAVPKERVLGAENKGVGVLMSGLDFERVVLSGGPLGLMQACLDIVLPYVHDRKQFGEPIGSFQLVQAKLADMYTTLNACRAYVYAVAQACDRGQTTRKDAAGAILYSAERATQMALDAIQLLGGSGYVNEYATGRLLRDAKLYEIGAGTSEIRRMLIGRELFKEGS

SEQ ID NO: 98269 - protein, 272 aa, Unknown
  Bacterial polypetide isolated from the Sargasso Sea
CPGLISGEHIGALAMSEPNAGSDVVSMKLRAERRGDHFVLNGSKMWITNGPDAHVYVIYAKTEPELGPHGITAFIVERDWAGFSRSPKLDKLGMRGSNTCELVFNNVEVPVENILGQVNGGVKVLMSGLDYERVVLSGGPTGIMQSCMDVVVPYIHDRQQFGQSIGEFQLIQGKVADMYTQLNASRAYLYAVAQACDRGETTRKDAAGVILYTAERATQMALDAIQILGGNGYINDYPTGRLLRDAKLYEIGAGTSEIRRMLIGRELFNETR

SEQ ID NO: 98270 - protein, 389 aa, Unknown
  Bacterial polypetide isolated from the Sargasso Sea
MNSLYTSLNFGLGEDVDMLRDAVQDFAANEIAPIAAKVDHDNAFPNELWPVLGGMGLLGVTVPEEYGGANMGYLAHVVAMEEISRASASIGLSYGAHSNLCVNQINRNGNAAQKAKYLPKLVSGEHIGALAMSEPNAGSDVVSMKLHARKEGDRYILNGNKMWITNGPDANTYVIYAKTDLTKGAHGITAFIVERGFKGFSQAQKLDKLGMRGSNTCELVFEDVEVPEENILGGLNNGVKVLMSGLDYERVVLSGGPLGIMNACMDIVVPYIHEREQFGKSIGEFQLVQGKLADMYTGMNAAKAYVYSVAKSCDRGETTRKDAAGAILYSAELATKMALDAIQLLGGNGYVNEYATGRLLRDAKLYEIGAGTSEIRRMLIGRELFNESK

SEQ ID NO: 98271 - protein, 284 aa, Unknown
  Bacterial polypetide isolated from the Sargasso Sea
MGKRATKNKYLPKLISGEHIGSLAMSEPSAGSDVVSMKLKAEKRNDYYLLNGSKMWITNGPDADTLVVYAKTDLSAGPKGITAFLIEKDMQGFSTGKKLDKLGMRGSNTSELIFENCEVPYENVLGEEGKGVNVLMSGLDYERVVLAAGPVGIMAGAMDVVVPYIHEREQFGKPIGTFQLMQGKIADMYTTMNACRSYVYAVAKACDEGQTTRKDSAGCILYAAEKATQIALDAIQCLGGNGYINDYPTGRLLRDAKLYEIGAGTSEIRRMLIGRELFEETKLS

SEQ ID NO: 98272 - protein, 389 aa, Unknown
  Bacterial polypetide isolated from the Sargasso Sea
MNSLYTSLNFGLGEEVDMLRDAVQDFAKHEIAPIAAKVDHDNAFPNEIWPVLGGMGLLGVTVPEEYGGANMGYLAHVVAMEEISRASASIGLSYGAHSNLCVNQINRNGNAEQKAKYLPKLVSGEHIGALAMSEPNAGSDVVSMKLHARKEGDRYILNGNKMWITNGPDANTYVIYAKTDLTKGAHGITAFIVERGFKGFSQAQKLDKLGMRGSNTCELVFEDVEVPEENILGGLNNGVKVLMSGLDYERVVLSGGPLGIMNACMDIVVPYIHEREQFGKSIGEFQLVQGKLADMYTGMNAAKAYVYSVAKSCDRGETTRKDAAGAILYSAELATKMALDAIQLLGGNGYVNEYATGRLLRDAKLYEIGAGTSEIRRMLIGRELFNESK

SEQ ID NO: 98273 - protein, 170 aa, Unknown
  Bacterial polypetide isolated from the Sargasso Sea
MALAEDHDQIRDVARGFAEERLMPIAGETDRLHKFPRDAVSELAELGFMGMMVSEEDNGGGMDAVSYAVALEEISRGCASAGVIMSANNSLYCAPVSANATSQQQKDEFLKPYASGEKIGCFALSEPGNGSDAGAASTTAKDAGDHFVLNGTKAWITNALEADAAVVFAT

SEQ ID NO: 98274 - protein, 288 aa, Unknown
  Bacterial polypetide isolated from the Sargasso Sea
FGVQDFDEQVQISINRVQSEDLVRALVVEARRLGFSSINLDLVYGLPYQQPASFLQTLQSVLLLDPDRVSLFSYAHLPTRFAAQRKIPTQSLPQAEDKLALLQLAIRHFSEAGYQCIGMDHFAKTTDALAIAQQQGKLQRNFQGYTTAGQDALIGLGVSSISQVNGVIWQNQKELQDYQQMLTGGQLPLERGFSLSPDDKIRAALISQLMCHFELDIPAFCQRFAIEDFWSYFADALPKLDPLIADGLVLCSDHHIQVTPLGRLLVRLVCASFDRYLQSSSNQSYSKV

SEQ ID NO: 98275 - protein, 308 aa, Unknown
  Bacterial polypetide isolated from the Sargasso Sea
SVALEKLAHLRQLGFSPVSFGVQDFDEQVQITINRVQSEDLVQALVLEAKRLGFSSINLDLVYGLPYQKPERFIQTLQSVLQLDPDRVSLFSYAHMPTRFAAQRKIPTQSLPQAEDKLALLQLAIKEFSEAGYQCIGMDHFAKTTDSLAKAQQQGKLQRNFQGYTTAGQDALIGLGVSSISQVNGVIWQNQKELSHYQQQLNDGQLPLERGFSLSQDDKIRAALISQLICHFKLDIPDFCQRFAIEDFWSYFADALPKLDPLIADGLVQCSDSVIQVTPLGRLLVRLVCASFDRYLHQANSLSYSKVV

SEQ ID NO: 98276 - protein, 317 aa, Unknown
  Bacterial polypetide isolated from the Sargasso Sea
SFDASAELSIELDPRNVDKRYLQHLRSLGYTRISFGLQDTDYNVQKTINRVQSTSHIAELVFEARSLGFESVNLDLIYGLPNQSLETFKSTIAATKAMMPDRISLFSYAHLPERFAAQRKFAPETLPNSEEKAALYKLAVNNFTSVGYEMIGLDHFALSTDSLAIAKNQGELHRNFQGYTLRGDTDLVGIGVSAISTVGNAFAQNAKDLKDYYTRIDQQQPSAVVGLTLSSDDLIRRDVISSLMCNLEVNKPYIEKKHHIIFDEYFSGALNNLSGLEDDGLVRLSPHSISIPEKARIYVRAICARFDAYLNVSETLS

SEQ ID NO: 98277 - protein, 316 aa, Unknown
  Bacterial polypetide isolated from the Sargasso Sea
MRVNENLIKKYSKTGPRYTSYPPATFFDDSFSNLDFEKKIILSNDENPQNISVYIHIPFCPQICHFCGCTTESGFTKPFLERYVDAVIKEISYVSKLINKNRKLTQIHWGGGTPNAISYKYIERITKKLFEVFDFSKNYEMAIECNPAHLEFRHIELLKKFGFNRISVGIQDFRDDVLEAINRKPSKHPIDDIIKKIKDEGFTGTNIDLVYGLPLQTVDSFKKTVEKAIQLDSDRIVTFSYAHVPSVLPRQKVLEKIGFPSSKDKALMYENSYEMFTKSGYISIGMDHFSKPGDEFEIALKNKQLHRNFQGYCTRE

SEQ ID NO: 98278 - protein, 348 aa, Unknown
  Bacterial polypetide isolated from the Sargasso Sea
MSKVDEKLLKKYSSTGPRYTSYPPATFFDTNFSNEDYVEKLILSNSESPESVSVYIHIPFCPQICHFCGCTTETGFTKPFLERYIDALIKEIEFVSKKIDSKRKLTQVHWGGGTPNAISYKYIERVTNKLYETFDFSANYEMAIECNPAHLEFNHIELLKKFGFNRISLGIQDFRTDVLDGINRKPSKYPIEEIVKKIEDEGFTGTNIDLVYGLPYQTPENFSETVDRAIKLNTDRVVTFSYAHVPSVLPRQKILEKIGFPSSNDKALMYEIAYEKLLKAGYVSIGMDHYSKPEDEFAIALNNKQLHRNFQGYCTRETTGQVYAFGASSISQLDSAYIQNIKNASQYI

SEQ ID NO: 98279 - protein, 245 aa, Unknown
  Bacterial polypetide isolated from the Sargasso Sea
YGLPKQTPEGFARTVEEVIRLQPDRLSVFNYAHLPERFMPQRRIDNNDLPSAAAKLEMLHATIDQLTAAGYRYIGMDHFALPDDELAIAQEEGTLQRNFQGYTTHGHCDLIGLGVSAISQIGDLYCQNSSDLNTYQDSLSNAQLATQRGLLCNHDDRVRRAVIQQLICHFELDFEPIEQAFTLDFRGYFNDLWPELLTLQRDGLISLDDKGIRILPAGRLLARSVCMVFDAYLAMQNRQRFSRVI

SEQ ID NO: 98280 - protein, 167 aa, Unknown
  Bacterial polypetide isolated from the Sargasso Sea
MSVQLIDWDLALIQKYNYSGPRYTSYPTALEFSPEFGAAEFDAAVARYPQRPLSLYVHIPFCHKLCYFCGCNKIVTRQQHKADQYLDVLEQEIIHRAPLFAGRQVHQLHWGGGTPTYLNKAQISRLMRLLRSHFNFNADAEISIEVDPREIDWMFWIISDRKALPVE

SEQ ID NO: 98281 - protein, 306 aa, Unknown
  Bacterial polypetide isolated from the Sargasso Sea
HFGGGTPTFLSHDELRRLMQHLRQHFSLLDDDSGDYSIEIDPREADWSTMGLLRELGFNRVSLGVQDLDPEVQRAVNRLQTLEETRAIVEAARTLQFRSVNIDLIYGLPKQTPERFARTVAEVIALQPDRLSLFNYAHLPERFMPQRRISADDLPSPADKLIMLQNSIDQLTRAGYRYIGMDHFALPDDELAIAQEEGTLQRNFQGYTTHGHCDLIGLGVSAISQIGDLYSQNDSDIASYQQSLGNGQLATRRGLHCNADDRLRRAVIQQLICHFQLRFADIERAHSVVFRDYFRRPLGRAGTARG

SEQ ID NO: 98282 - protein, 334 aa, Unknown
  Bacterial polypetide isolated from the Sargasso Sea
MNTERGQAADLHQIVAVSLAGSLDAGQGHVPEPTAQSRCTQGNFPMTAVSPDLLRRFDVPGPRYTSYPTADRFVEAFGQEDYVLALQQRRSGTLAKAMPLSLYVHIPFCESLCYYCACNKIITKHHDRAEVYLRYLSREIDLHTAHCGVGQVVSQLHLGGGTPTFLSDSGLRELMAMLKRSFTLAPGGEYSIEVDPRTVNAERLALLAELGFNRLSFGVQDFDAEVQKAVHRIQPAEQVFALVESARSLGFDSVNVDLIYGLPRQTPESFDRTLAQVAQLRPDRIALYAYAHLPERFKPQRRIISAELPTGASKLSMLSRSLDAFMDAGYVYVG

SEQ ID NO: 98283 - protein, 457 aa, Unknown
  Bacterial polypetide isolated from the Sargasso Sea
MTIIAVQQRPVSIITKYALNAPRYTSYPTALKFEPLQDDILPQALAVSKAPAVSLYVHIPFCKTLCYYCGCNKMVTRHNEKADEYLDYIEKEILSKRYLTDGRRAVSLHLGGGSPSFLSETQHTYLMYLLKKHFTFEAGAELSIELDPRNIDKHYLQNLKCLGYTRISFGLQDTDYNVQKTINRIQSTSHIAELVFEARSLGFDSVNLDLIYGLPNQSIETFSSTIAATKAMMPDRISLFSYAHLPERFAAQRKFAEETLPSSEEKAALYKLAVNSFTNIGYEMIGLDHFALSKDSLAIAKNKGELHRNFQGYTLRGDADLIGFGVSAISTVGNAFAQNAKELKEYYHRLDNHLPNAKVGLSLSVDDLIRRDVISSLMCNLAVDKQAIADKHHIIFDEYFASALNNLEELKEDGLIETTSRYIRVPESARIYIRAICARFDAYLNASEILSSYSKAI

SEQ ID NO: 98284 - protein, 208 aa, Unknown
  Bacterial polypetide isolated from the Sargasso Sea
AAQRKIKDADLPSAQQKLDILQETISSLTETGYQFIGMDHFARPDDELAIAQRKGVLHRNFQGYTTQGDTDLLGMGVSAISMIGDNYAQNQKELKRYYQQVDEQGNALWRGIALTRDDCIRRDVIKLLICNFRLDYAAVEQQWALNFADYFAEDLKLLAPLAKDGLVDVDEKGIQVTPKGRLLIRNICMCFDAYLRQKARMQQFSRVI

SEQ ID NO: 98285 - protein, 276 aa, Unknown
  Bacterial polypetide isolated from the Sargasso Sea
GYREQDEQFIFDLMAKAKAMGFVSTNIDLIYGLPHQTPETFAATMQRVLDLSPDRLSVFNYAHLPARFAAQRKIKDEHLPSPKQKLEMLHQTIETLTGAGYQYIGMDHFAKPDDELAKLQREGKLHRNFQGYTTQEECDLLGLGVSSISQIGDCYAQNQKDIRPYYEAIDKDGHALWKGCSLNRDDEIRRVVIKQLICHFDLDMAKMDEKLGIKFEEYFAEDLKLLQTFIDDKLVDVTDRKITISPTGRLLIRNICMCFDLYYRQKARQQQFSRVI

SEQ ID NO: 98286 - protein, 263 aa, Unknown
  Bacterial polypetide isolated from the Sargasso Sea
MAKAKAMGFVSTNIDLIYGLPHQTPETFAATMQRVLDLSPDRLSVFNYAHLPARFAAQRKIKDEHLPSPKQKLEMLHQTIETLTGAGYQYIGMDHFAKPDDELAKLQREGKLHRNFQGYTTQEECDLLGLGVSSISQIGDCYAQNQKDIRPYYEAIDKDGHALWKGCSLNRDDEIRRVVIKQLICHFDLDMAKMDEKLGIKFEEYFAEDLKLLQTFIDDKLVDVTDRKITISPTGRLLIRNICMCFDLYYRQKARQQQFSRVI

SEQ ID NO: 98287 - protein, 493 aa, Unknown
  Bacterial polypetide isolated from the Sargasso Sea
MCHRRLRRYYTMQPNRAFIYSKASKKREIIMRSGSADTLFRPDLLAKYGANGPRYTSYPTALQFRDDFDPTDYVRAASDPGASSSELSLYFHIPFCNTACFYCGCNKIATNNHRRARPYLDQLKLEMALQAALFDPARPVTQLHWGGGTPTFLSDDETAELMAATREHFMLAPDADAEFSIEIDPRTVTPATLVHLRNIGFNRLSLGVQDFDPVVQQAINRIQPLAMTADLLSAARTTGFHSVSVDLIYGLPHQTVSVFARTLETIIELAPDRLSVFGYAHMPHLFKMQRQIDGATLPPPETRIALLGLAIDMLTSASYVYIGMDHFARPSDELVRAQRNGTLQRNFQGYSTRADTDLVGFGVSSIGKVGDVYAQNAKDLPAYGAALDAGRLPIARGVRLTPDDRLRRDVITQLMCNLDLPFSHVEAAHGIRFADHFARELDALRPFERDGLLTIAADRLTIHPAGRMVVRNIAMAFDAYLGQTPQQRYSRTV

SEQ ID NO: 98288 - protein, 458 aa, Unknown
  Bacterial polypetide isolated from the Sargasso Sea
MKQPTQISWDQSMIEKYNYSGPRYTSYPTALEFDDSFTEQNLLTAIENSKSDKLSLYIHIPFCAKLCYYCGCNKVITRHAHKADQYIEYLSHEIIKRAPLFKHYTVTQMHWGGGTPTFLNPEQILKLTDLIKANFNFAAEGEFSIEVDPREIELSMLDTLKEAGFNRISIGVQDFNKEVQVAVNREQDEQFIFDLMAKAKAMGFVSTNIDLIYGLPHQTPETFAATMQRVLDLSPDRLSVFNYAHLPARFAAQRKIKDEHLPSPKQKLEMLHQTIETLTGAGYQYIGMDHFAKPDDELAKLQREGKLHRNFQGYTTQEECDLLGLGVSSISQIGDCYAQNQKDIRPYYEAIDKDGHALWKGCSLNRDDEIRRVVIKQLICHFDLDMAKMDEKLGIKFEEYFAEDLKLLQTFIDDKLVDVTDRKITISPTGRLLIRNICMCFDLYYRQKARQQQFSRVI

SEQ ID NO: 98289 - protein, 458 aa, Unknown
  Bacterial polypetide isolated from the Sargasso Sea
MKQPTQISWDQSMIEKYNYSGPRYTSYPTALEFDDSFTEQNLLTAIENSKSDKLSLYIHIPFCAKLCYYCGCNKVITRHAHKADQYIEYLSHEIIKRAPLFKHYTVTQMHWGGGTPTFLNPEQILKLTDLIKANFNFAAEGEFSIEVDPREIELSMLDTLKEAGFNRISIGVQDFNKEVQVAVNREQDEQFIFDLMAKAKAMGFVSTNIDLIYGLPHQTPETFAATMQRVLDLSPDRLSVFNYAHLPARFAAQRKIKDEHLPSPKQKLEMLHQTIETLTGAGYQYIGMDHFAKPDDELAKLQREGKLHRNFQGYTTQEECDLLGLGVSSISQIGDCYAQNQKDIRPYYEAIDKDGHALWKGCSLNRDDEIRRVVIKQLICHFDLDMAKMDEKLGIKFEEYFAEDLKLLQTFIDDKLVEIADRKITISPTGRLLIRNICMCFDLYYRQKARQQQFSRVI

SEQ ID NO: 98290 - protein, 140 aa, Unknown
  Bacterial polypetide isolated from the Sargasso Sea
NFDDEILEIECDILIPAAVGGVIKSNNANNIKAKIIVEGANSPTTLSADKILRGNGVVLIPDILANAGGVTASYFEWVQNTQNYLWKEKELHDRLIDVLTSAFEEVWIISEKNKVDLRTAALIKGIKKVAAAKLTRGLFP

SEQ ID NO: 98291 - protein, 171 aa, Unknown
  Bacterial polypetide isolated from the Sargasso Sea
MEQKKETTFKESVDLMYDRAVETLNLPIGLAEQIRTCNAVYQVRFGVKLKGVYKIFVGWRAVHSEHILPVKGGIRFAEIANQEEVEALAALMTYKCAIVNVPFGGSKGALKINPNDYDEEDLEKITRRFAHELIKKDLVNPNLNVPAPDMGTGEREMAWISDTFQNLYPNQ

SEQ ID NO: 98292 - protein, 237 aa, Unknown
  Bacterial polypetide isolated from the Sargasso Sea
RIQHNNILGPYKGGLRFHKNVDLNEVKALASLMSIKCALQDIPFGGAKGGIQINPNDYSNIDLEIITRGYTRAINKYIGPHYDIPAPDVGTNSQIMDWIMDEYNQINNVESKAIITGKSVECGGSLGRKEATGRGIGVIMNEIIDKNENLIKLEGFGNVGYHLVEYLNDLNENTDKIFSINTISDHTGHYKIDYFAFDKSKIINFTKFLLQYQEKNKSLKDIEKYSFNLINIDKDEY

SEQ ID NO: 98293 - protein, 264 aa, Unknown
  Bacterial polypetide isolated from the Sargasso Sea
ALGGVDGRTEATGRGVFYSILEFLNNDKDRKKSKLRREIEGQRIIIQGFGNVGFHAAELLYESGAKIIAVIERDGSVLNEKGIDVQKLKKHFTRKRTFEGFDGFSTARGHFLSKECDILIPAATEGVIHKDNAAKIKAKLIVEGGNGPVTADADEILNKNGITVIPDFYANSGGVIVSYFEWVKNLSKMRYGLMQERDQEKRQSNLVAALEQMTSNSFPTEMKDEFIKGASEIDLVRSGLEEKMKEGYYAIHETFHSDRKIKSF

SEQ ID NO: 98294 - protein, 226 aa, Unknown
  Bacterial polypetide isolated from the Sargasso Sea
MKNNTEPTFRQSVDTMYNRASRLIDLAPGLEEKIRVCNATYTVRFGVRLKGKIQTFTGYRSVHSEHIEPVKGGIRFAKSVNQDEVEALAALMTYKCALVEIPFGGSKGGLCIDPREYEDEELEIITRRFAYELAKRDLIHPSQNVPAPDMGTGEREMAWIADQYSRMNTTEINSRACVTGKPLNAGGISGRVEATGRGIQYALREFFNHKDDMKKAKLKGTLAGKK

SEQ ID NO: 98295 - protein, 75 aa, Unknown
  Bacterial polypetide isolated from the Sargasso Sea
AKRLRGEKGDIALPCATQNELNETDANTLVNSGCICVSEGANMPSTPEAIAVFQKAKILFSPGKASNAGGVATSG

SEQ ID NO: 98296 - protein, 117 aa, Unknown
  Bacterial polypetide isolated from the Sargasso Sea
MDKIIKQFLSQVSQKNQNEPEFMQAVTEVAETVIPYIVTQDIYYGQNILLRMVEPERVVSFRVAWIDDNEEIQVNRGYRIEMNSAIGPYKGGLRFHPSVNLSILKFLAFEQVSKTLL

SEQ ID NO: 98297 - protein, 330 aa, Unknown
  Bacterial polypetide isolated from the Sargasso Sea
LMTYKCSLMDLPFGGSKGALIVDPYRWKNEELERITRRFTFELAKRDLIHPSQNVPGPDMGTDENVMAWMADEYRRLNPTEIDAMAAVTGKPIAVGGIDGRTEATGRGVYYSILEFLKNKKDRQKSKLRQGLEDQKVIIQGFGNVGYHVASLLHQSGAKIIAIIERDGSVVNQDGIDVESLKKYFIKKRSFEGYDGYSKVRGRFLTKDCDILVPAATEGVINKNNASNIKAKLIVEGGNGPVTSDADKILRKKGITVIPDFYANSGGVIVSYFEWVKNLSKMRYGLMQEREVEKRSENLVNTLEAMTSSTFPSDFKDDYIKGSSEIDLVR

SEQ ID NO: 98298 - protein, 112 aa, Unknown
  Bacterial polypetide isolated from the Sargasso Sea
MSSKYQASIDNFMQSVIDKNPNEKEFLQAVEEVAEAVIPLIEETPKYKNSNILDRIVEPERVIMFRVPWLDDNGVTQVNRGFRVEFNSAIGPYKGGLRFHPSVNLSILKFLG

SEQ ID NO: 98299 - protein, 161 aa, Unknown
  Bacterial polypetide isolated from the Sargasso Sea
FAKSVNQDEVEALAALMTYKCALVEIPFGGSKGGLCIDPREYKDEELEIITRRFAYELAKRDLIHPSQNVPAPDMGTGEREMAWIADQYSRMNTTEINSRACVTGKPLNAGGISGRVEATGRGIQYALREFFNHRDDMKKAKLKGTLAGKKIIVQGLGNVG

SEQ ID NO: 98300 - protein, 221 aa, Unknown
  Bacterial polypetide isolated from the Sargasso Sea
MTCTDERIKNETELFNQGVIDRNPAEYEFHQAVREFTESVMPFVMSNEKYADGHILERMTEPDRIVIFRVCWENDEGHVCCNRAWRVQFNNAIGPYKGGLRFHPDVTQSILKFLGFEQVYKNALTGLPMGGAKGGSNFDPKGKSDREVMRFCQSLMTELSRHIGEDTDIPAGDIGVGAREISYLFGQYKRLNNRFVGTLTGKGLSFGGSLIRSEATGYGVV

SEQ ID NO: 98301 - protein, 161 aa, Unknown
  Bacterial polypetide isolated from the Sargasso Sea
MNYKSKQDFLDNVHSKFPNEKEFLQAVEEVIGSIWDTVQQNQNYLDGNILDRIVTPERVIIFRVPWVDDNGSVHVNLGYRIQFNSAIGPYKGGLRFHPTVNLGVLKFLAFEQIFKNSLTGLNMGGGKGGSDFNPKGKSDNEIMKFCQSFMTELSRHIGHNT

SEQ ID NO: 98302 - protein, 103 aa, Unknown
  Bacterial polypetide isolated from the Sargasso Sea
MYSSINDFMNKVKHKDPNEIEFHQAVHEVIDSLWDFLMSNREYIHAGVLDRIIEPERVITFRVPWRDDRGEVNVNRGYRVEFNSAIGPYKGGLRFHPSVNLSI

SEQ ID NO: 98303 - protein, 88 aa, Unknown
  Bacterial polypetide isolated from the Sargasso Sea
VAVPDILANAGGVIVSYFEWVQNRLGFKWSESRVNRRCDSIIKLGFNNVYKISKEYKVSLRIAAYISAIDKVAKTYKFRDGSFTFQKT

SEQ ID NO: 98304 - protein, 150 aa, Unknown
  Bacterial polypetide isolated from the Sargasso Sea
ISAKLIVEAANGPITYKANQILKRKKIFIIPDILANAGGVAVSYFEWVKNIRHIRFGRLEKRRNQLQLQNLIEAIEAMTGKSMPEKYKANFVNGIEEIDLIRSGLDDMMIDGFQSVKKEFTENDKISDFRTAAYKVAIEKIALSYDFIGL

SEQ ID NO: 98305 - protein, 140 aa, Unknown
  Bacterial polypetide isolated from the Sargasso Sea
MTKIFEKISDKNHEQVVYCNDPSSGLKAIIAIHNTVLGPALGGCRMYPYKSEEDALVDVLRLSRGMTYKASISNLNLGGGKAVIIGDPNSDKSEVLLRSFGKFVQSLGGKYITAEDVGMTVRDMEFIRMETDHVTGIKRA

SEQ ID NO: 98306 - protein, 309 aa, Unknown
  Bacterial polypetide isolated from the Sargasso Sea
EVPFRRDDGELDSVIGFRVQHNNTRGPFKGGIRYHEHVDIDEVRSLATLMTWKTSLLDIPYGGGKGGIGVDPTKFSKTELERMSRRFFRAIDPIIGVNVDIPAPDVNTNAQVMSWFMDEYSQIHGYSPAIVTGKPLELGGSEGREAATGKGTAIITRESAGKWDIDLQNSKIVIQGFGNVGSYAAKFLHEYGCKIIAVSDVTGGLFDPDGLDIPSLFEHNYKNRTIDGFKQGKKITNEELLALECDFLIPAALGSAINESNVDKLNCKVVVEAANGPVTGDAARSLHKRSIPVIPDILTNAGRCYCILL

SEQ ID NO: 98307 - protein, 169 aa, Unknown
  Bacterial polypetide isolated from the Sargasso Sea
MQYIEEVLQSVKESNPNEPEFYQAVEEVLSSINQVVEGNSEFQQQAILERLVEPERQAIFRVPWLDDDGKVQVNRGFRIEFSSTLGPYKGGLRFHPSVNQSVVKFLGFEQVLKNALTGLQLGGAKGGADFNPKGKSDNEIMRFCQSYMTELYRHIGANTDVPAGDIGVG

SEQ ID NO: 98308 - protein, 151 aa, Unknown
  Bacterial polypetide isolated from the Sargasso Sea
MSGKEFLESVDKVFDNAATVLKLPDYIATQIKSPNSTYKLNFGVKIRNRLFTFTGFRCVHSEHLEPVKGGIRYAIHADQSEVEALAALMTYKCALVDIPFGGSKGALIIDPKMYKSNELEKITRRFAQELIKRDLINPSQNVPAPDMGTGE

SEQ ID NO: 98309 - protein, 216 aa, Unknown
  Bacterial polypetide isolated from the Sargasso Sea
MTKIFEKISDKNHEQVVYCNDSSSGLKAIIAVHNTVLGPALGGCRMYPYKSEEEALVDVLRLSRGMTYKASISNLNLGGGKAVIIGDPNKDKSEVLLRSFGKFVQSLGGKYITAEDVGMTVHDMEFIRMETDHVTGIQRAMGGSGDPSILTALGVFVGIKAALTKKLNIQSVNGLKIGIQGFGKVGYYLCSHLKNEGAQIYGYDDNEESLERVKND

SEQ ID NO: 98310 - protein, 76 aa, Unknown
  Bacterial polypetide isolated from the Sargasso Sea
YFNHAGGVTVSYFEWVQNLQQFQWTEEEVNNKLEHKMVAAFNEVADMMNSKKTSMRMAAFAVAIDRVARSFEMRGV

SEQ ID NO: 98311 - protein, 188 aa, Unknown
  Bacterial polypetide isolated from the Sargasso Sea
MSVFEHPEFDNHEHVAFYADAATGLKAIIAIHNTHLGPALGGCRMWPYLNSSEALTDVLRLSKGMTYKAAMANLQQGGGKAVIIGDPRKHKSPEFMQAMGRFVESLSGQYITAEDSGITVDDLKAVATQTEHVAGTFAQYNALGESPTGNPAPSTAYGVFVGLKQTVKHVLNSDLNGVKVAIQGMGHV

SEQ ID NO: 98312 - protein, 164 aa, Unknown
  Bacterial polypetide isolated from the Sargasso Sea
MEQKKETTFKESVDLMYDRAVKTLNLPIGLAEQIRTCNAVYQVRFGVKLKGEYKIFVGWRAVHSEHILPVKGGIRFAEIANQEEVEALAALMTYKCAIVNVPFGGSKGALKINPNDYDEEDLEKITRRFAHELIKKDLINPNLNVPAPDMGTGRGKWLGYLTHP

SEQ ID NO: 98313 - protein, 270 aa, Unknown
  Bacterial polypetide isolated from the Sargasso Sea
PYKSEEDALIDVLRLSRGMTYKASISNLNLGGGKAVIIGDPNSDKSEVLLRSFGKFVQSLGGKYITAEDVGMSVHDMEFIRMETDHVTGIKRAMGGSGDPSILTALGVFVGMKAALKKRLNIKSLNGLKVGVQGFGKVGYYLCSHLNNEGVEIYGHDINEESLERVINEFGVKPVSADELISMDLDVFSPCAMGAVINPSTIESLKCSVIAGAANNQLEKEDRDSKLLQEKEIMYVPDYVINAGGLMNVANELQGYNKEKAKYQVEGIYY

SEQ ID NO: 98314 - protein, 170 aa, Unknown
  Bacterial polypetide isolated from the Sargasso Sea
MCAAPANEPTFRESVDLMFNRAAALMDLPPGLEEKIRVCNGTYTVRFGVRLRGQIHTFTGYRAVHSEHMEPVKGGIRFASAVDQDEVEALAALMTYKCALVEAPFGGSKGGLRIDPRDYDEHELEQITRRFAYELIKRDLINPSQNVPAPDMGTSEREMAWMADQYARMN

SEQ ID NO: 98315 - protein, 251 aa, Unknown
  Bacterial polypetide isolated from the Sargasso Sea
IPYGGGKGGICVDPSTLSSLELERLSRRFFRAINPIIGINRDIPAPDVNTNPQIMAWFMDEYGMTNGHTPGIVTGKPLELGGSLGRNAATGRGTAIIARETANLLNMDLDGASVVIQGFGNVGSFAGKFLSEMGSKIIAVSDVNGGLYDPDGLDIPAMIDHNLKNKTIKGFSQGKKISNEKILNLECDFLIPAALGGVIHKMNLDKLKCKVIIEAANGPVTPPADDVLFKKGIHVIPDILTNAGGVTVFLF

SEQ ID NO: 98316 - protein, 415 aa, Unknown
  Bacterial polypetide isolated from the Sargasso Sea
TIRFGVKLSGGIKVFTGWRAVHSEHLEPVKGGIRYSPAVSSTEVEAMAMLMTFKNAVIDVPFGGSKGGLKINPNKYSEEDLEKITRRFTEELVKRGLISPSLNVPAPDMGTGKKEMAWIADEYKRLNPHDINAYACVTGKPENMGGVDGRTEATGRGLFYALNSFFNSQDIKKTKIKGKLSSQKIILEGLGKVGYFAARALRDHGCKIIGVIEKDQSFFNSEGLDIDAIRNWLIESGDPKNYSNQVELKSREEVFSENCDIYIPAATEGTITDANYNLLNAKIICEGANGPITSKADQLLTKKGILIIPDLYANAGGVAVSYFEWVRNLQHMRFGRMEKRRKEYENASLISVIESTTGAKVSSQTKDLLNQGPSEIDLVRSGLEDMMTEAYENMSEIGIKIITIHYVRLLLFTLS

SEQ ID NO: 98317 - protein, 467 aa, Unknown
  Bacterial polypetide isolated from the Sargasso Sea
MGSDNNVFLKSISKMFDDAVKILGVKRGLANQIKSCNSTHTIRFGVKLDSGIKTFTGWRAVHSEHLEPVKGGIRYSPHIKTSEIEAMAALMTFKNAVIDVPFGGSKGGLKIDPKKYSEEELEKITRRFTEELVKRGLISPSLNVPAPDMGTGKREMAWIADEYKRLNPHDINAFACVTGKPANMGGVDGRTEATGRGIFYALNSFFNSVDIKKTKIKGPLKSQKIIVEGLGKVGYYAATALRDHGCKIIGVIEHHYSFYNSKGLDVDLIKKWLTESGDPKDYPNQKELKSREEVFSKETDIFIPAAREGTVTEENQSNLNAKIVCEGANGPLTSRADEELTKRGVLIIPDLYANAGGVAVSYFEWVRNLSHMRFGRMEKRRKEYENASLISIIENSTGSRVSSKTKDILKQGPTEIDLVRSGLEDMMTEAYENMSEIWNENDYPSLRTTAYIYSIKKLVESYKSIGI

SEQ ID NO: 98318 - protein, 424 aa, Unknown
  Bacterial polypetide isolated from the Sargasso Sea
MVKHDPFANATKQVNDACDVLKIKDKGIREYLAMPNKVLRVKIPVKMDNGKIRVFTGFRSQHNNDRGPYKGGIRYFDPEGGVQYMEREVMALSSWMTWKCAVVDVPLGGGKGAIFVNPKKDKLSEGELERLTRGFAYKIGEIIGPQKDIPAPDVYTTGKEMTQIMDTWSKMNGNKYSPGVITGKPIPMGGSLARNVATGLGTAYCVRESAKILKIKLKGAKVVLQGFGNASTFAGEYLEKMGAKCIGASDSKGSIIVPNGFKVSKLIEHKQKKGSVVGFPGSKKVSTEQLLTTKCEILIPGALENQIDAKLAKKLQCRIIGEAANGPTLPEADPIIYNKKIMVIPDILANSGGVCISYLEWVQNNMGYYWSFDEVAGKMEANITRGLKDTHDISKKYKIDMRRAAMVLAVQRVMEAFEHKGIWP

SEQ ID NO: 98319 - protein, 380 aa, Unknown
  Bacterial polypetide isolated from the Sargasso Sea
MSYKCAIINVPYGGSKGGLKIDPSKWEKRELEKITRRFAQELIKRDLISPSMNVPAPDIGTSSKEMAWIADEYRKIHPADINGAACVTGKPENKNGLIGREEATGRGVQFIIREFFRNTDLLKKVKLDNDLSTKTFILQGFGNVGYHASKFLTEDDGVKLIAIAEHNGGIYNKDGINVEDAKKYFVKHKSFKNYPKADFVKGSSLLIKRKCDILIPAARENVITEKNAADISANLIVEAANGPISYEGNKILNKNKKFIIPDILANGGGVAVSYFEWVKNIRHIRFGRLEKRRNQLQLNNLIEAIETMTGKTMPKKYKDNFANGIEEIDLVRSGLDDMMIDGFQSVKKVFLENKKIPDFRTAAFKTAIEKIALSYDFIGL

SEQ ID NO: 98320 - protein, 166 aa, Unknown
  Bacterial polypetide isolated from the Sargasso Sea
RKGLNIPELFKHIAKEKTVKGFSGGDPFVGEILELECDVLIPAAVGGVITSTNASNIKANVVVEGANSPTTLNADKILRDNNVLIIPDILANAGGVTGSYFEWVQNTQNYLWKEKDLYEKLIDVLESAFEEIFIISEKNNCDLRTAALIKGIKRVAAAKLTRGLFP

SEQ ID NO: 98321 - protein, 242 aa, Unknown
  Bacterial polypetide isolated from the Sargasso Sea
MVKHDPFANATKQVNDACDVLKIKDKGLREYLAMPNKVLRVKIPVKMDNGKIRVFTGFRSQHNNDRGPYKGGIRYFDPEGGVQYMEREVMALSSWMTWKCAVVDVPLGGGKGAIFVNPKKDKLSEGELERLTRGFAYKIGEIIGPQKDIPAPDVYTTGKEMTQIMDTWSKMNGNKYSPGVITGKPIPMGGSLARNVATGLGTAYCVREASKILKIKLKGAKVVLQGFGNASTFAGEYLEKMG

SEQ ID NO: 98322 - protein, 404 aa, Unknown
  Bacterial polypetide isolated from the Sargasso Sea
MGSDNNVFLKSISKMFDDAVKILGVKRGLANQIKSCNSTHTIRFGVKLDSGIKTFTGWRAVHSEHLEPVKGGIRYSPHIKTSEIEAMAALMTFKNAVIDVPFGGSKGGLKIDPKKYSEEELEKITRRFTEELVKRGLISPSLNVPAPDMGTGKREMAWIADEYKRLNPHDINAFACVTGKPANMGGVDGRTEATGRGIFYALNSFFNSVDIKKTKIKGPLKSQKIIVEGLGKVGYYAATALRDHGCKIIGIIEHHYSFYNSKGLDVDLIKKWLTESGDPKDYPNQKELKSREEVFSKETDIFIPAAREGTVTEENQSNLNAKIVCEGANGPLTSRADEELTKRGVLIIPDLYANAGGVAVSYFEWVRNLSHMRFGRMEKRRKEYENASLISIIENSTRITSVLQ

SEQ ID NO: 98323 - protein, 414 aa, Unknown
  Bacterial polypetide isolated from the Sargasso Sea
MATNALKLVDNSIKRVFNIFGDLNVNVLHHLNKSNNEIKVNFASKLNNNQLRTFTGYRVQHNNILGPYKGGLRFHECVDINEVNALAKWMTYKNALQNIPFGGAKGGISINPNDYSKDELQIISRDFLKSIYNYIGPEIDIPAPDVGTNSMVMDWMTDEYLNINNISSKGVFTGKSVECGGINGREGATGLGVALCVKEWAKINNINLEGKTFILQGLGNVGYHAARILSSYGMVLIGIGNANGYWKNTDGFNIYQIKKYIEEHGEDLNNYCSDSIDKSDFFSIECDVIIPAALELQITEEEAKVINTNLIVEAANGPTDEIAEEILLDKNVEIIPDILANSGGVICSYYEWLQNINHTYNYYNINDILSNHMENKCKEINNLMKIHDQKSMRIICYYLALKSIQGVYENKGLL

SEQ ID NO: 98324 - protein, 433 aa, Unknown
  Bacterial polypetide isolated from the Sargasso Sea
MNNFLLDTTKYVNKALKYTDLSDGLSNKIITCNSTYTVRFGVRLRGKIFTFEGWRSVHSEHMEPTKGGIRFDMQTNAEEVEALAALMSYKCAIINVPYGGSKGALKIDPSQWNKYELEKITRRFAQELIKRDLISPSMNVPAPDIGTSSREMAWIADEYRKIHPADINGAACVTGKPANKNGLIGREEATGRGVQYIVREFFRNPDLLKLVKLNNDLSTKTFILQGIGNVGYNLSKFLTEDDGVKLIGISELNGGIFNEDGINVEHAKKYFTKHKSFENYPKASFIKDSSLLLKRECDILIPAARENVITEKNAGDITAKLIVEAANGPISYKGNQILNRKKIFVIPDILANGGGVAVSYFEWVKNIRHIRFGRLEKRRNQLQINNLIEAIEAMTGKSMPKKYKASFMNGIEEIDLIRSGLDDMMIDGFQSGK

SEQ ID NO: 98325 - protein, 467 aa, Unknown
  Bacterial polypetide isolated from the Sargasso Sea
MGSDNNVFLKSISKMFDDAVKILGVKRGLANQIKSCNSTHTIRFGVKLESGIKTFTGWRAVHSEHLEPVKGGIRYSPHIKTSEIEAMAALMTFKNAVIDVPFGGSKGGLKIDPKKYSEEELEKITRRFTEELSKRGLISPSLNVPAPDMGTGKKEMAWIADEYKRLHPHDLNAFACVTGKPENMGGIDGRTEATGRGIFFALKSFFDSVDIKKTKIKGSLKSQKIIVEGLGKVGYYAAAALREHGCKIIGVIEHHHSFFNEKGLDIDLIKKWLSESGDAKDYPNQNELKTRDEVFEKKSDIFIPAAREGTVTEENQAKLNTKIICEGANGPLTSRADEELSKRGVLIIPDLYANAGGVAVSYFEWVRNLSHMRFGRMEKRRKEYENASLISIIENSTGSRVASKTKDILKQGPSEIDLVRSGLEDMMAEAYENMSEIWNDNNYPSLRTTAYIYSIKKLVESYKSIGI

SEQ ID NO: 98326 - protein, 405 aa, Unknown
  Bacterial polypetide isolated from the Sargasso Sea
SEHLEPVKGGIIYSPHIKTSEIEAMAALMTFKNAVIDVPFGGSKGGLKIDPKKYSEEELEKITRRFTEELVKRGLISPSLNVPAPDMGTGKREMAWIADEYKRLNPHDINAFACVTGKPANMGGVDGRTEATGRGIFYALNSFFNSVDIKKTKIKGPLKSQKIIVEGLGKVGYYAATALRDHGCKIIGVIEHHYSFYNSKGLDVDLIKKWLTESGDPKDYPNQKELKSREEVFSKETDIFIPAAREGTVTEENQSNLNAKIVCEGANGPLTSRADEELTKRGVLIIPDLYANAGGVAVSYFEWVRNLSHMRFGRMEKRRKEYENASLISIIENSTGSRVSSKTKDILKQGPTEIDLVRSGLEDMMTEAYENMSEIWNENDYPSLRTTAYIYSIKKLIESYKSIGI

SEQ ID NO: 98327 - protein, 121 aa, Unknown
  Bacterial polypetide isolated from the Sargasso Sea
MHSSIEEFMSHIEAKNQGEKEFHQAVHEVVDSLWDFLNDHQDYVHAKILERITEPERVIMFRVPWRDDRGDTQVNRGFRVEFNSAIGPYKGGLRFHPSVNLGILKFLGFEQVFKNSLTTLP

SEQ ID NO: 98328 - protein, 355 aa, Unknown
  Bacterial polypetide isolated from the Sargasso Sea
MTKIFEKISDKNHEQIVYCNDPSSGLKAIIAVHNTVLGPALGGCRMYPYKSEEDALVDVLRLSRGMTYKASISNLNLGGGKAVIIGDPNKDKSEVLLRSFGKFVQSLGGKYITAEDVGMSVHDMEFIRMETDHVTGIKRAMGGSGDPSILTALGVFVGMKAALKKRLNIQSISGLKIGVQGFGKVGYYLCSHLKNEGAHIYGNDINKENLDRVEEEFGVIPVDSDELMSMDLDVFSPCAMGAVINPSTIENLKCSVIAGAANNQLEKEDRDSKLLKEKEIMYVPDYVINAGGLMNVANELQGYNKEKAKYQVEGIYYILMRIFDYAANNNISTLEAANLLAERRIQDYIKWNHQQ

SEQ ID NO: 98329 - protein, 272 aa, Unknown
  Bacterial polypetide isolated from the Sargasso Sea
RGVFYSILEFLNNDKDRKKSKLRREIEGQRIIIQGFGNVGFHAAELLYESGANIIAVIERDGSVLNEEGIDVQKLKKHFTRKRTFEGFDGFSTARGHFLSKECDILIPAATEGVIHKDNAAKIKAKLIVEGGNGPVTADADEILNKNGITVIPDFYANSGGVIVSYFEWVKNLSKMRYGLMQERDQEKRQSNLVAALEQMTSNSFPTEMKDEFIKGASEIDLVRSGLEEKMKEGYYAIHETFHSDRKIKSFRMAAMVIAVKKVAEAYKYLGI

SEQ ID NO: 98330 - protein, 354 aa, Unknown
  Bacterial polypetide isolated from the Sargasso Sea
GIRYSLSSSEGEVEALAALMTYKCSLMDLPFGGSKGALIVDPHHWKHDELERITRRFTNELAKRDLIHPSQNVPGPDMGTDENVMAWMADEYRRLYPTEIDAMASVTGKPIALGGVDGRTEATGRGVFYSILEFLNNDKDRKKSKLRREIEGQRIIIQGFGNVGFHAAELLYESGAKIIAVIERDGSVVNEEGIDVQKLKKHFTRKRTFEGFDGFSTARGHFLSKECDILIPAATEGVIHKDNAAKIKAKLIVEGGNGPVTADADEILNKNGITVIPDFYANSGGVIVSYFEWVKNLSKMRYGLMQERDQEKRQSNLVAALEQMTSNSFPTEMKDEFIKGASEIDLVRSGLEEK

SEQ ID NO: 98331 - protein, 292 aa, Unknown
  Bacterial polypetide isolated from the Sargasso Sea
VTGKPVSKGGIAGRTEATGRGVQYALQAFFDQKRDVAKTGLKPGLANKRIIVQGLGNVGYHAALFLSTEDNAIITHVLERDGSVINEAGINIQKLREYILDTGSVKGYQGFVAKGIELLESDADILIPAAMELVITEENAASIKAPLIIEAANGPVSAEADDILNKMGKVIIPDMYANAGGVTVSYFEWIKNLSRIRFGRMQRRAEENRFGALIEGINTLTGSNFPEDLAKQIIQGGKEIDLVRSGLEDTMRNAYEVISETWNAHDEVKDLRTAAMMVAIKRIAQSYSSMGI

SEQ ID NO: 98332 - protein, 129 aa, Unknown
  Bacterial polypetide isolated from the Sargasso Sea
FGQYKRLKNEFSGVLTGKGMSWGGSLIRPEATGYGVVYFIDEMLKPQGDTLKDKKVTISGSGNVAQYATEKCIDMGAKVLTLSDSSGFIYDKDGIDSEKLQYIMELKNVKRFRISEYLKKYSKAEYYPK

SEQ ID NO: 98333 - protein, 284 aa, Unknown
  Bacterial polypetide isolated from the Sargasso Sea
GGISGRTEATGRGVEYALRAFFDHEEDVAKTGLTAGLKGKRVIVQGLGNVGYHAALFLSKEDGALITHVLEKDGAVIDSNGIDIEKLRNHLLKTGTIKGFDGFTDMGSEALESDADILIPAAMELVITKENAHRIKTPLIIEAANGPISSEADEILCQNGKIIIPDLYANAGGVTVSYFEWIKNLSRIRLGRLQRRAQENQVMAIIEGVEELTGREFPEDKKSRSIQGSAEVDLVRSGLEDTMRNTYEVISDLWNQDKNVPDLRTAAMMIAVKRIAQSYASLGI

SEQ ID NO: 98334 - protein, 197 aa, Unknown
  Bacterial polypetide isolated from the Sargasso Sea
RVGNVGSFAAKFLHESECKVIAISDVTGGLHEPGGLDIPSLIDHVKEHGVIEKSGQGESISNEDILSLDCDFLIPAALGGVIHKMNAENLNCRFVIEAANGPTTPPGDEILFSKSIPVIPDILTNAGGVTVSYFEWVQNLQQFRWEEDEVNSKLEAKMTSAYKEVTTLRKEKNVSFRTAAFMVGIDRVARSVELRGF

SEQ ID NO: 98335 - protein, 155 aa, Unknown
  Bacterial polypetide isolated from the Sargasso Sea
SNAARIKAPLIAEAANGPVTFEADSILRKKGTVILPDAFLNAGGVTVSYFEWIKNLARIRFGRLERRHEEMKGKLIVETLETMLKAKVPNDLKNKLIEGADELDLVRSGLDDSMRDAYKNIRETFYSMNNVDDFRTASYVVAIKTIAKGYESMNL

SEQ ID NO: 98336 - protein, 320 aa, Unknown
  Bacterial polypetide isolated from the Sargasso Sea
GANFNPKGKSENEVMRFCQSFMTELYRHIGADVDVPAGDIGVGAREIGYMFGQYKRITNHFTGVLTGKGIEYGGSEMRPEATGYGAAYFLEEMLKTKGDSIEGKNVLISGSGNVATFAAEKIIHRGGKVLTLSDSAGFVHDKDGIDEEKLKWVMELKNVRRGRISEYADKFSGAEYHAGKRPWGVAADLAMPCATQNEILEDDAKTMLSNGIMAVSEGANMPTEIEGIHHFLAAKILFAPAKAANAGGVGMSGLEMSQNSERRSWSNEELSKMLRDLMIGIHKNCNDAGMQKDGWCNYMAGSNIAGFKKSADAMMAFGVV

SEQ ID NO: 98337 - protein, 318 aa, Unknown
  Bacterial polypetide isolated from the Sargasso Sea
TALAAWMTWKCAVVDIPYGGAKGGVKCNPKEMSTSELERLTRAYTQSMHDVFGPDKDIPAPDMGTGPDQMAWLMDEYSRARGTTVNAVVTGKPIILGGSVGRIEATGRGVMVSTLAALTKMKINPFKATVAIQGFGNVGSWAAQLLKERGCKIIAISDVSGGYYNEEGIDVGKAITHKNENNGVLENFDGGKKITNEELLILDVDVLIPAALENTITEKNANKIKAKLIVEGANGPTSHEADPILEKKGVIAVPDILANAGGVIVSYFEWVQNRLGFKWTKNRVYRRSDSIIKQAFNNVFAISKKYNISLRTAAYIAA

SEQ ID NO: 98338 - protein, 186 aa, Unknown
  Bacterial polypetide isolated from the Sargasso Sea
FLHEYGCKIIAVSDVTGGLYDPDGLDIPSLFDFNYANKTIDGFDQGEKISNDELLALECDFLIPAALGSAINEKNVDSLNCKVIIEAANGPVTGSAANKLWDRKVGIIPDILTNAGGVTVSYFEWVQNLQQFKWTEEDVNKKLEDKMVVAFDEVFELKEKKKVPMRIASFMVAIDRVHKAYNLREG

SEQ ID NO: 98339 - protein, 294 aa, Unknown
  Bacterial polypetide isolated from the Sargasso Sea
MTYKCALVEVPFGGSKGGLIINIKKWSEEELERITRRFTQELAKRDLIHPSQNVPAPDVGTGEREMAWMADEFRRLNPTDLNAWACVTGKPVNKGGISGRTEATGRGVKFALKAFFQNDNDVKKTGLTPGLKGKRIIVQGLGNVGYYAAKFLSDEDGAKVTHVIERDGSIVNHKGIDISSLKKHLIVKGTIKGFNGFIEAGAEILEEEADILIPAAMELVINEENANRIKVPLIVEAANGPVSSSADEILNQRGVIIIPDLYANAGGVTVSYFEWIKNLSRIRLGRLQRRAQKN

SEQ ID NO: 98340 - protein, 205 aa, Unknown
  Bacterial polypetide isolated from the Sargasso Sea
KGAKVVIQGFGNVGSYTAKFLDEYGCKIIGVSDISGGLYDPNGFNVPELFDYNYKNRTIDGFEQGKKISNEELLALECDFLIPAALGSAINESNVDSLNCKVIIEAANGPVTGEAANKLWKRKIAIIPDILTNAGGVTVSYFEWVQNLQQFKWTEEEVNKKLEDKMVQAFKEVHDVKVKQKIPMRIASFMVAIDRVERSYTLRGG

SEQ ID NO: 98341 - protein, 128 aa, Unknown
  Bacterial polypetide isolated from the Sargasso Sea
MEKIIKQFLSEVNKRNQNEPEFMQAVTEVAETVIPYIVTKKIYYGQNILLRMVEPERVVSFRVAWIDDNEEIQVNRGYRIEMNSAIGPYKGGLRFHPSVNMSILKFLAFEQVFKNALTTLPMGGGKGG

SEQ ID NO: 98342 - protein, 220 aa, Unknown
  Bacterial polypetide isolated from the Sargasso Sea
FVLQEFLNDIKIFPQKARTVIQGFGNVGSWFSALASANRIPVIAVADHLGGVVSYDGLDINALWDYAKTNGTVAGFTGGEKCLPEDIFSIEADILVPAAIENVITENVAKSISHKVILEAANHPTTPEADELLAERGITVLPDILVNGGGVTVSYFEWTQNLQQFSWQEEQVNNELKLRMKAAYNSVAEKVRNSGLTFREAAFEIAVEKVTETAKLRGFV

SEQ ID NO: 98343 - protein, 177 aa, Unknown
  Bacterial polypetide isolated from the Sargasso Sea
MAVSDHVDLQGFMDGVKRRNPGENEFHQAVYEVAQYIFDYIKDKEIYHQHQILRRIAEPDRVVSFRVCWEDDKGNVRVQRGYRIQNNNAIGPYKGGLRFHPSVNQSILKFLAFEQTFKNSLTGLPMGGGKGGSDFNPKGKSDNEVMRFCQSFMTELYRHVGVDVDVPAGDIGVGARE

SEQ ID NO: 98344 - protein, 236 aa, Unknown
  Bacterial polypetide isolated from the Sargasso Sea
MVGFHAALFLSTEDNSKITHVMERDGAVINTDGIDILSLRKHLAREKTIKGYKGFVESGIEILEEEADIIIPAAMELVITKDNAARIKAPLIIEAANGPVSAEADEILTRRSVVIIPDLYANAGGVTVSYFEWIKNLSKIRLGRLQRRAQENQIRILVDGIEKMTGKSFPKSNLYEALQGGSELDLVRSGLEDTMRNTYRTISEVWNDEKTTGSLRTSAMMVALRRVAQSYSSLGI

SEQ ID NO: 98345 - protein, 177 aa, Unknown
  Bacterial polypetide isolated from the Sargasso Sea
MELVIFLGGLYDPNGFNLPELFDYNYKNRTIDGYEQGKKISNEELLALECDFLIPAALGSAINESNVDSLNCKVIIEAANGPVTGEAANKLWKREIAIIPDILTNAGGVTVSYFEWVQNLQQFKWTEDEVNKKLEYKMVQAFKEVHDLKVKQKVPMRIASFMVAIDRVSTAYTLREG

SEQ ID NO: 98346 - protein, 131 aa, Unknown
  Bacterial polypetide isolated from the Sargasso Sea
FILRKKGTVILPDAFLNAGGVTVSYFEWIKNLARIRFGRLERRYEEMKGKLIVETLETMLKAKVPNDLKNKLIEGADELDLVRSGLDDSMRDAYKNIRETFYSMNNVDDFRTASYVVAIRTIARGYESMNL

SEQ ID NO: 98347 - protein, 288 aa, Unknown
  Bacterial polypetide isolated from the Sargasso Sea
VNLGEVTALSILMSWKSAIVGLPYGGAKGGVAIDPRPLSRAEKQRITRRYTAELLPIIGVDKDIPAPDMGTDEQTMAWIMDTYSNFVGSPQPGIVTGKPASLGGSITRREATGRGAVAIASAAMEKLNKKYSESSVVVQGFGNVGRYAALASYERGAKVIAVNDLSGAIYNEKGLNIPELFKHIAKEKTVKGFSGSDAFVGEILELECDVLIPAAIGGVITSSNAGNIKANVIVEGANSPTTLNANKILRENNVLIIPDILANAGGVTGSYFEWVQNYSKLSWKEKDL

SEQ ID NO: 98348 - protein, 129 aa, Unknown
  Bacterial polypetide isolated from the Sargasso Sea
PSATQNELSGKDAKTLVKNGVKAVGEGANMPCTPEAIRILREAGILFGPGKAANAGGVATSALEMQQNASRDRWSFAQTEERLAQIMQSIHDRCAETADEYGAPGDYVLGANIAGFVRVAEAMRMLGVI

SEQ ID NO: 98349 - protein, 268 aa, Unknown
  Bacterial polypetide isolated from the Sargasso Sea
ALKAFFDHPKDVEKTGLSQGLAGKKIIVQGLGNVGYHAALFLSEEDKCLITHVIERDGSIINSNGIDIKELKNYIITNGSVKGYKGFVDKGSEILEEEADILIPAAMELVINETNANRIKTPLIIEAANGPVSSNADEILNKKGIIIIPDLYANAGGVTVSYFEWIKNLSRIRLGRLQRRAQENQINVLIQAMENMTGKNFPEEYKEQAIQGASEVDLVRSGLEDTMRNSYAVISDVWNKNKNVSDLRTAAMMVAVKRVAQSYSSLGI

SEQ ID NO: 98350 - protein, 228 aa, Unknown
  Bacterial polypetide isolated from the Sargasso Sea
DVNTNPQIMAWFMDEYGMINGHTPGIVTGKPVELGGSLGRNAATGRGTAIIARETANLLNMDLNGAKVVIQGFGNVGSFAGKFLNEMGSKIIAVSDVNGGLFDLEGLDIPSLIKHNEKNKTIKGFSQGKAISNDEILNIDCDFLIPAALGGVIHKMNVDKLNCKVIIEAANGPVTPPADDILFKKGIHVVPDILTNAGGVTVSYFEWVQNLQQFQWTEDEVNAKLEDK

SEQ ID NO: 98351 - protein, 73 aa, Unknown
  Bacterial polypetide isolated from the Sargasso Sea
NAGGVTVSYFEWVQNLQQFKWTEDEVNKKLEDKMVRAFHEVYSMKKERGVAMRIASFMVSIDRVHSAYNLREG

SEQ ID NO: 98352 - protein, 313 aa, Unknown
  Bacterial polypetide isolated from the Sargasso Sea
GGIRYDLDVNQEEVEALAALMTYKCSLVEVPFGGSKGGLIINPKEWNEQELEKITRRFTQELAKRDLIHPSQNVPAPDVGTGEREMAWMADEYRRLNPTDLNAWACVTGKPVNKGGISGRTEATGRGVKYALNAFFDTAEDVKKTSLTPTLKGKRVIIQGLGNVGYHAALFLSKEDNAIITHVLERDGGIVDEDGIDVIALRQHIVSTGSIKDFKGYIKAGSELLEAEADILIPAAMELVITKDNASKIKAPIVVEAANGPLSADADEILNKKGKVIIPDLYANAGGVTVSYFEWIKNLSRIRFGRLQRRAQE

SEQ ID NO: 98353 - protein, 292 aa, Unknown
  Bacterial polypetide isolated from the Sargasso Sea
AGGIAARVEATGRGVQYALREFFRHPEDVRAAGLSGRLDGKRVVVQGLGNVGYHAAKFLSEEDGALITGIIEHDGALYDPKGLNVDRVRDWLVRHGGLQGYPEANSVADGEVVLTSECDILVPAALEGVINLSNAHHIKANLIIEAANGPITAGADDILRGRGTVIIPDLYANAGGVTVSYFEWVKNLGHIRFGRLQRRQEEARHQLVLDELERLDTAMGDAWNLSPEFREKYLRGADELELVRSGLDDTMRIAYQSMREVWHGRDDVTDLRTAGFIVAIQRVAQSYRAKGL

SEQ ID NO: 98354 - protein, 200 aa, Unknown
  Bacterial polypetide isolated from the Sargasso Sea
MALKTHLDETGTIKDFNGFVDQGSESLEAEADILIPAAMELVITKKNVDRIKVPLIIEAANGPIASDADEILSKRGVVIIPDLYANAGGVTVSYFEWIKNLSRIRLGRLQRRSQENQISILLDGIEAMTGKSFSEETRIGSIKGASELDLVRSGLEDTMISTYETISEVWNNEEFASDLRTAAMMVAVNRVVQSYSSLGI

SEQ ID NO: 98355 - protein, 234 aa, Unknown
  Bacterial polypetide isolated from the Sargasso Sea
GFHASLFLSEEDKCIVTTVIERDGVVYNEKGINIRELKHHMQQTGGTKGFDGYQDGGKEYLLNDCEILIPAAMEGVITKENANKIKANLIIEAANGPITYHADKILEKMGVVIIPDMYANAGGVTVSYFEWVKNLTHIRFGRMQRREVEKQNLSIIEAVEKMTGKNFPSELRNNVMQGPTELSLVRSGLDDTMRIGYKAMSDKFHSSEKIKSLRMASMIIAIEKVSEAYVSLGI

SEQ ID NO: 98356 - protein, 467 aa, Unknown
  Bacterial polypetide isolated from the Sargasso Sea
MTNKFLSDTTKYVDKALKFTNLSDGLANKIITCNSTYTVRFGVRLRGEIFTFEGWRSVHSEHMEPTKGGIRFDMATHAEEVEALAALMSYKCAIINVPYGGSKGGLKIDPSKWEKRELEKITRRFAQELIKRDLISPSMNVPAPDIGTSSKEMAWIADEYRKIHPADINGAACVTGKPENKNGLVGREEATGRGVQFIIREFFRNPDLLKKVKLDNDLSTKSVILQGFGNVGYHASKFLTEDDGVKLIAIAEHNGGIYNKDGINVEHAKKYFVKHKSFKNYPKADFVKDSSLLIKRKCDILIPAARENVITEKNAADISANLIVEAANGPISYKGNQILNKNKKFIIPDILANGGGVAVSYFEWVKNIRHIRFGRLEKRRNQLQLNNLIEAIETMTGKTMPKKYKDKFANGIEEIDLVRSGLDDMMIDGFQSVKKVFLENKKIPDFRTAAFKTAIEKIALSYDFIGL

SEQ ID NO: 98357 - protein, 466 aa, Unknown
  Bacterial polypetide isolated from the Sargasso Sea
MNNFLLDTNKYVNKALKYSGLSDDLANKIITCNSTYTVRFGVRLRGKIFTFEGWRSVHSEHMEPTKGGIRFDMDTHAEEVEALAALMSYKCAIINVPYGGSKGGLKIDPSQWESRELEKITRRFAQELIKRDLISPSMNVPAPDIGTSSKEMAWIADEYRKIHPADINGSACVTGKPPSKNGLVGREEATGRGVQYIVREFFRNPDLLKLVKLDNDLSTKSFILQGFGNVGYHLSKFLTEDDGVKLIGISEFNGGIYNEDGINVEHAKKYFTKHNSFENYPKATFIKDSSLLLKRKCDILIPAARENVITEKNAEDISANLIVEAANGPISYKGNQILNRKKIFVIPDILANGGGVAVSYFEWVKNLRHIRFGRLEKRRNQIQLNNLIEAIESMTGKTMPAKYKTNFHNGIEEIDLIRSGLDDMMIDGFQTVKKEFIETDKITDFRTAAFKAAIEKIALSYDFIGL

SEQ ID NO: 98358 - protein, 427 aa, Unknown
  Bacterial polypetide isolated from the Sargasso Sea
MSTKEFLKSVDTIFDDAAKLLKLPYGLANKIKLANSTYTVRFGVKLKGKIYTFTGYRSVHSEHMEPVKGGIRYASYADQDEVEALAALMSYKCALMEIPFGGSKGALVINPYEWGESELEKITRRFTQELAKRDLIHPSQNVPAPDMGSGEKEMAWIADEYRRLNPSEITARACVTGKPVNKGGISGRVEATGRGVQFGLREFFRNKNDVKLAKLDGSLEGKRVIIQGFGNVGYHAALFLSEEDNAKITTVIERDGVIYNENGINIRDLKNHMIETGGTVGFEGYNKSNTKFLFNDCEILIPAAMEGVITKENANLVKANLIIEAANGPITYEADKILEQNGVVIIPDMYANAGGVTVSYFEWVKNLTHIRFGRMQRREVENQNLSIIKAVEKMTGKEFPDDLKASVMQGPTELSLVRSGLDDTMRA

SEQ ID NO: 98359 - protein, 466 aa, Unknown
  Bacterial polypetide isolated from the Sargasso Sea
MNNFLSDTTKYVNKALKYSDMSAGLANKIITCNSTYTVRFGVRLRGQIYTFEGWRSVHSEHMEPTKGGIRFDLATNADEVEALAALMSYKCAIINVPYGGSKGALKINPNSWDVKELEKITRRFAQELIKRDLISPSMNVPAPDIGTSSREMAWIADEYRKIHPSDINGSACVTGKPTSKNGLVGREEATGRGVQFIVREFFRNPELLKKVKLDEDLSTKSFILQGFGNVGYHLSKFLTEDDGLNLIGIAEYNGGIFNENGINVEHAKKYFDKHNSFENYSKATFVKDSTLLLKRRCDILIPAARENVITEKNASDILAKLIVEAANGPISYKGNQILNKKKVFVIPDILANGGGVAVSYFEWVKNLRHIRFGRLEKRRNQIQLNTLIEAIETMTGKSMPEKYKEKFVDGIEEIDLIRSGLDDMMIDGFQNVKEEFLKNEKISDFRTAAYKTAIEKIALSYEFIGL

SEQ ID NO: 98360 - protein, 473 aa, Unknown
  Bacterial polypetide isolated from the Sargasso Sea
MAGDEFLNSIETNFKKAINCLQKSEGGKFITEDLANQIMMANATYVVRFGVRLRNSIYTFTGYRSVHSDHFEPVKGGIRYDMAVNQEEVEALAALMTYKCSLVEVPFGGSKGGLIINIRDWNEEEMERITRRFTQELAKRDLIHPSQNVPAPDVGTGEREMAWMADEYRRLNPTDLNAWACVTGKPVNKGGISGRTEATGRGVEYALKAFFDNHEDVKKTGLTSGLVGKRVIVQGLGNVGYHAALFLSKEDECLITHVIERDGSIVNKDGIDIEDLKNHIVKNGSVKGYQGYTSKGSEILEEDADILIPAAMELVINKENANRIKTPLIIEAANGPVSSEADEILNKKGVVIIPDLYANAGGVTVSYFEWIKNLSRIRLGRLQRRAQENQVNILVEAMEKMTGTDFPEGYKEMAIKGSSELDLVRSGLEDTMRNSYQVISDVWNNDENAKDLRTAAMMVAIKRVAQSYTSLGM

SEQ ID NO: 98361 - protein, 419 aa, Unknown
  Bacterial polypetide isolated from the Sargasso Sea
MASDAFLNSIEVNFRKAVKCLQDTDGLEFLSSDLANQIMLANSTYTVRFGVRLRGTMHTFVGYRSVHSDHFEPVKGGIRYDLAVNQGEVEALAALMTYKCALVEVPFGGSKGGLIINPRDWKPEELERITRRFAQELAKRDLMHPSQNVPAPDVGTGEREMAWMADEYRRLNPTDLNAWACVTGKPVSKGGIAGRTEATGRGVQYALRAFFDNENDLKKTGLSSGLKGKRIIVQGLGNVGFHAALFLSLEDKALITHVLERDGSIVDENGINIELLKQHIVAKGSIKGFPGYQESGNEMLEADGDILIPAAMELVITEKNAERIKTPLIIEAANGPVSAEADPILDAKGIIIIPDLYANAGGVTVSYFEWIKNLSRIRLGRLQKRAQENQISQLVDGIENLTGKSFNDDFRTEFSSRSL

SEQ ID NO: 98362 - protein, 421 aa, Unknown
  Bacterial polypetide isolated from the Sargasso Sea
GQIYTFEGWRSVHSEHMEPTKGGIRFDLATNADEVEALAALMSYKCAIINVPYGGSKGALKINPNSWDEKELEKITRRFAQELIKRDLISPSMNVPAPDIGTSSREMAWIADEYRKIHPSDINGSACVTGKPTSKNGLVGREEATGRGVQFIVREFFRNPELLKKVKLDENLSTKSFILQGFGNVGYHLSKFLTEDDGLNLIGIAEYNGGIFNENGINVEHAKKYFEKHNSFENYSKATFVKDSTLLLKRRCDILIPAARENVITEKNASDILAKLIVEAANGPISYKGNQILNKKKVFVIPDILANGGGVAVSYFEWVKNLRHIRFGRLEKRRNQIQLNTLIEAIETMTGKSMPEKYKEKFVDGIEEIDLIRSGLDDMMIDGFQNVKEEFLKNEKIPDFRTAAYKTAIEKIALSYEFIGL

SEQ ID NO: 98363 - protein, 281 aa, Unknown
  Bacterial polypetide isolated from the Sargasso Sea
VTLSEVMALSAWMSVKNAAVNVPYGGAKGGIRVDPRKLSSGELERLTRRYTSEIGIIIGPNKDIPAPDVNTNAQIMAWMMDTYSMNEGSTATGVVTGKPIALGGSLGRREATGRGVFVVGSEAARNLGIDVKGARIVVQGFGNVGSVAAKLFHDAGAKVIAVQDHKGIVFNGNGLDVDALIQHVDHNGSVAGFAAETVSQDEFWALECEFLIPAALEGQLTAKNAPHIKAKIVVEGANGPTTPEADDILRDRGILVCPDVIANAGGVTVSYFEWVQDFSSF

SEQ ID NO: 98364 - protein, 183 aa, Unknown
  Bacterial polypetide isolated from the Sargasso Sea
MNKIINQFLAEIDKRNSHEPEFMQAVKEVSEDLIPYIVSQDIYHGKNILMRMVEPERVVMFRVNWIDDNGEIRVNRGYRVEMNSAIGPYKGGLRFHPSVNLSILKFLAFEQVFKNSLTTLPMGGGKGGADFDPKNKSDGEVMRFCQSFMTELFRHIGPNTDIPAGDIGVGGREIGILFGPYKR

SEQ ID NO: 98365 - protein, 185 aa, Unknown
  Bacterial polypetide isolated from the Sargasso Sea
MKKIIEKFINQVESRNKNEPEFLQAVTEVAETVIPYIVKNDIYYGQNILLRMVEPERVISFRVAWIDDFEQIQVNRGYRVEMNSAIGPYKGGLRFHPSVNLSILKFLAFEQIFKNSLTTLPMGGGKGGSDFNPRGRTDTEVMRFCQSFMTELFRHIGPNRDIPAGDIGVGSREIGFLFGQYKRLK

SEQ ID NO: 98366 - protein, 229 aa, Unknown
  Bacterial polypetide isolated from the Sargasso Sea
RYTSEIGIIIGPQKDIPAPDVGTNGKVMAWMMDTYSMNHGTTVTSVVTGKPIHLGGSLGRDKATGRGVFVSGLEVARRANIEVEGARVAVQGFGNVGSEAARLFAAAGARVVAIQDHTATLFNSTGIDMTALSAWQLEHKQIAGFPGAETIASEAFWSLDMDILIPAALEGQITRHRAETLTCKLVLEGANGPTYPDADDVLASRGIVVVPDVVCNAGGVTVSYFEWVQ

SEQ ID NO: 98367 - protein, 170 aa, Unknown
  Bacterial polypetide isolated from the Sargasso Sea
MYNSIEDFMNKVKHKDPNETEFHQAVHEVVESLWSFLASNREYMHSGVLDRIVEPERVITFRVPWRDDRGQVNVNRGYRVEFNSAIGPYKGGLRFHPSVNLSILKFLGFEQVFKNSLTTLPMGGGKGGSDFDPKGKTDNEVMSFCQSFMLELSKHIGPDTDVPAGDIGVG

SEQ ID NO: 98368 - protein, 261 aa, Unknown
  Bacterial polypetide isolated from the Sargasso Sea
VDPTALSDRELERLTRRYTCEISRVIGPRQDIPAPDVGTNAQVMAWMMDTWSRHAGIAATGVVTGKPVHLGGSLGRVQATGRGVFITGCHIAEKLGLCVAQSRVAVQGFGNVGSVSAGLFHAAGARVVAVQDHRATLYQHDGLDIPALQAWQQAHGTIAGFPGADSVADEAFWSLGYEILIPAALEGQISAERAAGLRCRLILEGANGPTLPEADDVLAERGIVLVPDVIANAGGVTVSYFEWVQDFSSFFWSEEEIDARL

SEQ ID NO: 98369 - protein, 219 aa, Unknown
  Bacterial polypetide isolated from the Sargasso Sea
SIEGKDVLVSGSGNVAQYASEKVLHLGGKVVTLSDSSGFIYDPEGISKDKLDWVIDLKNNKRGRIKEYAEEFGCEYFEGLRPWGISCDIALPCATQNEINESNAKDMVKNGIIAICEGANMPSDPDAINIFQGSKVLFGPGKAANAGGVAVSGLEMSQNSMRIRWEREEVDQKLLTLMKSIHSACVVHGDNKKHIDYVKGANVSGFIKVADAMMDQGVV

SEQ ID NO: 98370 - protein, 237 aa, Unknown
  Bacterial polypetide isolated from the Sargasso Sea
DMEVMRFCQSFMNELFRHIGANVDVPAGDIGVGGREIGYMFGQYKKLTRKWEGVLTGKGYGWGGSLIRPEATGYGQVYFLREMLASKGNSIEGKKCAISGSGNVAQYCAKKVLSYGGKVITMSDSGGYIFDKDGIDEDKLAWIMDLKNNRRGRIKEYVSEYTGAVYREGKRPWGENCDIALPSATQNEIEEKGAKNLVKNGCLAISEGANMPTSPAAYGILSKAGILFGPAKAANAG

SEQ ID NO: 98371 - protein, 302 aa, Unknown
  Bacterial polypetide isolated from the Sargasso Sea
NIRVNRGYRIQNNNAIGPYKGGIRFHPSVNQSILKFLAFEQTFKNSLTGLPMGGGKGGANFNPKGKSENEVMRFCQSFMTELYRHIGADVDVPAGDIGVGAREIGYMFGQYKRITNQFTGVLTGKGIEYGGSEMRPEATGYGAAYFLEEMLKTKGDSIEGKNVLISGSGNVATFAAEKINHRGGKVLTLSDSAGFIFDKDGINEEKLQWVMELKNVRRGRISEYAEKFSSAEYHAGKRPWGIAADLAMPCATQNEILEDDAKTMLSNGVIAVSEGANMPTVIEGIHHFLKAKILFAPAKAAN

SEQ ID NO: 98372 - protein, 437 aa, Unknown
  Bacterial polypetide isolated from the Sargasso Sea
MSSQQQAAQSASTLQSVPSYLNKDDLGPWGNYLRQVDRVAPYLGSLSRWLETLKRPKRILVVDVPIELDNGTVAHFEGYRVQHNVSRGPGKGGVRYHQDVTLSEVMALSAWMSVKNAAVNVPYGGAKGGIRVDPRTLSRGELERVTRRYTSEIGIIIGPNTDIPAPDVNTNEQIMAWMMDTYSMNQGQTATGVVTGKPIALGGSLGRREATGRGVFVVASEAARRIGVDIEGARIAVQGFGNVGGIAARLFQEAGSKLVAVQDHTGSLYKSTGIDAVALADYVAKNGGVGGFPEADAVTNEEFWTVESDILIPAALENQITEKNAGKIKTKIVVEGANGPTTTAADDILHDRGILVIPDVVANAGGVTVSYFEWVQDFSSFFWTEDEINQRLERVMREAFAAVWQVSSEQKVSVRTAAFIVACKRILEARELRGLYP

SEQ ID NO: 98373 - protein, 338 aa, Unknown
  Bacterial polypetide isolated from the Sargasso Sea
GPYKGGIRFHPSVNESILKFLGFEQTFKNSLTGLPMGGGKGGSNFNPKGKTDNEVMRFCQSFITELYRHIGEDTDVPAGDIGVGGREIGYMFGQYKRITNRFVGVLTGKGIEFGGSKMRTEATGYGAIFFLRNMLEQHKESMEGQRVLISGSGNVATHAAEKCLQLGAKPLTLSDSGGFVHCADGFTQEQIDWVKELKNVRRGRISEAADEFKNIDFSEGRPWGVEGDCAVPSATQNEVDGKDAKILMKNGVKAVAEAANMPCEQDAVDAFVDGGVMFGPAKAVNAGGVGVSGLEMSQNSARIAWSEDELRKLLENMMKDIHDSCVQYGESKSGPVNY

SEQ ID NO: 98374 - protein, 428 aa, Unknown
  Bacterial polypetide isolated from the Sargasso Sea
MSSQLQSIPSYLHADDLGPWGNYLQQVDRVAPYLGSLSRWLETLKRPKRILIVDCPIELDNGTVAHFEGYRVQHNVSRGPGKGGVRYHQDVTLSEVMALSAWMSVKNAAVNVPYGGAKGGIRVDPRKLSRGELERVTRRYTSEIGIIIGPNTDIPAPDVNTNEQVMAWMMDTYSMNQGQTSTGVVTGKPIALGGSLGRKEATGRGVFVVGSEAAKKKGLEIEGARIAVQGFGNVGGIAAKLFQEAGAKVIAVQDHTGTIYQPGGLDSNKLLDHVARTGGVAGFEGAEPMPNDEFWTVETDILIPAALENQITEKNAGKIRTKIIVEGANGPTTTAADDILTANGVLVIPDVIANAGGVTVSYFEWVQDFSSFFWTEDEINHRLERVMREAFSGVWAVAEEHKVSVRTAAFIVACKRILMAREMRGLYP

SEQ ID NO: 98375 - protein, 403 aa, Unknown
  Bacterial polypetide isolated from the Sargasso Sea
MSSSSNPTSYAYENAVKELGLKPNIARALEIPDRELTVEVPFRRDNGELDSVVGFRVQHNNTRGPFKGGIRYHEHVDIDEVRSLATLMTWKTSLLDIPYGGGKGGIGVDPTKFSKTELERMSRRFFRAIDPIIGVNVDIPAPDVNTNAQVMSWFMDEYSQIHGYSPAIVTGKPLELGGSEGREAATGKGTAIITRESAGKWGIDLQNSKIVIQGFGNVGSYAAKFLHEYGCKIIAVSDVTGGLFDPDGLDIPSLFEHNYKNRTIDGFEQGKKITNEELLAIECDFLIPAALGSAINESNVDTLNCKVVVEAANGPVTGDAARSLHKRSIPVIPDILTNAGGVTVSYFEWVQNLQQFKWTEDEVNKKLEDKMVRAFHEVYSMKKERGVSMRNASFMASIDRVHS

SEQ ID NO: 98376 - protein, 410 aa, Unknown
  Bacterial polypetide isolated from the Sargasso Sea
MSSSTDPTSSAYSEAVNKLGLKPNIAKALELPDRELTVEVPFRRDNGELESVVGFRVQHNNTRGPFKGGIRYHQHVDIDEVRSLATLMTWKTSLLDIPYGGGKGGIGVDPSQYSKTELERMSRRFFRAIDPVIGVNVDIPAPDVNTNAQVMSWFMDEYSQIHGYSPAIVTGKPLELGGSAGREAATGKGTAVITRETADKWGIDLKNCKVVIQGFGNVGSYAAKFLDEYGCKIIAVSDVTGGLYDSDGLDIPSLFEHNYRNRTIDGFDQGKKITNEELLALECDFLIPAALGSAINDSNVDSLNCKVIVEAANGPVTGDAANKLWDKKIAIIPDILTNAGGVTVSYFEWVQNLQQFKWTEDEVNKKLEEKMVHAFNEVYSIKKEKSVPMRIASFMVAIDRVHSAYNLREG

SEQ ID NO: 98377 - protein, 410 aa, Unknown
  Bacterial polypetide isolated from the Sargasso Sea
MYDEVIRQYDEVAEMINLDPNIKERLKLPQRALTVTFPFRRDEYTEVETVIGYRVQHVLSMGPTKGGIRYAQDVNLGEVTALSILMSWKSAIVGLPYGGAKGGVAIDPRPLSRAEKQRITRRYTAELLPVIGVDKDIPAPDMGTDEQTMAWIMDTYSNFVGSPQPGIVTGKPASLGGSITRREATGRGAVAIAAAAMDKLNKKYSDSTVVIQGFGNVGRYAALASYERGAKVIAVNDLTGGVYNEKGLNIPELFKHIAKENTVKGFSGGDPFVGEILELECDVLIPAAVGGVITSTNASNIKAHVIVEGANSPTTLNADKILRENNVLIIPDILANAGGVTGSYFEWVQNTQNYLWKEKELYEKLIDVLESAFEEVYIISEKNNCDLRTAALIKGIKRVAAAKLTRGLFP

SEQ ID NO: 98378 - protein, 471 aa, Unknown
  Bacterial polypetide isolated from the Sargasso Sea
MEQKKETTFKESVDLMYDRAVKTLNLPIGLAEQIRTCNAVYQVRFGVKLKGEYKIFVGWRAVHSEHILPVKGGIRFAEIANQEEVEALAALMTYKCAIVNVPFGGSKGALKINPNEYDEEDLEKITRRFAHELIKKDLVNPNLNVPAPDMGTGEREMAWISDTFQNLYPNQINGMGCVTGKPVHNGGIRGRTEATGRGVQFGIREFFRHPEDLKLAQIDGGLDSKKIIVQGLGNVGWHAAKFLSEEDGAKIIGIIERDGAIYSEKGLDVNDVLNYIKENGGVKNFPNSSFTENGQELLEKECDILIPAAIEGVINSSNAARIKAPLIAEAANGPVTFEADSILRKKGTVILPDAFLNAGGVTVSYFEWIKNLARIRFGRLERRHEEMKGKLIVETLETMLKAKVPNDLKNKLIEGADELDLVRSGLDDSMRDAYKNIRETYYSMNNVDDFRTASYVVAIKTIAKGYESMNL

SEQ ID NO: 98379 - protein, 413 aa, Unknown
  Bacterial polypetide isolated from the Sargasso Sea
MATKINNKKASDDQFNRAADLIGLDEKIRLSLNVPDRELVVEVPLRRDDGSLESYRGYRVQHNNSRGPFKGGIRYHHEVDIDEVRALAALMTWKTALVDIPYGGGKGGISVDPSTLSTLELERLSRRFFRAINPIIGINRDIPAPDVNTNPQIMAWFMDEYGMTNGHTPGIVTGKPIELGGSLGRNAATGRGTAIIARETANLLNMDLDGASVVIQGFGNVGSFAGKFLSEMGSKIIAVSDVNGGLYDPDGLDIPAMIDHNLKNKTIKGFSQGKKISNEKILNLECDFLIPAALGGVIHKMNLDKLKCKVIIEAANGPVTPPADDVLFKKGIHVIPDILTNAGGVTVSYFEWVQNLQQFQWTEDEVNAKLEDKMVSAFQEVGKMMKSKKTSMRMAAFAVAIDRVAKSFELRGV

SEQ ID NO: 98380 - protein, 408 aa, Unknown
  Bacterial polypetide isolated from the Sargasso Sea
MSSSTNPTSAAYKQAVEKLGMKPNIAKALEIPDRELTVEVPFRRDNGEVESVIGFRVQHNNTRGPFKGGIRYHQHVDIQEVRSLATLMTWKTSLLDIPYGGGKGGIGIDPSKYSKTELERMSRRFFRAIDPIIGVNVDIPAPDVNTNAQVMSWFMDEYSQLHGYSPAIVTGKPLELGGSEGREAATGRGTAIITRETAEKWEIDLQGAQIVVQGFGNVGSYAAKFLHEYGCKVIAVSDVSGGLYDPDGLHIPSLFEYNYKHRTIDGFEQGKKITNEELLALECDFLIPAALGSAINEQNVDKLNCRVIIEAANGPVTGDAASKLWDKKIGIIPDILTNAGGVTVSYFEWVQNLQQFKWDEEDVNAKLENKMVKAFNEVYALKKEKNVPMRIASFMVAIDRVQTAYNLR

SEQ ID NO: 98381 - protein, 139 aa, Unknown
  Bacterial polypetide isolated from the Sargasso Sea
MQKKLNGFLREIEKRNSHEPEFMQAVKEVAEDLIPYIIKQDIYHGKNILMRMCEPERVLMFRVNWVDDNGEIRVNRGYRIEMNSAIGPYKGGLRFHPSVNLSILKFLAFEQVFKNSLTTLPMGGGKGGSDFDPKNKSDS

SEQ ID NO: 98382 - protein, 410 aa, Unknown
  Bacterial polypetide isolated from the Sargasso Sea
MSSSTDPTSAAYKAAVENLGLKPNIAKALEIPDRELQVEIPFRKDNGEIDSVIGFRVQHNNTRGPFKGGIRYHHHVDIDEVRSLATLMTWKTSLVDIPYGGGKGGIGMNPGDYSETELERISRRFFRAIDPIIGVNIDIPAPDVNTNAQVMSWFMDEYSQLHGYSPAIVTGKPLELGGSEGREAATGRGTAIITRETAEKWGIKLKGAKVVIQGFGNVGSYTAKFLDEYGCKIIGVSDISGGLYDSNGFNVPELFDYNYKNRTIDGFEQGKKISNEELLALECDFLIPAALGSAINESNVDSLNCKVIIEAANGPVTGEAANKLWKRKIAIIPDILTNAGGVTVSYFEWVQNLQQFKWTEAEVNKKLEDKMVQAFKEVHDVKVKQKIPMRIASFMVAIDRVERSYTLRGG

SEQ ID NO: 98383 - protein, 363 aa, Unknown
  Bacterial polypetide isolated from the Sargasso Sea
MSSSSNPTSAAYKHAIKELGLKPNIANTLEMPDRELTVEVPFRKDNGEMESVLGFRVQHNNTRGPFKGGIRYHEHVDIEEVRSLATLMTWKTSLLDIPYGGGKGGIGVDPSKYSRTELERMSRNFFRAIDPIIGVNIDIPAPDVNTNAQVMSWFMDEYSQTHGYTPAIVTGKPLELGGSEGREAATGRGTAVITRETADKWGIELKNAKVVIQGFGNVGSYAAKFLHEYGCKIIGVSDVTGGLYDADGLDIPSLFEHNSKNRTIDGFKQGKKISNDELLALECDFMIPAALGSAINKSNVDSLNCKVIVEAANGPVTGDAANKLWDRKIGIIPDILTNAGGVTVSYFEWVQNLQQFKWTEDDV

SEQ ID NO: 98384 - protein, 285 aa, Unknown
  Bacterial polypetide isolated from the Sargasso Sea
MSEEFQYLSNQHTLFTYFHLAGNKEQAKELVKTGITAIAYETVTADDGSLPLLAPMSAIAGQIGFVVGSYFLLKPNKGIGVLLGSIGDIEPRVVTVIGAGVAGTEAIKKAVASGAYVKIIDLSEDKLQQLKQTFGEDKIEYIVSIPETIAEALVSSDLVIGSVYVIGKEAPKVITKEMISKMKPGSVLVDIAIDQGGCIETSKPTTHDDPVFIHNDVIHYCVTNMPGAVPLTATLALNKATMPYIEALTKDGVTKALDSNQHLANGLNMKNGEIIHPAIKEALGL

SEQ ID NO: 98385 - protein, 278 aa, Unknown
  Bacterial polypetide isolated from the Sargasso Sea
MLIGVPKEIKSDEYRIGLTPESVEMLTQSGHEVMIEQNAGLGIGKDNKDYEDAGAEIVTTREEIFQRAEMIVKVKEPQLDECALLRSDQILFTYLHLAPDPEQVKALLASGCRAIAYESVKADDGSYPLLTPMSEVAGRMAVQAGATCLEKAKGGLGRLIGGVTNVDPAEVVVIGGGVVGYNSIEIAIGMQANVTVLDKSAERLDQLESIFGDKLNAVLATDENNHECIKAADIVIGAVYIPGASAPKLISRELVKSMKDGSVFVDVAIDQGGCSETS

SEQ ID NO: 98386 - protein, 339 aa, Unknown
  Bacterial polypetide isolated from the Sargasso Sea
ANAGLGIGKDNKAFEDAGAEIVPTREEIFQRAEMIVKVKEPQLDECALLRSDQILFTYLHLAPDPEQVKALLASGCRAIAYESVKADDGSYPLLTPMSEVAGRMAVQAGATCLEKAKGGLGRLIGGVTNVDPAEVVVIGGGVVGYNSIEIAIGMQANVTVLDKSAERLDQLESIFGDKLNAVLATDENNHECIKAADIVIGAVYIPGASAPKLISRELVKSMKDGSVFVDVAIDQGGCSETSKPTTHSEPTYIEEGVLHYCVANMPGAVPMTSTYALNNATISYVLSLANNGFNAALTLDDGFCEGLNIHTGKVTIAAVAEEHGYEYHNPIDLIRGLSQ

SEQ ID NO: 98387 - protein, 240 aa, Unknown
  Bacterial polypetide isolated from the Sargasso Sea
GGLPLLAPMSEVAGRLAVIEGAANLKVNAGGRGLLISGVPGTSPANVVVVGGGVVGVNAAKMAVGLGARATVLDHSVPRLRYLSDIFGNSITTRYSSRTILEEVCRNADMVIGAVLIPGASAPKLISKAFLSEMKPGAVMVDVAIDQGGCFETSRATTHDDPTYIVNNVVHYCVANMPGSVPLTSSEALNNATLPHVLSLADRGLSALDQDLHLMNGLNVRDGKITYHAVIDALGERPAA

SEQ ID NO: 98388 - protein, 254 aa, Unknown
  Bacterial polypetide isolated from the Sargasso Sea
SGCTAIAYETITDDAGGLPLLAPMSEVAGRLSVIEGAANLKANAGGRGLLISGVPGTLPAEVVVIGGGVVGTNAAKMAVGLGARVTVLDRSVPRLRQLDDIFGNAITTRYSSRAIIEEVCRDADLVIGAVLIPGASAPKLIARDFLSSMKPGSVIVDVAIDQGGCFETSRATTHDDPTYIVDGVVHYCVANMPGSVPLTSSEALNNATLPHVLALAEHGMAALDRDPHLANGLNVRAGEVTFDAVLEAMQVEAA

SEQ ID NO: 98389 - protein, 224 aa, Unknown
  Bacterial polypetide isolated from the Sargasso Sea
MIIGIPKEIKESEHRVGMTPSGVQTLIQNGHDVYVQNSAGQGSGHSDEDYSNVGASLLKTIEEVYDISEMIIKVKEPLKKEYSLIKEGQIIYTYFHFASSLELTKAMIDSKSVCIAYETVENSDRSLPLLTPMSEVAGRMAAQQGAKFLEKHQKGCGILLGGVPGVSPAKAVVLGGGVVGTQSAKMLAGLGADVTILDISLDRLRELDDIMPKNVKTKFSNQYN

SEQ ID NO: 98390 - protein, 244 aa, Unknown
  Bacterial polypetide isolated from the Sargasso Sea
MLIGVPKEIKSDEYRIGLTPESVETLTQSGHEVMIEQNAGLGIGKDNKAYEDAGAEIVPTREEIFQRAEMIVKVKEPQLDECALLRSDQILFTYLHLAPDPEQVKALLASGCRAIAYESVKADDGSYPLLTPMSEVAGRMAVQAGATCLEKAKGGLGRLIGGVTNVDPAEVVVIGGGVVGYNSIEIAIGMQANVTVLDKSAERLDQLESIFGDKLNAVLATDENNHECIKAADIVIGAVYIPGA

SEQ ID NO: 98391 - protein, 146 aa, Unknown
  Bacterial polypetide isolated from the Sargasso Sea
MLIGVPKEIKPQENRVGLTPESVKELIDDGNEVIIERTAGQGSGFDDQKYNDVGATVFENAQDIFDRAELIIKVKEPQEDEIKKLKDGQLLFTYLHLAASKALTEGLMNSGATCIAYETITDKNGRLPLLAPMSEVAGRISIQAGA

SEQ ID NO: 98392 - protein, 198 aa, Unknown
  Bacterial polypetide isolated from the Sargasso Sea
MLIGIPKEIKPQENRVGLTPESVKELIDDGNEVIIERTAGQGSGFDDQNYNDVGATVFENAQDIFDRAELIIKVKEPQDDEIKKLKDGQLLFTYLHLAASKALTEGLMNSGATCLAYETITDNNGRLPLLAPMSEVAGRISIQAGARALEMTNKGRGVLLSGATGAPPAKVVIIGCGVVGFNAALIAHGMKSNVMLID

SEQ ID NO: 98393 - protein, 288 aa, Unknown
  Bacterial polypetide isolated from the Sargasso Sea
KQGQILYTYLHLAPDLPQTTDLIDSGATCIAYETVTSPRGGLPLLKPMSQVAGRMSIQAGAHALEKAQGGLGVLLGGVPGVRPASVIVVGGGIVGFNAAQMAVGLGADVTILDRDPDVLDGLARHFGASARTEYSTRTALQNLLPTADLVVGAVLIPGAAAPKLVNREDLQSMQPGSVLVDVAIDQGGCFETSHATTHDDPTYVVDEVVHYCVANMPGGVAKTSTYALNNTTLPHLKRIAGLGARKALETDQHLRAGLNVAMGQITCKPVAEAHGLEFVSPENMLESI

SEQ ID NO: 98394 - protein, 166 aa, Unknown
  Bacterial polypetide isolated from the Sargasso Sea
MHIGIPREIKEMENRVGVTPAGVSELVREDHRVLVEKNAGVGSGFSNEEYREAGASIVDNASEIWSSEMVYKVKEPLADEYNYFRDDLLLFTYLHLAAEGPLTNALMESKTTSIAYETVQLNDTLPLLTPMSEVAGRMAVQVGARFLEKPQGGQGVLLGGVPGVEP

SEQ ID NO: 98395 - protein, 87 aa, Unknown
  Bacterial polypetide isolated from the Sargasso Sea
QQELGFLREDLALFTYLHLAGSSTQAKKLLETGVTGIAYETVTAKDGSLPLLAPMSAIAGQLSMVVGSYHLLKPNNGRGTLISNIDP

SEQ ID NO: 98396 - protein, 237 aa, Unknown
  Bacterial polypetide isolated from the Sargasso Sea
MLIGVPKEIKSDEYRIGLTPESVEMLTQSGHEVMIEQNAGLGIGKDNKDYEDAGAEIVTTREEIFQRAEMIVKVKEPQLDECALLRSDQILFTYLHLAPDPEQVKALLASGCRAIAYESVKADDGSYPLLTPMSEVAGRMAVQAGATCLEKAKGGLGRLIGGVTNVDPAEVVVIGGGVVGYNSIEIAIGMQANVTVLDKSAERLDQLESIFGDKLNAVHATDENNHECIKAARYVIG

SEQ ID NO: 98397 - protein, 179 aa, Unknown
  Bacterial polypetide isolated from the Sargasso Sea
MLIGVPREIKSFENRVGMTPASVREVIAAGNRVLVERNAGHSIGLDDTDYEAAGAKIAASADDVFAEADMIVKVKEPQPVEIGMLRDGQILFTYLHLAPDEAQTQGLMDSGCTAIAYETVTDSRFGLPLLAPMSEVAGRMAVQAGATCLEISNGGRGVLLGGVPGVTPGNVVVIGGGVV

SEQ ID NO: 98398 - protein, 292 aa, Unknown
  Bacterial polypetide isolated from the Sargasso Sea
GMTPNAAQEAIAHGHEVIVQAGAGTGAGFEDADYLAAGATILDTAEEIFATADMIVKVKEPQAVERKMLREGQVLFTYLHLAPDPAQTRDLLDSGCTAIAYETVTDTRGGLPLLAPMSEVAGRLAPQSGAWALQKANGGSGVLMGGVPGVRPANVMIVGGGVVGTAAARVAVGMGANVTVLDRSVPRLSYLDDVFMGRLTTQFSDQASLAELLPAADMVIGAVLIPGAAAPKLVRRDQLAMMKPGSVLVDVAIDQGGCFETSKPTTHAEPIYDVDGIVHYCVANMPGAGRAP

SEQ ID NO: 98399 - protein, 161 aa, Unknown
  Bacterial polypetide isolated from the Sargasso Sea
MHIGIPREIKEMENRVGVTPAGVSELVREDHRVLVEKNAGVGSGFSNEEYSEAGASIVDNASEIWSSEMVYKVKEPLADEYNYFRDDLLLFTYLHLAAEGPLTNALMESKTTSIAYETVQLNDTLPLLTPMSEVAGRMAVQVGARFLEKPQGGQGVLLGGV

SEQ ID NO: 98400 - protein, 292 aa, Unknown
  Bacterial polypetide isolated from the Sargasso Sea
KFSSKYDKLSFNKRSLSKMLIGCPKEIKNHEYRVGLTPIMVKDLKDQGHEVLIESGAGNGSGFENTNYIEAGATIVDGSDAVFEKAELIIKVKEPQKIERARLQQGQILFTYLHLAPDRDQTVDLIKSGVTAFAYETITDKNGGLPLLAPMSEVAGRLAPQMGAWALQKANLGSGKLLAGVPGVPPANVLILGGGVVGTQAALIALGMGANVTLMDTSIKRLQYLDQFFNMKIKTLLSSKGNIDATLISSDMIIGAVLVPGATAPKLISRSQLSNMKKGTVLVDVAIDQGGC

SEQ ID NO: 98401 - protein, 292 aa, Unknown
  Bacterial polypetide isolated from the Sargasso Sea
ESVEKLTQSGHEVMIELNAGLGIGKDNKAYEDAGAEIVPTREEIFQRAEMIVKVKEPQLDECALLRSDQILFTYLHLAPDPEQVKALLASGCRAIAYESVKADDGSYPLLTPMSEVAGRMAVQAGATCLEKAKGGLGRLIGGVTNVDPAEVVVIGGGVVGYNSIEIAIGMQANVTVLDKSAERLDQLESIFGDKLNAVLATDENNHECIKAADIVIGAVYIPGASAPKLISRELVKSMKDGSVFVDVAIDQGGCSETSKPTTHSEPTYVEEGVLHYCVANMPGAVPMTSTYA

SEQ ID NO: 98402 - protein, 215 aa, Unknown
  Bacterial polypetide isolated from the Sargasso Sea
MIIGIPKEIKESEHRVGMTPSGVQTLIQNGHDVYVQNSAGHGSGHSDEDYSNVGANLLKTIEEIYDISEMIIKVKEPLTKEYSLIKEGQIIYTYFHFASSLELTKAMIDSKSVCIAYETVENSDRSLPLLTPMSEVAGRMAAQQGAKFLEKHQKGCGILLGGVPGVSPAKAVVLGGGVVGTQSAKMLAGLGADVTILDISLDRLRELDDIMPKNV

SEQ ID NO: 98403 - protein, 152 aa, Unknown
  Bacterial polypetide isolated from the Sargasso Sea
MLIGVPKEIKPQENRVGLTPESVKELIDDGNEVIIERTAGQGSGFDDQNYKDVGATVFENAQDIFDRAELIIKVKEPQDNEIKKLKDDQLLFTYLHLAASKALTEGLMNSGATCIAYETITDNNGRLPLLAPMSEVAGRIFIQARARALEMT

SEQ ID NO: 98404 - protein, 183 aa, Unknown
  Bacterial polypetide isolated from the Sargasso Sea
MLIGIPKEIKPQENRVGLTAQSVKSLVKEGHEVIVEKNAGNGSGFIDKDFIDSGAKILDSADEIFNNAELIIKVKEPQEQEIGLLRKDQILFTYLHLAANKKLTDGLISSGSTCIAYETVTDDNNRLPLLAPMSEVAGRISIQAGARALEMTNKGRGVLLSGATGAPPADVVIIGCGVVGFNA

SEQ ID NO: 98405 - protein, 361 aa, Unknown
  Bacterial polypetide isolated from the Sargasso Sea
MKIGLPKEVKNNEFRVGLTPDSVGELSLNHKVFVQKNAGKAIGFTDEMYQANGAQILENASSVFDESELIVKVKEPLPEENQFLSSKHTLFTYLHLAGNKENAKDLINTGVNGVAYETVTSDDGSLPLLAPMSKIAGRISLVVGQYFLLKPNKGIGTLFGNFENLQAREVSVVGAGVAGKEAIRKGLDSGAHVNVLDISSQKLKDLEKEFGTDNISYISSTPESISGAISKSDLVIGSVYVVGKEAPKVITRKMLNVMKPGSVLVDISIDQGGCVETSKPTTHDDPVFVEEGVVHYCVTNMPGAVPLTASLALNHATLPFIKKIADLGLEKACVSDNHLANGLNMSNGEIRHPSVQAALNS

SEQ ID NO: 98406 - protein, 296 aa, Unknown
  Bacterial polypetide isolated from the Sargasso Sea
MHIGVPREIKEMENRVGVTPAGVSELVREGHLVFVETNAGVGSGFSNQEYKEAGGSIVDNASEIWSCEMVYKVKEPLADEYNYFRDDLLLFTYLHLAAEGPLTNALMESKTTSIAYETVQLKDTLPLLTPMSEVAGRMAVQVGARFLEKPQGGQGVLLGGVPGVEPAGVVIIGGGVVGINSAKMAVGLGAKVTIIDISPERLRYLDDVFNGRVQLIMSNSFNIAKEVEKADLLIGGVLIPGKKAPHLVSEGMVKTMKKGSVIVDVAIDQGGCIETIDRVLTITILFMNGMVLYTIL

SEQ ID NO: 98407 - protein, 373 aa, Unknown
  Bacterial polypetide isolated from the Sargasso Sea
MIIGVPKEIKNHEYRVGMTPASVRELTALGHTVFVEHNAGSGIGFGDDAYQAAGATVLTTAAEVFAKAEMIVKVKEPQAVERAMLREGQILFTYLHLAPDLPQTEDLIKSKAICIAYETVTDNRGGLPLLAPMSEVAGRMSIQAGARALEKSCAGRGMLLGGVPGVEPAKVVIIGGGMVGTNAAQMAVGMGADVVVLDRSVDVLRRIDAQFNGAVKTVYSTVDALEKHVLSADLVIGGVLIPGAAAPKLVTADHIKRMKPGSAIVDVAIDQGGCVETSKATTHADPTYIVDDVVHYCVANMPGAVPLTSTFALNNATLPFIIRLANKGYKQALLDDAHLLNGLNVINGHVVNKHVADALNLPFVEPKQVLAAV

SEQ ID NO: 98408 - protein, 321 aa, Unknown
  Bacterial polypetide isolated from the Sargasso Sea
MLIGVPKEIKPDEYRVALTPAGAEMLAEAGHDLLIERGAGLGSGFSDGFYEGAGAKVLDTADEIWARAEIILKVKEPIKPEWPEMRSGQVIFTYFHFAASEELTRAVLDSGAIAIAYETVELDTGELPLLTPMSEVAGRMAVQEGAKYLEKPQGGLGVLLGGVPGVKPGRVLILGGGVVGTNAAKMAAGLGASVAIMDINLERLRYLDDVMPANVETLFSTRYAIREQIQEADLIIGAVLIPGAKAPNLITRKDLSFMQEGAVICDVAIDQGGCVETMQPTTHNDPVYTVDGIIHYAVANMPGGVPRTSTLALTNATLPYA

SEQ ID NO: 98409 - protein, 371 aa, Unknown
  Bacterial polypetide isolated from the Sargasso Sea
MLIGVPKEIKPQENRVGLTPESVKELIDDGNEVIIERTAGQGSGFDDQNYNDVGATVFENAQDIFDRAELIIKVKEPQDNEIKKLKDGQLLFTYLHLAASKALTEGLMNSGATCIAYETITDNNGRLPLLAPMSEVAGRISIQAGARALEMTNKGRGVLLSGATGAPPAKVVIIGCGVVGFNAALIAHGMKSNVMLIDQSEARLNELKNYFNDEVNTSISTPETIAEEVKKCDLLIGGVLIPGSSAPKLVSDELVSKMKKGAAIVDVAIDQGGCIETSKPTTHADPVYIKHDVVHYCVTNMPGCVPRTSTISLNQATLPFVKKLARDGLKKALSDDRNFMNGLNVIKNKCTQADVARDLNIAFSNPEDLVA

SEQ ID NO: 98410 - protein, 368 aa, Unknown
  Bacterial polypetide isolated from the Sargasso Sea
MIIGIPKEIKESEHRVGMTPSGVQTLIQNGHDVYVQNSAGQGSGHSDEDYSNVGASLLKTIEEVYDISEMIIKVKEPLKKEYSLIKEGQIIYTYFHFASSLELTKAMIDSKSVCIAYETVENSDRSLPLLTPMSEVAGRMAAQQGAKFLEKHQKGCGILLGGVPGVSPAKAVVLGGGVVGTQSAKMLAGLGADVTILDISLDRLRELDDIMPKNVKTKFSNQYNIKQEIQNAHLVIGAVLIAGAKAPNLITKDMLKDLRKGTVLVDVAVDQGGCFETTKPTTHSSPTYIIDDVLHYSVANMPGAVPMTSTEALTNATVAYAIEIANKGWKKACNENEPLKKGLNIINGDIVYKAVADAFDLNYTELNI

SEQ ID NO: 98411 - protein, 371 aa, Unknown
  Bacterial polypetide isolated from the Sargasso Sea
MLIGVPKEIKNHEYRVGLTPAGARELTRHGHRVLVQRGAGTAIGLLDNDYTAAGASLCDGADEVFARADMIVKVKEPQPAECAMLRRGQILYTYLHLAPDPDQAAALVKSGAVCIAYETVTGPGGGLPLLAPMSEVAGRMSIQVAATHLESPRGGRGLLMAGVPGVPAAHVVVLGAGVVGTGALQMAVGLGARVTVLDTNVNRLRQLDLVFANRITTVCSNAHTIDEAVRDADVVIGAVLVPGASAPRLVTRDMIATMRTGAVVVDVAIDQGGCFETSHATTHAAPTFVVDGVVHYCVANMPGAVARTSTFALNNATLTHALALADKGWKQAMTDDPHLRAGLNVCDGHITYEAVALALGLPYVPAAGVLA

SEQ ID NO: 98412 - protein, 147 aa, Unknown
  Bacterial polypetide isolated from the Sargasso Sea
MKIGVPTEVKNNESRVGLTPDSVKTLVEKGHEVKIQSNAGAAIGFSDSLYRKSGAIILQNAEEVFCAADLIIKVKEPVQEELKFLREDLTLFTYLHLAGNSAQAKKLLETGVTGIAYETVTASDGSLPLLAPMSAIAGQLSLVVGSY

SEQ ID NO: 98413 - protein, 262 aa, Unknown
  Bacterial polypetide isolated from the Sargasso Sea
MIDSKSVCIAYETVKNSDRSLPLLTPMSEVAGRMAAQQGAKFLEKHQKGCGILLGGVPGVSPAKAVVIGGGVVGTQSAKMLAGLGADVTILDISLDRLRELDDIMPKNVKTKFSNHYNIKQEIQNAHLVIGAVLIAGAKAPNLITKDMLKDLRKGTVLVDVAVDQGGCFETTIPTTHSSPTYIIDDVLHYSVANMPGAVPMTSTEALTNATIAYAIEIANKGWKKACNENEPLKKGLNIINGDIVYKAVADAFDLNYTELNI

SEQ ID NO: 98414 - protein, 375 aa, Unknown
  Bacterial polypetide isolated from the Sargasso Sea
MLIGVPKEIKSDEYRIGLTPESVKSLTQSGHQVMIENNAGLGIGKDNDAYEESGAEIVQTREEIFQRAEMIVKVKEPQLEECALLKSDQILFTYLHLAPDPDQVKALIESGCRAIAYESVRADDGTYPLLTPMSEVAGRMAVQAGATCLEKVKGGLGRLIGGVTDVDPADVVVIGGGVVGYNSIEIAIGMQANVTVLDKSPERLDQLESIFGEKLNAVLATEENNQACIKEADIVIGAVLIPGASAPKLISRELVQSMRKGSVLVDVAIDQGGCSETSKPTTHSDPTYVEEGVLHYCVANMPGAVPMTSTYALNNATLPYVLSLANEGFNKALSLDKGFCDGLNIHSGKVTITAVAEEQGYDYHDPIELIRGLDQ

SEQ ID NO: 98415 - protein, 359 aa, Unknown
  Bacterial polypetide isolated from the Sargasso Sea
MKIGVPAEVKNNENRVGLTPNSVKYLSNLGHSIYVQSKAGNSIGFSDNLYRESGAIILEEAGEVFKNANLIIKVKEPVEQELEFLREDLALFTYLHLAGNSAQAKKLLETGVTGIAYETVTATDGSLPLLAPMSAIAGQLSMVVGSYHLLKPNNGRGTLISNIDPRIVTVIGAGVAGKEAIAKAVLNHAEVKIIDLDQSVLDDLKKVYGGENVEYILSTPDSIQDAISVSDLVIGSVYVVGKEAPKVIKKEMLKSMVDGSVMVDISIDQGGCFETSKPTNHDNPTFLHDGILHYCVTNMPGAVPLTASNALNKATLPFIQEIAEKGITKALGENKHLLNGLNIQNGKIIHPGVKESLNI

SEQ ID NO: 98416 - protein, 270 aa, Unknown
  Bacterial polypetide isolated from the Sargasso Sea
MRVGVPKEIKVLEYRVGMIPSGVKELVDEGHEVFVETNAGMGIGMTDQDYIDAGASILSTPKEVFDISELIIKVKEPQLNECKMLKTGQVLFTYLHLAADPEQAAALVKSGVTAIAYETVTADNGSLPLLTPMSAVAGRLSIQAGAYALQKANGGRGVLLGGVPGVKAGQVLIIGGGVSGAHAAEMAVGLGAQVTILDLSSDRLKELSNKFGDKVSTRVSSKQLINELVVESDLVIGAVLVAGAAAPKLVTIEHVKQMRPGSVMVDISID

SEQ ID NO: 98417 - protein, 371 aa, Unknown
  Bacterial polypetide isolated from the Sargasso Sea
MIIGVPKEIKNHEYRVGMVPSSVRELTIKGHEVFVETNAGTGIGFSDQDYVDAGAKILATAAEVFAKAEMIVKVKEPQAVERAMLRYDQILFTYLHLAPDLPQTEDLIKSGAVCIAYETVTDDRGGLPLLAPMSEVAGRMSIQAGAMALEKSSGGRGMLLGGVPGVEPAKVVIIGGGMVGTNAAQMAVGMGADVVVLDRSIDALRRLNVQFGSAVKAVYSTADAIERHVLEADLVIGGVLIPGAAAPKLVTRSMIARMKPGSAIVDVAIDQGGCVETSHATTHQDPTYIVDDVVHYCVANMPGAVARTSTFALNNATLPYILKLANLGYKAALLQDKHLLNGLNVMHGKLVCKEVAQALNLEYTAPASLLA

SEQ ID NO: 98418 - protein, 371 aa, Unknown
  Bacterial polypetide isolated from the Sargasso Sea
MIIGVPKEIKNHEYRVGMVPSSVRELTIKGHEVFVETNAGTGIGFTDQDYIDAGAKILATAAEVFAKAEMIVKVKEPQAVERAMLRHDQILFTYLHLAPDLPQTEDLIKSGAVCIAYETVTDDRGGLPLLAPMSEVAGRMSIQAGAMALEKSSGGRGMLLGGVPGVEPAKVVIIGGGMVGTNAAQMAVGMGADVVVLDRSIDALRRLNMQFGSAVKAVYSTADAIERHVLEADLVIGGVLIPGAAAPKLVTRSMISRMKPGSAIVDVAIDQGGCVETSHATTHQDPTYIVDDVVHYCVANMPGAVARTSTFALNNATLPYILKLANLGYKAALLQDKHLLNGLNVMHGKLVCKEVAQALNLEYTAPASLLA

SEQ ID NO: 98419 - protein, 272 aa, Unknown
  Bacterial polypetide isolated from the Sargasso Sea
ADPEQAAALVKSDVTAIAYETVTADNGSLPLLTPMSAVAGRLSIQAGAYALQKANGGRGVLLGGVPGVKAGQVLIIGGGVSGAHAAEMAVGLGAQVTILDLSSDRLKELSNKFGDKVSTRVSSKQLINELVVESDLVIGAVLVAGAAAPKLVTIENVKQMRPGSVMVDISIDQGGCFETSKPTTHAEPTYIVDDVVHYCVTNMPGAVPRTSTFALTNETLPFIKSLANSGWQNALKNDEHLKNGLNVHAGSINFEAVADELGYPYKSPDEII

SEQ ID NO: 98420 - protein, 327 aa, Unknown
  Bacterial polypetide isolated from the Sargasso Sea
PKEIKNHEYRVGMTPASVRELVNYKHSVLVETNAGIGIGFTDEDYTAAGATVLATAAEVFAKAEMIVKVKEPQAVERAMLREGQILFTYLHLAPDLPQTEDLIKSKAICIAYETVTDNRGGLPLLAPMSEVAGRMSIQAGARALEKSCAGRGMLLGGVPGVAPAKVVVIGGGMVGTNAAQMAVGLGADVTVLDRSVDVLRRINAQFNGAVKAIYSTTDALEQEVLAADLVIGGVLVPGAAAPKLVTKDHIKRMKPGSAIVDVAIDQGGCVETSKPTTHADPTYIVDDVVHYCVANMPGAVPRTSTFALNNATLPFIIRLAIKATNKH

SEQ ID NO: 98421 - protein, 247 aa, Unknown
  Bacterial polypetide isolated from the Sargasso Sea
MAASVLSAPMASIGVPKEIKLDEQRVALTPDAVRELVSQGLEVRIETGAGAGAGIGDDAFAAAGAQMVSRDEAWGAHLVVKVKEPQAEEFVYLRKDMVLFTYLHLAAYPSVGEALLEAGTAAIAYETVQLENGSLPLLAPMSEIAGRLAAQVGAHLLEKPHGGRGVLMGGCTGVQPARVVVLGAGTVGWNAARTAAAMDAEVLLLDRSPQRLRSLEADRRGRLMSVVSSQWASGTVGANGGSGDRSR

SEQ ID NO: 98422 - protein, 212 aa, Unknown
  Bacterial polypetide isolated from the Sargasso Sea
MKVGSPKEIKNHEYRVGLIPPTVTELKKYGHEVFIQSEAGLGVGFSDNDYKAAGAKIFKDAKSIFEESDIIVKVKEPQKEERRLLRPEQILFTYLHLAPDRSQTEDLIESKVTAIAYETVTDNNGGLPLLAPMSEVAGKLAPQAGSWALQKANGGSGILLGGVSGVLPANVLVIGGGVVGTNAARVAFGMGANVTILDKSLKRLAELENQFS

SEQ ID NO: 98423 - protein, 379 aa, Unknown
  Bacterial polypetide isolated from the Sargasso Sea
MAASVLTAPMASIGVPREIKADEQRVALTPDAVRELISQGLEVRVEAGAGAGAGIGDEAFAAAGAQLVSREDAWGAHLVVKVKEPQSEEFGFLRDDMVLFTYLHLAAYPQVGEALLEAGTAAIAYETVQLENGSLPLLAPMSEIAGRLAAQVGAHLLEKPHGGRGVLMGGCTGVQPARVVVLGAGTVGWNAARTAAAMDAEVLLLDRSPQRLRSLEADRRGRLMSVVSSRGLLERLVPTADLVIGAVLTPGGRAPTLVDEAMVQQMRPGSVIVDVAIDQGGCIATSRETTHTDPTVTIHGVQHYAVGNMPGAVPFTSTEALVSVTLPYILGIAGRGLEEAVTERPELLSGLNTVQGSVCHPGVAKALGVAPRHPMACLR

SEQ ID NO: 98424 - protein, 330 aa, Unknown
  Bacterial polypetide isolated from the Sargasso Sea
MKIGIPKEIKNNEFRVAMTPVGVKELVNKGHKVILQKNAGLESNFSDKEYLKSGATIYETADDIYNNSEMILKVKEPIKEEYNKIKKNQIIFTYFHFASNEKLTQAMVNNKSICIAYETVEKVDKTLPLLKPMSEVAGRMAAQEGAKYLEKPMGGRGILLGGVENVAPAKVLIIGGGISGTEAAKMCSGLQANVTILDTNETKIKELNKVMPKNVKAILSNKKTLYKCAIQSDLIIGAVLVTGGKAPKLITKTMLKDLKKGCVLVDIAIDQGGCFETSKPTTHQNPTYIVDGILHYCVANMPGAVPYTSTLALTNNTLPYIIQIAEKGWE

SEQ ID NO: 98425 - protein, 367 aa, Unknown
  Bacterial polypetide isolated from the Sargasso Sea
MIIGVPKEIKEMENRVGATPAGVNELTRNGNQVLVEAGAGAGSGFADEAYRDAGATITDNVREVWGAEMVYKVKEPLEDEYGYFRSDLMLFTYLHLAAEGPLTKALVDNKVNSVAYETVQLEDGSLPLLTPMSEVAGRMAVQVGARFLEKPQGGQGVLLGGVPGVHPAMVVIIGGGVVGINSAKMAVGMGARVTILDVSAERMRYLDDVFNGRVELIMSNSYNIAEAVESADLLIGGVLIPGAKAPHLVTEAMVKTMKPGSVIVDVAIDQGGCIETIDHVTYHSNPVYERHGVVHYSVGNMPGAVARTSTLALTNVTMPYALALAGKCFVDACRNDKALGLGVNTMYGNVTCEGVASSLGYPYVPFD

SEQ ID NO: 98426 - protein, 258 aa, Unknown
  Bacterial polypetide isolated from the Sargasso Sea
IRYSEAVNQDEVEALAALMTYKCALVDAPYGGSKGGLCINPRDYEEHELEIITRRFAYELIKRDLINPSQNVPAPDMGTGEREMAWIADQYARMNTTDINARACVTGKPLIGGGIAGRVEATGRGVQYALQEFFREAKDVSKAQLSGTLDGKRIVVQGLGNVGYHAAKFLQQEDGARIIGIIERDGALVSENGLDVEAVHNWISKNGGVSGFPDATFVADGAIVLEQDCDILIPAALEGVINLDNATKIKAPLIIEAA

SEQ ID NO: 98427 - protein, 183 aa, Unknown
  Bacterial polypetide isolated from the Sargasso Sea
MRSSEANRIYFDRAADQLDLKENMRQLLLTPQREVQVQIPVELDSGAIASFIGYRVQHNNARGPMKGGLRYHSQVDLDEIRALASLMTWKTAVVNIPYGGAKGGVALDPTSLSTRELERVTRRFVDNIHDLIGPDVDIPAPDMGTSSEVMAWIMNQYDKFHGFSPAMCHRVNPWEYHGLPGRK

SEQ ID NO: 98428 - protein, 276 aa, Unknown
  Bacterial polypetide isolated from the Sargasso Sea
RRFTFELAKRDLIHPSQNVPGPDMGTDENVMAWMADEYRRLNPTEIDAMAAVTGKPIAVGGIDGRTEATGRGVYYSILEFLKNKKDRQKSKLRQGLEDQKVIIQGFGNVGYHVASLLHQSGAKIIAIIERDGSVVNQDGIDVESLKKYFTKKRSFEGYDGYSKVRGRFLTKDCDILIPAATEGVINKNNASNIKAKLIVEGGNGPVTSDADKILRKKGITVIPDFYANSGGVIVSYFEWVKNLSKMRYGLMQEREVEKRSENLVNTLEAMTSSTFP

SEQ ID NO: 98429 - protein, 282 aa, Unknown
  Bacterial polypetide isolated from the Sargasso Sea
LERITRRFTFELAKRDLIHPSQNVPGPDMGTDENVMAWMADEYRRLNPTEIDAMAAVTGKPIAVGGIDGRTEATGRGVYYSILEFLKNKKDRQKSKLRQGLEDQKVIIQGFGNVGYHVASLLHQSGAKIIAIIERDGSVVNQDGIDVESLKKYFTKKRSFEGYDGYSKVRGRFLTKDCDILIPAATEGVINKNNASNIKAKLIVEGGNGPVTSDADKILRKKGITVIPDFYANSGGVIVSYFEWVKNLSKMRYGLMQEREVEKRSENLVNTLEAMTSSTFPS

SEQ ID NO: 98430 - protein, 466 aa, Unknown
  Bacterial polypetide isolated from the Sargasso Sea
MANNSTFLNSVNQVFDEASSLLSLPEDLARKIKLANSVYQVNFGVRLRKTLYTFTGYRCVHSEHIEPVKGGIRYSLSATQDEVEALAALMTYKCSLMDLPFGGSKGALIVDPYRWKNEELERITRRFTFELAKRDLIHPSQNVPGPDMGTDENVMAWMADEYRRLNPTEIDAMAAVTGKPIAVGGIDGRTEATGRGVYYSILEFLKNKKDRQKSKLRQGLEDQKVIIQGFGNVGYHVASLLHQSGAKIIAIIERDGSVVNQDGIDVESLKKYFIKKRSFEGYDGYSKVRGRFLTKDCDILIPAATEGVINKNNASNIKAKLIVEGGNGPVTSDADKILRKKGITVIPDFYANSGGVIVSYFEWVKNLSKMRYGLMQEREVEKRSENLVNTLEAMTSSTFPSDFKDDYIKGSSEIDLVRSGLEEKMRQGYQSIHEVFHSDKKIKDFRTAAMVIAVRKVSEAYNYLGI

SEQ ID NO: 98431 - protein, 37 aa, Unknown
  Bacterial polypetide isolated from the Sargasso Sea
MPALKYGGESKQTNYVRGANIAGFVKVADAMLGQGVI

SEQ ID NO: 98432 - protein, 44 aa, Unknown
  Bacterial polypetide isolated from the Sargasso Sea
RLKNIMNSIHSSCLEHSTNENYVKGANIAGFIKVADSMLDQGVV

SEQ ID NO: 98433 - protein, 167 aa, Unknown
  Bacterial polypetide isolated from the Sargasso Sea
MELKNVKRGRISEYANQYSSAKFVEGSRPWSTKADVALPCATQNELNGEEAQVLVNNGVMCVAEGANMPCTPEAIEVFQSNKVLFSPGKASNAGGVATSGLEMSQNSLRLSWTSEEVDEKLHSIMVSIHESCVKYGSREDGTVDYVKGANVAGFVKVADAMIDQGLV

SEQ ID NO: 98434 - protein, 68 aa, Unknown
  Bacterial polypetide isolated from the Sargasso Sea
SGLEMSQNSMRLNWEREEVDQKLNQIMKNIHAQCIEHGSDGDFVNYVKGANIAGFIKVADAMIDQGIV

SEQ ID NO: 98435 - protein, 77 aa, Unknown
  Bacterial polypetide isolated from the Sargasso Sea
ASNAGGVAVSGLEMAQNSLRYSWTRQEVDEKLKEIMIKIHKKCLKYGKEKDYVDYGKGANISSFIKVADAMLAQGVV

SEQ ID NO: 98436 - protein, 289 aa, Unknown
  Bacterial polypetide isolated from the Sargasso Sea
QRHIGANTDVPAGDINVGAREIGYLYGEYRRLNNKFEGVLTGKGLEFGGSYVRTEATGFGLIYFLEAVCRHQGTPIEGKTIAVSGAGNVALHAALKAVEKGGKVISLSNSRGLLHNENGLTDTALKWAIDNHANRNNILADMADENMGKWIADKKPWHLKCDIALPCATQNELLEEDAKSLLDNGCQMVLEGANMPCTNEAQALFLDAQIAYVPGKASNAGGVALSGLEMSQNAMFNQRNASALDEQLYSIMESIHQRCVDEGKSEGDAGSSYVDYMKGANVAAFRRLA

SEQ ID NO: 98437 - protein, 150 aa, Unknown
  Bacterial polypetide isolated from the Sargasso Sea
KKYNVKYTKGKRPWSIKCDIALPCATENELNLDDAKELTGNGCYVVAEGANMPSTTDAVHHFINKKILYGPGKAANAGGVAISGIEMSQNSTRIPLSREKVDGLLKEIMQRVHRTCVKYGDKGDFINYVDGANIGGFVRVADSMIDQGIV

SEQ ID NO: 98438 - protein, 102 aa, Unknown
  Bacterial polypetide isolated from the Sargasso Sea
ANMPCEQEAVDAFTSANVLFGPAKAVNAGGVGVSGLEMSQNSGRISWEPERLRELLENMMRDIHDSCVEYGKSDKGPVNYLAGANIAGFVKVADAMLSYGHV

SEQ ID NO: 98439 - protein, 151 aa, Unknown
  Bacterial polypetide isolated from the Sargasso Sea
ARTGVKFEAGVRPWHVKVDVALPCATQNELDENDAKTLIQNGVVCVAEGANMPSTIEAAKAFEAAGVLYAPGKASNAGGVATSGLEMSQNSARLSWPREEVDARLLQIMQGIHAACLQYGKRADGSVSYIDGANIAGFVKVADAMLAQGVV

SEQ ID NO: 98440 - protein, 75 aa, Unknown
  Bacterial polypetide isolated from the Sargasso Sea
NAGGVAVSGLEMAQNSLRYSWSRKEVDEKLKKIMSDIHKSCLEFGSEKEHVNYVKGANIAGFVKVAEAMLAQGVV

SEQ ID NO: 98441 - protein, 185 aa, Unknown
  Bacterial polypetide isolated from the Sargasso Sea
MNYKSKQDFLDNVHSKFSNEKEFLQAVEEVIGSIWDTVQQSQDYLDGNILDRIITPERVIIFRVPWLDDNGRVHVNLGYRIQFNSAIGPYKGGLRFHPTVNLGVLKFLAFEQIFKNSLTGLNLGGGKGGSDFDPKGKSDNEIMKFCQSFMTELSRHIGHNTDVPAGDIGVGGREIGFMFGQYKRI

SEQ ID NO: 98442 - protein, 135 aa, Unknown
  Bacterial polypetide isolated from the Sargasso Sea
IKCDIALPCATENELNLDDAKQLTDNGCYVVAEGANMPSTTDAVHHFINQKILFGPGKAANAGGVAISGIEMSQNSTRIPLTRYKVDSLLKEIMQRVHNTCVKYGKKDDFVNYVDGANIGGFVRVADSMIDQGIV

SEQ ID NO: 98443 - protein, 99 aa, Unknown
  Bacterial polypetide isolated from the Sargasso Sea
MPCTADAISLFLKNKIQYAPGKASNAGGVAVSGLEMAQNSLKYTWSREVVDGKLKEIMSDIHSSCLKYGTEKDHVNYVKGANIAGFVKVADAMLAQGVV

SEQ ID NO: 98444 - protein, 155 aa, Unknown
  Bacterial polypetide isolated from the Sargasso Sea
RGRINKYSDKFGAEFMEGKRPWGIKCDVALPCATQNEINEAEAKDLVNNGCFVVAEGANMPSDAEAVNVFLSNKILFGPGKAANAGGVAVSGLEMSQNSMHLSWTREEVDTRLKNIMNSIHSSCLEHSTNENYVKGANITGFIKVADSMLDQGVV

SEQ ID NO: 98445 - protein, 223 aa, Unknown
  Bacterial polypetide isolated from the Sargasso Sea
MFKKKLDLKTFMNGLRKRNENELEFHQAVGEVAESLIPFINENKKYLESRILERLTEPDRIIVFRVCWQDDAGNVRINRGYRVQFNNSIGPYKGGLRFHPSVSLSILKFLGFEQIFKNSLTTLPIGGAKGGSNFNPKGKSDREVMRFCQAFMTELSRHIGPQCDIPAGDIGVGAREIGYMFGQVKRLTNEFTGSLTGKGIDFGGSLIRTEATGYGAVYFAREM

SEQ ID NO: 98446 - protein, 115 aa, Unknown
  Bacterial polypetide isolated from the Sargasso Sea
MSYVNEVFDSVKLRDPEQVEFHQAVWEVLETLEPVFDKHPEYKEAKILERLTEPERVIQFRVPWVDDNDHVQVNRGMRVEFNSAIGPYKGGLRFHPSVNLGIIKFLGFEQILKNA

SEQ ID NO: 98447 - protein, 138 aa, Unknown
  Bacterial polypetide isolated from the Sargasso Sea
WVTKCDLAYPCATQNELPLDDAITLVKNGCIGVFEGANMPTMPDAIEYFKEHKVMFSPGKASNAGGVATSGLEMTQNSQRLHWTREEVDNKLQQIMKSIHANCVKHGKRSDGYVDYVKGANIAGFVKVADAMLDQGHV

SEQ ID NO: 98448 - protein, 163 aa, Unknown
  Bacterial polypetide isolated from the Sargasso Sea
MQNVKAKDPAHNDFHQAVQEVAQSVVPFLEKNNVYKDAKILERIIEPDRIIIFRVCWEDDNGKVQINRGFRVQFNNAIGPYKGGLRFHPSVSLDTFKFLGFEQVFKNSLTTLPMGAAKGGSDFDPKGKSDNEVMRFCQAFMTELIRHIGKDTDVPAGDIGVGA

SEQ ID NO: 98449 - protein, 120 aa, Unknown
  Bacterial polypetide isolated from the Sargasso Sea
NGTDAKTLLKNGCICVAEGANMPCDHNAIKQFKDNKILFAPGKASNAGGVAVSGLEMAQNSLRYSWTRQEVDEKLKEIMIKIHKKCLKYGKEKDYVDYGKGANISSFIKVADAMLAQGVV

SEQ ID NO: 98450 - protein, 114 aa, Unknown
  Bacterial polypetide isolated from the Sargasso Sea
MYSSIDQFMDAVQSRNVGENEFHQAVHEVVESLWGFLKDHPHYLHAKVLDRIIEPERVIQFRVPWRNDRGEVEVNRGFRVEFNSAIGPYKGGLRFHPSVNLSILKFLGFEQVLK

SEQ ID NO: 98451 - protein, 125 aa, Unknown
  Bacterial polypetide isolated from the Sargasso Sea
TENELNLDDAKELTGNGCYVVAEGANMPSTTDAVHHFINKKILYGPGKAANAGGVAISGIEMSQNSTRIPLSREKVDGLLKEIMQRVHRTCVKYGDKGDFINYVDGANIGGFVRVADSMIDQGIV

SEQ ID NO: 98452 - protein, 225 aa, Unknown
  Bacterial polypetide isolated from the Sargasso Sea
MDKIIKQFLSQVNQKNQNEPEFMQAVTEVAETVIPYIVTQDIYYGQNILLRMVEPERVVSFRVAWIDDNEEIQVNRGYRIEMNSAIGPYKGGLRFHPSVNLSILKFLAFEQVFKNALTTLPMGGGKGGSDFDPKGKSDTEVMRFCQSFMTELFRHIGPNKDIPAGDIGVGGREIGYLFGQYKRLKNEFSGVLTGKGISWGGSLIRPEATGYGVVYFIDEMLKNIG

SEQ ID NO: 98453 - protein, 161 aa, Unknown
  Bacterial polypetide isolated from the Sargasso Sea
MKKIIKDFLSQVSQKNQNEPEFMQAVTEVAETVIPYIVSQDIYYGQNILLRMVEPERVVSFRVAWIDDNEEIQVNRGYRIEMNSAIGPYKGGLRFHPSVNLSILKFLAFEQVFKNALTTLPMGGGKGGSDFDPKGKSDTEVMRFCQSFMTELFRHIGPNKD

SEQ ID NO: 98454 - protein, 284 aa, Unknown
  Bacterial polypetide isolated from the Sargasso Sea
KIKNGLEPEFIQAVEEVAETVIPFIESNQKYKKAKILERIVEPERVIQFRVPWVDDSGEPQINRGFRVEFNSAIGPYKGGLRFHPSVNLSILKFLGFEQIFKNSLTTLPMGGGKGGSDFNPKGKSDNEVMKFCQSFMTELFRHIGPNTDVPAGDIGVGGREIGYMFGQYKRLRNEFTGVLTGKGINWGGSLIRPEATGYGVVYFAEKMLTNIGEDFKNKKVAISGSGNVAQYACEKSIQLGSKVLSMSDSKGYIYDPDGIDEEKLSWIMNLKNMKGEEFLSMLK

SEQ ID NO: 98455 - protein, 283 aa, Unknown
  Bacterial polypetide isolated from the Sargasso Sea
MNAIKEIYEKVKSRDPNQPEFHQAVLEVLESLEPVLEAHPEYTSIVERVVEPDRLIHFRVPWVDDSGNVQVNRGFRIQFNGAIGPYKGGLRFHPSVNASILKFLAFEQIFKNSLTGLPMGGGKGGSDFNPKGKSDDEVMRFCQSFMMELWRHIGQDCDVPAGDIGVGGREIGYLFGMYKKLRNDFQAGVLTGKGLSYGGSLIRPEATGYGLVYFAREMLATKGKSFEGAKVSISGSGNVAQFACEKVLDLGGVPVTMSDSSGWIHDPAGIDREKLAWIMDLKN

SEQ ID NO: 98456 - protein, 213 aa, Unknown
  Bacterial polypetide isolated from the Sargasso Sea
REIGYLFGQYKRLSNQFTSVLTGKGLSYGGSLIRPEATGYGCVYFAEEMLKRIDQGFEDKRVAISGSGNVAQYAAQKVMELGGRVISMSDSEGTLYAEGGLNDEQWQYLMELKNVRRGRLREMAEHYGLQFLAGQRPWGLACDIALPCATQNELDGEDARVLLKNGCICVTEGANMPSTLEAVDLFVEAGICYAPGKASNAGGVATSGLEMSQ

SEQ ID NO: 98457 - protein, 225 aa, Unknown
  Bacterial polypetide isolated from the Sargasso Sea
MHPEMKAIYDRVVARDPNQPEFHQACLEVLETLGPAIDAHPEYIPIVERICEPERIIQFRVTWVDDQGHQKVNRGFRIQYNGAIGPYKGGLRFHPSVNESILKFLAFEQIFKNSLTTLPMGGGKGGSDFDPKGKSDGEVMRFCQAFMMELWRHIGHNLDVPAGDIGVGGREIGYMFGMYKRLRNDFESGVLTGKGRSYGGSLIRPEATGYGLVYFAREMLATKDK

SEQ ID NO: 98458 - protein, 111 aa, Unknown
  Bacterial polypetide isolated from the Sargasso Sea
DNGCTTVGEGANMPCTPEAIELFLKNKVLFAPGKASNAGGVAVSGLEMAQNSLRYTWTRDVVDGKLKEIMSDIHSSCVNYGSYKDDINYVKGANIAGFVKVADAMLAQGVV

SEQ ID NO: 98459 - protein, 281 aa, Unknown
  Bacterial polypetide isolated from the Sargasso Sea
GPYKGGLRFHPSVNLSILKFLAFEQVFKNSLTTLPMGGGKGGSDFDPKGKSDAEIMRFCQSFMLELNRHIGANIDVPAGDIGVGGREIGYLYGMYRKIRNEFTGVLTGKGMSYGGSLIRPEATGYGQVYFAREMLKTRGLSLEGKICLVSGSGNVAQFATQKVLQLGGKVVTMSDSGGFIYDADGITSEKLEWIMELKNVRRGRISEYANQFEGATYTPVDHSLDYNPLWAVDADVALPAATQNEINGTDAKNLLSNNVYVVSEGSNMPSTPEAIDHFIEA

SEQ ID NO: 98460 - protein, 257 aa, Unknown
  Bacterial polypetide isolated from the Sargasso Sea
MSLSVDSFLTRLKQRDPDQPEFHQAVEEVVRSLWPFLEANPRYREAGILERMVEPERAILFRVPWVDDRGQVQVNRGYRIQMSSAIGPYKGGLRFHPSVNLGVLKFLAFEQVFKNSLTSLPMGGGKGGADFDPKGKSEGEVMRFCQSFMAELYRHIGADLDVPAGDIGVGGREIGYLFGQYKRLSNQFTSVLTGKGLSYGGSLIRPEATGYGCVYFAQEMLKRIDQGFEDKRVAISGSGNVAQYAAQKVMELGGRVI

SEQ ID NO: 98461 - protein, 201 aa, Unknown
  Bacterial polypetide isolated from the Sargasso Sea
MYKSVQDFMSYVESRSYGEKEFHQAVDEVVVSLWDFLQDHPDYLHAKVLERMIEPERVIMFRVPWRNDRGDVEVNRGYRVEFNSAIGPYKGGLRFHPSVNLGILKFLGFEQVFKNSLTTLPMGGGKGGSDFDPKGKSDNEVMSFCQSFMTELYRHIGNNTDVPAGDIGVGGREIGYMFGQYKRIRNEFTGVLTGKGLNWGG

SEQ ID NO: 98462 - protein, 243 aa, Unknown
  Bacterial polypetide isolated from the Sargasso Sea
LIRPEATGYGCVYFFEEMLNAIDDSIKGKNIAISGSGNVAQYAAEKVNELGGKVITLSDSGGSIHDPDGIDDDKLAYIMELKNVKRGRISEYSEKYNVSYMDGERPWSIPCDVALPCATQNEISGSEAKTLVKNGCKAVSEGANMPSDPEAVEIFLNNKILFGPGKAANAGGVAVSGLEMSQNSMRLSWSREEVDQKLHGIMKSIHKACVKYGSNGKRIDYVKGANIAGFIKVADAMIDQGVV

SEQ ID NO: 98463 - protein, 247 aa, Unknown
  Bacterial polypetide isolated from the Sargasso Sea
KYLKFLGFEQTFKNSLTGLPMGGGKGGANFNPKGKSNNEVMRFCQSFVTELYRHIGEDTDVPAGDIGVGGREIGYMFGQYKRITNRFVGVLTGKGLEFGGSKMRTEATGYGTIFFLNNMLKHQSQSLDGKRVIISGSGNVATHAAEKVLQLGGQPLTLSDSGGFIHCSDGFNQEQINWIKDLKGLRRGRISEAADEFNNIEFHEGKKPWGVEADYATPCATQNEISGADAELMLNNGIKAVAEGANM

SEQ ID NO: 98464 - protein, 309 aa, Unknown
  Bacterial polypetide isolated from the Sargasso Sea
NPKGKSENEVMRFCQSFMTELYRHIGADVDVPAGDIGVGGREIGYMFGQYKRITNHFTGVLTGKGLEYGGSEMRPEATGYGAAYFLEEMLKTKGDAIEGKDVIISGSGNVATFAAEKITHRGGKVLTLSDSAGFIYDKDGIDEEKLQWIMELKNVRRGRISEYVDKFSGAEYHAGKRPWGVNADLAMPCATQNEITAEDAKTMLGNSIMAVSEGANMPTNIDGIHQFLDAKILFAPAKAANAGGVGMSGLEMSQNSERRSWSNEELSKMLRDLMTGIHNNCHAAGKQKDGWCNYMAGSTLLGLKKVQML

SEQ ID NO: 98465 - protein, 287 aa, Unknown
  Bacterial polypetide isolated from the Sargasso Sea
MKYDSVGSFLSHVALRNPGQPEFLQAVTEVMESLWPFIEKNPRYAEQGLLERLVEPERVVMFRVSWTDDLGTVQVNRGYRIQHSMAIGPYKGGLRFHPSVNLSVLKFLAFEQTFKNALTTLPMGGGKGGSDFDPKGKSPAEVMRFCQAFVTELYRHVGPDTDVPAGDIGVGGREVGYMAGMYKKLANNAASVFTGKGLSFGGSLIRPEATGYGTVYFADEMLKTRGKSFKGMRVSVSGSGNVAQYAVEKAMELGAKVVTVSDSSGTIIDEEGFTPEKLAILMDVKNH

SEQ ID NO: 98466 - protein, 305 aa, Unknown
  Bacterial polypetide isolated from the Sargasso Sea
MSSKYQSSIDAFMESVKAKNSNETEFLQAVEEVAEAVIPIIEETPKYKNSKILDRIVEPERVIMFRVPWLDDNGDTQVNRGFRVEFNSAIGPYKGGLRFHPSVNLSILKFLGFEQIFKNSLTTLPMGGGKGGSDFNPKGKSDNEVMKFCQSFMTELSRHIGPDTDVPAGDIGVGGREIGYMFGQYKRIRNEFTGVLTGKGRNWGGSLIRPEATGYGTVYFAKEMLAVKNDSFNGKTVAISGSGNVAQYACEKVTQLGGKVVTFSDSKGYIYDEDGIDASKLAFVMDLKNVKRGRISEYVKEYPNA

SEQ ID NO: 98467 - protein, 272 aa, Unknown
  Bacterial polypetide isolated from the Sargasso Sea
MTAKLDEKLEPIYQDVLHRNPGEKEFHQAVHEVLETLGPVLVKYPEFADKKIIQRICEPERQIIFRVPWQDDSGEIHINRAFRVEFNSALGPYKGGMRFHPSVYLGIIKFLGFEQIFKNALTGLPIGGGKGGSDFDPKGKSDDEIMRFCQSLMTELYRHLGEYTDVPAGDIGVGGREIGYLFGQYKRITNRYESGVFTGKGLDWGGSRARTEATGYGTVFFTHEMLKARGDSLEGKTVVVSGSGNVAIYAIDKCHELGAKVIACSDSQGMIV

SEQ ID NO: 98468 - protein, 313 aa, Unknown
  Bacterial polypetide isolated from the Sargasso Sea
KGGSILIPKGKSDNEVMSFCQSFMSELFRHIGNNTDVPAGDIGVGGREIGYMFGQYKRICNEFTGVLTGKGLNWGGSLIRPEATGYGCVYFAEEMLKTKDDSFKGKTVAISGSGNVAQYATEKVNDLGGKVVTLSDSSGTVYDKNGIDSEKLAFIMELKNVKRGRIKEYADKYSTEYLEGEKPWRVACDVALPCATQNELNIDEAKELTKNGCIAVAEGANMPTEPDAVNLFLQEKILFGPGKAANAGGVAVSGLEMSQNSMRLSWSREEVDERLHTIMKNIHSACTKHGTEGDYTNYVKGANIAGFIKVADA

SEQ ID NO: 98469 - protein, 258 aa, Unknown
  Bacterial polypetide isolated from the Sargasso Sea
SGVLTGKGLNWGGSRIRPEATGYGAVYFAEEMLKLRNESFEGKTVAVSGSGNVAQYATEKVTQLGAKVVTMSDSNGTIHDPDGINEEKLAWIMDLKNIKRGRIKEYASEFNCDYIDGKKPWVIPCDIALPCATQNEINSNDAKILIKNGCICVSEGANMPSDAEAIDVFTNKKILFGPGKAANAGGVAVSGLEMSQNNMGLAWARDEVDQRLRQIMKDIHSQCTEFGLDADNYVNYVKGANIGGFIKVADAMIDQGVV

SEQ ID NO: 98470 - protein, 259 aa, Unknown
  Bacterial polypetide isolated from the Sargasso Sea
KFLGFEQIFKNSLTTLPMGGGKGGADFDPKGKSDNEVMSFCQSFMTELNRHIGPQTDVPAGDIGVGGREIGYMFGQYKRIKNEFTGVLTGKGLNWGGSLIRPEATGYGCVYFAENMLKTRGESFKGKTVAISGSGNVAQYSTEKVIELGGKVVTLSDSSGTIYDPSGIDSNKLAWVMDLKNTRRGRIQEYQDKFGGEYWDSKRPWAAKCDVALPSATQNEINKLDAETLIGNGCICVAEGANMPSDPDAIEVYLKNKIL

SEQ ID NO: 98471 - protein, 299 aa, Unknown
  Bacterial polypetide isolated from the Sargasso Sea
GKSDNEVMSFCQSFMTELSRHIGPDTDVPAGDIGVGGREIGYLFGQYKRISNEFSGILTGKGLNWGGSLIRPEATGYGCVYFTEEMLNANNDSIKGKNVAISGSGNVAQYAAEKVNELGGKVISLSDSGGSIHDPDGIDDEKLEYIMDLKNVKRGRISEYSEEYSVSYMEGERPWSIPCDIALPCATQNEISGSEAKTLVKNGCKAVSEGANMPSDPDAVEIFLNNKLLFGPGKAANAGGVAVSGLEMSQNSMRLSWSRQEVDEKLRGIMKSIHEACVKHGANGDNVDYVKGANIAGFI

SEQ ID NO: 98472 - protein, 261 aa, Unknown
  Bacterial polypetide isolated from the Sargasso Sea
ACLEVLETLGPAIDAHPEYIPIVERICEPERIIQFRVTWVDDQGEQKVNRGFRIQYNGAIGPYKGGLRFHPSVNESILKFLAFEQIFKNSLTTLPMGGGKGGSDFDPKGKSDGEVMRFCQAFMMELWRHIGHNLDVPAGDIGVGGREIGYMFGMYKRLRNDFESGVLTGKGRSYGGSLIRPEATGYGLVYFAREMLATKDKSFEGANVAISGSGNVAQFACEKVLDLGGKPVTMSDSSGWIHDPAGIDREKLAWIMDLKNN

SEQ ID NO: 98473 - protein, 328 aa, Unknown
  Bacterial polypetide isolated from the Sargasso Sea
VGKRNQNEPEFMQAVTEVAETVIPYIYQNEIYYGQNILLRMVEPERVVSFRVAWIDDQEEIRVNRGYRIEMNSAIGPYKGGLRFHPNVNLSVLKFLAFEQIFKNSLTTLPMGGGKGGSDFNPKGKTDTEVMRFCQSFMTELFRHIGPNRDIPAGDIGVGSREIGYLFGQYKRLKNEFTGVLTGKGVSWGGSLIRPEATGYGVVYFVEKMLEQKNLDFKDKKVSISGSGNVAQYAAEKVISLGGKVITMSDSSGFILDKDGIDAEKLNYVMKIKNIDRERINKYVKKFSSALYFQNKTPWSVGCDIALPCATQNDLQLEDAKSLIKNGC

SEQ ID NO: 98474 - protein, 310 aa, Unknown
  Bacterial polypetide isolated from the Sargasso Sea
RMVEPERSIIFRVPWVDDQGRVQVNRGFRIQMNSAIGPYKGGLRFHPSVNIGVLKFLAFEQVFKNSLTSLPMGGGKGGSDFNPKGKSDNEVMRFCQSFMTELYRHIGADLDVPAGDIGVGGREIGFLFGQYKRLSNQFTSVLTGKGLAYGGSLIRPEATGYGCVYFAEEMLKSSHSSFDGKRVAISGSGNVAQYAAQKVMELGGRVVSLSDSGGTLHFADGMTAEQWTYLMDLKNVRRGRLEEMGTHFGVTYLADQRPWSLPCDIALPCATQNELDGEDARALLKNGCICVAEGANMPSTLEAVDLSSRP

SEQ ID NO: 98475 - protein, 208 aa, Unknown
  Bacterial polypetide isolated from the Sargasso Sea
MDRINSFNSAIIARNPAEHEFHQAVQEFTGAVMPYVMANAKYDDGHVLERMTEPDRIVIFRVCWEDDNGHIHCNRAWRVQFNNAIGPYKGGLRFHPNVTQSVLKFLAFEQVYKNALTGLPMGGGKGGSDFDPKGKSDREIMRFCQSLMIELSKHIGEDTDIPAGDIGVGGREISYLFGQYKRLKNRFVGTLTGKGLSYGGSLIRTEAT

SEQ ID NO: 98476 - protein, 181 aa, Unknown
  Bacterial polypetide isolated from the Sargasso Sea
MEKIINGFIKEVSSRNQNEPEFMQAVSEVAENVIPYIVQNKIYYGQNILLRMVEPERVLSFRVAWIDDNEEIQVNRGYRVEMNSAIGPYKGGLRFHPNVNLSVLKFLAFEQIFKNSLTTLPMGGGKGGADFDPKGRSDTEVMRFCQSFMTELFRHIGPNRDIPAGDIGVGSREIGYLFGPI

SEQ ID NO: 98477 - protein, 281 aa, Unknown
  Bacterial polypetide isolated from the Sargasso Sea
MGGGKGGSDFDPKGKSENEVMSFCQSFMTELFRHIGANTDVPAGDIGVGGREIGYLFGQYKRISNEFTGVLTGKGLNWGGSLIRPEATGYGCVYFAQEMLENVGDDLEGKVVSISGSGNVAQYATEKATELGAKVVTMSDSSGTIHDPDGINSEKLNWVMDLKNNKRGRISKYAEEFKVKYYDGDRPWGIKCDIALPCATQNEIMDADAKQLVSNGCRVISEGANMPSDPEAISIFQGTDVLFGPGKASNAGGVATSGLEMSQNSMRINWDRDEVDKKLKN

SEQ ID NO: 98478 - protein, 185 aa, Unknown
  Bacterial polypetide isolated from the Sargasso Sea
SSGYIYDKEGINEEKLNHIMDIKNNKRGRISEYLKKYPKAEFIKGKKPWEVKCDVAFPSATQNEVNGTDAKTLLKNGCICVAEGANMPCDHNAIKQFKDNKILFAPGKASNAGGVAVSGLEMAQNSLRYSWTREEVDEKLKEIMIKIHKKCLKYGKEKDYVDYGKGANISSFIKVADAMLAQGVV

SEQ ID NO: 98479 - protein, 225 aa, Unknown
  Bacterial polypetide isolated from the Sargasso Sea
MYSSVQDFMAMIENKNPNEVEFHQAVREVIESLWDFLDKNQNYIYSGVMQRIVEPERVIMFRVPWRNDRGEVEVNKGYRIEFNSAIGPYKGGLRFHPSVNLSILKFLGFEQVFKNSLTTLPMGGGKGGSDFDPKGKSDTEVMSFCQSFMTELCRHIGPDTDVPAGDIGVGGREIGYMFGQYKRIRNEFTGVLTGKGLNWGGSLIRPEATGYGCVYFVDEMLKHAG

SEQ ID NO: 98480 - protein, 315 aa, Unknown
  Bacterial polypetide isolated from the Sargasso Sea
FRVPWVDDKGQVQVNRGMRVDFNSAIGPYKGGLRFHPSVNLGIIKFLGFEQILKNALTTRPIGGGKGGSDFDPKGKSDMEVMRFCQSFMNELFRHIGANVDVPAGDIGVGGREIGYLFGQYKKLTRKWEGVLTGKSYGWGGSLIRPEATGYGQVYFLREMLASKGDSIEGKKCAISGSGNVAQFCAQKVLSYGGKVITMSDSGGYIFDKDGIDEDKLAWIMDLKNNRRGRIKEYTSEYPGAVYHEGNRPWGEDCDIALPSATQNEIEEKGAKNLVKNGCIAISEGANMPTSPAAYEIISEAGILFGPAKAANAGG

SEQ ID NO: 98481 - protein, 280 aa, Unknown
  Bacterial polypetide isolated from the Sargasso Sea
DIGVGGREIGFLFGQYKRIRNEFTGVLTGKGLNWGGSLIRPEATGYGCVYFAQEMLKRTENSFDGKIVTVSGSGNVAQYATEKATELGAKVVSLSDSSGTIHDPDGIDSEKLSWVMDLKNNKRGRIKEYAKEFNVEYLENQNPWIISCDIALPCATQNEINGEDAKILIKNGCKVVSEGANMPSDPDAVNLFQNSDILFGPGKAANAGGVATSGLEMSQNSMRINWPRQEVDSKLKNIMKNIHESCVTHGKEGEGVNYVKGANIAGFIKVADAMMDQGVV

SEQ ID NO: 98482 - protein, 216 aa, Unknown
  Bacterial polypetide isolated from the Sargasso Sea
MYKSVDAFMKNVISRSPGENEFHQAVHEVITSIWGYVQDHPQYIHEGILDRIIEPERVIMFRVPWRDDRGKTQVNRGYRVEFNSAIGPYKGGLRFHASVNLSILKFLGFEQIFKNSLTTLPMGGGKGGSDFDPKGKSDNEVMSFTQSFMSELFRHIGPNTDVPAGDIGVGGREIGYLFGQYKRLRNEFSGVLTGKGLNWGGSKIRPEATGYGAVYF

SEQ ID NO: 98483 - protein, 243 aa, Unknown
  Bacterial polypetide isolated from the Sargasso Sea
TEATGYGAVYFLDNMMKHAGDGLEGRIAVVSGSGNVATHAAEKLLQLGAKPVTLSDSGGFIYDAEGISQEKLDWVKHLKTVKRGRISEYCEEFSGATYHEGERPWGVKCDVALPCATQNELRGDDARVLTKNGCIAISEGANMPTDLEGAHVFKDAKVLYAPGKAANAGGVAVSGLEMSQNSARISWKEEELQQLLRDIMDGIHSRCVEHGVSQDDDYVDYVKGANIAGFVKVADAMLAYGVV

SEQ ID NO: 98484 - protein, 267 aa, Unknown
  Bacterial polypetide isolated from the Sargasso Sea
MDRIRSFNSKIIERNPAENEFHQAVQEFTGSVMPYVMTNPKYDDGHILQRMTEPDRIVIFRVCWEDDKGNIHCNRAWRVQFNNAIGPYKGGLRFHPNVTQSVLKFLAFEQVYKNALTGLPMGGGKGGSDFDPKGKSDREIMRFCQSLMIELSKHIGEDTDIPAGDIGVGGREISYLFGQYKRLKNRFVGTLTGKGLSYGGSLIRTEATGYGVVYFTQHMLNERNEKIAGKTALISGAGNVAIFCAEKLLSEGAKVITLSDSSGFIYD

SEQ ID NO: 98485 - protein, 280 aa, Unknown
  Bacterial polypetide isolated from the Sargasso Sea
EKGGSDFDPKGKSDNEVMSFCQSFMTELSRHIGNNTDVPAGDIGVGGREIGYMFGQYKRVRNEFTGVLTGKGLNWGGSLIRPEATGYGCVYFAEEMLNTKGESFKGKSVAVSGSGNVAQYATEKVNDLGGKVVTLSDSGGTVYDKDGIDPEKLAFVIELKNVKRGRIKEYAEKFNAEYMEGSRPWSVNCDVALPCATQNELNESEAKELVNNGCIAVAEGANMPTEPAAVSHFLDKKILFGPGKAANAGGVAVSGLEMSQNSMRLSWAREEVDERLHSIM

SEQ ID NO: 98486 - protein, 159 aa, Unknown
  Bacterial polypetide isolated from the Sargasso Sea
MDKIIKQFLSQVSQKNQNEPEFMQAVTEVAETVIPYIVTQDIYYGQNILLRMVEPERVVSFRVAWIDDKEEIQVNRGYRIEMNSAIGPYKGGLRFHPSVNLSILKFLAFEQVFKNALTTLPMGGGKGGSDFDPKGKSDTEVMRFCQSFMTELFRHIGPN

SEQ ID NO: 98487 - protein, 209 aa, Unknown
  Bacterial polypetide isolated from the Sargasso Sea
MEGVTKRNPGQPEFVQAVYEVASTIFPYIADKPQYHESQILERMAEPERVISFRVPWTDDKGNIRTNRGWRVQFNSAIGPYKGGLRFHPSVNESILKFLGFEQTFKNSLTGLPMGGGKGGANFNPKGKSDNEVMRFCQSFMTELVRHIGPDTDVPAGDIGVGGREIGYMFGQYKRMTNSFVGVLTGKGLEFGGSKMRTEATGYGAIFFL

SEQ ID NO: 98488 - protein, 151 aa, Unknown
  Bacterial polypetide isolated from the Sargasso Sea
ADNFNCEYFEGKRPWSIKCDVALPCATQNEINESDAKELVKNGVVAVSEGANMPSDPDAVHVFQKSNVLFGPGKAANAGGVAVSGLEMSQNSMRIKWESEEVDEKLFNIMQNIHASCVENGSQNNIVDYVKGANIAGFIKVADAMIDQGVV

SEQ ID NO: 98489 - protein, 204 aa, Unknown
  Bacterial polypetide isolated from the Sargasso Sea
MARADHPDIEKFLEGVKTRNPGQPEFVQAVQEVAQDIFPFIQDKTEYHEYQILRRIAEPDRVVSFRVCWEDDENNIRVQRGWRVQNNNSIGPYKGGIRFHPTVTEGVLKFLAFEQTFKNSLTGLPMGGGKGGSNFNPRGKSEHEVMRFCQSFMTELFRHVGDDIDVPAGDIGVGAREIGYMFGQYKRITNRFTGVLTGKGLEYG

SEQ ID NO: 98490 - protein, 271 aa, Unknown
  Bacterial polypetide isolated from the Sargasso Sea
MVEPERVVMFRVNWIDDNGEIRVNRGYRVEMNSAIGPYKGGLRFHPSVNLSILKFLAFEQVFKNSLTTLPMGGGKGGADFDPKNKSDGEVMRFCQSFMTELFRHIGPNTDIPAGDIGVGGREIGYLFGQYKRLKNEFTGVLTGKGVSWGGSLIRPEATGYGTVYFAEDMLNHIGDSIKGKTVTISGSGNVAQYAAEKCLHLGAKVLTMSDSSGYIYDKEGINEEKLNHIMDIKNNKRGRISEYIKKYPKAEFIKGKKPWAVKCDVALPSAT

SEQ ID NO: 98491 - protein, 288 aa, Unknown
  Bacterial polypetide isolated from the Sargasso Sea
MTTATENKELTNFMTALKKQHPGEEEFHQAVQEVAESVFPFIEANPKYQQANILERLVEPDRIVIFKVTWESDDGTINVNRGYRVQFNNAIGPYKGGLRFHPSVTLGTFKFLGFEQIFKNSLTTLPMGGAKGGSDFDPKGKSDREVMRFCQAFMLELQRHIGSNVDIPAGDIGVGAREISFLFGMYKKIQNNFTGTITGKQLNIGGSLIRTEATGYGAVYFADEMLAHAGDSLKGKICVVSGSGNVAQFTVEKLLDYGAKVVSLSDSSGTIHDKDGITREKLEFVKEL

SEQ ID NO: 98492 - protein, 179 aa, Unknown
  Bacterial polypetide isolated from the Sargasso Sea
MTLSKEKFMNNVHLKNPGENEFHQAVEEVVESLWGFLEDNNYYLQAKILERMIEPERVIQFRVPWRNDIGEVQINRGYRVEFNSAIGPFKGGLRFHPSVNLSILKFLGFEQVFKNSLTTLPMGGGKGGSDFDPKGKTDNEVMNFCQSFMTELYRHIGPNTDIPAGDIGVGGREIGFMFG

SEQ ID NO: 98493 - protein, 206 aa, Unknown
  Bacterial polypetide isolated from the Sargasso Sea
MYTSIEQFMEYVQSKNPGENEFYQAVHEVTESLWEFLQNNPHYAYYKVLDRMVEPERVIQFRVPWRDDRGEIQINRGYRVEFNSAIGPYKGGLRFHPSVNLSILKFLGFEQVFKNSLTTLPMGGGKGGSDFDPKGKSENEVMSFCQSFMTELSRHIGPDTDVPAGDIGVGGREIGFMYGQYKRIRNEFTGVLTGKGLNWGGSLIRP

SEQ ID NO: 98494 - protein, 261 aa, Unknown
  Bacterial polypetide isolated from the Sargasso Sea
MKYKSKKEFLDSVVDNYSDQKEFHQAVEEVIHSIWDTATSSEEYCKFNILDRIVVPDRTIIFRVPWMDDKNNVHVNLGYRIQFNSAIGPYKGGLRFHPNVNLGVLKFLAFEQVFKNSLTGLNLGGGKGGSNFDPKGKSDKEIMSFCYAFMNELYRHIGRRTDIPAGDIGVGAREIGYMFGQYKKIRNAFTGVLTGKGTNWGGSLIRPEATGYGLVYFVLEMLDTRKDSLKGKTVTVSGSGNVAQFACEKLIELGAKPSNSF

SEQ ID NO: 98495 - protein, 448 aa, Unknown
  Bacterial polypetide isolated from the Sargasso Sea
MSHSLSQADFLAQVASRNPHQPEFIQAVSEVIASIWPYVVRHPRYLQHGLLERLVEPERLIQFRVSWVDDRGQVQVNRGYRVQHSSAIGPFKGGMRFHPSVDTSVLKFLAFEQTFKNALTTLPMGGGKGGSDFDPKGKSEGEVMRFCQALMLELHRHLGADTDVPAGDIGVGGREVSYMAGMMKKLTNSAECVFTGKGLSFGGSLIRPEATGYGLLYFVEAMLANRGQSLDGMTVSVSGSGNVAQYAIEKAMALGARVITASDSGGTVYDPAGFTPEKLARLMALKNEQRKRIADYAHEEGLEFFSGRTPWHLPTDVALPCATQNELDESDATTLIANGVQLVAEGANMPSSAAAIRRLHDAKVLFAPGKAANAGGVATSGLEMSQNAQRLCWSREEVDARLKGIMTSIHATCVHYGQDETGHVNYESGANIAGFVKVADAMLAQGVC

SEQ ID NO: 98496 - protein, 274 aa, Unknown
  Bacterial polypetide isolated from the Sargasso Sea
MYSSIDQFMDTVHSKNAGEVEFHQAVHEVVESLWDFLKDNPHYLHAKVLDRIIEPERVIQFRVPWRNDKGEVEVNRGFRVEFNSAIGPYKGGLRFHPSVNLSILKFLGFEQVFKNSLTTLPMGGGKGGSDFDPKGKSDNEVMSFCQSFMTELYRHIGPDTDVPAGDIGVGGREIGYLFGQYKRIRNEFTGVLTGKGLNWGGSLIRPEATGYGCVYFAEEMLKKVGDSFDGKQVAVSGSGNVAQYATEKATELGAKVITLSDSSGTIHDQNGIDG

SEQ ID NO: 98497 - protein, 446 aa, Unknown
  Bacterial polypetide isolated from the Sargasso Sea
MEKIIKQFLSEVNKKNQNEPEFMQAVTEVAETVIPYIVTKDIYYGQNILLRMVEPERVVTFRVAWIDDNEEIQVNRGFRIEMNSAIGPYKGGLRFHPSVNMSILKFLAFEQVFKNALTTLPMGGGKGGSDFDPKGKSDTEVMRFCQSFMTELFRHIGPNKDIPAGDIGVGGREIGYLFGQYKRLKNEFSGVLTGKGVSWGGSLIRPEATGYGVVYFIDEMLKNNGDGLKNKSVVISGSGNVAQYATEKCVDMGAKVLTLSDSSGYIYDKDGINKEKLEYIMELKNDKRERISEYVKKYSKAEFHSDKKPWSVKCDIAIPCATENELNLIDAKELLKNGCKTVGEGANMPCTSDAVKLFIKNKIQYAPGKASNAGGVAVSGLEMAQNSLRYTWSREVVDGKLKEIMSDIHSSCLKYGADKDYINYVKGANIAGFVKVADAMLAQGVV

SEQ ID NO: 98498 - protein, 450 aa, Unknown
  Bacterial polypetide isolated from the Sargasso Sea
MNYLSTTISQLKQSSPAQTEFYQAVEEVLRTLEPVLEKNNYYAKHSIIQRLVEPERQIMFRVPWQDDSGNIQINKGYRIEFNSALGPYKGGLRFHPSVNASIIKFLGFEQIFKNALTGLPIGGGKGGANFDPKGRSDAEIMRFCQSFMNELYRHIGPNTDVPAGDIGVGAREIGYMFGQYKRLTGKYEGVLTGKGLLWGGSYARKEATGYGTVYFADHMLNARGENLQGQRCLVSGAGNVAIYAMEKLYQLGATPIACSDSTGTLYHAQGLDLSLIKELKEKERTSLLRYLKSHPRAQFIPISEYPSGGHTIWRYKADLAFPCATQNELTTRDAEALVSNGCKLVSEGANMASSQGAVEYFLKAGISYGPGKAANAGGVATSQLEMAQNASMQKWTFEQVDCQLLQITKDIYLRASETAREFGAPGNLVLGANIAAFRRVADAMIEQGVV

SEQ ID NO: 98499 - protein, 248 aa, Unknown
  Bacterial polypetide isolated from the Sargasso Sea
MKKIVQKFLKHVSSRNQNEPEFMQAVTEVAETVIPYIITKDIYYGQNVLLRMVEPERVISFRVAWIDDNEEIQVNRGYRVQMNSAIGPYKGGLRFHPSVNLSVLKFLAFEQVFKNSLTTLPMGGGKGGSDFNPKGKSDTEVMRFCQSFMSELYRHIGPNNDVPAGDIGVGGREIGYLFGQYKRLSNEFSGVLTGKGVSWGGSLIRPEATGYGVVYFTVQMLNHINESIEGKSVVISGSGNVAQLQQKN

SEQ ID NO: 98500 - protein, 445 aa, Unknown
  Bacterial polypetide isolated from the Sargasso Sea
MYKSVQDFMSYVESRSYGEKEFHQAVDEVVVSLWDFLQDHPDYLHAKVLERMIEPERVIMFRVPWRNDRGDVEVNRGYRVEFNSAIGPYKGGLRFHPSVNLGILKFLGFEQVFKNSLTTLPMGGGKGGSDFDPKGKSDNEVMSFCQSFMTELYRHIGNNTDVPAGDIGVGGREIGYMFGQYKRIRNEFTGVLTGKGLNWGGSLIRPEATGYGCVYFAEEMLNTKDESFKGKTVAISGSGNVAQYAAEKVNDLGGKVVTLSDSSGTVYDKDGINAEKLAFVMDLKNVKRGRIKDYADKFNAEFHEGERPWKISCDVALPCATQNELNKSEAKELVKNGCLAVAEGANMPTEPDAVNLFLKEKILFGPGKAANAGGVAVSGLEMSQNSMRLSWTREEVDGRLHDIMKNIHTSCTANGKEGKFVNYVKGANIAGFIKVADAMMDQGIV

SEQ ID NO: 98501 - protein, 216 aa, Unknown
  Bacterial polypetide isolated from the Sargasso Sea
MFRNMNDFLDSVKSKNQHETEFHQAVHEVIESIWDFVSDNPHYQHNAILERITEPERVLMFRVPWTDDKGNIHVNKGFRIEFNSAIGPYKGGLRFHPSVNLSILKFLGFEQVFKNSLTTLPMGGGKGGSDFDPKGKSDAEVMRFCQSFMTELCRHIGQHTDVPAGDIGVGGREIGFMFGQYKRIRNEFTGVLTGKGLNWGGSLIRPEATGYGAVYF

SEQ ID NO: 98502 - protein, 446 aa, Unknown
  Bacterial polypetide isolated from the Sargasso Sea
MYKSVDNFMKNVISRSPGEDEFHQAVHEVISSIWGYVQDHPQYIHEGILDRIVEPERVIMFRVPWRDDRGKTQVNRGYRVEFNSAIGPYKGGLRFHASVNLSILKFLGFEQIFKNSLTTLPMGGGKGGSDFDPKGKSDNEVMSFCQSFMTELFRHIGPKTDVPAGDIGVGGREIGYLFGQYKRLRNEFTGVLTGKGLNWGGSRIRPEATGYGAVYFAEEMLKRRNESFEGKTVAVSGSGNVAQYATEKVTQLGAKVVTMSDSNGTIHDPDGINEEKLAWIMDLKNIKRGRIKEYSSEFNCDYIDGKKPWVIPCDIALPCATQNEINSNDAKILIKNGCICVSEGANMPSDAEAIDVFTNKKILFGPGKAANAGGVAVSGLEMSQNNMGLAWARDEVDQRLRQIMKDIHSQCTEFGSDADNYVNYVKGANIGGFIKVADAMIDQGVV

SEQ ID NO: 98503 - protein, 355 aa, Unknown
  Bacterial polypetide isolated from the Sargasso Sea
GGLRFHPSVNLSILKFLGFEQVFKNSLTTLPMGGGKGGSDFDPKGKSDSEVMSFCQSFMTELCRHIGPDTDVPAGDIGVGGREIGYMFGQYKRIRNEFTGVLTGKGLNWGGSLIRPEATGYGCVYFVDEMLKHAGKGLDEKHVAVSGSGNVAQYATEKVTQLGGKVVTLSDSSGFIHDPNGIDQEKLEWVIDLKNNKRGRIKEYADNFNCEYFEGKRPWSIKCDVALPCATQNEINESDAKELVKNGVVAVSEGANMPSDPDAIHVFQNSNILFGPGKAANAGGVAVSGLEMSQNSMRIKWESEEVDKKLFNIMQNIHSSCVEHGDQKNIIDYVKGANIAGFIKVADAMIDQGVV

SEQ ID NO: 98504 - protein, 452 aa, Unknown
  Bacterial polypetide isolated from the Sargasso Sea
MDNAIKTVYETVITRDPDQPEFHQAVEEVLESLGPVISENPEYMDVVHSMVEAERVIQFRVPWYDDEGSLQVNRGYRVQFNSAIGPYKGGLRFHPSVNLSILKFLGFEQVFKNSLTGLPMGGGKGGSDFNPKGRSDSEVKRFCQSYMSELWRHIGADLDVPAGDIGVGGREIGYMFGMFRKLANEFTAGVLTGKGLSYGGSLIRPEATGYGLVYFAREMLSTKGKSFEGARVAISGSGNVAQFACEKVLDLGGKPVTMSDSGGYIYDESGIDREKLAWIMDLKNNKRGRIKEYADHFDGVEYTESKPEPNHNELWATEVDVALPCATQNEVNEAEARMLVEGGVIAVAEGANMPCTPEAIEVFHENGILFGPGKASNAGGVATSGLEMSQNSLRMSWTREEVDQKLESIMVNIHKNAFETAEKYGMPGNYVAGANIAGFLKIAEATMAQGVL

SEQ ID NO: 98505 - protein, 378 aa, Unknown
  Bacterial polypetide isolated from the Sargasso Sea
MYSTIDEFMDYVEIKNPGEKEFHQAVHEVVESLWDYLKDNPHYLHSRILERVVEPERVIQFRVPWRNDRGNTEVNRGFRVEFNSAIGPYKGGLRFHPSVNLSILKFLGFEQVFKNSLTTLPMGGGKGGSDFDPKGKSDNEVMSFCQSFMTELYRHIGPNTDVPAGDIGVGGREIGFLFGQYKRIVNEFTGVLTGKGLNWGGSLIRPEATGYGCVYFAEEMLKKKGNGFEGKVIAVSGSGNVAQYATEKATDLGAKVVTLSDSSGSIHDKNGITPEKLAWVMDLKNNRRGRIKDYAIEFKVDYLEAQTPWSIPCDIALPCATQNEINGDDAKVLLSNGCKVVSEGANMPSDTQAVTVFQESDMLFGPGKAANAGGVQPA

SEQ ID NO: 98506 - protein, 432 aa, Unknown
  Bacterial polypetide isolated from the Sargasso Sea
MDKIVKQFLSQVSQKNQNEPEFMQAVNEVAETVIPYIVTKEIYYGQNILLRMVEPERVVSFRVAWIDDNEEIQVNRGYRIEMNSAIGPYKGGLRFHPSVNLSILKFLAFEQVFKNALTTLPMGGGKGGSDFDPKGKSDTEVMRFCQSFMTELFRHIGPNKDIPAGDIGVGGREIGYLFGQYKRLKNEFSGVLTGKGISWGGSLIRPEATGYGVVYFIDEMLKNKGDSMKGKKVTISGSGNVAQYATEKCIDMGAKVLTLSDSSGFIYDKDGIDSEKLKYIMELKNEKRVRISEYIKKYSKAEFYSKKSPWNIKCDIAIPCATQNELGKEDAMSLIKNGCNSVGEGANMPCTPDAVEQFINNKVLYAPGKASNAGGVAVSGLEMAQNSLRYTWTRNVVDGKLKEIMSDIHASCVKYGSTKDEINYLKGANIAG

SEQ ID NO: 98507 - protein, 289 aa, Unknown
  Bacterial polypetide isolated from the Sargasso Sea
PNKDIPAGDIGVGGREIGYMFGQYKRLKNEFSGVFTGKGISWGGSLIRPEATGYGVAYFIEEMLKHKKKNVKGKKVIISGSGNVAQFATEKFIEMGGKVLTMSDSSGFIHDPAGINKDKLKYVMQLKNEQRGRISEYEKKYPKAKFFSKDKPWKVGCDIAIPCATENELNQSDAKTLIKNGVMAVAEGANMPCTPEAIKAFQNSKVLYAPGKASNAGGVAVSGLEMAQNSLKNTWSRKIVDGKLQEIMTDIHSSCLEYGKEKNSIDYLKGANIAGFVKVADAMLAQGVV

SEQ ID NO: 98508 - protein, 223 aa, Unknown
  Bacterial polypetide isolated from the Sargasso Sea
KGDNLKGKKVTISGSGNVAQYATEKCIDMGAKVLTLSDSSGFIYDKDGIDSEKLQYIMEIKNGKRARISEYLKKYSKAEYYPKKSPWIIKCDIAIPCATQNELDLKDANSLIKNGCSTVGEGANMPCTPDAVELFISNKILYAPGKASNAGGVAVSGLEMAQNSLRYTWTRDAVDGKLKEIISDIHTSCVKYGSSKSEINYVKGANIAGFVKVADAMLAQGVV

SEQ ID NO: 98509 - protein, 357 aa, Unknown
  Bacterial polypetide isolated from the Sargasso Sea
MEKIIKQFLSEVNQRNQNEPEFMQAVTEVAETVIPYIVTKDIYYGQNILLRMVEPERVVSFRVAWIDDNEEIQVNRGYRIEMNSAIGPYKGGLRFHPSVNMSILKFLAFEQVFKNALTTLPMGGGKGGSDFDPKGKSDTEVMRFCQSFMTELFRHIGPNKDIPAGDIGVGGREIGYLFGQYKRLKNEFSGVLTGKGVSWGGSLIRPEATGYGVVYFIDEILKANNDGLKDKSVTISGSGNVAQYATEKCIDMGAKVLTLSDSSGYIYDKDGINKEKLLYIMELKNVKRKRISEYVKKYSKAEFYPNKKPWSVKCDIAIPCATQNELNLNDAKALLKNGCKTVGEGANMPCTADAISL

SEQ ID NO: 98510 - protein, 446 aa, Unknown
  Bacterial polypetide isolated from the Sargasso Sea
MKYKSKKEFLDSVVDNYSDQKEFHQAVEEVIHSIWDTATSNEEYCKFNILDRIVVPDRTIIFRVPWMDDKNNVHVNLGYRIQFNSAIGPYKGGLRFHPSVNLGVLKFLAFEQVFKNSLTGLNLGGGKGGSNFDPKGKSDKEIMSFCYAFMNELYRHIGRRTDIPAGDIGVGGREIGYMFGQYKKIRNAFTGVLTGKGTNWGGSLIRPEATGYGLVYFVLEMLNVRKDSLKGKTVTVSGSGNVAQFACEKLIELGAKPVTLSDSSGFIHDPDGITQEKIEYVKKLKSVRSARISEYAKKFNVEYVEGKRPWSIKCDIALPCATENELNLDDAKQLTDNGCYVVAEGANMPSTTNAVHHFINQKILYGPGKAANAGGVAISGIEMSQNSTRIPLSRDKVDGLLKEIMQRIHTTCVKYGKKDDFINYVDGANIGGFVRVADSMIDQGIV

SEQ ID NO: 98511 - protein, 236 aa, Unknown
  Bacterial polypetide isolated from the Sargasso Sea
MGHERILICQDDATGLKAIVAVHSTVCGPALGGTRMWNYASSADALIDVMRLSRGMTYKNAISGLNLGGGKAVIIGDSKTQKSPELFRKFGEFIDSLNGSYITAEDVGISPEDMMHVAESTKHVTGLPGKKGDPSPVTAYGVYMGMKAAAKYQFGNDNLNGKKIAVQGIGHVGEYLLNYLHKEGALLTITDINQDALKSAAEKYNCSVVNPDDIYDVDMDIYAPCALGATVNDETI

SEQ ID NO: 98512 - protein, 218 aa, Unknown
  Bacterial polypetide isolated from the Sargasso Sea
MARKSSPDGAANPQRRQWLKYAGASAAVGTLAMGTQQAYAAVTKPVPGADGILDVAIIGAGLAGLTAARDLRQSGCESFLVLEARDRVGGRTFNYDIPGGYVSEVGGQWIGPGQTAIADLARELGVGTFPTYYDGSTVMLGGDGRVAIDLKGTFGTDDAIAAKLSRLSRDVPCGAPWTSPKAGELDKLSVGDWLEKQGIKPEDQVAWHDSISLSGGAA

SEQ ID NO: 98513 - protein, 233 aa, Unknown
  Bacterial polypetide isolated from the Sargasso Sea
HMGSNFNTRFPQVSSYCENADLDPEKDLLPIIPVAHYHIGGVKTDLKGQTSVEGLWCCGEVAATGIHGANRLASNSLLESLVFAKIVANEINEKNIKKDIHISSRFIKIFKEKTKNKIRAKKYIWQLRSSMMRNLGIVRNKNSIIRGLNDVLKIERESKGLSAKLNDMILVSKFIIIGAYLRRESRGCHLRSDYQDTDKDFIKHFDIKYSEIDGYIKTILNSTISEVDEKLVS

SEQ ID NO: 98514 - protein, 134 aa, Unknown
  Bacterial polypetide isolated from the Sargasso Sea
MESIYKSDVVIVGSGISGLTVAISLYPRKVTLVTKRKLGEMSSSAWAQGGIAAAVSEEDSPQKHFEDTIKVSAGLSDENSVKEITEKAVSVVNFLEKIGVIFDREKGELSLSKEAAHSQRRVLKLTAINQVNLL

SEQ ID NO: 98515 - protein, 60 aa, Unknown
  Bacterial polypetide isolated from the Sargasso Sea
MSQRFATDILIIGGGAAGLAAALHLADVHRVTLLSKGSMESGSSAWAQGGIAAVTDSTDS

SEQ ID NO: 98516 - protein, 229 aa, Unknown
  Bacterial polypetide isolated from the Sargasso Sea
LTQDKIPVRPGAHYMIGGVQVDEHARTSVPRLFAAGEVTSSGLHGANRLASNSLLEGLVYGARAGEVASEEIISNGYEQEHNNFRVPMLANRRQDKSAESQSVSESLDLGDIRNSLRALMWRHVGVERSGSQLTEALSTVDSWCRYVLPRQFADSSGWQLQNMLESAQLMIRAAIVREESRGVHYRCDHPAPKNDDWKVHISWQRGCTSPQIAPVPDSTESRESSFSVE

SEQ ID NO: 98517 - protein, 238 aa, Unknown
  Bacterial polypetide isolated from the Sargasso Sea
MEVGPTAHYVMGGVKVDPFSQESSVPGLFAAGEVATGLHGANRLGGNSLSDLIVFGKIAGESAAKYSKEQEDYSEIDQLEIDKVVNETLEPLSRQGGENPASVVNDLRVMMQNKAGIIRTGDLLQEAMSDLDLLTERSKSTSPGGGRVYNPGWHQALEIGAMIDVSRMCAIAALKREESRGAHTRDDFPETDHEHWGNRNSVIWMDENAEMKIDFVSYPKIPKELRSLLDSEDLHEEE

SEQ ID NO: 98518 - protein, 282 aa, Unknown
  Bacterial polypetide isolated from the Sargasso Sea
MSERFNTEVLIVGTGISGLIAAIKLSERYSVTILSKSSLSDCSTAWAQGGIAAVIDNEDNINNHIKDTINNGHEICNTNSVQQIIKQGKDSIELLLNYGVNFNKKGKGLDQTLEGGHSHRRIVYHNDNTGEEVHSSLLREAKKKKNIIIKENIMVIDMIGKKENYCEGVYAYDKRNNYVVSIKANIIILATGGASKIYQYTTNPNTSTGDGIAMAWRFGCEISNMEFIQFHPTCLFHPKEKSFLISESLRGEGAKLKDLNGNCFMKKYDERLELAPQRYRAR

SEQ ID NO: 98519 - protein, 311 aa, Unknown
  Bacterial polypetide isolated from the Sargasso Sea
YSGDYTGRSILFALINKAKSLDIPIYDSQYVSDLLVDDNVCFGAMAFDIQSGERTIYLADSVIIAAGGHTRLWRKSSSRRNENTGDGFFLGLKAGCKLSDMEMVQFHPTGMVIPEEMAGTLVTEAVRGEGGKLINSDGERFMKNYDSDRMELSTRDRVAMANYTEIVEGRGSPNGGVYLDISHKGKDFIIEKLPRMYRQFLDTLMIDISKSPMEVSPTAHYSMGGIVVTPEEHWTGIEGLYAAGEVTAGLHGANRLGGNSLAEILIFGKRAGDAASKHSKEINVHIRSKEVIQQAHDNLNSSIKNGTEVAR

SEQ ID NO: 98520 - protein, 220 aa, Unknown
  Bacterial polypetide isolated from the Sargasso Sea
MEVGPTAHYVMGGVKVDPFSQETSVGGLFAAGEVATGLHGANRLGGNSLSDLIVFGKIAGEHAARYSKDQTDFLEIDSDEIEEVVEETLEPLSREGGENPAKVVSELREMMQNKAGIIRTGDLLEEALVELEEFRTRAASTSPGGGRMYNPGWHQALEIEAMVDVSKMCAISALRREESRGAHTRDDFPDTDHGHWGKVNSVIVMGDDGSMNIDFVSYPE

SEQ ID NO: 98521 - protein, 200 aa, Unknown
  Bacterial polypetide isolated from the Sargasso Sea
LSKSILQDCSTAWAQGGVAAVIDEKDNITNHTRDTLSNGHSICNVKSVEQIIAQGKKSIDLLLKHGVDFNKSGENLDLTLEGGHSHRRIVFHNDNTGEEIHRSLIEEAKSIKNIEIKENFMAIDLIGKKDNFCEGLYAFDGVKKAVVTIKSDVVILATGGASKVYQYTTNPHTSTGDGIAIAWRFGCTITNMEFIQFHPT

SEQ ID NO: 98522 - protein, 228 aa, Unknown
  Bacterial polypetide isolated from the Sargasso Sea
GAHYMICGVAVDTTAQTSIPHLFAAGEVASSGLHGANRLASNSLLEGLVFGSRVGEQVTQELEKADKGNKDENDLEVPFLTHADAVDPADVPGGEPLDLSDIRNSLRSLMWRHVGVERSGESLREALQTVDSWCRYVLHRQFSGPQGWQLQNLLEVGRLMIYASLARTETRGVHVRSDYPATSDDWRAHLCWQREMSDPWQTAVESGSPAVSGAGDCLPVRIDKNETK

SEQ ID NO: 98523 - protein, 169 aa, Unknown
  Bacterial polypetide isolated from the Sargasso Sea
GGIKSDKCGRTNISGLYACGENACTGIHGANRLASNSLLEAIAFAEIISGDIKDQINKYVRGASYHPKIVKVKPLDQNDLLVLRETMTKYVGVERDRVGLEQAFDTVRDIYLKYQTHGYDNNSLITSLLIIKSAMNRTEQRGSHYRTDHPYQDNKLNSRSSITKEDLNL

SEQ ID NO: 98524 - protein, 199 aa, Unknown
  Bacterial polypetide isolated from the Sargasso Sea
MHDQLEFDVLIIGSGAAGLSLALKLADRSNVAVLSKNALVEGATFYAQGGVSAALDKHDSVESHVEDTIATGAGLCNPEIVRFVVERAQESVDWLVNIGVDFTRLNNSSNTELDFHLHKEGGHSHRRVIHAADATGKAIETTLESRVRQHKNIELYENHVAVDLITINKLLKNKTRCIGAYVLDNESKNVKVFRARNGV

SEQ ID NO: 98525 - protein, 286 aa, Unknown
  Bacterial polypetide isolated from the Sargasso Sea
AVRGHGGVLLTAKDSERLLIENSGLSEVKNPKEFSFMLKYDNRGSLATRDIVARAIEQEMQNDGEESVGLHTFHLDTNEIQEKFPTIQARLNQLGATQNKEPLQLGEDPLPVAPAAHYFVGGVRVTSEGVVYPQSSEYLPSRFLGLYAIGEVASTGLHGANRLASNSLLEAVVYSQRCVETVKEIASQDLAMAPLSFNYKGLYLHTEEWDNLIQHESLDKLVKSLQQLMTEDVGIVKHNRRLEGALLKLKEMQEQVQRIWKVSRPTQELIELRNMIQVGILVTEAA

SEQ ID NO: 98526 - protein, 279 aa, Unknown
  Bacterial polypetide isolated from the Sargasso Sea
MSKEFDITLISKNTLVDSSTWYAQGGIAAVIDENDSTEDHLRDTLIAGDGLCNVEAVRECVSKGKEAIDWLSDIGTSFTRDKSSNNYHLTQEGGHSKRRVVHSEDATGKEVSSSLAEIVRSISNIKVLENHICVDLVTAKGRCVGAYVLDINTNEVKTFSSGSTIIATGGASKIYLYTSNPDGSSGDGIGLAWRAGCKVENLEFNQFHPTCLYHPEAKSFLLSEALRGEGAFLINNENERFMEKYDSRLELAPRDIVARSIDKEMKISGADNVFLDISH

SEQ ID NO: 98527 - protein, 307 aa, Unknown
  Bacterial polypetide isolated from the Sargasso Sea
DTHRVTLITKNTLRHGSSAYAQGGIAAVLDNKNPLSIEKHIQDTLKAGAGLCNQEAVRFIVNNGSYAIHWLVKQGVEFTTQQDGKTYHLTREGGHSERRIVHVKDRTGDAIIKTLSEQVWQNPNINIIENTIAIDLLSNDSQCYGCACFDKKTRHYILFHAKKVVLATGGSSDIFLHTTSNSNSSGDGIAMAARIGADTHHMEFHQFHPTSFYHASSPPFLITEAMRGEGGKLTMPDGKEFLHLYDERKELAPRDTVSRAMLVQMLKYQHNYMHLDISHKPSSTIKHLFPSIYSHCSQYGVDITRTA

SEQ ID NO: 98528 - protein, 334 aa, Unknown
  Bacterial polypetide isolated from the Sargasso Sea
RIIYVMTRTKDVIIVGAGMAGLVCAYECVQAGFTVALIHQGLIDHTSSSYAQGGIAAVWNEDDSFECHIEDTLIAGDGLCKQSVTRHFIEQGPELLQLLIDLGVSFDQDVNGAFKLTKEGGHSKERIFYVKDHTGQSIIQVLLSHLSDHPNIEWINGSLESLYSNGERICGVGVNQLSMYASNVVLATGGFSGLFTNSTNPKGNIGQGIALAHMAGALLGDLEFVQFHPTVYCHPNFPPLLLSEVLRGEGAFLVNKNHDRFMENYHPMADLAPRDIVARAIVNESDPALNIAPLISNFSVRFPTIYHHLCERGFDIETINIPVQPVAHYTVGGI

SEQ ID NO: 98529 - protein, 217 aa, Unknown
  Bacterial polypetide isolated from the Sargasso Sea
HTACLSLNIDMTQMPIPVVPAAHYLCGGVKTDVRGKTNVLGLWVAGETGCTGLHGANRLASNSLLEAAVVSERAAEDMLIYAQTVHHQSNVREWDPGDAADPDEMVVVSHNWDELRRTMWNYVGIVRSDKRLERAATRIANLQDEIHDYYWNFRLTSDLIELRNLCVVAQLIVASAQNRRESRGLHFTIDCPKTHASWKRQSIGKRGGRRTVNWLPT

SEQ ID NO: 98530 - protein, 312 aa, Unknown
  Bacterial polypetide isolated from the Sargasso Sea
HIDDTLKAGAGECNKKVVDFVIKEGSERIRELILWGTKFDTHNDKLDLAREGGHSENRILHHKDQTGEEIQKKLIEKVKSFKNIEIFENHTLVDLITDHHTKTNYNKCYGAYVISKEKEEIIKIAAKVTVLSTGGAGNIYSHSTNPSIATGDGLGAAYRAKIFMENLPFVQFHPTALYHKINDKTFLISEAVRGAGAFLRNSKGELFMEKYDSRGELAPRDIVARAIQMEMHNLNSKYVYLDGSSIERKKWKKYFPKIYSNCLSVGIKLPSDMIPIVPAAHYFCGGIKVNENGESSLKSLYAIGECSSTGLH

SEQ ID NO: 98531 - protein, 240 aa, Unknown
  Bacterial polypetide isolated from the Sargasso Sea
TALDIGVDPNPLLTEAIRGEGATLVDENNNRFMKKIHALSDLAPRDIVSRAIHDLKMQGHSTFLDCRKFNSNIFKKLFPTADKYLKNANINVEKELIPIIPAAHYHMGGTKVNMDGMTSINGLWACGETSSTGAHGANRLASNSLLEAFVYAIRIAKKINSLPIKNYAIRSINIKNYLPKEKTISKVRAKKYIWQLRSAMNKFVGVERSDQTLNNAFVEFDKIEREAKNLSAKLKDMLLV

SEQ ID NO: 98532 - protein, 191 aa, Unknown
  Bacterial polypetide isolated from the Sargasso Sea
MLTIISGGIKVDINGRTSVDGLWACGECSSTGAHGANRLASNSLLEAFVFSKRIADTINSEPPKKGYKLLNIENYIPKEKTISKIRAKKYIWQLRSAMNKFVGVDRNKSTLDQAFIEFFRIERETKSLSAKLKDMLLVSKLITFAALHRKESRGTHFRSDYPTKNNKLLKRNVFIQNDLFEYLNNKFEKVI

SEQ ID NO: 98533 - protein, 289 aa, Unknown
  Bacterial polypetide isolated from the Sargasso Sea
MTTRLNTEVLIVGTGISGLLSAIELSKTYSVTMLTKSRANKCSTSWAQGGIAAAVDNSDIDAHIDDTILNGHELCDSESVKKIIEQGKKSIDLLIEHGVNFNTNGTKLQQTLEGGHSKRRIAYHDDNTGEEIHSSLLEKAKKNKNITVKEGVMAIDLIGRKETICDGLYAYDESNDSVITIKAKIIILATGGANKLYQYTTNPNTSTGDGIALAWRFGCTISNMEFMQFHPTCLYHTNDKSFLISESLRGEGAKLINPNNEYFMYKYDKRAELAPRDVVARAIDIEMKI

SEQ ID NO: 98534 - protein, 181 aa, Unknown
  Bacterial polypetide isolated from the Sargasso Sea
YTCGGIATDLDGQTDVVNLFAIGETSSTGLHGANRMASNSLLECVVFAKAAAKKIKETFSPNLIDLPAWDSSKVIRAGENILINHNWDATRRLMWNYVGIVRSKDRLKKAKEKMELIKKEVQEFYKNYEVTSDFLELRNLVLVSELIIDSAIKRKESRGLHYNIDYPKKLKKASSTILQPK

SEQ ID NO: 98535 - protein, 250 aa, Unknown
  Bacterial polypetide isolated from the Sargasso Sea
MCNRQVVEAIVEAGPSAVERLISRGVRFDAENGNFDLTREGGHSSRRILHAQDITGREIDRAMRKAISGNPNIKLMQNHVAVDLITPSELPEPKCLGAYILNAATGSMITVEAKATLLATGGAGKAYLYTSNPDVSTGDGVAMAFRAGATIANMEFFQFHPTCLYHPEAKSFLISEALRGEGGILRRDDGHGFMTDVHPMADLAPRDIVARAIDREMKRTGDDHVGLDMTGHNPAFVASRFPNIHTACLA

SEQ ID NO: 98536 - protein, 269 aa, Unknown
  Bacterial polypetide isolated from the Sargasso Sea
HCRGVRVIELLVEDGECRGVQVLDGSNLYWITCKAVVVATGGGGHLFTNTTNPAQSSGEGIALSWKAGAAIEDLEFIQFHPTALKFYGSPCFLISEALRGEGAVLVDKYGNSPVKHLQNGDLATRDQVSRAIMNNMKKNNVDHVGLDLRFIDPKKIVDRFPTILSRCQEYGVNPLNEVIPVAPAAHYWMGGVHTDLNASSTVKGLYAVGEVASTGVHGANRLASNSLMECLVFARKMTSIELNTPINLRSADRYNKEIDMDNPKEDYIS

SEQ ID NO: 98537 - protein, 262 aa, Unknown
  Bacterial polypetide isolated from the Sargasso Sea
DNELAPRDLIAQNIFKQIEKGNSVFLDCRHMGSNFNTRFPQVSSYCEDADLDPERDLLPIIPVAHYHIGGVKTDLKGQTSVEGLWCCGEVAATGIHGANRLASNSLLESLVFAKIVANEINKKNIKRDIHISSKFIKIFKEKTKNKIRAKKYIWQLRSSMMRNLGIVRNNDSIIRGLNDVLKIERESKGLSAKLNDMILVSKFIIIGAYLRRESRGCHLRSDYQHTDKDFIKHFDIKYSEIDGYIKTILDSTISEFDEKLVS

SEQ ID NO: 98538 - protein, 319 aa, Unknown
  Bacterial polypetide isolated from the Sargasso Sea
MASHTGATLTDMEFVQFHPTGLDFGLDPTPLATEAIRGEGAYLVNQDEERFMFGIHPDHELAPRDLIAQNIFKQIEKGNSVFLDCRHMGSNFNTRFPQVSSYCENADLDPEKDLLPIIPVAHYHIGGVKTDLKGQTSVEGLWCCGEVAATGIHGANRLASNSLLESLVFAKIVASEINKKSIKKDIHISSKFIKIFKEKTKNKIRAKKYIWQLRSSMMRNLGIVRNKDSIIRGLNDVIKIERESKGLSAKLNDMILVSKFIIIGAYLRRESRGCHLRSDYQDTDKDFIKHFDIKYSEIDDYIKTILDSTISEVDEKLVS

SEQ ID NO: 98539 - protein, 371 aa, Unknown
  Bacterial polypetide isolated from the Sargasso Sea
ENTGDGFFLGLKAGCKLSDMEMVQFHPTGMVIPEEMAGTLVTEAVRGEGGKLINSDGERFMKNYDSERMELSTRDRVAMANYTEIVEGRGSPNGGVYLDISHKDKDFIIEKLPRMYRQFLDTLMIDISKSPMEVSPTAHYSMGGIVVTPKDHWTGVQGLYAAGEVTSGLHGANRLGGNSLAEILIFGKRAGAAASQRSKEIDVHIRSKKVINEAHENLNSWIKNGSEVARPLQRSLRNIMWEYGGVVKNKEKLEKGLSEIEGLKESSKNLDVRPDSEGYQDLMLAFDLEASIASSEATLKSALNREESRGAHQRDDFKDLSENENVNIRVELDDNKEIKLSKEKIPQLEKKLKNLINKTVEIDNFEGMLLE

SEQ ID NO: 98540 - protein, 259 aa, Unknown
  Bacterial polypetide isolated from the Sargasso Sea
DVVARAIDNEMKQNGYSNVYLDISYKPSDFIKKRFPKIFNKCLSVNIDITKEWIPVVPASHYTCGGVETDISGRTNMQNLYVIGESSHTGFHGANRLASNSLLECLVMAKNCAKRIIDTKIESSHNNIDLPQWDDSLSTESKERFAISHNWDELRKIMWNYVGIVRSNKRLKIAKEKIELIEKEMNDYYYKYNITSDMLELRNIIHVSKLIIKSALNRKESRGLHYSIDYPNINKKFNQNTYIDGRKNEYYLKLVKFKV

SEQ ID NO: 98541 - protein, 386 aa, Unknown
  Bacterial polypetide isolated from the Sargasso Sea
MADSIYRPDVVIVGGGVAGLTAALNLAPRKVCIITKSTLGVNTSSMWAQGGIAAAVGINDSVKSHIEDTVATAKGLADENVIVKVVSEAENIISDLESFGVIFDKNGDGSFDLGLEAAHSSNRIVRSKGDSSGIEIMRGLIEKVRESHNITVLENVSIDSIMSENNTIHGVIGRLVQDNVPDNHVVIESSNVVLATGGLGGIFANTTNPRSSYGEGIALAAQAGAVLTDMEFIQFHPTGLDFGLDPTPLATEAIRGDGAYLVNQNEERFMLGIHPENELAPRDLVAQNLFKQIEQGNSVFLDCRKVSNEFEIKYPQVASYCQAAGLNPKTDLLPILPVAHYHIGGVKTDLEGKTSIEGLWCCGEVAATGIHGANRLTSNSLLESMV

SEQ ID NO: 98542 - protein, 255 aa, Unknown
  Bacterial polypetide isolated from the Sargasso Sea
MSQRFATDILIIGGGAAGLAAALHLADMYRVTLLSKGSMESGSSNWAQGGIAAVTDPIDSLECHESDTINAGSGLCHLDTVKTVVGSAPLVIEQLSKWGVDFDLSGNEYHLTKEGGHSNRRILHVADATGKAIIEVLTQKTLDHPNIDLFEDKVAIDLAKRRNTAGQFSCTGAYVLNKVSSKVEVFQASHTILATGGASKVYLYTTNPDGSTGDGIAMAWRAGCRVSNMEFNQFHPTCLYHPHAGSFLISEAVRG

SEQ ID NO: 98543 - protein, 254 aa, Unknown
  Bacterial polypetide isolated from the Sargasso Sea
EGQNAVELHQENNAVHGATIQNSVKQTYIESGCIILATGGIGQLYKVTTNSKEALGDGVGMAARCGAVLSDMEFVQFHPTAFDIGIDPAPLATEALRGEGAKIINSKYQNFMKDAHPEGELAPRDIVARAIFTEQKKGEQVYLDCRGDLGSRMIDDFPTVYELCKKNKINPKNDPIPISPAAHYHMGGIKSDKCGRTNISGLYACGENACTGIHGANRLASNSLLEAIAFADIISSDIKDQINKYVREATYHPK

SEQ ID NO: 98544 - protein, 292 aa, Unknown
  Bacterial polypetide isolated from the Sargasso Sea
QPTWDNARLSSLHLTQEGGHSHRRIIHATDATGKAIFETLRKRAAEHPNIELVEECMAVDLITQCDSNDKRKCVGLYVFNPKSRKVDVIQAKFVALATGGASKTYLYTSNPDGASGDGIAMAWRAGCRVANMEFNQFHPTCLYHPHAKSFLISEALRGEGAMLELPDGTRFMSKFDDRGELAPRDIVARAIDHEMKRSGCDCVYLNITHRQPSFIMSHFPNIYERCLKFGIDITKDRIPVVPAAHYTCGGVVINERGETDIDNLYAIGETSCSGLHGANRMASNSLLECFVV

SEQ ID NO: 98545 - protein, 286 aa, Unknown
  Bacterial polypetide isolated from the Sargasso Sea
LAAIKLSERYSVTILSKSSLNDCSTAWAQGGIAAVIDTKDNINNHIKDTINNGHEICNTKSVQEIIKQGKDSIELLLNYGVNFNKKGQELDQTLEGGHSHRRIVYHNDNTGEEVHSSLLREAKKRGNIIIKENIMVIDMIGKKETYCEGVYAYDKRNNNVVSIKANIIILATGGASKIYQYTTNPNTSTGDGIAMAWRFGCEISNMEFIQFHPTCLFHPKEKSFLISESLRGEGAKLKDLNGNCFMKKYDERLELAPRDIVARAIDSEMKNNNFDHVNLDISSKIR

SEQ ID NO: 98546 - protein, 246 aa, Unknown
  Bacterial polypetide isolated from the Sargasso Sea
HPHAGSFLISEAVRGEGGVLRLPNGERFMHRFDDRRELAPRDVVARAIDFEMKRLGADFVTIDISHRSQQFILDHFPTIAEKCFSLGMDMTKEAIPVVPAAHYTCGGVTVDLNGLTDLPNLYAIGEVSSTGLHGANRLASNSLLECLVFAKRCSEHIKGEGISQVDPGFIPHWDESKVIDSQESVVIAHNWEELRRFMWDYVGIVRTDKRLNQAMHRIKLLKEEIRDFYGHYKISNDLIELRNLVD

SEQ ID NO: 98547 - protein, 294 aa, Unknown
  Bacterial polypetide isolated from the Sargasso Sea
RVRRHPNITLLEDHYAIDLITSDRLGLPGRRCHGLYALDLQSGRTVTIEAPHTVLATGGAGKVYLYTTNPDTATGDGIAMAWRAGCRVSNMEFIQFHPTCLFHPYAKSFLISEAVRGEGGILKLPDGTRFMPNHDERAELAPRDIVARAIDFEIKKRGIDCVYLDISHQSPEFLREHFPTILARCLEFGIDITKEPIPVVPAAHYTCGGVVTDLAGRTDLAGLYAVGETSCTGLHGANRLASNSLLECLVIGRSAAQAIEEEGFSAAVHAPLPDWDESRVSDPDEEVVVAHNWD

SEQ ID NO: 98548 - protein, 331 aa, Unknown
  Bacterial polypetide isolated from the Sargasso Sea
MTDTIMAGDGLCDTRVVQDFCDHAPEFVQRLIHLGVPFDTNDDGSFQLTKEGAHSFPRIFHVKDHTGTSIIQTLVAHLRDHPLVSWYNYSIQGILFSAQSKRVLGIRFNDQDLLAQYTVLATGGFSNIFSRSTNPKRNIGEGIALAYMLGAQLGDLEFIQFHPTVLCTHDHPPLLISEALRGEGAFLVNKDNDRFMKKYHDLEDLAPRDVVSRAVIQESDPKLNIAPLMTTIEQRFPTIYEALSQRGFTNESYEIPIQPLVHYTLGGIVATPSGRTNCEGLYAIGECSVTGFHGANRLASNSLLEAGIMGQRWCKGLASQSFSNIDVSSAS

SEQ ID NO: 98549 - protein, 291 aa, Unknown
  Bacterial polypetide isolated from the Sargasso Sea
FHPTCLYHPSAKSFLISEALRGEGAKLILKDGNSFMQRYDEREELAPRDIVARAIDHEMKRLGHDCVYLDISHKTNKFIQKHFPNISNYCLDLNIDISKIPIPVVPAAHYTCGGVIVNKNGETDITNLYAIGEVSYSGLHGANRMASNSLLECFVFANSAYNHIKKSSEKSYKLDNIRDWDESRVTNSDEEVVVSHNWDEIRRFMWDYVGIVRTTKRLQRAHHRIKLLKSEINEYYGNFRITKDLIELRNLAVVAEIIIESALLRKESRGLHYTTDFPISDDMNVPKNTII

SEQ ID NO: 98550 - protein, 308 aa, Unknown
  Bacterial polypetide isolated from the Sargasso Sea
WRAGCKVENLEFNQFHPTCLFHPEAKSFLISEALRGEGAFLVNHNKEKFMEKYDARLELAPRDVVARSIDKEMKISGADNVFLDISHKNSDEIKEHFPNIYSECLRFGYDLTAEPIPVVPAAHYTCGGVKVDLNSKTNIDNLYAIGEVSSTGLHGANRMASNSLLECVVFAKKASDHICKNFKNHNQEIQEWDISKVTETQEGVIIRHNWDDIRRLMWDYVGIVRSNNLLKRAEIAMKVIDEEVNYFYGKYLISSDLIELRNLALVANLIIKSAQKRKESRGLHYSLDYPNLLNTATPTILDPSKIKI

SEQ ID NO: 98551 - protein, 270 aa, Unknown
  Bacterial polypetide isolated from the Sargasso Sea
YLYTSNPDGACGDGIAMAWRAGCRVGNLEFNQFHPTCLYHPQAKSFLITEAVRGEGGLLKLPNGERFMQRFDERAELAPRDIVARAIDHEMKRLGVDCVYLDISHKPAEFIKSHFPTVYERCLGFGIDITKQPIPVVPAAHYTCGGVVVDQHGRTDVPGLYAIGETSFTGLHGANRMASNSLLECFVYARSACADIVAQLVAVDMPIDLPCWDASQVTDSDEDVIIAHNWDELRRFMWDYVGIVRTNKRLQRAQHRVRLLLDEIDEFYSN

SEQ ID NO: 98552 - protein, 258 aa, Unknown
  Bacterial polypetide isolated from the Sargasso Sea
HMALDLITTAKLGFTPDRCVGAYVYDVGARKVKKISAGCVVLATGGAGKVYLYTSNPDVATGDGIAMAWRAGCAVSNMEFVQFHPTCLYHPQAKGQLITEALRGEGAKLLLQSGESFMKKFDSREELASRDIVARAIDHEMKRLGDDYVLLDISHRSKDFVKRHFPNVHQQCLSYGINISQEPIPVVPAAHYLCGGVMTDLKGRTSLPGLYAVGEVASTGLHGANRMASNSLLECLVIASAAAMDIRSQIKIPADWLP

SEQ ID NO: 98553 - protein, 294 aa, Unknown
  Bacterial polypetide isolated from the Sargasso Sea
MYNQNAKFFLITEAMRGEGAKLLLPNGKKFMHKYDDRGVLAPRDIVARAIDNEMKKNGHEFVNLDISHMKKDFIIKRFPSIYNKCLEYGIDITKDKIPVVPATHYTCGGVEINKKGQTNIKNLYAIGEVAHSGLHGANRMASNSLLECLYFADVVSKDISLNNKNLKKININKIDQNKYIQHDELEKVLIKHCWKEIRTLMWNYVGIVRNNHRLSYADQRIKIMKKEIDTFFYTYKINKDIVELKNLVCIAELIIKSAISRKESRGLHYNIDYPETLNKPKDTVINKNQSSSLN

SEQ ID NO: 98554 - protein, 203 aa, Unknown
  Bacterial polypetide isolated from the Sargasso Sea
KARSFLITEAMRGEGAYLRLPDGERFMLRFDERAELAPRDIVARTIDHEIKRLGIRHVWLDITHKSPEFITEHFPTLYARLIELGIDITKDMIPVVPAAHYTCGGVVVNENSQTDLDGLYAIGETSYTGLHGANRMASNSLLECFVYGMSAANDIQQKFDSDFKFPTVPSWDESQVTDADEDVVILQNWDELRSTMWNYVGIV

SEQ ID NO: 98555 - protein, 272 aa, Unknown
  Bacterial polypetide isolated from the Sargasso Sea
IATGGASDLFQYTTHSEPATGDGIAMAWRAGCHISNMEFQQFHPTCFYNPGKKPFLITEALRGEGAKLTLPSGKRFMDQYDARAELAPRDIVARAIDSEMKRYDIPHVLLNISHVKRTTLQHLFPTIYDHCLHHGIDISEQAIPVIPAAHYTCGGIITDHVGRTNMNHLYAIGETACTGLHGANRLASNSLLECLVFATRASQDILSHFSPQQPRHLAPKTLSPSSLHTPLHQLTTELKQLMWQHVGIVRQDQLLTEALTKLDKLRQRFAAL

SEQ ID NO: 98556 - protein, 305 aa, Unknown
  Bacterial polypetide isolated from the Sargasso Sea
SDVLVIGSGAAGMTLALHLNRKFSVSMLCKDKPMEGSTYYAQGGVAAVLGEYDSVSSHVADTLDVGAGLCNPEIVAFTVKQSTKIINWLVELGVNFDKKVERDGSTAFHLTKEGGHSHRRVIHAADATGKEIALTLSEHLKSRNNVRLFPKYVAVDLVTKDSLGLRGKDCIGAYALNLKTKKVEIFKAKYVVIASGGASKVYQYTSNPDTASGDGIAMCWRAGCRVGNLEFNQFHPTCLFHPNAKSFLISESLRGEGAHLLLPNGERFMHKYDERKELAPRDIVARAIDHEMKKLGCNSVFLDIS

SEQ ID NO: 98557 - protein, 284 aa, Unknown
  Bacterial polypetide isolated from the Sargasso Sea
MEFVQFHPTAFDIGIDPAPLATEALRGEGAKIINSKYQNFMNDAHPEGELAPRDIVARAIFTEQKKGEKVYLDCRGDLGSRMIDDFPTVYELCKKNKINPKNDPIPISPAAHYHMGGIKSDKCGRTNISGLYACGENACTGIHGANRLASNSLLEAIAFAEIISGDIKDQINKYVRGASYHPKIVKVKPLDQNDLLVLRETMTKYVGVERDQVGLQQAFDTVRDIYLKYQTHGYDNNSLITSLLIIKSAMNRTEQRGSHYRTDHPYQDNKLNSRSSITKEDLNL

SEQ ID NO: 98558 - protein, 258 aa, Unknown
  Bacterial polypetide isolated from the Sargasso Sea
LNNRGQRFMSRYSPAMDLAPRDVVARAIVEECQIENVEHAWLDIRSSTTGNSTEWLTARFPQISSSCAEAGIDISKDLIPVSPAAHYLMGGLLTNTDGETSIPSLFAIGETACTGVHGANRLASNSLLETVIFAHRAIEKIQSGETDSLDLGNSLQTVSLPIKKATQTGNIDPQTVKKSVQKTMWDKVGVVRTQTGLEDAYEKIKYLSSNFRSDRTRNGYEINSLLIVTQIMIDAAIRRNESRGAHYRSDYPDQDDAW

SEQ ID NO: 98559 - protein, 347 aa, Unknown
  Bacterial polypetide isolated from the Sargasso Sea
MNRSSVTEVKTDFLIIGSGLSGLYAAIYASKFGKVALITKSSIQESNSYWAQGGIAAAINSDDSTEIHKKDTLSVGCGLNNLDAVNIMVSEGTERVLELINQGMSFDRAESGFDFGIEGGHSRRRILHALGNETGKAVVDFLSKEVQKNNKIKIYENSFVIDLFSDSKTCFGCLVFSDTKKNKISIHSKSTILATGGACGLYSQSSNPSSTSGDGIALGLNAGATVKDMEFIQFHPTVFSKEGAKNFLISEAIRGEGGQLINHSKIRFMENYSKQLELAPRDIVARAIFNEMRMNGEKNVFLSLKHLKSSLIKNRFKNTFELCLREGLDITKDDIPVSPAAHYMIGG

SEQ ID NO: 98560 - protein, 396 aa, Unknown
  Bacterial polypetide isolated from the Sargasso Sea
QWLIDQGVPFTRDEHAGSDDGGFEFHLTREGGHSHRRIIHAADATGAAIFKTLLDQARQRPNIQLLEQRVAVDLITEKRLGLPGERCLGAYVLNRTSGEVDTYGARFTILASGGAAKVYLYTSNPDGACGDGIAMAWRSGCRVANLEFNQFHPTCLYHPQAKSFLITEALRGEGAHLKLPNGERFMQRFDPRAELAPRDIVARAIDHEMKRLGIDCVYLDISHKPEAFIKTHFPTVYERCLTFNIDITKGPIPVVPAAHYTCGGVMVDQHGRTDVPGLYAIGETSFTGLHGANRMASNSLLECFVYARSAAADILEQLPRIPVPAALPRWDASQVTDSDEDVIIAHNWDELRRFMWDYVGIVRTNKRLQRAQHRVRLLLDEIDEFYSNYKVSRDLI

SEQ ID NO: 98561 - protein, 448 aa, Unknown
  Bacterial polypetide isolated from the Sargasso Sea
MTQNKHHIADIAIIGSGAAGLSLALSLANYCNVTVISKGALTEGSTLYAQGGIAAVFDKKNDSIESHVEDTLDAGGGLCDREAVHYTASNAHDCLQWLIDQGVPFDMEFDSKGKERFHLTREGGHSHRRILHAADATGKAVQTTLISQVKLHKNITLLEQYNAIDLITDKNTGKAGTHVEGMYVWNKKAKKVETISAKFVALATGGASKVYLYTSNPDVSSGDGIAMAWRAGCKVANMEFNQFHPTSLYHPELQNFLITEAMRGEGAYLKRPDGTRFMKDFDEREELAPRDIVARAIDFEMKRLGANCVYLDISHKDKEFIIEHFPTIYAKCLSVGLDITKEAIPVVPAAHYTCGGVMTDFNGKTDLDNLYAVGEVAYTGLHGANRMASNSLLECIVFAHAAAKDILSKIEHAPEPMTLPQWDESRVTNSDEEIVITHNWHELRLFMW

SEQ ID NO: 98562 - protein, 537 aa, Unknown
  Bacterial polypetide isolated from the Sargasso Sea
MKQVVEHQSDILVIGSGAAGLTLALHLAEKANVILLSKGPLSEGSTYYAQGGIASVFDESDTIESHVADTLVAGAGLCDKEVVTFTAENAKSAMQWLIECGVAFDKEETAGDNAKDAPYHLTREGGHSHRRILHAADATGKEVQTTLQERALAHPNIQVLERYNAIDLITTRKLNRPGNRVLGAYVWNRNAEQVETIKAKFVALATGGSSKVYQYTSNPDVASGDGIAMAWRAGCRVANMEFNQFHPTCLYHADARNFLLTEALRGEGAYLRRPDGSRFMPDFDERAELAPRDIVARAIDYEMKRLGADCVYLDISHKDSDFIIKHFPTIYSRCLELGIDITKDAIPVVPAAHYTCGGVMTDLHGQTDLNGLYAIGEVAYTGLHGANRLASNSLLECLVFARAASQDIESQMHKIPLPGQIPAWDESKVSNSDEEVVIAHNWHELRLFMWDYVGIVRSDKRLERALRRCLMLQQEIQEYYSNFRVSNNLLELRNLVQVAELIIRCAMDRKESRGLHYNIDHPEKVDSPQPTILQPEK

SEQ ID NO: 98563 - protein, 528 aa, Unknown
  Bacterial polypetide isolated from the Sargasso Sea
MKFDVAIVGSGLAGLSVALNLASTRRVALIAKRSMMEGASDNAQGGIAAVLDSADSIENHVDDTLVAGGGLCDEGATRYIVEHGREAIEWLISQGVPFTKDDAAELGFHLTREGGHSHRRIIHAADATGHAVLATLSARVRQHPNITFFENHHAIDLITSDRLGLPGRRCHGLYALDVDNDRTITIEAPHTVLATGGAGKVYLYTTNPDTATGDGIAMAWRAGCRVSNMEFIQFHPTCLFHPYAKSFLISEAVRGEGGLLKLPDGTRFMPAHDPRAELAPRDIVARAIDFEIKKRGIDCVYLDISHQPEAFLREHFPTIHARCLEFGIDIAKEPIPVVPAAHYTCGGVVTDLAGRTDLAGLYAVGETSYTGLHGANRLASNSLLECLVIGRAAAEAIEAAGFDAETPATLPAWDESRVSDADEEVVVAHNWDELRRLMWNYVGIVRTDKRLERAKHRLSLLRDEIQEYYANFRVTRDLLELRNLVDVATLIVKSAHSRRESRGLHYSRDWPSSLPKALPSVLTPRARR

SEQ ID NO: 98564 - protein, 537 aa, Unknown
  Bacterial polypetide isolated from the Sargasso Sea
MSDAIYSPDVVIVGGGVAGLTVALNLAPRKVCVITKSSLGINTSSSWAQGGIAAAVSKDDSNESHINDTLTTAKGLANIDAIKEVVNNAKGIIDDLEEYGVNFDKNEDGTFNLGLEGAHSFNRIIRSKGDSSGLEIMRGLIEKVKKSDHITVLENVSIDRIMTDNNTIYGVIGRFTDDNVPDSNVIIQSSHVVLATGGLGGIFANTTNPRSSYGEGVALASHAGATLTDMEFVQFHPTGLDFGLDPTPLATEAIRGEGAYLVNQDEVRFMFGIHPDNELAPRDLIAQNIFKQIEKGNSVFLDCRHMGSNFNTRFPQVSSYCENADLDPERDLLPIIPVAHYHIGGVKTDLKGQTSVEGLWCCGEVAATGIHGANRLASNSLLESLVFAKIVANEINKKDIKNDIHISSKFIKIFKEKTKNKIRAKKYIWQLRSSMMRNLGIVRNNDSIIRGLNDVLKIERESKGLSAKLNDMILVSKFIIIGAYLRRESRGCHLRSDYQDTDKDFIKHFDIKYSEVDGYIKTILDSTISEVDEKLVS

SEQ ID NO: 98565 - protein, 549 aa, Unknown
  Bacterial polypetide isolated from the Sargasso Sea
MDHSRPPDAIDPGPWDVVVVGAGAAGLMTCLELPEGLSVLLLNRNTGRRSSSRWAQGGIAAVTRPEDSSRSHADDTLSAGAGLCDGDAVRFLVDAAPRCVERLQQLGMAFDRDGHGLATTLEAAHSHRRVLHVQDRTGRALVDVLRERVEQRPGLLHRRGVRVTGLEVQNGRCCGVQVLDGHQLHRIQARAVVLASGGGGHLFANTTNPAQACGEGIALAWDAGASVEDLEFVQFHPTALRLDDAPCFLISEAVRGEGGVLVDGRGGSPVDQLPQRDLAPRDQVSRALVQRMRQQGVAQMWLDFAAIPHAKAEARFPTILDRCSEFGLNPLERPIPVAPAAHYWMGGVATDLQAATDLPGLYAVGEVACTGLHGANRLASNSLMECLVFAHRMAEIDLGPALKPISPAPPQAYGQALEGGITSAELMQQIEQLRLFCWQRAGVDRSGRGLSAGLDQLRCDLEHLDQQPLLDCLQQDNLLLDDSSRRDLNLLLDLRHRLLTSRLMLEACLFRRESRGGHFRTDAPATLPQWQCHSRLNRAQGLHTRAVRP

SEQ ID NO: 98566 - protein, 544 aa, Unknown
  Bacterial polypetide isolated from the Sargasso Sea
MKNILKQVTNIIHHDVLIIGSGAAGNSLALMLPNNLSIGIVSKSDIHEGSTYYAQGGISAVFNDLDSIDNHIEDTLETGCGLCRKDVVRDIAKKSRNLIKWLQERGVEFSHTQTKSGSKYLDLGMEGGHSYPRIVHADDKTGKVIQESLIDNLSNTANINAYTHRVAIDLIIDANNACVGCYIYNDQADKIEIHVANFLVLASGGANKAYLYTSNPDTSSGDGIAMAYRAGCNITNMEFMQFHPTCMYNQDAKFFLITEAMRGEGAKLLLPNGEKFMHKYDDRGVLAPRDIVARAIDNEMKKNGHEFVLLDISHMEKDFIIKRFPSIYNKCLEYGIDITKNKIPVVPATHYTCGGVEINKKGQTNIKNLYAIGEVAHSGLHGANRMASNSLLECLYFADVVSKDISLNSKNLKKINTNKIDQNKYMQHDELEKVLIKHCWKEIRTLMWNYVGIVRNNHRLSYADQRIKIMKKEIDAFFFTYKINKDIVELKNLVSVAELIIKSAISRKESRGLHYNIDYPETLSEPKDTTLSKNQSSSLNISSL

SEQ ID NO: 98567 - protein, 393 aa, Unknown
  Bacterial polypetide isolated from the Sargasso Sea
MADSIYRPDVVIVGGGVAGLTAALNLAPRKVCIITKSTLGMNTSSMWAQGGIAAAVGINDSVENHVEDTVTTAKGLADKNVIRKVIGEAESIISDLENIGVNFDKNNDGSFDLGLEAAHSRNRIVRSKGDSSGIEIMRGLIKKVSESENITVLENVSIDRIMSENNIIHGVIGRLVQENVPDNHVVIESSNVVLATGGLGGIFANTTNPRSSYGEGIALAAQAGAVLTDMEFIQFHPTGLDFGLDPTPLATEAIRGDGAYLVNQNEERFMLGVHPENELAPRDLVAQNLFKQIEQGNSVFLDCRKVRSKFEAKYPQVASYCQAAGLNPKIDLLPILPVAHYHIGGVKTDLDGKTSVEGLWCCGEVAATGIHGANRLASNSLLESMVFGELLQK

SEQ ID NO: 98568 - protein, 370 aa, Unknown
  Bacterial polypetide isolated from the Sargasso Sea
TRLDVQNGRCCGVQVLDGRHLQLIQARAVVLASGGGGHLFANTTNPAQACGEGIALAWQAGAAVEDLEFVQFHPTALRLDDAPCFLISEAVRGEGGVLVDAQGGSPVDHLRQRDLAPRDQVSRALVQRMREQGVAQMWLDFSAIPRAQAEARFPTILDRCSEFGLNPLERPIPVAPAAHYWMGGVATDLQAATDLPGLYAVGEVACTGVHGANRLASNSLMECLVFAHRLAEIDLGPAIKPSNPAPPQAYGQELEGAITSAGLMEQIEQLRLFCWQRAGVDRSGRRLNAGLDRLRCELERLDQQPLLNCLQRDALLLDDSSRRDLNLLLDLRHRLVTSKLMLEACLFRQESRGGHFRTDAPTSQPPWQCH

SEQ ID NO: 98569 - protein, 265 aa, Unknown
  Bacterial polypetide isolated from the Sargasso Sea
PDGSRFMPEFDERAELAPRDIVARAIDHEMKRLGADCMYLDISHKPADFIIKHFPTIHERCLAVGIDITKEAMPIVPAAHYTCGGVMIDNNGQTDIPGLYAIGEVTYTGLHGANRMASNSLLECVVYAHQAGADILAKLPMSVEPPRLPVWDESKVEDSDELVVIQHNWHELRLMMWDYVGIVRTNKRLARAKRRIDLLKQEVQEYYAHFRVSNNLLELRNLLQVAELIVNCALQRKESRGLHYNLDYPDMQPDSKPTVLTPERD

SEQ ID NO: 98570 - protein, 515 aa, Unknown
  Bacterial polypetide isolated from the Sargasso Sea
VARHLKITLITKTTLDECSTSWAQGGIASVLSNDDKFDIHIEDTLTNGHELNNRDVVEKIIKNGPSMINWLVNQKIKFSNKNRKLDLTLEGGHSKRRIVHAKDQTGKIIHDSLDKIVRNKKNITVKENLQVIDVICRGNSENKYCIGAYVYDSEINEVITYSSKKVILATGGAGKIYQYTTNPNTSTGDGIAIAWRAGCTISNMEFIQFHPTCLYHPEVKSFLISESMRGEGAKLLDIHGKPFMHKYDDREELAPRDIVARAIDNEIKANDNDFVYLDISMKSSEYIMNRFPSIYKKCKSIDIDITKSPIPVVPASHYTCGGVNTDIHGRTNIKNLYVIGESAHTGFHGANRLASNSLLECLVMSKYCSIDVNENIDYSMPHYGNIMNWDDTYVTKSKESYKISHNWGDIRKLMWNYVGIVRSHKNLNLALEKINIIEKEVMNYYQQYSISSDFLELRNIVQVSKLITKSALERKESRGLHYCEDFPKTLNKYNRNTELSKDSFNQNLQLVKLKV

SEQ ID NO: 98571 - protein, 321 aa, Unknown
  Bacterial polypetide isolated from the Sargasso Sea
MIKTDVLIIGSGAAGMTAAIELSNKFNVTLITKNSLVDSSTWYAQGGIAAVIDSNDTIEEHLRDTLIAGDGLCDENAVRECVSHGREAIEWLSSLGTNFTTDQSKENFHLTQEGGHSKRRVVHAEDATGKEVSSSLSEMVKKIETIEILENHICVDLITRNQRCIGAYVLDIDSNSVEAFSSGAVILATGGASKVYLYTSNPDGSSGDGIGLAWRAGCKVENLEFNQFHPTCLFHPKAKSFLISEALRGEGAYLINQNKEKFMEKYDSRLELAPRDVVARSIDKEMKISGADNVYLDISHKNSNKIKEHFPNIYNECLKFG

SEQ ID NO: 98572 - protein, 308 aa, Unknown
  Bacterial polypetide isolated from the Sargasso Sea
DMEFVQFHPTVFFKDGAKNFLISEALRGEGAKLINHSGKQFMKSYTPKKELAPRDIVSKAIFNEMKTNGEKNVFLTLKHLDKNLIKTRFKNTYELCLREGVDITNEKIPVAPAAHYLIGGIKTDIYARTNIKNLYACGEVACSGAHGANRLASNSLLECLVFSKRAIDSALEFSRKIKKIPKKILKTSEQISLFPSEKKLEKYLNLRMSISQIINNHVGILRNKKDLLLALDEISSIKKKDLDKNDIIDNRILNLKTLSYLMTKSALLREESRGCHMREDFSSKNNKWLKHINWKISSGTLRFSYTNH

SEQ ID NO: 98573 - protein, 537 aa, Unknown
  Bacterial polypetide isolated from the Sargasso Sea
MKQVVEHQSDILVIGSGAAGLTLALHLAEKANVILLSKGPLSEGSTYYAQGGIASVFDESDTIESHVADTLVAGAGLCDKEVVTFTAENAKSAMQWLIECGVAFDKEEATGNNAKDAPYHLTREGGHSHRRILHAADATGKEVQTTLQERALAHPNIQVLERYNAIDLITTRKLNRPGNRVLGAYVWNRNAEQVETIKAKFVALATGGSSKVYQYTSNPDVASGDGIAMAWRAGCRVANMEFNQFHPTCLYHADARNFLLTEALRGEGAYLRRPDGSRFMPDFDERAELAPRDIVARAIDYEMKRLGADCVYLDISHKDADFVMKHFPTIYSRCLELGIDITKDAIPVVPAAHYTCGGVMTDLHGQTDLNGLYAIGEVAYTGLHGANRLASNSLLECLVFARAASQDIESQLHKIPLPGPIPAWDESKVSNSDEEVVIAHNWHELRLFMWDYVGIVRSDKRLERALRRCLMLQQEIQEYYSNFRVSNNLLELRNLVQVAELIIRCAMERKESRGLHYNIDHPEKSASPLPTILQPEK

SEQ ID NO: 98574 - protein, 524 aa, Unknown
  Bacterial polypetide isolated from the Sargasso Sea
MSQRFATDILIIGGGAAGLAAALHLADLYRVTLLSKGSMESGASSWAQGGIAAVTDPIDSLECHQSDTITAGSGLCHLDTVKTVVESAPLVIEQLSQWGVDFDLRGNEYHLTKEGGHSNRRILHVADATGKAIIEVLTQKTLDHPNIDLFEDKVAIDLAKRRNTAGQYSCTGAYVLNKISRKVEVFQAAHTILATGGASKVYLYTTNPDGSTGDGIAMAWRAGCRVSNMEFNQFHPTCLYHPHAGSFLISEAVRGEGGVLRLPNGERFMHRFDDRKELAPRDVVARAIDFEMKRLGADFVTIDISHRSQQFILDHFPTIADKCFSLGMDMTKEAIPVVPAAHYTCGGVTVDLNGLTDLPNLYAIGEVSSTGLHGANRLASNSLLECLVFAKRCSEHIKGEGISQVEPGFIPHWDESKVIDSQESIVIAHNWEELRRFMWDYVGIVRTDKRLNQAMHRIELLKEEIRDFYGHYKISNDLIELRNLVDVAELIVSSALKRKESRGLHYNTDHLDELSEIRDTILKP

SEQ ID NO: 98575 - protein, 537 aa, Unknown
  Bacterial polypetide isolated from the Sargasso Sea
MSDSIYSPDVVIVGGGVAGLTVALNLAPRKVCVITKSSLGINTSSSWAQGGIAAAVSKDDSNESHINDTLTTAKGLANIDAIKEVINNAKGIIDDLEGYGVNFDKNEDGSFNLGLEGAHSFNRIIRSKGDSSGLEIMRGLIEKVKKSDHITVLENVSIDRIMTEKNTIYGVIGRFTDDNVPDSNVIIQSSHVVLATGGLGGIFANTTNPRSSYGEGVALASHAGATLTDMEFVQFHPTGLDFGLDPTPLATEAIRGEGAYLVNQDEERFMFGIHPDHELAPRDLIAQNIFKQIEKGNSVFLDCRHMGSNFNARFPQVSSYCENADLDPEKDLLPIIPVAHYHIGGVKTDLKGRTSVDGLWCCGEVAATGIHGANRLASNSLLESLVFAKIVANEINKENIKKDIHISSKFIKIFKEKTKNKIRAKKYIWQLRSSMMRNLGIVRNKDSIIRGLNDVLKIERESKGLSAKLNDMILVSKFIIIGAYLRRESRGCHLRSDYQDTDKEFIKHFDIKYSEIDGYIKTILDSTISEVDEKLVS

SEQ ID NO: 98576 - protein, 271 aa, Unknown
  Bacterial polypetide isolated from the Sargasso Sea
MIKTDVLIIGSGAAGMTAAIELSNQFNVTLITKNSLVDSSTWYAQGGIAAVIDSNDSIEEHLRDTLIAGDGLCDENAVRECVSHGKEAIEWLTSLGTNFTIDKSRENLHLTQEGGHSKRRVVHAEDATGKEVSSSLSEMVKRIKTIEVLENHICVDLITRNEKCIGAYVLDIESNSVKAFSSGSVILATGGASKVYLYTSNPDGSSGDGIGLAWRAGCKVENLEFNQFHPTCLFHPEAKSFLISEALRGEGAFLLNQNKEKFMEKYDARLE

SEQ ID NO: 98577 - protein, 242 aa, Unknown
  Bacterial polypetide isolated from the Sargasso Sea
MKASVEYLCDVLIIGSGAAGLSLALRLADQAKVLVLSKGPISEGATFYAQGGIAAVFDETDSIESHVSDTLNAGAGLCDPAVVEFTARNARESIQWLIQQGVPFDQEEDAEGESHYHLTREGGHSHRRIFHAADATGKAVQLTLIDQVRAHPNIQLMERFNAVDLITTRKLGLPGNRVLGAYVWNRNAEQVEVIRARFVALATGGASKVYQYTSKPDVSSGDGIPMAWRAGCRVAELEFNSS

SEQ ID NO: 98578 - protein, 460 aa, Unknown
  Bacterial polypetide isolated from the Sargasso Sea
TVESHIQDTLKVGDGICDEQAVRFTIENSKAAIEWLIDMGVEFTRTADGTDYHLTQEGGHSQRRVIHSDDTTGREISDSLAQRVRQHQNITVYEKHLAVDLIKDGERCLGAYILERATGLIKTFSASHTVLATGGASKVYFYTSNPDGASGDGYALAARAGCRLANMEFNQFHPTCLYHPQAKSFLLSEALRGEGAILRLPDGEAFMERFDVRGDLASRDIVARSIDFEMKRSGLNHVMLDMTHAEKSVIQQKFPSIFETCLSFGYDMSKVPVPVVPAAHYTCGGVMVDLSGKTDIDRLYAIGEVSYTGLHGANRMASNSLLECIVFGKAAAEVILNDDPIDQPELPLWDSSMVVESDEKIIVNHNWNLVRRLMWDYVGIVRSNKRLAKAAAELAAIQAEVEDYYWNFSVTSDLIELRNLTQVAEHIIKSAQLRKESRGLHFSIDHPKKMNLTEPTVIKP

SEQ ID NO: 98579 - protein, 270 aa, Unknown
  Bacterial polypetide isolated from the Sargasso Sea
MKLSIDSTSVYNKKALCELIDENTACIVVQNPDFFGRVQDFTELSETCHQYGALLIIAVTEIISLGALTNPGEMGADIVSGEGQSLGNPISFGGPHVGLLSTREKFLRQMPGRLAGETVDEDGKRGWVLTLSTREQHIRREKATSNICTNSGLCALAFSIHLSLLGEDGFTQLAKINHQRAIDLSKAIESLDEVELINETFFNEFTLKLPKPAISIVEEMANKGVLAGVPVKRLIPHDIDTENMLIVAATELTTNSDIEKFVTCLRETLS

SEQ ID NO: 98580 - protein, 52 aa, Unknown
  Bacterial polypetide isolated from the Sargasso Sea
NHKYSREQAAYPAKFLKANKFWPPVARVDNVYGDKNIFCTCPSMDEFKEDAA

SEQ ID NO: 98581 - protein, 316 aa, Unknown
  Bacterial polypetide isolated from the Sargasso Sea
PEHVKFIFATTEIKKVPITVLSRCQRFDLHRIENKILSDHLLKISKLENIDIDLEAISLLVRSADGSVRDGLSLLDQAITSPNEKVDSQTVISMLGLADREKIFNLIEIILEGDALGAINKYKELYELGADIAMIFDELLNVVHFLVQIKIAPDLKDDIYIPEFERNKGAELSSKMTLNNLNIIWQILFKGYQELQNSSHLYQHGEMIILRIIYLHDGPSPEDLIKKMDKEVVKKEPLEKNLELQNEFNESNKVLNFNENKKEILPKENVDIMHVQDFRHFVDMFFKNREGLLHTKLYNDVKIVSFKEGEVTLNTS

SEQ ID NO: 98582 - protein, 82 aa, Unknown
  Bacterial polypetide isolated from the Sargasso Sea
KIKDGSFDKVDNPIKNAPHTVEEISSDEWKHSYTRQEAAYPHSYLLNNKYWSPVSRIDNVYGDRNLFCVCPPIEEYDKAKTG

SEQ ID NO: 98583 - protein, 238 aa, Unknown
  Bacterial polypetide isolated from the Sargasso Sea
AVMASFYAVMHGPDGLKAIAQRIHRKTVRLAKGLEAHGFNVEQKHFFDTITIDVGPMQNVILKSAISEGINLRKIGKSRIGISLDERTRPAIIEAVWRSFGIKRKDKDLTTGYRIPNQLYRLTDFLTHPIFHMNRAESEMTRYMRRLVDRDIALDRSMIPLGSCTMKLNAAAEMLPLSWPEFSQVHPYAPKEQTLGYNIMIDNLSKMLCDVTGYDSISMQSNSGAQGEYAGLLTIGRY

SEQ ID NO: 98584 - protein, 66 aa, Unknown
  Bacterial polypetide isolated from the Sargasso Sea
NAPHTDLELASDEWKHKYSREDAAYPSKFLRSNKFWPPVARVDNVYGDKNLFCTCPDMDEFKEDAA

SEQ ID NO: 98585 - protein, 292 aa, Unknown
  Bacterial polypetide isolated from the Sargasso Sea
ARDVNGLTNLLAQNLKENGFELLNESFFDTLTISTKDKTKEITERALSNECNLRIVDESTIGVSLDETSSLDDIKKLLSIFLNKDVKIKQSENNSIPKDLVRKTDFLTHSVFSDYQTETEMLRYIRKLGDKDIALDRAMIPLGSCTMKLNATSEMIPVSWPEFSQIHPFSPKEQLQGFESLLSDIEGMLAELTGYSAISLQPNAGSQGEFAGLLAIDSFHKNNNDHDRNICLIPKSAHGTNPASAQMVGLKVIPVECDSQGNIDLGDLKSKADKHSKNFIFFDDYFTIYAWG

SEQ ID NO: 98586 - protein, 46 aa, Unknown
  Bacterial polypetide isolated from the Sargasso Sea
NQLSDWLVKLTGYDALCMQPNSGAQGEYAGLLAIRHYPESRNEGPR

SEQ ID NO: 98587 - protein, 198 aa, Unknown
  Bacterial polypetide isolated from the Sargasso Sea
MIDENSFASRHIGPRNDDIDLMLKKINCTSLDDMINKTVPKQIIFKSQLNLKPGMSEQFNKLNLQLLSIKNNFKKTYIGLGYHGTITPSVILRNIFENPGWYTAYTPYQPEVSQGRLEMLMNFQQMIIDLTGMEIANASLLDESTAVAEAMMLAYRQSKKLKKTFCIQNSCHPQTLSVLKTRAEPLGINIVVSKNTNS

SEQ ID NO: 98588 - protein, 105 aa, Unknown
  Bacterial polypetide isolated from the Sargasso Sea
TESENLEEIDKFCNALIKIKKEINLVESSKFDKTDNPLKNAPHTYVELASSEWKHAYSREEAAFPTEYVKNNKYWAPVARVDNVFGDRNLVCSCPSMDEYKDEAA

SEQ ID NO: 98589 - protein, 168 aa, Unknown
  Bacterial polypetide isolated from the Sargasso Sea
MPDRILIIEDEPAIADALVYALSTEGFDVHWCGLAGEGMQWLRDNPVDLLVLDVGLPDESGFEVCRRIRQFSALPIMFLTARKEEVDRIVGLEIGADDYVVKPFSPREISARVRAILRRTRAEPLASEQPAPAELFLHDAERRRIRYHRQWLELTRYEYLILSTLLRR

SEQ ID NO: 98590 - protein, 107 aa, Unknown
  Bacterial polypetide isolated from the Sargasso Sea
PVPGTMMIEPTESENLFEINRFCEALNSIYFEITSNNESDREMLKNSPHTLKMLTSSKWNFEYSRENASFPKDYLETNKFWPSVRRVDEAYGDRNLICSCPPIETYQ

SEQ ID NO: 98591 - protein, 198 aa, Unknown
  Bacterial polypetide isolated from the Sargasso Sea
IDKGLEIKSETFFDTLVVKIKDAKKIHEKANANGMNLRDISNDSVGISLDETSTQDDVKAIIEIFDDEQNKNSKIEQSWSKEFNRATDFLTHEVFNSHHSETQILRYIRSLADKDIALDRSMIPLGSCTMKLNATTEMIPVGWNGFANMHPHAPEDQAQGYLEIINDLENWLTQITGYKAISLQPNAGSQGEYAGLLA

SEQ ID NO: 98592 - protein, 294 aa, Unknown
  Bacterial polypetide isolated from the Sargasso Sea
KTTTARLIAMSINCKNRDKKNCEPCGSCDSCKSTTSDSNLDVIEIDAASNTGVDDIREIIDNVKYKPVIGDYKIFIIDEVHMLSKSAFNALLKTLEEPPEHVKFIFATTEIKKVPITVLSRCQRFDLHRIENKILSDHLLKISKLENIDIDLEAISLIVRSADGSVRDGLSLLDQAITSPNEKVDSQTVISMLGLADREKIFNLIEIILEGDALGAINKYKELYELGADIAMIFDELLNVVHFLVQIKIAPDLKDDIYIPEFERNKGAELSSKMTLNNLNIIWQILFKGYQELQ

SEQ ID NO: 98593 - protein, 110 aa, Unknown
  Bacterial polypetide isolated from the Sargasso Sea
MRKFSDRHIGISEVDEKSMKDFLGIESLEQLIKETIPDEIRTKEKLKLDDAISESQYSNHIYQLSQKNKYFKNYIGLGYNEAILPPVIQRNILENPGWYTAYTPYQAEVA

SEQ ID NO: 98594 - protein, 85 aa, Unknown
  Bacterial polypetide isolated from the Sargasso Sea
KEINKIKEGKFDKLDNPIKNAPHTDLELASDKWEHKYSREEAAYPSSFLKSNKFWPPVARVDNVYGDKNLFCTCPSMDEFKEDAA

SEQ ID NO: 98595 - protein, 109 aa, Unknown
  Bacterial polypetide isolated from the Sargasso Sea
VAGTLMIEPTESESREELDIFCDAMISIRKEIEEIATSNEDSENNILKNSPHTVEELSSDKWTHNYFREKAAYPLDYLKARKYWPPVKRIDNVYGDKNLFCTCPDMDEF

SEQ ID NO: 98596 - protein, 71 aa, Unknown
  Bacterial polypetide isolated from the Sargasso Sea
MSFPVPGTLMIEPTESESKAEIDRFINAMVSIRKEIEEIENNAADCEDNVLKNAPHTAKELIADTSESHLL

SEQ ID NO: 98597 - protein, 278 aa, Unknown
  Bacterial polypetide isolated from the Sargasso Sea
AGVTKRGDVVLSGTLHPHYVATTETLLKYLEAEINVLPPDTAGDEDVASHIGDDTACVIVQYPDLFGRVRDLQPIADACHDAGALLVVAMTEVVALGALKPPGDMGADVVAAEGRSIGNPLNFGGPCVGLFATRDKYIRQMPGRLVGETVDVDGRRGWVLTLSTREQHIRREKATSNICTNSGLCALAFTIHMSLLGEDGFRKLAMLNHARTVQLYDRLEAAGLNVLNDSFFNEIAIDLGKPAGPVVDALAGDGILAGVPLSRLLPNVPLAENLLLVA

SEQ ID NO: 98598 - protein, 102 aa, Unknown
  Bacterial polypetide isolated from the Sargasso Sea
MMIEPTESENLNELDKFCEALNSIYTEIISDDDSKRQMLRNSPHTLKMLTSTDWPYPYSREEASFPKSYLKTNKFWPSVRRVDEAYGDRNLICSCPPIETYQ

SEQ ID NO: 98599 - protein, 255 aa, Unknown
  Bacterial polypetide isolated from the Sargasso Sea
MAAGGADRAAGPRQQAIRRRTGGPGMSYQAPLRDMRFVLHELFDAAGHCERLGNGLDRELIDGVLEEAAAFAAGEVAPLNRNSDEEGCHLENGQVSTPKGFAEAYRQYVDNGWASMTGPVEYGGQGFPQLVAFAFHEMLMGASLSFRVYSGLTEGAVLALHKHGSETLRQQYLDKLVSGQWTGTMCLTEPQAGTDLALLRTRAEPQADGSYRVSGSKIFISGGEQDISENIIHLVLARLPDAPAGVKGISLLLVP

SEQ ID NO: 98600 - protein, 143 aa, Unknown
  Bacterial polypetide isolated from the Sargasso Sea
MLHNSEKDFIKRHIGLKKKDEKKILNEIGYESLDELISNTVPKNILLKDSLSIGEPNSEYEALRKLRLISKKNQIYSNFIGMGYYGTYTPNVVVRNIFENPGWYTSYTPYQPEVAQGRLEMLLNYQQMITDFTGMDIANASLL

SEQ ID NO: 98601 - protein, 195 aa, Unknown
  Bacterial polypetide isolated from the Sargasso Sea
MLKTLEEPPEHVKFIFATTEIKKVPITVLSRCQRFDLHRIENKILSDHLLKISKLENIDIDLDAISLIVRSADGSVRDGLSLLDQAITNPNEKVDSQTVISMLGLADREKIFNLVEIILEGDALGAINKYKELYELGADIAMIFDELLNVVHFLVQMKIAPDLKDDIYIPEFERNKGTELSSKMTLNNLNIIWQI

SEQ ID NO: 98602 - protein, 256 aa, Unknown
  Bacterial polypetide isolated from the Sargasso Sea
ISIKTTSLKIANIKKKSLGKQINFRYYSKEIVSLSLDETTSLNDLYEILSCFVNIKNFDFNLIDDQLSDSLPAIAKSLIRKTSYLENKVFNDYGSETDFLRYLKKLEDKDIALNKSMIPLGSCTMKLNATSEMIPISWPIVNSIHPFVPKQQSQGYKIIIDKLKDMLCKITGFDEVSLQPNAGAQGELAGLMTIKAFLEATGESSRDICLIPSSAHGTNPASAILAGMRVEIIKCDENGNVDTKDLAYKIQEFPDQ

SEQ ID NO: 98603 - protein, 34 aa, Unknown
  Bacterial polypetide isolated from the Sargasso Sea
YKYWPPVARVDNVYGDKNLFCSCPAMDEYKETAA

SEQ ID NO: 98604 - protein, 132 aa, Unknown
  Bacterial polypetide isolated from the Sargasso Sea
YLEKRLEEAGFELAFPSRRASHEFIVSLKNEAKELHVNAMDFAKALLDKGFHAPTTYFPLLVPECLLIEPTESETRETVDRFVDALVEIREAARVDAEQVKGAPYTTPVRRLDDVKAARQLDLAWRPGLPTG

SEQ ID NO: 98605 - protein, 254 aa, Unknown
  Bacterial polypetide isolated from the Sargasso Sea
TREQHIRREKATSNICTSQALLAVMAGFFAIYHGPNGLIGIANDVHKKTCKLFNALKSGDHEILNNNFFDTLSIHLKGDISEIKTRLLDAKININWFDNNLVSISIDEATTSDDIADLVFALTGIPISNDPEDGDASINKEIVRSSDFMKQERFNKYHSETEMMRYIKRLSDKDIALDRSMIPLGSCTMKLNSASEMAPVSWPEFANMHPYCPTDQTKGYQVLIKDLREMLSSITGYYDISLQPNAGSQGEYAG

SEQ ID NO: 98606 - protein, 310 aa, Unknown
  Bacterial polypetide isolated from the Sargasso Sea
RKIFNLIEIILEGDALSALNRYKELYELGADIAMIFDELLNVVHFLVQMKIAPDLKDDIYIPEFERNKGTELSSKMTLNNLNIIWQILFKGYQELQNSSHLYQHGEMIILRIIYLHDGPSPEDLIKKMDKEVVKKETLEKNLKVQNETNESNKVLNFNENKKEILPKENVNIKHVQDFRHFVDMFFKNREGLLHTKLYNDALLVSFKEGEVTLNTSKINDIGFNRTVAKLISKWTGRIWQIHSSTSNLGKSLHDEDIINQQKEIEIMKNHPEVKKILKEFPESKIHAITELGEINDDETDINQTKMKKEK

SEQ ID NO: 98607 - protein, 61 aa, Unknown
  Bacterial polypetide isolated from the Sargasso Sea
DRFIEAMIAIRDEIRAVEEGRSDREDNPLKHAPHTAYISNIHPCWSEYKFIADNWNDFAFS

SEQ ID NO: 98608 - protein, 255 aa, Unknown
  Bacterial polypetide isolated from the Sargasso Sea
LPGVSLSPLAGAQGELSGVLTLRAALNDRGQGHRKKMLIPDTAHGTNPASAAMAGFDVISIGSGPDGNIDLDSIRAEANSDLAGVMFTQPTTLGLFDKKAIEMCKIVHQAGGLVYGDGANMNALLGRVKLGHLGFDVVHMNLHKTFSTPHGGGGPGAGPICVTEELSKFLPGPIATTNELTKLYELTMPEKTIGRSGAFQGNFGVLVRAFTYISLLGNQGMLDISGNAVLNANYLLAKLRDLYELPYDRKVMHEV

SEQ ID NO: 98609 - protein, 104 aa, Unknown
  Bacterial polypetide isolated from the Sargasso Sea
MIEPTESESREELDIFCDAMISIRKEIEEIEKGNEDSENNILKNSPHTVEELSNDNWEHNYSREKAAYPLDYLKARKYWPPVKRIDNVYGDKNLFCTCPDMDEF

SEQ ID NO: 98610 - protein, 47 aa, Unknown
  Bacterial polypetide isolated from the Sargasso Sea
RESAAYPSATLKSYKYWPPVARVDNVYGDKNLFCSCPSMDEYKESAA

SEQ ID NO: 98611 - protein, 293 aa, Unknown
  Bacterial polypetide isolated from the Sargasso Sea
PRFADSIASDSRFANMHPSMPEEFTQGCLKVYYEIGNYLCEITGMDDASFQPPAGASGELTGLLIIKKYLEVNNMNHKTEIIVPDSAHGTNPASARMAGFTVVEVETDSRGMVNIEKLKEIVNENTAGLMLTNPNTGGLFEEEILTISQIIHNAGGLLYYDGANLNAIVGASRPGDMGFDIVHSNLHKTFATPHGGGGPGSGPVAVKSFLREYLPGPIAENKDRKYNWYHPENSIGRMHGYHGNFLVTLRALVYMKLLGKEGLDKLGAYAVLNARYLSSKVSQIIPLAYDEPC

SEQ ID NO: 98612 - protein, 54 aa, Unknown
  Bacterial polypetide isolated from the Sargasso Sea
HLNDNWNHSYSREKSCFPLNWQKQNKYWPPVGRVDNAFGDRNLVCTCPPIEEYE

SEQ ID NO: 98613 - protein, 62 aa, Unknown
  Bacterial polypetide isolated from the Sargasso Sea
AEVVAGEWDRPYPRSLGPFPAEWTRAHKFWPQNSRIDDVYGDRNLVASRAAVDVAVAQTASG

SEQ ID NO: 98614 - protein, 130 aa, Unknown
  Bacterial polypetide isolated from the Sargasso Sea
MSKFKSGLANSSKNKHLSLQELEQNDRFIHRHIGPSENEISQMLDALQISSLDNLIDKVVPDSIRMPRELELPDSRTETDVLNQLRGMAGRNQLAKSMIGMGYHNTFLPGVIQRNILENPGWYTAYTPYQ

SEQ ID NO: 98615 - protein, 178 aa, Unknown
  Bacterial polypetide isolated from the Sargasso Sea
DKTDQIFKNALDQKVNIRKVNSEMLSVSFDEKKNVYRVNQLLKIFNAAESIKKEDPTVSLPNLPKNLLRTSKYLEHPVFNSYHSETEMLRYLKKLEDKDIALNRTMIALGSCTMKLNATAEMIPISWRELAEPHPFVPVEQMEGYRELFTDLKNWLRSITGFSGVSLQPNAGAQGEYA

SEQ ID NO: 98616 - protein, 258 aa, Unknown
  Bacterial polypetide isolated from the Sargasso Sea
ESIPANSSGRVDTEKLLGRLDKTVAAIMITNPNTCGLFEDQIVRVADAVHEIGGFLYCDGANFNAIVGRVKPGDLKIDSMHLNLHKTFSTPHGGGGPGSGPVVLSKELADYAPLPFVVKTDDRFELIESAEDTDKKPFGRIKGFHGQFGVFVRALTYMLSMGSDGLRQASGDAVLSANYLLAQLKDDLSISFEGPCMHEVLIDDRFLKDTGVTTLDFAKAMIDEGFHPMTMYFPLVVPGALLMEPTETESKESLDNYI

SEQ ID NO: 98617 - protein, 290 aa, Unknown
  Bacterial polypetide isolated from the Sargasso Sea
IVPDSAHGTNPASASMCGYQIIEIPSAPDGRLDIDALRAAVGDDTAAMMITNPSTMGLFETNIAEASQIVHDAGGQMYYDGANFNAIIGKTDPGRMGFDAVHYNLHKTFSQPHGGGGPGSGPIGVKGHLSEFLPTPLASRRESQDGDPTGVGDGFHYFWQDVGNNSIGKVQQWNGNAGAVVRAWAFYRRYGRDLERMSEYAVLNSNYLRHKIMNPDSDVAAKINCMPSEGSEANLVMHEFTLSMSPVKEVNGVTGKDVAKRLLDYGYMSPTLYFPQIVPECLMIEPTETE

SEQ ID NO: 98618 - protein, 103 aa, Unknown
  Bacterial polypetide isolated from the Sargasso Sea
AGNPALRLALQTREQHIRRDKATSNICTAQVLLAVMASFYAVHHGPDGLMAIARRIVGQRRQLELVLQSLGFVVPEGERFDTVTVTSPLSPAVHQAVREAGFN

SEQ ID NO: 98619 - protein, 79 aa, Unknown
  Bacterial polypetide isolated from the Sargasso Sea
SLRKFDKVDNPIKNAPHTDMELASDDWKHNYSREEAAYPAKFLKSNKFWPPVARVDNVYGDKNIFCTCPSMDEFKEDAA

SEQ ID NO: 98620 - protein, 94 aa, Unknown
  Bacterial polypetide isolated from the Sargasso Sea
PHAAYMATSEKYARRMPGRIIGETVEANERKGRALRMAMQTREQHIRRDKATSNICTAQALLANMAAAYAIYHGADSASSLNLTPSTRLVSISR

SEQ ID NO: 98621 - protein, 93 aa, Unknown
  Bacterial polypetide isolated from the Sargasso Sea
CETLIKIKSEIDGIKSGKFDKTDNPIKNAPHTDLELASNEWNHKYSREEAAYPSKFLRSNKFWPPVARVDNVYGDKNIFCSCPSMDEFKEDAA

SEQ ID NO: 98622 - protein, 279 aa, Unknown
  Bacterial polypetide isolated from the Sargasso Sea
MATIITSSGLKITELLRFPNALHSFCWFPWILLSITLINQNKNIYFSYLTIFISSLMLLTAGYPYYIVYGLILFSLYFIFVILLNFQQKKENQIKENLFIFIKCIIPSILAFILASPWLFKIKELMNITRDRNLNDINFSLSGSSNITDQLGSWVFPPVANTEGWYYFGIIITLLIIFLFFTNFKKENVQNKYLFFFILLFVIVYQFSASQSSLIFSFIWTKIDFIQNFRFWIRSNIILVPIISVLIAFSLEKFEIYYNNNYYYKISNTIKPNYCNKFI

SEQ ID NO: 98623 - protein, 200 aa, Unknown
  Bacterial polypetide isolated from the Sargasso Sea
MIDIDKFASRHIGPRNEDIIEMLKVVGSKSLDDLIEKTVPDHIIFKDKLKLRPGMSEEFNKTNTQLLSLKNNFKKTYIGMGYYNTTTPSVILRNIFENPGWYTAYTPYQPEVSQGRLEMLMNFQQMIIDLTGMDIANASLLDESTAAAEAMMMAFKIKKSSKFNFCVQNTCHPQTLSVLKTRAKPLGIKIIFDKPNSPIH

SEQ ID NO: 98624 - protein, 502 aa, Unknown
  Bacterial polypetide isolated from the Sargasso Sea
MSTVFDFKGASGSGWSQPDSNFQNPDAVPESLRRKRLPGWPRASEPELVRHYTLLSQKTFGIDTGFYPLGSCTMKHNPRVNERIVQLPGIDRIHPLQDSSQVQGLLAIYYEMQEMLAICSGMDAVTLQPVAGAQGEFTAIRCIQEYHRSRGDGHRDKVIVPDSAHGTNPASASMCGYQIIEIPSASDGRLDIDALRAAVGDDTAAMMITNPSTMGLFETNIAEASQIVHEAGGQMYYDGANFNAIIGKTDPGRMGFDAVHYNLHKTFSQPHGGGGPGSGPIGVKDHLSEFLPTPIASRRESQDGDPNGVGDGFYYFWKDVGDNSIGKVQQWNGNAGAVVRAWAFYRRYGRDLERMSEHAVLNSNYLRHKIMNPEPDVAAKINCMPSEGSEADLVMHEFTLSMSPVKEVNGVTGKDVAKRLLDYGYMSPTLYFPQIVPECLMIEPTETESKEVLDKFAADFHAVLSEDPEILTTAPHTTPVKRVDEVWAARNLILRHPGNDED

SEQ ID NO: 98625 - protein, 498 aa, Unknown
  Bacterial polypetide isolated from the Sargasso Sea
MKNSNKGLNHDEPILFEIGGVDKSGVDLNKPTFKENFIGECFEDREIGLPGLSEPESIRHYVRLSRKNYSIDAGLYPLGSCTMKHNPRLNEKLARLKGFSEVHPLQPLSTCQGALELIDEISIWLKELTGMKAVTMTPKAGAQGELCGMLAIKKAIEARNECNRTKVLVPDSAHGTNPATAAFLGFDVVTIKSDKNGRLNFDDFKENVDKDFAAAMITNPNTCGLFEDDIIEIANYIHDAGGYLYCDGANFNALVGKVRPGDLGIDAMHINLHKTFSTPHGGGGPGSGPVVFSDILKDFCPAPLLKKDEENYYLVENHNDKDIDKSFGRLCVFHGQMGMFVRALSYMMSHGSDGLRQVSEDAVLNANYIKSSLEDILTPAYEGYCMHEVLFNDDFLSGTGVETIDFAKALIDKGYHPMTIYFPLVVHGALLVEPTETESKNSIDQFIETIRELASKTQDGEDFFKKAPIYTPIRRLDETKAARNPVLRWQKNDVIAAE

SEQ ID NO: 98626 - protein, 183 aa, Unknown
  Bacterial polypetide isolated from the Sargasso Sea
PHVKKEKNNYETYTPKNSIGRLNGFLGSFGIVLRAYAYIRSLGSQGLKEISENAIINANYIQEKLKSHYTLTSSRNCMHETVLSAIKQKENGIKALDIAKKLLDEGFHAPTMYFPLIVEEALMIEPTESESKETIDQFIECMIKISELSENNPNEILNAPINLPVERLDEALAARNPVLTWKK

SEQ ID NO: 98627 - protein, 498 aa, Unknown
  Bacterial polypetide isolated from the Sargasso Sea
MKNSNKGLNHDEPILFDIGDIDKSGVDLNNSTFKENLIGGSFDDREIGLPGLSEPESIRHYVRLSRKNYSIDAGLYPLGSCTMKHNPRLNEKLARLKGFSEVHPLQPISTCQGALELIDEISNWLKELTGMEAVTMTPKAGAQGELCGMLAIKKAIETRNENHRNKVLVPDSAHGTNPATAAFLGFDVVTIKSDENGRLNFEDFKEKVDENFAAAMITNPNTCGLFEDDIIEIANYIHDAGGYLYCDGANFNALVGKVRPGDLGIDAMHINLHKTFSTPHGGGGPGSGPVVFSSILKDFCPAPLLKEVDEKYYLVENNDDEEIDESFGRLCVFHGQMGMFVRALSYMMSHGSDGLRQVSEDAVLNANYIKSSLEDILTPAYDGYCMHEVLFNDDFLSGTGVETIDFAKALIDKGYHPMTIYFPLVVHGALLVEPTETESKNSLDQFIGTIRELAIKIHEDDEFFKKAPIYTPIRRLDETKAARNPVLRWQKNEVIAAE

SEQ ID NO: 98628 - protein, 522 aa, Unknown
  Bacterial polypetide isolated from the Sargasso Sea
GALSLDETTTITAEFNEVVTLTGSIQFVLSSNAGTTLEIQTVADGLDANDNPVSQGSVLYTVITGDLEASDLSISSIGFSSDGKITDAAGNEVTSISEPGGQALDDNAALTVETVAPVIGSITTTYATGVYGEGAEIPVTLNFLNGAAGSAEDVALTGTGTINIAVGGVANGGTATFSAASDATVTGTYTVGASDTEGNISVESAALVGAGTLTDVAGNTAVLTMPSSIFSGKTITIDRTKPFLNTITTNDYATTDTPTLRIGDQIDILLNFDNTVKLANGNIIVTFNTTNTAGTATVSPASGDQTLTATYTVSEGESTARLDISSVALDPADADVTLTDNPTYAANNATFKPNNIDEASGFTPVTAFTTGGWNIAVDGVYPFISNMTSDTDDSTYGIGSVISVTVNFNEAVTSNNTLELPFGLTSNISFAAITSAATSVTGTYTVVENDDVAALDVTGAAVNNGTIIDAASNELQTAGLTLPASSNLTDVPKAIVIDGVRPAAPSISSATPAGGSASLTNA

SEQ ID NO: 98629 - protein, 63 aa, Unknown
  Bacterial polypetide isolated from the Sargasso Sea
MRFEISSLQIAAKAWGPADGFQVLAFHGWLDNAATFDHLAPFLPDWRLVSLDMPGHGHSSHRP

SEQ ID NO: 98630 - protein, 202 aa, Unknown
  Bacterial polypetide isolated from the Sargasso Sea
MVRVSRVRRIIRKIDPWTVLKVTFVLNFVVALTIVLGFSILWVLLINAGVPQGLEDIAKRLALLDENSTLVGNIEALFSSVVFLATVYLLTQTALATIGAFFYNLVSDLVGGIEVVVLEESYGEAPPVVKEKQKKPKKEKDKNKETVLMTLSKTVKKIRSERKQEEEVVYPEMPRPDVPRDIEEQTLSDSFKNIPNEEDEYK

SEQ ID NO: 98631 - protein, 293 aa, Unknown
  Bacterial polypetide isolated from the Sargasso Sea
MRLSTDYVPLARDDLAAGVPLGFDLFDADGAALLPAGTTLHDAAQHAFLFDHFRPVRRRDDAEAAAEPRAPDAVPHAQRMGLSPGASIGIRRRVGTTRGLQRCRLIGIAASGALFVEPQPAAALDFARGDDIEAVAIGRAAVSRFGATVESVQEAGAARFLVLSPPGFVDRLRTRAEPRVPVRIAACCAGGSEGAEGIGMVHDISVSGLSIAVDRPIAAIGETLRVQLPYAAGDRVELLALDGTVRAVHADPAAPALTLHHAAFGETGADDLIRLKALLFDRLMASPDTGRRR

SEQ ID NO: 98632 - protein, 303 aa, Unknown
  Bacterial polypetide isolated from the Sargasso Sea
AGLQAVTIKTTNEGDIDLDDLKDKVNENVCVLMLTLPSTLGLFEPNILEITKVIHDNGGLVYADGANLNALLGVTKFGDLGIDICHSNLHKTFSTPHGGGGPGSGPVMVAKYLESFLPYPHIKKEGNDYKQYKPENTVGRLNGFYGSFGILVRAYAYIRSLGKAGLKEISESAIINANYIQEKLKKDYKLTSSRYCMHETVLSASQQKEDGVKAIDIAKKLLDEGFHAPTMYFPLIVDEALMIEPTESESKETIDRFIDAMIMISELSKSNPKEIIDAPVNLPVERLDEAQAARNPVLIWAKK

SEQ ID NO: 98633 - protein, 74 aa, Unknown
  Bacterial polypetide isolated from the Sargasso Sea
MVNQIKKTILLKNSPHTAKKLISDDWNHSYKRSEAAYPVSSLEDGKYWPPVGRVDNVYGDRNLMCSCPSMEDYI

SEQ ID NO: 98634 - protein, 156 aa, Unknown
  Bacterial polypetide isolated from the Sargasso Sea
ISRQSGLNAHEFIVDCRSFKSTANITNEDIAKRLIDYGFHAPTMSWPIPGTLMIEPTESETKSELDKFCDAMIAIKKEIVEIELGKMPQDDNVLVNAPHTVHDICDDWNHPYSKESAVFPTQWNKENKFWPYVSRIDNAFGDRNFFCVCPDIDSYK

SEQ ID NO: 98635 - protein, 114 aa, Unknown
  Bacterial polypetide isolated from the Sargasso Sea
MNQIKSFVDRHIGISADDQKDMLDFLGYKDMHSFIEDVVPESILEDDYLDLGDGLSEMAALKKLDKVAKQNKVFRSYIGQGYYGTVTPKVIKRNVFENPGWYTSYTPYQAEILK

SEQ ID NO: 98636 - protein, 106 aa, Unknown
  Bacterial polypetide isolated from the Sargasso Sea
MMIEPTESESKEELDRFAEAMITIADEIKEIENGIYPKDNNPLVNAPHTAQSLIAAEWNHPYTREKAAYPTKFTFANKYWVPVSRIDDAFGDRNLVCSCPPLEEYA

SEQ ID NO: 98637 - protein, 150 aa, Unknown
  Bacterial polypetide isolated from the Sargasso Sea
MSGFAQRHLGPSPAEQQQMLARLGCSDLEHLLQQCVPAEILIDAAEAAKDLPQGCEERLALRELEQRAEANTVRRSLIGLGYYDTATPALIQRHVFENPSWYTAYTPYQAEIAQGRLEALLNFQTLISELTGLPIANASLLDEATAAAEA

SEQ ID NO: 98638 - protein, 60 aa, Unknown
  Bacterial polypetide isolated from the Sargasso Sea
VIPVECDEEGNIDIVDLKQKAEIHEKNLSSLMITYPSTHGVFETNVSEVCDVIHSTGAFV

SEQ ID NO: 98639 - protein, 162 aa, Unknown
  Bacterial polypetide isolated from the Sargasso Sea
NDYSILYRGKSGLNAHEFIVDCRSFKSTANITNEDIAKRLIDYGFHAPTMSWPIPGTLMIEPTESETKSELDKFCDAMIAIKKEIVEIESGKMPQEDNVLVNAPHTVHDICDDWNHPYSKESAVFPTQWNKENKFWPYVSRIDNAFGDRNFFCVCPDIDSYK

SEQ ID NO: 98640 - protein, 58 aa, Unknown
  Bacterial polypetide isolated from the Sargasso Sea
NGNVAHECIIDIRSIKSETGISEEDIAKRLIDYGFHAPTMSWPVAGTMMIEPTESESL

SEQ ID NO: 98641 - protein, 222 aa, Unknown
  Bacterial polypetide isolated from the Sargasso Sea
MLKAISSKSIDNLIENTVPKNILIKDELKIDEPMSENDALKKLKLLSKKNEVFRNFIGMGYYNTVTPNVILRNILENPGWYTSYTPYQPEVAQGRLEMLINFQQMIMDLTGMDIANASLLDEGTATAEAVGLCQRLDKNNSKKIFVSSSCNPQTIDIIKTRVEPFNIELIIGDEEKILKGIKDKIICGVLAYPGTLGEIKDPSESISLIHKKEGKVIVVSDL

SEQ ID NO: 98642 - protein, 175 aa, Unknown
  Bacterial polypetide isolated from the Sargasso Sea
MRSLIGLGYYDNHMPKVIQRHVLENPRWYTSYTPYQAEIAPGRLEALFNFQTIVCELTGFPVANASLLDEGTAAAEAMALSFSARKNNSSKVYLVESNVFVHTFNVLQTRANPLGISLKRFTQSTLPNHDDVFGMLLQLPGKNGQLYDPTFLISQAHRSKIIVTACIDPLAQVLI

SEQ ID NO: 98643 - protein, 142 aa, Unknown
  Bacterial polypetide isolated from the Sargasso Sea
REIKNQYGVTEEDIAKRLMDYGYHAPTMSWPVNGTMMIEPTESESKEEIDRFCEALISIKDEILKIADGMYHKNDNPLKNAPHTATHIASDNWPHRYSRNEAVYPANHLKSHKYWPPVGRIDNAFGDRNLICTCLPPSEYSD

SEQ ID NO: 98644 - protein, 277 aa, Unknown
  Bacterial polypetide isolated from the Sargasso Sea
GIPMGYGGPHAAFIATKDEYKRQLPGRIIGLSKDKYNKPAFRMALQTREQHIRRDRATSNICTAQALLANLAVMYAIYHGPQGLLAIANKIHQLTSSFHKKALSMNLPIRKTIHFDTVVIDVDKESKNKIKQKCELNSFNLNFFDTAVGISIDQTTETNDLELILTIFQDVLKNDSSKVTMPLIESDIEAKYLRNNAILTQEIFNSYHSETSLMRYMKKLEDKDVGLTKTMVPLGSCTMKLNSAASMMPLSWTEFANVHPFCPQDQVKGYLEIIHNM

SEQ ID NO: 98645 - protein, 122 aa, Unknown
  Bacterial polypetide isolated from the Sargasso Sea
MLHNSQKDFLKRHIGPSDEDQNKMLKELNYKSLDDLIKSTVPEKIQLKDELNIGESNSEYEALRKLKAISKKNQIYSNFIGMGYYGTYTPYVILRNILENPGWYTSYTPYQPEVAQGRLEML

SEQ ID NO: 98646 - protein, 160 aa, Unknown
  Bacterial polypetide isolated from the Sargasso Sea
MIDINSFASRHIGPRNIDIKEMLKLVGFKSLDELISNTVPDKILFKDKLNLRPGMSEDFNKTNMQLLSLKNNFKKTYIGMGYYNTITPSVILRNILENPGWYTAYTPYQPEVSQGRLEMLMNFQQMIIDLTGMEIANASLLDESTAADEAMMMAFKIKKN

SEQ ID NO: 98647 - protein, 328 aa, Unknown
  Bacterial polypetide isolated from the Sargasso Sea
FYAIYHGPSGLTQIAKRLVELRINLESSLAALGFDIPDGIRFDSVDVYSEHSQRIHNEALKNGYNLRILPLGSTIENSTGFGISLDELSNEKEIKDILTFIANLLEKEEDLEHKIFEKEFHLESLALRSSAWMQQDIFTNYQSETELMRYIFRLAEKDFSLVDGMMPLGSCTMKLNSAAELNPVSWANLSSMHPFSPPDQTKGYSKIISDLEKWISEIVGLKSVSFQPNAGSQGEFAGLLAINSYFESKGELLRKKCLIPKSAHGTNPASAVMAGFEVLTVECDDEGNIDYQDLSIKVKKFDTHIGALMLTYPSTHGVFELQIRKICD

SEQ ID NO: 98648 - protein, 95 aa, Unknown
  Bacterial polypetide isolated from the Sargasso Sea
RFCDTLIKIKQEIDLVKSGEFDKIDNPIKNAPHTDTELASDNWTHKYSREQAAYPAKFLRVNKFWPPVARVDNVYGDKNIFCTCPSMDEFKEDAA

SEQ ID NO: 98649 - protein, 283 aa, Unknown
  Bacterial polypetide isolated from the Sargasso Sea
AFFACKEDHKRYIPGRIIGVSMDSEGNPALRMALQTREQHIKRAKATSNICTAQALLAVMASMYAVFHGPEGLKFIAKEIRNKAHQLRTALIKAGVSTINGQHFDTVCINEKVDVIKKYTEDAEINIGFIDDKAIISIDETTSWEMLEKLSSVLSKALNVTIEIQKEETDLSNNDRTDDFLSQNVFNSYHSETEMMRYIKRLENKDLSLTHAMISLGSCTMKLNAATEMEPITWPEFANLHPFTPTNQTQGYQQIFKELEKDLCNITGFSGMSLQPNSGAQGE

SEQ ID NO: 98650 - protein, 157 aa, Unknown
  Bacterial polypetide isolated from the Sargasso Sea
IVDFTGMDIANASLLDEGTAAAEAMGLSHRLNKKDSNLVFVSEDCHPQTINVIQTRAEPMGLKVLVGKEDEVLDGLKEDLVCGILQYPGTLGDIKDPGEAISKIHKKNGKAVLACDLLALAKLKTPRELGADIAVGSSQRFGIPMGYGGPPCSLFAT

SEQ ID NO: 98651 - protein, 50 aa, Unknown
  Bacterial polypetide isolated from the Sargasso Sea
QGRLEALLNFQQMVADLTGLAISNASLLDEATAAAEAMTLLQRTGKPTSN

SEQ ID NO: 98652 - protein, 152 aa, Unknown
  Bacterial polypetide isolated from the Sargasso Sea
YSGEKGRSAHEFIIDCREFKKYNIEVVDIAKRLIDYGFHAPTVSFPVPGTMMIEPTESENLNEINRFCEALNSIYFEITSNNESDREMLKNSPHTLKMLTSSEWNYEYSREDASFPKVYLKTNKFWPSVRRVDEAYGDRNLICSCPPIETYQ

SEQ ID NO: 98653 - protein, 182 aa, Unknown
  Bacterial polypetide isolated from the Sargasso Sea
NNIHHNARYLKKSLEILGFEIISKNYFDTLLIKTPEAKYWVNKSIEQGINFRLVDDETFTLSLDETTTLQEVDNLVNFFNEQNIDIFAEEVENRIDVSCFENGLIREDKILTHPVFNIYHSETEMMRYLKKLENKDVALNRSMIPLGSCTMKLNAASEMLPITLPGFSNAHPFSRDSSKTWI

SEQ ID NO: 98654 - protein, 114 aa, Unknown
  Bacterial polypetide isolated from the Sargasso Sea
VPGTMMIEPTESESLKELDRFCDTLIKIKSEIDKIKAGKFDKIDNPIKNAPHTDLELASNEWAHKYTREDAAYPSEFLKFNKFWPPVARVDNVYGDKNLFCSCPSMDEFKEDAA

SEQ ID NO: 98655 - protein, 287 aa, Unknown
  Bacterial polypetide isolated from the Sargasso Sea
REQHIRRDKATSNICTAQALLAIVSAAYAIYHGPDGIKTIAERVSQLAKNFADKLKQSGYEIHSDHFFDTVTIVTKDKTDQIYKNALDQKVNIRRVNSEMLAVSFDEKKNVYRVNQLLKIFNAAESIKKEDPTVSLPNLPKNLLRTSKYLEHPVFNSYHSETEMLRYLKKLEDKDIALNRTMIALGSCTMKLNATAEMIPISWRELAEPHPFVPIEQMEGYRDLFTDLKNWLRSITGFSGVSLQPNAGAQGEYAGLMVIRKYHLDRGEENRNICLIPSSAHGTNPAS

SEQ ID NO: 98656 - protein, 306 aa, Unknown
  Bacterial polypetide isolated from the Sargasso Sea
EHISGREKATSNICTAQSLLAIISSFYAIYHGSSGLTKMAKRLVILRSHLESCLRELGFTIPLGNRFDSVDIYSEESEKIHKEALKNGFNFRILPLGSRIEDSTGFGISLDELTDENEIYKILNFIANAIEEKRDFKESALNKFFQLEGIPLRNQEWMQQNIFKNYQSETDLMRYIFKLSEKDFSLVDGMIPLGSCTMKLNAAAELSPISWDNLSSIHPFAPSSQTKGYLKIINDLEKWISELVGLKSVSFQPNAGSQGEFAGLLAINSYFASKGDLLRKKCLIPQSAHGTNPASAVMAGFDVVTI

SEQ ID NO: 98657 - protein, 316 aa, Unknown
  Bacterial polypetide isolated from the Sargasso Sea
RSMPGRIVGVSVDRHGNKAYRLALQTREQHIRRDKATSNICTAQALLAIVSAAYVVYHGPKGIKKIADTVSQLAKNFADKIKQSGYELYSDYFFDTVTVKTLDKTDKIYKNALDQHVNIRKVNSEMLAVSFDERKNLYRANQVLKIFNCSETIKETTKETTNKSLSNLPKTLLRTSTYLDHPVFNSYHSETAMLRYLKKLEDSDIALNRSMIALGSCTMKLNSVSEMIPVTWKEFSHPHPYSPIEQMDGYRELFTDLKNWLRSITGFSGVSLQPNAGAQGEFAGLMVIRKFHEKNGQRNRNVCLIPSSAHELIQQA

SEQ ID NO: 98658 - protein, 242 aa, Unknown
  Bacterial polypetide isolated from the Sargasso Sea
ATKDEYKRSMPGRIVGVSVDRHGNKAYRLSLQTREQHIRRDKATSNICTAQALLAIVSAAYAIYHGPEGIKTIAERVSQLAKNFADKLKQSGYEIYSDHFFDTVTIVTKDKTDQIYKNALDQKVNIRKVNSEMLAVSFDEKKNVYRVNQLLKIFNAAESIKKEDPTVSLPNLPKNLLRTSKYLEHPVFNLYHSETEMLRYLKKLEDKDIALNRTMIALGSCTMKLNATAEKIPISWRELAEP

SEQ ID NO: 98659 - protein, 217 aa, Unknown
  Bacterial polypetide isolated from the Sargasso Sea
ATSNICTAQALLAIVSAAYAIFHGPNGIRKISERVSQLANNFADKIKKSGYEIYSNNFFDTVVIKTKDNTEKIFKNALDQKVNIRKVNSEMLAVSFDEKKNVYRANQLLKIFNCTESIKDNPTESLPNLPKNLLRTSKYLEHPVFNSYHSETEMLRYLKKLEDKDIALNRSMIALGSCTMKLNAVAEMIPISWREFAEPHPFVPVEQMEGFKKLFTD

SEQ ID NO: 98660 - protein, 242 aa, Unknown
  Bacterial polypetide isolated from the Sargasso Sea
MYKENFSERHIGPNSSELKKILKTIGVKSINHLLDETIPDSIKINKRLNLPDSITEHEFLKEIKSLSYKNKKFKTYIGLGYHDTFTPSVIQRNILENPGWYTAYTPYQAEVAQGRLEALLNFQTMVCDLTKMEIANASLLDESTSAAEAMTLLYNNRTAQQKNDNTLSFFIDENILPQTKSVLETRAKPIGIKLEVGDISKIKTDKYFGCIIQYPGKNGNVKNLNPVLKKLQKNDIKVIIAA

SEQ ID NO: 98661 - protein, 137 aa, Unknown
  Bacterial polypetide isolated from the Sargasso Sea
MTSKFGSNLFIDRHLGLGDNDERIMLNKLGFNNIDQFINQVIPDDIQLKDKSSEILPQGCSEIEALNELEEIANKNTKMRSLIGLGYYDNHMPKVIQRHVLENPRWYTAYTPYQAEIAQGRLEALFYFQTIVCELTG

SEQ ID NO: 98662 - protein, 292 aa, Unknown
  Bacterial polypetide isolated from the Sargasso Sea
GPKGIKKIADTVSQLARNFADKLKQSGYELYSDYFFDTVTVKTLDKTDKIYKNALDQHVNIRKVNSEMLAVSFDERKNLYRANQVLKIFNCSETIKETTKEITNRSLSNLPKTLLRTSTYLDHPVFNSYHSETAMLRYLKKLEDSDIALNRSMIALGSCTMKLNSVSEMIPVTWKEFSHPHPYSPIEQMDGYRELFTDLKNWLRSITGFSGVSLQPNAGAQGEFAGLMVIRKFHEKNGQKKRNVCLIPSSAHGTNPASAQMAGMKVVVVNCDAFGNVDYEDLKKKAEEYSDT

SEQ ID NO: 98663 - protein, 140 aa, Unknown
  Bacterial polypetide isolated from the Sargasso Sea
LKEASGITEMDVAKRLQDYGFHSPTMSFPVAGTLMIEPTESESKGEIDRFIEAMVSIKGEIDKVISGEWSIENNPLVFAPHTQADVLGNEWDRAYDRFYAAFPVPSVAKDKFWPTVTRIDDVYGDRNLVCSCPAVETYRD

SEQ ID NO: 98664 - protein, 127 aa, Unknown
  Bacterial polypetide isolated from the Sargasso Sea
MSKYKADCFARRHIGPGERDVASMTKKLGFSSLDSLAKAVVPEEIYQQRQSLSFSSADELTALNRAKNIASENQLFNNFIGMGYSGTIVPAVIQRNLFENPGWYTQYTPYQPEISQGRLEALFNFQT

SEQ ID NO: 98665 - protein, 209 aa, Unknown
  Bacterial polypetide isolated from the Sargasso Sea
MIEDTSKEFIRRHIGPTSHEENTMVQKVGAQSLEDLIEKTVPQKILIKENLKIDEPMSENDALKKLKLLSKRNEIYRNFIGMGYYNTITPNVILRNILENPGWYTSYTPYQPEVAQGRLEMLLNFQQVIMDLTGMDIANASLLDEGTAAAEAVGLCQRLDKGDSKKIFVSSSCNPQTIDIIKTRVEPFGIEIIVGSEDKELNKIEDKII

SEQ ID NO: 98666 - protein, 138 aa, Unknown
  Bacterial polypetide isolated from the Sargasso Sea
MIEDTSKEFIQRHIGPSVKDQDSMVKKIGAKSLNDLIDKTVPQNILIKDNLKIDQPMSENEALKKLKLLSHRNEIYRNFIGMGYYNTITPNVILRNILENPGWYTSYTPYQPEVAQGRLEMLLNFQQVIMDLTGMDIA

SEQ ID NO: 98667 - protein, 116 aa, Unknown
  Bacterial polypetide isolated from the Sargasso Sea
MIDDNSKEFIKRHIGPSDDEQSKMLQHVGYSSLEDLMKNTVPEKILLKDDLNIDEPLSENDALKKLKSISKKNKIFKNFIGMGYYNSITPNVILRNILENPGWYTSYTPYQPEVAQ

SEQ ID NO: 98668 - protein, 176 aa, Unknown
  Bacterial polypetide isolated from the Sargasso Sea
RLTEIAIVNANYMKTKLEKNFKILYSGENGRSAHEFIIDCREFKKYNIEVVDIAKRLIDYGFHAPTVSFPVPGTMMIEPTESENLNEINRFCEALNSIYFEITSNNESDREMLKNSPHTLKMLTSSEWNYEYSREDASFPKDYLKTNKFWPSVRRVDEAYGDRNLICSCLPIETYQ

SEQ ID NO: 98669 - protein, 175 aa, Unknown
  Bacterial polypetide isolated from the Sargasso Sea
MIDINSFLSRHIGPRENDIKIMLDAINCKSLDELIDKTVPEHIIFKNKLKLKPGMSENFNKINLQLLSLKNTFKKTYIGLGYYNTVTPSVILRNILENPGWYTAYTPYQPEVSQGRLEMLMNFQQMVIDLTGMDIANASLLDESTAVAEAMMMSYKIKKDNKKTICIQNKCHPQT

SEQ ID NO: 98670 - protein, 129 aa, Unknown
  Bacterial polypetide isolated from the Sargasso Sea
RLIDFGYHAPTMSWPVAGTIMIEPTESENLEEIDKFCNALIKIKKEIDLVESSKFDKIDNPLKNAPHTYVELASSEWKHAYSREEAAFPTEYVKNNKYWAPVARVDNVFGDRNLVCSCPSMDEYKDEAA

SEQ ID NO: 98671 - protein, 100 aa, Unknown
  Bacterial polypetide isolated from the Sargasso Sea
LEEIDRFCNALLSIKDEIDKIETGKFEKKDNPIINAPHTYLELSSDEWKHSYSRAEAAFPKTYLKEYKYWAPVARVDNVYGDRNLVCSCPSMDEYKDAAA

SEQ ID NO: 98672 - protein, 129 aa, Unknown
  Bacterial polypetide isolated from the Sargasso Sea
MEYGHFKEENFSKRHIGLNELDKRKLLKKLGYGTMDKFINDVVPQNIKRSAPMKIEKELSEKQLLSKIKEYASLNKTMISMIGQGFYSTHTPSVLLRNILENPSWYTAYTPYQPEISQGRLEALLNFQT

SEQ ID NO: 98673 - protein, 252 aa, Unknown
  Bacterial polypetide isolated from the Sargasso Sea
ERVSQLAKNFADKIKQSGYELYSDYFFDTVTIITKEKTDQIFKNALDQKVNIRKVNSEMLAISFDEKKNVYRVNQLLKIFNAAESIKKEDPTVSLPNLPKNLLRTSKYLEHPVFNSYHSETEMLRYLKKLEDKDIALNRTMIALGSCTMKLNATAEMIPISWRELAEPHPFVPVEQMEGYRALFTDLKNWLRSITGFSGVSLQPNAGAQGEYAGLMLIRKYHLDRGEQNRNICLIPSSAHGTNPASAQMVGM

SEQ ID NO: 98674 - protein, 267 aa, Unknown
  Bacterial polypetide isolated from the Sargasso Sea
LAKIFADGLKSGGYQLHSENYFDTVTIRTNEKTDTINNKALSEKINLRIVDKNTLSVAFDEVKRVDHVNTLLKIFGVKKTFNNTDTVELNNLPQNLLRTSKYLTHPIFNKYHSETEMLRYLKKLEDCDIALNRSMIALGSCTMKLNATAELIPVTWKEFSQPHPFVPQDQMKGYKVLFNDLVNDLKEITGFDAVSLQPNSGAQGEYSGLMTIRKFHLNNNQKNRNVCLIPESAHGTNPASAQMCGMKVVVINCDDESNVDLKDLKEK

SEQ ID NO: 98675 - protein, 87 aa, Unknown
  Bacterial polypetide isolated from the Sargasso Sea
IKEEIDMVKSGKFDKVDNPIKNAPHTDIELASDEWNHKYSREQAAYPAKFLKANKFWPPVARVDNVYGDKNIFCTCPSMDEFKEDAA

SEQ ID NO: 98676 - protein, 109 aa, Unknown
  Bacterial polypetide isolated from the Sargasso Sea
MIEPTESEGMSELDRFCDTLIKIKQEIDKIKSGKFDKDDNPIKNAPHTDSELASDIWEHKYTRQEAAYPAKFLRVNKFWPPVARVDNVYGDKNIFCTCPSMDEFKEDAA

SEQ ID NO: 98677 - protein, 255 aa, Unknown
  Bacterial polypetide isolated from the Sargasso Sea
SPAAGAHGELCGLMTARAALEARGDARKRVLVPDSAHGTNPATAAICGYSVEAIPLNDRGRVDLAALKAALDEEVAAFMLTNPNTCGLFEDEILEQSQAVHDVGAFFYCDGANFNAIVGRVRPGDLGIDCMHLNLHKTFSTPHGGGGPGSGPVVLSEALASHAPLPWVVHGDDGYEVVEHEAGAGDAEPYGRMKAFHGQMGMFVRALAYMMSHGADGLKQVSSDAVLNANYLLARLSDELTLAYDGPCMHEVLFD

SEQ ID NO: 98678 - protein, 121 aa, Unknown
  Bacterial polypetide isolated from the Sargasso Sea
AQGRLEMLLNFQQMIVDFTGMDIANASLLDEGTAAAEAMGLIHRLNKKDINLVFVSEDFHPQTINVIQTRAEPLGLKILVVKEDEVLEQLKEDLVCGILQYPGTLGDIKDPSEAISKIHKK

SEQ ID NO: 98679 - protein, 115 aa, Unknown
  Bacterial polypetide isolated from the Sargasso Sea
MIDDTSKEFISRHIGPSTEDQKEMLKAISSKSIDNLIENTVPKNILIKDELKIDEPMSENDALKKLKLLSKKNEVFRNFIGMGYYNTVTPNVILRNILENPGWYTSYTPYQPEVA

SEQ ID NO: 98680 - protein, 119 aa, Unknown
  Bacterial polypetide isolated from the Sargasso Sea
MIDDTSQEFINRHIGPSKNDQEKMLDYIESKSINHLIQNTVPKNILLKDELKIGDSLSESEALKKLKIISQKNETFRNFIGMGYYNCFTPNVVVRNILENPGWYTSYTPYQPEVAQGRL

SEQ ID NO: 98681 - protein, 215 aa, Unknown
  Bacterial polypetide isolated from the Sargasso Sea
MGGKKSIEAISSAPWGSALASLISYGYIKLLGEKGLRKCSEIAILNSNYIKKRLQGAYEILYSGINGKVAHEFIIDCRPFKKNGIEVIDIAKRLMDYGFHAPTVSFPVPGTMMIEPTESENMEEIDRFCEAMISIRMEIDSDNPADYAMLKNAPHTEKMITSDKWDFPYTRQKAAFPLEFVRENKFWPSVRRIDEAFGDRNLICSCTSIDYFVKT

SEQ ID NO: 98682 - protein, 113 aa, Unknown
  Bacterial polypetide isolated from the Sargasso Sea
MLPNSEKDFIKRHIGPSKEDQSKMLKELNYKSLDDLIDSTVPEKIKFKGELNIGEPNSEYEALRKLRAISKKNEVYSNFIGMGYYGTYTPYVILRNILENPGWYTSYTPYQPE

SEQ ID NO: 98683 - protein, 100 aa, Unknown
  Bacterial polypetide isolated from the Sargasso Sea
LSELDRFCDTLINIKSEIDMIKSGEFDKVDNPIKNAPHTDIELASDDWEHKYTREQAAYPAKFLKTNKFWPPVARVDNVYGDKNIFCTCPSMDEFNEDAA

SEQ ID NO: 98684 - protein, 205 aa, Unknown
  Bacterial polypetide isolated from the Sargasso Sea
MIDDTSQEFINRHIGPSDKDQEKILDYIGSKSLDQLIQDTVPKNILLNDELKIGDSLSESEALKKLKVISQKNETYKSFIGMGYYNCFTPNVVLRNILENPGWYTSYTPYQPEVAQGRLEMLMNFQQLVIDFTGMDIANASLLDEATAAAEAVGLAQRVSKNNSKKVYVSETCNPQVIDLIKTRIEPFGLELLIGNQKDLIKFKW

SEQ ID NO: 98685 - protein, 138 aa, Unknown
  Bacterial polypetide isolated from the Sargasso Sea
MEDHTSAFFATSENFKRKIPGRIIGVSKDNHGSKALRMALQTREQHIRIEKATSNICTAQVLLAIMSSMYAVYHGPKNIISIANKVHNLSSNLATSLNQAGLKILHQQFFDTIKILPNNNWEIEAQNEKMNFRKFEDG

SEQ ID NO: 98686 - protein, 309 aa, Unknown
  Bacterial polypetide isolated from the Sargasso Sea
VAADLLSLTLLKAPGKFGVDIVVGTSQRFGIPLGYGGPHAAFFATKEEYKRYIPGRIIGQTIDMDNNPAFRMALQTREQHIKRDRATSNICTAQVLLAVMAGMYAVFHGPKGLKNIAQEIHDKAKKLDSILTNLGIDQLNESFFDTLKISVPSEEIREIAEKNLINFLYINDSTISISLNEGVDKKELNKIINVFEVFMKKKVNKDSQISNSSRLPENQSRKSDFLSNKTFNSYHSETTLMRYIKSLEQKDLSLTHSMIPLGSCTMKLNSASEMLPISSSKWSDIHPFVPLNQVEGYTQILSELSNQLN

SEQ ID NO: 98687 - protein, 131 aa, Unknown
  Bacterial polypetide isolated from the Sargasso Sea
MLKGVSEKRALELLKKVIDKNKNAKFMIGKGFNNNNMPSVIKRNILMNPKWYTPYTPYQAEISQGRLESLFNYQTMIKNITGLPVSNASLLDIGSTSAEVLSMSHSFHKRKRNKFILSETVHPYIIDILKL

SEQ ID NO: 98688 - protein, 303 aa, Unknown
  Bacterial polypetide isolated from the Sargasso Sea
MRSSCFDNVKSPGRNGCRYCCGKFTKIRSSYGFCGPHAAFISCREEYKRLLPGRIIGRSVDKNDNLAYRMALQTREQHIRRERATSNICTAQALLAITSAAYAIYHGPKGIKKIGLRTHKLARILSKSLTTLGFDLINKIYFDTIAIKLPRKKMTSIKSQAQKNKLNFRYFSNEIITISMDETSTIGDVEKILKCFSTVKNLDLEEIVNSIKYDLDVIPKNFTRNKDYLTHPVFNSYKSETDFVRYLKALEDKDIALNRSMIPLGSCTMKLNSTSEMIPISWTKINALHPFIPKTQAKGYEFV

SEQ ID NO: 98689 - protein, 159 aa, Unknown
  Bacterial polypetide isolated from the Sargasso Sea
MIDDTSNEFINRHIGPSEEDQAKVLSYLGSSSLEQLIKDTVPENILLKEDLKISDSLSESEALKKLKIISKKNQTFRNFIGMGYYNCFTPNVILRNILENPGWYTSYTPYQPEVAQGRLEMLLNFQQVIIDLTGMDIANASLLDESTAAAEAVGLAQRI

SEQ ID NO: 98690 - protein, 128 aa, Unknown
  Bacterial polypetide isolated from the Sargasso Sea
MIDINSFASRHIGPRNEDIDSMLKFIKCKNLDELIQKTVPDHILFKDKLKLKPGMSEDFNKVNMQLLSLKNKFKKTYIGLGYHNTVTPSVILRNILENPGWYTAYTPYQPEVSQGRLEMLINFQQMII

SEQ ID NO: 98691 - protein, 186 aa, Unknown
  Bacterial polypetide isolated from the Sargasso Sea
DTVTIKTNDKTSSIYLTALNEDINLRKVDDKHISVAFDEAKKLNDVNILLKIFGVSKVINQDVKVELNNLPKNLLRTSKYLTHPVFNKYHSETEMLRYLKKLEDCDIALNRSMIALGSCTMKLNATAELMPITWKEFSLPHPFVPTDQMEGYKILFNDLINDLKEITGYDAVSLQPNSGAQGEYAG

SEQ ID NO: 98692 - protein, 255 aa, Unknown
  Bacterial polypetide isolated from the Sargasso Sea
MTSKFGSDFFIDRHLGLGDNDERIMLNKLGFNNIDQFINQVIPEDIQLKDKSSEILPQGCSEIEALNELEEIANKNAKLRSLIGLGYYDNHMPKVIQRHVLENPRWYTSYTPYQAEIAQGRLEALFNFQTIVCELTGFPVANASLLDEGTSAAEAMAMSFSARKNKSSKVYLVESNVFDHTFNVLQTRAKPLGISLKRFTQSNLPNHDDVFGMLLQLPGKNGQLYDPTFLISQAHRSEIIVTACIDPLAQVLIKP

SEQ ID NO: 98693 - protein, 141 aa, Unknown
  Bacterial polypetide isolated from the Sargasso Sea
MKSTANSDLFINRHLGLSDADEQKMLSKIGFKNIDEFINQVIPEDIQLKDKSSEILPQGCSEIEALNELEEIANKNTKMRSLIGLGYYDNHMPKVIQRHVLENPRWYTSYTPYQAEIAQGRLEALFNFQTIVCELTGFPVA

SEQ ID NO: 98694 - protein, 284 aa, Unknown
  Bacterial polypetide isolated from the Sargasso Sea
NPVFRCHRTETKMMRYLHQLEMKDLSLNTSMIPLGSCTMKLNSATEMEALSWPSFVNIHPFAPIEQTKGYENLIKELNAFLIKITGFDSISMQPNSGSQGEYTGLLLIRAYHLFNGNSKRNICLIPTSAHGTNPASAVMAGMRVVPILCDEKGNISLKDLMQKMNKHSEELSAVMLTYPSTHGVFEPKINEICNSIHEHGAQVYFDGANLNAMVGLCKPGEFGCDVMHINLHKTFCIPHGGGGPGMGPIVCKSHLSDFLPNHSQLKTGGINAISPVSSTPFGSS

SEQ ID NO: 98695 - protein, 226 aa, Unknown
  Bacterial polypetide isolated from the Sargasso Sea
INLHKTFCIPHGGGGPGMGPIVCKNHLKEFLPSHVIYEKTKDSAGAVSASPFGSSSILVISWAYIAMLNSLGLQLATKLAILNANYMAKRLEGHYPILFKGESGFNAHEFIIDLREIKNQYGVNEEDIAKRLMDYGYHAPTMSWPVNGTMMIEPTESESKEEIDRFCEALISIKDEILKIADGKYHQNDNPIKNAPHTATHIASDNWPHRYSRNEAVYPANHLKNP

SEQ ID NO: 98696 - protein, 112 aa, Unknown
  Bacterial polypetide isolated from the Sargasso Sea
LQPNAGSQGEYAGLLVIRAWHRSRGDDHRDVCLIPTSAHDTNPASAVMAGLKVVAVACDADGNIDQQDLAARAAEHADRLAALMVTYPSTHGVFETGIRGICELVHRHGGQV

SEQ ID NO: 98697 - protein, 281 aa, Unknown
  Bacterial polypetide isolated from the Sargasso Sea
MEIIHLGWLFKLREQHIKRDRATSNICTAQVLLAVMAGMYAVYHGPNGLKEISKSIHLKAVYLKTSLKSIGLQIKYSNFFDTVTVICESKKIKELAVIKKINFCYLSDNEISISVNEKTNLNDLTEIISVFEDYAKKESNIKEFPKDIEVVNERKSNILSHPVFNSYHSETSLMRYIKSLENKDLSLTQSMISLGSCTMKLNSASEMIPLSWTEWSSIHPFVPVDQAKGYHEVINRLERYLSEITGFAATSLQPNSGAQGEYSGLMVIKSYLDKKGDSHRN

SEQ ID NO: 98698 - protein, 102 aa, Unknown
  Bacterial polypetide isolated from the Sargasso Sea
ESLNEINRFCSALQKIKQEIDKVHSGDYDKVDNPLKNAPHTHVELSSNKWEHKYEREEAAYPSEILKTVKYWPPVARVDNVYGDKNLFCTCPSMEEYEDSAA

SEQ ID NO: 98699 - protein, 114 aa, Unknown
  Bacterial polypetide isolated from the Sargasso Sea
MSWPVAGTLMIEPTESESKLELDRFCDAMIEIRKEIKRIEKGTLDKKDNMLKNAPHCAEHLTENNWKHEYSREEAAYPLNSLRENKYWCPVGRIDNVYGDRNLVCSCPSMEELN

SEQ ID NO: 98700 - protein, 269 aa, Unknown
  Bacterial polypetide isolated from the Sargasso Sea
MYKENFSRRHIGPSTSELNDMLKIIGVKSIEDLLSQTIPEKIRLKSDLDIPDAISEMEFLKEIKRFSTLNRNFKTYIGLGYHDTFTPSVIQRNILENPGWYTAYTPYQPEIAQGRLEALLNFQTMICDLTKMEIANASLLDEGTSAAEAMIMMYNNRSKDQKSQNLDRFFVDSSILPQTLSVLKTRAYPLGIEIEIDEINNINSDDCFGCIIQYPGKKGNLPNINEILSGIKNEDFKIVLAVDLMSLVIIEPPNPEKVDVVVGTTQRFG

SEQ ID NO: 98701 - protein, 52 aa, Unknown
  Bacterial polypetide isolated from the Sargasso Sea
ALLNFQQMVADLTGLAISNASLLDEATAAAEAMTLLQRTGKPTSNVFYVADD

SEQ ID NO: 98702 - protein, 124 aa, Unknown
  Bacterial polypetide isolated from the Sargasso Sea
RLIDYGFHAPTMSWPIPGTLMIEPTESESKSELDKFCDAMIAIKKEIIEIESGKIPQEDNVLVNAPHTVHDICDDWNHPYSKENAVFPAQWSKENKFWPYVSRIDNAFGDRNFFCVCPDINSYK

SEQ ID NO: 98703 - protein, 244 aa, Unknown
  Bacterial polypetide isolated from the Sargasso Sea
SQMNYSIDTQFYPLGSCTMKYNPKINDQLASLKGFSNIHPLIEESLVQGSLELMFNLQSYLSNISGMTATSLSTMAGAQGELAGVLMIKAFHEKQSTSSKRNVILIPDSAHGTNPASASMAGFSVKSIPSDQNGNMDIDVLKENANENLAGIMLTLPSTLGLFDNQIVDICNIVHEAGGLVYGDGANMNAWMGQTKLGDLGFDVIHINLHKTFSTPHGGGGPGSGPVCVNDTLLNYLPGPVVQR

SEQ ID NO: 98704 - protein, 280 aa, Unknown
  Bacterial polypetide isolated from the Sargasso Sea
MNDVFYRRDKATSNICTAQALLAIISAAYAIYHGPEGILKIANRTSKLAKIFSDSLEENGFKIFSKSFFDTVTIETNEKTETIFNKALAEKINLRRVNKKTLSVAFDEVKKIKHVNTLLKVFGVKKEYDNSVNVELNNLPKNLLRTSKYLTHPIFNKYHSETEMLRYLKRLEDCDIALNRSMIALGSCTMKLNATAELIPVTWKEFSLPHPFVPEDQMKGYKVLFNDLINDLKEITGFDAVSLQPNSGAQGEYSGLMTIRKYHINNKQKNRNICLIPESA

SEQ ID NO: 98705 - protein, 296 aa, Unknown
  Bacterial polypetide isolated from the Sargasso Sea
DTVSQLAKNFADKLKQSGYELYSDYFFDTVTVKTLDKTDKIYKNALDQQVNIRKVNSEMLAVSFDERKNLYRANQVLKIFNCSETIKETTKETTNKSLSNLPKNLLRSSTYLDHPVFNSYHSETAMLRYLKKLEDSDIALNRSMIALGSCTMKLNSVSEMIPVTWKEFSHPHPYSPIEQMDGYRELFTDLKNWLRTITGFSGVSLQPNAGAQGEFAGLMVIRKFHEKNGQKKRNVCLIPSSAHGTNPASAQMAGMKVVVVSCDSHGNVDYEDLKKKTEEYSDTLSTLMVTYPSTHG

SEQ ID NO: 98706 - protein, 257 aa, Unknown
  Bacterial polypetide isolated from the Sargasso Sea
MGYVQENSNFFDTLKIKVSPDQKKGIHKKAEKNSINFRYFESEHVGISLDETTSPSDVMAILNIFSDFADNAIEVHLNNIEEVQLKLSTELQRKSEFLSHDVFNKYQTEHEILRYMKRLENKDLSLVHSMISLGSCTMKLNATAEMIPVTWEEMNLHPFVPMSQAKGYEKMISELNIWLSDITGFSKLSFQPNSGAQGEYTGLMVIRAFHMDNGNDNRDIALIPSSAHGTNPASAIMAGMKVVVIACDKHGNIDLDD

SEQ ID NO: 98707 - protein, 49 aa, Unknown
  Bacterial polypetide isolated from the Sargasso Sea
WDHPYTRSEAAYPSKHQKNHKYWPPVSRIDNAYGDRNLVCTCPTIDDYK

SEQ ID NO: 98708 - protein, 204 aa, Unknown
  Bacterial polypetide isolated from the Sargasso Sea
MIDIDKFASRHIGPRNEDIIEMLKVVGSKSLDDLIEKTVPDHIIFKDKLKLRPGMSEEFNKTNTQLLSLKNNFKKTYIGMGYYNTTTPSVILRNILENPGWYTAYTPYQPEVSQGRLEMLMNFQQMIIDLTGMDIANASLLDESTAAAEAMMMAFKIKKSSRFTFCIQNTCHPQTLSVLKTRAKPLGIKIIFNKPNEDTFGCLI

SEQ ID NO: 98709 - protein, 181 aa, Unknown
  Bacterial polypetide isolated from the Sargasso Sea
MIDINSFASRHIGPRNDDIKEMLKVVGCDSLDDLIQKTVPDHIIFKNKLKLRPGMSEEFNKTNTQLLSLKNNFKKTYIGMGYYNTITPSVILRNILENPGWYTAYTPYSSEASQGRLEMLMNFQQMIIDLTGMDVCNASLLDEGTAAAEAMTMAFKINKSSKNNFCIQNTCHPQTLSILKT

SEQ ID NO: 98710 - protein, 200 aa, Unknown
  Bacterial polypetide isolated from the Sargasso Sea
MANNTRDFSYRHIGLKDSDVNNILHDLGYKDMKTFLKDLMPESIYDKTDITLPDALDEASALKKLKSISKKNKVYKSYVGQGFYNCHVPSVIKRNVFENPGWYTSYTPYQPEIAQGRLEALMNYQTMIADLTAMDISNASLLDEPTAAAEAMMLAHRVSKSKSNKFFIHEKCFNQTISIIQSRAKPLNIEIEIGQEMSKS

SEQ ID NO: 98711 - protein, 247 aa, Unknown
  Bacterial polypetide isolated from the Sargasso Sea
MDKYVKDRSKDFSTRHIGIKDSEAKQMLQDLGYNDMDKFLKDLMPESIFDLSALKLPEPLDEASALKNLKAISKKNKVYKSFIGQGFYGCNVPTVIKRNVFENPGWYTSYTPYQPEIAQGRLEALMNYQTMVADLTGMDISNASLLDEPTAAAEAMMLANRVAKSKSNVFFIHENSFPQSIAIMKSRAKPLGIEIEVGEEMDSKKEYFGCYVQYPGDDGSIIDFSAVSESIHAQGGLLIVGSDLLAL

SEQ ID NO: 98712 - protein, 242 aa, Unknown
  Bacterial polypetide isolated from the Sargasso Sea
GPIALKSHLSQFAPNHVVINLDGLPIENTAVSAAPWGSPGILPISLIYIKLMGEHGLKKSSQVAILNANYLANRLKKYFPIVFTGKNGLIAHECIIDIRHLKDTLGITEEDIAKRLIDYGFHAPTMSWPVPGTLMIEPTESEPKEEIDRFCEAMISIRKETKKIESGDWDKVDNPLKNAPHQSDDLTDPKWNHLYSKKIAFYPLDSVRQKKYWPPTARIDNVYGDRNVVCTCPPMEIFEEQE

SEQ ID NO: 98713 - protein, 46 aa, Unknown
  Bacterial polypetide isolated from the Sargasso Sea
RYERSKAAYPVDSLYENKYWPPVGRVDNVYGDRNLVCSCPSMEDYD

SEQ ID NO: 98714 - protein, 176 aa, Unknown
  Bacterial polypetide isolated from the Sargasso Sea
MSNAKSLEQLEQKQDFIRRHIGPSPAQVSDMLSALEVSSVQELIDQTVPANIRLEQPLSIGESRTEVETLSYLKSVASKNKVFKSYIGQGYHPTHVPHVILRNVLENPGWYTAYTPYQPEIAQGRLESLLNFQTMTLDLTGLDLASASLLDESTAAAEAMGLAKRVSKAKKTQCLF

SEQ ID NO: 98715 - protein, 148 aa, Unknown
  Bacterial polypetide isolated from the Sargasso Sea
MIFRPIKASSGISEEDLAKRLIDFGYHAPTMSWPVAGTIMIEPTESENLGEIDKFCNALIKIKKEINLVETSKFDKIDNPLKNAPHTYVELASSEWKHAYSREEAAFPTEYVKNNKYWAPVARVDNVFGDRNLVCSCPSMDEYKDEAA

SEQ ID NO: 98716 - protein, 127 aa, Unknown
  Bacterial polypetide isolated from the Sargasso Sea
MIDDTSQEFINRHIGPSKEDQKKILNYIGSKSLDDLIQNTVPENILLKDELKIGHSLSESEALKKLKIISQKNETFRNFIGMGYYNCFTPNVILRNILENPGWYTSYTPYQPEVAQGRLEMLLNFQQ

SEQ ID NO: 98717 - protein, 109 aa, Unknown
  Bacterial polypetide isolated from the Sargasso Sea
MIEPTESEGLSEINRFCDTLIKIKQEIEKIKSGEFDKIDNPIKNAPHTDSELASDNWEHKYTRQEAAYPSKFLKANKFWPPVARVDNVYGDKNIFCTCPSMDEFKEDAA

SEQ ID NO: 98718 - protein, 118 aa, Unknown
  Bacterial polypetide isolated from the Sargasso Sea
MSWPVAGTMMIEPTESEGLSEIDRFCDTLIKIKQEIEKIKSGEFDKIDNPIKNAPHTDTELSSDVWEHKYSRQEAAYPASFLKQNKFWPPVARVDNVYGDKNIFCTCPSMDEFKEDAA

SEQ ID NO: 98719 - protein, 78 aa, Unknown
  Bacterial polypetide isolated from the Sargasso Sea
SGKFDKNDNPLKNAPHTHIELTANEWKHKYDRESAAYPSATLKSYKYWPPVARVDNVYGDKNLFCSCPSLDEYKDSAA

SEQ ID NO: 98720 - protein, 78 aa, Unknown
  Bacterial polypetide isolated from the Sargasso Sea
TSEFDKIDNPLKNAPHTYIELASNEWKHKYTREEAAFPNQYVKNYKYWAPVARVDNVYGDRNLVCSCPSMDEYKDEAA

SEQ ID NO: 98721 - protein, 258 aa, Unknown
  Bacterial polypetide isolated from the Sargasso Sea
MIDDTSKEFISKHIGPSTEDQKEMLKAISSKSIDNLIEKTVPKNILIKDKLKIDESMSENDALKKLKLLSKKNEVFRNFIGMGYYNTVTPNVILRNILENPGWYTSYTPYQPEVAQGRLEMLINFQQMIMDFTGMDIANASLLDEGTAAAEAVGLCQRLDKNNSKKIFVSSSCNPQTIDIIKTRVEPFNIELIIGDEGKILKGIKDKIICGVLAYPGTLGEIKDPSESISLIHKKEGKVIVVSDLLSLTRLKTPAELG

SEQ ID NO: 98722 - protein, 213 aa, Unknown
  Bacterial polypetide isolated from the Sargasso Sea
MININSFASRHIGPRNEDITAMLKIVNCKSLDELIKKTVPEHILFTDKLKLKPGMSEDFNKVNMQLLSLKNKFKKTYIGLGYYNTITPSVILRNILENPGWYTAYTPYQPEVSQGRLEMLMNFQQMIIDLTGMDIANASLLDESTAAAEAMMMAYKIKKSKQHTFCIQNSCHPQTLSVLKTRANPLGIKIIIGQPDEDTFGCLIQNPDTYGEI

SEQ ID NO: 98723 - protein, 241 aa, Unknown
  Bacterial polypetide isolated from the Sargasso Sea
MLHNSQKDFLKRHIGPSNEDQNKMLMELNYKSLDDLIKSTVPEKIQLKDELNIGDSNSEYEALRKLKAISKKNQIYSNFIGMGYYGTYTPYVILRNILENPGWYTSYTPYQPEVAQGRLEMLLNFQQMIVDFTGMDIANASLLDEGTAAAEAMGLSHRLNKKDSNLVFVSENCHPQTINVIQTRAEPMGLKVLVGDEDKLIDQLKEDLVCGILQYPGTLGDIKDPSEAISKIHKKNGKAIL

SEQ ID NO: 98724 - protein, 227 aa, Unknown
  Bacterial polypetide isolated from the Sargasso Sea
LAPFLPGHAHMARKEGAVSAAPFGSASILPITWMYITMMGGNGLKRASQMAILNANYIARRLEEHYPVLYSGEGGLVAHECILDIRPLKDSSGISVDDVAKRLIDFGFHAPTMSFPVAGTLMIEPTESESKEELDRFCDAMIAIREEIRAVEQGRLDKDDNPLKNAPHTALELVGEWHHAYSREQAVYPLASLIEAKYWPPVGRVDNVYGDRNLICACPSIEAYQDA

SEQ ID NO: 98725 - protein, 146 aa, Unknown
  Bacterial polypetide isolated from the Sargasso Sea
MLENNKSFFRRHIGNSEQEQQKMLDQLDYKNIKDLISNTVPNNIHFKEPLTIGEPNSEYEALRKLKNISKQNKIYSNFLGMGYYGTYIPNVILRNILENPGWYTSYTPYQPEVAQGRLEMLLNFQQMITDFTGMDIANASLLDEGT

SEQ ID NO: 98726 - protein, 313 aa, Unknown
  Bacterial polypetide isolated from the Sargasso Sea
KSAHGTNPASAQMCGMDILIVNCDDKGNVDLTHLDKKIEEAGDKLSALMITYPSTHGVFEESIVEICKKIHDAGGQVYLDGANYNAMVGVAKPGKFGPDVCHMNLHKTFCIPHGGGGPGVGAIGLKKHLADFAPGHPMFKNEIGLTTQEAVSAAPWGSASILPISYSYISMMGDDGLKLATQVAILNANYIKERLKNYYPILYTGKNNMVAHEFIIDIRPFKQELNISDEDIAKRLIDYGFHAPTMSFPVPGTLMIEPTESESKEELDRFCEAMISIHNEITMIRDGKFDKVDNPIKNAPHTIEEVSSDNGIT

SEQ ID NO: 98727 - protein, 331 aa, Unknown
  Bacterial polypetide isolated from the Sargasso Sea
SSFAQTIAIMQSRARPLGIEIHIGDSMDKDSEYFGCYYQYPNANGGIADMSEVAEEIHNKNGLFIVGTDLLALTLIKAPGEFDADIVIGSAQRFGVPMGFGGPHAGFIAVKDAFKRSLPGRLIGLTQDQQGRPCYRLALQTREQHIRREKATSNICTAQALLAIMSSFYAIYHGPDGLKEIASRVHQKTKVLAHNLTANGFKLVENTFFDTLVIEVADANPIHKKALEHKFNFRKISNNLIGLSFDETTKDEDVKTILNIFSENISISEKAEDVVPDNLMRNSLYLTHEVFNSYHSETQILRYIRSLADKDIALDRSMIPLGSCTMKLNAT

SEQ ID NO: 98728 - protein, 314 aa, Unknown
  Bacterial polypetide isolated from the Sargasso Sea
PDKIQFKGELNIGEPNSEYEALRKLKSISKKNQIYSNFIGMGYYGTYTPYVILRNILENPGWYTSYTPYQPEVAQGRLEMLLNFQQMIVDFTGMDIANASLLDEGTAAAEAMGLSHRLNKSDSNLVFISENCHPQTIDVIQTRAEPMGLKVLVGNEDKVLDQLKEDVVCGILQYPGTLGDIKDPSEHISKIHKKNGKAILACDLLALAKLKTPGELGADIAVGSSQRFGIPMGYGGPHAAFFATKDEFKRSMPGRIVGVSVDRHGNKAYRLSLQTREQHIRRDKATSNICTAQALLAIVSAAYAIYHGPRWNKG

SEQ ID NO: 98729 - protein, 325 aa, Unknown
  Bacterial polypetide isolated from the Sargasso Sea
VVVVNCDEDGNVDLKDLKSKVDKYSNDLAALMVTYPSTHGVFEEKITEICDYVHKAGGQVYMDGANLNALVGIAKPGKFGPDVCHINLHKTFCIPHGGGGPGMGPIACAKHLEDFLPNHSVIKSIGTDKSLGSVSAAPWGSSSILVISWMYIKMMGAEGLKKASQVAILNANYISKRLSKFYKVLYTGKNGNVAHECIIDLRPIKAKSGISEEDIAKRLIDYGYHAPTMSWPVAGTLMIEPTESEGLDEMNRFCNALISIKEEIDKVDKGNFDKKDNPLKNAPHTYLELSSNEWKHSYTREEAAFPKEYLKDNKFWPPVARVDNV

SEQ ID NO: 98730 - protein, 159 aa, Unknown
  Bacterial polypetide isolated from the Sargasso Sea
MTKQTLTQLEQHELFLTRHIGPNAEQQQEMLNFIGAESLEDLTAQTVPGKIRLPQELTIGESCGEAEGIAYIRNIANKNKVFKSYIGMGYYGVQVPNVILRNVFENPGWYTAYTPYQPEIAQGRLEAILNFQQVSMDLTGLDLASASLLDEATAAAEAM

SEQ ID NO: 98731 - protein, 298 aa, Unknown
  Bacterial polypetide isolated from the Sargasso Sea
KSVSFQPNAGSQGEFAGLLAINSYFESKGELSRKKCLIPKSAHGTNPASAVMAGFDVLTIECDDEGNIDFQDLSIKVKKFDNQIGALMLTYPSTHGVFELQIRKICDLIHSVGGFVYLDGANLNAQVGLCKPGNYGVDVCHLNLHKTFCIPHGGGGPGVGPVAASETLSPFLPTHSLMDNNLSNSSNYVSSAKHGSASILPISWMYIKMAGLSGLRKATAHAILSANYIAHSLKHKFKILYKGKNNFVAHECILDFRDLKSKTGLSVNDLAKRLIDYSFHAPTISWPVPETIMIEPTE

SEQ ID NO: 98732 - protein, 300 aa, Unknown
  Bacterial polypetide isolated from the Sargasso Sea
DEGTAAAEAMGLSYRICKSETKKVFVSKNCHPQTIDVIKTRAEPLGLKVIVGDEDKDINENIVCGIIQYPGTLGDIKDPSEAISKIHKKNGKAVLICDLLALAKIKTPAELGADIAVGSAQRFGIPMGYGGPHAAFFATKDEYKRSMPGRIVGVSVDRHGNKAYRLSLQTREQHIRRDKATSNICTAQALLAIVSAAYAVYHGPKGIKKIADTVSQLAKSFADKLKQSGYELYSNYFFDTVTVKTLDKTNKIYKNALRQQVNIRKVNSEMLAVSFDERKNIYRANQLLKIFNCSETIRKR

SEQ ID NO: 98733 - protein, 287 aa, Unknown
  Bacterial polypetide isolated from the Sargasso Sea
MTSKFGSNLFIDRHLGLGDNDERIMLNKLGFNNIDQFINQVIPDDIQLKDKSSEILPQGCSEIEALNELEEIANKNTKMRSLIGLGYYDNHMPKVIQRHVLENPRWYTSYTPYQAEIAQGRLEALFNFQTIVCELTGFPVANASLLDEGTAAAEAMAMSFSARNNKSSKVYLVESNVFDHTFNVLQTRAKPLGISLKRFTQSNLPNHDDVFGMLLQLPGKNGQLYDPTFLVSQAHRSEIIVTACIDPLAQVLIKPISEFGVDVAVGSMQRFGVPMGFWWASCSIFCL

SEQ ID NO: 98734 - protein, 315 aa, Unknown
  Bacterial polypetide isolated from the Sargasso Sea
ATKDEFKRSMPGRIIGVSVDRHGNKAYRLALQTREQHIRRDKATSNICTAQALLAIVSAAYAIYHGPKGIRTISERVSQLAKNFADKLKQSGYELYSDYFFDTVTVLTKDKTEQIFQNALSQKVNIRKVNSEMLAVSFDEKKNVYRANQLLKIFNCAEAIKENPTESLPNLPKNLLRTSKYLEHKVFNSYHSETEMIRYLKRLEDKDIALNRTMIALGSCTMKLNAVAEMIPISWREFSEPHPFAPIEQMEGFRTLFTDLKNWLRSVTGFSGVSLQPNAGAQGEYAGLMVIRKYHMERGEKNRNVCLIPSSAHGT

SEQ ID NO: 98735 - protein, 268 aa, Unknown
  Bacterial polypetide isolated from the Sargasso Sea
MKKDVKYYQHQFVDRHVGPNQEELSQMLHTIGVGSIEELIDLSIPKSIQSKEKLNVGNGISEKELIEKLKSIAEKNTIMKTYIGMGYYNCITPPVIQRNILENPGWYTQYTPYQAEISQGRLEALINFQTMVCDLTALPIANASLLDEATAAAEAMTMTYRMSKDRNIFLVSKHCHPQTIDVLKTRSEPLGITIQLCDDDDFIFNQNVFGSILQYPDTNGSVNNFQKLTNAAHKESAYVIIATDLMSLALLKPPGELGADVALGSSQR

SEQ ID NO: 98736 - protein, 267 aa, Unknown
  Bacterial polypetide isolated from the Sargasso Sea
MLPNSEKDFLKRHIGPSKEDQSKMLKELNYKSLDDLIDSTVPEKIKFRGELNIGESNSEYEALRKLRAISKKNQVYSNFIGMGYYGTYTPYVILRNILENPGWYTSYTPYQPEVAQGRLEMLLNFQQMIVDFTGMDIANASLLDEGTAAAEAMGLSHRLNKKDSNLVFVSEDCHPQTINVIQTRAEPLGLKVLVGKEDEVLDQLKEDLVCGILQYPGTLGDIKDPSEAISKIHKKNGKAVLACDLLALAKLKTPRELGADIAVGSSQ

SEQ ID NO: 98737 - protein, 311 aa, Unknown
  Bacterial polypetide isolated from the Sargasso Sea
MVIRAFHRDKGNDKRTICLIPESAHGTNPASAVMAGMDVIVIKCDSSGNIDVKDLKEKAYANKETLSALMITYPSTHGVFEESVNEICSIIHDCGGQVYLDGANLNAMVGLSRLGDFGADVCHINLHKTFAIPHGGGGPGMGPICVAEHLSSYLPGHTVLDNNSKSISAISAAPYGSASILPISWGYITMLGSDGLKKASEIAILNANYMAKRLESDFSVLYRGINKTSAHEFIIDLRRLKNDTGISDEDVAKRLIDYGFHAPTMSWPVPGTLMIEPTESESKRELDRFCDAMISIKKEIDKVVSGEFDPE

SEQ ID NO: 98738 - protein, 328 aa, Unknown
  Bacterial polypetide isolated from the Sargasso Sea
AGFDVLTVECDDEGNIDYQDYLIKVKQFDNQIGALMLTYPSTHGVFELQIRKICDLIHSVGGFVYLDGANLNAQVGLCKPGNYGVDVCHLNLHKTFCIPHGGGGPGVGPVAASETLSPYLPAHSLMDNNLSNSFNFVSSAKHGSASILPISWMYIKMAGLSGLRKATSQAILSANYIAHSLKHKFKILYKGKNNFVAHECILDFRDLKSKTGLSVNDLAKRLIDYSFHAPTISWPVPETIMIEPTESESLAEVDRFCEAMLLIGEEISEIENNHELKNNNVISNAPHTLKELIADNWQYPYSKEKASFPYKTPTTIKFWSSVSRINNA

SEQ ID NO: 98739 - protein, 354 aa, Unknown
  Bacterial polypetide isolated from the Sargasso Sea
ITGYEAVSLQPNAGSQGEYAGLLAIDAYHKQRGDEKRNICLIPKSAHGTNPASAQMVNMIPIPVECDDEGNIDIQDLKQKAEENKEQLAAIMITYPSTHGVFEDTVKEVCEIIHKNGGQVYLDGANLNAMVGICYPGEFGGDVSHLNLHKTFCIPHGGGGPGVGPIGVKEHLKDFLPGFHEKDSIVGPVSASNWGSASILPISWMYIRMMGSDHLKKASEIAILNANYIAKRLQDHYQVLYKGSNGLVAHECILDVRDLKELDIEVEDIAKRLIDYGFHAPTMSWPVPGTLMIEPTESESKKEIDRFCEAMISIKEEIQRIKSGTLPKENNMLKNAPHTSLHISEDEWTHPYSR

SEQ ID NO: 98740 - protein, 308 aa, Unknown
  Bacterial polypetide isolated from the Sargasso Sea
LNFEVKSINYFDTLLIKDTKSKYWVNKSIDNGINFRFVNDDHFSISLDETTSLQDVDNLIKFFNENNNEIYAEEIESKIEDSIFKSDLDRKDKILTHPVFNIYHSETEMMRYLKKLENKDVSLNRSMIPLGSCTMKLNAASEMLPITLPGFSNAHPFLEPHQREGYNEMMSELISMLKDITGFDAVSLQPNAGAQGEFAGLLAIQKYHEKNSDTKRNICIIPKSAHGTNPASAQMCGMDILIVNCDDKGNVDLTHLDKKIEEAGDRLSALMITYPSTHGVFEESIVEICKKIHEAGGQVYLDGANYNA

SEQ ID NO: 98741 - protein, 279 aa, Unknown
  Bacterial polypetide isolated from the Sargasso Sea
MALVGIARPGNFGPDVCHINLHKTFCIPHGGGGPGMGPIACKRHLEPFLPNHPVIKDCGPASGIGSISAAPWGSASILAISWMYIKMMGSEGLRIATENAILNANYVAYKLKDFFPILYKGKNGNVAHECIIDIRPIKNDTGITEEDIAKRLIDFGFHAPTMSWPVAGTMMIEPTESESLRELDRFCNALITIKNEIDKIKSGEYDKTDNPIKNAPHTDVELVSNEWKHKYSREDAAYPAVYLKENKFWPPVARVDNVYGDKNLFCSCPSMDEFKEDAA

SEQ ID NO: 98742 - protein, 308 aa, Unknown
  Bacterial polypetide isolated from the Sargasso Sea
DGYRELFTDLKNWLRSITGFSGVSLQPNAGAQGEFAGLMVIRKFHEKNREDNRNVCLIPSSAHGTNPASAQMVGMKVVVVKCDQHGNVDFEDLKNKAEEHSNNLAALMVTYPSTHGVFEEKITDICELVHKHGGQVYMDGANLNALVGIAKPGKFGPDVCHINLHKTFCIPHGGGGPGMGPIACKKHLEGFLPKHSVIKDCGPATGIGAVSAAPWGSASILSISWMYIKMMGSEGLKKASQVAILNANYIAHKLKDYFPILYKGKSGNVAHECIIDIRKLKKETGITEEDIAKRLIDFVFMRQTCHGQ

SEQ ID NO: 98743 - protein, 340 aa, Unknown
  Bacterial polypetide isolated from the Sargasso Sea
KDSNLVFVSEDCHPQTINVIQTRAEPMGLKVLVGKEEEVLDQLKEDLVCGVLQYPGTLGDIKDPSEAISKIHKKNGKAVLACDLLALAKLKTPRELGADIAVGSSQRFGIPMGYGGPHAAFFATKDDYKRSMPGRIVGVSVDRHGNKAYRLSLQTREQHIRRDKATSNICTAQALLAIVSAAYAIYHGPDGIKNISERVSQLAKSFADKIKQSGYEIYSDYFFDTVTIITKEKTDQIYKNALNLKVNIRKVNSEMLAVSFDERKNVYRVNQLLKIFNAAESIKKEDPSVKLPNLPKNLLRTSKYLEHPIFNLYHSETEMLRYLKKLEDKDIALNRTMIAL

SEQ ID NO: 98744 - protein, 286 aa, Unknown
  Bacterial polypetide isolated from the Sargasso Sea
MENLNKINLFSKRHLGSGEADINYMLQEVGYDSMSSFIDSVVPGSILKRNAVQIGEEKTEEEVLEELRAIASKNKVFKSFIGQGHYNNFTPSVILRNVFENPGWYTSYTPYQPEISQGRLEALINFQTMVSDLTAMELSNASLLDEATAAAEAMTLAKRSSKSKSDSFFVDENSFQNTINVLKTRAEPLGIKLIFGNPTDLSSHEVFGAFLQYPGSNGKITDMSQHIKSCHDQSALAVIGSDLLALTILKPPGEMGADIVIGSSQRFGVPLGCGGPHAAFMAVSDK

SEQ ID NO: 98745 - protein, 265 aa, Unknown
  Bacterial polypetide isolated from the Sargasso Sea
CHLNLHKTFCIPHGGGGPGVGPVAASETLSPYLPTHFLMDNNLSNSFNFVSSAKHGSASILPISWMYIKMAGLSGLRKATSHAILSANYIAHSLKHKFKILYKGKNDFVAHECILDFRDLKSKTGLSVNDLAKRLIDYSFHAPTISWPVSETIMIEPTESESLAEVDRFCEAMLLIGEEISEIENNYELKNNNVISNAPHTLKELIADNWQYPYSKEKASFPYKTPTTIKFWSSVSRINNAYGDRNLICSCNVNQDETLEEKKCA

SEQ ID NO: 98746 - protein, 333 aa, Unknown
  Bacterial polypetide isolated from the Sargasso Sea
RALRMPLQQREQHIRRAKATSNICTAQVLLSVMASMYAVYHGRDGIISIANNIHEKTSLLASSLAKSGFKIVHSQFFDTIRIKLEKSQSELIKEEALKNHINLRYFDNHDIGISLDETVNDNDLIDILTTFNAKITDTVNYSIEVKRNSDFMRHPVFNSYQSETEMMRYIHKLETKDLALNTSMISLGSCTMKLNAATQMIPVSWNEFSNPHPFAPLDQNEGYLKLFDDLSNWLKNITGLDGCSLQPNSGAQGEYTGLLTIRAYHIDKKNTEKNICLIPESAHGTNPASAVMAGMNVVPIKCDSMGNIDIEDLKDKIHSHKDQISCMMVTYPS

SEQ ID NO: 98747 - protein, 304 aa, Unknown
  Bacterial polypetide isolated from the Sargasso Sea
AQGEYAGLMVIRKYHLERGESNRNVCLIPSSAHGTNPASAQMVGMKVVVVNCDKQGNVDFEDLKKKAEAHSENLGALMVTYPSTHGVFEEKISDICELVHKHGGQVYMDGANLNALVGIAKPGNFGPDVCHINLHKTFCIPHGGGGPGMGPIACKRHLEIYLPSHPVIKDCGPATGIGPVSAAPWGSSSILSISWMYIKMMGSEGLKLATQIAILNANYIAHKLKNHFPILYKGKNGNVAHECIIDIRSIKNDTGVTEEDIAKRLIDFGFHAPTMSWPVPGTMMIEPTESESLQELDRFCDCLI

SEQ ID NO: 98748 - protein, 321 aa, Unknown
  Bacterial polypetide isolated from the Sargasso Sea
YSDHFFDTVTIVTKDKTDQIYKNALDQKVNIRRVNSEMLAVSFDEKKNVYRVNQLLKIFNAAESIKKEDPTVSLPNLPKNLLRTSKYLEHPVFNSYHSETEMLRYLKKLEDKDIALNRTMIALGSCTMKLNATAEMIPISWRELAEPHPFVPIEQMEGYRDLFTDLKNWLRSITGFSGVSLQPNAGAQGEYAGLMVIRKYHLDRGEENRNICLIPSSAHGTNPASAQMVGMKVVVVDCDKEGNVDFEDLKKKIEMHSENLGALMVTYPSTHGVFEEKITDICELIHKHGGQVYMDGANLNALVGIARPGNFGPRCLSHKLT

SEQ ID NO: 98749 - protein, 325 aa, Unknown
  Bacterial polypetide isolated from the Sargasso Sea
VGVSVDRHGNKAYRLSLQTREQHIRRDKATSNICTAQALLAIVSAAYAIYHGPDGIKNISERVSQLAKSFADKIKQSGYELYSNNFFDTVTIITKEKTDQIYKNALNQRVNIRKVNSEMLAVSFDERKNVYRVNQLLKIFNAAESIKKEDPSVSLPNLPKNLLRTSKYLEHPVFNLYHSETEMLRYLKRLEDKDIALNRTMIALGSCTMKLNAAAEMIPISWKEFAEPHPFVPIEQMEGFRDLFTDLKNWLRSITGFSGVSLQPNAGAQGEYAGLMVIRKYHLDRGEPNRNICLIPSSAHGTNPASAQMVGMKVVVVNCDKAGVM

SEQ ID NO: 98750 - protein, 162 aa, Unknown
  Bacterial polypetide isolated from the Sargasso Sea
MYKGSNGNVAHECIIDIRKIKSEPGIREEDIAKRLIDYGFHAPTMSWPVAGTMMIEPTESESLTEIDRFCETLIKIKKEIDKIKSGEFDKVDNPIKNAPHTDLELSSDEWKHKYSREEAAYPSKYLKTNKFWPPVARVDNVYGDKNIFCTCPSIDEFKEDAA

SEQ ID NO: 98751 - protein, 311 aa, Unknown
  Bacterial polypetide isolated from the Sargasso Sea
PQDQMKGYKVLFNDLVNDLKEITGFDAVSLQPNSGAQGEYSGLMTIRKFHMNNNQKNRNVCLIPESAHGTNPASAQMCGMKVVVVNCDEEGNVDLIDLKDKVNKYSKDLAALMVTYPSTHGVFEEKISEICDYVHKAGGQVYMDGANLNALVGIAKPGKFGPDVCHINLHKTFCIPHGGGGPGMGPIACAKHLKDFLPNHNITKNNRSEKSLGSVSAAPWGSASILPISWMYIKMMGAEGLRKASEVAILNANYISKKLSNHYKVLYKGKNGNVAHECIIDLRPIKSKSGISEEDIAKRYNRLRLSRPNNV

SEQ ID NO: 98752 - protein, 259 aa, Unknown
  Bacterial polypetide isolated from the Sargasso Sea
KVLVGKEDEVLDQLKENLVCGILQYPGTLGDIKDPSEAISKIHKKNGKAILACDLLALAKLKTPRELGADIAVGSSQRFGIPMGYGGPHAAFFATKDEYKRSMPGRIVGVSVDRHGNKAYRLSLQTREQHIRRDKATSNICTAQALLAIVSAAYAIYHGPDGIKNISERVSQLAKSFADKIKQSGYELYSNNFFDTVTIITKEKTDQIYKNALNQRVNIRKVNSEMLAVSFDERKNVYRVNQLLKIFNAAESIKKEDLQ

SEQ ID NO: 98753 - protein, 328 aa, Unknown
  Bacterial polypetide isolated from the Sargasso Sea
VGSAQRFGVPMGFGGPHAGFMAVKDVYKRSLPGRLIGLTQDSKGRPCYRLALQTREQHIRRERATSNICTAQALLAIMSSFYAIYHGPNGLKSIASDVKEKTLKIANELSRKGYVIKNNNFFDTLVMELENPEQVHLRAKDKKINLRLISEKELGLSFDEMTTDQDVNNISELFEDLKKPLKKYEINWDKSFDRKTEYLNHEVFNSHHSETQILRYIRSLSDKDIALDRCMIPLGSCTMKLNATSEMIPVGWNGFANVHPHAPTDQTEGYQKIICDLEDWLSQITGYKAISLQPNAGSQGEYAGLLAIDSFHKANNDHDRNICLIPES

SEQ ID NO: 98754 - protein, 322 aa, Unknown
  Bacterial polypetide isolated from the Sargasso Sea
MLIQYQNKFGEIEDFSRLSDYCKKNKSLLVCATDLLALTLLRPPGEIGADIVIGSSQRFGVPMGFGGPHAAFMATHENFQRSMPGRIIGASKDASGNLSYRLALQTREQHIRREKATSNICTSQALLAVMAGFFAIYHGPNGLIGIANDVHKKTRKLFNALKSGDHEILNNNFFDTLSIRLKGDISEIKTRLLDAKININWFDNNLVSISIDEATTSDDIADLVFALSGKPISNDSEDGEASLNKEIVRSSDFMKQERFNKYHSETEMMRYIKRLSDKDIALDRSMIPLGSCTMKLNSASEMAPVSWPELQTCIHIVRPIKQ

SEQ ID NO: 98755 - protein, 138 aa, Unknown
  Bacterial polypetide isolated from the Sargasso Sea
GISEEDIAKRLIDYGFHAPTMSWPVAGTMMIEPTESESLSELDRFCDTLISIKEEIDMVKSGKFDKVDNPIKNAPHTDIELASDEWNHKYSREQAAYPAKFLKANKFWPPVARVDNVYGDKNIFCTCPSMDEFKEDAA

SEQ ID NO: 98756 - protein, 347 aa, Unknown
  Bacterial polypetide isolated from the Sargasso Sea
IFNCAEAIKENPTESLPNLPKNLLRTSNYLEHKVFNSYHSETEMIRYLKRLEDKDIALNRTMIALGSCTMKLNAVAEMIPISWREFSEPHPFAPIEQMEGFRTLFTDLKNWLRSVTGFSGVSLQPNAGAQGEYAGLMVIRKYHMERGEKNRNVCLIPSSAHGTNPASAQMAGMKVVVVNCDKDGNVDYEDLKKKAEQNSENLGALMVTYPSTHGVFEERISDICELIHKHGGQVYMDGANLNALVGIAKPGNFGPDVCHINLHKTFCIPHGGGGPGMGPIACKRHLEIYLPTHPVIKDCGPATGIGPISAAPWGSSSILSISWMYIKMMGSEGLKLASQIAILNANY

SEQ ID NO: 98757 - protein, 259 aa, Unknown
  Bacterial polypetide isolated from the Sargasso Sea
GPSPAEMAHMLETLGLSDLDSLIDETLPKSIRQKNPLNFGKPKSERALLSHMRVTASKNKVLTSLIGQGYHGTVTPPVIQRNILENPAWYTAYTPYQPEISQGRLEALLNYQTMISDLTGLEIANASLLDEATACAEAMTMAERVAKSKAKAFFIDENCHIQNIEVMKTRARPLGIEIVVGDPDNLNPSDVFGAIFQYPGTFGHVKDFTSHIEKLHENKAIAVIAADPLSLTLLKEPGAMGADIAIGSTQRFGVPIGYG

SEQ ID NO: 98758 - protein, 269 aa, Unknown
  Bacterial polypetide isolated from the Sargasso Sea
ALGSCTMKLNATAEMIPISWRELAEPHPFVPVEQMEGYREMFTDLKNWLRSITGFSGVSLQPNAGAQGEYAGLMVIRKYHLDRGDENRNICLIPSSAHGTNPASAQMVGMKVVVVDCDKEGNVDFEDLKKKAELHSDNLGALMVTYPSTHGVFEEKIKDICEVIHEHGGQVYMDGANLNALVGVAKPGNFGPDVCHINLHKTFCIPHGGGGPGMGPIACKRHLQVYLPNHPVVKDCGPASGIGAVSAAPWGSSSILSISWMYIKMMGSE

SEQ ID NO: 98759 - protein, 204 aa, Unknown
  Bacterial polypetide isolated from the Sargasso Sea
MIDDNSKEFIKRHIGPSEEDQSKMLQYIGYKSLDDLMENTVPEKILLKDELKIDQPMSENDALKKLKSISKKNKIFRNFIGMGYYNSITPNVILRNILENPGWYTSYTPYQPEVAQGRLEMLLNFQQSIIDLTGMDIANASLLDEATATAEAVGLSQRLDKTNSKKIFISNNCNPQTIDLKLSLVKVIHKATKYGFNVHLLIHF

SEQ ID NO: 98760 - protein, 163 aa, Unknown
  Bacterial polypetide isolated from the Sargasso Sea
ILYKGTKGNVAHECIIDIRPIKSETGITEEDIAKRLIDFGFHAPTMSWPVAGTMMIEPTESESLVELDRFCDTLIKIKSEINKIKSGDFDKVDNPIKNAPHTDLELASDNWDHKYSREEAAYPAKFLRVNKFWPPVARVDNVYGDKNIFCTCPSMDDFKEDAA

SEQ ID NO: 98761 - protein, 294 aa, Unknown
  Bacterial polypetide isolated from the Sargasso Sea
MQHVHQHGGQVYLDGANMNAQVGLTSPGFIGADVSHLNLHKTFAIPHGGGGPGMGPIGVKAHLAPFVAGHVVVKPGRESDNNGAVSAAPYGSAGILPISWMYIKLLGSNGLKKSTQTALLNANYVMKKLSEHYPVLFRGRNDRVAHECIIDLRPIKEASGVTEMDIAKRLNDYGFHAPTMSFPVAGTLMIEPTESESKVELDRFIDAMVSIRAEIAKVEAGEWPADNNPLHNAPHTMADIMDPAFDSRPYSREVAVFPSAAVRTNKFWPTVNRIDDVYGDRNLFCACVPLSDYE

SEQ ID NO: 98762 - protein, 189 aa, Unknown
  Bacterial polypetide isolated from the Sargasso Sea
MLHNSQKDFLKRHIGPSDEDQNKMLKELNYKSLDDLIKSTVPEKIQLKDELNIGESNSEYEALRKLKAISKKNQIYSNFIGMGYYGTYTPYVILRNILENPGWYTSYTPYQPEVAQGRLEMLLNFQQMIVDFTGMDIANASLLDEGTAAAEAMGLSHRLNKKDSNLVFVSENCHPQTIDVIQTRAEPMG

SEQ ID NO: 98763 - protein, 201 aa, Unknown
  Bacterial polypetide isolated from the Sargasso Sea
SASILPISWMYIAMMGEDHLRKATQVAILNTNYLAKRLKDHYKILYTGNEGLVAHECILDVRPFKESCGIEAEDIAKRLIDYGFHAPTMSWPVAGTLMIEPTESESLDELNRFCDAMIGIRNEIKAIEEGISDKEDNLLKNAPHCIDDAIEDWNYSYTKKEAYYPNNQTKLQKYWPPVGRVDNVYGDRNLVCTCPSIKDFK

SEQ ID NO: 98764 - protein, 169 aa, Unknown
  Bacterial polypetide isolated from the Sargasso Sea
LKDYFPILYKGSNGNVAHECIIDIRSIKTETGITEEDIAKRLIDYGFHAPTMSWPVAGTMMIEPTESESLSELDRFCGTLISIKSEIDMIKSGKFDKVDNPIKNAPHTDIELASDEWNHKYSREQAAYPAKFLKANKFWPPVARVDNVYGDKNIFCTCPSMDEFKEDAA

SEQ ID NO: 98765 - protein, 127 aa, Unknown
  Bacterial polypetide isolated from the Sargasso Sea
MIFGFHAPTMSWPVAGTMMIEPTESEGLSELDRFCDTLIKIKQEIDKIKSGEFDKVDNPIKNAPHTDSELASDNWEHKYTRQEAAYPAKFLKANKFWPPVARVDNVYGDKNIFCTCPSMDEFKEDAA

SEQ ID NO: 98766 - protein, 163 aa, Unknown
  Bacterial polypetide isolated from the Sargasso Sea
THEKLNKVGPVSGTNWGSASILPISWMYMKMMGAEGLVAATQSAILNTNYIASILKDHYEILFKGENGLVAHECIIDIRPLKEKTGIDIEDIAKRLIDYGFHAPTMSWPVAGTLMIEPTESESLKEIDRFCEAMIKIRKEIEDIENGKSDKEDNPSKEFSAYS

SEQ ID NO: 98767 - protein, 298 aa, Unknown
  Bacterial polypetide isolated from the Sargasso Sea
MTKQTLTQLEQHDLFLRRHIGPDSSQQQEMLNYVGAESLDDLTAQIVPESIRLSQELSIGDSCGEAEGIAYIRGLAKQNQVFKSYIGMGYYGTQVPNVILRNVFENPGWYTAYTPYQPEIAQGRLEAILNFQQVSMDLTGLDLASASLLDEATAAAEAMALAKRVSKAKKANIFFVADDVFPQTLDVVKTRAECFGFEVVVGPAHEAVNHELFGALFQYSNRFGQITDFTDLFAELRAKNVIVTVAADIMALVLLKSPGAMGADVVFGSAQRFGVPMGFGGPHAAFFVARDEHKRSMP

SEQ ID NO: 98768 - protein, 301 aa, Unknown
  Bacterial polypetide isolated from the Sargasso Sea
QTKMIKELGYNSLDDLIHNTVPEKIYFKDKLSIGDSNSEYEALRKLKAISKKNQIFSNFIGMGYYGTYTPYVILRNILENPGWYTSYTPYQPEVAQGRLEMLLNFQQMIVDFTGMDIANASLLDEGTAAAEAMGLSHRLNKKDSNLIFISQDCHPQTINVVQTRAEPMGLKVLIGKEDEVLDNLKEDLVCGILQYPGTLGNIKDPSESISKIHKLNGKVIIACDLLALAKLKTPGELGADIAVGSSQRFGIPMGYGGPHAAFFATKDEYKRSMPGRIVGVSVDRHGNKAYRLSLQTREQHI

SEQ ID NO: 98769 - protein, 307 aa, Unknown
  Bacterial polypetide isolated from the Sargasso Sea
VDRHGNKAYRLSLQTREQHIRRDKATSNICTAQALLAIVSAAYAIYHGPDGIKNISERVSQLAKNFGDKIKQSGYELYSDYFFDTVTIITKDKTDQIFKNALDQKVNIRKVNSEMLSVSFDEKKNVYRVNQLLKIFNAAESIKKEDPTVSLPNLPKNLLRTSKYLEHPVFNSYHSETEMLRYLKKLEDKDIALNRTMIALGSCTMKLNATAEMIPISWRELAEPHPFVPVEQMEGYRELFTDLKNWLRSITGFSGVSLQPNAGAQGEYAGLMVIRKYHLDRGDENRNICLIPSSAHGTNPASAQMVE

SEQ ID NO: 98770 - protein, 148 aa, Unknown
  Bacterial polypetide isolated from the Sargasso Sea
IDLRPIKAKSGISEEDIAKRLIDYGYHAPTMSWPVAGTLMIEPTESESLGEINRFCNALISIKEEIDKVDSGNFDKKDNPLKNAPHTYLELSSNEWKHSYTREEAAFPNQYLKDNKYWPPVGRVDNVYGDRNLVCSCPSLDEYKDEAA

SEQ ID NO: 98771 - protein, 310 aa, Unknown
  Bacterial polypetide isolated from the Sargasso Sea
ASLLDEGTAAAEAMGLSHRLNKSDSNLVFVSENCHPQTIDVIQTRAEPMGLKVLVGNEDKVLEQLKEDIVCGVLQYPGTLGDIKDPSEAISKIHKKNGKAILVCDLLALSMLKTPRELGADIAVGSSQRFGIPMGYGGPHAAFFATKDEYKRSMPGRIVGVSVDRHGNQAYRLSLQTREQHIRRDKATSNICTAQALLAIVSAAYAIYHGPDGIKSISERVSQLAKNFADKIKQSGYELYSDYFFDTVTIITKEKTDQIFKNALDQKVNIRKVNSEMLAVSFDERKNVYRVNQLLKIFNAAESIKKEDPT

SEQ ID NO: 98772 - protein, 285 aa, Unknown
  Bacterial polypetide isolated from the Sargasso Sea
DYIKIGGYKILSDHFFDTVTIKTNEKTNSIYEAALKENINLRKVNQEHLSVAFDEAKKLDDVNLLLKLFGVSKIIKQDVRVELDNLPKNLLRTSKYLTHPVFNKYHSETEMLRYLKKLEDCDIALNRSMIALGSCTMKLNATAELIPITWKEFSLPHPFVPTNQMEGYKILFNDLINDLKEITGYDAVSLQPNSGAQGEYAGLMTIRKFHKNNKQENRNVCLIPDSAHGTNPASAQMCGMKVVVVNCDEDGNVDIDDLKNKAEKHSKDLAALMVTYPSTHGVLRK

SEQ ID NO: 98773 - protein, 131 aa, Unknown
  Bacterial polypetide isolated from the Sargasso Sea
KRLIDYGFHAPTMSFPVPGTLMIEPTESESKEELDRFCEAMISIHNEITMIRDGKFDKVDNPIKNAPHTIEEVSSDNWDHKYSRKDAAYPHAYLINNKYWSPVSRIDNVYGDRNLFCVCPPIDEYDVAKTG

SEQ ID NO: 98774 - protein, 301 aa, Unknown
  Bacterial polypetide isolated from the Sargasso Sea
MLAVSFDEKKNVYRANQLLKIFNCAEAIKENPTESLPNLPKNLLRTSNYLEHKVFNSYHSETEMIRYLKRLEDKDIALNRTMIALGSCTMKLNAVAEMIPISWREFSEPHPFAPIEQMEGFRTLFTDLKNWLRSVTGFSGVSLQPNAGAQGEYAGLMVIRKYHMERGEKNRNVCLIPSSAHGTNPASAQMAGMKVVVVNCDKDGNVDYEDLKKKAEQNSKNLGALMVTYPSTHGVFEERISDICELIHKHGGQVYMDGANLNALVGIAKPGNFGPDVCHINLHKTFCIPHGGGGPGMGPIA

SEQ ID NO: 98775 - protein, 222 aa, Unknown
  Bacterial polypetide isolated from the Sargasso Sea
IGLTNQEAVSAAPWGSASILPISYSYISMMGDDGLKLATQVAILNANYIKERLKNYYPILYTGKNNMVAHEFIIDIRPFKQELNISDEDIAKRLIDYGFHAPTMSFPVPGTLMIEPTESESKEELDRFCEAMISIHNEITMIRDGKFDKVDNPIKNAPHTIEEISSDNWDHKYTRKEAAYPHAYLINNKYWSPVSRIDNVYGDRNLFCVCPPIDEYEEAQTG

SEQ ID NO: 98776 - protein, 161 aa, Unknown
  Bacterial polypetide isolated from the Sargasso Sea
MTSKFGSDLFIDRHLGLGNNDERIMLNKLGFNNIDQFINQVIPEDIQIKDKSSEILPQGCSEIDALNELEEIANKNTKMRSLIGLGYYDNHMPKVIQRHVLENPRWYTSYTPYQAEIAQGRLEALFNFQTIVCELTGFPVANASLLDEGTAAAEAMAMSFS

SEQ ID NO: 98777 - protein, 307 aa, Unknown
  Bacterial polypetide isolated from the Sargasso Sea
KLLRTSTYLDHPVFNNYHSETEMLRYLKRLEDSDIALNRTMIALGSCTMKLNAVSEMIPVTWQEFSQPHPFAPVEQMEGFRELFTDLKNWLRSITGFSGVSLQPNAGAQGEFAGLMVIRKFHEKNGELNRNVCLIPSSAHGTNPASAQMVGMKVVVIKCDEHGNVDYEDLKKKAEEHSENLAALMVTYPSTHGVFEEKIIDICDLIHKHGGQVYMDGANLNALVGIAKPGKFGPDVCHINLHKTFCIPHGGGGPGMGPIACKKHLEIFLPRHPVIKDCGPATGIGAVSAAPWGSSSILSISWMYIKM

SEQ ID NO: 98778 - protein, 305 aa, Unknown
  Bacterial polypetide isolated from the Sargasso Sea
SFQSYIGLGYHPTIVPPAIQRNIFENPGWYTAYTPYQAEIAQGRLEAILNFQTTVIELTGMEIANASLLDESTAAAEAMALLFDVRTRDQKKNNVNKFFVSEEILPQTLSVLQTRSTPIGVELVIGNHETFDFSSDYFGAILQYPGKYGQVNDYTSFIAKANENEIKVAVAADILSLVKLTPPGEMGAAVVVGTTQRFGIPMGYGGPHAAFFATKEEYKRSMPGRIIGVTIDSNGNRALRMALQTREQHIKREKATSNICTAQVLLSVMAGMFAVYHGPKGLRYIADKVHSMAVTLANALNKLGC

SEQ ID NO: 98779 - protein, 240 aa, Unknown
  Bacterial polypetide isolated from the Sargasso Sea
SETLSPFLPTHSLMDNNLSISSNYVSSAKHGSASILPISWMYIKMAGFCGLRKATAHAILSANYIAHSLKHKFKILYKGKNNFVAHECILDFRDLKSKTGLSVNDLAKRLIDYSFHAPTISWPVPETIMIEPTESESLVELDRFCEAMLLIGEEISEIEKNVALKNNNVISNAPHTLKELIADNWHYPYSKEKASFPYKTPTSIKFWSSVSRINNAYGDRNLICSCNVNQGETFEEKKCA

SEQ ID NO: 98780 - protein, 302 aa, Unknown
  Bacterial polypetide isolated from the Sargasso Sea
FFDTLKVEMTKKDKASLKKLSEEAKINFRYYDSNHVGISLDETKGYKDVLDVLEVFSELSNKNLEIDLDSLENYNHEENQNLIRESTFLEHEVFNKYQTEHEILRYMKRLENKDLSLVHSMISLGSCTMKLNSTTEMIPVTWEEMNLHPFVPKDQYQGYEKMIKELNIWLSEITGFSSLSFQPNSGAQGEYTGLMVIRAYHLDNRNNQRDIALIPSSAHGTNPASAIMAGMKVVVIQCDKHGNIDIDDLREKCEQYSENLSCLMITYPSTHGVFEDHIVEVCKLIHDNGGLVYMDGANMNAQ

SEQ ID NO: 98781 - protein, 258 aa, Unknown
  Bacterial polypetide isolated from the Sargasso Sea
IPKALLRTSTYLDHPVFNSYHSETAMLRYLKKLEDSDIALNRSMIALGSCTMKLNSVSEMIPVTWKEFSHPHPYSPIEQMDGYRELFTDLKNWLRTITGFSGVSLQPNAGAQGEFAGLMVIRKFHEKNGQKKRNVCLIPSSAHGTNPASAQMAGMKVVVVNCDALGNVDYEDLKKKSEEYSDTLSTLMVTYPSTHGVFEEKITDICDLVHKHGGQVYMDGANLNALVGIAKPGNFGPDVCHINLHKTFCIPHGGGGPG

SEQ ID NO: 98782 - protein, 274 aa, Unknown
  Bacterial polypetide isolated from the Sargasso Sea
MTTIKKNNLFSKRHIGVNSQDRDFMLQSIGYDSMDSFIDAVVPENILEKEKIDLGEEKTEEEALYELRLIAQENKVFKSFIGQGHYNTYTPKVILRNVLENPGWYTSYTPYQPEISQGRLEALINFQTMVSDLTGMDIANASLLDEATAAAEAMTLAKRVSKSKSDIFYVDENSFENTINVLKTRAKPLGIDIIVGPIEQAKDADCYGAFIQYPGSDGSIQDHSEIVDSIHGKRGIAVFASDLLALCLVKPPGEMGADIVVGSSQRFGVPLGCG

SEQ ID NO: 98783 - protein, 170 aa, Unknown
  Bacterial polypetide isolated from the Sargasso Sea
RLKDHFPILYKGSQGNVAHECIIDIRAIKSETGITEEDIAKRLIDFGFHAPTMSWPVAGTMMIEPTESESLPELDRFCDTLIKIKQEIDKIKSGNFDKVDNPIKNAPHTDSELASDNWEHKYTRQEAAYPAKFLKANKFWPPVARVDNVYGDKNIFCTCPSMDEFKEDAA

SEQ ID NO: 98784 - protein, 283 aa, Unknown
  Bacterial polypetide isolated from the Sargasso Sea
SHPIFNIYHSETDIMRYLKKLENKDIALNRSMIPLGSCTMKLNAASEMLPITLNGFSNAHPFLESHQREGYNQLMIELIAMLKDITGFDGISLQPNAGAQGEFAGLLAIKKFHDNNKEDNRNICIIPNSAHGTNPASAQMCGMEVSIVKCDKYGNVDIDHLRQKINEAGINLAALMITYPSTHGVFEEGIVEICNLIHDAGAQVYMDGANLNALVGIAKPGFFGPDVSHMNLHKTFCIPHGGGGPGMGPIGVKKHLIPFLPGHPLIDNEIGLQQNQEAISSAP

SEQ ID NO: 98785 - protein, 259 aa, Unknown
  Bacterial polypetide isolated from the Sargasso Sea
LVRQVVPDSILLRGDGRLPEGCGEQEALTELKEIAELNVVKRTLIGQGYYGTITPPVIQRNVFENPAWYTSYTPYQAEISQGRLEALFNYQTLITELTGLPVANASLLDEGTAAAEAMILAYNQGKKKDFIVDSKIFSQTLDVLKTRAKPLGINIIKIDLDATIALEEFTNAFGLLVQLPDSNGRLKHHDGLLRCADVYKCMKIAIVDPMCQVLMKPVGEWGFDVAVGSMQRFGVPMGYGGPHAAFFATTEKYKRKIPG

SEQ ID NO: 98786 - protein, 310 aa, Unknown
  Bacterial polypetide isolated from the Sargasso Sea
IKKTVPEKILLKDSLEIGDSNSEYKALRKLKNISKKNKIFSSFIGMGYYGTHTPYVILRNILENPGWYTSYTPYQPEVAQGRLEMLLNFQQMIIDFTGMDIANASLLDEGTAAAEAMGLSYRVSKTDTKKVFVSKNCHPQTIDVIKTRAEPLGLEIVVGDEDKDINENIICGILQYPGTLGDIKDPSEAISKIHKNNGKAVLACDLLALAKLKTPAELGADIAVGSSQRFGIPMGYGGPHAAFFATKDEYKRSMPGRIVGVSVDRHGKKAFRLALQTREQHIRRDKATSNICTAQALLCIVSAAYAIYHG

SEQ ID NO: 98787 - protein, 282 aa, Unknown
  Bacterial polypetide isolated from the Sargasso Sea
MLKDITGFDAISLQPNAGAQGEFAGLLAIKKFHDHNNENNRNICLIPNSAHGTNPASAQMCGMEVSIVKSDIYGNVDIDHLKQKINEAGLNLAALMITYPSTHGVFEESIVEICNLIHDAGGQVYLDGANMNSLVGIAKPGFFGPDVSHINLHKTFCIPHGGGGPGMGPIGVKKHLIPFLPGHPLVGNEIGLQNQEAVSAAPWGSASILPISYSYISMMGDVGLKQATQVAILNANYIKTNLEPYFPILYKGKNNMVAHECIIDLRPIKESLNITEEDMQNA

SEQ ID NO: 98788 - protein, 314 aa, Unknown
  Bacterial polypetide isolated from the Sargasso Sea
HPQTISVMKTRSEPIGVKLKVIPVEEFNFSENTFGCLIQCPSTDGKVFNYKSLSQSAHDAGAFIAVATDLLSLALITEPGACDADIAVGSSQRFGVPLGFGGPHAAFLAANESFKRKMPGRIIGLSKDSEDNLAFRMALQTREQHIRRDKATSNICTAQVLLSVIAGMYAVYHGPKGILQIANTIHENTKRLASSLEENGYEIRHDQFFDTIRFGTNGKKINTKDLSVNFRHFNNGDIGISLDETTSQSDIDNLLKLFKCKDKPSDHFTLRESRNSEYLTHEVFNSYHSETEMMRYLKKLETKDLSLNTQYDFS

SEQ ID NO: 98789 - protein, 158 aa, Unknown
  Bacterial polypetide isolated from the Sargasso Sea
SNGNVAHECIIDIRSIKSDTGISEEDIAKRLIDYGFHAPTMSWPVAGTMMIEPTESESLSELDRFCNTLISIKKEIDMVKSGKFDKADNPIKNAPHTDIELASDEWDHKYSREQAAYPAKFLKVNKFWPPVARVDNVYGDKNIFCTCPSMDEFKEDAA

SEQ ID NO: 98790 - protein, 180 aa, Unknown
  Bacterial polypetide isolated from the Sargasso Sea
AILNANYISKKLSEHYKVLYTGKNGNVAHECIIDIRPIKTKSGITEEDIAKRLIDFGYHAPTMSWPVAGTIMIEPTESESLVEINRFCNALIKIKEEIDKVDKGDFDKKDNPLKNAPHTYLELSANEWKHSYTREQAAFPNQYLKDNKYWPPVARVDNVYGDRNLVCSCPTLDEYKDEAA

SEQ ID NO: 98791 - protein, 224 aa, Unknown
  Bacterial polypetide isolated from the Sargasso Sea
EISIQKQEAVSAAPWGSASILPISYSYISMMGSEGLKKATQVAILNANYIKKKLDPYFPILYRGKNNMVAHECIIDIRPYKELYNITEEDVAKRLIDYGFHAPTMSFPVPGTLMIEPTESESKEEIDRFCTAMISIYEEIQKIKDNIFDKEDNPLKNAPHTMDEISADKWNHKYTRQEAAFPISYLKNKKYWPPVSRIDNVYGDRNLFCACPPLEDYENMKKSA

SEQ ID NO: 98792 - protein, 163 aa, Unknown
  Bacterial polypetide isolated from the Sargasso Sea
MLHNSQKDFLKRHIGPSDEDQDKMLKELNYNSLDDLIKSTVPEKIQLKDGLNIGESNSEYEALRKLKAISKKNQIYSNFIGMGYYGTYTPYVILRNILENPGWYTSYTPYQPEVAQGRLEMLLNFQQMIVDFTGMDIANASLLDEGTAAAEAMGLSHRLNKKD

SEQ ID NO: 98793 - protein, 166 aa, Unknown
  Bacterial polypetide isolated from the Sargasso Sea
MLHNSQKDFLKRHIGPSDEDQNKMLKELNYKSLDDLIKSTVPEKIQLKDELNIGESNSEYEALRKLKAISKKNQIYSNFIGMGYYGTYTPYVILRNILENPGWYTSYTPYQPEVAQGRLEMLLNFQQMIVDFTGMDIANASLLDEGTAAAEAMGLSHRLNKKDSNL

SEQ ID NO: 98794 - protein, 132 aa, Unknown
  Bacterial polypetide isolated from the Sargasso Sea
MSEFHKKHIGPSQSEIKEMLQYLDCSSLNDLLDKIVPKNILDIDDMSIGNEVFSENDILNHVKNIGTNNKVHRSLIGQGYYDTITPNVILRNILENPGWYTQYTPYQPEISQGRLEALLNYQTNDYSKLLLT

SEQ ID NO: 98795 - protein, 271 aa, Unknown
  Bacterial polypetide isolated from the Sargasso Sea
QAEISQGRLEALINFQTMVGDLTGFEIANASLLDEATAAAESMTLAHRVGKSKSQRFFIDQNCFPQTISVVTARAKPIGIEVMVGDPKQLTDLKEETYFGALLQYPGNDGAVIDFSQGIESMHAQNGLVIMATDLLALTLLKSPGEMGADIAIGSSQRFGVPLGFGGPHAAFMATKEKYKRSLPGRLVGASIDEDGRTAYRLALQTREQHIRREKATSNICTAQALLAIMAGFYAAYHGPAGLKQIAQSVRSKATALAKGINELGYDLKSS

SEQ ID NO: 98796 - protein, 301 aa, Unknown
  Bacterial polypetide isolated from the Sargasso Sea
NRVFRSYIGQGYYGTVTPKVIKRNVFENPGWYTSYTPYQAEISQGRLEALINFQTTICELTSMEIANASLLDEATAAAEAMMLAKRVSKNKSNYFFVDKNCFKQTISVLKTRAKPFGIELEIGDPQDFNEKDFFGMLIQYPNKYGEIEDFSKLSDYCKKNKSLLVCATDLLALALLRPPGEIGADIVIGSSQRFGVPMGFGGPHAAFMATHESFQRSMPGRIIGASKDASGNLSYRLALQTREQHIRREKATSNICTSQALLAVMAGFFAIYHGPKGLIGIANDVYKKTCKLFSAIKSSDH

SEQ ID NO: 98797 - protein, 284 aa, Unknown
  Bacterial polypetide isolated from the Sargasso Sea
TTSEDIKILWEVFLENNDFPSVNEIDLEFTTGKNDTMIPQNLVRNSDFLTHPVFHLNQSETAMLRYLRYLQDKDIALDKSMIPLGSCTMKLNATSEMVPISWPEFSNMHPFAPVNQTEGYKKLISDLENYLIKITGFDAVSMQPNSGAQGEYAGLLAIHNYHKSRGEGQRNVCLIPSSAHGTNPASASMTSMKSVIVKCDENGNIDVKNLSELADKHADNLAALMITYPSTHGVFEDSLIRICEIIHNKGGQVYMDGANLNALMGIAQPGKLGPDVLHMNLHKT

SEQ ID NO: 98798 - protein, 268 aa, Unknown
  Bacterial polypetide isolated from the Sargasso Sea
IGPDVLHMNLHKTFCIPHGGGGPGMGPIGFKKHLAPFAPSHAVCPVQDVPEENSAVSAAPYGSPGILPISWVYIKLMGGPGLLKATKVAILNANYIASRVGKHFPVVYTGNNGRVAHECIIDVRPFRETAGITEEDVAKRLIDYGFHSPTMSWPVAGTLMIEPTESEPLEELDRFCDALIAIRAEIQRLEEGEWDADDNPLHNAPHTAEDLADPEWNHCYTREEAVYPLPDLRVNKYWPPVNRIDNVFGDRNVVCSCPPIESYQEVEA

SEQ ID NO: 98799 - protein, 224 aa, Unknown
  Bacterial polypetide isolated from the Sargasso Sea
MTAKNKSDFLNRHVGLNNSDIKKMLKRLDIKSLDDLIKKVIPKNILSPISENLLKKDLSETEALAQLKKYSKKNKLYKSFIGMGYYGTLVPNVIKRNILENPGWYTQYTPYQAEISQGRLEALLNFQTMISSATGLPLANASLLDESTAAAEAMTMFYGSTKDNNKNSFFISKNCHPQTIDVLKTRAEPLGIKLIIGDENSSTLDNSIFGMLLQYPASDGKIID

SEQ ID NO: 98800 - protein, 97 aa, Unknown
  Bacterial polypetide isolated from the Sargasso Sea
IDRFCDAMLAIAGEVEKVEKGVWPADDNPLVNAPHTAADLMRDDWTHPYSREQAASPEGNSQANKYWPPVSRVDNAFGDRNLICSCPSIDEWEAAAE

SEQ ID NO: 98801 - protein, 315 aa, Unknown
  Bacterial polypetide isolated from the Sargasso Sea
YTPYQSEISQGRLEALFNFQTMVVELTKMDIANASLLDESSATAEGMQLLHRVRSKEKKAASTCLVCKDIFPQTLDVLNTRANPLDIKLKSFSSSETLSLSDPDNDIFGLIIQYPNQYGSITDLTSLVKSAHENNIKVCVITDLLALTLLKPPGEFGADIVVGNSQRFGVPLGYGGPHAAFIATRQEFQRQLPGRIIGLSIDKHNNPAYRMALQTREQHIRKEKATSNICTAQALLAILAGMYAVYHGPNGLKEISTKVHHLTTQLNTALKEMNITQKNTSFFDTLHIEVSEEVMKKIKEKTQTKQINFRFINFT

SEQ ID NO: 98802 - protein, 316 aa, Unknown
  Bacterial polypetide isolated from the Sargasso Sea
FTDLKNWLRSITGFSGVSLQPNAGAQGEYAGLMVIRKYHLDRGEENRNICLIPSSAHGTNPASAQMVGMKVVVVDCDKEGNVDFEDLKKKAEEHSENLGALMVTYPSTHGVFEEKITDICELIHKHGGQVYMDGANLNALVGIARPGNFGPDVCHINLHKTFCIPHGGGGPGMGPIACKRHLQVYLPNHPVVKDCGPATGIGAVSAAPWGSSSILSISWMYIKMMGSEGLKLATQVAILNANYIAHRLKDHFPILYKGSNGNVAHECIIDIRSIKSEIGITEEDIAKRLIDYGFHAPTMSWPVAGTMMIEPTESES

SEQ ID NO: 98803 - protein, 176 aa, Unknown
  Bacterial polypetide isolated from the Sargasso Sea
ANYISKKLSNDYKVLYTGKNGNVAHECIIDIRPIKASSGISEEDLAKRLIDFGYHAPTMSWPVAGTIMIEPTESENLEEIDKFCNALIKIKKEINLVESSKFDKTDNPLKNAPHTYIELSSNEWKHKYTREEAAFPNEYVKNNKYWAPVGRVDNVYGDRNLVCSCPSMDEYKEEAA

SEQ ID NO: 98804 - protein, 298 aa, Unknown
  Bacterial polypetide isolated from the Sargasso Sea
KKELSKINQDIICGVLAYPGTLGEIIDPSESISQIHKKNGKAILICDLLSLTKLKTPAELGADIAVGSAQRFGIPMGYGGPHAAFFATKEEFKRSMPGRIIGVSKDRHGKKAYRLSLQTREQHIRRDKATSNICTAQALLAIISAAFAIYHGPDGILKIANRTSKLAKLFADEIKKGGFQILSEHFFDTITIKTNDKTNSIYQTALNENINLRKVDDKHISVAFDEAKKLNDVNILLKIFGVSKIINQDVKVELNNIPKNLLRTSKYLTHPVFKIYHSETEMLRYLKKLEDCDIALNR

SEQ ID NO: 98805 - protein, 280 aa, Unknown
  Bacterial polypetide isolated from the Sargasso Sea
FGIPMGYGGPHAAFFATKDEYKRSMPGRIVGVSVDRHGNKAYRLSLQTREQHIRRDKATSNICTAQALLAIVSAAYAIYHGPDGIKSISERVSQLAKNFADKIKQSGYELYSDYFFDTVTIITKEKTDQIFKNALDQKVNIRKVNSEMLSVSFDERKNVYRVNQLLKIFNAAESIKKEDPTVTLPNLPKNLLRTSKYLEHPVFNSYHSETEMLRYLKKLEDKDIALNRTMIALGSCTMKLNATAEMIPISWRELAEPHPFVPVEQMEGYREMFTDLKNWL

SEQ ID NO: 98806 - protein, 308 aa, Unknown
  Bacterial polypetide isolated from the Sargasso Sea
KIFKNALDQKVNIRKVNSEMLSVSFDEKKNVYRANQLLKIFNCTESIKENPTEKLPNLPKKLLRISKFLEHPVFNSYHSETEMLRYLKRLEDKDVALNRSMIALGSCTMKLNSVAEMIPISWREFSEPHPFVPVEQMDGFRSLFTDLKNWLRSITGFSGVSLQPNAGAQGEYAGLMVIRKFHSSRGEKNRNVCLIPSSAHGTNPASAQMVGMKVVVVDCDKEGNVDFEDLKKKAEQNSSNLASLMITYPSTHGVFEEKITEICELIHKHGGQVYMDGANLNALVGIARPGNFGPDVCHINLHKTFCIP

SEQ ID NO: 98807 - protein, 173 aa, Unknown
  Bacterial polypetide isolated from the Sargasso Sea
LSTNYLAKRLGEHYKILYTGKNNLVAHECIIDVRPFKESCGIEAEDIAKRLIDYGFHAPTMSWPVAGTLMIEPTESESLEELNRFCEAMIGIREEIRAIEEGKFSQDNNPLKNAPHCVDTLIEEWTYPYSKKEAYYPNNQIKHQKYWPPVGRVDNVYGDRNLVCTCPSIKEFK

SEQ ID NO: 98808 - protein, 294 aa, Unknown
  Bacterial polypetide isolated from the Sargasso Sea
IQFKGELNIGEPNSEYEALRKLKAISKKNQIYSNFIGMGYYGTYTPYVILRNILENPGWYTSYTPYQPEVAQGRLEMLLNFQQMIVDFTGMDIANASLLDEGTAAAEAMGLSHRLNKSDSNLVFVSENCHPQTIDVIQTRAEPMGLKVLVGNEDKVLEQLKEDIVCGVLQYPGTLGDIKDPSEAISKIHKKNGKAILVCDLLALSMLKTPRELGADIAVGSSQRFGIPMGYGGPHAAFFATKDEYKRSMPGRIVGVSVDRHGNKAYRLSLQTREQHIRRDKATSNICTAQALLA

SEQ ID NO: 98809 - protein, 265 aa, Unknown
  Bacterial polypetide isolated from the Sargasso Sea
FTDLKNWLRSITGFSGISLQPNAGAQGEYAGLMVIRRYHLERGEKNRNVCLIPSSAHGTNPASAQMVGMKVVVVNCDKEGNVDFEDLKKKAELHSENLGALMVTYPSTHGVFEEKISEICELIHKNGGQVYMDGANLNALVGIARPGNFGPDVCHINLHKTFCIPHGGGGPGMGPIACKKHLEIYLPTHPVVKDCGPATGIGAVSAAPWGSSSILSISWMYIKMMGSEGLRLATQIAILNANYVAYRLKDHFPILYKGSKGNVAH

SEQ ID NO: 98810 - protein, 278 aa, Unknown
  Bacterial polypetide isolated from the Sargasso Sea
PEDQAEGYLEMIGDLSAKLCEITGYDDLSMQPNSGAQGEYAGLLTIAAYHRANGEGHRNICLIPMSAHGTNPASAQMVGWKVVAVKSAENGDIDMEDFRSKTEQHSQNLAACMITYPSTHGVFEEGVKEICQITHDHGGQVYIDGANLNAMVGLSRPGDLGGDVSHLNLHKTFCIPHGGGGPGMGPIGVKAHLAPHLPGHPETGGVEGPVSAAPYGSPSILPISWAYCLLMGGEGLTQATRVAILNANYIAKRLEGSYDVLYKGRNGRVAHECIIDTR

SEQ ID NO: 98811 - protein, 308 aa, Unknown
  Bacterial polypetide isolated from the Sargasso Sea
TIDVIQTRAEPMGLKVLVGNEDKVLEQLKEDIVCGVLQYPGTLGDIKDPSEAISKIHKKNGKAILVCDLLALSMLKTPRELGADIAVGSSQRFGIPMGYGGPHAAFFATKDEYKRSMPGRIVGVSVDRHGNKAYRLSLQTREQHIRRDKATSNICTAQALLAIVSAAYAIYHGPDGIKSISERVSQLAKNFADKIKQSGYELYSDYFFDTVTIITKEKTDQIFKNALDQKVNIRKVNSEMLSVSFDERKNVYRVNQLLKIFNAAESIKKEDPTVSLPNLPKNLLRTSKYLEHPVFNSYHSETEMLRYL

SEQ ID NO: 98812 - protein, 150 aa, Unknown
  Bacterial polypetide isolated from the Sargasso Sea
CIIDIRSIKNDTGITEEDIAKRLIDFGFHAPTMSWPVPGTMMIEPTESESLNEINRFCDTLIKIKKEIDKIKNGEFDKIDNPIKNAPHTDLELASNEWKHKYSREDAAYPSKFLKSNKFWPPVSRVDNVYGDKNLFCTCPSMDEFKEDAA

SEQ ID NO: 98813 - protein, 312 aa, Unknown
  Bacterial polypetide isolated from the Sargasso Sea
GEWGADIVVGNSQRFGVPMGFGGPHAAFMSAQDAFKRKLPGRIIGVSVDTDGNPALRMALQTREQHIRRDKATSNICTAQVLLAIMAGAYAVYHGPDGLKRIAERIRDQAGVLATGLRMLGHEVLTNDFFDTIRVRPSGDVSEVLGLALGNGINLRSFGDGTVGIALDEVTRPNDLDDLFSVFNKGSEPAFNARSLAEQESLPVLPAWADRASPYLEHEVFNKYHSETEMLRYLHKLEAKDLSLNTSMIPLGSCTMKLNATSQMAGVTSPEAGKLHPFAPEDQVEGYKIIFSELEQWLAEITGFSATSLQPN

SEQ ID NO: 98814 - protein, 196 aa, Unknown
  Bacterial polypetide isolated from the Sargasso Sea
SYIAMMGNKGLKKATQVAILNANYLAKKLEDHFPVLYRGTSGYHAHEFIIDIRPIRESSDISEEDIAKRLMDYGFHAPTMSWPVPGTMMIEPTESESKPELDRFIEAMISIKKEIDNVVSGEYDPIDNPLKNAPHTAEHALSDNWSHPYSRHGSSFPMDWQSEYKYWPSVGRIDNAYGDRNLVCTCPSTDDYRDTD

SEQ ID NO: 98815 - protein, 298 aa, Unknown
  Bacterial polypetide isolated from the Sargasso Sea
ATAEAVGLSQRLDKTNSKKIFISNNCNPQTIDLIKTRTNPFGLELIIGDENKVLSKIKEDIICGVLSYPGTLGEIIDPSESISQIHKKNGKAILVCDLLALAKLKTPAELGADIAVGSAQRFGIPMGYGGPHAAFFATKEEFKRSMPGRIIGVSKDRHGKKAYRLSLQTREQHIRRDKATSNICTAQALLAIISAAFAIYHGPEGILKIADRTSKLAKLFADEIKNGGYKILSDHFFDTVTIKTNEKTNSIYQAALKEEINLRKVDEKNLSVAFDEAKKLDDVNLLLKIFGLSKIIKQ

SEQ ID NO: 98816 - protein, 279 aa, Unknown
  Bacterial polypetide isolated from the Sargasso Sea
LQTREQHIRRDKATSNICTAQALLAIISAAFAIYHGPDGILKIANRTSKLAKIFADEIKKGGFQILSDHFFDTVTIETKDKTNSIYQKALSENINLRKVDDKHISVAFDEAKKLNDVNTLLKVFGVSKIINQDVKVELNNLPKNLLRTSKYLTHPVFNKYHSETEMLRYLKKLEDCDIALNRSMIALGSCTMKLNATAELMPITWKEFSLPHPFVPTDQMEGYKILFDDLINDLKEITGYDAVSLQPNSGAQGEYAGLMTIRKFHESNGQGTRDVCLIP

SEQ ID NO: 98817 - protein, 349 aa, Unknown
  Bacterial polypetide isolated from the Sargasso Sea
EIDCFENKIARSYIGMGYYDTITPNVILRNLLENLAGYTAYTPYQAEVSQGRLEALLNYQQMVMDLTGMDIANASLLDEATAAAEAMAFSRRISRSKSMKFFASEDCHPQTLDVLKTRAEPMGIELVLGTPEENLETEFFGVLLQYPSTTGVIHDIGKWIEQWHQNDTMVSVATDLLSLVLLKPPGELGADVVIGNSQRFGVSMGFGGPHAAFFATHDRHKRSMPGRLIGVSVDGRGRRALRMALQTREQHIRREKATSNICTAQVLLAVIAGCYAVYHGPDGLKSIAGRVHRMTMLFAKSLKKIGIRCSEHFFDTVHIDAGNNRDQIYESALQQGLNFRKIGSYHLGV

SEQ ID NO: 98818 - protein, 224 aa, Unknown
  Bacterial polypetide isolated from the Sargasso Sea
MDFSKRHIGPDDSDINKMLSYLGFDSIEQLINATIPDGIQFNDELNIGKSISEYEFLNTIKRIGKKNQVVKSYIGTGYYGTVTPPVILRNILENPGWYTAYTPYQAEISQGRLEALLNFQTMVTDMTGLDISNASLLDESTAAAEAMVLMFRSSRNRNTFLVSDQCHPQTIDVLKTRSRPIDINLKVIATEEFVFNEETFGCLIQCPTTDGKVFSYKELAKSAH

SEQ ID NO: 98819 - protein, 286 aa, Unknown
  Bacterial polypetide isolated from the Sargasso Sea
MLKELGYNNLEELIDKTVPKKILLKENLSIGEPNSEYKALRKLRDISQKNKIYSSFIGMGYYGNYTPYVILRNILENPGWYTSYTPYQPEVAQGRLEMLLNFQQMVIDFTGMDIANASLLDEGTAAAEAMGLSYRICKKDTKKVFVSKNCHPQTIDVIKTRAEPLGLEITVGDEDKDINENIVCGIIQYPGTLGDIKDPSEAISKIHKQNGKAVIVCDLLALAKIKTPAELGADIAVGSTQRFGIPMGYGGPHAAFFATKDEYKRSMPGRIVGVSVDRHGNKAYRL

SEQ ID NO: 98820 - protein, 298 aa, Unknown
  Bacterial polypetide isolated from the Sargasso Sea
MLFKPTDYLPYDFANRRHIGPSGEEIQQMLALLEVNSLDELIDKTVPQGIRQLDVLKWERAKSEREVLYHLRQTASKNKVLISLIGQGYHGTVTPPVIQRNILENPAWYTSYTPYQPEIAQGRLEALLNFQTMVSDLTGLDIANASLLDEATAAAEAMVMSQRISKSKSKIFFVDENSHPQNIAVLKTRAEPIGIEIIVGKVTETDFTSGFFGAIFQYPGTHGSLEDFSDQINAIHSTGGIGIISADILALTILKEPGAMNADIAIGSTQRFGVPVGFGGPHAAYIATIDKYKRSYRV

SEQ ID NO: 98821 - protein, 215 aa, Unknown
  Bacterial polypetide isolated from the Sargasso Sea
MLKNAQKDFIRRHIGSSEKEQAKMLQDLGYKNLDELIEKTVPEKILLKDSLEIGDPNSEYKALRKLKNISKKNKIFSSFIGMGYYGTHTPYVILRNILENPGWYTSYTPYQPEVAQGRLEMLLNFQQMIIDFTGMDIANASLLDEGTAAAEAMGLSYRVSKTDTKKVFVSKNCHPQTIDVIKTRAEPLGLEVVVGDEDKDINENIICGILQYPGN

SEQ ID NO: 98822 - protein, 277 aa, Unknown
  Bacterial polypetide isolated from the Sargasso Sea
MVGIARPGNFGPDVCHINLHKTFCIPHGGGGPGMGPIACKRHLQVYLPNHPVVKDCGPATGIGAVSAAPWGSSSILSISWMYIKMMGSQGLKLATQVAILNANYIAHRLKEHYPILYKGSNGNVAHECIIDIRSIKTETGITEEDIAKRLIDYGFHAPTMSWPVAGTMMIEPTESESLSELDRFCDTLISIKSEIDMIKSGKFDKIDNPIKNAPHTDIELASDEWKHKYSREQAAYPAKFLKANKFWPPVARVDNVYGDKNIFCTCPSMDEFKEDAA

SEQ ID NO: 98823 - protein, 303 aa, Unknown
  Bacterial polypetide isolated from the Sargasso Sea
IRKYHLDRGDKNRNICLIPSSAHGTNPASAQMVGMKVVVVNCDKEGNVDFEDLKKKAELHSQNLGALMVTYPSTHGVFEEKIMDICELIHKHGGQVYMDGANLNALVGIAKPGNFGPDVCHINLHKTFCIPHGGGGPGMGPIACKRHLQVYLPNHPVVKDCGPATGIGAVSAAPWGSSSILSISWMYIKMMGSDGLRLATKVAILNANYLAKRLKDHFPILYKGSKGNVAHECIIDIRAIKSETGVTEEDIAKRLIDFGFHAPTMSWPVAGTMMIEPTESESLPELDRFCDTLIKIKQEIDKI

SEQ ID NO: 98824 - protein, 296 aa, Unknown
  Bacterial polypetide isolated from the Sargasso Sea
HGTNPASAMMASMKVVIVQCDEEGNIDLEDLEAKAQKHSSELSALMITYPSTHGVFEETLTKICDIIHHHGGQVYMDGANLNALVGIAQPGKIGPDVLHMNLHKTFCIPHGGGGPGMGPIGFKKHLAPFAPSHAVCPVPGVPEENSAVSAAPYGSPGILPISWVYIKLMGGPGLLKATKVAILNANYIASRVGKHFPVVYTGNNGRVAHECIIDVRPFRETAGITEEDVAKRLIDYGFHSPTMSWPVAGTLMIEPTESEPLEELDRFCDALIAIRAEIKRLEEGEWNADDNPLQNA

SEQ ID NO: 98825 - protein, 295 aa, Unknown
  Bacterial polypetide isolated from the Sargasso Sea
MLWQSKNPSRVGSRYSSRKFTTIWIPMGYGGPHAAFFATKDEFKRSMPGRIIGVSVDRHGNKAYRLALQTREQHIRRDKATSNICTAQALLAIVSAAYAIYHGPNGIRKISERVSQLANNFADKIKKSGYEIYSNNFFDTVVIKTKDKTEKIFKNALDQKVNIRKVNSEMLAVSFDEKKNVYRANQLLKIFNCAESIKDNPTESLPNLPKNLLRTSKYLEHKVFNSYHSETEMLRYLKRLEDKDIALNRSMIALGSCTMKLNAVAEMIPISWREFSEPHPFVPVEQMEGFRTLFT

SEQ ID NO: 98826 - protein, 276 aa, Unknown
  Bacterial polypetide isolated from the Sargasso Sea
PRWYTSYTPYQAEIAQGRLEALFNFQTIVCELTGFPVANASLLDEGTAAAEAMAMSFSARKNKSSKVYLVESNVFDHTFNVLQTRAKPLGISLKRFTQSNLPNHDDVFGMLLQLPGKNGQLYDPTFLISQAHRSEIIVTASIDPLAQVLIKPISEFGVDVAVGSMQRFGVPMGFGGPHAAYFACSEKYKRLIPGRIVGQTLSKNGEKSLRLALQTREQHIRREKATSNICTAQSLLAIISSFYAIYHGPSGLTQIAKRLVEMRINLESSLAALGFD

SEQ ID NO: 98827 - protein, 268 aa, Unknown
  Bacterial polypetide isolated from the Sargasso Sea
ALSRRSSKAKSNIFFVDENCFVNTINVLKTRAFPLGIQIKIGSIEEANSCDYFGMLLQYPGADGRITNFEKIVAESQKKDALITFASDLLALTLLKAPGELNADIVIGSSQRFGVPLGCGGPHAAFMAVKDELRRSLPGRIVGASIDDSGNLAYRLALQTREQHIRREKATSNICTSQALLAIMAGFYAVYHGPQGLKQIAKNINNLTNLLAQNLKENGFELLQESFFDTLTISTRDKTKEIIDRALSRECNLRIVDESTLGISLDET

SEQ ID NO: 98828 - protein, 297 aa, Unknown
  Bacterial polypetide isolated from the Sargasso Sea
IANASLLDESTAAAEAMMMAYKIKKTKQQTFCIQNSCHPQTLSVLRTRANPLGITIIEGKPNEDTFGCLIQNPDTYGEIEDLETLIKSNKSNEIISIVAADIMSMVVMNSPGSYDADIVIGSSQRFGVPMGLGGPHAAFFATKDEFKRLMPGRLIGVSVDRNNKRSYRMALQTREQHIRREKATSNICTAQALLAIIAAAYAIYHGPERLINIASTINHNTRYLKKSLEKLDYKIKSNKFFDTIVIEDAKARDWFNKSVEEGINFRLINNTTFSITIDETTTLEDINNLIAFFNTAQ

SEQ ID NO: 98829 - protein, 309 aa, Unknown
  Bacterial polypetide isolated from the Sargasso Sea
FSRKISEICDYVHKAGGQVYMDGANLNALVGIAKPGKFGPDVCHINLHKTFCIPHGGGGPGMGPIACAKHLKDFLPNHNITKKTRSEKSLGSVSAAPWGSASILPISWMYIKMMGAEGLKKASEVAILNANYISKKLSNHYKVLYKGKNGNVAHECIIDLRPIKSKSGISEEDIAKRLIDYGYHAPTMSWPVAGTLMIEPTESENLAEINRFCNALISIKKEIDKVDNGGFDKKDNPLKNAPHTHIELSANEWKHSYKREEAAFPNQYLKDNKYWPPVGRVDNVFGDRNLVCTCPSLQEYKEEAALILN

SEQ ID NO: 98830 - protein, 324 aa, Unknown
  Bacterial polypetide isolated from the Sargasso Sea
KWHELGTLVSVASDPMSLVLIKPPGESGADVVIGSTQRFGVPMGFGGPHAAYFAAREKNMRSVPGRIIGVSIDRRQKTALRMALQTREQHIRREKATSNICTAQVLLGVIAGCYAIFHGPEGLRIIAKRIHRMTGILAEGLKSFGISVENQHYFDTLTISAGKRDNEIYEKALVKGINLRKIGSSKLGISLDETTTAEDIQILWEVFSENNDFPSLKELDSDFTSGKKDTAIPHNLIRKSDFLTHPVFHMHHSETAMLRYLRYLQDKDIALDKSMIPLGSCTMKLNATSEMVPISWPEFFHMHPFAPVNQTERYIKLISDLENY

SEQ ID NO: 98831 - protein, 285 aa, Unknown
  Bacterial polypetide isolated from the Sargasso Sea
YTPNYFKGTKIAIVDPLCQVLMQPVGELGFDIAVGSMQRFGVPMGFGGPHAAFFATTEKYKRKIPGRIVGQSLDSQGNKALRLALQTREQHIRRDKATSNICTAQALLANMAGFYAAYHGAEGLKKISTRVLKYRQTLLKALKWIGIEVDESEGFDTVRFKSFLALEGFNVRYEDGWTMITLDECTTEEELKQLIDSQLDLNNPFDTIDHVLDSIGDYHWLTVPMRTQEWLTQEVFNRYHSETEMMRYMHRLASKDYSLVHGMMPLGSCTMKLNAAAELMPVSWP

SEQ ID NO: 98832 - protein, 251 aa, Unknown
  Bacterial polypetide isolated from the Sargasso Sea
CLIPSSAHGTNPASAQMVGMKVVVVNCDKEGNVDFDDLKKKVEQHSENLAALMVTYPSTHGVFEEKITDICELVHKHGGQVYMDGANLNALVGVAKPGNFGPDVCHINLHKTFCIPHGGGGPGMGPIACKKHLQVYLPNHPVIKDCGPTSGIGAVSAAPWGSSSILSISWMYIKMMGSEGLKLATQVAILNANYIAHRLKDHFPILYKGANGNVAHECIIDIRNIKSETGVTEEDIAKRMIDFGFHAPTMS

SEQ ID NO: 98833 - protein, 270 aa, Unknown
  Bacterial polypetide isolated from the Sargasso Sea
IHKHGGQVYMDGANLNALVGIARPGNFGPDVCHINLHKTFCIPHGGGGPGMGPIACKRHLQVYLPNHPVVKDCGPATGIGAVSAAPWGSSSILSISWMYIKMMGSEGLKLATQIAILNANYIAHRLKDHYPILYKGSNGNVAHECIIDIRSIKTETGITEEDIAKRLIDYGFHAPTMSWPVAGTMMIEPTESESLSELDRFCDTLISIKSEIDMIKSGKFDKVDNPIKNAPHTDIELASDEWNHKYSREQAAYPAKFLKTNKFWPPGCKS

SEQ ID NO: 98834 - protein, 316 aa, Unknown
  Bacterial polypetide isolated from the Sargasso Sea
DADVRTLWDVFTLPENSVEDLKTCEPSTQSLLPDTCIRKSDFLTHSVFHAHRSETQLLRYLRELADRDLALDRTMIPLGSCTMKLNATSEMIPISWPEFADIHPFAPSHQLQGYQILQDQLCKWLGEATGYAGISLQPNAGSQGEYAGLLVIRAWQRARGEGHRNICLIPASAHGTNPASAQMAGMKVVVTGCDDQGNVDLVELREKCEQFTDQLAAVMITYPSTHGVFESEIKNLCDIVHDHGGRVYIDGANMNALVGTAEPGHFGGDVSHLNLHKTFCIPHGGGGPGVGPVCVVEDLVPFLPGHENSGVQTSGG

SEQ ID NO: 98835 - protein, 177 aa, Unknown
  Bacterial polypetide isolated from the Sargasso Sea
MLKNAQKDFIQRHIGPSKEEQKVMLKELGYNNLDELIAKTVPEKILLKENLSIGEPNSEYKALRKLRDISQKNKIHSNFIGMGYYGNYTPYVILRNILENPGWYTSYTPYQPEVAQGRLEMLLNFQQMVIDFTGMDIANASLLDEGTAAAEAMGLSYRICKIETKKVFVSKNCHPQT

SEQ ID NO: 98836 - protein, 215 aa, Unknown
  Bacterial polypetide isolated from the Sargasso Sea
LEIANASLLDESTACAEAMTMARRIAKSSSNNFFVDQECHPQNIEVLRTRAEPLGLTIIVGHPDKDLNQSDCFGAIFQYPGTHGFINDFTANITSLHENNAVAIISADPLSLTLLKAPGEMGADIAVGSTQRFGVPQGFGGPHAAYMATKDAFKRFLPGRIVGVSVDSRGNKAYRLALQTREQHIRREKATSNVCTAQALLAVKASFYAVMHGPA

SEQ ID NO: 98837 - protein, 292 aa, Unknown
  Bacterial polypetide isolated from the Sargasso Sea
PNANGGIADMSEVAEQIHNKNGLFIVGTDLLALTLIKAPGEFDADIVIGSAQRFGVPMGFGGPHAGFIAVKDAFKRSLPGRLIGLTQDQQGRPCYRLALQTREQHIRREKATSNICTAQALLAIMSSFYAIYHGPDGLKEIALRVHQKAKVLAHNLTANGFKLVENTFFDTLVIEVTDANSIHKKALEHKFNLRKISNNLIGLSFDETTTDEDVKTILNLFSENTSMSKNVDDVVSDNLIRKSLYLTHEVFNSYHSETQILRYIRSLADKDIALDRSMIPLGSCTMKLNATS

SEQ ID NO: 98838 - protein, 217 aa, Unknown
  Bacterial polypetide isolated from the Sargasso Sea
RNIFENPGWYTQYTPYQSEISQGRLEALFNFQTMIVELTKMDIANASLLDESSATAEAMQLLHRVRDKEKKNATTCLVCEDIFPQTLDVLNTRANPLNINLKFFNSQETLTSLKETISDPENEIFAIILQYPNQYGNASDITALVNLAHQQKIKVCVITDLMALTLLKPPGEFDVDIVVGNSQRFGVPLGYGGPHAAFIATKNEYQRQLPGRIIGLS

SEQ ID NO: 98839 - protein, 302 aa, Unknown
  Bacterial polypetide isolated from the Sargasso Sea
TGLDIANASLLDESTAAAEAMMMAYKINKNKKQTFCIQNSCHPQTLSVLRTRANPLGITIIEGKPNEDTFGCLIQNPDTFGEIEDLDTLIKNNKSKEIISIVAADIMSMVVMKSPGSYDADIVIGSSQRFGVPMGLGGPHAAFFATKDEFKRLMPGRLIGVSVDRNNKRSYRMALQTREQHIRREKATSNICTAQALLAIIAAAYAIYHGPKRLINIASTVNHNTRYLKKSLEKLDYKIKSNKYFDTIVIEDAKARDWFNKSVEEGINFRLINNTTFSITIDETTTLEDIDNLIAFFNTTNK

SEQ ID NO: 98840 - protein, 242 aa, Unknown
  Bacterial polypetide isolated from the Sargasso Sea
MMRYLKKLENKDIALNRSMIPLGSCTMKLNSATEMLPITLSGFSNAHPFLESHQREGYNQLMIELIAMLKDITGFDGISLQPNAGAQGEFAGLLAIKKYHESNNEANRNICLIPSSAHGTNPASAHMCGMEVLIVKCDDEGNVDIDDLKEKIVKAKDNIAALMITYPSTHGVFEESITEICKLIHEAGGQVYMDGANLNALVGIAKPGVFGPDVSHMNLHKTFCIPHGGGGPGMGPIGLKNI

SEQ ID NO: 98841 - protein, 294 aa, Unknown
  Bacterial polypetide isolated from the Sargasso Sea
SFYAVFHGPEGLKAIAQRIHRKTVRLAKGLEKAGFKVEPDAFFDTITVDVGLFQKGVMSAAVQEGINLRAIGKNKVAVSYDETTRRDTTEAVWRAFGLNMRDNDLEPSYRIPNNLLRQSTYLEHEVFHMNRAETEMMRYMRRLSDRDLALDRAMIPLGSCTMKLNSAAEMMPVSWREFSLLHPFAPKDQAKGYEEIITDLSQKLCTITGYDAISMQPNSGAQGEYAGLLTIADYHNSRGESHRNVCLIPTSAHGTNPASAQMVGWKVVPVNSADNGDIDIDDFKAKAELYSNEL

SEQ ID NO: 98842 - protein, 204 aa, Unknown
  Bacterial polypetide isolated from the Sargasso Sea
MSYLFSQRHIGPDKKQVKEMLSILGFSSLEDFIIKIVPKNILSDFQDKVLDSRSEVETLNRLKELGDLNKVFSSYIGQGYYNTHLPGVIKRNILENPGWYTQYTPYQAEISQGRLEALLNFQTMVSDLTSLPISNASLLDEATAAAEAMVMFFNNSKVSTKINFLVSDKCHPQTIDVLKTRSEPMGINLRLGQIKNSDFDDTVF

SEQ ID NO: 98843 - protein, 344 aa, Unknown
  Bacterial polypetide isolated from the Sargasso Sea
MLHNSQKDFLKRHIGPSDEDQNKMLKELNYKSLDDLIKSTVPEKIQLKDELNIGESNSEYEALRKLKAISKKNQIYSNFIGMGYYGTYTPYVILRNILENPGWYTSYTPYQPEVAQGRLEMLLNFQQMIVDFTGMDIANASLLDEGTAAAEAMGLSHRLNKKDSNLVFVSEKCHPQTIDVIQTRAEPMGLRVLVGDEDKILDQLKEDLVCGILQYPGTLGDIKDPSEAISKIHKKNGKAILACDLLALAKLKTPRELGADIAVGSSQRFGIPMGYGGPHAAFFATKDEYKRSMPGRIVGVSVDRHGNKAYRLSLQTREQHIRRDKATSNICTAQALLAIVSAAY

SEQ ID NO: 98844 - protein, 263 aa, Unknown
  Bacterial polypetide isolated from the Sargasso Sea
MLRTSNYLTHPVFNKYHSETEMMRYLKRLEDSDIALNRSMIALGSCTMKLNATAEMIPISWKEFSMPHPFVPENQMGGYKILFNDLIKDLKEITGFDAVSLQPNSGAQGEYAGLMTIRAFHKNNNQPNRNICLIPNSAHGTNPASAQMSGMKVVVINCDENGNIDLDDLKIKSEKYSKDLAALMVTYPSTHGVFEEKIKEICEIVHSKGGQVYMDGANLNALVGIAKPGQFGPDVCHINLHKTFCIPHGGGGPGMGPIACAKH

SEQ ID NO: 98845 - protein, 155 aa, Unknown
  Bacterial polypetide isolated from the Sargasso Sea
RAAHEFIIDCRFFKDKGIEVIDIAKRLIDYGFHAPTVSFPVSGTMMIEPTESENLAELDRFCEAFISIRYEIEASTKEQTNNLLRNAPHTLTQLTAHEWLLPYTREEAAYPLQFVREKKFWPSVQRVDEAYGDRNLMCTCAPIEMYEEKQVTEIQ

SEQ ID NO: 98846 - protein, 126 aa, Unknown
  Bacterial polypetide isolated from the Sargasso Sea
RPATRLALQTREQHIRREKATSNICTAQVLLAVIASMYAVWHGPDGLRAIATRVHDLTSKLALGLQGVGFPVLNESFFDTLRVSAPGQASDIVARALKEGFNLHFVNADVVGIALDETCDTALIEA

SEQ ID NO: 98847 - protein, 289 aa, Unknown
  Bacterial polypetide isolated from the Sargasso Sea
KTLLRTSTYLDHPVFNSYHSETAMLRYLKKLEDSDIALNRSMIALGSCTMKLNSVSEMIPVTWKEFSHPHPYSPIEQMEGYRELFTDLKNWLRTITGFSGVSLQPNAGAQGEFAGLMVIRKFHEKNGQKKRNVCLIPSSAHGTNPASAQMAGMKVVVVNCDTFGNVDYEDLKKKAEEHSDTLSALMVTYPSTHGVFEEKITDICDLVHKHGGQVYMDGANLNALVGIAKPGNFGPDVCHINLHKTFCIPHGGGGPGMGPIACKKHLEIYLPSHPVIDCGPPSGIGAISA

SEQ ID NO: 98848 - protein, 319 aa, Unknown
  Bacterial polypetide isolated from the Sargasso Sea
RCKLDNLPKNLVRSSKFLTHPVFSKYHSETEMMRYLKRLEDSDIALNRSMIALGSCTMKLNSTAEMIPISWQELSLPHPFVPEDQMQGYKMIFNDLIKDLKEMTGFDAVSLQPNSGAQGEYAGLMTIRSYHRNNNQSNRNVCLIPSSAHGTNPASAQMSGMKVVVINCDDNGNIDINDLKDKAQKYSKDLAALMVTYPSTHGVFEEKIKEICEIVHKEGGQVYMDGANLNALVGVAKPGEFGPDVCHINLHKTFCIPHGGGGPGMGPIACAKHLEEFLPTHHHLKERNSKKGMGAVSAAPWGSASILAISWMYIKMMGA

SEQ ID NO: 98849 - protein, 241 aa, Unknown
  Bacterial polypetide isolated from the Sargasso Sea
MEGYRTLFTDLKNWLRSITGFSGVSLQPNAGAQGEYAGLMVIRKYHSDRGNKNRNICLIPSSAHGTNPASAQMVGMKVVVVNCDKEGNVDFEDLKKKAEIHSENLGALMVTYPSTHGVFEEKISDICELIHKHGGQVYMDGANLNALVGIAKPGNFGPDVCHINLHKTFCIPHGGGGPGMGPIACKKHLQVYLPNHPVVKDCGPATGIGAVSAAPWGSSSILSISWMYIKMMGSEGLKLAT

SEQ ID NO: 98850 - protein, 195 aa, Unknown
  Bacterial polypetide isolated from the Sargasso Sea
MLHNSQKDFLKRHIGPSDEDQNKMLKELNYKSLDDLIKSTVPEKIQLKDELNIGESNSEYEALRKLKAISKKNQIYSNFIGMGYYGTYTPYVILRNILENPGWYTSYTPYQPEVAQGRLEMLLNFQQMIVDFTGMDIANASLLDEGTAAAEAMGLSHRLNKKDSNLVFVSENCHPTTIDVIQTRADPMGLKVLVG

SEQ ID NO: 98851 - protein, 202 aa, Unknown
  Bacterial polypetide isolated from the Sargasso Sea
PNAGAQGEYAGLMVIRKYHLDRGDENRNICLIPSSAHGTNPASAQMVGMKVVVVDCDKEGNVDFEDLKKKAELHSDNLGALMVTYPSTHGVFEEKIKDICEVIHQHGGQVYMDGANLNALVGVAKPGNFGPDVCHINLHKTFCIPHGGGGPGMGPIACKRHLQVYLPNHPVVKDCGPASGIGAVSAAPWGSSSILSIFLDVY

SEQ ID NO: 98852 - protein, 229 aa, Unknown
  Bacterial polypetide isolated from the Sargasso Sea
MLKELNYQSLDDLIDNTVPEKIKFKGELNIGESNSEYEALRKLRAISKKNKVYSNFIGMGYYGTYTPYVILRNILENPGWYTSYTPYQPEVAQGRLEMLLNFQQMIVDFTGMDIANASLLDEGTAAAEAMGLSHRLNKKDSNLVFVSEDCHPQTIDVIQTRAEPMGLKVLVGKEDEVLDKLKEDLVCGILQYPGTLGNIKDPSEAISKIHKKNGKAVLACDLLALAKLK

SEQ ID NO: 98853 - protein, 282 aa, Unknown
  Bacterial polypetide isolated from the Sargasso Sea
MIDDNSKEFIKRHIGPSEEDQSKMLQYVGYKSLEDLMSNTVPEKILLKDDLKIDQPMSENDALKKLKSISKKNKIFKNFIGMGYYNSITPNVILRNILENPGWYTSYTPYQPEVAQGRLEMLLNFQQSIIDLTGMDIANASLLDEATATAEAVGLSQRLDKTNSKKIFISSNCNPQTIDLIKTRTNPFGLELIIGDEKKELSKINEDIICGVLSYPGTLGEINDPSESISQIHKKNGKAILVCDLLALARLKTPAELGADIAVGSAQRFGIPMGYGGPHAAF

SEQ ID NO: 98854 - protein, 185 aa, Unknown
  Bacterial polypetide isolated from the Sargasso Sea
RATQVAILSANYIAKRLEGHYDTLYKGYSGMVAHECILDTRPIQENAGLTVDDVAKRMIDYGFHAPTMSWPVAGTLMVEPTESEPREELDRICDAMIAIASEATRVAAGEWPADDNPLVNSPHTVGMITHDNWLHPYSRENAAYPVENLRRSKYWSPVSRVDNVYGDRNLVCTCPPLEAYMDTAE

SEQ ID NO: 98855 - protein, 277 aa, Unknown
  Bacterial polypetide isolated from the Sargasso Sea
KNKILTIVAADIMSLILMKSPGSMGADIVIGSTQRFGIPMGLGGPHAAYFATKDEFKRLMPGRIIGVSVDRNKKRSFRMALQTREQHIRREKATSNICTAQALLAIMSAAYAIFHGPKRLYNIASEIHRNTLLLKKSLEYLNFKCKSKVFFDTILIENNSSIHWCNKSKKNGYNFRLIDENHFSISLDETTSLEDVDNIINFFNDSNKKFNYEEIESNIDFNEIFDNDISRQDKILSHPIFNIYHSETDMMRYLKKLENKDIALNRSMIPLGSCTMK

SEQ ID NO: 98856 - protein, 293 aa, Unknown
  Bacterial polypetide isolated from the Sargasso Sea
SITGFSGVSLQPNAGAQGEYAGLMVIRKYHLDRDEANRNICLIPSSAHGTNPASAQMAGMKVVVVNCDKEGNVDFDDLKKKAEQHSENLGALMVTYPSTHGVFEEKISDICELVHKHGGQVYMDGANLNALVGIAKPGNFGPDVCHINLHKTFCIPHGGGGPGMGPIACKRHLQVYLPNHPVIKDCGPTSGIGAVSAAPWGSSSILSISWMYIKMMGSAGLKLATQVAILNANYIAHRLKDHFPILYKGSNGNVAHECIIDIRNIKSETGITEEDIAKRLIDYGFHAPTMSWP

SEQ ID NO: 98857 - protein, 287 aa, Unknown
  Bacterial polypetide isolated from the Sargasso Sea
TTEMIPITWPELANMHPFAPESQTAGYREMFAALTKQLVEITGFDDMSLQPNSGASGEYAGLMAIRAYHQSRGDAHRDVCIIPVSAHGTNPASAAMVGYKIVVVGTDADGNINVPELKAAAEKHSANLAALMVTYPSTHGVYEDGIKEVCDTIHAHGGQVYMDGANMNAQVGLTSPGHIGADVCHLNLHKTFCIPHGGGGPGMGPIGVKAHLAPFMPDHPSAKLDGATPAGGATPFGVVSAAPYGSALILPISFAYISMMGAAGLTNASKRAILNANYMAKRLEDHY

SEQ ID NO: 98858 - protein, 259 aa, Unknown
  Bacterial polypetide isolated from the Sargasso Sea
MLIQYPNKIGEIEDFSRLSNYCKKNKSLLVCATDLLALTLLKPPGEIGADIVIGSSQRFGVPMGFGGPHAAFMATHESFQRSMPGRIIGASKDASGNLSYRLALQTREQHIRREKATSNICTSQALLAVMAGFFAIYHGPNGLIGIANDIHKKTCKLYNALKSSDHEILNNNFFDTISISLEGQFSEIREIKHRLLDAKININWFYADLVSISIDEATTSDDIADLVFALTGKSISNNSKDGETSLDKEIVRSSDFMKQ

SEQ ID NO: 98859 - protein, 269 aa, Unknown
  Bacterial polypetide isolated from the Sargasso Sea
DDKVGISLDETCDRELIERLWSLMSFDNANQPSFDSIQATEIRDALPSGLERTTEFLTHPVFNSYHSETEMLRYIRRLSDKDIALDRSMIPLGSCTMKLNATTEMIPVTWPEFSAIHPFAPKDQVEGYIELITELERMLCICTGYAAVSLQPNAGSQGEYAGLLAIRAYHRSRGEVERDICLIPSSAHGTNPASATMCGMKVIVVNCDNYGNIDIADLREKTAQYEKSLAAIMVTYPSTHGVFEDGIREVCEIVHNAGGQVYVDGANLN

SEQ ID NO: 98860 - protein, 295 aa, Unknown
  Bacterial polypetide isolated from the Sargasso Sea
SKKNKIFRNFIGMGYYNSITPNVILRNIFENPGWYTSYTPYQPEVAQGRLEMLLNFQQSIIDLTGMDIANASLLDEATATAEAVGLSQRLDKTNSKKIFISSNCNPQTIDLIKTRTDPFGLELIIGDEKKELPKINEDIICGVISYPGTLGEIIDPSESISQIHKKNGKAILVCDLLSLAKLKTPAELGADIAVGSAQRFGIPMGYGGPHAAFFATKEAFKRSMPGRIIGVSKDRHGKKAYRLSLQTREQHIRRDKATSNICTAQALLAIISAAFAIYHGPDGILKIANRTSKLA

SEQ ID NO: 98861 - protein, 322 aa, Unknown
  Bacterial polypetide isolated from the Sargasso Sea
ENHSITRKSVITNNWLAKTSWQPNSGAQGELAGLMSIRSYYDAIGESHRNIAFIPTSAHGTNPASASLCGLKIVQIQCKQNGEICTNDLTKKCTQYKNELAVIMITYPSTFGVFDANITQICDQVHNCGAQVYMDGANMNAQVGLTSPFTIGADVCHLNLHKTFCIPHGGGGPGVGPICVASHLAPYLPNTEPLSTHLNKHDYIIASAPYGSASILLISYAYIQMMGSTGLKKASQIAILNANYIAKKLAPHYNIMYTNENGRVAHELIIDCKSFKKSANITVEDIAKRLIDYGFHAPTMSWPVPDTLMIEPTESEGLDEIN

SEQ ID NO: 98862 - protein, 285 aa, Unknown
  Bacterial polypetide isolated from the Sargasso Sea
LTLLRPPGEIGADIVIGSSQRFGVPMGFGGPHAAFMATHESFQRSMPGRIIGASKDASGNLSYRLALQTREQHIRREKATSNICTSQALLAVMAGFFAIYHGPNGLIGIANDVHKKTRKLFSALKSGDHEILNNNFFDTLSIRLKGDISEIKTRLLDAKININWFDNNLVSISIDEATTSEDIADLVFALSGKPILNDSEDGEASLNKEIVRSSDFMKQERFNKYHSETEMMRYIKRLSDKDIALDRSMIPLGSCTMKLNSASEMAPVNWPEFANMHPYCPTDQT

SEQ ID NO: 98863 - protein, 280 aa, Unknown
  Bacterial polypetide isolated from the Sargasso Sea
MIDDNSKEFIKRHIGPSEEDQSKMLQYVGYKSLEDLMSNTVPEKILLKDDLKIDQPMSENDALKKLKSISKKNKIFKNFIGMGYYNSITPNVILRNILENPGWYTSYTPYQPEVAQGRLEMLLNFQQSIIDLTGMDIANASLLDEATATAEAVGLSQRLDKTNSKKIFISSNCNPQTIDLIKTRTNPFGLELIIGDEKKELSKINEDIICGVLSYPGTLGEINDPSESISQIHKKNGKAILVCDLLALARLKTPAELGADIAVGSAQRFGIPMGYGGPHA

SEQ ID NO: 98864 - protein, 304 aa, Unknown
  Bacterial polypetide isolated from the Sargasso Sea
NKDLSLTQSMISLGSCTMKLNSASEMIPLSWTEWNSIHPFVPVDQAKGYHEVINRLEGYLSEITGFTATSLQPNSGAQGEYSGLMVIKSYLDKKGDSHRNICLIPSSAHGTNPASAIMAGLKVVVINTDERGNIDIEDLKTKVNEHKDNLAALMITYPSTHGVFESEIQSINDLIHQNGGQVYMDGANMNAQVGLTSPKIIGADVCHLNLHKTFSIPHGGGGPGVGPICVAEHLKEFLPSNPLIKTGGDDSLEGISSAPWGSALVCIISYGYIRMLGREGIRKSTEIAIVNANYLKTKLEKNYK

SEQ ID NO: 98865 - protein, 318 aa, Unknown
  Bacterial polypetide isolated from the Sargasso Sea
FLTHEVFNSHHSETQLMRYIRKLGDKDLALDRSMIPLGSCTMKLNATSEMIPVGWNGFANMHPHAPSDQTQGYTEIINNLKDWLSQLTGYEAISLQPNAGSQGEYAGLLAIDGYHKAKGELNRNICLIPESAHGTNPASAQMVGYEVVVIDCDENGDIDFEDLKNKVRVHKENIAAMMITYPSTHGVFEEKVRDVCELIHSFGGFIYIDGANFNAMVGTCYPGEFGGDVSHLNLHKTFCIPHGGGGPGIGPIGVVDKLVPYLPADPLKQSDQEYSISGTHFGSASILPISWMYIAMMGEESLRKATQVAILSTKLSCK

SEQ ID NO: 98866 - protein, 281 aa, Unknown
  Bacterial polypetide isolated from the Sargasso Sea
NSAAELNPVSWANLSSIHPFSPLDQTKGYSKIISDLEKWISDIVGLKSVSFQPNAGSQGEFAGLLAINSYFESKGELSRKKCLIPKSAHGTNPASAVMAGFDVLTVACDDEGNIDFQDLSIKVKKFDNQIGALMLTYPSTHGVFELQIREICDLIHSVGGFVYLDGANLNAQVGLCKPGNYGIDVCHLNLHKTFCIPHGGGGPGVGPVAASETLSPFLPTHSLMDNNLSNSSNYVSSAKYGSASILPISWMYIKMAGLSGLRKATAHAILSAQLYCAFFKA

SEQ ID NO: 98867 - protein, 204 aa, Unknown
  Bacterial polypetide isolated from the Sargasso Sea
FYLFHWMYINMMGAIGLRKATEVAILNANYVSRKLEGSYKTLYKGKNDLVAHECIIDFRPIKAESGISEEDIAKRMIDYGFHAPTMSWPVAGTLMIEPTESEGLAELDRFCSAMINIKKEITMVQNNVFDKDDNPLKNAPHTNLELSSDSWTHKYTREQAAFPLKYLKANKFWSPVARVDNVHGDRNLVCSCPSLESYRDEEAA

SEQ ID NO: 98868 - protein, 285 aa, Unknown
  Bacterial polypetide isolated from the Sargasso Sea
FSEMIPVTWKEFSHPHPYSPIEQMDGYRELFTDLKNWLRSITGFSGVSLQPNAGAQGEFAGLMVIRKFHEKNGQKKRNVCLIPSSAHGTNPASAQMAGMKVVVVNCDAFGNVDYEDLKKKTEKYSDTLSALMVTYPSTHGVFEEKITDICELVHKHGGQVYMDGANLNALVGIAKPGNFGPDVCHINLHKTFCIPHGGGGPGMGPIACKKHLEIYLPSHPVIDSGPPSGIGAISAAPWGSSSILSISWMYIKMMGSEGLKLATQNAILNANYIAHKLKNYFPYFI

SEQ ID NO: 98869 - protein, 307 aa, Unknown
  Bacterial polypetide isolated from the Sargasso Sea
FLVGKEDEVLDQLKEDLVCGILQYPGTLGDIKDPSEAISKIHKKNGKAVIACDLLALAKLKTPRELGADIAVGSSQRFGIPMGYGGPHAAFFATKDEYKRSMPGRIVGVSVDRHGNKAYRLSLQTREQHIRRDKATSNICTAQALLAIVSAAYAIYHGPDGIKNISERVSQLAKSFADKIKQSGYEIYSDYFFDTVTIITKEKTDQIYKNALNQKVNIRKVNSEMLAVSFDERKNVYRVNQLLKIFNAAESIKKEDPSVKLPNLPKNLLRTSKYLEHPIFNLYHSETEMLRYLKKLEDKDIALNRTM

SEQ ID NO: 98870 - protein, 130 aa, Unknown
  Bacterial polypetide isolated from the Sargasso Sea
MLHNSQKDFIKRHIGTSISEQEKMLNVLGYKSLENLIENTVPKKIHFKDDLSIGESNSEYEALRKLKAVSKKNEIYSNFIGMGYYGTYTPNVVIRNILENPGWYTSYTPYQPEVAQGRLEMLLNFQQMDS

SEQ ID NO: 98871 - protein, 275 aa, Unknown
  Bacterial polypetide isolated from the Sargasso Sea
NFTISLDETTTLEDVDNLINFFNEKNHKIDLTKIENTKEESIFKSGLMRDDKILTHPIFNIYHSETEMMRYLKKLENKDIALNRSMIPLGSCTMKLNAASEMLPVTFPGFSDAHPFLESFQREGYNQMMKELISMLKDISGFDEISLQPNAGAQGEFAGLLSIKKYHESKNDFNRNICLIPSSSHGTNPASAQMCGMDVSVVKCDDLGNVDLDHLDRKINEAGDHLAALMITYPSTHGVFEESITEICEKIHNAGAQIYLDGANFNSMVAIAKPG

SEQ ID NO: 98872 - protein, 325 aa, Unknown
  Bacterial polypetide isolated from the Sargasso Sea
NGDIDVEDFRSKAEMHKNDLAGCMITYPSTHGVFEETVHEVCEIIHEYGGQVYIDGANMNAMVGLSRPGDIGGDVSHLNLHKTFCIPHGGGGPGMGPIGVKAHLTPHLPGHPELGNDKGPVSAAPFGSPSLLPISWAYCLMMGGEGLTQATRVAILNANYIAKRLEESFDVLYRGANGRVAHECIIDTRPFAETAGVSVDDIAKRLIDSGFHAPTMSWPVAGTLMIEPTESETKAELDRFCDAMLSIREEIRLIEDGKYPKDNNPLCNAPHTVQDLVGTWERPYSREQGCFPPGAFKVDKYWPPVNRIDNVYGDRHLCCTCPTDV

SEQ ID NO: 98873 - protein, 287 aa, Unknown
  Bacterial polypetide isolated from the Sargasso Sea
VYMDGANLNALVGVAKPGNFGPDVCHINLHKTFCIPHGGGGPGMGPIACKKHLQVYLPNHPVIKDCGPTTGIGAVSAAPWGSSSILSISWMYIKMMGSAGLKLATQVAILNANYIAHRLKDHFPILYKGSNGNVAHECIIDIRNIKSETGVTEEDIAKRLIDFGFHAPTMSWPVAGTMMIEPTESEGLSELDRFCDTLIKIKQEIDKIKSGEFDKVDNPIKNAPHTDSELASDNWEHKYTRQEAAYPAKFLKANKFWPPVARVDNVYGDKNIFCTCPSMDEFKEDAA

SEQ ID NO: 98874 - protein, 278 aa, Unknown
  Bacterial polypetide isolated from the Sargasso Sea
KDLENIAGDIVCGIIQYPGSLGEIKDPSEMISKIHKKNGKAILICDLLSLALIKTPAELGADIAVGSSQRFGIPMGYGGPHAAFFATKDEFKRSMPGRIVGVSVDRHGNKAYRLALQTREQHIRRDKATSNICTAQALLAIVSAAFAIYNGPEGIKNIAERVSQLANNFANKLKQSGYELYSQSFFDTVTIKTGEKTEKIFQNALNQKVNIRKVNSEMLAVSFDQKKNVYRANQLLKIFNSAESIKDNPTESLPNLPKKLLRSSSYLDHPVFNNYHSE

SEQ ID NO: 98875 - protein, 297 aa, Unknown
  Bacterial polypetide isolated from the Sargasso Sea
KDFIRRHIGPSEKDQEKMLKDLNFKSLDEFINSTIPEKIQFKGELNIGEPNSEYEALRKLKAISKKNQIYSNFIGMGYYGTYTPYVILRNILENPGWYTSYTPYQPEVAQGRLEMLLNFQQMIVDFTGMDIANASLLDEGTAAAEAMGLSHRLNKSDSNLVFVSENCHPQTIDVIQTRAEPMGLKVLVGNEDKVLEQLKEDIVCGVLQYPGTLGDIKDPSEAISKIHKKNGKTILVCDLLALSMLKTPRELGADIAVGSSQRFGIPMGYGGPHAAFFATKDEYKRSMPGRIVGVSVD

SEQ ID NO: 98876 - protein, 170 aa, Unknown
  Bacterial polypetide isolated from the Sargasso Sea
MLHNSQKDFLKRHIGPSDEDQNKMLKELNYKSLDDLIKSTVPEKIQLKDELNIGESNSEYEALRKLKAISKKNQIYSNFIGMGYYGTYTPYVILRNILENPGWYTSYTPYQPEVAQGRLEMLLNFQQMIVDFTGMDIANASLLDEGTAAAEAMGLSHRLNKKDSNLVFVS

SEQ ID NO: 98877 - protein, 187 aa, Unknown
  Bacterial polypetide isolated from the Sargasso Sea
MLHNSEKDFIKRHIGPSKKDEKDMLGQLGYQNINELISQTVPEKILFKGELNIGEPNSEYEALRILKGLSRKNQIYSNFIGMGYYGTYTPNVIIRNILENPGWYTSYTPYQPEVAQGRLEMLLNFQQMIIDFTGMDIANASLLDEGTAAAEAMGLSHRLNKKDSDLVFISKDCHPTNNRGRKTRAEP

SEQ ID NO: 98878 - protein, 289 aa, Unknown
  Bacterial polypetide isolated from the Sargasso Sea
ILENPGWYTQYTPYQAEISQGRLEALLNFQTMVTSSTGLPLSNASLLDESTAASEAMTMFYNTTKDPNRKCFFISKNCHPQTIDVLKTRAEPLGIELIIQDEHTFDLNKKMFGMLLQYPTTDGNVVDYTDLINKAKDYKIYTCLATDLLALSILKTPGEMGADVAVGNTQRFGVPMGYGGPHAAFFATSEYFKRKIPGRIIGVSNDVHNDSALRMALQTREQHIRREKATSNICTSQVLLAIISSMYAVYHGPNNIIAIANKIQNLSSQLATALNNNGIKILYNHFFDT

SEQ ID NO: 98879 - protein, 276 aa, Unknown
  Bacterial polypetide isolated from the Sargasso Sea
IGLGYHNTITPSVVLRNILENPGWYTAYTPYQPEVSQGRLEMLMNFQQMIIDLTGMDIANASLLDESTAAAEAMMMAFKIKKNKLHTFCIQNFCHPQTLSVLKTRANPLGIKIIEGSPNEDTFACLIQNPDTFGEIQNLEKLISINKSREVISIVAADIMSMVIMKSPGSYDADIVIGTSQRFGVPMGLGGPHAAFFATKDEFKRLIPGRLIGVSVDRNNKRSYRMALQTREQHIRREKATSNICTAQALLAIVAAAYAIYHGPERLRNIATNINY

SEQ ID NO: 98880 - protein, 251 aa, Unknown
  Bacterial polypetide isolated from the Sargasso Sea
MLKNAQKDFIRRHIGPSEKEQTKMLQDLGYKNLDELIKKTVPEKILLRDSLEIGDPNSEYKALRKLKNISKKNKIFSSFIGMGYYGTHTPYVILRNILENPGWYTSYTPYQPEVAQGRLEMLLNFQQMIIDFTGMDIANASLLDEGTAAAEAMGLSYRVSKTDTKKVFVSKNCHPQTIDVIKTRAEPLGLEIVVGDEDKDINENIICGILQYPGTLGDIKDPSEAISKIHKNNGKAVLACDLLALAKLKTP

SEQ ID NO: 98881 - protein, 312 aa, Unknown
  Bacterial polypetide isolated from the Sargasso Sea
EKNRNVCLIPGSAHGTTPASAQMVGMKVVVVNCDKEGNVDYEDLKKKTELHSKNLGALMVTYPSTHGVFEEKITEICDLIHKHGGQVYMDGANLNALVGIARPGNFGPDVCHINLHKTFCIPHGGGGPGMGPIACKKHLEKYLPNHPIIEDCGPASGIGPVSAAPWGSSSILSISWMYIKMMGSDGLKLATQNAILNANYLAKKLKDHYPILYTGKNGNVAHECIIDIRSIKNETGITEEDIAKRLIDFGFHAPTMSWPVAGTMMIEPTESESLSELNKFIDALIKIKIEINNIKEGTLDKTDNPIKNAPHT

SEQ ID NO: 98882 - protein, 239 aa, Unknown
  Bacterial polypetide isolated from the Sargasso Sea
GNIDVNNISELAEKHADNLAALMITYPSTHGVFEESLIHICEIIHHKGGQVYMDGANLNALMGIAQPGKLGPDVLHMNLHKTFCIPHGGGGPGMGPIGLKSHLAEFAPNHCVVPIKDLSAGNTAVSAAPWGSPGILPISWVYICLMGSRGLKKSSQVAILNANYLAMRLNEHFPIVYTGKNGLVAHECIIDVRQLKADTGISEEDVAKRLIDYGFHAPTMSWPVAGTLMIEPTESEPKA

SEQ ID NO: 98883 - protein, 280 aa, Unknown
  Bacterial polypetide isolated from the Sargasso Sea
SLRLALQTREQHIRREKATSNICTAQSLLAIISSFYAIYHGPSGLTQIAKRLVELRINLESSLAVLGFEIPDGIRFDSVDVYSEHSQRIHNEALKNGYNLRILPLGSTIENSSGFGISLDELSNEKEIKDILTFIANLIEKEEDLEHIKFDKEFHLESLALRSSAWMQQDIFTNYQSETELMRYIFRLAEKDFSLVDGMMPLGSCTMKLNSAAELNPVSWANLSSIHPFSPPDQTKGYSKIISDLEKWISAIVGLKSVSFQPNAGSQGEFAGLLAINSYF

SEQ ID NO: 98884 - protein, 250 aa, Unknown
  Bacterial polypetide isolated from the Sargasso Sea
MDGANLNALVGVAKPGNFGPDVCHINLHKTFCIPHGGGGPGMGPIACKKHLQVYLPNHPVIKDCGPTTGIGAVSAAPWGSSSILSISWMYIKMMGSAGLKLATQVAILNANYIAHRLKDHFPILYKGSNGNVAHECIIDIRNIKSETGVTEEDIAKRLIDFGFHAPTMSWPVAGTMMIEPTESEGLSEIDRFCDTLIKIKQEIEKIKSGEFDKIDNPIKNAPHTDSELASDNWEHKYTRQEAAYPSKFLR

SEQ ID NO: 98885 - protein, 295 aa, Unknown
  Bacterial polypetide isolated from the Sargasso Sea
KKNEVFRNFIGMGYYNTVTPNVILRNILENPGWYTSYTPYQPEVAQGRLEMLINFQQMIMDFTGMDIANASLLDEGTAAAEAVGLCQRLDKNNSKKIFVSSSCNPQTIDIIKTRVEPFNIELIIGDEGKILKGIKDKIICGVLAYPGTLGEIKDPSESISLIHKKEGKVIVVSDLLSLTRLKTPAELGADIAVGSAQRFGIPMGYGGPHAAFFATKEEFKRSMPGRIIGVSVDRHGKKAFRLSLQTREQHIRRDKATSNICTAQALLAILSAAYAIYHGPEGILKIANRTSKLAK

SEQ ID NO: 98886 - protein, 267 aa, Unknown
  Bacterial polypetide isolated from the Sargasso Sea
MIDINSFASRHIGPRNDDIESMLKFIKCKNLDELIQKTVPDHILFKDKLKLKPGMSEEFNKVNMQLLSLKNKFKKTYIGLGYHNTVTPSVILRNILENPGWYTAYTPYQPEVSQGRLEMLMNFQQMIIDLTGLDIANASLLDESTAAAEAMMMAYKIKKNKQHTFCIQNSCHPQTLSVLRTRAHPLGITIIEGKPNEDTFGCLIQNPDTYGEIEDLDTLIKSNKSKEIVSIVAADIMSMVVMKSPGSYDADIVIGSSQRFGVPMGLG

SEQ ID NO: 98887 - protein, 264 aa, Unknown
  Bacterial polypetide isolated from the Sargasso Sea
MNTHSFVNRHIGVQEKDVKSMLDKINASSIDELIDQTIPKAIRLKKELNVGNPVSEFDYLKNLQSIAKKNKNFDNYIGQGYYGTITPSVIQRNILCNPGWYTAYTPYQAEIAQGRLEALLNFQTVITELTGMEIANASLLDEATAAAESMLMFFHMRSRAQVKNNAIKFFISEKVFKQNLNVMMARAEPLGIEIVIGNPHEFELTNEFFGSIVQYPNSFGEVEDYSSWTSKSHEIDLPVSVIADIMSLVLLPSPGSWGADRSCR

SEQ ID NO: 98888 - protein, 335 aa, Unknown
  Bacterial polypetide isolated from the Sargasso Sea
PLHTPVTSCPSENEIYQMLDALGMSSLDELIDKVVPESIRMHGELELPNSRTETDVLNQLQGMAGRNKLAKSMIGMGYHNTILPGVIQRNILENPGWYTAYTPYQPEVSQGRLEALLNFQQMIIDLTGMEIANASLLDEATAAAEAMTFCKRVSRSKSMRFFAADDCHPQTIDVLKTRAEPMGIELVVGNVAEQQQTPDKSLFGALIQNPGTFGDIHDIEDLITKWHELGTLVSVASDPMSLVLIKPPGESGADVVIGSTQRFGVPMGFGGPHAAYFAAREKNMRSVPGRVIGVSIDRRGKTALRMALQTREQHIRREKAHSNICTAQVLLGVIA

SEQ ID NO: 98889 - protein, 256 aa, Unknown
  Bacterial polypetide isolated from the Sargasso Sea
YPSTHGVFEPEIVSLCKLVHDFGAQVYMDGANLNAQVGLTSPGLIGADVCHINLHKTFAIPHGGGGPGMGPICVKQHLSEFLPGFSLDTNNVAYSVASAPYSSASILFISYAYIVLMGGAGLQDASKQAILKANYIKARLDDYYTIVYKGSSGHVAHELILDCRSFKKSAGITVEDVAKRLMDYSFHAPTLSWPVPGTLMIEPTESESKKELDRFCDAMIAIYLEIQEVETGKASKDDNVLVNAPHIQQEVVQMHG

SEQ ID NO: 98890 - protein, 254 aa, Unknown
  Bacterial polypetide isolated from the Sargasso Sea
ISDLENWISDIVGLKSVSFQPNAGSQGEFAGLLAINSYFESKGELTRKKCLIPKSAHGTNPASAVMAGFDVLTVECDDEGNIDFQDLSIKVNKFDNKIGALMLTYPSTHGVFELQIRKICDLIHSVGGFVYLDGANLNAQVGLCKPGNYGVDVCHLNLHKTFCIPHGGGGPGVGPVAASETLSQFLPTHSLMDNNLSNSANYVSSAKHGSASILPISWMYIKMAGLSGLRKATSHAILSANYIAHSLKHKFKIL

SEQ ID NO: 98891 - protein, 287 aa, Unknown
  Bacterial polypetide isolated from the Sargasso Sea
MIDDNSKEFIKRHIGPSYVEQSKMLQHVGYSSLEDLMKNTVPEKILSKDDLNIDEPLSENDALKKLKSISKKNKIFRNFIGMGYYNSITPNVILRNILENPGWYTSYTPYQPEVAQGRLEMLLNFQQTIIDLTGMDIANASLLDEATATAEAVGLSQRLDKTNAKKIFISSNCNPQTIDLIKTRTKPFGLELIIGDEKKDLSKINQDIICGVLAYPGTLGEIIDPSESISQIHKKNGKAILICDLLSLTRLKTPAELGADIAVGSAQRFGIPMGYGGPHAAFFATKE

SEQ ID NO: 98892 - protein, 313 aa, Unknown
  Bacterial polypetide isolated from the Sargasso Sea
HQREGYNQLMIELIAMLKDITGFDGISLQPNAGAQGEFAGLLAIKKFHDHNNENNRNICIIPNSAHGTNPASAQMCGMEVSIVKCDKYGNVDIDHLKEKINEAGINLAALMITYPSTHGVFEEGIVEICNLIHDAGGQVYMDGANLNALVGIAKPGFFGPDVSHMNLHKTFCIPHGGGGPGMGPIGVKKHLIPFLPGHPLIDNEIGLQQNQEAISSAPWGSASILPISYSYISMMGDIGLKNATQVAILNANYIKHSLEPYFPILYKGKNNMVAHECIIDLRPLKEELDITEEDIAKRLIDYGFHAPTMSFPV

SEQ ID NO: 98893 - protein, 243 aa, Unknown
  Bacterial polypetide isolated from the Sargasso Sea
MGYGGPHAAFFATKDEYKRSMPGRIVGVSVDRHGNKAYRLSLQTREQHIRRDKATSNICTAQALLAIVSAAYAIYHGPEGIRTIAERVSQLAKNFADKLKQSGYEIYSDHFFDTVTIVTKDKTDQIYKNALDQKVNIRKVNSEMLAVSFDEKKNVYRVNQLLKIFNAAESIKKEDPTVSLPNLPKNLLRTSKYLEHPVFNSYHSETEMLRYLKKLEDKDIALNRTMIALGSCTMKLNATAEMI

SEQ ID NO: 98894 - protein, 238 aa, Unknown
  Bacterial polypetide isolated from the Sargasso Sea
IGVKAHLAPFVAGHVVVKPGRESDNNGAVSAAPYGSAGILPISWMYIKLLGSNGLKKSTQTALLNANYVMKKLSEHYPVLFRGRNDRVAHECIIDLRPIKEASGVTEMDIAKRLNDYGFHAPTMSFPVAGTLMIEPTESESKVELDRFIDAMVSIRAEIAKVEAGEWPADNNPLHNAPHTMADIMDPAFDSRPYSREVAVFPSAAVRTNKFWPTVNRIDDVYGDRNLFCACVPLSDYE

SEQ ID NO: 98895 - protein, 284 aa, Unknown
  Bacterial polypetide isolated from the Sargasso Sea
GTYTPNVIIRNILENPGWYTSYTPYQAEVAQGRLEMLLNFQQMIIDFTGMDIANASLLDEGTAAAEAMGLSHRLNNKDSKIVFVSNDCHPQTIDVVKTRAEPLGLKVKVGQNTDLDKLQEDIICGILQYPGTLGDIQDPSESISKIKKKNGKAILACDLLALAKLKTPAELGADIAIGSSQRFGIPMGYGGPHAAFFATKDQFKRSMPGRIIGVSVDRHGNKAYRLALQTREQHIRRDKATSNICTAQALLAIVSAAYAIYHGPNGIRKISERVSQLANNFADK

SEQ ID NO: 98896 - protein, 288 aa, Unknown
  Bacterial polypetide isolated from the Sargasso Sea
GILQYPGTLGDIKDPSEAISKIHKKNGKAVLACDLLALAKLKTPRELGADIAVGSSQRFGIPMGYGGPHAAFFATKDEYKRSMPGRIVGVSIDRHGNKAYRLSLQTREQHIRRDKATSNICTAQALLAIVSAAYAIYHGPDGIKNISERVSQLAKSFADKIKQSGYEIYSDYFFDTVTIITKEKTDQIYKNALNQKVNIRKVNSEMLAVSFDERKNVYRVNQLLKIFNAAESIKKEDPSVKLPNLPKNLLRTSKYLEHPIFNLYHSETEMLRYLKKLEDKDIALNRTM

SEQ ID NO: 98897 - protein, 248 aa, Unknown
  Bacterial polypetide isolated from the Sargasso Sea
MLHNSQKDFIKRHIGPTTEEQSKMLKQLGYNSLDDLIHNTVPEKIHFKDKLSIGDSNSEYEALRKLKAISKKNQIYSNFIGMGYYGTYTPYVILRNILENPGWYTSYTPYQPEVAQGRLEMLLNFQQMIVDFTGMDIANASLLDEGTAAAEAMGLSHRLNKKDSNLIFVSEDCHPQTINVVQTRAEPMGLKVLIGKEDEVLDNLKEDLVCGILQYPGTLGDIKDPSESISKIHKLNGKAIIACDLLAL

SEQ ID NO: 98898 - protein, 312 aa, Unknown
  Bacterial polypetide isolated from the Sargasso Sea
GILQYPGTLGNIKDPSESISKIHKLNGKVIIACDLLALAKLKTPGELGADIAVGSSQRFGIPMGYGGPHAAFFATKDEYKRSMPGRIVGVSVDRHGNKAYRLSLQTREQHIRRDKATSNICTAQALLAIVSAAYAIYHGPDGIKKISERVSQLAKNFADKLKQSGYELYSDNFFDTVTILTRDKTNQIFQNALDQKVNIRKVNSEMLSVSFDEKKNVYRANQLLKIFNAAESIKENPTESLPNLPKKLLRKSKFLEHPVFNLYHSETEMLRYLKKLEDKDIALNRSMIALGSCTMKLNAVAEMIPISWREFA

SEQ ID NO: 98899 - protein, 300 aa, Unknown
  Bacterial polypetide isolated from the Sargasso Sea
ICKGECHVMLHNSQKDFIKRHIGPTEEEQTKMIKELGYNSVDDLIHNTVPEKIYFKDKLSIGDSNSEYEALRKLKAISKKNQIFSNFIGMGYYGTYTPYVILRNILENPGWYTSYTPYQPEVAQGRLEMLLNFQQMIVDFTGMDIANASLLDEGTAAAEAMGLSHRLNKKDSNLIFISQDCHPQTINVVQTRAEPMGLKVLIGKEDEVLDNLKEDLVCGILQYPGTLGNIKDPSESISKIHKLNGKVIIACDLLALAKLKTPGELGADIAVGSSQRFGIPMGYGGPHAAFFATKDEYKRS

SEQ ID NO: 98900 - protein, 283 aa, Unknown
  Bacterial polypetide isolated from the Sargasso Sea
KNNTAIPQKLVRNSDFLTHPVFHLNQSETAMLRYLRYLQDKDIALDKSMIPLGSCTMKLNATSEMVPISWPEFSNMHPFAPANQTKGYMKLINDLENFLIKITGFDAVSMQPNSGAQGEYAGLLAIHNYHKSRGEGHRNVCLIPSSAHGTNPASATMTSMKSVIVKCDENGNIDVKNLSELADKHADNLAALMITYPSTHGVFEDSLIRICKIIHDREGQVYMDGANLNALMGIAQPGKLGPDVLHMNLHKTFCIPHGGGGPGMGPIGLKSHLAEFAPNHSVV

SEQ ID NO: 98901 - protein, 280 aa, Unknown
  Bacterial polypetide isolated from the Sargasso Sea
SLQPNAGAQGEYAGLMVIRKYHLERGDQNRNICLIPSSAHGTNPASAQMVGMKVVVVDCDKEGNVDFEDLKKKTETHSENLGALMVTYPSTHGVFEEKISDICDLIHKHGGQVYMDGANLNALVGIAKPGNFGPDVCHINLHKTFCIPHGGGGPGMGPIACKRHLQVFLPNHSVVKDCGPATGIGAVSAAPWGSSSILSISWMYIKMMGSQGLKLASEVAILNANYIAHRLKNHFPILYKGTNGNVAHECIIDIRSIKSETGITEEDIAKRLIDYGFHAP

SEQ ID NO: 98902 - protein, 317 aa, Unknown
  Bacterial polypetide isolated from the Sargasso Sea
MCGMEISIVNCDEKGNVDIDHLDKKISEAGDKLSALMITYPSTHGVFEENIVEICKKIHDAGGQVYLDGANYNAMVGVAKPGKFGPDVCHMNLHKTFTIPHGGGGPGVGAIGLKKHLEEFAPGHPVFKNEIGLSEQEAVSAAPWGSASILPISYSYISMMGDDGLKLATQVAILNANYVKQRLSEYYPILYKGKNGMVAHEFIVDIRPFKEEVNISDEDIAKRLIDYGFHAPTMSFPVPGTLMIEPTESESKEELDRFCEAMISIFTEIEKIKNGTFNKADNPIKNAPHTVEEISSDEWKHTYTRLEAAYPHPYLLN

SEQ ID NO: 98903 - protein, 265 aa, Unknown
  Bacterial polypetide isolated from the Sargasso Sea
ISIDELPTLSELHDILKSLVNFSSRSDTIEHVYESQKNYKWIGIPERTKLWLQQEVFHKYRSETNMMRYIYELVSKDFSLVNGMMPLGSCTMKLNAAAELMPVSWPEFANIHPFAPKIQTYGYQRIADDLKEWLSDITGFADINLQPNAGSQGEYAGLLAIQEYHKSRGDDKRNVCLIPTSAHGTNPASAVMAGMKIVPVKCDDDGNIDIKDLEKQAIMNTFELSALMITYPSTHGVFETKIKNICKIIHDNGGQVYLDGENLNA

SEQ ID NO: 98904 - protein, 293 aa, Unknown
  Bacterial polypetide isolated from the Sargasso Sea
IAAVQAKKGIVAVAADLMSLVMLKSPGELGADVALGSAQRFGVPMGYGGPHAAFFATRDSYKRSLPGRIIGVSKDTRGRPALRMALQTREQHIRREKANSNICTAQVLLANMASFYAVYHGPQGLKTIAERIHRFADILATGLNQKGAEKGVALKHSTYFDTLTVMVDNKEDVLAKAYAKGMNLRADLEGAVGVSLDETTTREDIVALFDVLLGEEHGLTVEGLDAEVTTQDVKSIPEGLVRTSDFLTHEVFNKYHSETEMLRYIKSLENKDLALNHSMISLGSCTMRLNATA

SEQ ID NO: 98905 - protein, 293 aa, Unknown
  Bacterial polypetide isolated from the Sargasso Sea
RHIGPRNDEIKSMLKSITCNSLDDLIKKTVPSNILFDTPLNLKPGMSEEFNKINMQLLSIKNNFSKTYIGLGYYGTITPSVILRNILENPGWYTAYTPYQPEVSQGRLEMLMNFQQMIIDLTGMEIANASLLDESTAVAEAMMLAFKQSGKSKKEFLIQNACHPQNLSVLRTRAEPLGITIKSSLETSNETFACLIQNPDTYGEISNIKDLIRKNNSKGIISIIAADIMSLIIMKSPGELGADIVVGSSQRFGVPMGLGGPHAAFFATKNIFKRLMPGRIIGVSVDRNNKRAY

SEQ ID NO: 98906 - protein, 221 aa, Unknown
  Bacterial polypetide isolated from the Sargasso Sea
GLSEQEAVSGAPWGSASILPISYSYISMMGDDGLKLATQVAILNANYIKQRLSAYYPILYKGKNGMVAHEFIIDIRPFKQEINISDEDIAKRLIDYGFHAPTMSFPVPGTLMIEPTESESKEELDRFCEAMISIHQEIEKIRSGTFDKVDNPIKNAPHTVEEITSDEWNHAYTRQEAAYPHSYLLNNKYWSPVSRIDNVYGDRNLFCVCPPIEEYEDAKTG

SEQ ID NO: 98907 - protein, 199 aa, Unknown
  Bacterial polypetide isolated from the Sargasso Sea
MLPNSEKDFLKRHIGPSKEDQLKMLKELNYKSLDDLIDNTVPEKIKFKGELNIGESNSEYEALRKLRAISKKNQVYSNFIGMGYYGTYTPYVILRNILENPGWYTSYTPYQPEVAQGRLEMLLNFQQMIVDFTGMDIANASLLDEGTAAAEAMGLSHRLNKKDSNLVFVSEDCHPQTINVIQTRAEPMGLKVLVGKEEK

SEQ ID NO: 98908 - protein, 159 aa, Unknown
  Bacterial polypetide isolated from the Sargasso Sea
RGSTGRVAHECILDLRPLKRDAGIDVDDIAKRLMDYGFHAPTVSWPVAGTVMVEPTESESLAELDRFADALVAIREEIRAIETGTSDPQNNPLKRAPHTLAAVTADDWDRPYSRQQAAFPMEGQQESKVWPAVSRIDNAFGDRNLVCTCPSLEAVALAA

SEQ ID NO: 98909 - protein, 311 aa, Unknown
  Bacterial polypetide isolated from the Sargasso Sea
LGAQGEYAGLMVIRKYHLERGETNRNVCLIPSSAHGTNPASAQMVGMKVVVVNCDKQGNVDFEDLKKKVEVHSENLGALMVTYPSTHGVFEEKISDICDLVHKHGGQVYMDGANLNALVGIAKPGNFGPDVCHINLHKTFCIPHGGGGPGMGPIACKRHLEIYLPSHPVIKDCGPATGIGPVSAAPWGSSSILSISWMYIKMMGSEGLKLATQIAILNANYVAHKLKNHFPILYKGTNGNVAHECIIDIRSIKNDTGVTEEDIAKRLIDFGFHAPTMSWPVPGTMMIEPTESESLQELDRFCDCLIKLKRK

SEQ ID NO: 98910 - protein, 139 aa, Unknown
  Bacterial polypetide isolated from the Sargasso Sea
TGITEEDIAKRLIDYGFHAPTMSWPVAGTMMIEPTESENLREINRFCDTLIKIKSEIDNIKSGKFDKIDNPIKNAPHTDLELSSDEWSHKYTREEAAYPSKYLKSNKFWPPVARVDNVYGDKNIFCTCPSMDEFKEDAA

SEQ ID NO: 98911 - protein, 235 aa, Unknown
  Bacterial polypetide isolated from the Sargasso Sea
MIDDTSQEFINRHIGPSKKDQEKILDYIGSKSLDQLIQNTVPKNILLKDELKIGDPLSESEALKKLKGISQKNQTFRNFIGMGYYNCFTPHVVLRNILENPGWYTSYTPYQPEVAQGRLEMLLNFQQLVIDFTGMDIANASLLDEATAAAEAVGLAQRVSKNNSKKVYVSETCNPQVIDLIKTRIEPFGLELLIGNQKDFLKNLNGELLCGVIAYPDTLGEIIDPSESISLIHKK

SEQ ID NO: 98912 - protein, 213 aa, Unknown
  Bacterial polypetide isolated from the Sargasso Sea
MLKNAQKDFIQRHIGPSKEEQEVMLKELGFKNLDELIKKTVPEKILLKENLSIGDSNSEYKALRKLKDISQKNKVYSSFIGMGYYGTYTPYVILRNILENPGWYTSYTPYQPEVAQGRLEMLLNFQQMIIDFTGMDIANASLLDEGTAAAEAMGLSYRICKSKTKKVFVSKNCHPQTIDVIKTRAEPLGLKIMVGDEYEDINEDIVCGILQYP

SEQ ID NO: 98913 - protein, 286 aa, Unknown
  Bacterial polypetide isolated from the Sargasso Sea
AAGYQEMIAELSEWLINVTGYDALSMQPNSGAQGEYAGLLAIQRYHESRGEGHRNVCLIPSSAHGTNPASAQMVSLKVVVVACDSKGNVDLNDLRKKAEEVGDNLSCAMITYPSTHGVYEETVREICDIVHQYGGQVYMDGANMNAQVGITSPGFIGSDVSHLNLHKTFCIPHGGGGPGMGPIGVKSHLAPFLPNHTVVNVETAGKDCGAVSAAPWGSASILPISYMYIKMMGSDGLRRATEVAILNANYVAKKLEGHFPVLYKGNNGRVAHECIIDLRPAKKAAV

SEQ ID NO: 98914 - protein, 277 aa, Unknown
  Bacterial polypetide isolated from the Sargasso Sea
EKALKYKDTLAGLMITYPSTHGVFEEAIQEICETIHDNGGLVYMDGANMNAQVGLTNPAKIGADVCHLNLHKTFSIPHGGGGPGMGPICVTEKLAPYLPNHSIIPIKENKGTAVCATPWGSASILIISYAYIRLLGKKGLTKATQTAILNANYIKARLESQYKVLFQGKNKRVAHELIVDFREFKKSAKIEVEDIAKRLIDYGYHAPTMSWPVPGTLMIEPTESEDKDELDRFCDALLSIKKEIKDIETGAADTTNNLLKNAPHTVEQVSSDDGQTL

SEQ ID NO: 98915 - protein, 282 aa, Unknown
  Bacterial polypetide isolated from the Sargasso Sea
NLGALMVTYPSTHGVFEEKISDICELVHKHGGQVYMDGANLNALVGVAKPGNFGPDVCHINLHKTFCIPHGGGGPGMGPIACKKHLQVYLPNHPVIKDCGPTSGIGAVSAAPWGSSSILSISWMYIKMMGSAGLKLATQVAILNANYIAHRLKDHFPILYKGSNGNVAHECIIDIRNIKSETGVTEEDIAKRLIDFGFHAPTMSWPVAGTMMIEPTESESLSELDRFCDTLIKIKQEIDKIKSGKFDKVDNPIKNAPHTDSELASDNWEHKYTRQEAAYPAK

SEQ ID NO: 98916 - protein, 236 aa, Unknown
  Bacterial polypetide isolated from the Sargasso Sea
KKYEINWDKSFDRKTEYLNHEVFNSHHSETQILRYIRSLSDKDIALDRCMIPLGSCTMKLNATSEMIPVGWNGFANVHPHAPTDQTEGYQKIIFDLEDWLSQITGYKAISLQPNAGSQGEYAGLLAIDSFHKANNDHDRNICLIPESAHGTNPASAQMVGYEVVVIDCDENGDIDFDDLKNKVNTHKNKIAAMMITYPSTHGVFEERVKDVCDLIHNFGGFIYIDGANFNAMVGTC

SEQ ID NO: 98917 - protein, 269 aa, Unknown
  Bacterial polypetide isolated from the Sargasso Sea
YKNALDQKVNIRKVNSEMLAVSFDEKKNVYRVNQLLKIFNAAESIKKEDPTVSLPNLPKNLLRTSKYLEHPVFNLYHSETEMLRYLKKLEDKDIALNRTMIALGSCTMKLNATAEMIPISWRELAEPHPFVPIEQMEGYRDLFTDLKNWLRSITGFSGVSLQPNAGAQGEYAGLMVIRKYHLDRGEENRNICLIPSSAHGTNPASAQMVGMKVVVVDCDKEGNVDFEDLKKKVEMHSENLGALMVTYPSTHGVFEEKITDICELIHKHG

SEQ ID NO: 98918 - protein, 309 aa, Unknown
  Bacterial polypetide isolated from the Sargasso Sea
EFRKRFLKRHIGPSKEDQSKMLKELNYQSLDDLIDNTVPEKIKFKGELNIGDSNSEYEALRKLRAISKKNQVYSNFIGMGYYGTYTPYVILRNILENPGWYTSYTPYQPEVAQGRLEMLLNFQQMIVDFTGMDIANASLLDEGTAAAEAMGLSHRLNKKDSNLVFVSEDCHPQTINVIQTRAEPMGLNVLVGKEDEVLDQLKEDLVCGILQYPGTLGDIKDPSEAISKIHKKNGKAVLACDLLALAKLKTPRELGADIAVGSSQRFGIPMGYGGPHAAFFATKDEFKRSMPERIVGVSVDRHGNKAYRL

SEQ ID NO: 98919 - protein, 255 aa, Unknown
  Bacterial polypetide isolated from the Sargasso Sea
FEDLKKKAEMHFENLGALMVTYPSTHGVFEEKITDICELIHKHGGQVYMDGANLNALVGIARPGNFGPDVCHINLHKTFCIPHGGGGPGMGPIACKRHLQVYLPNHPVVKDCGPATGIGAVSAAPWGSSSILSISWMYIKMMGSEGLKLATQIAILNANYIAHRLKDHYPILYKGSNGNVAHECIIDIRSIKTETGITEEDIAKRLIDYGFHAPTMSWPVAGTMMIEPTESESLSELDRFCDTLISIKSEIDMIK

SEQ ID NO: 98920 - protein, 273 aa, Unknown
  Bacterial polypetide isolated from the Sargasso Sea
MRTSKYLTHPVFNKYHSETEMMRYLKRLEDSDIALNRSMIALGSCTMKLNSTAEMIPISWKEFSQPHPFVPVNQTKGYQILFEDLINDLKEITGFDAVSLQPNSGAQGEYAGLMTIRKFHKNNNQPNRNVCLIPNSAHGTNPASAQMSGMKVVVVNCDDNGNIDLQDLQNKSEKYSKDLAALMVTYPSTHGVFEEKITQICDIVHLNGGQVYMDGANLNALVGIAKPGKFGPDVCHINLHKTFCIPHGGGGPGMGPIACAKHLKDFLPNHRHL

SEQ ID NO: 98921 - protein, 299 aa, Unknown
  Bacterial polypetide isolated from the Sargasso Sea
TMISSATGLPLANASLLDESTAAAEAMTMFYGSTKDQNKNSFFISKNCHPQTIDVLMTRAEPLGIKLIIGNENSITLDNSIFGMLLQYPSSDGRIIDYTELIKKAKRSKVYTCLATDLLALSILKTPAEMGADVAVGNTQRFGVPMGYGGPHAAFFATSENFKRKIPGRIIGVSKDIHGSRALRMALQTREQHIRREKATSNICTAQVLLAIMSSMYAVYHGPKNIISIANKVHSLCSNLATSLDHAGLKILHRQFFDTIRIFPNNKWEIKAENEKMNFRKFEDGSVDISLDESTTEED

SEQ ID NO: 98922 - protein, 217 aa, Unknown
  Bacterial polypetide isolated from the Sargasso Sea
PQDQMKGYKVLFNDLVNDLKEITGFDAVSLQPNSGAQGEYSGLMTIRKFHLNNNQKNRNVCLIPESAHGTNPASAQMCGMKVVVVNCDDEGNVDLIDLKDKVNKYSKDLAALMVTYPSTHGVFEEKISEICDYIHKAGGQVYMDGANLNALIGIAKPAKFGPDVCHINLHKTFCIPHGGGGPGMGPIACAKHLKDFLPNHNITKNTRSEKSLGSVSA

SEQ ID NO: 98923 - protein, 107 aa, Unknown
  Bacterial polypetide isolated from the Sargasso Sea
MVEPTESESKEELDRFCEAMIAIRAEIESVESGAVDGEDNLLKNAPHTTDMVGGNAWPHDYDRERAAFPAPWLRDYKFWPAVGRIDNVWGDRNLVCSCAGMEAFAEE

SEQ ID NO: 98924 - protein, 162 aa, Unknown
  Bacterial polypetide isolated from the Sargasso Sea
LYKGTNGNVAHECIIDIRNIKNETGITEEDIAKRLIDFGFHAPTMSWPVPGTMMIEPTESESLTEINRFCDTLIKIKKEIDKVKNGEFDKVDNPIKNAPHTDLELASNEWKHKYSREEAAYPSQFLKSNKFWPPVSRVDNVYGDKNLFCTCPSMDEFKEDAA

SEQ ID NO: 98925 - protein, 292 aa, Unknown
  Bacterial polypetide isolated from the Sargasso Sea
TPNVILRNILENPGWYTSYTPYQAEVAQGRLEMLLNFQQLIIDLTGMDIANASLLDEATATAEAVGLSQRLDKTNSKKIFISKNCNPQTLDLIKTRTKPFGLELIIGDEKNELLQIEDDIICGVLSYPKTLGEIIDPSESISQIHKKNGKAILVCDLLALARLKTPAELGADIAVGSAQRFGIPMGYGGPHAAFFATKEEFKRSMPGRIIGVSKDRHGKKAYRLSLQTREQHIRRDKATSNICTAQALLAIISAAFAIYHGPEGILKIANRTCKLAKIFADEIKIGGYKILS

SEQ ID NO: 98926 - protein, 319 aa, Unknown
  Bacterial polypetide isolated from the Sargasso Sea
LGALMVTYPSTHGVFEEKISDICELVHKHGGQVYMDGANLNALVGVAKPGNFGPDVCHINLHKTFCIPHGGGGPGMGPIACKKHLQAYLPNHPVIKDCGPTTGIGAVSAAPWGSSSILSISWMYIKMMGSEGLKLASQVAILNANYIANRLKDHFPILYKGSNGNVAHECIIDIRNIKSETGVTEEDIAKRLIDFGFHAPTMSWPVAGTMMIEPTESEGLSELNRFCDTLIMIKQEIEKIKSGKFDKIDNPIKNAPHTDSELASDNWTHKYSRTEAAYPAKFLRASKFWPPVSRVDNVYGDKNIFCTCPSIDEFKEDAA

SEQ ID NO: 98927 - protein, 218 aa, Unknown
  Bacterial polypetide isolated from the Sargasso Sea
MLHNSEKDFIKRHIGPSEDDQSKMLKKLNYKSLDDLINNTVPEKIQFKGELNIGESNSEYEALRKLKAISKKNEIYSNFIGMGYYGTYTPYVILRNILENPGWYTSYTPYQPEVAQGRLEMLLNFQQMIVDFTGMDIANASLLDEGTAAAEAMGLSYRLDKSGSNLVFVSENCHPQTVEVIRTRAEPMGLKVLVGNEDKVLEQLKRILFAEYYSILGL

SEQ ID NO: 98928 - protein, 269 aa, Unknown
  Bacterial polypetide isolated from the Sargasso Sea
NFGPDVCHINLHKTFCIPHGGGGPGMGPIACKKHLQIYLPNHPVIKDCGPTSGIGAVSAAPWGSSSILSISWMYIKMMGSAGLKFATQVAILNANYIAHRLKDHFPILYKGSNGNVAHECIIDIRNIKSETGVTEEDIAKRLIDFGFHAPTMSWPVAGTMMIEPTESEGLSELDRFCDTLIKIKQEIDLIKSGKFDKVDNPIKNAPHTDTELASDDWNHKYSREQAAYPAKFLKVNKFWPPVARVDNVYGDKNIFCTCPSMDEFKEDAA

SEQ ID NO: 98929 - protein, 310 aa, Unknown
  Bacterial polypetide isolated from the Sargasso Sea
QSLRFKSGYGNDEDLNKISSDIVCGILQYPGTLGDIKDPSENISRIKKKNGKAILVCDLLALAKLKTPAELGADIAVGSSQRFGIPLGYGGPHAAFFATRDEFKRSMPGRIVGVSVDRHGNKAYRLALQTREQHIRRDKATSNICTAQALLAIVSAAYAIYHGPKGIRTISERVSQLAKNFADKLKQSGYKLYSDYFFDTVTIITKEKTDQIYNNALSQKVNIRKVNSEMLSVSFDEKKNVYRANQLLKIFNCAESIKENPTENLPNLPKNLIRTSSYLDHKVFNSYHSETEMLRYLKRLEDKDIALNRS

SEQ ID NO: 98930 - protein, 272 aa, Unknown
  Bacterial polypetide isolated from the Sargasso Sea
LEDKDIALNRSMIALGSCTMKLNAVAEMIPASWREFSEPHPFVPIEQMEGYRTLFMDLKNWLRSITGFSGVSLQPNAGAQGEYAGLMVIRKYHLERGEKNRNICLIPSSAHGTNPASAQMVGMKIVVINCDKEGNVDFEDLKKKTELHSKNLGALMITYPSTHGVFEEKITDICELIHKHGGQVYMDGANLNALVGIARPGNFGPDVCHINLHKTFCIPHGGGGPGMGPIACKKHLEIYLPSHPVVKDCGPASGIGAISAAPWGSSSILPIS

SEQ ID NO: 98931 - protein, 166 aa, Unknown
  Bacterial polypetide isolated from the Sargasso Sea
MVGMCYPGQFGGDVSHLNLHKTFCIPHGGGGPGVGPIGVVKELVPYLPADPLTQKDSEYSISGSKFGSASILPISWMYIRMMGEESLRRATQIAILNTNYIANKLKDDYDVLYKGKNGLVAHECILDVRPFKESCGIEAEDIAKRLIDYGFHAPTMSMAGCWNIND

SEQ ID NO: 98932 - protein, 293 aa, Unknown
  Bacterial polypetide isolated from the Sargasso Sea
HEHGGQVYMDGANLNALVGVAKPGNFGPDVCHINLHKTFCIPHGGGGPGMGPIACKRHLQVYLPNHPVVKDCGPASGIGAVSAAPWGSSSILSISWMYIKMMGSEGVKLATQIAILNANYIANRLKNHYPILYKGSNGNVAHECIIDIRSIKSETGISEEDIAKRLIDYGFHAPTMSWPVAGTMMIEPTESESLSELDRFCDTLISIKKEIDMVKSGKFDKVDNPIKNAPHTDIELASDEWSHKYSREQAAYPAKFLKANKFWPPVARVDNVYGDKNIFCTCPSMDEFKEDAA

SEQ ID NO: 98933 - protein, 218 aa, Unknown
  Bacterial polypetide isolated from the Sargasso Sea
MENFDSFALRHIGLSQTDIDNLLDQLGYKDLEEFSKSVLPENIFIEKELGLGDAMSEEEALKVLKEISKENTVYRSFIGQGYFGTVTPNVILRNVFENPGWYTSYTPYQAEISQGRLEALINFQTMVGDLTGFEIANASLLDEATAAAESMTLAHRVGKSKSHRFFIDQNCFPQTVSVVTARAKPIGIEVMVGDPQQLTNLKEETYFGALLPISKVMM

SEQ ID NO: 98934 - protein, 270 aa, Unknown
  Bacterial polypetide isolated from the Sargasso Sea
VTYPSTHGVFEEKITEICDIVHSNGGQVYMDGANLNALVGIAKPGKFGPDVCHINLHKTFCIPHGGGGPGMGPIACAKHLKDFLPNHRHLNEVKLNKSMGSVSAAPWGSASILVISWMYIKMMGSKGLKAASEISILNANYIAKKLSEKYKILYTGKNGNVAHECIIDIRPIKEKSGISEEDIAKRLIDYGYHAPTMSWPVSGTIMIEPTESENLEEINRFCNALLGIKDEIDKIDSGKYDKKDNPIINAPHTYLELSGDEWKHSYTRKE

SEQ ID NO: 98935 - protein, 299 aa, Unknown
  Bacterial polypetide isolated from the Sargasso Sea
MGQGYYPTITPPVIQRHILESPTWYTSYTPYQSEIAQGRLEALLNFQTVITELTGLPIANASLLDDATAAAEAMMMCHRIRSNTEKDRTQFGLLSDVDTHIKEVVLGRAASLGIDVILLEEISQISETLFGILGQYPNTEGTLGDPHQWALTCQEKGVKLAVVADLMACTLFQPPGEWGADIVVGSSQRFGVPMGYGGPYAGYFATKEIYQRQVPGRIIGASKDNAGKTAYRMALQTREQHIRREKATSNICTAQALLATMAGMYAVYHGPEGLKEIATGIHHLTTPLANLLKASGFQL

SEQ ID NO: 98936 - protein, 261 aa, Unknown
  Bacterial polypetide isolated from the Sargasso Sea
DEYKRSMPGRIIGVSVDRLGKKALRMALQTREQHIRREKATSNICTAQALLAIISAAYAIYHGPKGINEIAERISKLAKSFADKIKKSGYELYSDSFFDTVTILTKNKTQNIFKNALRNGVNVRMVGDSMISVAFDERKSIEKTNMLLKIFNSAESINETGKVTLSNIPKNLTRTSKYLTHPVFNSYHSETEMLRYLKKLEDSDIALNRSMISLGSCTMKLNAVSEMIPVTWGEFYEPHPFAPVEQMEGYRNLFTDLKNWL

SEQ ID NO: 98937 - protein, 265 aa, Unknown
  Bacterial polypetide isolated from the Sargasso Sea
KFFVSELCHPQTIDVIKTRAWPLGIDVEVGDHSSFDLTEDVFGVLLQYPATDGSILDYRDFAAEAHAVGSTVVVATDLMALTLLTPPGEWGADIVVGNSQRFGVPMGFGGPHAAFMSAQDAFKRKLPGRIIGVSVDTDGNPALRMALQTREQHIRRDKATSNICTAQVLLAIMAGAYAVYHGPDGLKRIAERIRDQAGVLATGLRMLGHEVLTNDFFDTIRVRPSGDVSEVLGLALGNGINLRSFGDGTVGIALDEVTRPNDLDD

SEQ ID NO: 98938 - protein, 239 aa, Unknown
  Bacterial polypetide isolated from the Sargasso Sea
MKSKYSNSEFSKRHIGSNQDQVKAMLKEIGCDSMDEFIEETIPNQIRFKGNLNVGDSVDEYELIHSLKMIASKNKPFKSYIGTGYYNTITPNVILRNIFENPGWYTAYTPYQAEISQGRLEALLNFQTMVMDMTGMEIANASLLDEATAAGEAMVMMSRENPNRNIFYADQNCHPQTIELLRTRSEPVGINLVVCKIEDFDFNDDVIGALIQYPSSDGKIFSFDDICQNAHNKKSLIAV

SEQ ID NO: 98939 - protein, 136 aa, Unknown
  Bacterial polypetide isolated from the Sargasso Sea
TEEDIAKRLIDYGFHAPTMSWPVAGTMMIEPTESENLREINRFCDTLIKIKSEIDNIKSGKFDKIDNPIKNAPHTDLELSSDEWSHKYTREEAAYPSKYLKSNKFWPPVARVDNVYGDKNIFCTCPSMDEFKEDAA

SEQ ID NO: 98940 - protein, 163 aa, Unknown
  Bacterial polypetide isolated from the Sargasso Sea
ILYKGINGYVAHEFIIDIRPIKEISGITEEDIAKRLMDYGFHAPTMSWPVPGTMMIEPTESESKDELDRFCEAMISIRNEINDVVEGNIDKNNNPLKNAPHTAEYSLSEEWDHPYSRKDACFPGKWQKEYKYWPSVSRIDNAFGDRNLICSCPPIEEYTNVDN

SEQ ID NO: 98941 - protein, 294 aa, Unknown
  Bacterial polypetide isolated from the Sargasso Sea
IHHHGGQVYMDGANLNALVGIAQPGKIGPDVLHMNLHKTFCIPHGGGGPGMGPIGFKKHLAPFAPSHAVCPVPGVSEENSAVSAAPYGSPGILPISWVFIKLMGGPGLLKATKVAILNANYIASRVGKHFPVVYTGNNGRVAHECIIDVRPFRETAGITEEDVAKRLIDYGFHSPTMSWPVAGTLMIEPTESEPLEELDRFCDALIAIRAEIQKLEEGEWNADDNPLHNAPHTAEDLADPEWNHCYTREEAVYPLPGLRVNKYWPPVNRIDNVFGDRNVVCSCPPIESYQEVEA

SEQ ID NO: 98942 - protein, 317 aa, Unknown
  Bacterial polypetide isolated from the Sargasso Sea
FADKLKQSGYELYSDYFFDTVTVKTLDKTDKIYKNALDQHVNIRKINSEMLAVSFDERKNLYRANQVLKIFNCSETIKETTKETTNKNLSNLPKTLLRTSTYLDHPVFNSYHSETAMLRYLKKLEDSDIALNRSMIALGSCTMKLNSVSEMIPVTWKEFSHPHPYSPIEQMDGYRELFTDLKNWLRTITGFSGVSLQPNAGAQGEFAGLMVIRKFHEKNGQKKRNVCLIPSSAHGTNPASAQMAGMKVVVVNCDAYGNVDYEDLKKKSEEYSDTLSTLMVTYPSTHGVFEEKITDICDLIHKHGGQVYMDGANLNAL

SEQ ID NO: 98943 - protein, 265 aa, Unknown
  Bacterial polypetide isolated from the Sargasso Sea
MIDDNSKEFIKRHIGPTDDEQSKMLKYVGYSSLEDLMKNTVPEKILLKNDLSIDEPLSENDALKKLKSVSKKNKIFRNFIGMGYYNSITPNVILRNILENPGWYTSYTPYQPEVAQGRLEMLLNFQQTIIDLTGMDIANASLLDEATATAEAVGLSQRLDKTNAKKIFISNNCNPQTIDLIKTRAKPFGLELIIGDEKKELSNINQDIICGVLAYPGTLGEITDPSESISQIHKRNGKAILICDLLSLARLKTPAELGADIAVGS

SEQ ID NO: 98944 - protein, 277 aa, Unknown
  Bacterial polypetide isolated from the Sargasso Sea
MGLCHRLNKKDSNLVFISEDCHPQTIDVIQTRAEPMGLKVLVGKEDEVLDQLKEDLVCGILQYPGTLGDIKDPSEAISKIHKKNGKAVLACDLLALAKLKTPRELGADIAVGSSQRFGIPMGYGGPHAAFFATKDEYKRSMPGRIVGVSVDRHGNKAYRLSLQTREQHIRRDKATSNICTAQALLAIVSAAYAIYHGPDGIKNISERVSQLAKSFADKIKQSGYELYSNNFFDTVTIITKEKTDQIYKNALNQKVNIRKVNSEMLAVSFDERKMYIE

SEQ ID NO: 98945 - protein, 309 aa, Unknown
  Bacterial polypetide isolated from the Sargasso Sea
LSNITGYYDISLQPNAGSQGEYAGLLAIDAYHKNNGDDNRSICLIPRSAHGTNPASAMMVGMKVVPIECDSEGNIDLKDLKEKASLHKSNLSAIMITYPSTHGVFESNVREVCKIVHDHGGLVYIDGANLNALVGIAKPGEFGGDVSHLNLHKTFCIPHGGGGPGVGPIGVVEKLKDFMPSHHENIQNVGPVSSTDFGSASILPISWMYIAMMGSKGLKQATMTAILSANYVAKRLSDHYQILYKGENNLIAHECIIDARPFKESSNIDVDDIAKRLMDYGFHAPTMSWPVAGTLMIEPTESESREELD

SEQ ID NO: 98946 - protein, 322 aa, Unknown
  Bacterial polypetide isolated from the Sargasso Sea
GWYTAYTPYQPEVSQGRLEMLMNFQQMIIDLTGLDIANASLLDESTAAAEAMMMAYKIKKNKQQTFCIQNSCHPQTLSVLRTRAHPLGITIIEGKPNEDTFGCLIQNPDTYGEIEDLDTLIKSNKSKEIVSIVAADIMSMVVMKSPGSYDADIVIGSSQRFGVPMGLGGPHAAFFATKDEFKRLMPGRLIGVSVDRNNKRSYRMALQTREQHIRREKATSNICTAQALLAIIAAAYAIYHGPKRLINIASTVNHNTRYLKKSLEKLEYKIKSNKYFDTIVIEDAKARDWFNKSVKEGINFRLINNTTFSITIDETTTLEDID

SEQ ID NO: 98947 - protein, 144 aa, Unknown
  Bacterial polypetide isolated from the Sargasso Sea
MLPNSEKDFLKRHIGPSKEDQSKMLKELNYQSLDDLIDNTVPEKIKFNGELNIGESNSEYEALRKLRAISKKNQVYSNFIGMGYYGTYTPYVILRNILENPGWYTSYTPYQPEVAQGRLEMLLNFQQMIVDFTGMDIANASLLD

SEQ ID NO: 98948 - protein, 246 aa, Unknown
  Bacterial polypetide isolated from the Sargasso Sea
MRILFCGIIQYPGTLGDIKDPSEAISKIHKQNGKAVLVCDLLALAKIKTPAELGADIAVGSTQRFGIPMGYGGPHAAFFATKDEYKRSMPGRIVGVSVDRHGNKAYRLALQTREQHIRRDKATSNICTAQALLAIVSAAYAVYHGPKGIKKIADTVSQLAKSFADKIKQSGYELYSDYFFDTVTVKTLDKTDKIYKNALDQQVNIRKVNSQMLAVSFDERKNLYRANQVLKIFNCSETIKETTKET

SEQ ID NO: 98949 - protein, 309 aa, Unknown
  Bacterial polypetide isolated from the Sargasso Sea
MQRFGIPMGFGGPHAAYFACSEKYKRLIPGRIVGQTLSKNGEKSLRLALQTREQHIRREKATSNICTAQSLLAIISSFYTIYHGPSGLTQIAKRLVELRINLESSLAALGFDIPNGIRFDSVDVYSEHSPRIHNEALKNGYNLRILPLGSTIENSTGFGISLDELSTEKEIKDILTFIAKLIEKEEDLEHIKFDKEFHLESLALRSSAWMQQDIFTNYKSETELMRYIFRLAEKDFSLVDGMMPLGSCTMKLNSAAELNPVSWANLSSIHPFSPLDQTRGYSKIISDLEKWISEIVGLKSVSFSQMQAL

SEQ ID NO: 98950 - protein, 294 aa, Unknown
  Bacterial polypetide isolated from the Sargasso Sea
MRYIKSLERKDLSLNHSMIALGSCTMKLNAAAEMLPLSWKRWNNIHPFAPENQTNGYKLMLNKLEKQLNEITGFHATSLQPNSGAQGEYAGLMVIRSYFKSINQTNRNICIIPSSAHGTNPASAIMAGMKVVVVGTDKYGNINEEELKLKAEEHSENLAALMITYPSTHGVFESSIKRITDTIHKNGGQVYMDGANMNAQVGLTNPNEIGADVCHLNLHKTFAIPHGGGGPGVGPICVREHLSDFLPQTDRSNHKEFSVKAISSAPWGSAMACLFSYGYICMMGSKGLKRATEI

SEQ ID NO: 98951 - protein, 247 aa, Unknown
  Bacterial polypetide isolated from the Sargasso Sea
VFEEKITDICELVHKHGGQVYMDGANLNALVGIAKPGNFGPDVCHINLHKTFCIPHGGGGPGMGPIACKRHLQAYLPNHPVIEDCGPTTGIGAVSAAPWGSSSILSISWMYIKMMGSEGLKLASQVAILNANYIAHRLKDHFPILYKGSQGNVAHECIIDIRMIKSETGVTEEDIAKRLIDFGFHAPTMSWPVAGTMMIEPTESEGLSELDRFCDTLIKIKQEIEKIKSGEFDKIDNPIKNAPHTDS

SEQ ID NO: 98952 - protein, 215 aa, Unknown
  Bacterial polypetide isolated from the Sargasso Sea
AEQHSENLGALMVTYPSTHGVFEEKITDICELVHKHGGQVYMDGANLNALVGIAKPGNFGPDVCHINLHKTFCIPHGGGGPGMGPIACKRHLQVYLPNHPVIKDCGPTSGIGAVSAAPWGSSSILSISWMYIKMMGSAGLKLATQVAILNANYIAHRLKDHFPILYKGSNGNVAHECIIDIRNIKSETGVTEEDIAKRLIDFGFHAPTMSWPVAG

SEQ ID NO: 98953 - protein, 248 aa, Unknown
  Bacterial polypetide isolated from the Sargasso Sea
NTLLPGVIQRNILENPGWYTAYTPYQPEVSQGRLEALLNFQQMIIDLTGMEIANASLLDEATAAAEAMTFCKRVSKSKSMRFFAADDCHPQTIDVLKTRAEPMDIELVVGNLAEQQQTPDESLFGALIQNPGTFGDIHDIEDLITKWHELGTLVSVASDPMSLVLIKPPGESGADVVIGSTQRFGVPMGFGGPHAAYFAAREKNMRSVPGRIIGVSIDRRGKTALRMALQTREQHIRREKATSNICTA

SEQ ID NO: 98954 - protein, 256 aa, Unknown
  Bacterial polypetide isolated from the Sargasso Sea
MIPISWKEFADFYPFVPVEQMEGFRDLFTDLKNWLRSITGFSGVSLQPNAGAQGEYAGLMVIRKYHLDRDEAYRNICLIPSSAHGTNPASAQMVGMKVVVVNCDKEGNVDFDDLKKKVEQHSENLAALMVTYPSTHGVFEEKITDICELVHKHGGQVYMDGANLNALVGVAKPGNFGPDVCHINLHKTFCIPHGGGGPGMGPIACKKHLQVYLPNHPVIKDCGPASGIGAVSAAPWGSSSILSISWMYIKMMGSEG

SEQ ID NO: 98955 - protein, 118 aa, Unknown
  Bacterial polypetide isolated from the Sargasso Sea
MSWPVAGTMMIEPTESESLSELDRFCDTLISIKEEIDMVQTGKFDKVDNPIKNAPHTDIELASDEWKHKYSREQAAYPAKFLKANKFWPPVARVDNVYGDKNIFCTCPSMDEFKEDAA

SEQ ID NO: 98956 - protein, 291 aa, Unknown
  Bacterial polypetide isolated from the Sargasso Sea
STHGVFESSIKRITQQIHDNGGQVYMDGANMNAQVGLTNPYSIGADVCHLNLHKTFSIPHGGGGPGVGPICVAKHLVDFLPQTDRNIKKENGVKAISAAPWGSAMACLISYGYISMMGPDGLKKATEIAILNANYIKKRIEKDFKILYQGENGRSAHELIIDCRDFKEEYGIDVMDIAKRLIDYGFHAPTVSFPVAGTMMIEPTESENLEEIDRFCNALISIKSEILGCSKDDDSNLLKNSPHTQNTLTSDIWEFKYSREQAAYPISYLKENKFWPAVTRIDEAFGDRNLI

SEQ ID NO: 98957 - protein, 248 aa, Unknown
  Bacterial polypetide isolated from the Sargasso Sea
MIDDNSKEFIKRHIGPSDDEQSKMLKHVGYSSLEDLMKNTVPEKILLKNDLNIDEPLSENDALKKLKSISKKNKIFKNFIGMGYYNSITPNVILRNILENPGWYTSYTPYQPEVAQGRLEMLLNFQQTIIDLTGMDIANASLLDEATATAEAVGLSQRLDKTNAKKIFISNNCNPQTIDLIKTRTKPFGLELIIGDEKKVLSNINQDIICGVLAYPGTLGEIIDPSESISQIHKRNGKAILICDLLSL

SEQ ID NO: 98958 - protein, 159 aa, Unknown
  Bacterial polypetide isolated from the Sargasso Sea
MINKNSFSSRHIGPRNEDIETMLRTVNCSSLDDLIKKTVPKNILFESNLNLKPGMSEEFNKINLQLLSIKNNFSKTYIGLGYYGTITPSVLLRNILENPGWYTAYTPYQPEVSQGRLEMLMNFQQMIIDLTGMEIANASLLDESTAAAEAMMLAYRQTG

SEQ ID NO: 98959 - protein, 307 aa, Unknown
  Bacterial polypetide isolated from the Sargasso Sea
CCLIPDSAHGTNPASAQMCGMKVVVVNCDDDGNVDIDDLKNKAEKHSKDLAALMVTYPSTHGVFEEKIMDICEVIHKHGGQVYMDGANLNALVGVAKPGKFGPDVCHINLHKTFCIPHGGGGPGMGPIACAKHLADFLPTHEIIKEAGPKNGMGAVSAAPWGSSSILPISWMYIKMMGAEGLKKASQVSILNANYISKKLSKDYKVLYTGKNGNVAHECIIDIRPIKASSGISEEDLAKRLIDFGYHAPTMSWPVAGTIMIEPTESENLEEIDKFCNALIKIKKEINLVESSKFDKIDNPLKNAPHT

SEQ ID NO: 98960 - protein, 182 aa, Unknown
  Bacterial polypetide isolated from the Sargasso Sea
SAAILSANYMAARLFSHYPVLYTGANGRVAHECIIDIRGIQERSGISNEDIAKRLIDFGFHAPTMSFPVAGTLMIEPTESESIAEVDRFCDAMLAIAEEIGKVEAGVWPADDNPLVNAPHTAADLMRDDWTHPYSREQAANPDGNQQANKYWPPVSRVDNAYGDRNLICSCPSIDEWEAAAE

SEQ ID NO: 98961 - protein, 232 aa, Unknown
  Bacterial polypetide isolated from the Sargasso Sea
APFLANHSLIKISGPDLSNSAVSAAPWGSGGILPISWMYITMMGREGLRKATQVAILSANYIAKKLESHYPILYKGQNDMVAHECIIDIRPFKQNSGISEEDIAKRLIDYGFHAPTMSFPVPGTLMIEPTESESLEELDRFIDAMVKIRGEIQQIETGALDSENNPLKNAPHTLKDIVDDNWDRPYSIAEACYPADKNPATKYWPTVNRIDNVYGDRNLFCACPPIESFKSD

SEQ ID NO: 98962 - protein, 300 aa, Unknown
  Bacterial polypetide isolated from the Sargasso Sea
MEGVSLPHPFVPTNQMEGYKILFKDLINDLKEITGYDAVSLQPNSGAQGEYAGLMTIRKFHKNNKQENRNVCLIPDSAHGTNPASAQMCGMKVVVVNCDDDGNVDINDLKNKAEKHSKDLAALMVTYPSTHGVFEEKIMEICDVIHKHGGQVYMDGANLNALVGIAKPGKFGPDVCHINLHKTFCIPHGGGGPGMGPIACSKHLADFLPTHEIIKEAGPKNGMGSVSAAPWGSSSILPISWMYIKMMGAEGLKKASQVSILNANYISKKLSKDYKVLYTGKNGNVAHECIIDIRPIKSKL

SEQ ID NO: 98963 - protein, 226 aa, Unknown
  Bacterial polypetide isolated from the Sargasso Sea
KLKDFMPSHHENIKNVGPVSSTDFGSASILPISWMYIVMMGSKGLKQATMTAILSANYVAKRLSDHYQILYKGENNLIAHECIIDTRPFKESSNIDVDDIAKRLMDYGFHAPTMSWPVAGTLMIEPTESESREELDIFCDAMISIRKEIEEIEKGNEDPINNILKNSPHTVEELSSDNWQHNYSREKAAYPLDYLKARKYWPPVKRIDSVYGDKNLFCTCPDMDEF

SEQ ID NO: 98964 - protein, 274 aa, Unknown
  Bacterial polypetide isolated from the Sargasso Sea
LQTREQHIRREKATSNVCTAQALLAVMASFYAVMHGPDGLKAIAQRIHRKTVRLAKGLEAHGFNAEQKHFFDTITIDVGPMQNVILKSAISEGINLRKIGKSRIGISLDERTRPAIIEAVWRSFGIKRKDKNLTSGYRIPNELYRNTDFLTHPIFHMNRAESEMTRYMRRLVDRDIALDRSMIPLGSCTMKLNAAAEMLPLSWPEFSQVHPYAPKEQTLGYSTMIDNLSKMLCDVTGYDSISMQSNSGAQGEYAGLLTIGRYHKSRGDNNRDIC

SEQ ID NO: 98965 - protein, 109 aa, Unknown
  Bacterial polypetide isolated from the Sargasso Sea
MIEPTESESLSELDRFCDTLINIKSEIDMIKSGQFDKVDNPIKNAPHTDIELASDEWDHKYTREQAAYPAKFLKTNKFWPPVARVDNVYGDKNIFCTCPSMDEFKEDAA

SEQ ID NO: 98966 - protein, 198 aa, Unknown
  Bacterial polypetide isolated from the Sargasso Sea
MSEFQKKHIGPQNHHIQEMLSFLEQKSLEDLIKKIVPETILDIDEDSIGNEQFSENGILAHIKNIGEKNHLYRSLIGQGYYDTITPNVILRNILENPGWYTQYTPYQPEISQGRLEALLNYQTMVSEICNLPIANASLLDEGTAASEAMLMLYRKNRTESNKFLIDQDCFQQTIDVIVARAAPLDIEIEICHYKEMNF

SEQ ID NO: 98967 - protein, 312 aa, Unknown
  Bacterial polypetide isolated from the Sargasso Sea
NRKICIIPSSAHGTNPASAVMAGMSVVIVKCDENGNIDVDDLRSKAEEHAENLAALMITYPSTHGVFEESVIEITGIIHKNGGQVYMDGANMNAQVGLTSPGNIGADVCHLNLHKTFAIPHGGGGPGMGPIGVAEHLVPFLPGNPIIKTGGDKAIEPINGAPWGSALILIISYGYNKLLGSEGLKKSTQYAILNANYLKEKLADHYDVLYTGNNGRVAHEMILDCRDFKKTAGVEVADIAKRLIDYGFHAPTVSFPVAGTLMIEPTESESLKELDRFAHAMIAIKNEIDEIACGDADKNDNVLKNLRILHRY

SEQ ID NO: 98968 - protein, 312 aa, Unknown
  Bacterial polypetide isolated from the Sargasso Sea
RMALQTREQHIRRDKATSNICTAQVLLAVIAGFYAVYHGPEGLKQIASRIHFFTQIFANYLTKLNYKIVNHSYFDTLKIYTPGKAKNLARKAEKHRINIRVFGDNHVGISFDETTSQEILFSLLKIFNDERSFKIDFNKKINEVIPRACIRSTQYLGHPIFNKFRSETEMLRYIRWLSTRDIALDQSMIPLGSCTMKLNSTSEMMPVSWKTFSSIHPFAPLHQTKGYQKLFRELENMLKETTGFAAISLQPNAGSQGEFAGLMTIRKYHDKIGQNHRNICLIPSSAHGTNPASAVMAGMNVIVIDCDSNREY

SEQ ID NO: 98969 - protein, 294 aa, Unknown
  Bacterial polypetide isolated from the Sargasso Sea
LVDQLIQITGFDAISMQPNSGAQGEYTGLLLIHRYQIHRGEGQRNICLIPSSAHGTNPASAMMASMKVVIVQCDEEGNIDLEDLEAKAQKHSSELSALMITYPSTHGVFEETLTKICDIIHHHGGQVYMDGANLNALVGIAQPGKIGPDVLHMNLHKTFCIPHGGGGPGMGPIGFKKHLAPFAPSHAVCPVPGVPEENSAVSAAPYGSPGILPISWVYIKLMGGPGLLKATKVAILNANYIASRVGKHFPVVYTGNNGRVAHECIIDVRPFRETAGITEEDVAKRLIDYGSTLQ

SEQ ID NO: 98970 - protein, 167 aa, Unknown
  Bacterial polypetide isolated from the Sargasso Sea
GYYPVLYRGDSGYHAHEFIIDIRPIKDASGINEEDIAKRLMDYGFHAPTMSWPVPGTMMIEPTESESKPELDRFIEAMISIKKEIDNVTSGEFDPTDNPLKNAPHTAEHALSDNWSHPYSRHISCFPMHWQSEYKYWPSVGRIDNAYGDRNLVCTCPATDDYRDREL

SEQ ID NO: 98971 - protein, 316 aa, Unknown
  Bacterial polypetide isolated from the Sargasso Sea
MLHNSQKDFIRRHIGPKKKDEQNMLNQLGYKSLSELINNTVPEKILLKDSLSIGDPNSEYEALRKLKAISKKNQIYSNFIGMGYYGTYTPNVIVRNILENPGWYTSYTPYQAEVAQGRLEMLLNFQQMIIDFTGMDIANASLLDEGTAAAEAMGLSHRLNKKDSKIVFVSSDCHPQTIDVVKTRAEPMGLKVLVGQDSELDKLSEDIICGILQYPGTLGDIKDPSESISKIKKKNGKAILACDLLALAKLKTPAELGADIAIGSSQRFGIPMGYGGPHAAFFATKDEFKRSMPGRIIGVSVDRHGNKAYRLALQTE

SEQ ID NO: 98972 - protein, 276 aa, Unknown
  Bacterial polypetide isolated from the Sargasso Sea
FNTENKTLDAKNIEENLDEIFKEDDLLRNDNILTHPIFNIYHSETEMMRYLKKLENKDIALNRSMIPLGSCTMKLNAASEMLPITLPGFANAHPFLEKHQREGYNQMLRELISMLKDITGFDAISLQPNAGAQGEFAGLLAIKKYHEANKQGDRNICLIPNSAHGTNPASAQMCGMEVSIVKCDNFGNVDLNHLDEKINEAGNRLAALMITYPSTHGVFEESISIICKKIHNAGGQVYMDGANLNAMVGIAKPGKFGPDVSHMNLHKTFCIPHGGG

SEQ ID NO: 98973 - protein, 282 aa, Unknown
  Bacterial polypetide isolated from the Sargasso Sea
SIVGICIKIHDAGGQVYLDGANYNAMVGVAKPGKFGPDVCHMNLHKTFCIPHGGGGPGVGAIGLKKHLADFAPGHPMFKNEIGLTTQEAVSAAPWGSASILPISYSYISMMGDDGLKLATQVAILNANYIKERLKNYYPILYTGKNNMVAHEFIIDIRPFKQELNISDEDIAKRLIDYGFHAPTMSFPVPGTLMIEPTESESKEELDRFCEAMISIHNEITMIRDGKFDKVDNPIKNAPHTIEEVSSDNWDHKYTRKEAAYPHAYLINNKYWSPVSRIDNVY

SEQ ID NO: 98974 - protein, 258 aa, Unknown
  Bacterial polypetide isolated from the Sargasso Sea
LRETALKNKKMMSLIGQGYHGTITPPAIQRNVLENPAWYTSYTPYQPEISQGRLEALLNFQTMISDLTGLEIANASLLDEATACAEAMTMAKRITKNKSINFFVDQECHPQNIEVLKTRAQPLGLNIIIGDPDKDINYEDCFGAIFQYPGTFGALRDFTNVTDKLHEKGALVTISADPMSLTLLKEPGSMGADIAVGSTQRFGVPQGFGGPHAAYMATKETYKRFLPGRIVGVSIDSKGNKAYRLALQTREQHIRREK

SEQ ID NO: 98975 - protein, 266 aa, Unknown
  Bacterial polypetide isolated from the Sargasso Sea
IQNTCHPQTLSVLKTRAKPLGIKIIFNNPNEDTFGCLIQNPDTYGEIADLDSLIKLNKEKDILSIVAADIMNLVVMKSPRIFGADIVVGTSQRFGVPMGLGGPHAAFFATLDEYKRMMPGRLIGVSVDRNNKRSYRMALQTREQHIRREKATSNICTAQALLAIISASYAIYHGPERLKNIANNIHHHTRYLKKSLEILGFKIISKNYFDTLLINSSEAKYWVDKSIEHGINFRLVNDKSFTLSLDETTTLQEIDNLLIFFNEKKY

SEQ ID NO: 98976 - protein, 299 aa, Unknown
  Bacterial polypetide isolated from the Sargasso Sea
NPASAQMCGMEVSIVKCDNLGNVDLNHLDEKIKEAGNKLAALMITYPSTHGVFEESISIICEKIHNAGGQVYMDGANLNAMVGISKPGKFGPDVSHMNLHKTFCIPHGGGGPGMGPIGVKSHLENFLPGHPIIQNELGLTSLDAVSAAPWGSPAILPISYSYISMMGDEGLKLATQVAILNANYIKEKLKNYFSLLYSGKNGMVAHECIIDIRPIKEELNISEEDIAKRLIDYGFHAPTMSFPVPGTLMIEPTESESKEEIDRFCTALISIHGEIEKVRNGTYDSEDNPIKNSPHTIEE

SEQ ID NO: 98977 - protein, 265 aa, Unknown
  Bacterial polypetide isolated from the Sargasso Sea
MALRQKVNIRKVNSDMLAVSFDERKNVYRVNQLLKIFNAAESIKKEDPSVSLPNLPKNLLRASKYLEHPVFNLYHSETEMLRYLKRLEDKDIALNRTMIALGSCTMKLNAAAEMIPISWKEFAEPHPFVPIEQMEGFRDLFTDLKNWLRSITGFSGVSLQPNAGAQGEYAGLMVIRKYHLDRGEANRNICLIPSSAHGTNPASAQMVGMKVVVVNCDKEGNVDFDDLKKKVDQHSENLGALMVTYPSTHGVFEEKIIEICELVHK

SEQ ID NO: 98978 - protein, 164 aa, Unknown
  Bacterial polypetide isolated from the Sargasso Sea
ILYKGAKWGLVAHACIIDIRPLKDLAGIEVEDVAKRLIDYGFHAPTMSWPVAGTLMIEPTESESLKEIDRFCEAMICIRQEIEEIATGKVSNEDNLLKNAPHTAKKLITEVWDHEYSREKAAYPVEGMQQNKYWPPIGRVDNVYGDRNLVCSCPSMEDYELETI

SEQ ID NO: 98979 - protein, 158 aa, Unknown
  Bacterial polypetide isolated from the Sargasso Sea
FVAHECILDFRDLKSKTGLSVNDLAKRLIDYSFHAPTISWPVPETIMIEPTESESLVELDRFCEAMLLIGDEITEIEKNIELKNNNVISNAPHTLKELIADNWHYPYSKEKASSPYKTPTSIKFWSAVSRINNAYGDRNLICSCNVNQGETFEEKKCA

SEQ ID NO: 98980 - protein, 221 aa, Unknown
  Bacterial polypetide isolated from the Sargasso Sea
KDLPKGNTAVSAAPWGSPGILPISWVYIQLMGGHGLKKSSQVAILSANYLAKRLNEHFPIVYTGKNGLVAHECIIDIRPLKANTGISEEDIAKRLIDYGFHAPTMSWPVAGTLMIEPTESEPKVELDRFCEAMISIRREADRVYKGEWDKADNPLKNSPHPPEDLTDPEWDHCYSQEIAFYPLASIRQNKYWPPSARVDNVHGDRNIFCACPPLESYEGEE

SEQ ID NO: 98981 - protein, 242 aa, Unknown
  Bacterial polypetide isolated from the Sargasso Sea
AASETLSPYLPTHSLMDNNLSNSFNFVSSAKHGSASILPISWMYIKMAGLSGLRKATSHAILSANYIAHSLKHKFKILYKGKNNFVAHECILDFRDLKSKTGLSVNDLAKRLIDYSFHAPTISWPVPETIMIEPTESESLVELDRFCEAMLLIGEEISEIEKNIELKDNNVISNAPHTLKELIDDNWHYPYSKEKASFPYKIPKSIKFWSSVSRINNAYGDRNLICSCNVNQDDTLEEKKCA

SEQ ID NO: 98982 - protein, 267 aa, Unknown
  Bacterial polypetide isolated from the Sargasso Sea
GLELLIGNQKDYLKNLNGDLICGVLAYPDTLGEIVDPSESISLIHKKGGKAIIVCDLLSLAKLKTPAELGADIAVGSAQRFGVPMGYGGPHAAFFATKDEFKRSIPGRIIGVSVDKFGKKAYRLSLQTREQHIRRDKATSNICTAQALLAIVSAAYAVYHGPNGILEIANRTSKLAKLFADNIKNSGFELHTNNFFDTVTIKTNNKTEEIYKKAISEKVNLRKINDKILSVAFDESKRLDHVNLLLKIFGISKDVTKTIDVNLDNLP

SEQ ID NO: 98983 - protein, 315 aa, Unknown
  Bacterial polypetide isolated from the Sargasso Sea
ALGSCTMKLNAVAEMIPISWREFAEPHPFVPIEQMDGFRNLFTDLKNWLRSITGFSGVSLQPNAGAQGEYAGLMVIRKYHMERGESNRNICLIPSSAHGTNPASAQMVGMKVVVVNCDKEGNVDFEDLRKKAEIHSENLGALMVTYPSTHGVFEEKIIDICDLIHRHGGQVYMDGANLNALVGIAKPGNFGPDVCHINLHKTFCIPHGGGGPGMGPIACKRHLEIYLPNHPVVKDCGPATGIGPVSAAPWGSSSILSISWMYIKMMGSEGLKHATQIAILNANYLANKLKDHYPILYKGANGNVAHECIIDIRSI

SEQ ID NO: 98984 - protein, 293 aa, Unknown
  Bacterial polypetide isolated from the Sargasso Sea
IFHSINSETEMLRYINKLEKRDLSLNYSMIPLGSCTMKLNATVEMIPISWPEFNSIHPFSPLNQAKGYKKIINELEEMLYKVTGFDAVSFQPNSGAQGEYAGLLSIREYHKANNSKRDICLIPESAHGTNPASAIMAGLKVVIVKCDDHGNIDYEDLSKKVDEAGDRLSSLMVTYPSTHGVFEHNIDEICNLIHENGGLVYMDGANLNAMVGVCKPGKFGADVMHINLHKTFCIPHGGGGPGMGPICVNEKLKPHLPKHSFTDEDFSYSVSSSPFGSASILLISYIYMKLMAA

SEQ ID NO: 98985 - protein, 327 aa, Unknown
  Bacterial polypetide isolated from the Sargasso Sea
RGEENRNICLIPSSAHGTNPASAQMVGMKVVVVDCDKEGNVDFEDLKKKAEMHSENLGALMVTYPSTHGVFEEKITDICELIHKHGGQVYMDGANLNALVGIARPGNFGPDVCHINLHKTFCIPHGGGGPGMGPIACKRHLQVYLPNHPVVKDCGPATGIGAVSAAPWGSSSILSISWMYIKMMGSEGLKLATQIAILNANYIAHRLKDHYPILYKGSNGNVAHECIIDIRSIKTETGITEEDIAKRLIDYGFHAPTMSWPVAGTMMIEPTESESLSELDRFCDTLISIKSEIDMIKSGKFDKVDNPIKNAPHTDIELASDEWSHKY

SEQ ID NO: 98986 - protein, 267 aa, Unknown
  Bacterial polypetide isolated from the Sargasso Sea
KFGPDVSHMNLHKTFCIPHGGGGPGMGPIGVKSHLENFLPGHPIVQNELGLTSLDAVSAAPWGSPSILPISYSYISMMGDEGLKLATQVAILNANYIKEKLKEYFPLLYSGKNGMVAHECIIDIRPIKEELNISEEDIAKRLIDYGFHAPTMSFPVPGTLMIEPTESESKEEIDRFCTAMISIHKEIEKVRNGTYDSEDNPIKNSPHTIEEVSSDEWDHKYSRSEAVFPHSYLYNNKYWSPVARIDNVYGDRNLFCVCPPIEDYEDV

SEQ ID NO: 98987 - protein, 177 aa, Unknown
  Bacterial polypetide isolated from the Sargasso Sea
NANYIANRLKDHFPILYKGSNSNVAHECIIDIRSIKSETGISEEDIAKRLIDYGFHAPTMSWPVAGTMMIEPTESESLSELDRFCDTLISIKEEIDMVQTGKFDKVDNPIKNAPHTDIELASDEWSHKYSREQAAYPAKFLKANKFWPPVARVDNVYGDKNIFCTCPSMDEFKEDAA

SEQ ID NO: 98988 - protein, 299 aa, Unknown
  Bacterial polypetide isolated from the Sargasso Sea
MLHNSQKDFLKRHIGPSDEDQNKMLKKLNYKSLDDLIKSTVPEKIQLKDELNIGDSNSEYEALRKLKAISKKNQIYSNFIGMGYYGTYTPYVILRNILENPGWYTSYTPYQPEVAQGRLEMLLNFQQMIVDFTGMDIANASLLDEGTAAAEAMGLSHRLNKKDSNLVFVSENCHPQTIDVIQTRAEPMGLKVLVGDEDKILDQLKEDLICGILQYPGTLGNIKNPSEAISKIHKKNGKAILACDLLALAKLKTPRELGADIAVGSSQRFGIPMGYGGPHAAFFATKDEYKRSMPGRIVG

SEQ ID NO: 98989 - protein, 332 aa, Unknown
  Bacterial polypetide isolated from the Sargasso Sea
SKVKSQVFFVSRDCLPQTIDVIKTRAKPIGVKVIVGDHRTDLAKINAFGVLLQYPDAGGAILDYRQSIEQVHSNGGLVAMAADLLALVLLKSPGELGADVAIGSSQRFGVPMGFGGPHAAYMATKDSFKRALPGRIVGVSIDSHGATAYRLALQTREQHIRRDKATSNICTAQVLLAVMSSMYAVYHGPKGLRNIALRVNHMTRICASGLARLGYYCNFDTFFDTLVLSTDDKTEAILSAAKACKVNLREIDASHIGLSLDETSGFAELELLWTIFALGQNIGFTAAQLESTLKPSIPSELLRQDKILTHESFQKYHSETEMMRYLRRLADK

SEQ ID NO: 98990 - protein, 280 aa, Unknown
  Bacterial polypetide isolated from the Sargasso Sea
MVTYPSTHGVFEEKIKDICEVIHEHGGQVYMDGANLNALVGVAKPGNFGPDVCHINLHKTFCIPHGGGGPGMGPIACKRHLQVYLPNHPVVKDCGPASGIGAVSAAPWGSSSILSISWMYIKMMGSEGVKLATQIAILNANYIANRLKDHYPILYKGSNGNVAHECIIDIRSIKSETGISEEDIAKRLIDYGFHAPTMSWPVAGTMMIEPTESESLSELDRFCDTLISIKEEIDMVKSGKFDKVDNPIKNAPHTDIELASDEWNHKYSREQAAYPAKFLK

SEQ ID NO: 98991 - protein, 273 aa, Unknown
  Bacterial polypetide isolated from the Sargasso Sea
VAQGRLEMLLNFQQMIVDFTGMDIANASLLDEGTAAAEAMGLSHRLNKKDSNLVFVSEDCHPQTINVIQTRAEPMGLKVLVGKEDEVLDQLKEDLVCGILQYPGTLGDIKDPSEAISKIHKKNGKAVLACDLLALAKLKTPRELGADIAVGSSQRFGIPMGYGGPHAAFFATKDEYKRSMPGRIVGVSVDRHGNKAYRLSLQTREQHIRRDKATSNICTAQALLAIVSAAYAIYHGPDGIKNISERVSQLAKSFADKIKQSGYELYSNYFFDT

SEQ ID NO: 98992 - protein, 238 aa, Unknown
  Bacterial polypetide isolated from the Sargasso Sea
MTQSLFELEQKTDFIRRHIGPGEEELRALLATVGAESLDDLIEQTVPAAIRRPGPLGIGAPMTEVEALAKLKGYAAKNQIAKSYIGMGYHDTHVPHVILRNVLENPGWYTAYTPYQPELAQGRLEALLNFQQLTLDLTGMDLASASLLDEATAAAEAMALAKRMAKSKSNLFFVADDVHPQVIDVVKERAVHFGFEVVVGPAGEAVSEEVFGAMFQYPGTTGNVADLRSLIAAVQAQK

SEQ ID NO: 98993 - protein, 213 aa, Unknown
  Bacterial polypetide isolated from the Sargasso Sea
HLEEFAPGHPVFKNEIGLSEQDAVAAAPWGSASILPISYSYISMMGDDGLKLATQVAILNANYIMKRLSEYYPILYKGKNGMVAHEFIIDIRPFKQEINISDEDIAKRLIDYGFHAPTMSFPVPGTLMIEPTESESKEELDRFCEAMISIHGEIEKIRNGSFDKVDNPIKNAPHTVEEISSDEWKHSYTRKEAAYPHSYLLNNKYWSPVSRID

SEQ ID NO: 98994 - protein, 310 aa, Unknown
  Bacterial polypetide isolated from the Sargasso Sea
NSEYEALRKLRAISKKNHVYSNFIGMGYYGTYTPYVILRNILENPGWYTSYTPYQPEVAQGRLEMLLNFQQMIVDFTGMDIANASLLDEGTAAAEAVGLSHRLNKKDSNLVFVSEDCHPQTINVIQTRAEPMGLKVLVGKEDEVLDQLKEDLVCGILQYPGTLGNIKDPSEAISKIHKKNGKAVLACDLLALAKLKTPRELGADIAVGSSQRFGIPMGYGGPHAAFFATKDEYKRSMPGRIVGVSVDRHGNKAYRLSLQTREQHIRRDKATSNICTAQALLAIVSAAYAIYHGPDGIKNISERVSQLAKS

SEQ ID NO: 98995 - protein, 288 aa, Unknown
  Bacterial polypetide isolated from the Sargasso Sea
QLKEDIVCGILQYPGTLGDIKDPSEAISKIHKKNGKAILACDLLALAKLKTPRELGADIAVGSSQRFGIPMGYGGPHAAFFATKDEYKRSMPGRIVGVSVDRHGNKAYRLSLQTREQHIRRDKATSNICTAQALLAIVSAAYAIYHGPDGIKNISERVSQLAKNFADKIKQSGYELYSDYFFDTVTIVTKEKTDQIFKNALVQKVNIRRVNSEMLAVSFDEKKNVYRVNQLLKIFNAAESIKKEDPTVSLPNLPKNLLRTSKYLEHPVFNSYHSETEMLRYLKKLEDK

SEQ ID NO: 98996 - protein, 250 aa, Unknown
  Bacterial polypetide isolated from the Sargasso Sea
FKRKIPGRIIGLTNDSNNNPALRMALQTREQHIRREKATSNICTAQVLLAIISSMYAVYHGPEGLKAISMRIFKLTNQLASSLKAKGFDLTGDCFFDTINFKASGWEKNAEKEKFNFRKFANKSVGISIDETTTKADIIKILKIFKVNELKSDRKTKINPSLERKSSFLSHPVFNRYRSETEILRYIHKLEAKDLSLNTSMIALGSCTMKLNSTTEMESITWPEFSNIHPYAPTNQREGYRILIEELNTH

SEQ ID NO: 98997 - protein, 248 aa, Unknown
  Bacterial polypetide isolated from the Sargasso Sea
MDFSKRHIGPDDSDINKMLSYLGFDSIEHLINATIPDGIQFNDDLDIGKSISEYEFLNTIKRIGKKNQIVKSYIGTGYYGTVTPPVILRNILENPGWYTAYTPYQAEISQGRLEALLNFQTMVTDMTGLDISNASLLDESTAAAEAMVLMYRSLRNRNTFLVSDQCHPQTIDVLKTRSRPIGINLKVLATEEFVFNEETFGCLIQCPTTDGKVFSYKELAKSAHDSGAYIAVATDLLSLAIIAEPGSY

SEQ ID NO: 98998 - protein, 277 aa, Unknown
  Bacterial polypetide isolated from the Sargasso Sea
MVSKNCHPQTIDVLKTRSEPLDIHLVVHDEKELVFNGTEFGMLLQYPHTDGNLCDYTNLINEAKNKNIYTCLATDLLALSILKTPGEMNADAAVGNAQRFGVPLGYGGPHAAFFATTDEFKRKIPGRIIGVSNDSHGNRALRMALQTREQHIRREKATSNICTSQVLLAIMSSMYAVYNGPEKIKHIAHRVNKLCNQLAESLKSSGIDLFHKKFFDTIRFTPKNDWEPLAENAKFNFRKYDDGSVGISIDEETKEHDIFKICKIFDLVKTDLPQIIH

SEQ ID NO: 98999 - protein, 160 aa, Unknown
  Bacterial polypetide isolated from the Sargasso Sea
YTGKNGLVAHECIIDIRPLKADTGISEEDIAKRLIDYGFHAPTMSWPVAGTLMIEPTESEPKAELDRFCEAMISIRMEADRVYKGEWDKADNPLKNSPHPPDDLTDTEWDHCYSQENAFYPLASIRRNKYWPPSARVDNVHGDRNVFCSCPPIENYEGEE

SEQ ID NO: 99000 - protein, 264 aa, Unknown
  Bacterial polypetide isolated from the Sargasso Sea
AGAQGEFAGLLAIKKYHESKNEFSRNICLIPNSAHGTNPASAQMCGMEVSIVKCDDFGNVDLNHLEIKIQEAGNKLAALMITYPSTHGVFEETITDICEKIHNAGGQVYMDGANLNAMVGIAKPGKFGPDVSHINLHKTFCIPHGGGGPGMGPIGVKSHLELFLPGHPIIHNELGLTKLDAVSAAPWGSPSILPISYSYISMMGNEGLKIATQVAILNANYIKEKLSSYFPLLYSGKNGMVAHECIIDIRPIKEELSISEEDVQ

SEQ ID NO: 99001 - protein, 270 aa, Unknown
  Bacterial polypetide isolated from the Sargasso Sea
MECGHFKEENFSKRHIGLNEEDKRNLLKKLGYETMDKFINDVVPQNIKRSAPMKIEKELSEKQLLSKIKEYASLNKTMISMIGQGFYSTHTPSVLLRNILENPSWYTAYTPYQPEISQGRLEALLNFQTMISEITSLPIANASMLDESTAAAEAMTMSFKLSNNKNTVILDKYLHPQTINVIKTRAEPLGINLIISENPEKEKIDNCSCVIFQYPNTEGKIKNLDDEIKIIQNAGSMVILVADLLSLALIKSPGEMGADIAVGSTQRFGV

SEQ ID NO: 99002 - protein, 312 aa, Unknown
  Bacterial polypetide isolated from the Sargasso Sea
RLEMLLNFQQMIVDFTGMDIANASLLDEGTAAAEAMGLSHRLNKSDSNLVFVSQNCQPQTIDVIQTRAEPMGLKVLVGNEDKVLEQLKEDIVCGVLQYPGTLGDIKDPSEAISKIHKKNGKAILVCDLLALSMLKTPRELGADIAVGSSQRFGIPMGYGGPHAAFFATKDEYKRSMPGRIVGVSVDRHGNQAYRLSLQTREQHIRRDKATSNICTAQALLAIVSAAYAIYHGPDGIKSISERVSQLAKNFADKIKQSGYELYSDYFFDTVTIITKEKTDQIFKNALDQKVNIRKVNSEMLSVSFDERKMVTE

SEQ ID NO: 99003 - protein, 306 aa, Unknown
  Bacterial polypetide isolated from the Sargasso Sea
ATSNICTAQALLAIISAAYAIYHGPEGILKIANRTSKLAKIFADGLKSAGYQLHSENFFDTVTIRTNEKTDTINNKALSEKINLRVVDKNTLSVAFDEVKRVDHVNTLLKIFGVKKIFNNSDTVELTNLPPNLLRTSKYLTHPIFNKYHSETEMLRYLKKLEDCDIALNRSMIALGSCTMKLNATAELIPVTWKEFSLPHPFVPQDQMKGYKVLFNDLVNDLKEITGFDAVSLQPNSGAQGEYSGLMTIRKFHLNNNQKNRNVCLIPESAHGTNPASAQMCGMKVVVINCDEEGNVDLEDLKDKVN

SEQ ID NO: 99004 - protein, 202 aa, Unknown
  Bacterial polypetide isolated from the Sargasso Sea
VTYPSTHGVFEEKITDICDLIHKHGGQVYMDGANLNALVGIAKPGNFGPDVCHINLHKTFCIPHGGGGPGMGPIACKKHLQVYLPNHPVVKDCGPATGIGAVSAAPWGSSSILSISWMYIKMMGSQGLKLATKVAILNANYIAHRLKNHFPILYKGTNGNVAHECIIDIRSIKSETGVTEEDIAKRLIDYGFHAPTMSWPVA

SEQ ID NO: 99005 - protein, 281 aa, Unknown
  Bacterial polypetide isolated from the Sargasso Sea
HAKELADKISKLGHEIVTNDNSFFDTVVIKLSNMSIDSLKDKALKHNFNLMYHENGLIGISLDEKTDYNEVEALANLFDVSNDSQNTYNIFKPNRTGDILTHPIFHSINSETEMLRYINKLEKRDLSLNYSMIPLGSCTMKLNATVEMIPISWPEFNSIHPFAPLNQAKGYKKIINELEEMLYKVTGFDAVSFQPNSGAQGEYAGLLSIREYHKANNSNRDICLIPESAHGTNPASAIMAGLKVVIVQCDDHGNIDFKDLSKKVDEAGDRLSSLMVTYPST

SEQ ID NO: 99006 - protein, 330 aa, Unknown
  Bacterial polypetide isolated from the Sargasso Sea
RTSKYLEHPVFNSYHSETEMLRYLKRLEDKDIALNRTMIALGSCTMKLNAAAEMIPISWKEFAEPHPFVPIEQMEGFRDLFTDLKNWLRSITGFSGVSLQPNAGAQGEYAGLMVIRKYHLDRGEANRNICLIPSSAHGTNPASAQMVGMKVVVVNCDKEGNVDFEDLKKKAEQHSENLGALMVTYPSTHGVFEEKIIDICELVHKHGGQVYMDGANLNALVGVAKPGNFGPDVCHINLHKTFCIPHGGGGPGMGPIACKKHLQVYLPNHPVIKDCGPTTGIGAVSAAPWGSSSILSISWMYIKMMGSAGLKLASQVAILNANYIAHRLKD

SEQ ID NO: 99007 - protein, 274 aa, Unknown
  Bacterial polypetide isolated from the Sargasso Sea
IALDEVTRPDDLDDLFSVFNKGSEPAFNACSLAEQESLPVLPAWADRASPYLEHEVFNKYHSETEMLRYLHKLESKDLSLNTSMIPLGSCTMKLNATSQMAGVTSPEAGKLHPFAPEDQVEGYKIIFSELEQWLAEITGFSATSLQPNSGAQGEYAGLLVIRAYHEDRKDHHRNVCLIPASAHGTNPASAVMAGMKVVVVKSTDDGQIDLEDLSKKASDHSENLAALMVTYPSTHGVFEEGIVEVCSIIHEHGGLVYLDGANLNAQVGLARPGD

SEQ ID NO: 99008 - protein, 322 aa, Unknown
  Bacterial polypetide isolated from the Sargasso Sea
TMKLNATSEMIPVSWPEFSNIHPFAPKDQLSGYSKLVSEMEEMLALLTGYSGISLQPNAGSQGEYAGLLAIDAYHQNNNEAHRDICLIPKSAHGTNPASAQMVGLKVVPVDCDEEGNIDINDLKEKASTHSDNLSSLMITYPSTHGVFETSVTEVCEIIHSHGAFVYIDGANFNAMVGLCYPGSFGGDVSHLNLHKTFCIPHGGGGPGIGPIGVVEKLKEFMPSHHNENKAVGPVSGTDWGSASILPISWMYMKMMGTQGLLEATQNAILNTNYIATKLKGHYEILYKGKDGLVAHECIIDIRPLKETAGIEVEDVAKRLID

SEQ ID NO: 99009 - protein, 287 aa, Unknown
  Bacterial polypetide isolated from the Sargasso Sea
TGFSGVSLQPNAGAQGEYAGLMVIRKYHLDRDDANRNICLIPSSAHGTNPASALMAGMKVVVVNCDKEGNVDFDDLKKKTEQHSENLGALMVTYPSTHGVFEEKISDICELVHKHGGQVYMDGANLNALVGLAKPGNFGPDVCHINLHKTFCIPHGGGGPGMGPIACKRHLQVYLPNHPVIKDCGPTSGIGAVSAAPWGSSSILSISWMYIKMMGSEGLKLATQVAILNANYIANRLKNHFPILYKGSNGNVAHECIIDIRNIKSETGITEEDIAKRLIDYGFHAPT

SEQ ID NO: 99010 - protein, 289 aa, Unknown
  Bacterial polypetide isolated from the Sargasso Sea
RQAKPLAWKRPKSEREVLYHLRQTASKNEVFNSLIGQGYHGTVTPPAIQRNILENPAWYTAYTPYQPEIAQGRLEALLNYQTMVSDLTGLDIANASLLDEATACAESMVMAQRVSKNQHVKFFVDENCHPQNIAVMKTRAEPIGIDILVGDPKNIGENTDLFGGIFQFPGTYGHINDFSRQIKFLHELKGIGVICADPLSLTLLKEPGAMGADIAVGSTQRFGVPVGFGGPHAAYIATRDVYKRSMPGRIVGVSVDSRGNRAYRLALQTREQHIRREKATSNVCTAQAL

SEQ ID NO: 99011 - protein, 323 aa, Unknown
  Bacterial polypetide isolated from the Sargasso Sea
LEDKDIAFNRTMIALGSCTMKLNATAEMIPISWRELAEPHPFVPVEQMEGYREMFTDLKNWLRSITGFSGVSLQPNAGAQGEYAGLMVIRKYHLDRGDENRNICLIPSSAHGTNPASAQMVGMKVVVVDCDKEGNVDFEDLKKKAEMHSENLGALMVTYPSTHGVFEEKIKDICEIIHQHGGQVYMDGANLNALVGVAKPGNFGPDVCHINLHKTFCIPHGGGGPGMGPIACKRHLQVYLPNHPVVKDCGPASGIGAVSAAPWGSSSILSISWMYIKMMGSEGVKLATQIAILNANYIANRLKDHYPILYKGSNGNVAHEMYY

SEQ ID NO: 99012 - protein, 265 aa, Unknown
  Bacterial polypetide isolated from the Sargasso Sea
DVCHINLHKTFCIPHGGGGPGMGPIACKRHLEIYLPNHPIVKDCGPATGIGPVSSAPWGSSSILSISWMYIKMMGSEGLKLATQIAILNANYLANRLKDHYPILYKGTNGNVAHECIIDIRSIKSETGVTEEDIAKRLIDFGFHAPTMSWPVAGTMMIEPTESESLAEIDRFCDTLIKIKSEINKIKSGEYDKVDNPLKNAPHTDLELTSDIWDHKYSREEAAYPAKFLRSNKFWPPVARVDNVYGDKNIFCTCPSMDEFEEDAA

SEQ ID NO: 99013 - protein, 264 aa, Unknown
  Bacterial polypetide isolated from the Sargasso Sea
MHPFAPVAQAAGYQRLAEQLEAWLAALTGFAAVSLQPNAGSQGEYAGLLVIRAWHRSRGDDHRDVCLIPTSAHGTNPASAVMAGLKVVAVACDADGNIDQQDLAARAAEHADRLAALMVTYPSTHGVFETGIRRICELVHRHGGQVYLDGANLNAQVGLCRPGAFGADVCHLNLHKTFCIPHGGGGPGVGPIGVAAHLAPFLPGHPLQASPDQAIGPVSAAALGSASILPISWMYLRMMGPEALRQATAVALLSANYLALRLDP

SEQ ID NO: 99014 - protein, 303 aa, Unknown
  Bacterial polypetide isolated from the Sargasso Sea
LNFQQMIIDFTGMDIANASLLDEGTAAAEAMGLSHRLNKKDSDLVFISKDCHPQTIEVVKTRAEPLGLKVLIGDDEELNNIKNDIVCGILQYPGTMGDIKDPSENISKIRKKNGKAILACDLLSLAKLKTPAELGADIAIGSSQRFGIPLGYGGPHAAFFATKDEFKRSMPGRIIGVSVDRHGNKAYRLALQTREQHIRRDKATSNICTAQALLAIVSAAYAIYHGPKGIRTISERVSQLAKNFADKLKQSGYELYSDYFFDTVTVLTKDKTEQIFQNALSQKVNIRKVNSEMLAVSFDEKKN

SEQ ID NO: 99015 - protein, 281 aa, Unknown
  Bacterial polypetide isolated from the Sargasso Sea
NLNALVGVAKPGKFGPDVCHINLHKTFCIPHGGGGPGMGPIACAKHLADFLPTHEIIKEAGPENGMGAVSAAPWGSSSILPISWMYIKMMGAEGLKKASQVSILNANYISKKLSKDYKVLYTGKNGNVAHECIIDIRPIKASSGISEEDLAKRLIDFGYHAPTMSWPVAGTIMIEPTESENLQEIDKFCNALIKIKKEINLVESSKFDKIDNPLKNAPHTYVELASSEWKHAYSREEAAFPTEYVKNNKYWAPVARVDNVFGDRNLVCSCPSMDEYKDEAA

SEQ ID NO: 99016 - protein, 289 aa, Unknown
  Bacterial polypetide isolated from the Sargasso Sea
LKNWLRTITGFSGVSLQPNAGAQGEFAGLMVIRKFHEKNDQKKRNVCLIPSSAHGTNPASAQMAGMKVVVVNCDSYGNVDYEDLKKKAEEYSDTLSTLMVTYPSTHGVFEEKITDICDLIHKHGGQVYMDGANLNALVGIAKPGNFGPDVCHINLHKTFCIPHGGGGPGMGPIACKKHLEIYLPSHPVIDCGTPSGIGAISAAPWGSSSILSISWMYIKMMGSEGLKLATQNAILNANYIAHKLKDHFPILYKGKNGNVAHECIIDIRKIKSDTGIKEEDIAKRLIDFG

SEQ ID NO: 99017 - protein, 275 aa, Unknown
  Bacterial polypetide isolated from the Sargasso Sea
LRNILENPGWYTSYTPYQPEVAQGRLEMLLNFQQMIVDFTGMDIANASLLDEGTAAAEAMGLSHRLNKKDSNLVFVSENCHPQTIDVIQTRAEPMGLKVLVGDEDKVLDQLKEDLVCGILQYPGTLGDIKDPSEAISKIHKKNGKAILACDLLALAKLKTPRELGADIAVGSSQRFGIPMGYGGPHAAFFATKDEYKRSMPGRIVGVSVDRHGNKAYRLSLQTREQHIRRDKATSNICTAQALLAIVSAAYAIYHGPEGIRIIAERVSQLAKNLQ

SEQ ID NO: 99018 - protein, 284 aa, Unknown
  Bacterial polypetide isolated from the Sargasso Sea
MPKILLRTSTYLDHPVFNSYHSETAMLRYLKKLEDSDIALNRSMIALGSCTMKLNSVSEMIPVTWKEFSHPHPYSPIEQMDGYRELFTDLKNWLRTITGFSGVSLQPNAGAQGEFAGLMVIRKFHEKNDQKKRNICLIPSSAHGTNPASAQMAGMKVVVVNCDSYGNVDYEDLKKKVEEHSDTLSTLMVTYPSTHGVFEEKITDICDLVHKHGGQVYMDGANLNALVGIAKPGNFGPDVCHINLHKTFCIPHGGGGPGMGPIACKKHLEIYLPSHPVIDCGTPS

SEQ ID NO: 99019 - protein, 312 aa, Unknown
  Bacterial polypetide isolated from the Sargasso Sea
IFTPFAPLDQAQGYMELISDLEEWLLECTGYDAISLQPNAGSQGEFAGLLAIKRYHEAQGDESRDVCLIPSSAHGTNAASAVMAGLRVVVVDCAENGDISLQDLREKIANHKSELAAIMVTYPSTHGVFEVGISEICHLVHEAGGQVYVDGANLNALVGLAAPGAFGADVSHLNLHKTFCIPHGGGGPGIGPVATKEHLAAFLPNHPLIPEAGPASGSGAIAAAPWGSAGILPIPWMYIAMMGADGLRQATSVAILNANYVASRLQDSYPVLFRGQNGLIAHECILDLRAHSEFVSVDDVAKRLIDYGSTLR

SEQ ID NO: 99020 - protein, 262 aa, Unknown
  Bacterial polypetide isolated from the Sargasso Sea
MIKDFPNRHIGPRDDQIQEMLSELGFSSLEDLSNKVIPPNILLNSKMDLPNKMSEPETINRLRELANENSVYNSFIGMGYYGTFLPAVIQRNILENPGWYTQYTPYQAEISQGRLEALLNFQTMVSDITGLPMANASLLDEATAAAEAMLMFFNTTKNNEKGVFLVSESCHPQTIDVLKTRAEPLGITLKVIDITTQDFNQDVFGAIIQYPDTNGSIQDKTELCKAAHHNQAHICIATDLLALALLKSPGEMGADVAVGSTQ

SEQ ID NO: 99021 - protein, 293 aa, Unknown
  Bacterial polypetide isolated from the Sargasso Sea
MLNIVGSKSLDDLIEKTVPDHIIFKDKLKLRPGMSEEFNKTNTQLLSLKNNFKKTYIGMGYYNTTTPSVILRNIFENPGWYTAYTPYQPEVSQGRLEMLMNFQQMIIDLTGMDIANASLLDESTAAAEAMMMAFKVKKSLKFTFCVQNTCHPQTLSVLKTRAEPLGIKIIFDNPNEDTFGCLIQNPDTYGEIADLDKLIKLNKQKQIISIIAADIMSLIIIKSPRSFGADIVVGSSQRFGVPMGLGGPHAAFFATLDEYKRMMPGRLIGVSVDRTNKRSYRMALQTREQHIRR

SEQ ID NO: 99022 - protein, 294 aa, Unknown
  Bacterial polypetide isolated from the Sargasso Sea
LSRLVAALATAAGQTSPSLPLAPVEELGGVPERVDPWLSQSVFHDHRSETELMRYIQRLVSRDLSLVHGMIPLGSCTMKLNAAAELLPVSWPAFAGLHPFAPVAQAAGYQRLAEQLEAWLAALTGFAAVSLQPNAGSQGEYAGLLVIRAWHRSRGDDHRDVCLIPTSAHGTNPASAVMAGLKVVAVACDAEGNIDQQDLAARAAEHADRLAALMVTYPSTHGVFETGIRGICELVHRHGGQVYLDGANLNAQVGLCRPGAFGADVCHLNLHKTFCIPHGGGGPGVGPIGVAAHL

SEQ ID NO: 99023 - protein, 270 aa, Unknown
  Bacterial polypetide isolated from the Sargasso Sea
DINDLKDKAEKYSKDLASLMVTYPSTHGVFEEKIMEICDIIHKQGGQVYMDGANLNALVGVAKPGKFGPDVCHINLHKTFCIPHGGGGPGMGPIACAKHLAEFLPTHKIIKESGPKNGMGAVSAAPWGSSSILPISWMYIKMMGAEGLKKASQVSILNANYISKKLSNDYKVLYTGKNGNVAHECIIDIRPIKASSGISEEDLAKRLIDFGYHAPTMSWPVAGTIMIEPTESENLEEIDKFCNALIKIKKEIDLVETSKFDKIDNPLKNA

SEQ ID NO: 99024 - protein, 289 aa, Unknown
  Bacterial polypetide isolated from the Sargasso Sea
MMVIRSYFKSINQTNRNICIIPASAHGTNPASAVMAGMKVVVVGTDKFGNIDEDDLIKKAEENSENLAALMITYPSTHGVFESSIKRITQTIHANGGQVYMDGANMNAQVGLTNPYSIGADVCHLNLHKTFSIPHGGGGPGVGPICVAKHLVDFLPQTDRNITKKHGVKAISAAPWGSAMACLISYGYISMMGPDGLKKATEIAILNANYIKKRIEKDYKILYQGEKGRSAHELIIDCRDYKDEFGIDIMDIAKRLIDYGFHAPTVSFPVPGTMMIEPTESESLEEIDR

SEQ ID NO: 99025 - protein, 294 aa, Unknown
  Bacterial polypetide isolated from the Sargasso Sea
SCTMKLNATSEMIPVGWEEFSSIHPYAPEHQVKGYLQLIDNLEQMLEKITGYSAISLQPNAGSQGEYAGLLAIDAFHKSNGHHNRKVCLIPESAHGTNPASAQMAGMKVVPVKCDKSGNIDLDDLQCKANNNSEELAGIMITYPSTHGVYEETVTEVCNVIHSHGGKVYIDGANLNAMVSLCKPGLFGGDVSHLNLHKTFCIPHGGGGPGVGPIGVVEELSDYLPSDPLRYSDENTTGPISASNFGSASILPISWMYIQMMGSQALRLATQIAILSANYIAHKLKGHYAILYTG

SEQ ID NO: 99026 - protein, 275 aa, Unknown
  Bacterial polypetide isolated from the Sargasso Sea
NKINTQLLSLKNNFKKTYIGMGYYNTITPSVILRNILENPGWYTAYTPYQPEVSQGRLEMLMNFQQMIIDLTGMDIANASLLDESTAAAEAMMMAFKIKKSAKFTFCVQNKCHPQTLSVLKTRAKPLGIKIIFDNPDDDTFGCLIQNPDTYGEIANLNDLININKSHDALSIIAADIMSLVVMKSPKDFGADIVVGSTQRFGVPMGLGGPHAAYFATLDEYKRMIPGRLIGVSVDRTNKRSYRMALQTREQHIRREKATSNICTAQALLAIISAS

SEQ ID NO: 99027 - protein, 272 aa, Unknown
  Bacterial polypetide isolated from the Sargasso Sea
PASATMCGMKVIVVNCDSSGNIDIADLREKTDKYKKALAAIMVTYPSTHGVFEDGIKEVCEIVHNAGGQVYVDGANLNAMVGICQPGRFGADVSHLNLHKTFCIPHGGGGPGVGPVAVAEHLAPFLPGHRFGHSDNYKVGPISAAPWGSAGILPISWVYITLMGARGMLSASQIAILNANYIAKKIKKHFPVLYTGENGCVAHECIIDLRKIKETTGIDVEDVAKRLIDFGFHAPTMSFPVAGTLMIEPTESESKAELDRFLEAMATIRNEI

SEQ ID NO: 99028 - protein, 301 aa, Unknown
  Bacterial polypetide isolated from the Sargasso Sea
FVPIEQMEGYRAMFTDLKNWLRSITGFSGVSLQPNAGAQGEYAGLMVIRKYHLDRGEENRNICLIPSSAHGTNPASAQMVGMKVVVVDCDKEGNVDFEDLKKKAETHSENLGALMVTYPSTHGVFEEKITDICKLIHEHGGQVYMDGANLNALVGIARPGNFGPDVCHINLHKTFCIPHGGGGPGMGPIACKKHLQVYLPNHPVVKDCGPATGIGSVSAAPWGSSSILSISWMYIKMMGSQGLKLATQVAILNANYIAHRLKNHYPILYKGSNGNVAHECIIDIRSIKSETGITEEDIAKR

SEQ ID NO: 99029 - protein, 284 aa, Unknown
  Bacterial polypetide isolated from the Sargasso Sea
DTVTVHCASAPAVHRAAAVAGFNLRVLPDGAAPADATGFGISLDELSDQHELQALLVLLAEACGQATPQLEAEQPPSLSLPQRSQPWLSQPVFYQYRSESELLRYIQRLVSRDLSLVHGMIPLGSCTMKLNAAAELQPVSWPAFAALHPFAPADQARGYRRLADDLEQWLAALTGFAAVSLQPNAGSQGEYAGLLVIRAWHRSRGEAHRDICLIPTSAHGTNPASAVMAGLKVVAVACDDQGNIDQQDLAAKAAEHADRLAALMVTYPSTHGVFETGIREICSV

SEQ ID NO: 99030 - protein, 281 aa, Unknown
  Bacterial polypetide isolated from the Sargasso Sea
KLIKIYNKAISEKVNLRKVNNKTLSVAFDEAKRLDHVNLLLKIFGIDKDVTKTTDVSLDNLPKNLLRKSKYLTHPVFNKYHSETEMMRYLKRLEDSDIALNRSMIALGSCTMKLNSTAEMIPISWKEFALPHPFVPVDQMSGYTILFNDLIKDLKEITGFDAVSLQPNSGAQGEYAGLMTIRAFHKSNNQANRNVCLIPSSAHGTNPASAQMSGMKVVVVNCDNNGNIDLEDLKNKSKKYSKDLAALMVTYPSTHGVFEEKITEICEIVHSNGGQVYMDGA

SEQ ID NO: 99031 - protein, 307 aa, Unknown
  Bacterial polypetide isolated from the Sargasso Sea
STYLDHPVFNSYHSETEMLRYLKRLEDCDIALNRSMIALGSCTMKLNSVSEMIPVTWKEFSQPHPFSPIEQMDGYRELFTDLKNWLRIITGFSGVSLQPNAGAQGEFAGLMVIRKFHEKNGQKNRNICLIPSSAHGTNPASAQMVGMKVIVVDCDIHGNVDYNDLKKKSEKYSDNLAALMVTYPSTHGVFEEKITDICELIHKHGGQVYMDGANLNALVGIAKPGNFGPDVCHINLHKTFCIPHGGGGPGMGPIACKKHLEVYLPNHPVINDCGPATGIGAVSAAPWGSSSILSISWMYIKMMGSEG

SEQ ID NO: 99032 - protein, 256 aa, Unknown
  Bacterial polypetide isolated from the Sargasso Sea
KNWLRSITGFSGVSLQPNAGAQGEYAGLMVIRKYHLDRDDAHRNICLIPSSAHGTNPASAQMVGMKVVVVNCDKEGNVDFDDLKKKVEQHSENLAALMVTYPSTHGVFEEKITDICELVHKHGGQVYMDGANLNALVGVAKPGNFGPDVCHINLHKTFCIPHGGGGPGMGPIACKKHLQVYLPNHPVIKDCGPTSGIGAVSAAPWGSSSILSISWMYIKMMGSEGLKLATQVAILNANYIAHRLKDHFPILFKGAN

SEQ ID NO: 99033 - protein, 280 aa, Unknown
  Bacterial polypetide isolated from the Sargasso Sea
MLRYLKKLEDCDIALNRSMIALGSCTMKLNATAELIPITWKEFSLPHPFVPTNQMEGYKILFNDLINDLKEITGYDAVSLQPNSGAQGEYAGLMTIRKFHKNNKQENRNVCLIPDSAHGTNPASAQMCGMKVVVVNCDEDGNVDIDDLKNKAEKHSKDLAALMVTYPSTHGVFEEKIMEICDVIHKHGGQVYMDGANLNALVGVAKPGKFGPDVCHINLHKTFCIPHGGGGPGMGPIACAKHLADFLPTHEIIKEAGPMNGMGAVSAAPWGSSSILPISW

SEQ ID NO: 99034 - protein, 205 aa, Unknown
  Bacterial polypetide isolated from the Sargasso Sea
MKVVVVDCDKEGNVDFEDLKKKAELYSDNLGALMVTYPSTHGVFEEKIKDICKVIHEHGGQVYMDGANLNALVGVAKPGNFGPDVCHINLHKTFCIPHGGGGPGMGPIACKRHLQVYLPNHPVVKDCGPASGIGAVSAAPWGSSSILSISWMYIKMMGSEGVKLATQIAILNANYIANRLKDHYPILYKGSNGNVAHECIIDIRS

SEQ ID NO: 99035 - protein, 275 aa, Unknown
  Bacterial polypetide isolated from the Sargasso Sea
AAFFATKDEYKRSMPGRIFGVSVDRHGNKAYRLSLQTREQHIRRDKATSNICTAQALLAIVSAAYAIYHGPDGIKNISERVSQLAKNFGDKIKQSGYELYSDCFFDTVTIITKDKTDQIFKNALDQKVNIRKVNSEMLSVSFDEKKNVYRVNQLLKIFNAAESIKKEDPTVSLPNLPKNLLRTSKYLEHPVFNLYHSETEMLRYLKKLEDKDIALNRTMIALGSCTMKLNATAEMIPISWRELAEPHPFVPVEQMEGYRELFTDLKNWLRSITGF

SEQ ID NO: 99036 - protein, 303 aa, Unknown
  Bacterial polypetide isolated from the Sargasso Sea
ESISKIHKKNGKAILACDLLSLAKLKTPRELGADIAVGSSQRFGIPMGYGGPHAAFFATKDEYKRSLPGRLVGVSVDRHGNKAYRLSLQTREQHIRRDKATSNICTAQALLAIVSAAYAIYHGPEGIKNISERVSQLAKNFADKIKQSGYELYSDYFFDTVTIITKDKTDQIFENALNQKVNIRKVNSEMLSVSFDERKNVYRVNQLLKIFNAAESIKKEDPVANLVNLPKNLIRTSKYLEHPVFNLYHSETEMLRYLKKLEDKDIALNRTMIALGSCTMKLNATAGMIPISWRELAEPHPFV

SEQ ID NO: 99037 - protein, 159 aa, Unknown
  Bacterial polypetide isolated from the Sargasso Sea
GSNGNVAHECIIDIINIKSETGVTEEDIAKRLIDFGFHAPTMSWPVAGTMMIEPTESEGLSELDRFCDTLIKIKQEIEKIKSGEFDKIDNPIKNAPHTDSELASDNWTHNYSREEAAYPAKFLRSNKFWPPVARVDNVYGDKNIFCTCPSMDEFKEDAA

SEQ ID NO: 99038 - protein, 152 aa, Unknown
  Bacterial polypetide isolated from the Sargasso Sea
AHECIIDIRSLKDETGISEEDIAKRLIDYGFHAPTMSWPVAGTLMIEPTESEPKAELDRFCEAMISIRREADRVYKGEWDKTDNPLKNSPHPAEDLTDPQWNHCYSQETAFYPLASIRQKKYWPPSARVDNVHGDRNVFCACPPLESYEDEE

SEQ ID NO: 99039 - protein, 264 aa, Unknown
  Bacterial polypetide isolated from the Sargasso Sea
GNAQRFGVPMGNGGPHAAFFSTSETFKRKIPGRIIGLTNDSNQKPALRMALQTREQHIRREKATSNICTAQVLLAIMSGMFAVYHGPEGIKKIAKRVSSLTNQLGISLKKAGIKLNNNSFFDTINFNAKGWQDKAKKKKLNFRIHSDKTIGISIDETTTESDIIEILNVFNVKTLEKESKSNLPSSIFRKSSFLTHPVFNSYRSETEMLRYIHKLETKDLSLNTSMIALGSCTMKLNSTTEMEGISWPEISNIHPFAPENQKYG

SEQ ID NO: 99040 - protein, 114 aa, Unknown
  Bacterial polypetide isolated from the Sargasso Sea
VAGTMMIEPTESESLSELDRFCDTLISIKSEIDMIKSGKFDKVDNPIKNAPHTDIELASDEWNHKYSREQAAYPAKFLKANKFWPPVARVDNVYGDKNIFCTCPSMDEFKEDAA

SEQ ID NO: 99041 - protein, 167 aa, Unknown
  Bacterial polypetide isolated from the Sargasso Sea
MLPNSEKDFLKRHIGPSKEDQSKMLKELNYKSLDDLIDNTVPEKIQFKGELNIGESNSEYEALRKLRSISKKNQVYSNFIGMGYYGTYTPYVILRNILENPGWYTSYTPYQPEVAQGRLEMLLNFQQVIVDFTGMDIANASLLDEGTAAAEAMGLSHRLNKKDSNLV

SEQ ID NO: 99042 - protein, 279 aa, Unknown
  Bacterial polypetide isolated from the Sargasso Sea
PLGIDVIVGPIEEAKDADCYGAFIQYPGSDGSIQDHSKIVDSIHGKKGIAVFASDLLALCLLKPPGEMGADIVVGSSQRFGVPLGCGGPHAAFMSVKEDLKRSLPGRIVGASVDSSGDLAYRLALQTREQHIRREKATSNICTAQALLAIMAGFYSLYHGKEGLIKIAQKVNNLTALLKENLSAKGLNSKNEDFFDTLVIETGSHTEAIYLRARDNGINLRLIDSTSIGISLDETTSMDDLEVLMKIFTDSNDQLRDIKSQSIPKNIIRKSSFLDHNIF

SEQ ID NO: 99043 - protein, 310 aa, Unknown
  Bacterial polypetide isolated from the Sargasso Sea
ILDKKLKLLGLDQLNDTYFDTLHFKFPIEKVREAALQNKVNFNFINDNEFSISLNEATEIEDVNKIIDILSSINRKEIDFDISKINFNSIPQSLNRKSSFLDEKVFNSYHSETSMMRYIKSLERKDLALNHSMIALGSCTMKLNAAAEMLPLSSARWNNIHPFAPNNQVDGYNIMLNKLELQLNEITGFSGTSLQPNSGAQGEYAGLMVIRSYFKSISQTNRNICIIPSSAHGTNPASAVMAGMKVVVVGTDKFGNIDEDDLVKKAEEHSENLAALMITYPSTHGVFESSIKRITQTIHDNGGQVYMDGA

SEQ ID NO: 99044 - protein, 257 aa, Unknown
  Bacterial polypetide isolated from the Sargasso Sea
HKTFCIPHGGGGPGMGPIACKKHLEIYLPSHPVIDCGPPSGIGAVSSAPWGSSSILSISWMYIKMMGSEGLKLATQNAILNANYIAYKLKDHFPILYKGKNGNVAHECIIDIRKIKSETGITEEDIAKRLIDFGFHAPTMSWPVPGTMMIEPTESESLSEINRFCASLIKIKEEINKVKNGKFDKDDNPLKNAPHTHVELTANEWKHKYDRESAAYPSATLKSYKYWPPVARVDNVYGDKNLFCSCPSMDEYKESAA

SEQ ID NO: 99045 - protein, 210 aa, Unknown
  Bacterial polypetide isolated from the Sargasso Sea
HGRSSSILSISCMYIKMMGSEGLKLATQNAILNANYITHKLKDHFPILYKGKNGNVAHECIIDIRKIKSETGITEEDIAKRLIDFGFHAPTMSWPVPGTMMIEPTESESLSEINRFCDSLIKIKEEINKVKNGKFDKVDNPLKNAPHTHVELVANEWKHKYDRESAAYPSATLKSYKYWPPVARVDNVYGDKNLFCSCPSMDEYKKESAA

SEQ ID NO: 99046 - protein, 191 aa, Unknown
  Bacterial polypetide isolated from the Sargasso Sea
GSEGLKLATQIAILNANYIAHRLKNHFPILYKGSKGNVAHECIIDIRTIKNETGITEEDIAKRLIDFGFHAPTMSWPVPGTMMIEPTESESLKELDRFCDTLIKIKSEIDNIKSGKFDKVDNPIKNAPHTDLELASNEWNHKYTREEAAYPSEFLKSNKFWPPVARVDNVYGDKNLFCTCPSMDEFKEDAA

SEQ ID NO: 99047 - protein, 214 aa, Unknown
  Bacterial polypetide isolated from the Sargasso Sea
MLHNSEKDFIKRHIGPSEDDQSKMLKKLNYKSLDDLINNTVPEKIQFKGELNIGESNSEYEALRKLKAISKKNEIYSNFIGMGYYGTYTPYVILRNILENPGWYTSYTPYQPEVAQGRLEMLLNFQQMIVDFTGMDIANASLLDEGTAAAEAMGLSYRLDKSDSNLVFVSENCHPQTIEVIRTRAEPMGLKVLVGNEDKVLEQLKEDIVCGILQ

SEQ ID NO: 99048 - protein, 283 aa, Unknown
  Bacterial polypetide isolated from the Sargasso Sea
NQVIPEDIQLKDKSSEILPQGCSEIEALKELEEIANKNTKMRSLIGLGYYDNHMPKVIQRHVLENPRWYTSYTPYQAEIAQGRLEALFNFQTIVCELTGFPVANASLLDEGTAAAEAMAMSFSARKNKSSKVYLVESNVFDHTFNVLQTRAKPLGISLKRFTLSNLPSHDDVFGMLLQLPGKNGQLYDPTFLISQAHRSEIIVTACIDPLAQVLIKPISEFGVDVAVGSMQRFGVPMGFGGPHAAYFACSEKYKRLIPGRIVGQTLSKNGEKSLRLALQTREQ

SEQ ID NO: 99049 - protein, 239 aa, Unknown
  Bacterial polypetide isolated from the Sargasso Sea
GPICVKKQLAPFMPNHAVVKIEGTGANNGAVSAAPFGSAGILPISWMYIKMMGGDGLRQATEMAILSANYMAKKLGDLFPVLYVGSNGRVAHECIIDMRPLKEKTGVTEMDIAKRLMDYGFHAPTMSFPVAGTLMIEPTESESKVELDKFITAMTSIRNEIAKVEAGEWTADNNPLHFAPHTMEDIFDPSWDRPYERQYAAFPAQYVAENKFWPTVTRIDDVYGDRNLMCACPSPEDYR

SEQ ID NO: 99050 - protein, 128 aa, Unknown
  Bacterial polypetide isolated from the Sargasso Sea
VVVAADLLALTVLTPPGDWGADVAIGNTQRFGVPMGFGGPHAAYLAVRDEFKRQMPGRLVGVTVDAQGKPALRLALQTREQHIRREKATSNVCTAQALLAIMASMYAVYHGPHGLKTIALRVNRIAAL

SEQ ID NO: 99051 - protein, 137 aa, Unknown
  Bacterial polypetide isolated from the Sargasso Sea
ITEEDIAKRLIDFGFHAPTMSWPVPGTMMIEPTESESLNEINRFCDTLIKIKKEIDKIKNGEFDKLDNPIKNAPHTDLELASNEWKHKYSREEAAYPSQFLKSNKFWPPVSRVDNVYGDKNLFCTCPSMDEFKEDAA

SEQ ID NO: 99052 - protein, 252 aa, Unknown
  Bacterial polypetide isolated from the Sargasso Sea
MLPNSEKDFLKRHIGPSKEDQSKMLNELNYHSLNDLIDNTVPEKIKFKGELNIGESNSEYEALRKLRTISKKNQVYSNFIGMGYYGTYTPYVILRNILENPGWYTSYTPYQPEVAQGRLEMLLNFQQMIVDFTGMDIANASLLDEGTAAAEAMGLSHRLNKKDSNLVFVSENCHPQTINVIQTRAEPMGLKVLVGKEDEVLDQLKEDLVCGILPYPGTLGDIKDPSEAISRIHKMNGKAVLACDLVALAKLK

SEQ ID NO: 99053 - protein, 252 aa, Unknown
  Bacterial polypetide isolated from the Sargasso Sea
LKTIIGKDSDLENISEDLACGILQYPGTLGDIKDPSESISRIHKRNGKAILACDLLALAKLKTPGELGADIAIGSSQRFGIPMGYGGPHAAFFATKDEYKRSMPGRIVGVSVDRNGNKAYRLSLQTREQHIRRDKATSNICTAQALLAIVSAAYAIYHGPKGIKTISERVSQLAKNFADKLKQSGYELYSDYFFDTVTIKTNEKTDQIFNNALSQKVNIRKVNSKMLAVSFDEKKNVYRANQLLKIFNCAES

SEQ ID NO: 99054 - protein, 254 aa, Unknown
  Bacterial polypetide isolated from the Sargasso Sea
MLKELGCNNLDELIEKTVPKKILLKENLSIGEPNSEYKALRKLRDISQKNKIYSSFMGMGYYGNYTPYVILRNILENPGWYTSYTPYQPEVAQGRLEMLLNFQQMVIDFTGMDIANASLLDEGTAAAEAMGLSYRICKKDTKKVFVSKNCHPQTIDVIKTRAEPLGLEIIVGDEDKDINENIVCGIIQYPGTLGDIKDPSEAISKIHKQNGKAVLACDLLALAKIKTPAELGADIAVGSTQRFGIPMGYGGPHA

SEQ ID NO: 99055 - protein, 258 aa, Unknown
  Bacterial polypetide isolated from the Sargasso Sea
VLVGNEDKVLEQLKEDIVCGVLQYPGTLGDIKDPSEAISKIHKKNGKAILVCDLLALSMLKTPRELGADIAVGSSQRFGIPMGYGGPHAAFFATKDEYKRSMPGRIVGVSVDRHGNQAYRLSLQTREQHIRRDKATSNICTAQALLAIVSAAYAIYHGPDGIKSISERVSQLAKNFADKIKQSGYELYSDYFFDTVTIITKEKTDQIFKNSLDQKVNIRKVNSEMLSVSFDERKNVYRVNQLLKIFNAAESIKKEDPT

SEQ ID NO: 99056 - protein, 289 aa, Unknown
  Bacterial polypetide isolated from the Sargasso Sea
TNLIKKAKQSKIYTCLATDLLALSILKTPAEMGADAAVGNTQRFGVPMGYGGPHAAFFATSENFKRKIPGRIIGVSKDSHGAKALRMALQTREQHIRREKATSNICTAQVLLAIMSSMYAVYHGPKNIISIANRVQSLCSNLATSLNHAGIKILHNQFFDTIRIFPTENWEIEAENEKFNFRKFEDGSVGISLDESTTEENILKICKIFSASYLSGKSVFSLAEEMKRGTAFLDHEVFNKYHSETEMLRYIHKLEVKDLSLNNSMIPLGSCTMKLNATTEMVPVTWQNF

SEQ ID NO: 99057 - protein, 266 aa, Unknown
  Bacterial polypetide isolated from the Sargasso Sea
MLRNSKYLEHPVFNSYHSETEMLRYLKKLEDKDIALNRTMIALGSCTMKLNATAEMIPISWRELAEPHPFVPIEQMEGYRTMFTDLKNWLRSITGFSGVSLQPNAGAQGEYAGLMVIRKYHLDRGDDNRNICLIPSSAHGTNPASAQMVGMKVVVVNCDKEGNVDFEDLKKKTELHSENLGALMVTYPSTHGVFEEKISDICDLIHKHGGQVYMDGANLNALVGIAKPGNFGPDVCHINLHKTFCIPHGGGGPGMGPIACKRHCKF

SEQ ID NO: 99058 - protein, 196 aa, Unknown
  Bacterial polypetide isolated from the Sargasso Sea
GQFGGDVSHLNLHKTFCIPHGGGGPGVGPIGVVEKLKPFLPKDPLDGESDGYAISGTKFGSASILPISWMYIAMMGQESLRKATQAAILSTNYLAKRLGEHYKILYTGKNNLVAHECIIDVRPFKESCGIEAEDIAKRLIDYGFHAPTMSWPVAGTLMIEPTESESLEELNRFCEGMIGIREEIRAIEEGKSSEDN

SEQ ID NO: 99059 - protein, 193 aa, Unknown
  Bacterial polypetide isolated from the Sargasso Sea
EDQLIQITGFDAISMQPNSGAQGEYTGLLLIHRYQIHRGEGQRNICLIPSSAHGTNPASAMMASMKVVIVQCDEEGNIDLEDLEVKAQKHSSELSALMITYPSTHGVFEETLTKICDIIHHHGGQVYMDGANLNALVGIAQPGKIGPDVLHMNLHKTFCIPHGGGGPGMGPIGFKKHLAPFAPSHSVCPVPGV

SEQ ID NO: 99060 - protein, 299 aa, Unknown
  Bacterial polypetide isolated from the Sargasso Sea
AESMIMFYNSRKRKEIIAGKNKFFVADNLFPQTIEVVKGRAKNLDIELIIGDYNSIELDDQYFGSIIPYTDVTGSLIEIEPFISKSHEVNSSVAVSADILSLVLLKSPGSMGADVVFGTTQRFGVPMGYGGPHAAYFAAKESFKRNMPGRIIGVSIDADENKALRMALQTREQHIKRDKATSNICTAQALLAVIASMYAVYHGPKGLKEIAENVNSLAKRMALGLLKSNVTLGSHRFFDTVHVKNIDAHKVKQLCEENSCNIFCINKNEISISFAETHNNSDVDLLLELIKSTLSGNDN

SEQ ID NO: 99061 - protein, 205 aa, Unknown
  Bacterial polypetide isolated from the Sargasso Sea
SSILSISWMYIKMMGSEGLKLATQIAILNANYIAHKLKNHFPILYKGTNGNVAHECIIDIRSIKNDTGVTEEDIAKRLIDFGFHAPTMSWPVPGTMMIEPTESESLQELDRFCDCLIKIKEEIDKIKKGDFDKNDNPIKNAPHTDLELASNNWEHKYSREEAAYPSNFLKSCKFWPPVARVDNVYGDKNLFCTCPSMDEFKEDAA

SEQ ID NO: 99062 - protein, 158 aa, Unknown
  Bacterial polypetide isolated from the Sargasso Sea
MAFSRRISRSKSMKFFASEDCHPQTLDVLKTRAEPMGIELVLGTPEDNLETGFFGVLLQYPSTTGVIYDIGKWIEQWHQNDTMVSVATDLLSLVLLKPPGELGVDVVIGNSQRFGVPMGFGGPHAAFFATHDRHKRSMPGRLIGVSVDGRGRRALRMA

SEQ ID NO: 99063 - protein, 293 aa, Unknown
  Bacterial polypetide isolated from the Sargasso Sea
MKVVVVNCDSHGNVDYEDLKKKAEEYSDTLSALMVTYPSTHGVFEEKITDICDLIHKHGGQVYMDGANLNALVGIAKPGKFGPDVCHINLHKTFCIPHGGGGPGMGPIACKKHLEVYLPNHPIISDCGPATGIGAISAAPWGSSSILSISWMYIKMMGSEGLKLATQNAILNANYIANKLKDHFPILYKGKNGNVAHECIIDIRKIKNETGITEEDIAKRLIDFGFHAPTMSWPVPGTMMIEPTESESLSEINRFCEALIKIKEEINKVKNGEFDKIDNPLKNAPHTHVELVA

SEQ ID NO: 99064 - protein, 237 aa, Unknown
  Bacterial polypetide isolated from the Sargasso Sea
MLKNAQKDFIQRHIGASKEEQKVMLKELGYNNLDELIAKTVPEKILLKENLSIGEPNSEYKALRKLKDISQKNKIFSNFIGMGYYGNYTPYVILRNILENPGWYTSYTPYQPEVAQGRLEMLLNFQQMIIDFTGMDIANASLLDEGTAAAEAMGLSYRICKKDIKKVFVSKNCHPQTIDVIKTRAEPLGLKIIVGDEDTDINENIVCGILQYPGTLGDIKDPSEAISKIHRQNGKAV

SEQ ID NO: 99065 - protein, 220 aa, Unknown
  Bacterial polypetide isolated from the Sargasso Sea
TPSGIGAISAAPWGSSSILSISWMYIKMMGAEGLKLATQNAILNANYIAHKLKDHFPILYKGKNGNVAHECIIDIRKIKSEIGITEEDIAKRLIDFGFHAPTMSWPVPGTMMIEPTESESLSEINRFCDALIKIRDEINKVKNGEFDKIDNPLKNAPHTHIELTANEWKHKYDRESAAYPSATLKSYKYWPPVARVDNVYGDKNLFCSCPTMDEYKESAA

SEQ ID NO: 99066 - protein, 294 aa, Unknown
  Bacterial polypetide isolated from the Sargasso Sea
FVPIEQMDGFRTLFTDLKNWLRSITGFSGVSLQPNAGAQGEYAGLMVIRKYHLERGEGNRNVCLIPSSAHGTNPASAQMVGMKVVVVNCDKQGNVDYEDLKKKVEQHSANLGALMVTYPSTHGVFEERISEICDLVHKHGGQVYMDGANLNALVGIAKPGNFGPDVCHINLHKTFCIPHGGGGPGMGPIACKRHLEIYLPSHPIIKDCGPATGIGAISAAPWGSSSILSISWMYIKMMGSEGLKLATQIAILNANYIAHKLKDHFPILYKGIKGNVAHECIIDIRSIKSETGIT

SEQ ID NO: 99067 - protein, 216 aa, Unknown
  Bacterial polypetide isolated from the Sargasso Sea
IGAISAAPWGSSSILSISWMYIKMMGSEGLKKASQVAILNANYIAHKLKNSFPILYKGKNGNVAHECIIDIRKIKTDTGITEEDIAKRLIDFGYHAPTMSWPVAGTMMIEPTESESLSEINRFCSALQKIKQEIDKIQSGHYDKIDNPLKNAPHTHVELSSNKWEHKYEREEAAYPSEILKTVKYWPPVARVDNVYGDKNLFCTCPSMDEYEDSAA

SEQ ID NO: 99068 - protein, 291 aa, Unknown
  Bacterial polypetide isolated from the Sargasso Sea
HGGQVYMDGANLNALVGIAKPGNFGPDVCHINLHKTFCIPHGGGGPGMGPIACKRHLETYLPNHPVVKDCGPATGIGAVSAAPWGSSSILSISWMYIKMMGSEGLKLATETAILNANYIANRLKDHYPILYKGTNGNVAHECIIDIRSIKSETGITEEDIAKRLIDYGFHAPTMSWPVAGTMMIEPTESESLSELDRFCDTLIKIKLEIDKIKSGEYDKIDNPIKNAPHTDLELASDNWQHKYSREDAAYPAKFLRVNKFWPPVARVDNVYGDKNIFCTCPSMDEFNEDAA

SEQ ID NO: 99069 - protein, 278 aa, Unknown
  Bacterial polypetide isolated from the Sargasso Sea
LEMLLNFQQMIVDFTGMDIANASLLDEGTAAAEAMGLSHRLNKKDSNLVFVSEDCHPQTIDVIQTRAEPMGLKVLVGKEDEVLDKLKEDLVCGILQYPGTLGNIKDPSEAISKIHKKNGKAVLACDLLALAKLKTPRELGADIAVGSSQRFGIPMGYGGPHAAFFATKDEYKRSMPGRIVGVSVDRHGNKAYRLSLQTREQHIRRDKATSNICTAQALLAIVSAAYAIYHGPDGIRNISERVSQLAKSFADKIKQSGYELYSNYFFDTVTIITKEKTD

SEQ ID NO: 99070 - protein, 267 aa, Unknown
  Bacterial polypetide isolated from the Sargasso Sea
YPSTHGVFEESIVEICEKIHNAGGQVYMDGANLNAMVGIAKPGKFGPDVSHMNLHKTFCIPHGGGGPGMGPIGVKSHLEKFLPGHPVFQNELGLTNQEAVSAAPWGSASILPISYSYISMMGDEGLKLATQVAILSANYIKTRLNKYFPILYKGKNEMVAHECIIDIRPFKNELKISEEDIAKRLIDYGFHAPTMSFPVPGTLMIEPTESEPKEELDRFCEAMISIYEEINKVRNGEFDLIDNPLKNAPHTIHEISAENWEHRYSRQ

SEQ ID NO: 99071 - protein, 236 aa, Unknown
  Bacterial polypetide isolated from the Sargasso Sea
DKLSIGEPNSEYEALRKLRIISKKNQIYSNFIGMGYYGTYTPYVILRNILENPGWYTSYTPYQAEVAQGRLEMLLNFQQMIIDFTGMDIANASLLDEGTAAAEAMSLSYRINKKNSKIVFVSKDCHPQTIELIKTRAEPLELKIIVGNENTDLEKINEDIVCGIIQYPGTLGDIKDPSETISKIHKKNGKAVLACDLLALAKLKTPGELGADIAVGNSQRFGIPMGYGGPHAAFFA

SEQ ID NO: 99072 - protein, 267 aa, Unknown
  Bacterial polypetide isolated from the Sargasso Sea
GWALLSGSFGGDVSHLNLHKTFCIPHGGGGPGIGPIGVVEALKDFMPSTHEEAKAVGPVSGTDWGSASILPISWMYIKMMGTNGLVQATQNAILNTNYIASKLKDHYEILYKGENGLVAHECIIDIRPLKETAGVEVEDVAKRLIDYGFHAPTMSWPVAGTLMIEPTESESLKELDRFCEAMISIRKEISEIENNEVPREDNLLKNSPHTAKKLISDSWEHPYDRVKAGYPVEGLYESKYWPPVGRVDNVYGDRNLVCSCPSMEDYE

SEQ ID NO: 99073 - protein, 224 aa, Unknown
  Bacterial polypetide isolated from the Sargasso Sea
MTEKNKSEFINRHVGLNDSDIKKMLKHLSIKSLDELIEKVIPENILSPITENLLKKDLSETETLARLKEYSKENKLYKSFIGMGYYGTLVPNVIKRNILENPGWYTQYTPYQAEISQGRLEALLNFQTMISSATGLPLANASLLDESTAAAEAMTMFYGSTKDQDKNSFFISQNCHPQTIDVIKTRAEPLGIKLIIGNEDSIILDNSIFGMLLQYPTSDGRIVD

SEQ ID NO: 99074 - protein, 277 aa, Unknown
  Bacterial polypetide isolated from the Sargasso Sea
LVGIAKPGKFGPDVCHINLHKTFCIPHGGGGPGMGPIACAKHLEDFLPNHSVIKSIGTDKSLGSVSAAPWGSSSILVISWMYIKMMGAEGLKKASQVAILNANYISKKLSKFYKVLYTGKNGNVAHECIIDLRPIKAKSGISEEDIAKRLIDYGYHAPTMSWPVAGTLMIEPTESEGLDEMNRFCNALISIKEEIDKVDKGNFDKKDNPLKNAPHTYLELSSNEWKHSYTREDAAFPKEYLKDNKFWPPVARVDNVYGDRNLVCTCPSLDEYKDEAA

SEQ ID NO: 99075 - protein, 275 aa, Unknown
  Bacterial polypetide isolated from the Sargasso Sea
RNILENPAWYTAYTPYQPEISQGRLEALLNFQTMVCDLTGMEIANASLLDEATAAAEAMVFCHKITKSKSDVIFVSNSCHPQIIDVIQTRAEPIGIRVVIGDEHENLSSQAFAVLLQYPSTNGEIHDYSKLTKDIKSNGGMTIVAADLLSLSLLKPPGEWGADVVVGSSQRFGVPLGFGGPHAAFFATREEYKRSIPGRIVGISQDANGDVALRLALQTREQHIRREKATSNICTAQVLLAVIASMYAVYHGPDGIRQIATRINILAKVLAEGIK

SEQ ID NO: 99076 - protein, 277 aa, Unknown
  Bacterial polypetide isolated from the Sargasso Sea
TIVPPVIARNVLENPGWYTAYTPYQAEISQGRLEALLNFQTMVIDLTGLEIANASLLDEGTAAAEAMTMLQGDAGSDGRNSFFVSNNCHPQTIGVVRGRAEPLGIEIVVGTDSDFLEEKSKETFFGALVQYPGTDGLITDYSHFCDTAHSNGIPVVMAADILALTLLTPPGEMGADVAVGSTQRFGVPMGYGGPHAAYFATKEKFKRKIPGRIIGVSKDEEGEPALRMALQTREQHIRRGKATSNICTAQVLLAVMAGMYGVYHGPEGLLKIAKRIH

SEQ ID NO: 99077 - protein, 293 aa, Unknown
  Bacterial polypetide isolated from the Sargasso Sea
EFGVDVAVGSMQRFGVPMGFGGPHAAYFACSEKYKRLIPGRIVGQTLSKNGEKSLRLALQTREQHIRREKATSNICTAQSLLAIISSFYAIYHGPSGLTQIAKRLVELRINLESSLAALGFDIPDGIRFDSVDVYSEHSQRIHNEALKNGYNLRILPLGSTIENSTGFGISLDELSNEKEIKDILTFIANLLEKEEDLEHIIFDKEFHLESLALRSSAWMQQDIFTNYQSETELMRYIFRLAEKDFSLVDGMMPLGSCTMKLNSAAELNPVSWANLSSHASFCPTRSNQGLSK

SEQ ID NO: 99078 - protein, 84 aa, Unknown
  Bacterial polypetide isolated from the Sargasso Sea
FPDVVHAQGKPALRLALQTREQHIRREKATSNVCTAQALLAIMASMYAVYHGPHGLKTIALRVNRIAALLAAGVKQLGFATVND

SEQ ID NO: 99079 - protein, 283 aa, Unknown
  Bacterial polypetide isolated from the Sargasso Sea
MGYGGPHAAFFATKDEYKRSMPGRIIGVSVDRHGNKAYRLSLQTREQHIRRDKATSNICTAQALLAIVSAAYAIYHGPDGIKNISERVSQLAKNFGDKIKQSGYELYSDYFFDTVTIITKDKTDQIFKNALDQKVNIRKVNSEMLSVSFDEKKNVYRVNQLLKIFNAAESIKKEDPTVSLPNLPKNLLRTSKYLEHPVFNSYHSETDMLRYLKKLEDKDIALNRTMIALGSCTMKLNATAEMIPISWRELAEPHPFVPVEQMEGYRELFTDLKNWLRSITGFS

SEQ ID NO: 99080 - protein, 260 aa, Unknown
  Bacterial polypetide isolated from the Sargasso Sea
SDEDQNKMLKELNYKSLDDLIKSTVPEKIQLKDELNIGESNSEYEALRKLKAISKKNQIYSNFIGMGYYATYTPYVILRNILENPGWYTSYTPYQPEVAQGRLEMLLNFQQMIVDFTGMDIANASLLDEGTAAAEAMGLSNRLNKKDSNLVFVSENCHPQTIDVIQTRAEPLGLKVLVGNEDKVLDQLKEDLVCGILQYPGTLGDIKDPSEAISKIHKKNGKSILACDLLALAKLKTPRELGADIAVGSSQRFGIPMGYG

SEQ ID NO: 99081 - protein, 320 aa, Unknown
  Bacterial polypetide isolated from the Sargasso Sea
QYPGTYGHVRDFTDHIAKLHEHKGIAVVSADPMSLTLLKEPGAMGADIAVGSTQRFGVPVGAGGPHAAYMATKDAYKRNMPGRIVGVSVDAHGNKAYRLSLQTREQHIRREKATSNVCTAQALLAVMASMYAVFHGPKGLQAIAQRIHRKAVRLAKGLEEAGFKVDPQAFFDTITVDVGPLQAAVMKSAVDEGINLRRVGETRVGISVDETTRPETIEAVWRAFGIVRADDNFSPEYRVPENMHRKTEYLTHPIFHMNRAETEMMRYMRRLADRDLALDRAMIPLGSCTMKLNAAAEMMPLSWPEFSTIHPFAPADQQEG

SEQ ID NO: 99082 - protein, 297 aa, Unknown
  Bacterial polypetide isolated from the Sargasso Sea
MGYGGPHAAFFATKDEYKRSLPGRLVGVSVDRHGNKAYRLSLQTREQHIRRDKATSNICTAQALLAIVSAAYAIYHGPEGIKNISERVSQLAKNFADKIKQSGYELYSDYFFDTVTIITKDKTDQIFENALNQKVNIRKVNSEMLSVSFDERKNVYRVNQLLKIFNAAESIKKEDPVANLVNLPKNLIRSSKYLEHPVFNSYHSETEMLRYLKKLEDKDIALNRTMIALGSCTMKLNATAEMIPISWRELAEPHPFVPVEQMEGYRELFTDLKNWLRSITGFSGVSLQPNAGAQGEY

SEQ ID NO: 99083 - protein, 270 aa, Unknown
  Bacterial polypetide isolated from the Sargasso Sea
LNATTEMVPVTWPEFSNIHPFAPVEQVKGYMKIFDDLKSWLSILTGFDDCSLQPNSGAQGEYTGLLVIRAYHISRNERHRNICLVPESAHGTNPASAIMAGMSVEIISCDQNGNIDIQDLKAKAELHSENLSAIMLTYPSTHGIFENEIQEACDIVHDHGGQVYIDGANLNAMVGLCKPGEFGGDVMHINLHKTFCIPHGGGGPGMGPIVCKKHLSKFLPSHSYNTPNEDENAINPVSAAPYGSSSILIISWVYISLLNSEGLTEATKIA

SEQ ID NO: 99084 - protein, 259 aa, Unknown
  Bacterial polypetide isolated from the Sargasso Sea
KQNFNLMYHDNGFIGISLDEKTDFSEVEALAKLFDIKSDSKNSYNIFKPNRTGNILTHSIFHSINSETEMLRYINKLEKRDLSLNYSMIPLGSCTMKLNATVEMIPISWPEFNSIHPFAPLSQAKGYKKIINELEEMLYKVTGFDAVSFQPNSGAQGEYAGLLSIREYHKANNSTRDICLIPESAHGTNPASAIMAGLKVVIVKCDDHGNIDYEDLSKKVDEAGDRLSSLMVTYPSTHGVFEHNIDEICNLIHDNGGLV

SEQ ID NO: 99085 - protein, 304 aa, Unknown
  Bacterial polypetide isolated from the Sargasso Sea
PASAQMVGMKVVVVDCDKEGNVDFEDLKKKAEMHSENLGALMVTYPSTHGVFEEKITDICELIHKHGGQVYMDGANLNALVGIARPGNFGPDVCHINLHKTFCIPHGGGGPGMGPIACKRHLQVYLPNHPVVKDCGPATGIGAVSAAPWGSSSILSISWMYIKMMGSEGLKLATQIAILNANYIAHRLKDHYPILYKGSNGNVAHECIIDIRSIKTETGITEEDIAKRLIDYGFHAPTMSWPVAGTMMIEPTESESLSELDRFCDTLISIKSEIDMIKSGKFDKVDNPIKNAPHTDIELASDEW

SEQ ID NO: 99086 - protein, 188 aa, Unknown
  Bacterial polypetide isolated from the Sargasso Sea
MNKEFINNNTFASRHIGPRNDEIHLMLNKIDCISLDDLINKAVPENILFDHPLNLKPGMSEDFNKINLQLLSIKNNFKKTYIGLGYYGTVTPSVILRNILENPGWYTAYTPYQPEVSQGRLEMLMNFQQMIIDLTGMEIANASLLDESTAAAEAMMLAYKYTNKKKKTFCIQNECHPQTISVLKTRAK

SEQ ID NO: 99087 - protein, 268 aa, Unknown
  Bacterial polypetide isolated from the Sargasso Sea
MAGNLKRVAAFLDHEVFNKYHSETEMLRYIHKLEIKDLSLNNSMIPLGSCTMKLNATTEMIPVTWQNFCDIHPFSPLEQTKGYSRLIDELSSWLSRLTGFDSCSMQPNSGAQGEYAGLLVIRAYHLKNGDGHRNICLVPESAHGTNPASAIMAGMKVEIVSCDSNGNINLNELKEKSEKHSNNLSAIMLTYPSTHGVFENDIEEACEIVHRNGGQVYIDGANLNAMVGLCKPGEFGGDVMHINLHKTFCIPHGGGGPGMGPIVCKNHL

SEQ ID NO: 99088 - protein, 292 aa, Unknown
  Bacterial polypetide isolated from the Sargasso Sea
LNAAAEMIPISWKEFAEPHPFVPVEQMEGFRDLFTDLKNWLRSITGFSGVSLQPNAGAQGEYAGLMVIRKYHLDRDEAYRNICLIPSSAHGTNPASAQMVGMKVVVVNCDKEGNVDFDDLKKKVEQHSENLAALMVTYPSTHGVFEEKIKDICELVHKHGGQVYMDGANLNALVGVAKPGNFGPDVCHINLHKTFCIPHGGGGPGMGPIACKKHLQVYLPNHPVIKDCGPTSGIGAVSAAPWGSSSILSISWMYIKMMGSAGLKLATQVAILNANYIAHRLKDHFSDFVQRC

SEQ ID NO: 99089 - protein, 271 aa, Unknown
  Bacterial polypetide isolated from the Sargasso Sea
DYCKKNKSLLVCATDLLALTLLRPPGEIGADIVIGSSQRFGVPMGFGGPHAAFMATYESFQRSMPGRIIGASKDAGGNLSYRLALQTREQHIRREKATSNICTSQALLAVMAGFFAIYHGPNGLIGIANDVHKKTCKLFNALKSGDHEILNKNFFDTLSIHLKGDISEIKTRLLDAKININWFDNNLVSISIDEATTSDDIADLVFALTGKPISNDPEDGEASLNKEIVRSSDFMKQERFNKYHSETEMMRYIKRLSDKDIALDRSMIPLG

SEQ ID NO: 99090 - protein, 293 aa, Unknown
  Bacterial polypetide isolated from the Sargasso Sea
EYEGLRKLKSISKKNQIYSNFIGMGYYGTYTPNVIVRNILENPGWYTSYTPYQPEVAQGRLEMLLNFQQMIIDFTGMDIANASLLDEGTAAAEAMGLSHRLDKKDNKIVFISNDCHPQTIEVVKTRSEPLGLKVVIGNDEELSNISEDIICGIIQYPGTLGDIKDPSENISKIKKRNGKSILVCDLLSLAKLKTPAELGADIAVGSSQRFGIPMGYGGPHAAFFATKDEFKRSMPGRIVGVSVDRHGNKAYRLALQTREQHIRRDKATSNICTAQALLAIVSAAYAIYHGPKG

SEQ ID NO: 99091 - protein, 280 aa, Unknown
  Bacterial polypetide isolated from the Sargasso Sea
LNALVGVAKPGNFGPDVCHINLHKTFCIPHGGGGPGMGPIACKRHLQIYLPNHPVIKDCGPTTGIGAVSAAPWGSSSILSISWMYIKMMGSAGLKLASQVAILNANYIAHRLKDHFPILYKGSNGNVAHECIIDIRSIKSETGVTEEDIAKRLIDFGFHAPTMSWPVAGTMMIEPTESEGLSELDRFCDTLIKIKQEIEKIKSGEFDKIDNPIKNAPHTDTELSSDDWHHKYSREQAAYPAKFLKANKFWPPVARVDNVYGDKNIFCTCPSMDEFKEDAA

SEQ ID NO: 99092 - protein, 300 aa, Unknown
  Bacterial polypetide isolated from the Sargasso Sea
HPQTIDVVRTRAEMFGFDVIIGKATDAVNHEVFGALLQYPSTTGEVRDDSGLIAALQAKKAVVAVAADMMSLLLLKSPGELGADVVLGSAQRFGVPMAFGGPHSAFFATRDDYKRSMPGRIIGVSKDRRGNQALRMAMQTREQHIRREKANSNICTAQVLLANMASFFAVYHGPEGLKNIAERIHRSADVFAAGLQAKGVSLVHNTWFDTVTFKVADRAAVIARAIAAEVNLRTDIADSLSVSFHEMTSAADIAQLFDIVLGAGHGLDVTKLDAEIVAKGSNSIPADLVRTSKYFNAPGI

SEQ ID NO: 99093 - protein, 297 aa, Unknown
  Bacterial polypetide isolated from the Sargasso Sea
ISEICGLIHKHGGQVYMDGANLNALVGIAKPGNFGPDVCHINLHKTFCIPHGGGGPGMGPIACKKHLEIYLPTHPVVKDCGPTSGIGAVSAAPWGSSSILSISWMYIKMMGSEGLKLATQIAILNANYVAHRLKNHFPILYKGSKGNVAHECIIDIREIKKETAITEEDIAKRLIDFGFHAPTMSWPVPGTMMIEPTESESLKEIDRFCDTLIKIKLEIDKIKSGKFHKDDNPIKNAPHTDLELSSNEWVHKYSREEAAYPSEFLKFNKFWPPVARVDNVYGDKNLFCTCPSMDEFK

SEQ ID NO: 99094 - protein, 145 aa, Unknown
  Bacterial polypetide isolated from the Sargasso Sea
KMMGSEGVKLATQIAILNANYIANRLKDHYPILYKGSNGNVAHECIIDIRSIKSETGISEEDIAKRLIDYGFHAPTMSWPVAGTMMIEPTESESLSELDRFCDTLISIKEEIDMVKSGKFEKVDNPIKNAPHTDIELASDEWNHK

SEQ ID NO: 99095 - protein, 302 aa, Unknown
  Bacterial polypetide isolated from the Sargasso Sea
QIGALMLTYPSTHGVFELQIRKICDLIHSVGGFVYLDGANLNAQVGLCKPGNYGVDVCHLNLHKTFCIPHGGGGPGVGPVAASETLSPFLPTHSLMDNNLSNRLNYVSSAKHGSASILPISWMYIKMAGLSGLRKATANAILSANYIAHSLKHKFKILYKGKNNFVAHECILDFRDLKSKTGLSVNDLAKRLIDYSFHAPTISWPVPETIMIEPTESESLAELDRFCEAMLLIGEEISEIENNIELNNNNVIRNAPHTLKELIADNWHYPYSKEKASFPYKTTTAIKFWSSVSRINNAYGDR

SEQ ID NO: 99096 - protein, 283 aa, Unknown
  Bacterial polypetide isolated from the Sargasso Sea
KNIENRSLIGLGYHSTVIPPVVQRNVLENPNWYTAYTPYQAEISQGRLEALFNFQTLISELTGLPISNASLLDEATAAAEAISLSLAVRKNKNAKRFLVDKEILPQTFDVLKTRCEPLGIVLEIFDNNNFEIDNNVFGILIQLPGKNGRIWDPTSIINQVHKCDAIVTIAIDPLAQVLIRPMGEFGADIVVGSAQRFGVPIAFGGPHAAFFATKEIYKRQIPGRIVGQSVDVDGNPALRLALQTREQHIRRDKATSNICTAQVLLAVLSSFYAVHHGPNGLKK

SEQ ID NO: 99097 - protein, 262 aa, Unknown
  Bacterial polypetide isolated from the Sargasso Sea
HINLHKTFCIPHGGGGPGMGPIACKRHLEIYLPNHPIVKDCGPATGIGPVSSAPWGSSSILSISWMYIKMMGSEGLKLATQIAILNANYLANRLKDHYPILYKGTNGNVAHECIIDIRSIKAETGVTEEDIAKRLIDFGFHAPTMSWPVAGTMMIEPTESESLVELDRFSDTLIKIKSEIDKIKSGQFDKVDNPLKNAPHTDLELTSNNWDHKYSREEAAYPAKFLRVSKFWPPVARVDNVYGDKNIFCTCPSMEDFEEDAA

SEQ ID NO: 99098 - protein, 265 aa, Unknown
  Bacterial polypetide isolated from the Sargasso Sea
VSHMNLHKTFCIPHGGGGPGVGPIGVKSHLEKFLPGHPIFNNELGLSNQEAVSAAPWGSASILPISYSYISMMGDEGLKLATQVAILSANYIKERLKEYYPILYKGKNDMVAHECIIDIRPLKQELDISEEDIAKRLIDYGFHAPTMSFPVPGTLMIEPTESESKEELDRFCEAMISISDEIDKIKKGKFDPIDNPIKNAPHTIYEISSDVWEHKYSRQEAVFPHLYLLNNKYWPPVSRIDNVYGDRNLFCVCPPIEDYEEVSSG

SEQ ID NO: 99099 - protein, 212 aa, Unknown
  Bacterial polypetide isolated from the Sargasso Sea
AVSAAPWGSGGILPISWMYITMMGREGLLKATQVAILSANYIAKKLASHYPILYKGQNDMVAHECIIDIRPFKQSSGISEEDIAKRLMDYGFHAPTMSFPVPGTLMIEPTESESLEELDRFIDAMVKIRGEIQRIETGAFDSENNPLKNAPHTINDIVNDNWDRPYSIAEACYPADKNPATKYWPAVNRIDNVYGDRNLFCACPPIESFESD

SEQ ID NO: 99100 - protein, 201 aa, Unknown
  Bacterial polypetide isolated from the Sargasso Sea
TYLTYLYQTYWESMGLKKSSQVAILNANYLAEKLRKFFPIVFTGKNGLIAHECIIDIRQLKETSGITEEDIAKRLIDYGFHAPTMSWPVPGTLMIEPTESEPKDEIDRFCQAMISIRKEIKKIESGDWDKEDNPLKNAPHTSEDLINEKWGHLYSKETAFYPLPTLRQKKYWPPIGRIDNVHGDRNVICSCPPMEIFEEEE

SEQ ID NO: 99101 - protein, 204 aa, Unknown
  Bacterial polypetide isolated from the Sargasso Sea
MNELWDDFRKRHIGPDDDQTSEMLNFLGLKSLNQLIDLTIPKNIRTKTKLNIGHPKTENEALLYLEDMANKNQVLTSMIGMGYYGTITPGVILRNVLENPGWYTAYTPYQAEVSQGRLEALINFQQMVIDLTSMEIANASLLDEATAAAEGMSMARRVSASDSNIFFVDSDAHPQTIAVVLTRAKPLGIEIKIDDPKNFNFNHC

SEQ ID NO: 99102 - protein, 302 aa, Unknown
  Bacterial polypetide isolated from the Sargasso Sea
MVMDLTGMDIANASLLDEATAAAEAMAFSRRISRSKSMKFFASKDCHPQTLDVLKTRAEPMGIELVLGTPEENLETEFFGVLLQYPSTTGVIYDIGKWIEQWHQNDTMVSVATDLLSLVLLKPPGELGADVVIGNSQRFGVPMGFGGPHAAFFATHDRHKRSMPGRLIGVSVDGRGRRALRMALQTREQHIRREKATSNICTAQVLLAVIAGCYAVYHGPDGLKSIAGRVHRMTMLFAKSLNKIGIRCSEHFFDTIHIDAGNDRDQIYESALQQGLNFRKIGFHHLGVSLDETTTLDDLEQL

SEQ ID NO: 99103 - protein, 74 aa, Unknown
  Bacterial polypetide isolated from the Sargasso Sea
PIWAFLKPFLPGHHSLKKAQIGSDQNSVSAAAWGSASILPISWMYIRMMGRNGLKKASESAILNANYIAERLKP

SEQ ID NO: 99104 - protein, 191 aa, Unknown
  Bacterial polypetide isolated from the Sargasso Sea
MTTIKKNNLFSKRHIGVNSQDRDFMLQSIGYDSMDSFIDAVVPENILEKGKIDLGEEKTEEEALDELKLIAQENKVFKSFIGQGHYNTYTPKVILRNVFENPGWYTSYTPYQPEISQGRLEALINFQTMVSDLTGMDIANASLLDEATAAAEAMTLAKRVSKSKSDIFYVDENSFENTINVLKTRAKPLGI

SEQ ID NO: 99105 - protein, 280 aa, Unknown
  Bacterial polypetide isolated from the Sargasso Sea
EMLAVSFDERKNLYRANQVLKIFNCSETIKETTKEMTNKSLSNLPKTLLRTSTYLDHPVFNSYHSETAMLRYLKKLEDSDIALNRSMIALGSCTMKLNSVSEMIPVTWKEFSHPHPYSPIEQMDGYRELFTDLKNWLRTITGFSGVSLQPNAGAQGEFAGLMVIRKFHEKNGQKKRNVCLIPSSAHGTNPASAQMAGMKVVVVNCDAFGNVDYEDLKKKTEKYSDTLSALMVTYPSTHGVFEEKITDICDLVHKHGGQVYMDGANLNALVGIAKPRKFWS

SEQ ID NO: 99106 - protein, 308 aa, Unknown
  Bacterial polypetide isolated from the Sargasso Sea
SHRLNKKDSNLVFVSEDCHPQTIDVIQTRAEPMGLKVLVGKEDEVLDKLKEDLVCGILQYPGTLGDIKDPSEAISKIHKKNGKAVLACDLLALAKLKTPRELGADIAVGSSQRFGIPMGYGGPHAAFFATKDEYKRSMPGRIVGVSVDRHGNKAYRLSLQTREQHIRRDKATSNICTAQALLAIVSAAYAIYHGPDGIRNISERVSQLAKSFADKIKQSGYELYSNYFFDTVTIITKEKTDQIYKNALNQKVNIRKVNSEMLAVSFDERKNVYRVNQLLKIFNAAESIKKEDPSVSLPNLPKKFLRTS

SEQ ID NO: 99107 - protein, 264 aa, Unknown
  Bacterial polypetide isolated from the Sargasso Sea
MLRYLKKLEDCDIALNRSMIALGSCTMKLNATAELMPITWKEFSLPHPFVPTNQMEGYKILFNDLINDLKEITGYDAVSLQPNSGAQGEYAGLMTIRKFHESNGQGDRDVCLIPNSAHGTNPASAQMSGMKVVVINCDEDGNVDLSDLKNKAEKYSKNLAALMVTYPSTHGVFEEKITEICDVIHKHGGQVYMDGANLNALVGIAKPGKFGPDVCHINLHKTFCIPHGGGGPGMGPIACAKHLSDFLPTHEIIKDAGPKNGMGA

SEQ ID NO: 99108 - protein, 140 aa, Unknown
  Bacterial polypetide isolated from the Sargasso Sea
ETGITEEDIAKRLIDYGFHAPTMSWPVAGTMMIEPTESESLSELDRFCDTLISIKSEIDMIKSGKFDKVDNPIKNAPHTDIELASDEWNHKYSREQAAYPAKFLKTNKFWPPVARVDNVYGDKNLFCSCPSMDEYKNTAA

SEQ ID NO: 99109 - protein, 154 aa, Unknown
  Bacterial polypetide isolated from the Sargasso Sea
DVRPLKDSANVEVDDIAKRLMDYGFHAPTMSWPVAGTLMIEPTESESKKEIDRFCDAMISIRKEITNIESGNADSTNNFLKNAPHTVEEACADNWAYPYSRSDAVYPNNVKASEKYWPPVKRVDNVYGDKNLQCSCPSMDEFDAPVVLKSANLA

SEQ ID NO: 99110 - protein, 213 aa, Unknown
  Bacterial polypetide isolated from the Sargasso Sea
GGGGPGMGPIACKKHLQVYLPNHPVIKDCGPTTGIGAVSAAPWGSSSILSISWMYIKMMGSAGLKLATQVAILNANYIAHRLKDHFPILYKGSNGNVAHECIIDIRNIKSETGVTEEDIAKRLIDFGFHAPTMSWPVAGTMMIEPTESEGLSEIDRFCDSLIKIKQEIEKIKSGEFDKIDNPIKNAPHTDAELASDNWEHKYTRQEAAYPSKF

SEQ ID NO: 99111 - protein, 224 aa, Unknown
  Bacterial polypetide isolated from the Sargasso Sea
GANMNAQVGLTNPYIIGADVCHLNLHKTFAIPHGGGGPGMGPICVAAHLADFLPTFDLSNPFSTMTIAAAPYSSASILLISYSYIKLLGGDGLTMSTKIAINNANYIKNKLEDDFSILFTNKKGHVAHELIIDCRPFKKDANIDVEDIAKRLIDYSFHAPTMSWPVAGTLMIEPTESESIDELDRFCDAMISIKKEINEIINNQADKVDNVLKQAPHTIAETTS

SEQ ID NO: 99112 - protein, 261 aa, Unknown
  Bacterial polypetide isolated from the Sargasso Sea
EFNKINTQLLSLKNNFKKTYIGMGYYNTITPSVILRNILENPGWYTAYTPYQPEVSQGRLEMLMNFQQMIIDLTGMDIANASLLDESTAAAEAMIMAFKIKKSAKFTFCVQNKCHSQTLSVLKTRAKPLGIKIIFDNPDNDTFGCLIQNPDTYGEIANLNELININKSHDALSIIAADIMSLVVMKSPKDFGADIVVGSTQRFGVPMGLGGPHAAYFATLNEYKRMIPGRLIGVSVDRNNKRSYRMALQTREQHIRREKAT

SEQ ID NO: 99113 - protein, 191 aa, Unknown
  Bacterial polypetide isolated from the Sargasso Sea
YEALRKLRAISKKNQIYSNFIGMGYYGTYTPYIILRNILENPGWYTSYTPYQPEVAQGRLEMLLNFQQMIVDFTGMDIANASLLDEGTAAAEAMGLSHRLNKKDSNLVFVSEDCHPQTINVVQTRAEPMGLKVLIGKEEEILDKLKEDLVCGIIQYPGTLGDIKDPSESISKIHKLNGKAILACDLLVLAK

SEQ ID NO: 99114 - protein, 282 aa, Unknown
  Bacterial polypetide isolated from the Sargasso Sea
ANLNALVGIAKPGKFGPDVCHINLHKTFCIPHGGGGPGMGPIACKKHLESFLPKHSVIKDCGPATGIGAVSAAPWGSASILSISWMYIKMMGSEGLKKASQVAILNANYIAHKLKDSFPILYKGKSGNVAHECIIDIRKIKAETGITEEDIAKRLIDFGYHAPTMSWPVAGTMMIEPTESESLSEIKRFCSTLEKIKTEIDKIKADKYDKIDNPLKNAPHTHLELTSDKWDHKYEREEAAYPSEFLRTAKYWPPVGRVDNVYGDKNLFCTCPSIDEYEDTAA

SEQ ID NO: 99115 - protein, 256 aa, Unknown
  Bacterial polypetide isolated from the Sargasso Sea
FGMLLQYPTSDGNINDYTKLIKNAKSLKIFTCLATDLLALSILKTPAEMGADTAVGNTQRFGVPMGYGGPHAAFFATTEKFKRKIPGRIIGVSNDAYGKTALRMALQTREQHIRREKATSNICTAQVLLAIISSMYAVYHGPKKIILIAKKIQKLSSKLASMMDQAGLKVFYNQFFDTIRIHPNNKWEVNAMNNQMNFRKFDDGSIGISLDETTTQDDIKKICDVFCIQYSNIDNLYKIPDKLKRTAPFLDYEIFN

SEQ ID NO: 99116 - protein, 291 aa, Unknown
  Bacterial polypetide isolated from the Sargasso Sea
IDETLPNDIKLNQPLNLEKPLSESEYLMHLKKISALNKVYKTYIGLGYNRSYLPAVIQRNILENPGWYTAYTPYQAEISQGRMEALLNFQTMITDLTGMEISNASLLDESTAAAEAMTLLYAVRDREQKKNNICKFFVSEDIFPQTLSVLKTRSEPIGIDLVIGNIEDFDFDSNFFGALIQYPGASGEIKDIKSFISRCISNNIKTAVASDILSLVLLESPGKIGADVVVGTTQRFGIPLGYGGPHAGYFATKEEYKRNIPGRIIGVSIDADGNKALRMALQTREQHIKRD

SEQ ID NO: 99117 - protein, 300 aa, Unknown
  Bacterial polypetide isolated from the Sargasso Sea
MKLLGLSHRLNKSDSNLVFVSENCHPQTIDVIQTRAEPMGLKVLVGNEDKVLEQLKEDIVCGVLQYPGTLGDIKDPSEAISKIHKKNGKAILVCDLLALSMLKTPRELGADIAVGSSQRFGIPMGYGGPHAAFFATKDEYKRSMPGRIVGVSVDRHGNQAYRLSLQTREQHIRRDKATSNICTAQALLAIVSAAYAIYHGPDGIKSISERVSQLAKNFADKIKQSGYELYSDYFFDTVTIITKEKTDQIFKNALDQKVNIRKVNSEMLAVSFDERKNVYRVNQLLKIFNAAESIKKEDPT

SEQ ID NO: 99118 - protein, 132 aa, Unknown
  Bacterial polypetide isolated from the Sargasso Sea
IAKRLIDYGFHAPTMSWPVAGTMMIEPTESESLSELDRFCDTLISIKEEIDMVKSGKFDKVDNPIKNAPHTDIELASDEWNHKYSREQAAYPAKFLKANKFWPPVARVDNVYGDKNIFCTCPSMDEFKEDAA

SEQ ID NO: 99119 - protein, 217 aa, Unknown
  Bacterial polypetide isolated from the Sargasso Sea
KRFIQSNLPNHDDVFGMLLQLPGKNGQLYDPTFLISQAHRSEIIVTACIDPLAQVLIKPISEFGVDVAVGSMQRFGVPMGFGGPHAAYFACSEKYKRLIPGRIVGQTLSKNGEKSLRLALQTREQHIRREKATSNICTAQSLLAIISSFYAIYHGPSGLTQIAKRLVELRINLESSLAALGFDIPDGIRFDSVDVYSEHSQRIHDEALKNGYNLRIL

SEQ ID NO: 99120 - protein, 190 aa, Unknown
  Bacterial polypetide isolated from the Sargasso Sea
MLHNSEKDFIKRHIGLSKKDEKTMLSDLGYKSLNELVEDTVPNKILFKDLLSIGDPNSEYEGLRKLKSISKKNQIYSNFIGMGYYGTYTPNVIVRNILENPGWYTSYTPYQPEVAQGRLEMLLNFQQMIIDFTGMDIANASLLDEGSAAAEAMGLSHRLDKKDNKIVFISNDCHPQTIEVVKTRSEPLGL

SEQ ID NO: 99121 - protein, 253 aa, Unknown
  Bacterial polypetide isolated from the Sargasso Sea
PHPFSPVEQMDGYRELFTDLKNWLRSITGFSGVSLQPNAGAQGEFAGLMVIRKFHEKNREDNRNVCLIPSSAHGTNPASAQMVGMKVVVVKCDQHGNVDFEDLKNKAEEHSNNLAALMVTYPSTHGVFEEKITDICELVHNHGGQVYMDGANLNALVGIAKPGKFGPDVCHINLHKTFCIPHGGGGPGMGPIACKKHLEGFLPTHSVIKDCGPATGIGAVSAAPWGSASILSISWMYIKMMGSEGLKKASQVA

SEQ ID NO: 99122 - protein, 268 aa, Unknown
  Bacterial polypetide isolated from the Sargasso Sea
QTVGYREMIDQLEQMLCAATGYAAVSLQPNAGSQGEYAGLLIIHAYHASRGEAHRNVCLIPSSAHGTNPASAQMAGMQVVVVACDERGNVDLPDLEKKAAEHSKNLAAIMITYPSTHGVFEEGVKRVCEIVHSHGGQVYVDGANMNAMVGTAAPGHFGGDVSHLNLHKTFCIPHGGGGPGVGPVAVGAHLAPFLPGRAASGEDASQNIGNVSAAAFGSASILPISWMYIAMMGAAGLTAATETAILSANYVARRLAPYYPVLYTGAHG

SEQ ID NO: 99123 - protein, 314 aa, Unknown
  Bacterial polypetide isolated from the Sargasso Sea
EFANMHPFVPDDQTLGYQRIILILKEWLCDITGFADISLQPNAGSQGEYAGLLAIQKFHQSRGDFKRNVCLIPTSAHGTNPASAVMAGMKIVPVKCDDEGNIDLKDLAVKAIMNTFELSCIMITYPSTHGVFETSIKEICRIVHENGGQVYLDGANMNAQVGLAKPGNYGADVCHLNLHKTFCIPHGGGGPGVGPIGVAAHLTPFMNQRVSATEYGSASILPISWMYIRMMGGDGLRKASEVSLLSANWLACKIDPYFKVLYKGNNERIAHECIFDCRNLPVTAEDVAKRLMDYGFHAPTLSWPVLNTMMVNQL

SEQ ID NO: 99124 - protein, 264 aa, Unknown
  Bacterial polypetide isolated from the Sargasso Sea
DVVVGSSQRFGVPLGFGGPHAAFFATREEYKRSIPGRIVGVSQDANGDIALRLALQTREQHIRREKATSNICTAQVLLAVLASMYAVYHGPDGIRAIAKRVHILTKILAEGLKQLGYSLETDAFFDTIIVKTEDWTHSVLEAARVEEINLRAFDDKVGISLDETCDRELIERLWSLMSFESAIQPSFDSIQAAGIGDALPSGLERTTKFLTHPVFNSYHSETEMLRYIRRLSDKDIALDRSMIPLGSCTMKLNATTEMIPVTWP

SEQ ID NO: 99125 - protein, 78 aa, Unknown
  Bacterial polypetide isolated from the Sargasso Sea
AAASIRKNNPLKNAPHTHIELSGNEWKHIYKREEAAFPNEYLKDNKYWPPVGRVDNVYGDRNLVCSCPSLQEYKEEAA

SEQ ID NO: 99126 - protein, 319 aa, Unknown
  Bacterial polypetide isolated from the Sargasso Sea
DEASAAAEAMIMFFNSRKRKEIKEGKNKFFISDRCYPQTIEVVKGRANNLDIDLVIGNHEEFNTDASYFGAVIPYTDANGVIGDLSSFIEAAHTNNISVAVSTDILSLVLLNSPGAMDADVVFGSSQRFGVPMGYGGPHAAYFAAKESFKRNMPGRIIGVSKDTDENLALRMALQTREQHIKRDKATSNICTAQALLAVMAGMYAVYHGPNGLKEIAMHVHNLAKEFAKGASKNGIQVGSDSFFDTVWLKGVDAKKIQQDCEQKKCNVRVVNEKEISVSFAEPHTSEDVSLLLSVISENIHQTQKILQNHLLKFSLEKI

SEQ ID NO: 99127 - protein, 298 aa, Unknown
  Bacterial polypetide isolated from the Sargasso Sea
KFVKKSIIFGGQVYMDGAILNAMVGIAKPGKFGPDVSHMNLHKTFCIPHGGGGPGMGPIGVKSHLEKFLPGHPIVQNELGLTELDAVSAAPWGSPSILPISYSYISMMGDEGLKLATQVAILNANYIKEKLKDFFPLLYSGKNDMVAHECIIDIRPIKDELNISEEDIAKRLIDYGFHAPTMSFPVPGTLMIEPTESESKEEIDRFCTAMITIHSEIQKIREGIYDLEDNPIKNSPHTIEEVSSDEWHHKYSRKEAVFPHSYLYNNKYWPPVARIDNVYGDRNLFCVCPPIEEYEEVS

SEQ ID NO: 99128 - protein, 317 aa, Unknown
  Bacterial polypetide isolated from the Sargasso Sea
IIPKNILLISLIDLPDKMSESETIERLSELANMNCVFKSFVGMGYYGTLLPPVIQRNILENPGWYTQYTPYQAEISQGRLEALLNFQTMVSDITGLPMANASLLDEATAAAEAMLMFYNITKEPSKQVFLVSENCHPQTIDVLKTRSEPLGIILKICNITTQGFNDDIFGAIVQYPDTSGSIHDLTELSETAHQHGAYLCVATDLLALTLLKPPGEMGADVAVGNAQRFGVPMGYGGPHAAFFATTEKFKRKIPGRIIGLSKDSHGKPALRMALQTREQHIRREKATSNICTAQVLLAIISGMYAVYHGPSGIKKHA

SEQ ID NO: 99129 - protein, 304 aa, Unknown
  Bacterial polypetide isolated from the Sargasso Sea
AISKIHKNNGKAVLACDLLALAKLKTPAELGADIAVGSSQRFGIPMGYGGPHAAFFATKDEFKRSMPGRIVGVSVDRHGKKAFRLALQTREQHIRRDKATSNICTAQALLAIVSAAYAVYHGPKGIKKIAETVSQLTKNFADKLKHSGYELYSDQFFDTVTVKTLDKTDKIYKNALDQGVNIRKVNSELLAVSFDERKNLFRANQLLKIFNCSETIKESMNESLSNLPKKLLRTSTYLDHPVFNSYHSETEMLRYLKRLEDSDIALNRTMIALGSCTMKLNAVSEMIPVTWKEFSQPHPFSPIE

SEQ ID NO: 99130 - protein, 293 aa, Unknown
  Bacterial polypetide isolated from the Sargasso Sea
MGPKKIKHIARTVNRLCNQLANSLLASGIDLFHKKFFDTIRFTPKNNWEPLAEKEKFNFRKYDDDSIGITVDEETKEDDILKICKIFEIEKTDLSQSNFLDDEFIRKTDYLKHDVFNSFHSETEMLRYIHKLETKDLSLNTSMIPLGSCTMKLNATTEMVPVTWPEFSNIHPFVPTEQVKGYMKIFDDLKSWLSILTGFDDCSLQPNSGAQGEYTGLLVIRAYHISRNEKHRNICLVPESAHGTNPASAIMAGMLVEIISCDQNGNIDLQDLKAKAELHSKNLSAIMLTYPST

SEQ ID NO: 99131 - protein, 271 aa, Unknown
  Bacterial polypetide isolated from the Sargasso Sea
GVPMGFGGPHAGYMATRDAYKRSMPGRLVGVSIDSQGNRALRMALQTREQHIRREKATSNICTAQVLLANIASMYAVYHGPEGLKRIAERVHRLTGILAAGLARLCIAVENSAFFDTLTISPEDTQGVHERAVAAGMNLRPVDGNRVGVSLDETTTAADVEVLWSVLSGEANVGFTAAELDADAVEGIPFEHRRISAILGHPIFNTHHSETAMMRYMRELEDKDLALNRAMIPLGSCTMKLNAAAEMIPITWPEFGNLHPFAPANQVAGSL

SEQ ID NO: 99132 - protein, 307 aa, Unknown
  Bacterial polypetide isolated from the Sargasso Sea
VIRKYHLDRGDENRNICLIPSSAHGTNPASAQMVGMKVVVVDCDKEGNVDFEDLKKKAETHSENLGALMVTYPSTHGVFEEKISDICDLVHKHGGQVYMDGANLNALVGIAKPGNFGPDVCHINLHKTFCIPHGGGGPGMGPIACKRHLQVYLPNHPVVKDCGPATGIGAVSAAPWGSSSILSISWMYIKMMGSQGLKLATEVAILNANYIAHRLKNHFPILYKGTNGNVAHECIIDIRSIKSETGVSEEDIAKRLIDYGFHAPTMSWPVAGTMMIEPTESESLTEMDRFCDTLINIKTEIEMIKSG

SEQ ID NO: 99133 - protein, 139 aa, Unknown
  Bacterial polypetide isolated from the Sargasso Sea
TGITEEDIAKRLIDFGFHAPTMSWPVAGTMMIEPTESESLAELDRFCDTLIKIKSEINKIKSGDFDKVDNPIKNAPHTDLELTSDVWDHKYSREEAAYPAKFLRKNKFWPPVARVDNVYGDKNIFCTCPSMDDFKEDAA

SEQ ID NO: 99134 - protein, 251 aa, Unknown
  Bacterial polypetide isolated from the Sargasso Sea
QPWLEQEVFERYRSETELLRYIQRLVAKDFSLVHGMIPLGSCTMKLNAASELQPVSWAAFSRLHPFVPPSQRLGYDQLIAELEAWLATITGFAAVSLQPNAGSQGEYAGLLVIRAFHRQRGEAHRNICLIPTSAHGTNPASAVMAGMQVVAIQCDSDGNIDQADLAAKAEQHSQNLAALMVTYPSTHGVFEQGISDICAVVHRHGGQVYLDGANLNAQVGVCQPGRFGADVCHLNLHKTFCIPHGGGGPGV

SEQ ID NO: 99135 - protein, 170 aa, Unknown
  Bacterial polypetide isolated from the Sargasso Sea
RLKDHYPILYKGSNGNVAHECIIDIRSIKAETGITEEDIAKRLIDFGFHAPTMSWPVAGTMMIEPTESENLSELDRFCDTLIKIKQEIDLIKTGKFDKIDNPIKNAPHTDTELASDNWTHKYSREEAAYPAKFLKINKFWPPVARVDNVYGDKNIFCTCPSMDEFKEDAA

SEQ ID NO: 99136 - protein, 251 aa, Unknown
  Bacterial polypetide isolated from the Sargasso Sea
MTSKFGSDLFIDRHLGLGDNDEKIMLNKLGFNNIDQFINQVIPEDIQLKDKSSEILPQGCSEIEALNELEEIANKNTKMRSLIGLGYYDNHMPKVIQRHVLENPRWYTSYTPYQAEIAQGRLEALFNFQTVICELTGFPVANASLLDEGTAAAEAMAMSFSARKNKSSKVYLVESNVFDHTFNVLQTRAKPLGISLKRFTQSNFSNHDDVFGMLLQLPGKNGELYDPTFLISQAHRSEITVTACVDPLAQV

SEQ ID NO: 99137 - protein, 257 aa, Unknown
  Bacterial polypetide isolated from the Sargasso Sea
MLSLTRLKTPAELGADIAVGSAQRFGIPMGYGGPHAAFFATKEEFKRSMPGRIIGVSVDRHGKKAFRLSLQTREQHIRRDKATSNICTAQALLAILSAAYAIYHGPEGILKIANRTSKLAKIFADGLKSGGYQLHSENFFDTVTVKTNEKTDTINNKALSEKINLRVVDKNTLSVAFDEVKRVDHVNTLLKIFGIKKTFSNTDKVDLTNLPKNLLRTSKYLTHPIFHKYHSETEMLRYLKRLEDCDIALNRSMIALG

SEQ ID NO: 99138 - protein, 319 aa, Unknown
  Bacterial polypetide isolated from the Sargasso Sea
MQFLVDKECFKQTIDVIISRAEPLDIEIIVTDIKNFDFTNAFGCILQYPNKYGHISSNDDYKNLVSDAHNSNCKVIFASDLMCLQLFEAPGNLGADIAVGNSQRFGVPLGYGGPHAAFMSTSEEFKRDIPGRIVGVSQDRRGNQAYRLTLQTREQHIRREKATSNICTAQVLLAIISGMYALFHGPDDLKNIAKRIHSHTKELADKISKLGHEIVTNDNSFFDTIVIKLSNISIESLKDKALEHNFNLMYHDNGLIGISLDEKTDYNEVEALANLFDVSNDSRNTYNIFKPNRAGDILTHPIFHTINSETEMLRYINKL

SEQ ID NO: 99139 - protein, 281 aa, Unknown
  Bacterial polypetide isolated from the Sargasso Sea
QGEYAGLLAIDAYHKNNGDDNRSICLIPRSAHGTNPASAMMVGMKVVPVECDSEGNIDLKDLKEKSSLHKSNLSAIMITYPSTHGVFESNVKEVCKIVHDHGGLVYIDGANLNALVGIAKPGEFGGDVSHLNLHKTFCIPHGGGGPGVGPIGVVEKLKDFMPSHHENIQNVGPVSSTDFGSASILPISWMYIAMMGSKGLKQATMTAILSANYVAKRLSDHYKILYKGENNLIAHECIIDARPFKESSNIDVDDIAKRLMDYGFHAPTMSWPVAGTLMIEP

SEQ ID NO: 99140 - protein, 247 aa, Unknown
  Bacterial polypetide isolated from the Sargasso Sea
CNIIHKKGGQVYMDGANLNALVGVAKPGKFGPDVCHINLHKTFCIPHGGGGPGMGPIACAKHLAEFLPTHEIIKESGPKNGMGAVSAAPWGSSSILPISWMYIKMMGAEGLKKASQVSILNANYISKKLSNDYKVLYTGKNGNVAHECIIDIRPIKASSGISEEDLAKRLIDFGYHAPTMSWPVAGTIMIEPTESENLEEIDKFCNALIKIKKEINLVETSKFDKIDNPLKNAPHTYVELSSNEMES

SEQ ID NO: 99141 - protein, 294 aa, Unknown
  Bacterial polypetide isolated from the Sargasso Sea
MEQLHPSVILRNILENPGWYTAYTPYQPEVSQGRLEMLMNFQQMIIDLTGMEISNASLLDESTAAAEAMMLAYRNQNKVKKTFCIQNDCHPQTLSVLKTRSSPVGIKILVSNEPNEDTFACLIQNPDTFGEIHDIKQMIDQNKKNNILSIVAADIMSLILIKSPGELGADIVIGSSQRFGVPIGFGGPHAAFFATKNEYKRLIPGRIIGVSVDRYKKRSYRMALQTREQHIRREKATSNICTAQALLAIISAAYAIYHGPERLKKIALTIHNNTIFLKKSLEYLGFNCQSPKFF

SEQ ID NO: 99142 - protein, 247 aa, Unknown
  Bacterial polypetide isolated from the Sargasso Sea
AAEAMGLSHRLNKKDNNLVFVSEDCHPQTINVIQTRAEPIGLKVLVGKEDEVLDQLKEDLVCGILQYPGTLGDIKDPSESISKIHKKNGKAILACDLLALAKLKTPRELGADIAVGSSQRFGIPMGYGGPHAAFFATKDEYKRSMPGRIVGVSVDRHGNKAYRLSLQTREQHIRRDKATSNICTAQALLAIVSAAFSIYHGPDGIRNISERVSQLAKSFADKIKQSGYELYSNYFFDTVTIITKEKT

SEQ ID NO: 99143 - protein, 269 aa, Unknown
  Bacterial polypetide isolated from the Sargasso Sea
RGLGADVCHLNLHKTFAIPHGGGGPGMGPIAVAEHLSPYLPGHSMVKTGGDEAIRSIAAAPWGSASVLLISHAYVCLLGWRGMTRATQVAMLNANYIKSRLSAHFEVLYAGENGRVAHELIFDLRPFRESAGVTEQDVAKRLMDFGFHAPTVSFPVQGTLMVEPTESEPKEELDRFCNAMMKIREEIQAIVDGEADRNDNVLLNAPHTAEELTASDWTHPYSRQQAAFPLSSVRARKYWPPISRIDDAYGDRNLMCSCPPVDSYDEGSE

SEQ ID NO: 99144 - protein, 176 aa, Unknown
  Bacterial polypetide isolated from the Sargasso Sea
MLHNSQKDFIRRHIGPSEKDQEKMLKDLNFKSLDEFINSTIPEKIQFKGELNIGEPNSEYEALRKLKAISKKNKIYSNFIGMGYYGTYTPYVILRNILENPGWYTSYTPYQPEVAQGRLEMLLNFQQMIVDFTGMDIANASLLDEGTAAAEAMGLSHRLNKSDSNFSFCFRELSST

SEQ ID NO: 99145 - protein, 300 aa, Unknown
  Bacterial polypetide isolated from the Sargasso Sea
FFVDKNCFRQTISVLKTRAKPFGIELEIGDPQDFNEKDFFGMLIQYPNKFGEIEDFSRLSDYCKRNKSLLVCATDLLALTLLRPPGEIGADIVIGSSQRFGVPMGFGGPHAAFMATHESFQRSMPGRIIGASKDASGNLSYRLALQTREQHIRREKATSNICTSQALLAVMAGFFAIYHGPNGLIGIANDIHKKTRKLFNALKSGDHEILNNNFFDTLSIRLKGNVSEIKTRLLDAKININWFDNNLVSISIDEATTSDDIADLVFALSGKSISNDSEDVEASLNKEIVRSSDFMKQERL

SEQ ID NO: 99146 - protein, 299 aa, Unknown
  Bacterial polypetide isolated from the Sargasso Sea
KEFSHPHPYSPIEQMDGYRELFTDLKNWLRTITGFSGVSLQPNAGAQGEFAGLMVIRKFHEKNGQKKRNVCLIPSSAHGTNPASAQMAGMKVVVVNCDVFGNVDYEDLKKKAEEHSDTLSTLMVTYPSTHGVFEEKITDICDLVHKHGGQVYMDGANLNALVGIAKPGNFGPDVCHINLHKTFCIPHGGGGPGMGPIACKKHLEIYLPSHPVIDCGPPSGIGAISAAPWGSSSILSISWMYIKMMGSEGLKLATQNAILNANYIAHKLKDHFPILYKGKNGNVAHECIIDIRKIKSETG

SEQ ID NO: 99147 - protein, 294 aa, Unknown
  Bacterial polypetide isolated from the Sargasso Sea
AWYTAYTPYQAEISQGRMEALVNFQTMVCDLTGMPIANASMLDEATAAAEAMTLAKRSVKSKSNVFVVAGDAHPQTIEVIQTRAKPLGLEVRLANSAEEWNTLLDGDYFAVLAQYPATSGRIDDLRADVEKAHAKQAAFIVAADLLALTLITPPGEQGADIVVGTTQRFGMPMGAGGPHAAYMACRDEFKRSMPGRLVGVSVDVHGKPAYRLALQTREQHIRREKATSNICTAQVLPAVIASMYAVYHGPEGLKRIAQRVAAYTAVLAQGLKQLGAPVREQATFDTLSLHTGAA

SEQ ID NO: 99148 - protein, 299 aa, Unknown
  Bacterial polypetide isolated from the Sargasso Sea
VNSIDQLIEQTVPAAIRLKQGLNLPEAKSEVDYLKALKQTASLNKVFKSYIGQGYYDNITPGVILRNVFENPGWYTQYTPYQAEIAQGRLQALLNFQTMVIDLTGMEIANASLLDEGTAAAEAMFMQYSLRKKEQGNKYFVSEAIFAQTIDILKTRANPFGIELVIGNHENFEPTAEFFGAIVQYPAGNGEVYNYSQLANTLHEQNVKLTVIADLLSLTLLTPPGEWGADVVVGTTQRFGIPMGFGGPHAAFFATKDEYKRSIPGRIIGVTIDSNDNYALRMALQTREQHIRRDKATSN

SEQ ID NO: 99149 - protein, 265 aa, Unknown
  Bacterial polypetide isolated from the Sargasso Sea
REGYNKLMSELIAMLKDITGFDGISLQPNSGAQGEFSGLLAIKKYHESKNNFNKNICLIPSSAHGTNPASANMCNMDVSIVNCDSKGNIDLVDLDKKIDDAGEKLAAIMITYPSTHGVFEESIVTICEKIHNAGGQVYMDGANLNALVGISKPGIFGPDVSHINLHKTFCIPHGGGGPGMGPIGVKKHLIPFLPGHPVIKKGIGLQENDAVSAAPWGSPSILPISYSYISMMGDEGLKNATQIAILNANYIKSRLESFYDILYKG

SEQ ID NO: 99150 - protein, 284 aa, Unknown
  Bacterial polypetide isolated from the Sargasso Sea
MISKIHKKNGKAILICDLLSLALIKTPAELGADIAVGSSQRFGIPMGYGGPHAAFFATRDEYKRSMPGRIVGVSVDRHGNKAYRLALQTREQHIRRDKATSNICTAQALLAIVAAAFAIYHGPEGIKNIAERVSQLTNNFANKLKQSGYELYSESFFDTVTIKTGDKTDKIFQNALDQKVNIRKVNSNMLAVSFDQKKNVYRANQLLKIFNSAESIKENPTESLPNLPKKMLRTSRYLNHPVFNNYHSETEMLRYLKKLEDKDIALNRSMIALGSCTMKLNAVQ

SEQ ID NO: 99151 - protein, 292 aa, Unknown
  Bacterial polypetide isolated from the Sargasso Sea
FSAIKSSDHEVLNNNFFDTLSIRLNGDISKIKTRLLDAKININWFDNNLVSISIDEATTSDDIADLVFALSGKSLPIDSEVGEASLKKEIVRSSNFMKQERFNKYHSETEMMRYIKRLSDKDIALDRSMIPLGSCTMKLNAASEMAPVSWPEFANMHPYCPIDQTKGYQVLIKDLREMLSGITGYYDISLQPNAGSQGEYAGLLAIDAYHKNNGDNNRSICLIPRSAHGTNPASAMMVGMKVIPVECDSEGNIDLKDLKEKSSLHKSNLSAIMITYPSTHGVFESNVREVCK

SEQ ID NO: 99152 - protein, 256 aa, Unknown
  Bacterial polypetide isolated from the Sargasso Sea
MKVVVVDCDKEGNVDFEDLKKKAEIHSENLGALMVTYPSTHGVFEEKIMEICELIHNHGGQVYMDGANLNALVGIARPGNFGPDVCHINLHKTLCIPHGGGGPGMGPIACKRHLQVYLPNHPVVKDCGPATGIGAVSAAPWGSSSILSISWMYIKMMGAEGLKLATQVAILNANYIAHRLKDHYPILYKGSNGNVAHECIIDIRSIKSETGITEEDIAKRLIDYGFHAPTMSWPVAGTMMIEPNESESLSELDRFC

SEQ ID NO: 99153 - protein, 292 aa, Unknown
  Bacterial polypetide isolated from the Sargasso Sea
PASAAMSGFDVISIPSDEAGNIDIDFLKSIAGPDLAGAMITLPSTLGIFDTNITEVCKIVHEAGGLVYGDGANMNALLGRAKLGHLGFDVIHLNLHKTFSTPHGGGGPGAGPVCAKSILYDFLPAPVVEKSPSAFELITPASSIGRISGFQGNFAVLVRAYTYIKTLGAAGIKSISGNAVLNANYIMESLKDIYDIPYNRTCMHEVVFSASSKKDQEVNGLAIAKRLLDYGFHAPTMYFPLIVEEALMVEPTESETLETLDAFIDAMKAINEEISTQPELVTEAPHTTPVSK

SEQ ID NO: 99154 - protein, 284 aa, Unknown
  Bacterial polypetide isolated from the Sargasso Sea
EKSIFSCVCTDLMSLVLFQPPGKYGASAVVGNSQRFGVPMGYGGPHAAFFATREEYKRFIPGRIIGVSIDKFGNPAYRMALQTREQHIKRDRATSNICTAQVLLAVMAGMYAVYHGKEGIKKIAKKINYLTRLLSNGLTHLDFQQENEIFFDTLKIKVDKEIKKKIRKSAEEKKINLRYFESNHVGISIDETKSTNDIFDLINIFSEFSNKNLEIDLDALGKFDSNKKIKELRTTDFLSHEIFNKYYTEHEILRYMKRLENKDLSLVHSMISLGSCTMKVNSTT

SEQ ID NO: 99155 - protein, 197 aa, Unknown
  Bacterial polypetide isolated from the Sargasso Sea
MYIKMMGSEGLKLATQIAILNANYIAYRLKNHFPILYKGSKGNVAHECIIDIRTIKSETGITEEDIAKRLIDFGFHAPTMSWPVPGTMMIEPTESESLKELDRFCDTLIKIKSEIDNIKSGKFDKIDNPIKNAPHTDLELASNEWMHKYTREEAAYPSEFLKSNKFWPPVARVDNVYGDKNLFCTCPSMDEFKEDAA

SEQ ID NO: 99156 - protein, 239 aa, Unknown
  Bacterial polypetide isolated from the Sargasso Sea
RFGVPMGFGGPHAGFIAVKDSHKRSLPGRLIGLSKDQQDRPCYRLALQTREQHIRREKATSNICTAQALLAIMSGFYAIYHGPEGLKEIATRINGLTKDLANKLIDKGLEIKSETFFDTLVVKVKDAKKIHEKANANGMNLRDISNDSVGVSLDETSTQDDVKAIIEIFDDEQNKNSKIDQSWSKELNRATAFLTHEVFNSHHSETQILRYIRSLADKDIALDRSMIPLGSCTMKLNAT

SEQ ID NO: 99157 - protein, 313 aa, Unknown
  Bacterial polypetide isolated from the Sargasso Sea
PSCPDSFEPPGEIGADIVIGSSQRFGVPMGFGGPHAAFMATHESFQRSMPGRIIGASKDASGNLSYRLALQTREQHIRREKATSNICTSQALLAVMAGFFAIYHGPNGLIGIANDVHKKTRQLFNALKAGDHEILNNNFFDTLSIRLKGDIPEIKTRLLDAKININWFDNNLVSISIDEATTSDDIIDLVFALSGKSISNISEDGEASLNKEIVRSSDFMKQERFNKYHSETEMMRYIKRLSDKDIALDRSMIPLGSCTMKLNSASEMAPVSWPEFANMHPYCPIDQTEGYQILIKDLREMLSGITGYYDISL

SEQ ID NO: 99158 - protein, 299 aa, Unknown
  Bacterial polypetide isolated from the Sargasso Sea
LKKLKIISQKNQTFRNFIGMGYYNCFTPNVVLRNILENPGWYTSYTPYQPEVAQGRLEMLLNFQQLIIDFTGMDIANASLLDEATAAAEAVGLAQRVSKNNSKKVYVSDTCNPQVIDLIKTRIEPFGLELLIGNQKDFLKNLNGDLLCGVIAYPDTLGEIIDPSESISLIRKKGGKAIVVCDLLSLAKLKTPSELGADIAVGNAQRFGVPMGYGGPHAAFFATKEEFKRSMPGRIIGVSVDRFGKKAYRLSLQTREQHIRRDKATSNICTAQALLAIVSAAYAIYHGPNGILDIANRTS

SEQ ID NO: 99159 - protein, 283 aa, Unknown
  Bacterial polypetide isolated from the Sargasso Sea
VFNIYHSETEMMRYLKKLKNKDVALNRSMIPLGSCTMKLNAASEMLPITLPGFANAHPFLEPHQRDGYNQMMKELISMLKDITGFDAISLQPNAGAQGEFAGLLAIQKFHKKNSDTKRNICIIPKSAHGTNPASAQMCGMEISIVNCDEKGNVDIDDLDKKIAEAGIKLSALMITYPSTHGVFEESIVEICKKIHDAGGQVYLDGANYNAMVGIAKPGKFGPDVCHMNLHKTFTIPHGGGGPGVGAIGLKKHLEEFAPGHPVFKNEIGLTEQEAVSAAPWGSA

SEQ ID NO: 99160 - protein, 309 aa, Unknown
  Bacterial polypetide isolated from the Sargasso Sea
NKFFVDKFTHPQNIAVMKTRAEPLHINIVIGHPDEILEDNQYFGAIFQYPGTFGDIRDFSNHISSLHRNNAIAIMSADPLALTILKDPGSMDADIAVGSTQRFGVPVGFGGPHAAYIATKDLYKRNLPGRIVGVSIDSRGNKALRLALQTREQHIRREKATSNVCTAQALLAVMASMYAVFHGPDGLKAIAQRIHRKTVRLAIGLEELGYKIEPNSFFDTITIDVGNAQTVILKSGINEGINFRKIDENKIGITLDERTRPEIIESVWKAFGLDKKDTDFTPNYRIPDRLIRTTPYLEHPIFHMNRAEQ

SEQ ID NO: 99161 - protein, 286 aa, Unknown
  Bacterial polypetide isolated from the Sargasso Sea
SCAMITYPSTHGVYEETVREICDIVHQYGGQVYMDGANMNAQVGITSPGFIGSDVSHLNLHKTFCIPHGGGGPGMGPIGVKSHLAPFLPNHTVVNVETAGKDCGAVSAAPWGSASILPISYMYIKMMGSAGLRRATEVAILNANYVAKKLEGHFPVLYKGNNGRVAHECIIDLRPLKEASGVTELDIAKRLNDYGFHAPTMSFPVAGTLMIEPTESEAKYELDRFINAMVSIRQEIAKVESGEWDATDNPLHNAPHTLADICDSDWNRSYDRMLAAYPAPEVHRNK

SEQ ID NO: 99162 - protein, 292 aa, Unknown
  Bacterial polypetide isolated from the Sargasso Sea
GVSVDRHGNKAYRLSLQTREQHIRRDKATSNICTAQALLAIVSAAYAIYHGPDGIKSISERVSQLAKNFADKIKQSGYELYSDYFFDTVTIITKDKTDQIFKNALDQKVNIRKVNSEMLSVSFDERKNVYRVNQLLKIFNAAESIKKEDPTVALPNLPKNLLRTSKYLEHPVFNSYHSETEMLRYLKKLEDKDIALNRTMIALGSCTMKLNATAEMIPISWRELAEPHPFVPVEQMEGYREMFTDLKNWLRSITGFSGVSLQPNAGAQGEYAGLMVIRKYHLDRGDENRNIC

SEQ ID NO: 99163 - protein, 242 aa, Unknown
  Bacterial polypetide isolated from the Sargasso Sea
MLKELNYQSLDDLIDNTVPEKIKFKGELNIGESNSEYEALRKLRAISKKNQVYSNFIGMGYYGTYTPYVILRNILENPGWYTSYTPYQPEVAQGRLEMLLNFQQMIVDFTGMDIANASLLDEGTAAAEAMGLSNRLNKKDSNLVFVSEDCHPQTIDVIQTRAEPMGLKVLVGKEDEVLDQLKEDLVCGILQYPGTLGDIKNPSEAISKIHKKNGKAVLACDLLALAKLKTPRELGADVAVGS

SEQ ID NO: 99164 - protein, 294 aa, Unknown
  Bacterial polypetide isolated from the Sargasso Sea
MEGFRDLFTDLKYWLRSITGFSGVSLQPNAGAQGEYAGLMVIRKYHLDRDDAHRNICLIPSSAHGTNPASAQMVGMKVVVVNCDKEGNVDFDDLKKKVEQHSENLAALMVTYPSTHGVFEEKITDICEIVHKHGGQVYMDGANLNALVGVAKPGNFGPDVCHINLHKTFCIPHGGGGPGMGPIACKKHLQVYLPNHPVIKDCGPTSGIGAVSAAPWGSSSILSISWMYIKMMGSEGLKLATQVAILNANYIAHRLKDHFPILYKGANGNVAHECIIDIRNIKSETGVTEEDIAK

SEQ ID NO: 99165 - protein, 301 aa, Unknown
  Bacterial polypetide isolated from the Sargasso Sea
MLAVSFDERKNVYRVNQLLKIFNAAESIKKEDPSISLPNLPKNLLRTSKYLEHPVFNSYHSETEMLRYLKRLEDKDIALNRTMIALGSCTMKLNAAAEMIPISWKEFAEPHPFVPIEQMEGFRDLFTDLKNWLRSITGFSGVSLQPNAGAQGEYAGLMVIRKYHLDRGEANRNICLIPSSAHGTNPASAQMVGMKVVVVNCDKEGNVDFDDLKKKAEQHSENLGALMVTYPSTHGVFEEKITDICELVHKHGGQVYMDGANLNALVGIAKPGNFGPDVCHINLHKTFCIPHGGGRDRYGTD

SEQ ID NO: 99166 - protein, 277 aa, Unknown
  Bacterial polypetide isolated from the Sargasso Sea
DENCHPQTIGVIQTRAEPLGIEVIVGAPETLEAEKVFGAIFQYPGTYGHVRDFTAECEALHAAKAVAVVATDLLALCLLKEPGAMGADIAVGSAQRFGVPMGYGGPHAAFMSSTDKMKRAMPGRIVGVSIDSHGNRAYRLSLQTREQHIRREKATSNVCTAQALLAVMASFYAVFHGPVGLRAISERVHLLTVQLADALKAAGALVEPANFYDTITVEVGVGQQGILAAARHRGINLRKVGRDRVGISLDETSDPGVVAKVLDAFGITEAAPEAKQP

SEQ ID NO: 99167 - protein, 330 aa, Unknown
  Bacterial polypetide isolated from the Sargasso Sea
NICTSQALLAVMAGFFAIYHGPNGLIGIANDIHKKTRILFNALKSGDHEILNNNFFDTLSIRLKGDIQEIKTRLLDAKININWFDNNLVSISIDEATTSDDIIDLVFALSGKSISNISEDGEASLNKEIVRSSDFMKQERFNKYHSETEMMRYIKRLSDKDIALDRSMIPLGSCTMKLNSASEMAPVSWPEFANMHPYCPTDQTKGYQVLIKDLREMLSSITGYYDISLQPNAGSQGEYAGLLAIDAYHKNNGDDNRSICLIPRSAHGTNPASAMMVGMKVVPVECDSEGNIDLKDLKEKSSLHKSNLSAIMITYPSTHGVFESKCEEVC

SEQ ID NO: 99168 - protein, 254 aa, Unknown
  Bacterial polypetide isolated from the Sargasso Sea
EALMNYQTMVADLTGMDISNASLLDEPTAAAEAMMLANRVAKSKSNVFFIHKNSFPQSIAIMKSRAKPLGIEIEVGKEMDSKKEYFGCYVQYPGDDGSIIDFSAVSESVHAQGGLLIVGSDLLALTLLKPPSEFGADIVVGSSQRFGVPMGFGGPHAGFIAVKDSHKRSLPGRLIGLSKDQQDRPCYRLALQTREQHIRREKATSNICTAQALLAIMSGFYAIYHGPEGLKEIAIRINGLTKDLANKLIDKGLE

SEQ ID NO: 99169 - protein, 253 aa, Unknown
  Bacterial polypetide isolated from the Sargasso Sea
GVGPIGVGAHLKPFLPGHHSLKKAQLGSDQNSVSAAAWGSASILPISWMYIRMMGRNGLKKASESAILNANYIAERLKPHYPVLYTGVNGRVAHECIIDLRPIKEATGITVDDVAKRLIDFGFHAPTMSFPVSGTFMIEPTESESLKELDRFCEAMIIIRDEIKEIESGISDPEDNPLKFAPHTAEALLTENWTHSYTREKAAYPVAALREGKHWPPVGRIDNVFGDRNLICTCPSLDDYEEDSGKSKSSLAA

SEQ ID NO: 99170 - protein, 324 aa, Unknown
  Bacterial polypetide isolated from the Sargasso Sea
AALMITYPSTHGVFEDSLIHICEIIHNKGGQVYMDGANLNALMGIAQPGKLGPDVLHMNLHKTFCIPHGGGGPGMGPIGLKSHLSEFAPNHCVIQIKDLHEGNTAVSAAPFGSPGILPISWVYIQLMGGYGLKKSSQVAILNANYLAKRLNEHFPIVYKGKNGLVAHECIIDVRPLKADTGISEEDIAKRLIDYGFHAPTMSWPVAGTLMIEPTESEPKAELDRFCEAMISIRREVTRVDSGEWDKIDNPLKNSPHPADDLTDPEWNHCYSKETAFYPLASIRRNKYWPPSARVDNVHGDRNVFCACPPLEDMRASSEYISQCG

SEQ ID NO: 99171 - protein, 308 aa, Unknown
  Bacterial polypetide isolated from the Sargasso Sea
GLLVQKSVDRGNNFRFVDKNLFTISLDETTTLEDVDNLINFFNENNKSLIHEDLEKEINSIEIFTDKLKRDEEILSHPIFNIYHSETDMMRYLKKLENKDIALNRSMIPLGSCTMKLNAASEMLPITLNGFSNAHPFLESHQREGYNQLMIELIAMLKDITGFDGISLQPNAGAQGEFAGLLAIKKFHDHNNENNRNICIIPNSAHGTNPASAQMCGMEVSIVKCDKYGNVDIDHLKQKINEAGLNLAALMITYPSTHGVFEEGIVEICNLIHDAGGQVYMDGANLNALVGIAKPGFFGPDVSHMNLH

SEQ ID NO: 99172 - protein, 254 aa, Unknown
  Bacterial polypetide isolated from the Sargasso Sea
ICELIHKHGGQVYMDGANLNALVGIAKPGNFGPDVCHINLHKTFCIPHGGGGPGMGPIACKKHLESFLPSHPIIKDCGPATGIGPVSAAPWGSSSILSISWMYMKMMGSEGLKLATQIAILNANYVAHKLKNHYPILYKGTKGNVAHECIIDIRNIKKETGITEEDIAKRLIDFGFHAPTMSWPVPGTMMIEPTESESLVEIDRFCETLIKIKIEIDKIGAGKFDKVDNPIKNAPHTDLELASNDWNHKYKREE

SEQ ID NO: 99173 - protein, 294 aa, Unknown
  Bacterial polypetide isolated from the Sargasso Sea
FIRKYHLDRDDAHRNICLIPSSAHGTNPASAQMVGMKVFVINCDKEGNVDFDDLKKKVEQHSENLAALMVTYPSTHGVFEEKITDICELVHKHGGQVYMDGANLNALVGVAKPGNFGPDVCHINLHKTFCIPHGGGGPGMGPIACKKHLQVYLPNHPVIKDCGPTSGIGAVSAAPWGSSSILSISWMYIKMMGSEGLKLATQVAILNANYIAHRLKDHFPILYKGANGNVAHECIIDIRNIKSETGVTEEDIAKRMIDFGFHAPTMSWPVAGTMMIEPTESEGLSEIDRFCDTL

SEQ ID NO: 99174 - protein, 299 aa, Unknown
  Bacterial polypetide isolated from the Sargasso Sea
GMKVVPIECDSEGNIDLKDLKEKASFHKSNLSAIMITYPSTHGVFESNVREVCKIVHDHGGLVYIDGANLNALVGIAKPGEFGGDVSHLNLHKTFCIPHGGGGPGVGPIGVVEKLKNFMPSHHENIQNVGPVSSTDFGSASILPISWMYIAMMGSKGLKQATMTAILSANYVAKRLSDHYQILYKGENNLIAHECIIDARPFKESSNIDVDDIAKRLMDYGFHAPTMSWPVAGTLMIEPTESESREELDIFCDAMISIRKEIEEIEKGNEDSENNILKNSPHTVEELSNDNWEHNYSRE

SEQ ID NO: 99175 - protein, 273 aa, Unknown
  Bacterial polypetide isolated from the Sargasso Sea
MPKNLLRTSKYLEHPVFNSYHSETEMLRYLKRLEDKDIALNRAMIALGSCTMKLNSAAEMIPISWKEFAEPHPFVPIEQMEGFRDLFTDLKNWLRSITGFSGVSLQPNAGAQGEYAGLMVIRKYHLDRGESNRNICLIPSSAHGTNPASAQMVGMKVVVVNCDKEGNVDFDDLKKKVEQHSENLGALMVTYPSTHGVFEEKIIDICELIHKHGGQVYMDGANLNALVGVAKPGNFGPDVCHINLHKTFCIPHGGGGPGMGPIACKKHLQVYLP

SEQ ID NO: 99176 - protein, 250 aa, Unknown
  Bacterial polypetide isolated from the Sargasso Sea
VTWKEFSLPHPFVPQDQMKGYKVLFNDLVNDLKEITGFDAVSLQPNSGAQGEYSGLMTIRKFHLNNNQKNRNVCLIPESAHGTNPASAQMCGMKVVVINCDDEGNVDLIDLKDKVNKYSKDLAALMVTYPSTHGVFEEKISEICDYVHKAGGQVYMDGANLNALVGIAKPGKFGPDVCHINLHKTFCIPHGGGGPGMGPIACAKHLKDFLPNHYITKKTRSEKSLGSVSAAPWGSASILPISWMYIKMMG

SEQ ID NO: 99177 - protein, 238 aa, Unknown
  Bacterial polypetide isolated from the Sargasso Sea
CKHLEDFLPNHSVIKSIGTDKSLGSVSAAPWGSSSILVISWMYIKMMGAEGLKKASQVAILNANYISKRLSKFYKVLYTGKNGNVAHECIIDLRPIKAKSGISEEDIAKRLIDYGYHAPTMSWPVAGTLMIEPTESEGLDEMNRFCNALISIKEEIDKVDKGNFDKKDNPLKNAPHTYLELSSNEWKHSYTREEAAFPKEYLKDNKFWPPVARVDNVYGDRNLVCTCPSLDEYKDEAA

SEQ ID NO: 99178 - protein, 258 aa, Unknown
  Bacterial polypetide isolated from the Sargasso Sea
VSLQPNSGAQGEYAGLMTIRKFHESNGQGGRDVCLIPNSAHGTNPASAQMSGMKVVVVNCDEDGNVDLGDLKNKAEKYSKNLAALMVTYPSTHGVFEEKIIEICDVIHNYGGQVYMDGANLNALVGIAKPGKFGPDVCHINLHKTFCIPHGGGGPGMGPIACAKHLANFLPTHEIIKDAGPKNGMGAVSAAPWGSSSILPISWMYIKMMGAEGLKKASQISILNANYISKKLSKDYKVLYTGKNGNVAHECIIDIRPN

SEQ ID NO: 99179 - protein, 54 aa, Unknown
  Bacterial polypetide isolated from the Sargasso Sea
ERYQPEISQGRLEALLNFQQMVADLTGLAISNASLLDEATAAAEAMTLLQRTGK

SEQ ID NO: 99180 - protein, 317 aa, Unknown
  Bacterial polypetide isolated from the Sargasso Sea
LRYLNNLDLGQQTKEIHKRSLNKNINLRRIDEEHIGISLDETTSMKDLEDVIEIFTNQKIDLNLNFESSIPENLKRTSSFLDHEVFKKYRTETELVRYIRKLSDKDIALDRAMIPLGSCTMKLNATSEMIPVSWPEFSKIHPFAPKDQLHGYTELIEDMEKMLVDLTGYSKISLQPNAGSQGEYAGLLAIDAFHKKNNESHRNICLIPKSAHGTNPASAQMVGLEVIPVECDEEGNIDIDDLKQKAEIHEKNLSSLMITYPSTHGVFETNVSEVCDVIHSKGAFVYIDGANFNAMVGICYPGSFGGDVSHLNLHKTF

SEQ ID NO: 99181 - protein, 119 aa, Unknown
  Bacterial polypetide isolated from the Sargasso Sea
MINSFLKSHLGNINQDDINFMLDKIGVESLEELLNQTIPNDIFLDHKLNLPQGINENEYLKNLEKISEKNILFQNYIGLGYNKSITPSVIKRNILENPGWYTAYTPYQAEIAQGRLEAL

SEQ ID NO: 99182 - protein, 271 aa, Unknown
  Bacterial polypetide isolated from the Sargasso Sea
MIDDNSKEFIKRHIGPSDEDQSKMLQYVGYKSLEDLMSNTVPEKILLKDDLKIDQPMSENDALKKLKSISKKNKIFKNFIGMGYYNSITPNVILRNILENPGWYTSYTPYQPEVAQGRLEMLLNFQQSIIDLTGMDIANASLLDEATATAEAVGLSQRLDKTNSKKIFISSNCNPQTIDLIKTRTNPFGLELIIGEEATELAKINEDIICGVLSYPGTLGEINDPSESISQIHKKNGKAILVCDLLALARLKTPAELGADIAVGSAQRFGI

SEQ ID NO: 99183 - protein, 126 aa, Unknown
  Bacterial polypetide isolated from the Sargasso Sea
DYGFHAPTMSWPVAGTMMIEPTESESLSELDRFCDTLISIKSEIDMIKSGKFDKVDNPIKNAPHTDIELASDEWNHKYSREQAAYPAKFLKENKFWPPVARVDNVYGDKNLFCSCPSMDEFKNTAA

SEQ ID NO: 99184 - protein, 258 aa, Unknown
  Bacterial polypetide isolated from the Sargasso Sea
MRTEMFLNRHLGPNEGEIKVMLKKIGVDSLCQLIEETIPQSIRLNKTLDLPEGISEDAFTKHVNSLGNENQLFNTYIGLGYNQTITPAVIQRNILENPSWYTAYTPYQAEIAQGRLEALFNFQTVICDLTGMELSNASLLDESTAAAEAMTMLFGSRTKEQKKHNAFQFFVDENIFPQTFSLLKTRANPLGIDLVIGDPNQFEYNFNFFGAIFQYPGRKGNVPHLKSWIEKAINKGVCTVVAADIMSLVLLESPGKFG

SEQ ID NO: 99185 - protein, 296 aa, Unknown
  Bacterial polypetide isolated from the Sargasso Sea
RDCFTDLKNWLRSITVFSGVSLQPNAGAQGEYAGLMVIRKYHLDRDEVHRNICLIPSSAHGTNPASAQMVGMKVVVVNCDKEGNVDFDDLKKKVEQHSENLAALMVTYPSTHGVFEEKITDICELVHKHGGQVYMDGANLNALVGVAKPGNFGPDVCHINLHKTFCIPHGGGGPGMGPIACKKHLQVYLPNHPVIKDCGPASGIGAVSAAPWGSSSILSISWMYIKMMGSEGLKLATQVAILNANYIAHRLKDHFPILYKGANGNVAHECIIDIRNIKSETGVTEEDIAKRMIDFG

SEQ ID NO: 99186 - protein, 68 aa, Unknown
  Bacterial polypetide isolated from the Sargasso Sea
AAWGSASILPISWMYIRMMGRNGLKKASESAILNANYIAERLKPHYPVLYTGVNGRVAHECIIDLRPI

SEQ ID NO: 99187 - protein, 301 aa, Unknown
  Bacterial polypetide isolated from the Sargasso Sea
EYAGLLAIDAFHKKNGNENRNICLIPKSAHGTNPASAQMVGLKVVPIECDLEGNIDIEDLKEKASKHSENLSSLMITYPSTHGVFETSVTEVCEIIHSHGGFVYIDGANFNAMVGLCFPGAFGGDVSHLNLHKTFCIPHGGGGPGIGPIGVVEALKDFMPSTHKETKAVGPVSGTDWGSASILPISWMYIKMMGTNGLIQATQNAILNTNYIASKLKDHYDILYKGENGLVAHECIIDIRPLKESSGVEVEDVAKRLIDYGFHAPTMSWPVAGTLMIEPTESESLKELDRFCEAMISIRKE

SEQ ID NO: 99188 - protein, 303 aa, Unknown
  Bacterial polypetide isolated from the Sargasso Sea
LKTPAELGADIAVGSAQRFGVPMGYGGPHAAFFATKENLKRSMPGRIIGVSVDKFGKKAYRLSLQTREQHIRRDKATSNICTAQALLAIVSAAYAIYHGPNGILNIANRTSKLAKLFANNLKEGGFDLHSDNFFDTVTIKTNEKTEEIYKKAITEKVNLRKVNNKTLSVAFDEAKRFDHVNLLLKIFGINKVLKDIEDVKLDNLPKNLLRTSKYLSHPVFNKYHSETEMMRYLKRLEDSDIALNRSMIPLGSCTMKLNSTAEMIPISWKEFSLPHPYVPVEQMKGYTSLFNDLEKDLKEITGS

SEQ ID NO: 99189 - protein, 246 aa, Unknown
  Bacterial polypetide isolated from the Sargasso Sea
RLERKDIGLDTSMIPLGSCTMKLNAAVEMEAVTWPEFSTLHPYVPVSQAAGYQTIIRELETALCQITGFAAVSLQPNSGAQGEYAGLLAIRAYHQANGETARDVVLIPSSAHGTNPASAVMAGMKVIVVACDDDGNVDVLDLQKHADAHSESLAALMVTYPSTHGVFEESIQDICAIVHAHGGQVYMDGANMNAQVGITSPARIGADVCHLNLHKTFAIPHGGGGPGMGPIAVAAHLSPHLPGRPH

SEQ ID NO: 99190 - protein, 294 aa, Unknown
  Bacterial polypetide isolated from the Sargasso Sea
AISKKNQIYSNFIGMGYYGTYTPYVILRNILENPGWYTAYTPYQPEVAQGRLEMLLNFQQMIVDFTGMDIANASLLDEGTAAAEAMGLSHRLNKKDSNIVFVSENCHPQTIDVIQTRAEPMGLKVLVGDEDKVLDQLKEDLVCGILQYPGTLGDIKDPSEAISKIHKKNGKAVVVSDLLALALLKTPRELGADIAVGSSQRFGIPMGYGGPHAAFFATKDEFKRSMPGRIIGVSVDRHGNKAYRLSLQTREQHIRRDKATSNICTAQALLAIVSAAYAIYHGPEGIRTIAERVS

SEQ ID NO: 99191 - protein, 295 aa, Unknown
  Bacterial polypetide isolated from the Sargasso Sea
ELPDSITEHEFLKEIKSLSSMNKKFKTYIGLGYYDTFTPSVIQRNILENPGWYTAYTPYQAEIAQGRLEALLNFQTMVCDLTKMEIANASLLDESTSAAEAMTLLFNNRTAEQKKDKIVSFFIDDNILPQTKSVLETRAEPIGIKLEFGDISKIQTKKYYGAIVQFPGKHGDLKNYNPILERLQKNDIKVVIAADLMSLVIVEPPKENLVDIVVGTTQRFGIPLGYGGPHAAFFATKEKYKRSLPGRIIGLTKDVNGDRALRMALQTREQHIKRDRATSNICTAQVLLAVMAGMY

SEQ ID NO: 99192 - protein, 298 aa, Unknown
  Bacterial polypetide isolated from the Sargasso Sea
HGVLKSNVREVCKIVHDHGGLVYIDGANLNALVGIAKPGEFGGDVSHLNLHKTFCIPHGGGGPGVGPIGVVEKLKDFMPSHHENIQNVGPVSSTDFGSASILPISWMYIAMMGSKGLKQATMTAILSANYVAKRLSDHYQILYKGENNLIAHECIIDARPFKESSNIDVDDIAKRLMDYGFHAPTMSWPVAGTLMIEPTESESREELDIFCDAMISIRKEIEEIEKGNEDSENNILKNSPHTVEELSSDNWEHNYSREKAAYPLDYLKARKYWPPVKRIDNVYGDKNLFCTCPDMDEL

SEQ ID NO: 99193 - protein, 204 aa, Unknown
  Bacterial polypetide isolated from the Sargasso Sea
MIDDNSKEFIKRHIGPSEEDQSKMLQHVGYKSLEDLMINTVPEKILLKGDLKIDQPMSENDALKKLKSISKKNKIFKNFIGMGYYNSITPNVILRNILENPGWYTSYTPYQPEVAQGRLEMLLNFQQSIIDLTGMDIANASLLDEATATAEAVGLSQRLDKTNSKKIFISSNCNPQTIDLIKTRTNPFGLELIIGDEKKELTKI

SEQ ID NO: 99194 - protein, 268 aa, Unknown
  Bacterial polypetide isolated from the Sargasso Sea
MKLNAASEMIPLFWSEWNSIHPFVPIDQAQGYHQVINKLENYLSEITGFSATSLQPNSGAQGEYSGLMVIKSYLNKMGEEHRNICLIPSSAHGTNPASAIMAGLKVVVIGTDERGNIDIDDLKLKIEEHKDNLAALMITYPSTHGVFESEIQLINELIHQNGGQVYMDGANMNAQVGLTSPKLIGADVCHLNLHKTFSIPHGGGGPGVGPICVAEHLKDFLPSNPIISSGGKYHIDAISSAPWGSALVCLISYGYIRMLGKSRNKELN

SEQ ID NO: 99195 - protein, 174 aa, Unknown
  Bacterial polypetide isolated from the Sargasso Sea
IKEKLKKYFPLLYSGKNGMVAHECIIDIRPIKEELNISEEDIAKRLIDYGFHAPTMSFPVPGTLMIEPTESESKEEIDRFVTAMISIHEEIEKVRNGKYDIIDNPIKNAPHTIEEVSSDNWTHSYTRGDGAFPHSYLYNNKYWPPVARIDNVYGDRNLFCVCPPIEEYEEVSNA

SEQ ID NO: 99196 - protein, 297 aa, Unknown
  Bacterial polypetide isolated from the Sargasso Sea
MIDDNSKEFIKRHIGPSDEDQSKMLKYVGYNSLNDLIINTVPEKILLKNDLKIEEPLSENDALKKLKSISKKNKIFKNFIGMGYYNSITPNVVLRNILENPGWYTSYTPYQPEVAQGRLEMLLNFQQSIIDLTGMDIANASLLDEATATAEAVGLSQRLDKTNSKKIFISSNCNPQTIDLIKTRTGPFGLELIIGDEKKDLIKINEDIICGVLSYPGTLGEIVDPSESISQIHKKKGKAILVCDLLALAKLKTPAELGADIAVGSAQRFGIPMGYGGPHAAFFATKEEFKRSMPGKN

SEQ ID NO: 99197 - protein, 301 aa, Unknown
  Bacterial polypetide isolated from the Sargasso Sea
ADPLSLTLLKEPGAMGADIAIGSTQRFGVPVGYGGPHAAYMATKDAYKRSMPGRLVGVSVDTQNKAAYRLSLQTREQHIRREKATSNVCTAQALLAVMASFYAVFHGPEGLKAIAQRIHRKTVRLAKGLESAGFKVEPDAFFDTITVEVGLMQKTVMDAAVREGINLRAVGKTKIGINLDERSRRKVTEAVWRAFGITRSDDDLSHDYRVPDSLHRKSKYLEHDVFHMNRAETEMMRYMRRLADRDLALDRAMIPLGSCTMKLNSAAEMMPVSWREFSLLHPFAPKDQALGYEEMISDLSS

SEQ ID NO: 99198 - protein, 281 aa, Unknown
  Bacterial polypetide isolated from the Sargasso Sea
DRDLALDRSMIPLGSCTMKLNATTEMIPVSWPEFADIHPFAPKEQQAGFTQLTEQLKNWLCEATGYGGISLQPNAGSQGEYAGLLAIRSWQRSRGQGHRDVCLIPASAHGTNPASAQMAGMRVVVTGCDAQGNIDLDEFKSKCDEYSNDLAAVMITYPSTHGVFESHVKELCDIVHHHGGRVYVDGANMNALVGTAAPGDFGGDVSHLNLHKTFCIPHGGGGPGVGPVCVVDDLVDFLPGHATGGVATSGGVGAVSATPLGNALVLPISWMYIRMMGAESL

SEQ ID NO: 99199 - protein, 266 aa, Unknown
  Bacterial polypetide isolated from the Sargasso Sea
YGGPHAAFFATKDEYKRSMPGRIIGVSVDRHGNKAYRLSLQTREQHIRRDKATSNICTAQALLAIVSAAYAIYHGPDGIKNISERVSQLAKNFGDKIKQSGYELYSDYFFDTVTIITKDKTDQIFKNALDQKVNIRKVNSEMLSVSFDEKKNVYRVNQLLKIFNAAESIKKEDPTVSLPNLPKNLLRTSKYLEHPVFNSYHSETEMLRYLKKLEDKDIALNRTMIALGSCTMKLNATAEMIPISWRELAEPHPFVPVEQMEGYREL

SEQ ID NO: 99200 - protein, 284 aa, Unknown
  Bacterial polypetide isolated from the Sargasso Sea
VPDKIRFKDKLSIGEPNSEYEALRKLKVISKKNQVFSNFIGMGYYGTYTPNVIVRNILENPGWYTAYTPYQPEVAQGRLEMLLNFQQLIVDFTGMDIANASLLDEGTAAAEAIGLSYRLSKNDSKKVFVSSDCHPQTIAVIKTRAEPLGLEVILGNDSEIDNIKDLVCGILQYPGTLGDVKDPSESISKIHKKNGKAILACDLLALSLLKTPAELGADIAIGSSQRFGIPMGYGGPHAAFFATKDEFKRSMPGRIIGVSVDRHGNKAYRLSLQTREQHIRRDKA

SEQ ID NO: 99201 - protein, 291 aa, Unknown
  Bacterial polypetide isolated from the Sargasso Sea
QRLSRDLEAWLSALTGFAAVSLQPNAGSQGEYTGLLVIRAWHLSRGDANRDVCLIPTSAHGTNPASAVMAGLRVVPVACDADGNIDQQDLAARVAEHADRLAALMVTYPSTHGVFEPGIRRICDLVHANGGQVYLDGANLNAQVGLCRPGAYGADVCHLNLHKTFCIPHGGGGPGVGPIGVADHLAPFLPGHPLATSPSNSAIGPVSAAALGSAGILPISWMYLRMMGAAALRQASAVALLSANYLAHRLDEHYPVLFRGPTGRVAHECILDLRPLKRSASIDVDDIAKRL

SEQ ID NO: 99202 - protein, 237 aa, Unknown
  Bacterial polypetide isolated from the Sargasso Sea
GAQGEYAGLMVIRKYHLDRGDKNRNICLIPSSAHGTNPASAQMVGMKVVVVNCDKEGNVDFEDLKKKVESHSENLGALMVTYPSTHGVFEEKISDICDLIHKHGGQVYMDGANLNALVGIAKPGNFGPDVCHINLHKTFCIPHGGGGPGMGPIACKRHLQVYLPNHPVVKDCGPSTGIGAVSAAPWGSSSILSISWMYIKMMGSEGLKLATQVAILNANYIANRLKDHFPILYKGSK

SEQ ID NO: 99203 - protein, 300 aa, Unknown
  Bacterial polypetide isolated from the Sargasso Sea
YEETVREICDIVHQYGGQVYMDGANMNAQVGITSPGFIGSDVSHLNLHKTFCIPHGGGGPGMGPIGVKSHLAPFLPNHTVVNVETAGKDCGAVSAAPWGSASILPISYMYIKMMGSDGLRRATEVAILNANYVAKKLEGHFPVLYKGNNGRVAHECIIDLRPLKEASGVTELDIAKRLNDYGFHAPTMSFPVAGTLMIEPTESEAKYELDRFINAMVSIRQEIAKVESGEWDATDNPLHNAPHTLADICDSDWNRSYDRTLAAYPAPEVHRNKFWPTVNRIDDVYGDRNPICSCPSIESY

SEQ ID NO: 99204 - protein, 291 aa, Unknown
  Bacterial polypetide isolated from the Sargasso Sea
NKGGQVYMDGANLNALMGIAQPGKLGPDVLHMNLHKTFCIPHGGGGPGMGPIGMKSHLSKFAPNHCVVQIKDLPEGNTAVSAAPWGSPGILPISWVYIQLMGGCGLKKSSQVAILNANYLAMRLNEHFPIVYTGKNGLVAHECIIDIRPLKADTGISEEDIAKRLIDYGFHAPTMSWPVAGTLMIEPTESEPKSELDRFCEAMISISIEADRVLKGEWDKTDNPLKNSPHPADDLTDSKWNHCYSQETAFFPIASIRQNKYWPPSARVDNVHGDRNIFCSCPPLESYEDEE

SEQ ID NO: 99205 - protein, 244 aa, Unknown
  Bacterial polypetide isolated from the Sargasso Sea
SLIGLGYHSTVIPFVVQRNVLENPNWYTAYTPYQAEISQGRLEALFNFQTLISELTGLPISNASLLDEATAAAEAISLSLAVRKNKNANKFLVDQEILPQTYDVLKTRCDPLGIVLEFFDNDNFEIDNNVFGILIQLPGKNGRIWDPTSIIDQVHKFDAIVTISIDPLAQVLIKPMGEFGADIVVGSAQRFGVPIAFGGPHAAFFATKEIYKRQIPGRIVGQSVDVEGNQALRLALQTREQHIR

SEQ ID NO: 99206 - protein, 268 aa, Unknown
  Bacterial polypetide isolated from the Sargasso Sea
KNWLRSITGFSGVSLQPNAGAQGEYAGLMVIRKYHLDRGDENRNICLIPSSAHGTNPASAQMVGMKVVVVNCDKEGNVDFDDLKKKTELHSENLGALMVTYPSTHGVFEEKIMDICELIHKHGGQVYMDGANLNALVGIAKPGNFGPDVCHINLHKTFCIPHGGGGPGMGPIACKKHLQVYLPNHPVVKDCGPATGIGAVSAAPWGSSSILSISWMYIKMMGSEGLKLASKVAILNANYIAERLKDHYPILYKGFNGNVAHECIIDIR

SEQ ID NO: 99207 - protein, 231 aa, Unknown
  Bacterial polypetide isolated from the Sargasso Sea
KISDICKLIHDHGGQVYMDGANLNALVGIAKPGNFGPDVCHINLHKTFCIPHGGGGPGMGPIACKKHLEIYLPSHPVIKDCGPATGIGPVSAAPWGSSSILSISWMYIKMMGSEGLKLATQIAILNANYIANKLKNHFPILYKGNKGNVAHECIIDIRNIKNETGITEEDIAKRLIDFGFHAPTMSWPVPGTMMIEPTESESLSELDRFCDTLIKRKLEIENIKSGKNLIK

SEQ ID NO: 99208 - protein, 241 aa, Unknown
  Bacterial polypetide isolated from the Sargasso Sea
IACKRHLQVYLPNHPVVKDCGPATGIGAVSAAPWGSSSILSISWMYIKMMGSEGLKLATQIAILNANYIAHRLKDHYPILYKGSNGNVAHECIIDIRSIKTETGITEEDIAKRLIDYGFHAPTMSWPVAGTMMIEPTESESLPELDRFCDTLISIKSEIDMIKSGKFDKVDNPIKNAPHTDIELASDEWNHKYSREQAAYPAKFLKANKFWPPVARVDNVYGDKNIFCTCPSMDEFKEDAA

SEQ ID NO: 99209 - protein, 141 aa, Unknown
  Bacterial polypetide isolated from the Sargasso Sea
EKTGITEEDIAKRLVDYGYHAPTMSWPVSGTIMIEPTESENLEEIDRFCKALLSIKDEIDKIETGQFEKKDNPIINAPHTYLELSSDEWRHSYSRAEAAFPKTYLKEYKYWAPVARVDNVYGDRNLVCSCPSMDEYKDAAA

SEQ ID NO: 99210 - protein, 282 aa, Unknown
  Bacterial polypetide isolated from the Sargasso Sea
QQMIVDFTGMDIANASLLDEGTAAAEAMGLSHRLNKSDSNLVFVSENCHPQTIDVIQTRAEPMGLKVLVGNEDKVLEQLKEDIVCGVLQYPGTLGDIKDPSEAISKIHKKNGKAILVCDLLALSMLKTPRELGADIAVGSSQRFGIPMGYGGPHAAFFATKDEYKRSMPGRIVGVSVDRHGNKAYRLSLQTREQHIRRDKATSNICTAQALLAIVSAAYAIYHGPDGIKSISERVSQLAKNFADKIKQSGYELYSDYFFDTVTIITKEKTDQIFKNALDQKS

SEQ ID NO: 99211 - protein, 303 aa, Unknown
  Bacterial polypetide isolated from the Sargasso Sea
LRKLKKISKKNKIFSNFIGMGYYGTYTPNVVVRNILENPGWYTSYTPYQAEVAQGRLEMLLNFQQMIIDFTGMDIANASLLDEGTAAAEAMGLCHRLDKKNSNLVFVSNNCHPQTIDVIKTRAEPIGLRVLVSDDKELDKISEDLVCGIIQYPGTLGDIIDPSESISKIHRKNGKVILACDLLALAQLKTPAELGADIAIGSSQRFGIPMGYGGPHAAFFATKDEYKRSMPGRIIGVSLDRLGNKAYRLSLQTREQHIRRDKATSNICTAQALLAIVSAAYAIYHGPIGIKKISERVSQLTKN

SEQ ID NO: 99212 - protein, 233 aa, Unknown
  Bacterial polypetide isolated from the Sargasso Sea
MLKTPRELGADIAVGSSQRFGIPMGYGGPHAAFFATKDEYKRSMPGRIVGVSVDRHGNKAYRLSLQTREQHIRRDKATSNICTAQALLAIVSAAYAIYHGPDGIKSISERVSQLAKNFADKIKQSGYELYSDYFFDTVTIITKEKTDQIFKNALDQKVNIRKVNSEMLSVSFDERKNVYRVNQLLKIFNAAESIKKEDPTVSLPNLPKNLLRTSKFLEHPVFNSYHSETEMLR

SEQ ID NO: 99213 - protein, 291 aa, Unknown
  Bacterial polypetide isolated from the Sargasso Sea
LNPVSWANLSSMHPFSPLDQTKGYSKIISDLEKWISEIVGLKSVSFQPNAGSQGEFAGLLAINSYFESKGELLRKKCLIPKSAHGTNPASAVMAGFEVLTVECDDEGNIDFQDLSMKVKKFDDQIGALMLTYPSTHGVFELQIRKICDLIHSVGGFVYLDGANLNAQVGLCKPGNYGVDVCHLNLHKTFCIPHGGGGPGVGPVAASETLSPFLPTHSLMDNNLSISSNYVSSAKHGSASILPISWMYIKMAGFCGLRKATAHAILSANYIAHSLKHKFKILYKGKNNFVAP

SEQ ID NO: 99214 - protein, 299 aa, Unknown
  Bacterial polypetide isolated from the Sargasso Sea
VVWRLCSLSTLISELTGLPIANASLLDEATAAAEAMSLSFGVCRRPEATRFLVDANVLPQTWAVLQTRAEPLGISLERIDPATAPIDASVFGVLLQLPGADGCLWDPTAVIEAAHAAGALVTVAIDPLAQTLMAPVGSLGADIAVGSAQRLGVPMGFGGPHAAFFSTVEAYKRQIPGRLVGQSKDAEGRSALRLALQTREQHIRRDKATSNICTAQVLLAVMASFYAVHHGPDGLQAIAQRIAGLRSQLEQGLRVLGYPLELADRFDTVTVHCSSAPVVHRAAAVAGFNLRVLPDGAAP

SEQ ID NO: 99215 - protein, 210 aa, Unknown
  Bacterial polypetide isolated from the Sargasso Sea
APWGSSSILSISWMYIKMMGSEGLKLASQVAILNANYIAHRLKDHFPILYKGSQGNVAHECIIDIRNIKSETGVTEEDIAKRLIDFGFHAPTMSWPVAGTMMIEPTESESLSELDRFCDTLIKIKQEIDKIKSGKFDKIDNPIKNAPHTDSELASDNWEHKYTRQEAAYPAKFLRANKFWPPVARVDNVYGDKNIFCTCPSMDEFKEDAA

SEQ ID NO: 99216 - protein, 325 aa, Unknown
  Bacterial polypetide isolated from the Sargasso Sea
AVYHGPKNIISIANRVQNLCSDLATSLDHAGIKILHNQFFDTLRIFPNNKWEIAAENEKMNFRKFKDGSVGISIDESTTEKDVLKICKIFNADYLPAKHIYNLPDSLKRVAAFLDHEVFNKYHSETEMLRYIHKLEIKDLSLNNSMIPLGSCTMKLNATTEMIPVTWQNFCDIHPFSPLEQTEGYSRLIDELSSWLSTLTGFDSCSMQPNSGAQGEYAGLLVIRAYHIKNGNGHRNICLVPESAHGTNPASAIMAGMKVEIVSCDFNGNINLNELKEKSKKHSNNLSAIMLTYPSTHGVFENDIEEACEIVHRNGGQVYIDGANP

SEQ ID NO: 99217 - protein, 276 aa, Unknown
  Bacterial polypetide isolated from the Sargasso Sea
MSEFIQRHIGPTLVEQSKMLDDLGVSTIDELVRQIVPDSILLRGDDDLPEPCSEQQALEELKEIAEHNIVKRSLIGQGYYGTTTPPVIQRNVFENPAWYTSYTPYQAEISQGRLEALFNYQTLITELTGLPVANASLLDEGTAAAEAMLLAHSTSKKNIFLVDSEVFPQTLAVLQTRAEPLGIKIKLLDWHTVASLEDFEDAFGLLVQLPNNIGRLRDPSSLLRIADVHNCMKIAIVDPMCQVLMKPVGEIGFDVAVGSMQRFGIPMGFGGPHAAF

SEQ ID NO: 99218 - protein, 301 aa, Unknown
  Bacterial polypetide isolated from the Sargasso Sea
NISRFFVDSNILPQTLSVLKTRAYPLCIEIVVDEIDNISSEDCFGCIIQYPGKKGNLPNINKFLSSIKNEDFKTILAVDIMSLVIIEPPNPEKIDVVVGTTQRFGIPLGYGGPHAAFFATKEKYKRNIPGRIIGVTKDVDSDYALRMALQTREQHIKRDRATSNICTAQVLLAVMAGMYAVYHGPNGLKRISSTIHLKAVYLFNKISSLGIEIKYSEFFDTITIISDSKSIEKIALSKEVNLCFHAENEISISVNEKTDLKDLDLIISIFEENSGQNSAEMDFPDNYAIKNKRESEILTHP

SEQ ID NO: 99219 - protein, 269 aa, Unknown
  Bacterial polypetide isolated from the Sargasso Sea
SVPELLDEVIPTNIRRSDQMKIGAPLSEAEVLDEMRAIAGRNRIVTSMIGMGYYDCHTPPVILRNVLENPAWYTAYTPYQPEISQGRLEAILNFQTMVLELTGMDIANGSLLDEATAAAEGMTMAFRANRAKASIFRVDPDTHPQTIAVLRTRAEPIGIELEIRPTSEPYGEGCFGALISYPASGGEVRDIKPEIEAVQASGGLAIVASDLLALTMIESPGALGADMVLGSAQRFGVPFGYGGPHAAFFACRTAHQRSIPGRLVGVSQD

SEQ ID NO: 99220 - protein, 278 aa, Unknown
  Bacterial polypetide isolated from the Sargasso Sea
GGPHAAFISCKDEFKRLLPGRIIGISIDKNSDVAYRMALQTREQHIRREKATSNICTAQSLLAIVAASYAIYHGPEGLKKISLKIHRTAKLIARQLQNNNYKILYNNFFDTICIKTTKAKQSLIKKRALKKKINFRYYSKEIITISIDEKTTIDDIHEILFCFGLKIESITSLDSELNNNIIALPKSILRKTKYLDHEVFNSYRSETDFLRYIKRLEDKDIALNKSMIPLGSCTMKLNATSEMIPISWPAINSIHPFAPKSQTSGYKFLIDDLKKMLC

SEQ ID NO: 99221 - protein, 243 aa, Unknown
  Bacterial polypetide isolated from the Sargasso Sea
PIAVAKHLAPFLPGNPIIKTGGQNGIKAINSAPWGSALILIISYGYIKLLGGKGLKKSTEIAILNANYLKSKLKNHYNVLYTGSSGKVAHEMIIDCRSFKKGSTIEVEDIAKRLIDYGFHAPTVSFPVPGTLLIEPTESESLNELNRFAEAMINIKKEIEEINQGLYEINDNVLKNAPHTAFELIEGKWNHKYSRIKAAYPNKNQINNKFWPSVGRIDNAYGDRNLVCNCLPIEEYEQKIIEN

SEQ ID NO: 99222 - protein, 316 aa, Unknown
  Bacterial polypetide isolated from the Sargasso Sea
SCTMKLNAAAEMIPISWKEFAEPHPFVPIEQMEGFRDLFTDLKNWLRSITGFSGVSLQPNAGAQGEYAGLMVIRKYHLDRGEANRNICLIPSSAHGTNPASAQMAGMKVVVVNCDKEGNVDFDDLKKKAEQHSENLGALMVTYPSTHGVFEEKISDICELVHKYGGQVYMDGANLNALVGIAKPGNFGPDVCHINLHKTFCIPHGGGGPGMGPIACKRHLQVYLPNHPVIKDCGPTSGIGAVSAAPWGSSSILSISWMYIKMMGSAGLKLATQVAILNANYIAHRLKDHFPILYKGSNGNVAHECIIDIRNINQRP

SEQ ID NO: 99223 - protein, 218 aa, Unknown
  Bacterial polypetide isolated from the Sargasso Sea
MLHNSQKDFLKRHIGPSQEDQNKMLKELNYNSLDDFIKSTVPEKIQLKDGLNIGESNSEYEALRKLKAISKKNQIYSNFIGMGYYGTYTPYVILRNILENPGWYTSYTPYQPEVAQGRLEMLLNFQQMIVDFTGMDIANASLLDEGTAAAEAMGLSDRLNKKDSNLVFVSENCHPQTIDVIQTRAEPMGLKVLVGNEDEVLDQLKEDLVCGIFAYPGT

SEQ ID NO: 99224 - protein, 250 aa, Unknown
  Bacterial polypetide isolated from the Sargasso Sea
MQELEQNDRFIHRHIGPSENEISQMLDALGMSSLDNLIDRVVPDSIRMPGELELPDSRTETDVLNQLRGMGERNQLAKSMIGMGYHNTFLPGVIQRNILENPGWYTAYTPYQPEVSQGRLEALLNFQQMIIDLTGMEIANASLLDEATAAAEAMTFCKRVSKNKSMRFFAADDCHPQTIDVLKTRSEPMGIELVVGNVSEQQQTPDEALFGALIQNPGTFGDIYDIDDLITKWHELGTLVSVASDPMSLV

SEQ ID NO: 99225 - protein, 167 aa, Unknown
  Bacterial polypetide isolated from the Sargasso Sea
MLHNSQKDFIRRHIGPSDKDQQKMLKELNFNNLDELINSAVPEKIHFKGELNIGESNSEYEALRKLKAISKKNQIYSNFIGMGYYGTYTPYVILRNILENPGWYTSYTPYQPEVAQGRLEMLLNFQQMIVDFTGMDIANASLLDESTAAAEAVGLSYRLNKSDCKLV

SEQ ID NO: 99226 - protein, 159 aa, Unknown
  Bacterial polypetide isolated from the Sargasso Sea
GSNGNVAHECIIDIRSIKSDTGISEEDIAKRLIDFGFHAPTMSWPVAGTMMIEPTESESLSELDRFCNTLISIKEEIDMVKSGKFDKVDNPIKNAPHTDTELASDEWNHKYSREQAAYPAKFLKANKFWPPVARVDNVYGDKNIFCTCPSMDEFKEDAA

SEQ ID NO: 99227 - protein, 291 aa, Unknown
  Bacterial polypetide isolated from the Sargasso Sea
VIDCDKHGNIDIDDLKEKSTQYSKNLAALMVTYPSTHGVYEESINEVCEIVHKNGGQVYLDGANLNAMVGVSKLGEFGADVCHINLHKTFSIPHGGGGPGMGPICVAEHLKSFLPTHRYGSNSEKFTYSISSAPLGSANILPISWGYILMLGDHGLRSSTEIAILNANYMAQRLSKHYPILYKGIRGFCAHEFIIDIRGIKEESGITEEDIAKRLIDYGFHAPTMSWPVAGTMMIEPTESESKQELDKFCDAMISIKNEINNVIIKKFNKNDNPLINAPHTAMVVTNDTWG

SEQ ID NO: 99228 - protein, 274 aa, Unknown
  Bacterial polypetide isolated from the Sargasso Sea
MMVTYPSTHGVFEEKISDICELIHKNGGQVYMDGANLNALVGIAKPGNFGPDVCHINLHKTFCIPHGGGGPGMGPIACKKHLEIYLPSHPVIGDCGPATGIGAVSAAPWGSSSILSISWMYIKMMGSEGLKLATQIAILNANYIANRLKDHFPILYKGSKGNVAHECIIDIRIIKKETGITEEDIAKRLVDFGFHAPTMSWPVPGTMMIEPTESESLSELDRFCDTLIKIKSEIDKIKSGKFDKIDNPIKNAPHTDLELASNEWNHKYSREEAA

SEQ ID NO: 99229 - protein, 245 aa, Unknown
  Bacterial polypetide isolated from the Sargasso Sea
KFFECSEDSKNNYSIKETRSSKYLTHEVFNSYHSETKMMRYLKKLETKDLSLNTSMISLGSCTMKLNAAAEMIPVSWPEFSSIHPFAPKSQTLGYQELFDSLEKWLVNITGLHSCSLQPNSGAQGEYAGLMVVRAYHQNNGNTERNICLIPESAHGTNPASAVMAGMQVIVIKCDESGNIDVGDLKQKAEENKESLSALMITYPSTHGVFEETISDICDIIHEFGGQVYLDGANLNAMVGLSRAG

SEQ ID NO: 99230 - protein, 407 aa, Unknown
  Bacterial polypetide isolated from the Sargasso Sea
KLEDKDIALNRTMIALGSCTMKLNATAEMIPISWRELAEPHPFVPIEQMEGYRDLFTDLKNWLRSITGFSGVSLQPNAGAQGEYAGLMVIRKYHLDRGEENRNICLIPSSAHGTNPASAQMVGMKVVVVDCDKEGNVDFEDLKKKAEMHSENLGALMVTYPSTHGVFEEKITDICELIHKHGGQVYMDGANLNALVGIARPGNFGPDVCHINLHKTFCIPHGGGGPGMGPIACKRHLQVYLPNHPVVKDCGPATGIGAVSAAPWGSSSILSISWMYIKMMGSEGLKLATQVAILNANYIAHRLKDHYPILYKGSNGNVAHECIIDIRSIKSETGITEEDIAKRLIDYGFHAPTMSWPVAGTMMIEPTESESLSELERFCDTLINIKSEIDMIKSGKFDKVDNPIKKM

SEQ ID NO: 99231 - protein, 379 aa, Unknown
  Bacterial polypetide isolated from the Sargasso Sea
QMIVDFTGMDIANASLLDEGTAAAEAMGLSQRLDKNDSKIVFISENCHPQTIEVVKTRAEPMGLEVIIGKEEKELENLKDKIVCGILQYPGTLGDIIDPSESISKIHKRNGKAILACDLLALAKLKTPGELGADIAIGSSQRFGIPMGYGGPHAAFFATKDDYKRSMPGRIIGVSVDRHGNKAYRLSLQTREQHIRRDKATSNICTAQALLAIVSAGYAIYHGPEGIRTISERVSQLANNFADKIKKSGYELYSKYFFDTVTIKTKDKTEKILKNALDQKVNIRKVNSEMLAVSFDEKKNVYRANQLLKIFNCTESIMENPTESLPNLPKNLLRTSKYLEHPVFNSYHSETEMLRYLKKLEDKDIALNRSMIALGSCTM

SEQ ID NO: 99232 - protein, 275 aa, Unknown
  Bacterial polypetide isolated from the Sargasso Sea
MFIKTPDDLNIEGFAKRHIGLKKEDIQSITNELGFNDLVDFVNAVVPNNILIDGTSDSDGLSEEEALNKLKSIAKKNKIYKTFIGQGYYPSFTPSIIKRKVFENPGWYTSYTPYQAEISQGRLEALINFQTMVQDLTDLDISNASLLDEPTAAAEAMALANRTTKLKSKLFLLDANSFPQTQSVVLSRARPLNIEVIIDKPENFKNYEAFGALIQYPGNDGSINDYTEIVSNLNKKSIIAIAATDLLALTLIKSPGEMGFDIAIGNSQRFGVPLG

SEQ ID NO: 99233 - protein, 410 aa, Unknown
  Bacterial polypetide isolated from the Sargasso Sea
PGWYTSYTPYQPEVAQGRLEMLLNFQQMIVDFTGMDIANASLLDEGTAAAEAMGLSHRLNKTDSNLVFVSENCHPQTIDVIQTRAEPMGLKVLVGNEDKVLDQLKEDLVCGILQYPGTLGDIKDPSEAISKIHKKNGKAVLVSDLLALALLKTPRELGADIAVGSSQRFGIPMGYGGPHAAFFATKDEFKRSMPGRIIGVSVDRHGNKAYRLSLQTREQHIRRDKATSNICTAQALLAIVSAAYAIYHGPDGIKTIAERVSQLAKNFADKLKQSGYEIYSDHFFDTVTIVTKDKTDQIYKNALDQKVNIRRVNSEMLAVSFDEKKNVYRVNQLLKIFNAAESIKKEDPTVSLPNLPKNLLRTSKYLEHPVFNSYHSETEMLRYLKKLEDKDIALNRTMIALGSCTMKINA

SEQ ID NO: 99234 - protein, 752 aa, Unknown
  Bacterial polypetide isolated from the Sargasso Sea
MENPGWYTSYTPYQPEVAQGRLEMLLNFQQMIIDFTGMDIANASLLDEGTAAAEAMGLCNRLDKMDNKIVFISVDCHPQTIEVIKTRAEPLGLKVIIGNDNELSNLSEDIICGILQYPGTLGDIKDPSENISKIKKKNGKAILVCDLLSLAKLKTPAELGADIAVGSSQRFGIPLGYGGPHAAFFATKDEFKRSMPGRIVGVSVDRHGNKAYRLALQTREQHIRRDKATSNICTAQALLAIVSAAYAIYHGPKGIRTISERVSQLAKNFADKLKQSGYNLYSDYFFDTVTIITKEKTDQIYNNALAQEVNIRKVNSEMLSVSFDEKKNVYRANQLLKIFNCAESIKEIPTESLPNLPKNLLRTSSYLDHQVFNSYHSETEMLRYLKRLEEKDIALNRSMIALGSCTMKLNAVAEMIPISWREFSEPHPFVPIEQMDGFRTLFTDLKNWLRSITGFSGVSLQPNAGAQGEYAGLMVIRKYHIERGESNRNVCLIPSSAHGTNPASAQMVGMKVVVVNCDKQGNVDYDDLKKKAETYSENLGALMVTYPSTHGVFEEKISDICELIHKHGGQVYMDGANLNALVGIAKPGNFGPDVCHINLHKTFCIPHGGGGPGMGPIACKKHLEIYLPSHPVIKDCGPATGIGAISAAPWGSSSILSISWMYIKMMGSEGLKLATQIAILNANYVANKLKDHFPILYKGKNGNVAHECIIDIRSIKSETGITEEDIAKRLIDFGFHAPTMSWPVPGTMMIEP

SEQ ID NO: 99235 - protein, 434 aa, Unknown
  Bacterial polypetide isolated from the Sargasso Sea
VSVDRHGNKAYRLALQTREQHIRRDKATSNICTAQALLAIVSAAYAVYHGPKGIKKIADTVAQLAKNFADKLKQSGYELYSDYFFDTVTVKTLDKTDKIYKNALDQQINIRKVNSEMLAVSFDERKNLYRANQVLKIFNCSETIKETTKETTNKSLSNLPKNLLRNSTYLDHPVFNSYHSETAMLRYLKKLEDSDIALNRSMIALGSCTMKLNSVSEMIPVTWKEFSHPHPYSPIEQMDGFRELFTDLKNWLRTITGFSGVSLQPNAGAQGEFAGLMVIRKFHEKNGQKKRNVCLIPSSAHGTNPASAQMAGMKVVVVNCDSYGNVDYEDLKKKAEEYSDTLSALMVTYPSTHGVFEEKITDICDLVHKHGGQVYMDGANLNALVGIAKPGNFGPDVCHINLHKTFCIPHGGGGPGMGPIACKKHLETYCQVIQ

SEQ ID NO: 99236 - protein, 411 aa, Unknown
  Bacterial polypetide isolated from the Sargasso Sea
MLAVSFDEKKNVYRVNQLLKIFNAAESIKKEDPTVSLPNLPKNLLRTSKYLEHPVFNSYHSETEMLRYLKKLEDKDIALNRTMIALGSCTMKLNATAEMIPISWRELAEPHPFVPIEQMEGYRTMFTDLKNWLRSITGFSGVSLQPNAGAQGEYAGLMVIRKYHLDRGDNNRNICLIPSSAHGTNPASAQMVGMKVVVVNCDKEGNVDFEDLKKKAELHSENLGALMVTYPSTHGVFEEKISDICDLIHKHGGQVYMDGANLNALVGIAKPGNFGPDVCHINLHKTFCIPHGGGGPGMGPIACKRHLQVYLPNHPVVKDCGPATGIGAVSAAPWGSSSILSISWMYIKMMGSEGLKLATKVAILNANYIANRLKDHFPILYKGSKGNVAHECIIDIRTIKSETGITEEDIA

SEQ ID NO: 99237 - protein, 412 aa, Unknown
  Bacterial polypetide isolated from the Sargasso Sea
TTFSSLFDETTTLEDIDNLIAFFNITNKKIDANEIEKNLDPIFNDENILRKDKILSHPIFNIYHSETEMMRYLKKLENKDIALNRSMIPLGSCTMKLNAASEMLPITLPGFANAHPFLEKQQREGYNQMMRELISMLKDITGFDAISLQPNAGAQGEFAGLLAIKKFHESNNDYDRNVCLIPNSAHGTNPASAQMCGMEVSIVKCDDLGNVDLNHLDIKIKEAGNKLAALMITYPSTHGVFEESISKICEVIHNNGGQVYMDGANLNAMVGIAKPGKFGPDVSHMNLHKTFCIPHGGGGPGMGPIGVKSHLENFLPGHPIVKNELGLTELDAVSAAPWGSPSILPISYSYISMMGDEGLKLATQIAILNANYIKEKLSDFFPLLYSGKNGMVAHECIIDIRPIKDELNISEE

SEQ ID NO: 99238 - protein, 238 aa, Unknown
  Bacterial polypetide isolated from the Sargasso Sea
TLSPFLPTHSLMDNNLSNSSNYVSSAKHGSASILPISWMYIKMAGLSGLRKATAHAILSANYIAHSLKHKFKILYKGKNNFVAHECILDFRDLKSKTGLSVNDLAKRLIDYSFHAPTISWPVPETIMIEPTESESLAELDRFCEAMLLIGEEISEIENNVELNNNNVISNAPHTLKELIADNWNYPYSKEKASFPYKTLTSIKFWSSVSRINNAYGDRNLICSCNVNQGDTLDEKKCA

SEQ ID NO: 99239 - protein, 260 aa, Unknown
  Bacterial polypetide isolated from the Sargasso Sea
NLHKTFCIPHGGGGPGMGPIACAKHLADFLPTHEIIKEAGPKNGMGAVSAAPWGSSSILPISWMYIKMMGAEGLKKASQVSILNANYISKKLSNDYKVLYTGKNGNVAHECIIDIRPIKASSGISEEDLAKRLIDFGYHAPTMSWPVAGTIMIEPTESENLEEIDKFCNALIKIKKEINLVEQSKFDKIDNPLKNAPHTYVELASNEWKHSYTREEAAFPTEYVKNNKYWAPVGRVDNVFGDRNLVCSCPSMDEYKDEAA

SEQ ID NO: 99240 - protein, 772 aa, Unknown
  Bacterial polypetide isolated from the Sargasso Sea
MLTDFPNRHIGPRDDQIQKMLSELGFSSLDELSNKIIPKNILFDSLIDLPDKMSESDTIERLSELANMNCVFKSFIGMGYYGTLLPPVIQRNILENPGWYTQYTPYQAEISQGRLEALLNFQTMVSDITGLPMANASLLDEATAAAEAMLMFYNITKEPSKLVFLVSENCHPQTIDVLKTRSEPLGIILKICNITTEDFNDDIFGAIVQYPDTSGSIHDLTELSKTAHQYNAYLCVATDLLALTLLKPPGEMGADVAVGNAQRFGVPMGYGGPHAAFFATSEKFKRKIPGRIIGLSIDSHGKPALRMALQTREQHIRREKATSNICTAQVLLAIISGMYAVYHGPSGIKSIALRVNHLTRLLASSLNEAGYKLENNSFFDTIRFKADGWKTKSDQKQMNFRDYNDGSVGISVDETTTESDIIAILDIFCAEKSDSLETSIPSTLERESAILQNPVFNQYQSETDMLRYMHKLETKDLSLNTSMIPLGSCTMKLNSTTEMTAVTWPEFSNIHPFAPDDQVKGYQKLIQELNDWLIEITGFDSISMQPNSGAQGEYAGLMVIRAYHKAQRNEHRNICLIPDSAHGTNPASAVMAGMKVVVVDCDEQGNIDIEDLKKKITEHEKNLSSVMITYPSTHGVFESTIKELCEMVHDSGGQVYMDGANLNALVGVCKPGQFGADVMHINLHKTFCIPHGGGGPGMGPIVCKDHLSPFLPGHTQLKVNNDQAITAVSASPFGSSSILPISWSYIAMMGNEGLKKATQVAILSANYLAKKL

SEQ ID NO: 99241 - protein, 374 aa, Unknown
  Bacterial polypetide isolated from the Sargasso Sea
ENGFELLNDSFFDTLTISTKENTEEIINRALKKELNLRIVDDDTLGVSLDETSTLEDVKILLSIFLGKDIKIQRYENTSIPKDLIRRTKFLIHPVFANYQTETEMLRYIRKLCDKDIALDRAMIPLGSCTMKLNATSEMIPISWPEFSQIHPFAPKDQLHGYEQLVLDIENMLSELTGYPAISLQPNAGSQGEYAGLLAIDAFHKNNNDNERNICLIPKSAHGTNPASAQMAGLKVVPIECDEQGNIDLEDLKNKADKHSNNLSSLMITYPSTHGVFETTVKEVCEIIHSYGAFVYIDGANFNAMVGLCYPGLFGGDVSHLNLHKTFCIPHGGGGPGIGPIGVVDKLKEFIPSNHDEINKIGPVAGTNWGSASI

SEQ ID NO: 99242 - protein, 877 aa, Unknown
  Bacterial polypetide isolated from the Sargasso Sea
ELKLIAKENKVFKSFIGQGHYNTYTPKVILRNVFENPGWYTSYTPYQPEISQGRLEALINFQTMVSDLTGMDIANASLLDEATAAAEAMTLAKRASKSKSDIFYVDENSFENTINVLKTRAKPLGIDVIVGPIEEAKDADCYGAFIQYPGSDGSIQDHSKIVDSIHGKKGIAVFASDLLALCLLKPPGEMGADIVVGSSQRFGVPLGCGGPHAAFMSVKEDLKRSLPGRIVGASVDSSGDLAYRLALQTREQHIRREKATSNICTAQALLAIMAGFYSLYHGKEGLIKIAQKVNNLTGLLKENLSAKGLNSKNENFFDTLVIETGSHTEAIHLRARDNGINLRLIDSTSIGISLDETTSMDDLEVLIKIFTDSNDHLKEIKSQSIPKNIIRKSSFLDHNIFNVFHTETEMLRYIRRLYDKDIALDRAMIPLGSCTMKLNATSEMIPVSWPEFSNIHPFAPKDQLSGYSKLVSEMEEMLALLTGYSGISLQPNAGSQGEYAGLLAIDAYHQNNNEAHRNICLIPKSAHGTNPASAQMVGLKVVPVDCDEEGNIDIKDLKEKASTHSDNLSSLMITYPSTHGVFETSVTEVCEIIHSHGAFVYIDGANFNAMVGLCYPGSFGGDVSHLNLHKTFCIPHGGGGPGIGPIGVVEKLKEFMPSHHNENKAVGPVSGTDWGSASILPISWMYMKMMGTQGLLEATQNAILNTNYIATKLKGHYEILYKGKDGLVAHECIIDIRPLKETAGIEVEDVAKRLIDYGFHAPTMSWPVAGTLMIEPTESESLKELDRFCEAMINIRDEIREIEDGNSSKENNVLKNAPHTAKTLIDSNWDREYERSKAAYPVDSLYENKYWPPVGRVDNVYGDRNLVCSCPSMEDYN

SEQ ID NO: 99243 - protein, 292 aa, Unknown
  Bacterial polypetide isolated from the Sargasso Sea
KKVCETIHKYGGQVYVDGANLNALIGLVSLTEIGADVSHLNLHKTFCIPHGGGGPGVGPVAVKKHLIPFLPGNVFDETSAISSTTYGSAGILPISWSYISMMGEEGLRDATKTAILSANYIANKLRPYYPILFTDEKSMVAHECILDINEITSNTNITNEDISKRLIDYGFHAPTMSWPVPNTLMVEPTESEPMSELDRFCDAMISIAKEIDKVKNGNWSKEDNPIINAPHTVETLTQENWSHPYSRQIALANLSEKSNKYFPPVGRIDNVFGDRNLVCSCPPIEAYEHEQT

SEQ ID NO: 99244 - protein, 432 aa, Unknown
  Bacterial polypetide isolated from the Sargasso Sea
SEEEALKELKRISKENSVYRSFIGQGYYGTITPKVILRNVFENPGWYTSYTPYQAEISQGRLEALINFQTMVGDLTGFEIANASLLDEATAAAESMTLVHRVGKSKSQKFFIDQNCFPQTVSVVTARAKPIGIEVMVGDPQQLNNLKKETYFGALLQYPGNDGAIIDFSREIKSVHEQNGLVIMATDLLALTLLKSPGEIGADIAIGSSQRFGVPLGFGGPHAAFMATKEKYKRSLPGRLVGASIDKDGRTAYRLALQTREQHIRREKATSNICTAQALLAIIAGFYSVYHGPEGLKQIAESVHSKATSLAKEINELGYKLKSSSFFDTVTIQTKSNTQEIFLTAQNQLMNIRMLDENHISISLDETTTDKEIENIAKLFKSLPKKEKIFSSFDLPIDIIRSSDYLAHPVFHLYRTETEMLRYIRKLCDKDI

SEQ ID NO: 99245 - protein, 407 aa, Unknown
  Bacterial polypetide isolated from the Sargasso Sea
EITGFDAVSLQPNSGAQGEYAGLMTIRAFHKSNKQANRNICLIPNSAHGTNPASAQMSGMKVVVVNCDEKGNIDLDDLQNKSEKYSKDLAALMVTYPSTHGVFEEKITEICEIVHSKGGQVYMDGANLNALVGIAKPGKFGPDVCHINLHKTFCIPHGGGGPGMGPIACAKHLEDFLPTHQHLRDSNPDKGMGSVSAAPWGSASILVISWMYIKMMGSKGLKAASKISILNANYISKKLSEKYKILYTGKNGNVAHECIIDIRPIKEKSGITEEDIAKRLIDYGYHAPTMSWPVSGTIMIEPTESENLEEIDRFCKALISIKDEIDKIESGKFEKKDNPVINAPHTYLELSSDEWKHSYSRKEAAFPKEYLKEYKYWAPVARVDNVYGDRNLVCSCPSMEEYKDAAA

SEQ ID NO: 99246 - protein, 308 aa, Unknown
  Bacterial polypetide isolated from the Sargasso Sea
MLHNSQKDFLRRHIGPSEEDQKKMLSELKCSSLDDLIKNTVPEKIHFKGELNIGESNSEYEALRKLKLISKKNQIYSNFIGMGYYGTYTPYVILRNILENPGWYTSYTPYQPEVAQGRLEMLLNFQQMIVDFTGMDIANASLLDESTAAAEAVGLSYRLNKSDCKLVFVSENCHPQTIDLIKTRAEPMGLKVLVGNEEKVLDNLKQDVVCGILQYPGTLGDIKDPSESISKIHKKNGKAILACDLLSLAKLKTPKELGADIAVGSSQRFGIPMGYGGPHAAFFATKDEYKRSLPGRLVGVSVDRHGNK

SEQ ID NO: 99247 - protein, 377 aa, Unknown
  Bacterial polypetide isolated from the Sargasso Sea
GLLSIREYHKAKNSTRDICLIPESAHGTNPASAIMAGLKVVIVKCDDHGNIDFKDLSLKVDEAGDRLSSLMVTYPSTHGVFEHNIDEICNLIHKNGGLVYMDGANLNAMVGVCKPGKFGADVMHINLHKTFCIPHGGGGPGMGPICVNEKLKPHLPKHSFTGEDFSYSVSSSPFGSASILLISYIYMKLMAANGLLKASQVAILSANYMAKRLENDYNILYRGKSGLNAHEFIVDCRSFKSTANITNEDIAKRLIDYGFHAPTMSWPIPGTLMIEPTESEAKSELDKFCDAMIAIKKEIIEIESGKMSQEDNVLVNAPHTVHDICDDWNHPYSKESAVFPTQWNKENKFWPYVSRIDNAFGDRNFFCVCPDIDSYKE

SEQ ID NO: 99248 - protein, 314 aa, Unknown
  Bacterial polypetide isolated from the Sargasso Sea
MPFTPTDYLPYDFANRRHIGPSPSEMEEMFKTIGVESLDELINQTVPESIRQKDALDFGKPMSERELLRHMRITSSKNKILTSLIGQGYYGTVTPPVIQRNILENPAWYTAYTPYQPEISQGRLEALLNFQTMISDLTGLEIANASLLDEATACAEAMTMAQRISRSKNTIFFVDENCHPQNISVLKTRAKPLGISLIIDHVDNLDASKVFGAIFQYPGTNGNVRDFTAEIEKLHEFKAISVISADPLSLTLLKEPGAMGADIAVGTTQRFGVPVGYGGPHAAYMATKDTYKRSMPGRIVGVSIDANGNKAYRL

SEQ ID NO: 99249 - protein, 448 aa, Unknown
  Bacterial polypetide isolated from the Sargasso Sea
SLDELIEKTIPIHIIFKDKLVFRPGMSEEFNKINTQLLSLKNNFKKTYIGMGYYNTITPSVILRNILENPGWYTAYTPYQPEVSQGRLEMLMNFQQMIIDLTGMDIANASLLDESTAAAEAMMMAFKIKKSAKFTFCVQNTCHPQTLSVLKTRAKPLGIKIIFDNPDNDTFGCLIQNPDTYGEIANLNDLININKSYDALSIIAADIMSLVVMKSPKDFGADIVVGSTQRFGVPMGLGGPHAAYFATLDEYKRMIPGRLIGVSVDRTNKRSYRMALQTREQHIRREKATSNICTAQALLAIISASYAIYHGPTRLKNIANDIHYKSRYLKKSLEILNFEVKSKNYFDTLLIKDSKSKYWVNKSIDNGINFRFVNDDHFSISLDETTSLQDVDNLIKFFNENNIEIYAEEIEGKIENSIFKSDLERKDNILTHPVFNIYHSETEMMRYL

SEQ ID NO: 99250 - protein, 436 aa, Unknown
  Bacterial polypetide isolated from the Sargasso Sea
ISWPIVNSIHPFVPKQQSQGYKIIIDKLKDMLCKITGFDEVSLQPNAGAQGELAGLMTIKAFLEATGESSRDICLIPSSAHGTNPASAILAGMRVEIIKCDENGNVDTKDLAYKIQEFPDQIAALMVTYPSTHGVYEESISKICNMVHEAGGQVYMDGANLNALVGVSKPGNFGPDLCHINLHKTFCIPHGGGGPGVGPIAVKSHLSKFIPNHCLNSDAGPKSGFGPISSAPWGSASILPISLIYIMMMGAEGIKKATQVAILNANYIANKINKHFDILYTGRNGRVAHECIIDLREIKKNNHITEEDIAKRLIDYGFHAPTMSFPVPGTLMIEPTESESKKEIDRFCDALISIRGEINSYSMIDNPKDSPLKNAPHSFKDLIDSNFNYSSKTAYPIQNSLEPNIRYIAPVARVNNAYGDKNFVCSCLPIEMYLEK

SEQ ID NO: 99251 - protein, 514 aa, Unknown
  Bacterial polypetide isolated from the Sargasso Sea
YPGTLGDIKDPSEAISKIHKKNGKAILVCDLLALSMLKTPRELGADIAVGSSQRFGIPMGYGGPHAAFFATKDEYKRSMPGRIVGVSVDRHGNQAYRLSLQTREQHIRRDKATSNICTAQALLAIVSAAYAIYHGPDGIKSISERVSQLAKNFADKIKQSGYELYSDYFFDTVTIITKEKTDQIFKNALDQKVNIRKVNSEMLSVSFDERKNVYRVNQLLKIFNAAESIKKEDPTVSLPNLPKNLLRTSKYLEHPVFNSYHSETEMLRYLKKLEDKDIALNRTMIALGSCTMKLNATAEMIPISWRELAEPHPFVPVEQMEGYREMFTDLKNWLRSITGFSGVSLQPNAGAQGEYAGLMVIRKYHLDRGDENRNICLIPSSAHGTNPASAQMVGMKVVVVDCDKEGNVDFEDLKKKAELHSENLGALMVTYPSTHGVFEEKIKDICEVIHEHGGQVYMDGANLNALVGVAKPGNFGPDVCHINLHKTFCIPHGGGGPGMGPIACKRHLQVYCLI

SEQ ID NO: 99252 - protein, 382 aa, Unknown
  Bacterial polypetide isolated from the Sargasso Sea
MLAIISGMYALFHGQDDLKNIAKRIHSHTKELADKISKLGHEIVINDNSFFDTVVIKLSNMSIDSLKDKALKHNFNLMYHENGLIGISLDEKTDYNEVEVLANLFDVSNDSQNTYNIFKPNRTGDILTHPIFHSINSETEMLRYINKLEKRDLSLNYSMIPLGSCTMKLNATVEMIPISWPEFNSIHPFAPLNQAKGYKKIINELEEMLYKVTGFDAVSFQPNSGAQGEYAGLLSIREYHKANNSNRDICLIPESAHGTNPASAIMAGLKVVIVKCDDHGNIDFKDLSKKVDEAGDRLSSLMVTYPSTHGVFEHNIDEICDLIHTNGGLVYMDGANLNAMVGVCKPGKFGADVMHINLHKTFCIPHGGGGPGMGPICVNEKL

SEQ ID NO: 99253 - protein, 782 aa, Unknown
  Bacterial polypetide isolated from the Sargasso Sea
HIGPSKEDQSKMLKELNYQSLDDLIDSTVPEKIKFKGELNIGESNSEYEALRKLRAISKKNQVYSNFIGMGYYGTYTPYVILRNLLENPGWYTSYTPYQPEVAQGRLEMLLNFQQMIVDFTGMDIANASLLDEGTAAAEAMGLSHRLNKKDSNLVFVSEDCHPQTIDVIQTRAEPMGLKVLVGKEDEVLDQLKEDLVCGILQYPGTLGDIKDPSEAISKIHKKNGKAVLACDLLALAKLKTPRELGADIAVGSSQRFGIPMGYGGPHAAFFATKDEYKRSMPGRIVGVSVDRHGNKAYRLSLQTREQHIRRDKATSNICTAQALLAIVSAAYAIYHGPDGIKNISERVSQLAKSFADKIKQSGYELYSNYFFDTVTIITKEKTDQIYKNALNQKVNIRKVNSEMLAVSFDERKNVYRVNQLLKIFNAAESIKKEDPSISLPNLPENLLRTSKYLEHPVFNLYHSETEMLRYLKRLEDKDIALNRTMIALGSCTMKLNSAAEMIPISWKEFAEPHPFVPIEQMEGFRDLFTDLKNWLRSITGFSGVSLQPNAGAQGEYAGLMVIRKYHLDRGEANRNICLIPSSAHGTNPASAQMVGMKVVVVNCDKEGNVDFDDLKKKAEQHSENLGALMVTYPSTHGVFEEKITDICELVHKHGGQVYMDGANLNALVGVAKPGNFGPDVCHINLHKTFCIPHGGGGPGMGPIACKRHLQVYLPNHPVIKDCGPTTGIGAVSAAPWGSSSILSISWMYIKMMGSAGLKLATQVAILNANYIAHRLKDHFPI

SEQ ID NO: 99254 - protein, 329 aa, Unknown
  Bacterial polypetide isolated from the Sargasso Sea
MLHNSQKDFIKRHIGSTQEEQVKMLKELNYNSLDELISNTVPEKIHFKDNLSIGESNSEYEALRKLKAISKKNQIYSNFIGMGYYGTYTPYVILRNILENPGWYTSYTPYQPEVAQGRLEMLLNFQQMIVDFTGMDIANASLLDEGTAAAEAMGLSHRLNKKDSSLIFVSENCHPQTINVVQTRAEPMGLKVLIGKENEVLDNIKEDLVCGILQYPGTLGDIKDPSESISKIHKLNGKAILACDLLSLAKLKTPGELGADIAVGSSQRFGIPMGYGGPHAAYFATKDEYKRSMPGRIVGVSVDRHGNKAYRLALQTREQHIRRDKATSN

SEQ ID NO: 99255 - protein, 507 aa, Unknown
  Bacterial polypetide isolated from the Sargasso Sea
ILLKDSLSIGEPNSEYEALRKLKAISKKNQIYSNFIGMGYYGTYTPNVIVRNILENPGWYTSYTPYQAEVAQGRLEMLLNFQQMIIDFTGMDIANASLLDEGTAAAEAMGLSHRLNKKDSKIVFVSTDCHPQTIDVIKTRAEPMGLKVIVGQDTELDKIPGDIICGILQYPGTLGDIKDPSEQISKIKKKNGKAILACDLLALAKLKTPAELGADIAIGNSQRFGIPMGYGGPHAAFFATKDEFKRSMPGRIIGVSVDRHGNKAYRLALQTREQHIRRDKATSNICTAQALLAIVSAAYTIYHGPNGIRKISERVSQLANNFADKIKKSGYEIYSNNFFDTVAIKTKDKTEKIFKNALDQKVNIRKVNSEMLAVSFDEKKNVYRANQLLKIFNCAESIKDNPTESLPNLPKNLLRTSKYLEHPVFNSYHSETEMLRYLKRLEDKDIALNRSMIALGSCTMKLNAVAEMIPISWREFAEPHPFVPVEQMEGFRTLFTDLKNWLRSITG

SEQ ID NO: 99256 - protein, 261 aa, Unknown
  Bacterial polypetide isolated from the Sargasso Sea
MLKNAQKDFIQRHIGSSKEEQQVMLKELGYNNLDELIAKTVPEKILLKENLTIGDPNSEYKALRKLRDISQKNKIYSNFIGMGYYGNYTPYVILRNILENPGWYTSYTPYQPEVAQGRLEMLLNFQQMVIDFTGMDIANASLLDEGTAAAEAMGLSYRICKKDINKVFVSKNCHPQTIDVIKTRAEPLGLKIIVGDEDKDINENIVCGIIQYPGTLGDIKDPSEAISKIHKQNGKAVLVCDLLALAKIKTPAELGADIAVG

SEQ ID NO: 99257 - protein, 381 aa, Unknown
  Bacterial polypetide isolated from the Sargasso Sea
MLKIFGISKVIKQDAKVELDNLPQNLLRTSKYLTHPVFNKYHSETEMLRYLKKLEDCDIALNRSMIALGSCTMKLNATAELIPITWKEFSLPHPFVPTNQMEGYKILFNDLINDLKEITGYDAVSLQPNSGAQGEYAGLMTIRKFHKNNKQENRNVCLIPDSAHGTNPASAQMCGMKVVVVNCDDDGNVDIDDLKNKAEKHSKDLAALMVTYPSTHGVFEEKIMDICQVIHKHGGQVYMDGANLNALVGVAKPGKFGPDVCHINLHKTFCIPHGGGGPGMGPIACSKHLADFLPTHEIIKEAGPKNGMGAVSAAPWGSSSILPISWMYIKMMGAEGLKKASQVSILNANYISKKLSKDYKVLYTGKNGNVAHECIIDIQTN

SEQ ID NO: 99258 - protein, 612 aa, Unknown
  Bacterial polypetide isolated from the Sargasso Sea
MLHNSEKDFIKRHIGLKKKDEKKALSEIGYKSLDELISNTVPKNILLKDQLSIGEPNSEYEALRKLRLISKKNKIFSNFIGMGYYGTYTPNVIVRNIFENPGWYTSYTPYQPEVAQGRLEMLLNFQQMITDFTGMDIANASLLDEGTAAAEAMGLSYRLNNKDSKIVFVSEDCHPQTINVIQTRAEPMGLKMVIGNDDELNKITGDLVCGILQYPGTLGDIKDPSENISKIHKKNGKAILACDLLALAKLKTPGELGADIAVGSSQRFGIPMGYGGPHAAFFATKDEYKRSMPGRIIGVSVDRNGNKAYRLSLQTREQHIRRDKATSNICTAQALLAIVSAAYTIYHGPKGIRTISERVSQLAKNFADKLKQSGYELYSDYFFDTVTIKTKEKTDQIFNNALSQKVNIRKVNSEMLAVSFDEKKNVYRANQLLKIFNCAESIKENPTESLPNLPKNLLRTSKYLEHPVFNSYHSETEMLRYLKRLEDKDIALNRSMIALGSCTMKLNAVAEMIPASWREFSEPHPFVPIEQMEGYRTLFTDLKNWLRSITGFSGVSLQPNAGAQGEYAGLMVIRKYHIERGEKNRNICLIPSSAHGTNPASAQMVGMKIVVI

SEQ ID NO: 99259 - protein, 518 aa, Unknown
  Bacterial polypetide isolated from the Sargasso Sea
SEEFNKINNQLLSLKNNFKKTYIGMGYYNTITPSVILRNILENPGWYTAYTPYQPEVSQGRLEMLMNFQQMIIDLTGMDIANASLLDESTAAAEAMMMAFKIKKSAKFTFCVQNKCHPQTLSVLKTRAKPLGIKIIFDNPDDDTFGCLIQNPDTYGEIANLNDLININKSHDALSIIAADIMSLVVMKSPKDFGADIVVGSTQRFGVPMGLGGPHAAYFATLDEYKRMIPGRLIGVSVDRNNKRSYRMALQTREQHIRREKATSNICTAQALLAIISASYAIYHGPTRLRNIAEDIHYKSRYLKKSLEILNFEVKSKNYFDTLLIKDTKSKYWVNKSIDNGINFRFVNDDHFSISLDETTSLQDVDNLIKFFNENNNEIYAEEIESKIEDSIFKNDLDRKDKILTHPVFNIYHSETEMMRYLKKLENKDVALNRSMIPLGSCTMKLNAASEMLPITLPGFSNAHPFLEPHQREGYNEMMSELISMLKDITGFDAVSLQPNAGAQGEFAGLLAIQKYHE

SEQ ID NO: 99260 - protein, 349 aa, Unknown
  Bacterial polypetide isolated from the Sargasso Sea
MEISIVNCDEKGNVDIDHLEKKIEEAGDKLSSLMITYPSTHGVFEESIVEICKKIHDAGGQVYLDGANYNAMVGIAKPGKFGPDVCHMNLHKTFTIPHGGGGPGVGAIGLKKHLEKFAPGHPVFKNEIGLTEQEAVSAAPWGSASILPISYSYISMMGDDGLKLATQVAILNANYVKQRLSKYYPILYKGKNGMVAHEFIIDIRPFKEEINVSDEDIAKRLIDYGFHAPTMSFPVPGTLMIEPTESESKEELDRFCEAMISIYKEIEKIRNGTFDKVDNPIKNAPHTVEEISSDEWEHSYSRQDAAYPHSYLLNNKYWSPVSRIDNVYGDRNLFCVCPPIDEYSDVKTG

SEQ ID NO: 99261 - protein, 947 aa, Unknown
  Bacterial polypetide isolated from the Sargasso Sea
MRKFSDRHIGISEVDEKSMKDFLGVESLEQLIQETIPDEIRTKEELKLDNAISESQYSTHIYQLSQKNKYFKNYIGLGYNEAILPPVIQRNILENPGWYTAYTPYQAEVAQGRLEALLNYQTVICDLTGMEISNASLLDEGTSAAEAMTMLFGCRSRDQIKNGVNKFVISSDVFDQTISVLETRAEPLGIEIEIVDYDSINIDDSVFGCIVQYIGKTGKINNLENISKKVQDSNSKLIVAADLMALTLLKEPASFNCDVVVGTSQRFGIPLGYGGPHAGYFATKTDYKRFIPGRIIGVSKDRNGNRALRMALQTREQHIKRERATSNICTAQVLLAVMAGMYAVYHGKNGLIEIGDKINSLTKILDEKLNLLGLDQLNDSYFDTLHFKYPVEKVREEAIQNKLNFNFINDNEFSISLNEATEIEDVNKIIDIFSSVTEKEIDFNISKINFNSIPQELNRKSSFLDEKVFNLYHSETSMMRYIKSLERKDLALNHSMIALGSCTMKLNAAAEMLPLSSARWNNIHPFAPHNQVEGYNIMLNKLELQLNEITGFSGTSLQPNSGAQGEYAGLMVIRSYFKSINQTNRNICIIPASAPGTNPASAVMAGMKVVVVGTDKFGNIDEDDLIKKAEENSENLAALMITYPSTHGVFESSIKRITQTIHDNGGQVYMDGANMNAQVGLTNPYSIGADVCHLNLHKTFSIPHGGGGPGVGPICVAKHLVDFLPQTDRNITKKHGVKAISAAPWGSAMACLISYGYISMMGPDGLKKATEIAILNANYIKKRIEKDYKILYQGEKGRSAHELIIDCRDYKDEFGIDVMDIAKRLIDYGFHAPTVSFPVPGTMMIEPTESESLEEIDRFCDALISIKSEIIACSKDDEYNILKNAPHTQLTLTDDEWNLNYSREQAAFPMPYLKSNKFWPSVTRIDEAFGDRNLICTCAPIEDYIES

SEQ ID NO: 99262 - protein, 218 aa, Unknown
  Bacterial polypetide isolated from the Sargasso Sea
MSSGTASPHTLSSESHAPACNKTTASDDNPEFAGRHIGLSPTDEHFMLEAIGAKSRDALIEEIVPASILRRTVMDLPSAVSEQEALAELKAVAQQNNVCKSFLGQGYYGTHTPAVIQRNVLENPAWYTAYTPYQAEISQGRMEAVLAFQTMICDLSGMPIANASLLDEATAAAEAMTLAHRMQKGQESTFIADRRCHPQTLEVLATRAEPLGIDLIIG

SEQ ID NO: 99263 - protein, 301 aa, Unknown
  Bacterial polypetide isolated from the Sargasso Sea
VEICNKIHDAGGQVYLDGANYNAMVGVAKPGKFGPDVCHMNLHKTFCIPHGGGGPGVGAIGLKKHLADFAPGHPMFKNEIGLTTQEAVSAAPWGSASILPISYSYISMMGDDGLKLATQVAILNANYIKERLKNYYPILYTGKNNMVAHEFIIDIRPFKQELNISDEDIAKRLIDYGFHAPTMSFPVPGTLMIEPTESESKEELDRFCEAMISIHNEISMIRDGKFDKVDNPIKNAPHTIEEVSSDNWDHKYSRKDAAYPHAYLINNKYWSPVSRIDNVYGDRNLFCVCPPIDEYEEAKTG

SEQ ID NO: 99264 - protein, 338 aa, Unknown
  Bacterial polypetide isolated from the Sargasso Sea
MLPNSEKDFLKRHIGPSKEDQSKMLKELNYQSLDDLIDNTVPEKIKFKGELNIGDSNSEYEALRKLRAISKKNQVYSNFIGMGYYGTYTPYVILRNILENPGWYTSYTPYQPEVAQGRLEMLLNFQQMIVDFTGMDIANASLLDEGTAAAEAMGLSHRLNKKDSTLVFVSEDCHPQTINVIQTRAEPMGLKVLVGKEDEVLDQLKEDLVCGILQYPGTLGDIKDPSEAISKIHKKNGKAILACDLLALAKLKTPRELGADIAVGSSQRFGIPMGYGGPHAAFFATKDEYKRSMPGRIVGVSVDRHGNKAYRLSLQTREQHIRRDKATSNICTAQALLA

SEQ ID NO: 99265 - protein, 428 aa, Unknown
  Bacterial polypetide isolated from the Sargasso Sea
VPQDQMKGYKVLFNDLVNDLKEITGFDAVSLQPNSGAQGEYSGLMTIRKFHLNNNQKNRNVCLIPESAHGTNPASAQMCGMKVVVIKCDDEGNVDLIDLKEKVNKYSKDLAALMVTYPSTHGVFEEKISEICEYVHKAGGQVYMDGANLNALVGIAKPGKFGPDVCHINLHKTFCIPHGGGGPGMGPIACAKHLKDFLPNHNITKNTRSEKSLGSVSAAPWGSASILPISWMYIKMMGAEGLRKASEVAILNANYISKKLSNHYKVLYKGKNGNVAHECIIDLRPIKSKSGISEEDIAKRLIDYGYHAPTMSWPVAGTLMIEPTESENLAEINRFCNALISIKKEIDKVDNGSFDKKDNPLKNAPHTHIELSANEWKHSYTREEAAFPNEYLKDNKYWPPVARVDNVYGDRNLVCSCPSLDEYKDEAA

SEQ ID NO: 99266 - protein, 682 aa, Unknown
  Bacterial polypetide isolated from the Sargasso Sea
PHAAFFATKDEFKRLMPGRLIGVSVDRNNKRSYRMALQTREQHIRREKATSNICTAQALLAIIAAAYAIYHGPERLINIASTINYNIRYLKKSLEKLNYKIKSNKYFDTIVIEDSKAKEWFNKSVEEGINFRLINNTAFSITIDETTTLEDIDNLIAFFNITNKEIDANEIEKNLDPIFNDEKILRKDKILSHPIFNIYHSETEMMRYLKKLENKDIALNRSMIPLGSCTMKLNAASEMLPITLPGFANAHPFLEKQQREGYNQMMRELISMLKDITGFDAISLQPNAGAQGEFAGLLAIKKFHESNNEYDRNVCLIPNSAHGTNPASAQMCGMEVSIVKCDDLGNVDLNHLDLKIKEAGNKLAALMITYPSTHGVFEESISIICEAIHNAGGQVYMDGANLNAMVGIAKPGKFGPDVSHMNLHKTFCIPHGGGGPGMGPIGVKSHLENFLPGHPIVKNELGLTALDAVSAAPWGSPSILPISYSYISMMGDEGLKLATQIAILNANYIKEKLSDFFTLLYSGKNGMVAHECIIDIRPIKDELNISEEDIAKRLIDYGFHAPTMSFPVPGTLMIEPTESESKEEIDRFCTAMISIHNEIQKIRDGTYDAEDNPIKNSPHTIEEVSADEWSHKYTRAEAVFPHSYLYNNKYWPPVARIDNVFGDRNLFCVCPPIEDYEDVSNA

SEQ ID NO: 99267 - protein, 474 aa, Unknown
  Bacterial polypetide isolated from the Sargasso Sea
MLPNSEKDFLKRHIGPSKEDQSKMLKELNYKSLDDLIDNTVPEKIKFKGELNIGDSNSEYEALRKLRAISKKNQVYSNFIGMGYYGTYTPYVILRNILENPGWYTSYTPYQPEVAQGRLEMLLNFQQMIVDFTGMDIANASLLDEGTAAAEAMGLSHRLNKKDSNLVFVSEDCHPQTIDVIQTRAEPMGLKVFVGKEDEVLDQLKEDLVCGILQYPGTLGDIKDPSEAISKIHKKNGKAILACDLLALAKLKTPRELGADIAVGSSQRFGIPMGYGGPHAAFFATKDEYKRSMPGRIVGVSVDRHGNKAYRLSLQTREQHIRRDKATSNICTAQALLAIVSAAYAIYHGPDGIKNISERVSQLAKSFADKIKQSGYELYSNNFFDTVTIITKEKTDQIYKNALNQRVNIRKVNSEMLAVSFDERKNVYRVNQLLKIFNAAESIKKEDPSVSLPNLPKNLLRTSKYLEHPVSTYT

SEQ ID NO: 99268 - protein, 956 aa, Unknown
  Bacterial polypetide isolated from the Sargasso Sea
MLHNSQKDFLKRHIGPSEKDQKKMLSELKYSSLDELINKTVPEKIQFKGELNIGESNSEYEALRKLKAISKKNKIYSNFIGMGYYGTYTPYVILRNILENPGWYTSYTPYQPEVAQGRLEMLLNFQQMIVDFTGMDIANASLLDEGTAAAEAVGLSHRLNKSDSNLVFISENCHPQTIDVIQTRAEPMGLKVLVGNEDKALDNLKEDIVCGILQYPGTLGDIKDPSEAISKIHKRNGKAILACDLLALAKLKTPRELGADIAVGSSQRFGIPMGYGGPHAAFFATKDEYKRSMPGRIIGVSVDRHGNKAYRLSLQTREQHIRRDKATSNICTAQALLAIVSAAYAIYHGPDGIKNISERVSQLAKNFGDKIKQSGYELYSDYFFDTVTIITKDKTDQIFKNALDQKVNIRKVNSEMLSVSFDEKKNVYRVNQLLKIFNAAESIKKEDPTVSLPNLPKNLLRTSKYLEHPVFNSYHSETEMLRYLKKLEDKDIALNRTMIALGSCTMKLNATAEMIPISWRELAEPHPFVPVEQMEGYRELFTDLKNWLRSITGFSGVSLQPNAGAQGEYAGLMVIRKYHLDRGEENRNICLIPSSAHGTNPASAQMVGMKVVVVNCDKEGNVDFEDLKKKAETHSENLGALMVTYPSTHGVFEEKITDICDLIHKHGGQVYMDGANLNALVGIAKPGNFGPDVCHINLHKTFCIPHGGGGPGMGPIACKKHLQVYLPNHPVVKDCGPATGIGAVSAAPWGSSSILSISWMYIKMMGSQGLKLATEVAILNANYIAHRLKNHFPILYKGTNGNVAHECIIDIRSIKSETGVTEEDIAKRLIDYGFHAPTMSWPVAGTMMIEPTESESLTEIDRFCDTLINIKSEIEMIKSGKFDKVDNPIKNAPHTDIELSSDEWDHKYSRQQAAYPAKFLKTNKFWPPVARVDNVYGDKNIFCTCPSMDEFKEDAA

SEQ ID NO: 99269 - protein, 457 aa, Unknown
  Bacterial polypetide isolated from the Sargasso Sea
DCHYRQEKQHIRRDKATSNICTAQALLAIVSAAYAIYHGPDGIKNISERVSQLAKNFADKIKQSGYEIYSDHFFDTVTINTKEKTDQIYKNALNQKVNIRKVNSEMLAVSFDERKNVYRVNQLLKIFNAAESIKKEDPTVSLPNLPKNLLRTSKYLEHPVFNSYRSETEMVRYLKKLEDKDIALNRTMIALGSCTMKLNATAEMIPISWRELAEPHPFVPIEQMEGYRTLFTDLKNWLRSITGFSGVSLQPNAGAQGEYAGLMVIRKYHLDRGDKNRNICLIPSSAHGTNPASAQMVGMKVVVVNCDKEGNVDFDDLKKKVELHSENLGALMVTYPSTHGVFEEKIMEICELIHKHGGQVYMDGANLNALVGIAKPGNFGPDVCHINLHKTFCIPHGGGGPGMGPIACKKTFTGLSAQSPCCKRLWSCNRNRSCICRSLGKFKYFINFLDVYKNDGI

SEQ ID NO: 99270 - protein, 931 aa, Unknown
  Bacterial polypetide isolated from the Sargasso Sea
MLHNSEKDFIKRHIGLSKKDEKTMLSDLGYKSLNELIEDTVPSKILLKDLLSIGDPNSEYEGLRKLRSISKKNQIYSNFIGMGYYGTYTPNVIVRNILENPGWYTSYTPYQPEVAQGRLEMLLNFQQMIIDFTGMDIANASLLDEGTAAAEAMGLSHRLDKKDNKIVFISNDCHPQTIEVVKTRSEPLGLKVVIGNDEDLSNISEDIICGILQYPGTLGDIKDPSENISKIKKRNGKSILVCDLLSLAKLKTPAELGADIAVGSSQRFGIPMGYGGPHAAFFATKDEFKRSMPGRIVGVSVDRHGNKAYRLALQTREQHIRRDKATSNICTAQALLAIVSAAYAIYHGPKGIKTISERVSQLAKNFADKLKQSGYELYSDHFFDTVTIITKDKTDQIFNNALAQKVNIRKVNSEMLSVSFDEKKNVYRANQLLKIFNCAESIKENPTENLPNLPKNLLRTSTYLDHQVFNSYHSETEMLRYLKRLEEKDIALNRSMIALGSCTMKLNAVAEMIPITWREFSEPHPFAPIEQMEGFRTLFTDLKNWLRSITGFSGVSLQPNAGAQGEYAGLMVIRKYHLERGESNRNVCLIPSSAHGTNPASAQMVGMKVVVVNCDKQGNVDFEDLNKKVEAHSENLGALMVTYPSTHGVFEEKISDICELVHKHGGQVYMDGANLNALVGIAKPGNFGPDVCHINLHKTFCIPHGGGGPGMGPIACKRHLEIYLPSHPVIKDCGPATGIGPVSAAPWGSSSILSISWMYIKMMGSEGLKLATQIAILNANYVAHKLKNHFPILYKGTNGNVAHECIIDIRSIKNDTGVTEEDIAKRLIDFGFHAPTMSWPVPGTMMIEPTESESLQELDRFCDCLIKIKEEIDKIKSGDFDKNDNPIKNAPHTDLELASNKWEHKYSREEAAYPSNFLRSSKFLATCRKSR

SEQ ID NO: 99271 - protein, 541 aa, Unknown
  Bacterial polypetide isolated from the Sargasso Sea
MLAVSFDERKNVYRVNQLLKIFNAAESIKKEDPSVSLPNLPKNLSRTSKYLEHPVFNSYHSETEMLRYLKRLEDKDIALNRTMIALGSCTMKLNAAAEMIPISWKEFAEPHPFVPIEQMEGFRDLFTDLKNWLRSITGFSGVSLQPNAGAQGEYAGLMVIRKYHLDRGEANRNICLIPSSAHGTNPASAQMVGMKVVVVNCDKEGNVDFDDLKKKAEQHSENLGALMVTYPSTHGVFEEKITDICELVHKHGGQVYMDGANLNALVGVAKPGNFGPDVCHINLHKTFCIPHGGGGPGMGPIACKKHLQIYLPNHPVIKDCGPTTGIGAVSAAPWGSSSILSISWMYIKMMGSAGLKLASQVAILNANYIAHRLKDHFPILYKGSNGNVAHECIIDIRSIKSETGVTEEDIAKRLIDFGFHAPTMSWPVAGTMMIEPTESEGLSELDRFCDTLIKIKQEIEKIKSGEFDKIDNPIKNAPHTDTELASDNWDHKYSREQAAYPAKFLKANKFWPPVARVDNVYGDKNIFCTCPSMDEFKEDAA

SEQ ID NO: 99272 - protein, 607 aa, Unknown
  Bacterial polypetide isolated from the Sargasso Sea
MTSKDTFSQSLHELEQREMFQRRHIGPSSSEQDKMLKTLNLDSLESLIDEAVPLSIRMNQDLELPESRTEVDVLQELKSIASENKISRSFIGMGYYDTITPNVILRNLLENPGWYTAYTPYQAEVSQGRLEALLNYQQMVMDLTGMDIANASLLDEATAAAEAMAFSRRISRIKSMKFFASEDCHPQTLDVLKTRAEPMGIELVLGTPEDNLGTEFFGVLLQYPSTTGVIHDIGKWIEQWHQNDTMVSVATDLLSLVLLKPPGELGADVVIGNSQRFGVPMGFGGPHAAFFATHDRHKRSMPGRLIGVSVDGRGRRALRMALQTREQHIRREKATSNICTAQVLLAVIAGCYAVYHGPDGLKLIARRVHRMTMLFAKSLNKIGIRCSEHFFDTLHIDAGNERDQIYESALQQGVNFRKIGSNHLGVSLDETTTLDDLEQLVGVFQNSNENTSETIDLETWDQELSSSGESAIPSNLRRTSEFLTHPVFERYHSETSMMRYLKHLEDKDIALNRSMIPLGSCTMKLNSAVEMIPVTWQEFGGIHPFAPAEQTQGYQKMIKELEDQLIRITGFDAISMQPNSGAQGEYTGLLLIHRYQIHRGEGQRNIC

SEQ ID NO: 99273 - protein, 287 aa, Unknown
  Bacterial polypetide isolated from the Sargasso Sea
MLHNSQKDFIRRHIGPSNNEQQKMLKELNFKSLDDLINSTVPDKIQFKGELNIGEPNSEYEALRKLKSISKKNQIYSNFIGMGYYGTYTPYVILRNILENPGWYTSYTPYQPEVAQGRLEMLLNFQQMIVDFTGMDIANASLLDEGTAAAEAMGLSHRLNKSDSNLVFVSENCHPQTIEVIQTRAEPMGLKVLVGNEDKVLDQLKEDIVCGILQYPGTLGDIKDPSEHISKIHKKNGKAILACDLLALAKLKTPGELGADIAVGSSQRFGIPMGLWRASCSFFCNKR

SEQ ID NO: 99274 - protein, 374 aa, Unknown
  Bacterial polypetide isolated from the Sargasso Sea
MVIKSYLDKKGDSHRNICLIPSSAHGTNPASAIMAGLEVVVINTDERGNIDIEDLKTKVNEHKDNLAALMITYPSTHGVFESEIQSINDLIHQNGGQVYMDGANMNAQVGLTSPKIIGADVCHLNLHKTFSIPHGGGGPGVGPICVAEHLKEFLPSNPLIKTGGDDSLEAISSAPWGSALVCLISYGYIRMLGRNGIKKSTEIAIVNANYLKTKLEKNYKILYSGENGRSAHEFIIDCRDFKKYNIEVVDIAKRLIDYGFHAPTVSFPVPGTMMIEPTESENLNELDKFCEALNSIYTEIISDDDSKREMLRNSPHTLKMLTSTDWPYSYSREDASFPKSYLKTNKFWPSVRRVDEAYGDRNLICSCPPIETYQ

SEQ ID NO: 99275 - protein, 480 aa, Unknown
  Bacterial polypetide isolated from the Sargasso Sea
MQYPGTLGDIKDPSEPISKIHKKNGKAILACDLLALAKLKTPRELGADIAVGNSQRFGIPMGYGGPHAAFFATKDEYKRSMPGRIVGVSVDRHGNKAYRLSLQTREQHIRRDKATSNICTAQALLAIVSAAYAIYHGPDGIKTIAERVSQLAKNFADKLKQSGYEIYSDHFFDTVTIVTKDKTDQIYKNALDQKVNIRRVNSEMLAVSFDEKKNVYRVNQLLKIFNAAESIKKEDPTVSLPNLPKNLLRTSKYLEHPVFNSYHSETEMLRYLKKLEDKDIALNRTMIALGSCTMKLNATAEMIPISWRELAEPHPFVPIEQMEGYRDLFTDLKNWLRSITGFSGVSLQPNAGAQGEYAGLMVIRKYHLDRGEENRNICLIPSSAHGTNPASAQMVGMKVVVVDCDKEGNVDFEDLKKKAEMHSENLGALMVTYPSTHGVFEEKITDICELIHKYGGQVYMDGANLNALVGIARPGNFGPD

SEQ ID NO: 99276 - protein, 376 aa, Unknown
  Bacterial polypetide isolated from the Sargasso Sea
MIDDTSEEFINRHIGPSKEDQLKMLDYIGNNSLKQLIKDTVPENILLKNELNMAHSLSESEALKKLKLIAQKNQTYRNFIGMGYYNCFTPHVILRNLLENPGWYTSYTPYQPEVAQGRLEMLLNFQQLVMDFTGMDIANASLLDEATAAAEAVGLAQRVSKNNSKKVYVSEKCNPQVIDLIKTRIEPFGLELLIGNQSEFIKNIDGDLICGVLAYPDTLGEIVDPSEAISLIRKKGGKAIVVCDLLSLAKLKTPAELGADIAVGSAQRFGVPMGYGGPHAAFFATKENLKRSMPGRIIGVSVDKFGKKAYRLSLQTREQHIRRDKATSNICTAQALLAIVSAAYAIYHGPAGILNIASRTSKLAKLFANNIKEGGL

SEQ ID NO: 99277 - protein, 401 aa, Unknown
  Bacterial polypetide isolated from the Sargasso Sea
MSEFHKKHIGPSQREIDEMLQYLGCSSLNDLLEKIVPKNILDIDDMSVGNEVFSENDILNHVKKIGRNNKVHRSLIGQGYYDTITPNVILRNILENPGWYTQYTPYQPEISQGRLEALLNYQTMITQITALPIANASLLDEGTAASEAMLMLYRKNKSEKTQFLVDKECFQQTIDVIISRAEPLNIEIIVTDFKNFDFTNAFGCIVQYPNKYGHIAMENDYKRVVSDARNSNCKVIFASDLMCLQLFEAPGNLGADIAVGNSQRFGVPLGYGGPHAAFMSTSEEFKRDIPGRIVGVSQDRRGNQAYRLTLQTREQHIRREKATSNICTAQVLLAIISGMYALFHGPDDLKNIAKRIHSHTKELANKISKLGHEIVTNDNSFFDTVVIQLSNMSIESLKEKA

SEQ ID NO: 99278 - protein, 645 aa, Unknown
  Bacterial polypetide isolated from the Sargasso Sea
MVIDFTGMDIANASLLDEGTAAAEAMGLSYRICKKDTKKVFVSKNCHPQTIDVIKTRAEPLGLEIIVGDEDKDINENIVCGIIQYPGTLGDIKDPSEAISKIHKQNGKAVLVCDLLALAKIKTPAELGADIAVGSTQRFGIPMGYGGPHAAFFATKDEYKRSMPGRIVGVSVDRHGNKAYRLALQTREQHIRRDKATSNICTAQALLAIVSAAYAVYHGPKGIKKIADTVSQLAKSFADKIKQSGYELYSDYFFDTVTVKTLDKTDKIYKNALDQQVNIRKVNSEMLAVSFDERKNLYRANQVLKIFNCSETIKETTKEMTSKSLSNLPKNLLRTSTYLDHPVFNSYHSETAMLRYLKKLEDSDIALNRSMIALGSCTMKLNSVSEMIPVTWKEFSHPHPYSPIEQMDGYRELFTDLKNWLRTITGFSGVSLQPNAGAQGEFAGLMVIRKFHEKNGQKKRNVCLIPSSAHGTNPASAQMAGMKVVVVNCDALGNVDYEDLKKKAEEHSETLSALMVTYPSTHGVFEEKISDICDLVHKHGGQVYMDGANLNALVGIAKPGNFGPDVCHINLHKTFCIPHGGGGPGMGPIACKKHLEIYLPSHPVIDCGPPSGIGAISAAPWGSSSILSISWMYIKMMGSEGLKLA

SEQ ID NO: 99279 - protein, 295 aa, Unknown
  Bacterial polypetide isolated from the Sargasso Sea
MLPNSEKDFIKRHIGPSKEDQSKMLKELNYQSIDDLMNNTVPEKIMFKGELNIGESNSEYEALRKLRAISKKNHVYSNFIGMGYYGTYTPYVILRNILENPGWYTSYTPYQPEVAQGRLEMLLNFQQMIVDFTGMDIANASLLDEGTAAAEAMGLSHRLNKKDSNLVFVSEDCHPQTINVIQTRAEPMGLKVLVGKEDEVLDQLKEDLVCGILQYPGTLGDIKDPSEAISKIHKKNGKAVLACDLLALAKLKTPRELGADIAVGSSQRFGIPMGYGGPHAAFFATKDEYKRSMPG

SEQ ID NO: 99280 - protein, 352 aa, Unknown
  Bacterial polypetide isolated from the Sargasso Sea
MIDLNSFASRHIGPRNEDIKLMLKSINCSSLDDLIKKTVPSNILSESSLNLKPGMSEEFNKLNMQLLSIKNNFSKTYIGLGYYGTITPSVILRNILENPGWYTAYTPYQPEVSQGRLEMLMNFQQMIIDLTGMEIANASLLDESTAAAEAMMLAYKNNGKKNKTFCIQNTCHPQTISVLKARAEPLGIKILSSTKPDNDTFGCLIQNPDTFGEIHDLNSIIKSNKEQGILSVIISDLMSLVLMKSPGKFGADIVVGSAQRFGVPIGFGGPHAAFFATKNEFKRLIPGRIIGVSIDRNNKRAYRMALQTREQHIRREKATSNICTAQALLAIISAAYAMYHGPKRLQYIANTI

SEQ ID NO: 99281 - protein, 949 aa, Unknown
  Bacterial polypetide isolated from the Sargasso Sea
MRRLKLLENLNKINLFSKRHLGSSEADVNYMLGEVGYDSMSSFIDSVVPGSILKRNAVQIGEERTEEGVLEELKEIASKNKVFKSFIGQGHYDNFTPSVILRNVFENPGWYTSYTPYQPEISQGRLEALINFQTMVSDLTAMELSNASLLDEATAAAEAMTLAKRSSKSKSDSFFVDENSFQNTINVLKTRAEPLGIKLIFGNPIDLPNHEVFGAFLQYPGSNGKITDMSQHIKSCHDQSALAVIGSDLLALTILKPPGEMGADIVIGSSQRFGVPLGCGGPHAAFMAVSDKLKRSMPGRIVGASVDSNGDVAYRLALQTREQHIRREKATSNICTAQALLAIMASFYSIYHGKEGLIEIANKVNYLTSLLKKNFEVNGIDCLEDNFFDTLIIRSGQQTKEIHKRSLSKNINLRRIDEEHIGISLDETTSMKDIENILEIFTNQKIDSNLNFESSIPKKLKRTSSFLDHEVFKRYRTETELVRYIRKLSDKDIALDRAMIPLGSCTMKLNATSEMIPVSWPEFSKIHPFAPKDQLQGYKELIEDMEKMLVDLTGYSKISLQPNAGSQGEYAGLLAIDAFHKKNNESHRNICLIPKSAHGTNPASAQMVGLEVVPVECDEDGNIDIDDLKQKAEIHEENLSSLMITYPSTHGVFETNVSEVCDVIHSKGAFVYIDGANFNAMVGICYPGSFGGDVSHLNLHKTFCIPHGGGGPGIGPIGVVEKLSDFVPSHHDKSDPAVGPVSGTDWGSASILPISWMYMKMMGSEGLTQATQLAILNTNYIANRLKDHYKILYKGSNDLVAHECIIDVRPLKETAEVEVEDIAKRLIDYGFHAPTMSWPVAGTLMIEPTESESLSEIDRFCDAMISIRNEIKEIEEGKVSNQDNLLKNSPHCAKTLLQHEWDHPYTRAAAALPAKGLHENKYWPPVGRVDNVYGDRNLICSCPSMEDYE

SEQ ID NO: 99282 - protein, 239 aa, Unknown
  Bacterial polypetide isolated from the Sargasso Sea
KKHLADFAPGHPMFKNEIGLTTQEAVSAAPWGSASILPISYSYISMMGDDGLKLATQVAILSANYIKERLKKYYPILYTGKNNMVAHEFIIDIRPFKQELNISDEDIAKRLIDYGFHAPTMSFPVPGTLMIEPTESESKEELDRFCEAMISIHNEITMIRDGKFDKVDNPIKNAPHTIEEVSSDNWEHKYSRKDAAYPHAYLINNKYWSPVSRIDNVYGDRNLFCVCPPIDEYEEAKTG

SEQ ID NO: 99283 - protein, 326 aa, Unknown
  Bacterial polypetide isolated from the Sargasso Sea
MIEDTSKEFIQRHIGPTSHEENTMVKKVGAQSLEDLIEKTVPQKILIKDNLKIDEPMSENDALKKLKLLSKRNEIYRNFIGMGYYNTITPNVILRNILENPGWYTSYTPYQPEVAQGRLEMLLNFQQVIMDLTGMDIANASLLDEGTAAAEAVGLCQRLDKGDSKKIFVSSSCNPQTIDIIKTRVEPFGIEIIVGSEDKELNKIKDKIICGVLAYPGTLGDIKDPSEAISLIHKREGKAIMVCDLLSLARLKTPAELGADIAVGSAQRFGIPMGYGGPHAAFFATKEEFKRSMPGRIIGVSVDRHGKKAYRLSLQTREQHIRRDKA

SEQ ID NO: 99284 - protein, 297 aa, Unknown
  Bacterial polypetide isolated from the Sargasso Sea
MLKNAQKDFIRRHIGPSEKEQAKMLQDLGYKNLDELIEKTVPEKILLKDSLEIGDPNSEYKALRKLKNISKKNKIFSSFIGMGYYGTNTPYVILRNILENPGWYTSYTPYQPEVAQGRLEMLLNFQQMIIDFTGMDIANASLLDEGTAAAEAMGLSYRVSKTDTKKVFVSKNCHPQTIDVIKTRAEPLGLEILVGDEDKDINENIICGIIQYPGTLGDIKDPSEAISKIHKNNGKAVLACDLLALAKLKTPAELGADIAVGSSQRFGIPMGYGGPHAAFFATKDEYKRSMPGRIVGV

SEQ ID NO: 99285 - protein, 372 aa, Unknown
  Bacterial polypetide isolated from the Sargasso Sea
MIDDTSQEFINRHIGPSKEDQEKILDYIGSKSLDELIQNTVPENILLKNELKIGHSLSESEALKKLKIISQKNETFRNFIGMGYYNCFTPNVVVRNILENPGWYTSYTPYQPEVAQGRLEMLLNFQQLIIDFTGMDIANASLLDEATAAAEAVGLAQRVSKNNSRKVYVSETCNPQVIDLIKTRIEPFGLELLIGNQKDYIKNLNEELICGVLAYPDTFGEIVDPSESISLIRKKGGKAIIVCDLLSLAKLKTPAELGADIAVGSAQRFGVPMGYGGPHAAFFATKEEFKRSIPGRIIGVSVDKFRKKAYRLSLQTREQHIRRDKATSNICTAQALLAIVSAAYAIYHGPKGILDIANRTSKLAKLFAENIR

SEQ ID NO: 99286 - protein, 885 aa, Unknown
  Bacterial polypetide isolated from the Sargasso Sea
MDKYVKDRSKDFSTRHIGIKDSEAKQMLQDLGYNDMDKFLKDLMPESIFDLNALKLPEPLDEASALKNLKAISKKNKVYKSFIGQGFYGCNVPTVIKRNVFENPGWYTSYTPYQPEIAQGRLEALMNYQTMVADLTGMDISNASLLDEPTAAAEAMMLANRVAKSKSNVFFIHENSFPQSIAIMKSRAKPLGIEIEVGKEMDSKKEYFGCYVQYPGDDGSIIDFSPVSESIHAHGGLLVVGSDLLALTLLKPPSEFGADIVVGSSQRFGVPMGFGGPHAGFIAVKDSHKRSLPGRLIGLSKDQQDRPCYRLALQTREQHIRREKATSNICTAQALLAIMSGFYAIYHGPEGLKEIATRINGLTKDLANKLIDKGLEIKSETFFDTLVVKVKDAKKIHEKANANGMNLRDISNDSVGISLDETSAQDDVKAIIQIFDDEQNKNSKIEQSWSKEFNRATDFLTHEVFNSHHSETQILRYIRSLADKDIALDRCMIPLGSCTMKLNATTEMIPVGWNGFANMHPHAPEDQAQGYLDIINDLENWLTQITGYKAISLQPNAGSQGEYAGLLAIDGYHKANKDLSRNICLIPESAHGTNPASAQMVGYEVVVIDCDENGDIDMKDLKEKADLHNKNIAAMMITYPSTHGVFEEKVKEVCELIHSHGGFIYIDGANFNAMVGMCYPGQFGGDVSHLNLHKTFCIPHGGGGPGVGPIGVVKELVPYLPADPLTQKDSEYSISGSKFGSASILPISWMYIRMMGEESLRRATQIAILNTNYIANKLKDDYDVLYKGKNGLVAHECILDVRPFKESCGIEAEDIAKRLIDYGFHAPTMSWPVAGTLMIEPTESESLDELDRFCKAMIGIRDEIRAIEEGKSSQDDNLLKNAPHS

SEQ ID NO: 99287 - protein, 349 aa, Unknown
  Bacterial polypetide isolated from the Sargasso Sea
KKNRNVCLIPESAHGTNPASAQMCGMKVVVINCDDEGNVDLIDLKEKVNKYSKDLAALMVTYPSTHGVFEEKISEICEIVHKAGGQVYMDGANLNALVGIAKPGKFGPDVCHINLHKTFCIPHGGGGPGMGPIACAKHLKDFLPNHNITKNTRSQKSLGSVSAAPWGSASILPISWMYIKMMGAEGLRKASEVAILNANYISKKLSNHYKVLYKGKNGNVAHECIIDLRPIKSKSGISEEDIAKRLIDYGYHAPTMSWPVAGTLMIEPTESENLAEINRFCNALISIKKEIDKVDNGSFDRKDNPLKNAPHTYIELSANEWKHLYKREEAAFPNDNIKDNKYWPPSCKE

SEQ ID NO: 99288 - protein, 291 aa, Unknown
  Bacterial polypetide isolated from the Sargasso Sea
MEVKVYMDVQNLNALVGMQKPGNFGPDVCHINLHKTFCIPHGGGGPGMGPIACKKHLQVYLPNHPVVKDCGPATGIGAVSAAPWGSSSILSISWMYIKMMGSQGLKLATEVAILNANYIAHRLKNHFPILYKGTNGNVAHECIIDIRSIKNETGVTEEDIAKRLIDYGFHAPTMSWPVAGTMMIEPTESESLPEIDRFCDTLINIKLEIEMIKSGKFDKVDNPIKNAPHTDIELSSDKWDHKYSRQQAAYPAKFLKTNKFWPPVARVDNVYGDKNIFCTCPSMDEFKEDAA

SEQ ID NO: 99289 - protein, 334 aa, Unknown
  Bacterial polypetide isolated from the Sargasso Sea
MLHNSQKDFLRRHIGPSEEDQKKMLSELKYSSLDDLIKNTVPEKIQFKGELNIGESNSEYEALRNLKVISKKNQIYSNFIGMGYYGTYTPYVILRNILENPGWYTSYTPYQPEVAQGRLEMLLNFQQMIVDFTGMDIANASLLDESTAAAEAVGLSYRLNKSDCKLVFVSENCHPQTIDLIKTRAEPMGLKVLVGNEDKVLENLKEDVICGILQYPGTLGDIKDPSESISKIHKKNGKAILACDLLSLAKLKTPRELGADIAVGSSQRFGIPMGYGGPHAAFFATKDEYKRSLPGRLVGVSVDRHGNKAYRLSLQTREQHIRRDKATSNILQLK

SEQ ID NO: 99290 - protein, 418 aa, Unknown
  Bacterial polypetide isolated from the Sargasso Sea
PEDQAQGYLEIINDLENWLTQITGYKAISLQPNAGSQGEYAGLLAIDGYHKANKDLSRNICLIPESAHGTNPASAQMVGYEVVVIDCDENGDIDMKDLKEKADLHNKNIAAMMITYPSTHGVFEEKVKEVCELIHGHGGFIYIDGANFNAMVGMCYPGQFGGDVSHLNLHKTFCIPHGGGGPGVGPIGVVKELVPYLPADPLTQKDSEYSISGSKFGSASILPISWMYIKMMGEESLRRATQIAILNTNYIANKLKDHYDVLYKGKNGLVAHECILDVRPFKESCGIEAEDIAKRLIDYGFHAPTMSWPVAGTLMIEPTESESLDELDRFCEAMIGIREEIRAIEEGKSSQDDNLLKNAPHSVDTLIEDWKYPYSRKEAYYPNEQTKQQKYWPPVGRVDNAYGDRNLVCTCPDIKDLK

SEQ ID NO: 99291 - protein, 326 aa, Unknown
  Bacterial polypetide isolated from the Sargasso Sea
VEQHSENLGALMVTYPSTHGVFEEKIIDICDLVHKHGGQVYMDGANLNALVGVAKPGNFGPDVCHINLHKTFCIPHGGGGPGMGPIACKKHLQVYLPNHPVIKDCGPSTGIGAVSAAPWGSSSILSISWMYIKMMGSAGLKYATQVAILNANYIAHRLKDHFPILYKGSNGNVAHECIIDIRSIKSETGVTEEDIAKRLIDFGFHAPTMSWPVAGTMMIEPTESEGLSEIDRFCDTLIKIKQEIEKIKSGEFDKIDNPIKNAPHTDSEVASDNWEHKYTRQEAAYPSKFLRANKFWPPVARVDNVYGDKNIFCTCPSMDEFKEDAA

SEQ ID NO: 99292 - protein, 509 aa, Unknown
  Bacterial polypetide isolated from the Sargasso Sea
FTNQKMDLDLNFESSIPDDLKRTSSFLDHQVFKKYRTETELVRYIRKLSDKDIALDRAMIPLGSCTMKLNATSEMIPVSWPEFSKIHPFAPKDQLQGYAELIEDMEKMLVDLTGYSKISLQPNAGSQGEYAGLLAIDAFHKKNNESHRNICLIPKSAHGTNPASAQMVGLEVIPVECDEEGNIDIDDLKQKAEIHEKNLSSLMITYPSTHGVFETNVSEVCDVIHSKGAFVYIDGANFNAMVGICYPGSFGGDVSHLNLHKTFCIPHGGGGPGIGPIGVVEKLSDFVPSHHDENSPAVGPVSGTDWGSASILPISWMYMKMMGSEGLTQATQLAILNTNYIANRLKDHYKILYKGSNDLVAHECIIDVRPLKETAEVEVEDIAKRLIDYGFHAPTMSWPVAGTLMIEPTESESLSEIDRFCDAMISIRNEIKDIEDGKVSKQDNLLKNSPHCAKTLIQEEWGHPYTRAEAALPVKGLHENKYWPPIGRVDNVYGDRNLICSCPSMEDYE

SEQ ID NO: 99293 - protein, 419 aa, Unknown
  Bacterial polypetide isolated from the Sargasso Sea
ISVAFDEAKRLDHVNLLLKIFGINKDVTKTVDINLDNLPKNLLRTSKYLTHPVFNKYHSETEMMRYLKRLEDSDIALNRSMIALGSCTMKLNSTAEMIPISWKEFALPHPFVPIDQMKGYEILFNDLIKDLKEITGFDAVSLQPNSGAQGEYAGLMTIRAFHKNNKEANRNVCLIPNSAHGTNPASAQMSGMKVVVVNCDDNGNIDLEDLKNKSEKYSKDLAALMVTYPSTHGVFEEKITEICEIIHSNGGQVYMDGANLNALVGIAKPGKFGPDVCHINLHKTFCIPHGGGGPGMGPIACAKHLENFLPTHQHLKNINPEKGMGSVSAAPWGSASILVISWMYIKMMGSKGLKDASRISILNANYISRKLSEKYKILYTGKNGNVAHECIIDIRPIKEKSGITEEDIAKRLIDYGYHA

SEQ ID NO: 99294 - protein, 942 aa, Unknown
  Bacterial polypetide isolated from the Sargasso Sea
MFRENFSKRHIGPNSLELKKILKTIGVKSIEHLLKDTIPKSIIINKKLELPDSITEHEFLKEIKSLSSMNKKFKTYIGLGYHDTFTPSVIQRNILENPGWYTAYTPYQAEIAQGRLEALLNFQTMVCDLTKMEIANASLLDESTSAAEAMTLLFNNRTAEQKKDEIVSFFIDDNILPQTKSVLGTRAEPIGIKLEFGDISKIQTKKYFGTIVQFPGKHGDLKNYNNILEKLQKNDIKVVIAADLMSLVIIEPPKENLVDVVVGTTQRFGIPLGYGGPHAAFFATKEKYKRSLPGRIIGLTKDVNGNRALRMALQTREQHIKRDRATSNICTAQVLLAVMAGMYTVYHGPKGLKKIASSINKKTQFLSKKISSLGLNQLNKSFFDTLLIECDSKKIISIFKSKKINVLKVDSSKISISINEKTLEKDIESIISVFEEYTNKKAKSFGFPSNINMDKKMVRSSKFLTHKVFNSYHSETSLMRYIKKLENKDLSLTRSMISLGSCTMKLNAASEMIPLSWTEWNSIHPFVPTDQAKGYHNIISKLEEYLSEITGFSATSLQPNSGAQGEYSGLMVIKSYLNDIGQGNRNICLIPSSAHGTNPASAVMAGFKVVVIKTDKHGNIDLDDIKDKINEYDNSLAALMITYPSTHGVFESNIKTITKLIHKSGGQVYMDGANMNAQVGVTSPNMIGADVCHLNLHKTFAIPHGGGGPGIGPICVADHLKEYLPSNPIIKTGGNKAIPAISSAPWGSALACLISYGYIRMLGPKGLRESTEIAIVNSNYLKTKLEKNFSILYSGEKGRSAHEFIIDCRPFKKLNIEVNDIAKRLMDYGFHAPTVSFPVPGTIMIEPTESENLDELDRFSDAMNSIYEEITTDEVSRELLRNAPHTLQMAISDKWPYKYSRDEACFPKEYLRENKYWPSVRRVDDAFGDRNLICTCPPLSSF

SEQ ID NO: 99295 - protein, 900 aa, Unknown
  Bacterial polypetide isolated from the Sargasso Sea
MLETLGLSDLESLIDETLPKSIRQKNPLNFGKPKSERALLNHMRITASKNKVLTSLIGQGYHGTVTPPVIQRNILENPAWYTAYTPYQPEISQGRLEALLNYQTMISDLTGLEIANASLLDEATACAEAMTMAERIAKSKAKAFFIDENCHPQNIAVMKTRARPLGIEIVTGDPDKLNPADVFGAIFQYPGTFGHVRDFTSHIEKLHENKAIAVIAADPLSLTLLKEPGAMGADIAIGSTQRFGVPIGYGGPHAAYMATKDAYKRSMPGRLVGVSVDAQNKAAYRLSLQTREQHIRREKATSNVCTAQALLAVMASFYAVFHGPEGLKAIAQRIHRKTVRLAKGLETAGFKVEPDAFFDTITVEVGLMQKTVMDAAVRQGINLRAVGKTKIGINLDERSRRKVTEAVWRAFGITRSDDDLSHDYRVPDSLHRKSKYLEHDVFHMNRAETEMMRYMRRLADRDLALDRAMIPLGSCTMKLNSAAEMMPVSWREFSLLHPFAPKDQALGYEEMISDLSSKLCDITGYDAISMQPNSGAQGEYAGLLTIAEYHRAKGEEHRNVCLIPTSAHGTNPASAQMVGWKVIPVQSAENGDIDVADFREKAELHKNDLAGCMITYPSTHGVFEETVHEVCAITHEYGGQVYIDGANMNAMVGLSRPGDIGGDVSHLNLHKTFCIPHGGGGPGMGPIGVKAHLTPHLPGHPELGDDTGPVSAAPFGSPSLLPISWAYCLMMGGEGLTQATRVAILNANYIAKRLEGSFDVLYRGANGRVAHECIIDTRPFAETAGVSVDDIAKRLIDSGFHAPTMSWPVAGTLMIEPTESETKAELDRFCDAMLSIREEIRLIEDGKYPKDNNPLSNAPHTVQDLVGSWERPYSREQGCFPPGAFKVDKYWPPVNRIDNV

SEQ ID NO: 99296 - protein, 393 aa, Unknown
  Bacterial polypetide isolated from the Sargasso Sea
KKLSSLNQKFKTYIGLGYHDTFTPSVIQRNILENPGWYTAYTPYQPEIAQGRLEALLNFQTMICDITKMEIANASLLDEGTAAAEAMIMMYNNRSREQKLTNQNKFYVDSNIFPQTLAVLSTRANPLDIELVIGNINEINENEFFGCIIQYPGKDGKLEKIGNFLESINNDNLKVIIAVDLMSIVLIEPPETDKIDVIVGTTQRFGIPLGYGGPHAAFFATKEKYKRNIPGRIIGVTKDIDGDYSLRMALQTREQHIKRDRATSNICTAQVLLAVMAGMYAVYHGPKGLKEISKSIHLKAVYLKRNLESIGLKIKYSKLYDTVTVLCDSKKIKELAYIKKINFCYLSDGEISISVNEKTNLKDLKEIISVFEDFTRKVSTINEFPTDVKYKER

SEQ ID NO: 99297 - protein, 335 aa, Unknown
  Bacterial polypetide isolated from the Sargasso Sea
MNQIKSFVDRHIGISPGDQKDMLDFLGYKDINAFIEAVVPESILEDDYLDLGEGLSEMAALKKLDKVAKQNRVFRSYIGQGYYGTVTPKVIKRNVFENPGWYTSYTPYQAEISQGRLEALINFQTTICELTSMEIANASLLDEATAAAEAMMLAKRVSKSKSNTFFIDKNCFKQTISVLQTRAKPFGIELEIGDPQDFNEKDFFGMLIQYPNKFGEIDDFTKLSAYCKKNKSLLVCATDLLALTLLKPPGEIGADIVIGSSQRFGVPMGFGGPHAAFMATHESFQRSMPGRIIGASKDASGNLAYRLALQTREQHIRREKATSNICTSQALLAVM

SEQ ID NO: 99298 - protein, 291 aa, Unknown
  Bacterial polypetide isolated from the Sargasso Sea
MVTSPFLQRHVGPSDAEQQRMLTALGYADMAAFLADVVPEDILDEFPPQGLLPPGCGEAEALAHLREIAAANDSRRSLIGLGYYGTATPALIQRHVFENPAWYTAYTPYQAEIAQGRLEALLNFQTLISELTGLPIANASLLDEATAAAEAMSLSYGICRRTEANRFLVDANALPQTWAVLQTRAEPLGIVLERVTPEQASFDASVFGVLLQLPGADGQIWDPTAVIARAHEAGALVTVAIDPLAQTLIAPVASFGADIAVGSAQRFGVPMGFGGPHAAFFATKDTYKRQI

SEQ ID NO: 99299 - protein, 370 aa, Unknown
  Bacterial polypetide isolated from the Sargasso Sea
ASLLDEGTAAAEAMGLSHRLNKKDSDLIFISEDCHPQTINVVQTRAEPMGLKVLIGKEDEVLDNLKEDLVCGILQYPGTLGDIKDPSESISKIHKLNGKAILACDLLALAKLKTPGELGADIAVGSSQRFGIPMGYGGPHAAFFATKDEYKRSMPGRIVGVSVDRHGNKAYRLSLQTREQHIRRDKATSNICTAQALLAIVSAAYAIYHGPDGIRKISERVSQLAKNFADKLKQSGYELYSDNFFDTVTIVTREKTEQIFQNALDQKVNIRKVNSEMLAVSFDEKKNVYRANQLLKIFNAAESIKENPTESLPNLPKNLLRKSKYLEHPVFNLYHSETEMLRYLKKLEDKDIALNRTMIALGSCTMKLNA

SEQ ID NO: 99300 - protein, 727 aa, Unknown
  Bacterial polypetide isolated from the Sargasso Sea
MVLSIDQTELCEAAHDNQAHICIATDLLALALLKSPGEMGADVAVGSAQRFGVPMGYGGPHAAFFSTNEKFKRKIPGRIIGVSQDSLGKPALRMALQTREQHIRREKATSNICTAQVLLAIISGMYAVYHGPDGIKEIALRVNQFTRLLAVSLKNAGIDLVHNAYFDTIRFKAEGWKTKANEKQLNFRDHKDGTVGISIDETTTEDDIISILDVFNVEKYDVLESSVPDHLERTSSFLENSVFHKYRSETDMLRYIHTLETKDLSLNTSMIPLGSCTMKLNSTTEMTAVTWPEFSNIHPFAPSEQVEGYQSLIQELNDWLISITGFDAISMQPNSGAQGEYAGLMIIRAYHKAQGNDHRDTCLIPDSAHGTNPASAVMAGMRVVVVDCDDQGNIDIDDLKKKIMENEDNLSSVMITYPSTHGVFESTIKEICEMVHNSGGQVYMDGANLNALVGVCKPGDFGADVMHINLHKTFCIPHGGGGPGMGPIVCKDHLSPFLPGHTQIETSNKQAITAVSAAPFGSSSILPISWSYIAMMGNDGLKKATQVAILNANYLAKKLEDYYPVLYRGDSGYHAHEFIIDIRPIKDASGINEEDIAKRLMDYGFHAPTMSWPVPGTMMIEPTESESKPELDRFIGAMISIKKEIDNVISGEFDPTDNPLKNAPHTAEHALSDNWPHHYSRYISCFPMHWQSEYKYWPSVGRIDNAYGDRNLVCTCPATDDYRDRDL

SEQ ID NO: 99301 - protein, 485 aa, Unknown
  Bacterial polypetide isolated from the Sargasso Sea
TFFLIPSIIDAGNDSDQIYESALQQGLNFRKIGSNHLGVSLDETTTLDDLEQLVGVFQDSKENTSEAIDLESWDQELSSNRESAIPKNLRRTSEFLTHPVFERYHSETSMMRYLKHLEDKDIALNRSMIPLGSCTMKLNAAAEMIPVTWQEFGGIHPFAPAEQTQGYQKMIEELEDQLIRITGFDAISMQPNSGAQGEYTGLLLIHRYQIHRGEGQRNICLIPSSAHGTNPASAMMASMKVVIIQCDEEGNIDLEDLEAKAQKHSSELSALMITYPSTHGVFEETLTKICDIIHHHGGQVYMDGANLNALVGIAQPGKIGPDVLHMNLHKTFCIPHGGGGPGMGPIGFKKHLAPFAPSHAVCPVPGVPEENSAVSAAPYGSPGILPISWVYIKLMGGPGLLKATKVAILNANYIASRVGKHFPVVYTGNNGRVAHECIIDVRPFRETAGITEEDVAKRLIDYGFHSPTMSWPVAGTLMIEPTESE

SEQ ID NO: 99302 - protein, 258 aa, Unknown
  Bacterial polypetide isolated from the Sargasso Sea
MEENFSKRHIGLNEEDKRKLLKKLGYGTMDKFINDVVPQNIKRVAPMKIEKELSEKQLLSKIKEYASLNKTMISMIGQGFYSTHTPSVLLRNILENPSWYTAYTPYQPEISQGRLEALLNFQTMISEITSLPIANASMLDESTAAAEAMTMSFKLSNKKNTVILDKYLHPQTINVIKTRAEPLGINLIISENPEKEKLDDCSCVIFQYPNTEGRIKNLDDDIKIIQSAGSMVILVADLLSLALIKSPGEMGADIAVGS

SEQ ID NO: 99303 - protein, 489 aa, Unknown
  Bacterial polypetide isolated from the Sargasso Sea
MAIVSAAYAIYHGPTGILNIANRTSKLAKLFANNIREGGFELHSNNFFDTVTIKTNEKTKEIYKKAITEKVNLRKVDNNTLSVAFDEAKRIDHVNLLLKIFGINKDLKDIEDVMLDNLPKNLLRTSKYLSHPVFNKYHSETEMMRYLKRLEDSDIALNRSMIPLGSCTMKLNSTAEMIPISWKEFSLPHPYVPVEQMKGYTTLFNDLEKDLKEITGFDAVSLQPNSGAQGEYAGLMTIRAFHKNNNQANRNVCLIPNSAHGTNPASAQMSGMKVVVINCDANGNIDFEDLKIKSEKYSKDLAALMVTYPSTHGVFEEKISEICEVIHSNGGQVYMDGANLNALVGIAKPGEFGPDVCHINLHKTFCIPHGGGGPGMGPIACAKHLKDFLPTHQHLKELNLDKGMGSVSAAPWGSASILVISWMYIKMMGAKGLKLASEISILNANYISKKLSEKYKILYTGKNGNVAHECIIDIRPIKEKTGITEEDIA

SEQ ID NO: 99304 - protein, 975 aa, Unknown
  Bacterial polypetide isolated from the Sargasso Sea
MKLEHPDRLMNRTPLSLAALETHDAFAERHIGPDAASQQAMLDTLGFASRAALIDAVIPASIRRAETLPLGPFAQPKSEAEALAALRVLADKNQVFRSYIGQGYHDTHTPAVILRNVLENPAWYTAYTPYQPEISQGRLEALLNFQQMVADLTGLAISNASLLDEATAAAEAMTLLQRTGKPTSNVFYVADDVLPQTLEVIRTRALPVGIEVKTGPAADAAQANAFGVLLQYPGVNGDVRDYRALTDAIHAAGGHVVVAADLLALTVLTPPGDWGADVAIGNTQRFGVPMGFGGPHAAYLAVRDEFKRQMPGRLVGVTVDAQGKPALRLALQTREQHIRREKATSNVCTAQALLAIMASMYAVYHGPHGLKTIALRVNRIAALLAAGVKQLGFATVNDTFFDTLTIDTGARTAQVHEFAKAKRINLRRVSDTQVGVSVDETTTRDDLADLLAVFAQAAGGTAPAVDALDAGLAGVPALPAGLERTSAYLTHHVFNRHHSETEMLRYLRSLSDKDLALDRSMIPLGSCTMKLNATSEMLPVTWPEFGRIHPFAPAEQTVGYREMIDQLEQMLVAATGYAAVSLQPNAGSQGEYAGLLIIHAYHASRGEAHRDVCLIPASAHGTNPASAHMAGMKVVVVACDAQGNVDIADLKAKAEQHAKDLAAIMITYPSTHGVFEQNVREICEIVHAHGGQVYVDGANMNAMVGLTAPGQFGGDVSHLNLHKTFCIPHGGGGPGVGPVAVGAHLAKFLPNQRSTGYTREEDGIGAVSAAPYGSASILPISWMYIAMMGAKNLTAATETAILNANYIAKRLAPHYPVLYSGPGGLVAHECILDLRPIKESSGITVDDVAKRLMDYGFHAPTMSFPVPGTLMVEPTESESQEELDRFIAAMIAIRDEIRAVEEGRADREDNPLRHAPHTAAVVTANEWPHAYSREQAAYPVASLGTNKYWPPVGRADNVYGDRNLFCSCVPMSEYA

SEQ ID NO: 99305 - protein, 456 aa, Unknown
  Bacterial polypetide isolated from the Sargasso Sea
LIHKKKGKAILICDLLALAKIKTPAQLGADIVVGNSQRFGIPMGYGGPHAAFFATKDEYKRAMPGRIIGVSVDRLGKKALRMALQTREQHIRREKATSNICTAQALLAIISAAYAIYHGPKGINAIAERISKIAKSFADKIKKSGYELYSDSFFDTVTIITKNKTQNIFKNALRNGVNLRMVGDNMISVAFDERKSIEKTNLLLKIFNSSESINETGKVVLNNIPKNLIRTSKYLTHPVFNSYHSETEMLRYLKKLEDSDIALNRSMISLGSCTMKLNAVSEMIPVTWGEFYEPHPFAPVEQMEGYRNLFTDLKNWLREITGFSGVSLQPNAGAQGEYAGLMVIRKYHLENGNKERNVCLIPSSAHGTNPASAQMAGMKVVVISCDKNGNVDLEELKIKAKEYSKNLSALMVTYPSTHGVFEEKIKEICSIVHDNGGQVYMDGANLNALVGIAKHR

SEQ ID NO: 99306 - protein, 347 aa, Unknown
  Bacterial polypetide isolated from the Sargasso Sea
KQSGYEIYSDHFFDTVTIVTKDKTDQIYKNALDQKVNIRRVNSEMLAVSFDEKKNVYRVNQLLKIFNAAESIKKEDPTVSLPNLPKNLLRTSKYLEHPVFNSYHSETEMLRYLKKLEDKDIALNRTMIALGSCTMKLNATAEMIPISWRELAEPHPFVPVEQMEGYRALFTDLKNWLRSITGFSGVSLQPNAGAQGEYAGLMVIRKYHLDRGEENRNICLIPSSAHGTNPASAQMVGMKVVVVDCDKEGNVDFDDLKKKAETHSENLGALMVTYPSTHGVFEEKITDICELIHKHGGQVYMDGANLNALVGIARPGNFGPDVCHINLHKTFCIPHGGGGPGMGPIAC

SEQ ID NO: 99307 - protein, 165 aa, Unknown
  Bacterial polypetide isolated from the Sargasso Sea
FKYYTTGKNGNVAHECIVDLRPIKEKSGISEEDIAKRLIDYGYHAPTMSWPVSGTIMIEPTESENLEEIDRFCDTLLNIKDEIDKIDSGKFDKEDNPLINAPHTYLELSADEWKHSYSRKDAAFPKTHLKEYKYWAPVARVDNVYGDRNLVCSCPSMDEYKEEAA

SEQ ID NO: 99308 - protein, 494 aa, Unknown
  Bacterial polypetide isolated from the Sargasso Sea
MLHNSQKDFIKRHIGPSKKDQEKMLKDLNFKSLDEFINSTIPEKIQFKGELNIGEPNSEYEALRKLKAISKKNQIYSNFIGMGYYGTYTPYVILRNILENPGWYTSYTPYQPEVAQGRLEMLLNFQQMIVDFTGMDIANASLLDEGTAAAEAMGLSHRLNKSDSNLVFVSENCHPQTIDVIQTRAEPMGLKVLVGNEDKVLEKLKEDIVCGVLQYPGTLGDIKDPSEAISKIHKKNGKAILVCDLLALSMLKTPRELGADIAVGSSQRFGIPMGYGGPHAAFFATKDEYKRSMPGRIVGVSVDRHGNKAYRLSLQTREQHIRRDKATSNICTAQALLAIVSAAYAIYHGPDGIKSISERVSQLAKNFADKIKQSGYELYSDYFFDTVTIITKEKTDQIFKNALDQKVNIRKVNSEMLSVSFDERKNVYRVNQLLKIFNAAESIKKEDPTVSLPNLPNNLLRTSKYLEHPVFNSYHSETEMLRYLKKLEDKDIAL

SEQ ID NO: 99309 - protein, 461 aa, Unknown
  Bacterial polypetide isolated from the Sargasso Sea
GVSQDRRGNQAYRLTLQTREQHIRREKATSNICTAQVLLAIISGMYALFHGPDDLKNIARRIHSHTKELADKIAKFGHEIVTNDNSFFDTIVIKLSNMSIESLKDKALKQNFNLMYHDNGFVGISLDEKTDFNEVEALANLFDVNNDSKNSYSIFKPNRIGDILTHPIFHSINSETEMLRYINKLEKRDLSLNYSMIPLGSCTMKLNATVEMIPISWPEFNSIHPFAPLSQAKGYEKIINELEEMLYKVTGFDAVSFQPNSGAQGEYAGLLSIREYHKANNSRRDICLIPESAHGTNPASAIMAGLKVVIVKCDDHGNIDFKDLSAKVDEAGDRLSSLMVTYPSTHGVFEHNIDEICNLIHENGGLVYMDGANLNAMVGVCKPGKFGADVMHINLHKTFCIPHGGGGPGMGPICVNEKLKPHLPKHSFTDEDFSYSVSSSPFGSASILLISYIYMKLMAAN

SEQ ID NO: 99310 - protein, 364 aa, Unknown
  Bacterial polypetide isolated from the Sargasso Sea
MSEFHKKHIGPSQKEIDEMLQYLNCDSLNDLLEKIVPKNILDIDDISIGNDVFSENDILNHVKNIGSNNKVHRSLIGQGYYDTITPNVILRNILENPGWYTQYTPYQPEISQGRLEALLNYQTMITQITALPIANASLLDEGTAASEAMLMLYRKNKSEKMQFLVDKECFQQTIDVIISRAEPLDIEIIVTDFKNFNFTDAFGCILQYPNKYGHISSNDDYKNLVSDAHNSNCKVIFASDLMCLQLFEAPGNLGADIAVGNSQRFGVPLGYGGPHAAFMSTSEEFKRDIPGRIVGVSQDRRGNQAYRLTLQTREQHIRREKATSNICTAQVLLAIISGMYALFHGQDDLKNIAKRIHSHTKELA

SEQ ID NO: 99311 - protein, 269 aa, Unknown
  Bacterial polypetide isolated from the Sargasso Sea
MLKNAQKDFIQRHIGPSEEEQNIMLQELGFKNLDELIKNTVPEKILFKDDLGIGEPNSEYKALRKLKDISKKNKVYSSFIGMGYYGTYTPYVILRNILENPGWYTSYTPYQPEVAQGRLEMLLNFQQMVIDFTGMDIANASLLDEGTAAAEAISLSYRVSKSKTKKVFVSKNCHPQTIEVVKTRAEPLGLEIIVGDEDTDIKEEIICGVIQYPGTLGDIKDPSEAISKIHKHNGKAVLVCDLLALAKLKTPAELGADIAVGSSQRFGIP

SEQ ID NO: 99312 - protein, 516 aa, Unknown
  Bacterial polypetide isolated from the Sargasso Sea
ESIKKEDPVANLVNLPKNLIRTSKYLEHPVFNLYHSETEMLRYLKKLEDKDIALNRTMIALGSCTMKLNATAEMIPISWRELAEPHPFVPVEQMEGYRELFTDLKNWLRSITGFSGVSLQPNAGAQGEYAGLMVIRKYHLDRGDENRNICLIPSSAHGTNPASAQMVGMKVVVVDCDKEGNVDFEDLKKKAETHSENLGALMVTYPSTHGVFEEKISDICDLIHKHGGQVYMDGANLNALVGIAKPGNFGPDVCHINLHKTFCIPHGGGGPGMGPIACKRHLQVYLPNHPVVKDCGPATGIGAVSAAPWGSSSILSISWMYIKMMGSQGLKLATEVAILNANYIAHRLKNHFPILYKGTNGNVAHECIIDIRSIKSETGVSEEDIAKRLIDYGFHAPTMSWPVAGTMMIEPTESESLPEIDRFCDTLINIKTEIEMIKSGKFDKIDNPIKNAPHTDIELSSDEWEHKYSRQQAAYPAKFLKKNKFWPPVARVDNVYGDKNIFCTCPSMDEFKEDAA

SEQ ID NO: 99313 - protein, 962 aa, Unknown
  Bacterial polypetide isolated from the Sargasso Sea
MTKQTLTQLEQHDLFLRRHIGPDSSQQQEMLNYVGAESLDDLTAQIVPESIRLSQELSIGDSCGEAEGLAYIRGLAKQNQVFKSYIGMGYYGTQVPNVILRNVLENPGWYTAYTPYQPEIAQGRLEAILNFQQVSMDLTGLDLASASLLDEATAAAEAMALAKRVSKAKKANIFFVADDVFPQTLDVVKTRAECFGFEVVVGPAHEAVNHELFGALFQYSNRFGQITDFTDLFAELRAKNVIVTVAADIMALVLLKSPGAMGADVVFGSAQRFGVPMGFGGPHAAFFVARDEHKRSMPGRIIGVSKDTRGNRALRMAMQTREQHIRREKANSNICTAQILLANMASFYAVFHGPQGLKTIASRINRFADILAAGLQAKGVSLVNTTWFDTISIKGLDVAAVNARALAAEMNLRFDADGIVGVSLDETTIRSDIEALFDVILGAGHGLDVAALDAQIVAQGSQSIPTSLVRQDAILSHPTFNRYQSETEMMRYIKRLESKDLALNYSMISLGSCTMKLNAAVEMIPVSWPEFANMHPFCPLDQAKGYTQLIEELSSWLVNVTGYDAVCIQPNSGAQGEYAGLLAIRKYHESRGQAHRNICLIPQSAHGTNPASAQLAGMQVVVTACDKQGNVDLDDLKAKAAEVAENLSCIMITYPSTHGVYEESIREICNIVHQHGGQVYLDGANMNAQVCLTSPGFIGADVSHLNLHKTFAIPHGGGGPGMGPIGVKAHLAPFVAGHVVVKPGRESDNNGAVSAAPYGSAGILPISWMYIKLLGSNGLKKSTQTALLNANYVMKKLSEHYPVLFRGRNDRVAHECIIDLRPIKEASGVTEMDIAKRLNDYGFHAPTMSFPVAGTLMIEPTESESKVELDRFIDAMVSIRAEIAKVEAGEWPADNNPLHNAPHTMADIMDPAFDSRPYSREVAVFPSAAVRTNKFWPTVNRIDDVYGDRNLFCACVPISDYE

SEQ ID NO: 99314 - protein, 371 aa, Unknown
  Bacterial polypetide isolated from the Sargasso Sea
NELEEIANKNTKMRSLIGLGYYDNHMPKVIQRHVLENPRWYTSYTPYQAEIAQGRLEALFNFQTIVCELTGFPVANASLLDEGTAAAEAMAMSFSARKNKSSKVYLVESNVFDHTFNVLQTRAKPLGISLKRFTQSNLPNHDDVFGMLLQLPGKNGELYDPTFLISQAHRSEIIVTACIDPLAQVLIKPISEFGVDVAVGSMQRFGVPMGFGGPHAAYFACSEKYKRLIPGRIVGQTLSKNGEKSLRLALQTREQHIRREKATSNICTAQSLLAIISSFYAIYHGPSGLTQIAKRLVELRINLESSLAALGFDIPNGIRFDSVDVYSEHSQRIHNEALKNGYNLRILPLGSTIEHSTGFGISLDELSNEKE

SEQ ID NO: 99315 - protein, 234 aa, Unknown
  Bacterial polypetide isolated from the Sargasso Sea
MLHDSEKDFIKRHIGTSEEEQSKMLKVLGYTSLDELISKTVPEKILFTEDLDIGEPNSEYEALRKLKNLSKKNTIFSNFIGMGYYGTYTPNVIIRNILENPGWYTSYTPYQPEVAQGRLEMLLNFQQMIVDFTGMDIANASLLDEGTAAAEAMGLSYRLDKKDSKTVFISENCHPQTIEVVKTRAEPLGLKVVVGSEDKVIDETSDLVCGIIQYPGTLGDIKDPSAYISKIHKT

SEQ ID NO: 99316 - protein, 645 aa, Unknown
  Bacterial polypetide isolated from the Sargasso Sea
MLHNSQKDFIRRHIGPSEKDQEKMLKDLNFKSLDEFINSTIPEKIQFKGELNIGEPNSEYEALRKLKAISKKNQIYSNFIGMGYYGTYTPYVILRNILENPGWYTSYTPYQPEVAQGRLEMLLNFQQMIVDFTGMDIANASLLDEGTAAAEAMGLSHRLNKSDSNLVFVSENCHPQTIDVIQTRAEPMGLKVLVGDENKVLEQLKEDIVCGVLQYPGTLGDIKDPSESISKIHKKNGKAILVCDLLALSMLKTPRELGADIAVGSSQRFGIPMGYGGPHAAFFATKDEYKRSMPGRIVGVSVDRHGNKAYRLSLQTREQHIRRDKATSNICTAQALLAIVSAAYAIYHGPDGIKSISERVSQLAKNFADKIKQSGYELYSDYFFDTVTIITKEKTDQIFKNALDQKVNIRKVNSEMLSVSFDERKNVYRVNQLLKIFNAAESIKKEDPTVSLPNLPKNLLRTSKYLEHPVFNLYHSETEMLRYLKKLEDKDIALNRTMIALGSCTMKLNATAEMIPISWRELAEPHPFVPVEQMEGYREMFTDLKNWLRSITGFSGVSLQPNAGAQGEYAGLMVIRKYHLDRGDENRNICLIPSSAHGTNPASAQMVGMKVVVVDCDKEGNVDFEDLKKKAELHSNNLGALMVTT

SEQ ID NO: 99317 - protein, 462 aa, Unknown
  Bacterial polypetide isolated from the Sargasso Sea
MKKDVKYYQHQFVDRHVGPNQEELSQMLHTIGVGSIEELIDLSIPKSIQSKEKLNVGNGISEKELIEKLKSIAEKNTIMKTYIGMGYYNCITPPVIQRNILENPGWYTQYTPYQAEISQGRLEALINFQTMVCDLTALPIANASLLDEATAAAEAMTMTYRMSKDRNIFLVSKHCHPQTIDVLKTRSEPLGITVQLCDDDDFIFNQNVFGSILQYPDTNGSVNNFQKITNAAHKESAYVIIATDLMSLALLKPPGELGADVALGSSQRFGVPMGYGGPHAAFFAVKEKFKRFLPGRLIGVSVDSEGNQAYRMSLQTREQHIRREKATSNICTAQVLLAIMSGMYAVYHGPKRIKEIARTIHQHTCDLATSLSKAGYEILNDTFFDTIRFLGPDKTKEKLLKHNINIRDFSDGSLGIFIDETVMKKDISHLLSILNVSHELKYISTLPSDLRRRTSFLGHPVF

SEQ ID NO: 99318 - protein, 760 aa, Unknown
  Bacterial polypetide isolated from the Sargasso Sea
EDEVLDQLKEDLVCGILQYPGTLGNIKDPSEAISKIHKKNGKAVLACDLLALAKLKTPRELGADIAVGSSQRFGIPMGYGGPHAAFFATKDEYKRSMPGRIVGVSVDRHGNKAYRLSLQTREQHIRRDKATSNICTAQALLAIVSAAYAIYHGPDGIKNISERVSQLAKSFADKIKQSGYELYSNYFFDTVTIITKEKTDQIYKNALNQKVNIRKVNSEMLAVSFDERKNVYRVNQLLKIFNAAESIKKEDPSVSLPNLPKNLLRTSKYLEHPVFNLYHSETEMLRYLKRLEDKDIALNRTMIALGSCTMKLNAAAEMIPISWKEFAEPHPFVPIEQMEGFRDLFTDLKNWLRSITGFSGVSLQPNAGAQGEYAGLMVIRQYHLDRGEANRNICLIPSSAHGTNPASAQMVGMKVVVVNCDKEGNVDFDDLKKKVEQHSENLGALMVTYPSTHGVFEEKIIDICELVHKHGGQVYMDGANLNALVGVAKPGNFGPDVCHINLHKTFCIPHGGGGPGMGPIACKKHLQVYLPNHPVIKDCGPITGIGAVSAAPWGSSSILSISWMYIKMMGSAGLKLATQVAILNANYIAHRLKDHFPILYKGSNGNVAHECIIDIRNIKSETGVTEEDIAKRLIDFGFHAPTMSWPVAGTMMIEPTESEGLSEIDRFCDTLIKIKQEIEKIKSGEFDKIDNPIKNAPHTDSELTSDNWEHKYTRQEAAYPSKFLKANKFWPPVARVDNVYGDKNIFCTCPSMDEFKEDAA

SEQ ID NO: 99319 - protein, 462 aa, Unknown
  Bacterial polypetide isolated from the Sargasso Sea
MPLNYAMISLGSCTMKLNATAEMIPVTWPEFGKLHPFAPLAQAKGYQLLLADLENWLVKVTGYDAVCMQPNSGAQGEYAGLLAIKKYHESRGEGHRDICLIPASAHGTNPASAQMAGLRVIVTACDKSGNVDLDDLRAKAAEAGDQLSCLMVTYPSTHGVYEETIKEVCDIVHQHGGQVYLDGANMNAQVGLTAPGFIGADVSHLNLHKTFAIPHGGGGPGMGPIGVKKHLAPFVAGHAVVKTDKESRNNGAVSAAPFGSASILPISWMYIAMLGDEGLKKSTQVAILNANYLAKKLGESFPVLYSGRNGRVAHECILDIRPLKEASGISEMDVAKRLMDYGFHAPTMSFPVAGTLMVEPTESESKRELDRFVEAMTAIRAEIAKVQDGQWSLTDNPLVHAPHTQDDVMDAEWSRGYSRAEAVFPSEAVRAAKLWPSVNRIDDVYGDRNLFCSCIPTEDYAK

SEQ ID NO: 99320 - protein, 593 aa, Unknown
  Bacterial polypetide isolated from the Sargasso Sea
REGKAIMVCDLLSLSRLKTPAELGADIAVGSAQRFGIPMGYGGPHAAFFATKEEFKRSMPGRIIGVSVDRHGKKAFRLSLQTREQHIRRDKATSNICTAQALLAIISAAYAIYHGPEGILKIANRTSKLAKIFADSLEENGFKIFSKSFFDTVTIETNEKTETIFNKALAEKINLRRVNKKTLSVAFDEVKKIKHVNTLLKVFGVKKEYDNSVNVELNNLPKNLLRTSKYLTHPIFNKYHSETEMLRYLKRLEDCDIALNRSMIALGSCTMKLNATAELIPVTWKEFSLPHPFVPEDQMKGYKVLFNDLINDLKEITGFDAVSLQPNSGAQGEYSGLMTIRKYHINNKQKNRNICLIPESAHGTNPASAQMCGMKVVVVNCDEDGNVDLKDLKSKVDKYSNDLAALMVTYPSTHGVFEEKITEICDYVHKAGGQVYMDGANLNALVGIAKPGKFGPDVCHINLHKTFCIPHGGGGPGMGPIACAKHLEDFLPNHSVIKSIGTDKSLGSVSAAPWGSSSILVISWMYIKMMGAEGLKKASQVAILNANYISKRLSKFYKVLYTGKNGNVAHECIIDLRPIKAKSGISEEDIAKR

SEQ ID NO: 99321 - protein, 307 aa, Unknown
  Bacterial polypetide isolated from the Sargasso Sea
MNQIKSFIDRHIGIGADDQKEMLDFLGYKDMHSFIEDVVPESILEDDYLDLGEGLSEMAALKKLDKIAKQNKVFRSYIGQGYYGTVTPKVIKRNVFENPGWYTSYTPYQAEISQGRLEALINFQTTICELTSMEIANASLLDEATAAAEAMMLAKRVSKNKSNYFFVDKNCFRQTISVLKTRAKPFGIELEVGDPQDFNEKDFFGMLIQYPNKFGEIEDFSRLSDYCKKNKSLLVCATDLLALTLLRPPGEIGADIVIGSSQRFGVPMGFGGPHAAFMATHESFQRSMPGRIIGASKDAGGNLSYRL

SEQ ID NO: 99322 - protein, 286 aa, Unknown
  Bacterial polypetide isolated from the Sargasso Sea
RGNLNALVGIAKPGFFGPDVSHMNLHKTFCIPHGGGGPGMGPIGVKKHLIPFLPGHPLIDNEIGLQQDQEAISSAPWGSASILPISYSYIFMMGDIGLKNATQVAILNANYIKHSLEPYFPILYKGKNNMVAHECIIDLRPLKEELNITEEDIAKRLIDYGFHAPTMSFPVPGTLMIEPTESESKEEIDRFCTAMKSIFDEIEKIRSGKFDILDNPIKNSPHTIEELTDDKWEHKYTRKEAAFPHSYLQNNKYWSPVGRIDNVYGDRNLFCSCPPLDEYEELENTA

SEQ ID NO: 99323 - protein, 585 aa, Unknown
  Bacterial polypetide isolated from the Sargasso Sea
DRRYFKRIYWVDHIGPNTSDQKEMLKAISSKSINDLIEKTVPKNILIKDNLKIDEPMSETDALKKLKFLSKNNQIFRNFIGMGYYNTVTPNVILRNILENPGWYTSYTPYQPEVAQGRLEMLINFQQMIMDLTGMDIANASLLDEGTAAAEAVGLCQRIDKSNSKKIFVSSSCNPQTIDIIKTRVEPFNIELIIGDEEKVLKDIKDKIICGVLAYPGTLGEIKDPSEAISLIHKKEGKVIMVSDLLALARLKTPAELGADIAVGSAQRFGIPMGYGGPHAAFFATKEEFKRSMPGRIIGVSVDRHGKKAFRLSLQTREQHIRRDKATSNICTAQALLAIISAAYAIYHGPDGILKIANRTSKLAKIFADGLKSGGYKLHTENYFDTVTIRTNEKTDTINNKALSEKINLRIVDKNTLSVAFDEVKRVDHVNTLLKIFGVKKLFNNTDTVELTNLPENLLRTSKFLTHPIFNKYHSETEMLRYLKKLEDCDIALNRSMIALGSCTMKLNATAELIPVTWKEFSQPHPFVPQDQMKGYKVLFNDLVNDLKEITGFDAVSLQPNSGAQGEYSGLMTIRKFHLNNNQKN

SEQ ID NO: 99324 - protein, 499 aa, Unknown
  Bacterial polypetide isolated from the Sargasso Sea
LPNLPKNLLRTSKYLEHPVFNSYHSETEMLRYLKKLEDKDIALNRTMIALGSCTMKLNATAEMIPISWRELAEPHPFVPVEQMEGYRALFTDLKNWLRSITGFSGVSLQPNAGAQGEYAGLMVIRKYHLDRGEQNRNICLIPSSAHGTNPASAQMVGMKVVVVNCDKEGNVDFEDLKKKAETHSENLGALMVTYPSTHGVFEEKIKDICELIHKHGGQVYMDGANLNALVGIAKPGNFGPDVCHINLHKTFCIPHGGGGPGMGPIACKRHLQVYLPNHPVVKDCGPSTGIGPVSAAPWGSSSILSISWMYIKMMGSQGLRLATQIAILNANYIANRLKDHYPILYKGSNGNVAHECIIDIRSIKSETGITEEDIAKRLIDYGFHAPTMSWPVAGTMMIEPTESESLSELDRFCDTLISIKSEIDMIKSGKFDKVDNPIKNAPHTDFELASDEWTHKYSREQAAYPAKFLRVNKFWPPVARVDNVYGDKNIFCTCPSIDE

SEQ ID NO: 99325 - protein, 132 aa, Unknown
  Bacterial polypetide isolated from the Sargasso Sea
PKRLMDYGFHAPTVSWPVAGTVMVEPTESESLAELDRFADAMIAIRDEVRAIESGAIDASNNPLKQAPHTMAAVMAEVWDRPYTRQQAAFPLPDQQQHKVWPAVARIDNAYGDRNLICTCPSVEDVAVAVAA

SEQ ID NO: 99326 - protein, 222 aa, Unknown
  Bacterial polypetide isolated from the Sargasso Sea
FMPSHHENIQNVGPVSSTDFGSASILPISWMYITMMGSKGLKQATMTAILSANYVAKRLSDHYQILYKGENNLIAHECIIDARPFKESSNIDVDDIAKRLMDYGFHAPTMSWPVAGTLMIEPTESESREELDIFCDAMISIRKEIEEIEKRNEDPENNILKNSPHTVEELSSDNWKHNYSREKAAYPLDYLKARKYWPPVKRIDNVYGDKNLFCTCPDMDEF

SEQ ID NO: 99327 - protein, 424 aa, Unknown
  Bacterial polypetide isolated from the Sargasso Sea
AQRLGVPMGFGGPHAAFFTTTEQFKRKIPGRIIGVSKDSHGNQALRMALQTREQHIRREKATSNICTAQVLLAVMSGMYAVYHGPEGLVRIAQRINHLTNQLASSLVYSGYEIKSNRFFDTICFKASGWKEKSEAMKLNFRDFGDGFVGISLDETTTESDIESILNVFSAKISPDTNTSIPDNLVRSSRFLSNSVFTKYRSETEMLRYMHKLELKDLSLNTSMIPLGSCTMKLNATTEMKPVTWPEFSNVHPFAPINQVGGYHTLINELGNRLIQLTGFDAISMQPNSGAQGEYAGLMTIRAFHKANNQQERDICLIPSSAHGTNPASAIMAGMKVVVVECDDQGNIDEVDFQNKASEYRDNLSAIMITYPSTHGVFEPSIKQLCQIAHDNGGQVYMDGANLNALVGLCEPGNFGVDVMHINLH

SEQ ID NO: 99328 - protein, 449 aa, Unknown
  Bacterial polypetide isolated from the Sargasso Sea
MNAPHPASSALAAERPTLADLEARDAFAHRHIGPSADEQTAMLGTLGYTSRAALIDAVIPPAIRRQDGMPLGEFTQPLTEEAALAKLRGIAGQNRVVKSLIGQGYYGTHTPGVILRNILENPAWYTAYTPYQPEISQGRLEAMLNFQQMVIDLTAMDIANASMLDEATAAAEAMTLLQRIGKSKSTVFFVADDVLPQTLEVVRTRAEPIGVQVVTGPAADAAKHDAFGVLLQYPGANGALLGDLATYQALTDAVHAAGGLVVAAADLLALTLLAAPGEWGADVVIGNTQRFGVPFGFGGPHAGYMAVRDAFKRSMPGRLVGVTIDAQGNPAYRLALQTREQHIRREKATSNICTAQVLLGVMASMYAVYHGPQGLKRIAQRVHRLTATLAAGLRAIGYTLEADAFFDTLTVATGPRTANLHIAAQAHGITCARSTMRDWASRWTRPSAR

SEQ ID NO: 99329 - protein, 584 aa, Unknown
  Bacterial polypetide isolated from the Sargasso Sea
RYGERFDTVTVTSPLAPAVHQAVGEAGFNLRVLPDGANPAESTGFGIALDECTTADELSRLVAALATAAGQTSPSLPLAPVEELCGVPERVDPWLSQSVFHDHRSETELMRYIQRLVSRDLSLVHGMIPLGSCTMKLNAAAELLPVSWPAFAGLHPFAPMAQAAGYQRLAEQLEAWLAALTGFAAVSLQPNAGSQGEYAGLLVIRAWHRSRGDDHRDVCLIPTSAHGTNPASAVMAGLKVVAVACDADGNIDQQDLAARAAEHADRLAALMVTYPSTHGVFETGIRGICELVHRHGGQVYLDGANLNAQVGLCRPGAFGADVCHLNLHKTFCIPHGGGGPGVGPIGVAAHLAPFLPGHPLQASPDQAIGPVSAAALGSASILPISWMYLRMMGAEALRQATAVALLSANYLALRLDPHYPVLFRGATGRVAHECILDLRPLKRDAGIDVDDIAKRLMDYGFHAPTVSWPVAGTVMVEPTESESLAELDRFADAMIAIRDEIREIESGAMDASNNPLKQAPHTMAAVIAEDWDRPYSRQQAAFPLPDQQQNKVWPAVARIDNAYGDRNLICTCPSVEEIAVAVAA

SEQ ID NO: 99330 - protein, 486 aa, Unknown
  Bacterial polypetide isolated from the Sargasso Sea
MSSGFVQRHLGPSAAEQAQMLQRLGCRDLEQLLEQCVPAEILIDADQARQALPQECDERQALRELEQRAAANSVLRNLIGLGYYDTATPALIQRHVLENPSWYTAYTPYQAEIAQGRLEALLNFQTLISELTGLPIANASLLDEATAAAEAMALAYGACRRKAARRFHVQADLFPQTLAVLQTRAEPLGIELVVADPAAMEFGEDSFGLLLQLPSASGGCPDPTEVIACAKAADVLVIAAVDPLAQVLMPPVAQLGVQIAVGSAQRFGVPLGFGGPHAAFFATTEAYKRQIPGRLVGMSRDAAGEPALRLALQTREQHIRRDKATSNICTAQVLLAVMAGFYAVHHGPDGLTAIASRVQRLTTALASGLQQLGLELAAAPAFDTLRLRLDQPKAWIERLEAAGFNLLPLPDGVGISLDECSDEAEVQALLDCFAAGCGRMAPASSELLTATPLPKAIGELPVRPAGWLPQEVFQLYRSETELCATS

SEQ ID NO: 99331 - protein, 539 aa, Unknown
  Bacterial polypetide isolated from the Sargasso Sea
NPGWYTSYTPYQAEISQGRLEALINFQTTICELTSMEIANASLLDEATAAAEAMMLAKRVSKSKSNYFFVDKSCFKQTISVLQTRAKPFGIELEIGDPQDFNEKDFFGMLIQYPNKFGEIDDFTKLSAYCKKNKSLLVCATDLLALTLLKPPGEIGADIVIGSSQRFGVPMGFGGPHAAFMATHESFQRSMPGRIIGASKDASGNLAYRLALQTREQHIRREKATSNICTSQALLAVMAGFYAIYHGPEGLIGIATKIHLKTCTLYNALKRENHEILYDNFFDTLSVRLKGDLSKVKERLLDANININWFDQDLASIALDEATVSISIDEATSVDDIKDIFFAITGKEPPRFSYRTEVVLANVGMTKNMRRSSGFMKQERFNKYHSETEMMRYIKRLSDKDIALDRSMIPLGSCTMKLNSASEMAPVSWPEFANMHPYCPKNQTKGYRALIKDLKNMLSKITGYYDISLQPNAGSQGEYAGLLAIDAFHKNNGDENRSICLIPRSAHGTNPASAMMVGMKVVPVECDSDGNIDLEDLRE

SEQ ID NO: 99332 - protein, 414 aa, Unknown
  Bacterial polypetide isolated from the Sargasso Sea
MTQSLFELEQKTDFIRRHIGPGEEDLRALLAVVGAESLDDLIEQTVPAAIRRPGPLGIGASMTEVEALAKLKSYAAQNKVAKSYIGMGYHDTHVPHVILRNVLENPGWYTAYTPYQPELAQGRLEALLNFQQLTLDLTGMDLASASLLDEATAAAEAMALAKRMAKSKANLFFVADDVHPQVIDVVKERAVHFGFDVAVGPAAQACAEEVFGALFQYPTTTGEVKDLRALIAAVQAQKGLACVSADLLSLLLLKSPGELGADVVLGSAQRFGVPMGYGGPHAAFFATRDAYKRSMPGRIIGVSKDARGKAALRMAMQTREQHIRREKANSNICTAQVLLANMASFYAVYHGPVGLKTIASRVHRLTTILALGLQAKGVALQHASWFDTLTVLTTGKSELIAKAEGLGINLRADL

SEQ ID NO: 99333 - protein, 680 aa, Unknown
  Bacterial polypetide isolated from the Sargasso Sea
MLHNSQKDFLKRHIGPSDEDQNKMLKELNYKSLDDLIKSTVPEKIQLKDELNIGESNSEYEALRKLKAISKKNQIYSNFIGMGYYGTYTPYVILRNILENPGWYTSYTPYQPEVAQGRLEMLLNFQQMIVDFTGMDIANASLLDEGTAAAEAMGLSHRLNKKDSNLVFVSENCHPQTIDVIQTRAEPMGLKVLVGNEDKVLDQLKEDLVCGILQYPGTLGDIKDPSEAISKIHKKNGKSILACDLLALAKLKTPRELGADIAVGSSQRFGIPMGYGGPHAAFFATKDEYKRSMPGRIVGVSVDRHGNKAYRLSLQTREQHIRRDKATSNICTAQALLAIVSAAYAIYHGPEGIRTISERVSQLAKNFADKLKQSGYEIYSDHFFDTVTIVTKDKTDQIYKNALNQKVNIRKVNSEMLAVSFDEKKNVYRVNQLLKIFNAAESIKKEDPTVSLPNLPKNLLRTSKYLEHPVFNSYHSETEMLRYLKKLEDKDIALNRTMIALGSCTMKLNATAEMIPISWRELAEPHPFVPIEQMEGYRDLFTDLKNWLRSITGFSGVSLQPNAGAQGEYAGLMVIRKYHLDRGEENRNICLIPSSAHGTNPASAQMVGMKVVVVDCDKEGNVDFEDLKKKAEMHSENLGALMVTYPSTHGVFEEKITDICELIHKHGGQVYMDGANLNAL

SEQ ID NO: 99334 - protein, 262 aa, Unknown
  Bacterial polypetide isolated from the Sargasso Sea
MGKKKKYLEDQFVERHIGPNEDDIKWMLEKMGLESIEQLINFSVPKSIRSKEKLTIGSGISEKTLIEKLKIIAEKNVLMKSYIGMGYYNCITPPVIQRNILENPGWYTQYTPYQAEISQGRLEALINFQTMVCDFTALPISNASLLDEATAAAEAMIMAFRMSKNGNIFLVSNNCHPQTIDVLKTRSEPLGISIKIQNEDDFVFNHQVFGSIIQYPGNDGSVNNFQDITNAAHKESAYVIVATDLMSLALLKAPGELGADVA

SEQ ID NO: 99335 - protein, 531 aa, Unknown
  Bacterial polypetide isolated from the Sargasso Sea
MSQNSKEFSQRHIGLKDSEINHILHDLGYGSMEDFLEKLIPDSIYSKKKLNLPEPLDEPSALRALKEISKKNKVFKTFIGQGFYNCNVPAVIKRNVFENPGWYTSYTPYQPEIAQGRLEALMNYQTMVSDLTGMDISNASLLDEPTSAAEAMMLAKRVAKSKSNTFFVNSKTFKQTIAIIKSRAKPLGVEIEIGDCPDKGKEYFAAYFQYPNAEGSIEDLESVTKDIQAKGGLMIIGTDLLALTLLKTPGDFGADIAVGSAQRFGVPMGFGGPHAGFMAVKDVYKRSLPGRLIGLTQDSKGRPCYRLALQTREQHIRREKATSNICTAQALLAIMSSFYAIYHGPNGLKSIASDVKEKTLKIANELSRKGYVIKNNNFFDTLVVELENPEQVHLRAKDKKINLRVISEKELGLSFDEMTTDQDVNNISDLFDDLKKPLKKYETNWDKSFDRKTEYLNHEVFNSHHSETQILRYIRSLSDKDIALDRCMIPLGSCTMKLNATSEMIPVGWNGFANVHPHAPTDQTEGYQKII

SEQ ID NO: 99336 - protein, 966 aa, Unknown
  Bacterial polypetide isolated from the Sargasso Sea
MTTSAVKTLSQLANNQEFIQRHIGPDANETAAMLAELGVSSMEELIAQTVPASIRLPKPLATGEATTEADALAYLKAAANKNKLFKSYIGMGYHPTLTPNVILRNVLENPGWYTAYTPYQPEIAQGRLEALLNFQQISLDLTGMELASASLLDEATAAAEAMALAKRVAKSKANTYFIADDVHPQTIDVVRTRAEMFGFDVIIGKATDAVNHDVFGALLQYPSTTGEVRDDSGLIAALQAKKAVVAVAADMMSLLLLKSPGELGADVVLGSAQRFGVPMAFGGPHSAFFATRDDYKRSMPGRIIGVSKDRRGNQALRMAMQTREQHIRREKANSNICTAQVLLANMASFFAVYHGPEGLKNIAERIHRSADVFAAGLQAKGVSLVHSTWFDTVTFKVADSAARSAVIARAIAAEVNLRTDIAESLSVSFHEMTSAADIAQLFDIVLGAGHGLDVTKLDADIVAKGSNSIPADLVRTSKYLTHPVFNQYHSETEMLRYIKKLENKDLALNHSMISLGSCTMKLNATAEMIPVTWPEFGSLHPFVPRDQAEGYYDMIGELANWLVDITGYDAVSMQPNSGAQGEYAGMIAIRKYHESRGDSHRNVCLIPVSAHGTNPATAAMACFEVVLVDCDKSGNIDMADLKAKAEAVSDKLAAIMVTYPSTHGVFEESIRELCDIVHAHGGQVYMDGANMNAQVGITSPGFIGADVSHLNLHKTFCIPHGGGGPGMGPIGVKKQLAPFMPNHAVVKIEGTGQDNGAVSAAPFGSAGILPISWMYIKMMGGDGLRQATEMAILSANYMAKKLGSLFPVLYVGTNGRVAHECIIDMRPLKEKTGVTEMDIAKRLMDYGFHAPTMSFPVAGTLMIEPTESESKVELDKFITAMTSIRNEIARVEAGEWTADNNPLHFAPHTMEDIFDPSWDRPYERQYAAFPAQYVAENKFWPTVTRIDDVYGDRNLMCACPSPEDYR

SEQ ID NO: 99337 - protein, 407 aa, Unknown
  Bacterial polypetide isolated from the Sargasso Sea
MPKKLLRTSTYLDHPVFNSYHSETEMLRYLKRLEDSDIALNRTMIALGSCTMKLNAVSEMIPVTWQEFSQPHPFSPVEQMEGYRELFTDLKNWLRSITGFSGVSLQPNAGAQGEFTGLMVIRKFHEKNGELNRNVCLIPSSAHGTNPASAQMVGMKVVVVKCDEYGNVDYEDLKKKAEEHSENLAALMVTYPSTHGVFEEKIIDICDLIHKHGGQVYMDGANLNALVGIAKPGKFGPDVCHINLHKTFCIPHGGGGPGMGPIACKKHLEIFLPKHPVIKDCGPASGIGAVSAAPWGSSSILSISWMYIKMMGSEGLKKASQVAILNANYIAHKLKNSFPILYKGKNGNVAHECIIDIRKIKTDTGITEEDIAKRLIDFGYHAPTMSWPVTGTMMIEPTESESLNEIN

SEQ ID NO: 99338 - protein, 553 aa, Unknown
  Bacterial polypetide isolated from the Sargasso Sea
MENFDSFALRHIGLSQTDIGLLLDQFGYKDLEDFSKSVLPKNIFIEEKLDLSDAMSEEEALKVLKEISKENAVYRSFIGQGYYGTVTPKVILRNVFENPGWYTSYTPYQAEISQGRLEALINFQTMVGDLTGFEIANASLLDEATAAAESMTLAHRVGKSKSQRFFIDQNCFPQTISVVTARAKPISIEVMVGDPKQLTDLKEETYFGALLQYPGNDGAVIDFSQEIVSMHAQNGLVIMATDLLALTLLKSPGEMGADIAIGSSQRFGVPLGFGGPHAAFMATKEKYKRSLPGRLVGASIDEDGRTAYRLALQTREQHIRREKATSNICTAQALLAIMAGFYAAYHGPAGLKQIAQSVRSKATVLAKGINELGYDLKSSSFFDTVTIHTESRTQEIFSTAQDQLMNLRMLDANHISISLDETVTEQEIKNITKLFKDLSKKEKVVLNFELPIDIIRSTEYLTHPVFHLYRTETEMLRYIRKLCDKDIALDRAMIPLGSCTMKLNATSEMLPVGWEEFSNIHPYAPYDQTAGYKILINDLEAKLSEITGLFSCI

SEQ ID NO: 99339 - protein, 323 aa, Unknown
  Bacterial polypetide isolated from the Sargasso Sea
MTSKFGSDLFIDRHLGLGDNDERIMLNKLGFNNIDQFINQVIPEDIQLKDKSSEILPQGCSEIEALNELEEIANKNTKMRSLIGLGYYDNHMPKVIQRHVLENPRWYTSYTPYQAEIAQGRLEALFNFQTIVCELTGFSVANASLLDEGTAAAEAMAMSFSARKNKSSKVYLVESNVFDHTFNVLQTRAKPLGISLKRFTQSNLPNHDDVFGMLLQLPGKNGQLYDPTFLISQAHRSEIIVTACIDPLAQVLIKPISEFGVDVAVGSMQRFGVPMGFGGPHAAYFACSEKYKRLIPGRIVGQTLSKNGEKSLKTSIANKRATY

SEQ ID NO: 99340 - protein, 264 aa, Unknown
  Bacterial polypetide isolated from the Sargasso Sea
CYPGQFGGDVSHLNLHKTFCIPHGGGGPGVGPIGVVKELVPYLPADPLTQKDSEYSISGSKFGSASILPISWMYIRMMGEESLRRATQIAILNTNYIANKLKDDYDVLYKGKNGLVAHECILDVRPFKESCGIEAEDIAKRLIDYGFHAPTMSWPVAGTLMIEPTESESLDELDRFCKAMIGIRDEIRAIEEGKSSQDDNLLKNAPHSVDTLIEEWKYPYSRKEAYYPNEQTKQQKYWPPVGRVDNAYGDRNLVCTCPDIKDLK

SEQ ID NO: 99341 - protein, 216 aa, Unknown
  Bacterial polypetide isolated from the Sargasso Sea
MGAVSAAPWGSSSILPISWMYIKMMGAEGLKKASQISILNANYISKKLSKDYKVLYTGKNGNVAHECIIDIRPIKASSGISEEDLAKRLIDFGYHAPTMSWPVAGTIMIEPTESENLEEIDKFCNALIKIKKEINLVESSKFDKIDNPLKNAPHTYIELASNEWNHKYSREEAAFPNEYVKNNKYWAPVARVDNVYGDRNLVCSCPSMDEYKDEAA

SEQ ID NO: 99342 - protein, 355 aa, Unknown
  Bacterial polypetide isolated from the Sargasso Sea
MFKENFTRRHIGPNSSELNKILSTIGVTSVEQLLEQTIPETIRLKNDLNIPEGISEMEFLKEIKKLSSLNQKFKTYIGLGYHDTFTPSVIQRNILENPGWYTAYTPYQPEIAQGRLEALLNFQTMVCDITKMEIANASLLDEGTSAAEAMIMMYNNRSKDQKSTNQNKFYVDSNIFPQTLAVLSTRAKPLDIELVVGDIKELNENEFFGCIIQYPGKDGKLEEIDNLLESINNENLKVIIAVDLMSIVLIEPPNPDKIDVVVGTTQRFGIPLGYGGPHAAFFATKEKYKRNIPGRIIGVTKDLDGDYSLRMALQTREQHIKRDRATSNICTAQVLLAVMAGMYAVYHGSEGLKEI

SEQ ID NO: 99343 - protein, 692 aa, Unknown
  Bacterial polypetide isolated from the Sargasso Sea
WELKRFGIPMGYGGPHAAFFATKDEFKRSMPGRIIGVSVDRHGNKAYRLSLQTREQHIRRDKATSNICTAQALLAIVSAAYAVYHGPKGIKNISERVSQLTKNFADKIKQSGYKLYSESYFDTVTIYTKEKTDQIFKNALDQKINVRKVNSEMIAVSFDERKNVYRANQLLKIFNSTESIKDNPTRSLPNLPKNLLRTSKYLEHPVFNSYHSETEMLRYLKRLEDKDIALNRSMIALGSCTMKLNAVAEMIPISWREFAEPHPFAPVEQMEGYRKLFTDLKNWLRSITGFSGVSLQPNAGAQGEYAGLMVIRKYHIDRGESNRNVCLIPSSAHGTNPASAQMVGMKVVVVNCDKEGNVDIEDLKKKAELNSENLGALMVTYPSTHGVFEEKISDICKIIHDNGGQVYMDGANLNALVGIAKPGNFGPDVCHINLHKTFCIPHGGGGPGMGPIACKKHLEVFLPSHPIVKDCGPVSGIGSVSAAPWGSSSILSISWMYIKMMGSEGLKLATQNAILNANYLAYKLKNHFPILYTGKNGNIAHECIIDIRPIKAETGITEEDIAKRMIDFGFHAPTMSWPVAGTMMIEPTESESLTEIDKFCETLIKIKEEIEKIKSGEFDKVDNPIKNAPHTDLELSSDEWKHKYSREEAAYPSKHLKTNKFWPPVARVDNVYGDKNIFCTCPSIDEFKEDAA

SEQ ID NO: 99344 - protein, 352 aa, Unknown
  Bacterial polypetide isolated from the Sargasso Sea
GAQGEYSGLMVIKSYLDKKGDSHRNICLIPSSAHGTNPASAIMAGLKVVVINTDERGNIDLEDLKSKVKEHKDNLAALMITYPSTHGVFESEIQSINDLIHQNGGQVYMDGANMNAQVGLTSPKIIGADVCHLNLHKTFSIPHGGGGPGVGPICVAEHLKEFLPSNPLIKTGGDDSLEAISSAPWGSALVCLISYGYIRMLGRDGIRKSTEIAIVNANYLKTKLEKNYKILYSGENGRSAHEFIIDCRDFKKYNIEVVDIAKRLIDYGFHAPTVSFPVPGTMMIEPTESENLNELDKFCEALNSIYTEIISDDDSKREMLRNSPHTLKMLTSTDWPYSYSREDASFPKSYLK

SEQ ID NO: 99345 - protein, 398 aa, Unknown
  Bacterial polypetide isolated from the Sargasso Sea
PLKLCLAIVSAAYAIYHGPKGIRKISESVSQLTKNFADKLKQSGYELYSNHFFDTVTVKTLDKTDKIYKNALDQGVNIRKVNSEMLAVSFDERKNLYRANQLLKIFNCSETIKETMNESLSNLPKNLLRTSTYLDHPVFNNYHSETEMLRYLKRLEDSDIALNKSMIALGSCTMKLNAVSEMIPITWKEFSQPHPFSPVEQIDGYRELFTDLKNWLRSITGFSGVSLQPNAGAQGEFAGLMVIRKFHEKNREDNRNVCLIPSSAHGTNPASAQMVGMKVVVVKCDQHGNVDFEDLKNKAEEHSNNLAALMITYPSTHGVFEEKITDICELVHKHGGQVYMDGANLNALVGIAKPGKFGPDVCHINLHKTFCIPHGGGGPGMGPIACKKHLESFLPKHS

SEQ ID NO: 99346 - protein, 262 aa, Unknown
  Bacterial polypetide isolated from the Sargasso Sea
MKLEHPDRLMNRTPLSLAALEVHDAFAERHIGPDSADQQAMLEALGFASRAALIDAVIPKTIRRAETLPLGPFVQPKSEAEALAALRELAEKNQVFRSYIGQGYYNAHTPAVILRNVLENPAWYTAYTPYQPEISQGRLEALLNFQQMIVDLTGLAISNASLLDEATAAAEAMTLLQRVGKPKSNVFYVADDVLPQTIEVVKTRATPVGIEVKVGPAADAANANAFGVLLQYPGVNGDVRDYRALADAIHAAGGHVVVAADL

SEQ ID NO: 99347 - protein, 421 aa, Unknown
  Bacterial polypetide isolated from the Sargasso Sea
SGERMAYRLALQTREQHIRREKATSNICTAQVLLAVMAGFYGLWHGPEGLTRIASHAHGLACRFATAMRAAGRTVRHGSFFDTVTIEAADDRDALVAAALGAGINLRPLDGAIAASFDETTTDEALESLLAALGAGSAGEAPSAIPSSLSRKGGFMRQPVFYRYRTETEMLRYMRSLADRDLALDRCMIPLGSCTMKLNATAEMIPVTWPEFARIHPYAPADQAKGYAEMITRLEEMLADCTGYAAVSLQPNAGSQGEFAGLMAIARYHQSRGEGHRNVCLIPQSAHGTNPASAAMAGMEVVVVKCDDDGNVDIADLKEKTEAHRDALSAIMVTYPSTHGVFEESIAELCDIVHEAGGQVYVDGANLNALVGHCAPLQFGADVSHLNLHKTFCIPHGRRRPGRRADRCRRASGTFPSGLAA

SEQ ID NO: 99348 - protein, 336 aa, Unknown
  Bacterial polypetide isolated from the Sargasso Sea
IANASLLDEGTAASEAMLMLYRKNKSEKMQFLVDKECFQQTIDVIISRAEPLDIEIIVTDFKNFNFTDAFGCILQYPNKYGHISSNDDYKNLVSDAHNSNCKVIFASDLMCLQLFEAPGNLGADIAVGNSQRFGVPLGYGGPHAAFMSTSEEFKRDIPGRIVGVSQDRRGNQAYRLTLQTREQHIRREKATSNICTAQVLLAIISGMYALFHGPDDLKNIAKRIHSHAKELADKISKLGHEIVTNDNSFFDTVVIKLSNMSIDSLKDKALKHNFNLMYHENGLIGISLDEKTDYNEVEALANLFDVSNDSQNTYNIFKPNRTGDILTHPIFHSINS

SEQ ID NO: 99349 - protein, 441 aa, Unknown
  Bacterial polypetide isolated from the Sargasso Sea
MTKLDTQNEFIARHIGPRDADTAAMLQLLGYDSVDALTNAVIPESIKGTSILGEQPGLSEADALAKIKAIAAKNLQFKNFIGQGYYGTHTPSPILRNLLENPAWYTAYTPYQPEISQGRLESLLNFQTLVSDLTGMQIANASLLDEATAAAEAMTFCKRLSKNKAANTFFVSQHCHPQTLDVLRTRAEPLGIDIEVGDEAAITDASAYFGALLQYPASNGDIFDYRALVERFHAANALVAVAADLLALTLLTPPGEFGADVALGSAQRFGVPLGFGGPHAAYFATRDAFKRDMPGRLVGMSVDRFGKPALRLAMQTREQHIRREKATSNICTAQVLLANIASMYAVYHGPKGLTEIAQRVHSFTAILALGLTKLGHSVEQQHFFDTLSIKTGAKTAELHAKARTAGINLREIDAERLGLSLDETTDQAAVEALLNLFAADQ

SEQ ID NO: 99350 - protein, 141 aa, Unknown
  Bacterial polypetide isolated from the Sargasso Sea
MLPNSEKDFLKRHIGPSKEDQSKMLKELNYQSLDDLIDSTVPEKIKFRGELNIGESNSEYEALRKLRAISKKNQVYSNFIGMGYYGTYTPYVILRNILENPGWYTSYTPYQPEVAQGRLEMLLNFQQMIVDFTGMDIANAS

SEQ ID NO: 99351 - protein, 518 aa, Unknown
  Bacterial polypetide isolated from the Sargasso Sea
EEDLEHIKFDKEFHLESLALRSSAWMQQDIFTNYESETELMRYIFRLAEKDFSLVDGMMPLGSCTMKLNSAAELNPVSWANLSSMHPFSPPDQTKGYSKIISDLEKWISEIVGLKSVSFQPNAGSQGEFAGLLAINSYFESKGELLRKKCLIPKSAHGTNPASAVMAGFDVLTVECDEEGNIDYQDLSIKVKKFDNQIGALMLTYPSTHGVFELQIRKICDLIHSVGGFVYLDGANLNAQVGLCKPGNYGVDVCHLNLHKTFCIPHGGGGPGVGPVAASETLSPYLPTHSLMDNNLSNSFNFVSSAKHGSASILPISWMYIKMAGLSGLRKATSHAILSANYIAHSLKHKFKILYKGKNDFVAHECILDFRDLKSKTGLSVNDLAKRLIDYSFHAPTISWPVPETIMIEPTESESLAEVDRFCEAMLLIGEEISEIENNHELKNNNVISNAPHTLKELIADNWQYPYSKEKASFPYKTSTSIKFWSSVSRINNAYGDRNLICSCNVNQDETLEEKKCA

SEQ ID NO: 99352 - protein, 342 aa, Unknown
  Bacterial polypetide isolated from the Sargasso Sea
MIDDNSKEFIKRHIGPSEEDQSKMLQYVGYKSLEDLMSNTVPEKILLKDDLKIDQPMSENDALKKLKSISKKNKIFKNFIGMGYYNSITPNVILRNILENPGWYTSYTPYQPEVAQGRLEMLLNFQQSIIDLTGMDIANASLLDEATATAEAVGLSQRLDKTNSKKIFISSNCNPQTIDLIKTRTNPFGLELIIGDEKKELPKINEDIICGVLSYPGTLGEINDPSESISQIHKKNGKAILVCDLLALARLKTPAELGADIAVGSAQRFGIPMGYGGPHAAFFATKEEFKRSMPGRIIGVSKDRHGKKAYRLSLQTREQHIRRDKATSNICTAQALLAIISA

SEQ ID NO: 99353 - protein, 160 aa, Unknown
  Bacterial polypetide isolated from the Sargasso Sea
MLHNSQKDFIKRHIGPTKEEQLKMLKELGYNSLDDLINNTVPEKIHFKEKLSIGDSNSEYEALRKLKVISKKNQIYSNFIGMGYYGTYTPYVILRNILENPGWYTSYTPYQPEVAQGRLEMLLNFQQMIVDFTGMDIANASLLDEGTAAAEAMGLSHRLK

SEQ ID NO: 99354 - protein, 759 aa, Unknown
  Bacterial polypetide isolated from the Sargasso Sea
EPLGITVQLCDDDDFIFNQNVFGSILQYPDTNGSVNNFQKITNAAHKESAYVIIATDLMSLALLKPPGELGADVALGSSQRFGVPMGYGGPHAAFFAVKENFKRFLPGRLIGVSVDSEGNQAYRMSLQTREQHIRREKATSNICTAQVLLAIMSGMYAVYHGPKRIKEIARTIHQHTCDLATSLSKAGYEILNDTFFDTIRFLGPDKTKEKLLKHNINIREFSDGSLGISIDETVMKKDISHLLSILNVSHELNNISTLPSDLRRETSFLSHPVFNSYHSETEMLRYIHRLETKDLSLNTSMIPLGSCTMKLNATTEMIGVTWPEFASIHPFVPVNQAKGYKHLFDDLSNWLGDITGLPGVSLQPNSGAQGEYAGLMVIRAFHLSQGDSNRNVCLIPESAHGTNPASAIMCGMEVIVVKCDSKGNIDIEDLKNKAQKHQNNLAALMITYPSTHGVFESTVQKICKIIHDYKGQVYMDGANLNAMVGVSRVSDIGVDVCHINLHKTFAIPHGGGGPGMGPICAAKHLTSFLPTHNVIPCNTSSNAISAVSATPWGSAGVLPISWSYMALLGNEGMKKSTSIAILNANYMAKLLEDHFPILYRGENGFNAHEFIIDLRPIRKESGITDEDIAKRLMDYGFHAPTMSWPVPGTLMIEPTESESKNELDRFCSAMISIKKEINDVIEGKSDAKNNMLKNSPHTMETITKETWDHPYTREDAVFPAPWLREYKYWPTVGRIENAIGDRNLICTCPDISDYEEDN

SEQ ID NO: 99355 - protein, 804 aa, Unknown
  Bacterial polypetide isolated from the Sargasso Sea
MGLSHRLNKKDSNLVFVSEDCHPQTINVIQTRAEPMGLKVLVGKEDEVLDQLKEDLVCGILQYPGTLGDIKDPSEAISKIHKKNGKAVLACDLLALAKLKTPRELGADIAVGSSQRFGIPMGYGGPHAAFFATKDEFKRSMPGRIVGVSVDRHGNKAYRLSLQTREQHIRRDKATSNICTAQALLAIVSAAYAIYHGPDGIKNISERVSQLAKSFADKIKQSGYELYSNNFFDTVTIITKEKTDQIYKNALNQRVNIRKVNSEMLAVSFDERKNVYRVNQLLKIFNAAESIKKEDPSVSLPNLPKNLLRTSKYLEHPVFNSYHSETEMLRYLKRLEDKDIALNRTMIALGSCTMKLNAAAEMIPISWKEFAEPHPFVPIEQMEGFRDLFTDLKNWLRSITGFSGVSLQPNAGAQGEYAGLMVIRKYHLDRGEANRNICLIPSSAHGTNPASAQMVGMKVVVVNCDKEGNVDFDDLKKKAEQHSENLGALMVTYPSTHGVFEEKITDICELVHKHGGQVYMDGANLNALVGVAKPGNFGPDVCHINLHKTFCIPHGGGGPGMGPIACKRHLQVYLPNHPVIKDCGPTSGIGAVSAAPWGSSSILSISWMYIKMMGSAGLKLATEVAILNANYIAHRLKDHFPILYKGSNGNVAHECIIDIRNIKSETGVTEEDIAKRLIDYGFHAPTMSWPVAGTMMIEPTESEGLSELDRFCDTLIKIKEEIEKIKSGEFDKIDNPIKNAPHTDSELASDDWTHKYSRAEAAYPAKFLRANKFWPPVARVDNVYGDKNIFCTCPSIDEFKEDAA

SEQ ID NO: 99356 - protein, 541 aa, Unknown
  Bacterial polypetide isolated from the Sargasso Sea
NTLSVAFDEVKKVEHVNILLQIFGIDKKYDNSENVELNNLPKNLLRTSKYLSHPVFNKYHSETEMLRYLKRLEDCDIALNRSMIALGSCTMKLNATAELIPVTWKEFSQPHPFVPEDQMKGYKVLFNDLINDLKEITGFDAVSLQPNSGAQGEYSGLMTIRKYHINNNEKNRNVCLIPESAHGTNPASAQMCGMKVVVVNCDEDGNVDLKDLKSKVDQHAKDLAALMVTYPSTHGVFEEKITEICDYVHKSGGQVYMDGANLNALVGIAKPGKFGPDVCHINLHKTFCIPHGGGGPGMGPIACAKHLKDFLPNHSVIKNIGTEKSLGSVSAAPWGSSSILSISWMYIKMMGAEGLKKASQVAILNANYISKRLSKHYKVLYTGKNGNVAHECIIDLRPIKAKSGISEEDIAKRLIDYGYHAPTMSWPVAGTLMIEPTESESLGEMNRFCNALISIKEEIDKVDNGKFDKKDNPLKNAPHTYLELSANDWKHSYTREQAAFPNQYLRDNKFWPPVARVDNVYGDRNLVCSCPSLDEYKDEAA

SEQ ID NO: 99357 - protein, 845 aa, Unknown
  Bacterial polypetide isolated from the Sargasso Sea
MNQIKSFVDRHIGIGADDQKEMLDLLGYKNMNTFIQSVVPDSILEGDYLNLGEGLSEMAALKKLDKVAKQNRVFRSYIGQGYYGTVTPKVIKRNVFENPGWYTSYTPYQAEISQGRLEALINFQTTICELTSMEISNASLLDEATAAAEAMMLAKRVSKNKSNYFFVDKNCFRQTISVLKTRAKPFGIELEIGDPQDFNEKDFFGMLIQYPNKFGEIDDFSRLSDYCKKNKSLLVCATDLLALTLLRPPGEIGADIVIGSSQRFGVPMGFGGPHAAFMATHESFQRSMPGRIIGASKDASGNLSYRLALQTREQHIRREKATSNICTSQALLAVMAGFFAIYHGPNGLIGIAKDVHKKTRKLFDAIKSSDHEILNNNFFDTLSIQLKGNVTEIKDRLLDAKININWFDDNLVSISIDEATTFDDIADLVFALSGKAILNHSEDDKVDLNKEIVRSSDFMKQERFNKYHSETEMMRYIKRLSDKDIALDRSMIPLGSCTMKLNSASEMAPVSWPEFANMHPYCPIDQTEGYQVLIKDLKEMLSDITGYYDISLQPNAGSQGEYAGLLAIDAYHKNNGDDNRSICLIPRSAHGTNPASAMMVGMKVVPIECDSEGNIDLTDLKEKSSLHKSNLSAIMITYPSTHGVFESNVREVCKIVHDHGGLVYIDGANLNALVGIAKPGEFGGDVSHLNLHKTFCIPHGGGGPGVGPIGVVEKLKDFMPSHHENIQNVGPVSSTDFGSASILPISWMYITMMGSKGLKQATMTAILSANYVAKRLSDHYQILYKGENNLIAHECIIDARPFKESSNIDVDDIAKRLMDYGFHAPTMSWPVAGTLMIEPTESESR

SEQ ID NO: 99358 - protein, 856 aa, Unknown
  Bacterial polypetide isolated from the Sargasso Sea
MSNFSKRHIGPTTKEINEMLNELGLNSTDELIERSVPGSIRDTSDLGIGKGLNEFSYLNAIKGLAKKNKVFRSYIGNGYYGTITPTVIQRNILENPGWYTAYTPYQAEIAQGRLEALLNFQTMVTDMTGLPIANASLLDEATAAAEAMVMMLRSTKDKNTMLVADNCHPQTIDVIKTRAEPIGVKINIMPINEFEFSNDIFGVLLQYPATDGQVFIFDEICNKAHAAGALVSVATDLLSLAILPSPGEIGADIAIGNSQRFGVPIGYGGPHAAFISCSEKFKRKMPGRIIGVSVDQNGNKALRMALQTREQHIRRDRATSNICTAQVLLAVMAGMYAVYHGQKGIKQIAEKIHNNTNLLASSLQNKGYKILHEEFFDTIRISLENFSLDKIKERAEALRINLRYYQNEDVGISIDETCSDNDINDILSIFDADMNDNLKFKLRSKRKSEFLTHSIFNKYHSETEMMRYLHRLESKDLALNTSMIALGSCTMKLNAASEMIPISWPEFSSIHPFAPKSQTEGYNELASTLSDWLMKITGLDGCSLQPNSGAQGEYAGLLVIRAYHIANNDTDRTVCLIPSSAHGTNPASAVMAGMEVIVIDCDDHGNIDIDDLKSKSERYSKNLAALMVTYPSTHGVYEESISEVCEIIHKNGGQVYLDGANLNAMVGLSKLGEFGADVCHINLHKTFAIPHGGGGPGMGPICVAKHLKSFLPTHRYSSSSQEFTYSVSAAPLGSANILPISWGYILMLGDDGLRASTEVAILNANYMAKRLSEHYPILYKGANGLCAHEFIIDIRNIKEESGITEEDIAKRLIDYGFHAPTMSWPVIGTMMIEPTESESKEELDKFCDAMILIKNE

SEQ ID NO: 99359 - protein, 360 aa, Unknown
  Bacterial polypetide isolated from the Sargasso Sea
QPNAGSQGEYAGLLAIKGYHESRGEGHRNICLIPSSAHGTNPASAQMVGMQVVVTKCDDNGNVDMADLKAKCEQHSGNLAAIMITYPSTHGVFETSVKELCALVHSHGGRVYVDGANMNALVGVAAPGEFGGDVSHLNLHKTFCIPHGGGGPGVGPVCVVEDLVPFLPGHATAGVAGGVGAVSAAPLGNAAVLPISWMYIRMMGAEGLQAATETAILSANYISARLKDHYPTLYASENGHVAHECILDLRQLKDTSGVMAEDVAKRLIDYGFHAPTLSFPVPNTLMVEPTESETLFELDRFIDAMIAIREEIRQIEAGKLPQDNNPLKNAPHTAESLLSVEWNRPYTREAAAYPVAALRS

SEQ ID NO: 99360 - protein, 249 aa, Unknown
  Bacterial polypetide isolated from the Sargasso Sea
MENKLNINSSYSLVEKKPSFSDRHIGPSEAEVKEMLDKLEFSTLEELIQATVPNQILLDAPLTLDNPMSEEDALEYLSSKISQNNLFKSYIGMGYSNTITPSVILRNILENPGWYTAYTPYQPEVSQGRLEMLINFQQMIMDFTGLEVANASLLDEGTAAVEAMILAFRHSKDDRCIFLVSEFCHPQTIDLLHTRAEPLGIEIKVGDLDLLIKENPNLFFGFIGQYPNTLGQISDFKFALSQSKAQSSI

SEQ ID NO: 99361 - protein, 305 aa, Unknown
  Bacterial polypetide isolated from the Sargasso Sea
FEEKITDICELVHKHGGQVYMDGANLNALVGIAKPGKFGPDVCHINLHKTFCIPHGGGGPGMGPIACKKHLEGFLPKHSVIKDCGPATGIGAVSAAPWGSASILSISWMYIKMMGSEGLKKASQVAILNANYIAHKLKKSFPILYKGKSGNVAHECIIDIRKIKSDTGITEEDIAKRLIDFGYHAPTMSWPVAGTMMIEPTESESLKEINRFCSTLEKIKTEIDKIQNDKYDKIDNPLKNAPHTHLELTSDKWDHKYEREEAAYPSEFLKTAKYWPPVGRVDNVYGDKNLFCTCPSIDEYEDTAA

SEQ ID NO: 99362 - protein, 312 aa, Unknown
  Bacterial polypetide isolated from the Sargasso Sea
LPFTHGVFEPNISEMCQVIHQEGGQVYLDGANLNAQVGICRPGSYGIDVCHLNLHKTFSIPHGGGGPGVGPIAVADHLVPYLPGHSIIKCGGKKAISAVSAAPFGSAGILPISWMYIRMMGSDGLRKASSIAILSANYLAKRLDPYYPVLFKDPNGLVAHECILDLRPLKSQLGIEVEDVAKRLMDYGFHAPTISWPVAGTLMVEPTESESLSELDRFCDAMIGIREEIEQIKLGKIDPINNPLKQSPHTLKRVTSDDWDRPYSRKEAAYPLPDQEKYKFWPSVSRINNAYGDRNLICSCPSVQDLEDTNSI

SEQ ID NO: 99363 - protein, 884 aa, Unknown
  Bacterial polypetide isolated from the Sargasso Sea
KNKIFRNFIGMGYYNSITPNVILRNILENPGWYTSYTPYQPEVAQGRLEMLLNFQQSIIDLTGMDIANASLLDEATATAEAVGLSQRLDKTNSKKIFISNNCNPQTIDLIKTRTNPFGLELIIGDEKKELTKINDDIICGVLSYPGTLGEINDPSESISLIHKKNGKAILVCDLLALARLKTPAELGADIAVGSAQRFGIPMGYGGPHAAFFATKEEFKRSMPGRIIGVSKDRHGKKAYRLSLQTREQHIRRDKATSNICTAQALLAIISAAFAIYHGPEGILKIANRTSKLAKIFADNIKSGGYKILSDYFFDTVTIKTNEKTNSIYEAALKENINLRKVDKEHLSVAFDEAKKLDDVNILLKLFGISKTIKQDVKVELDNLPKNLLRTSKYLTHPVFNKYHSETEILRYLKKLEDCDIALNRSMIALGSCTMKLNATAELIPITWKEFSLPHPFVPTNQMEGYKILFKDLINDLKEITGYDAVSLQPNSGAQGEYAGLMTIRKFHKNNKQENRNVCLIPDSAHGTNPASAQMCGMKVVVVNCDDDGNVDINDLKNKAEKHSKDLAALMVTYPSTHGVFEEKIMEICDVIHKHGGQVYMDGANLNALVGIAKPGKFGPDVCHINLHKTFCIPHGGGGPGMGPIACSKHLADFLPTHEIIKEAGPKNGMGAVSAAPWGSSSILPISWMYIKMMGAEGLKKASQVSILNANYISKKLSKDYKVLYTGKNGNVAHECIIDIRPIKASSGISEEDLAKRLIDFGYHAPTMSWPVAGTIMIEPTESENLEEIDKFCNAFIKIKKEINLVESAKFDKIDNPLKNAPHTYVELASTEWKHAYSREEAAFPTEYIKNNKYWAPVARVDNVFGDRNLVCSCPTMDEYKDEAA

SEQ ID NO: 99364 - protein, 431 aa, Unknown
  Bacterial polypetide isolated from the Sargasso Sea
TSFCATNQMEGYKILFNDLINDLKEITGYDAVSLQPNSGAQGEYAGLMTIRKFHESNGQGDRDVCLIPNSAHGTNPASAQMSGMKVVVINCDDDGNVDLNDLKNKAEKYSKNLAALMVTYPSTHGVFEEKITEICDVIHKHGGQVYMDGANLNALVGIAKPGKFGPDVCHINLHKTFCIPHGGGGPGMGPIACTKHLSDFLPTHEIIKDAGPKNGMGAVSAAPWGSSSILPISWMYIKMMGAEGLKKASQISILNANYISKKLSKDYKVLYTGKNGNVAHECIIDIRPIKASSGISEEDLAKRLIDFGYHAPTMSWPVAGTIMIEPTESENLEEIDKFCNALIKIKKEIDLVESSKFDKIDNPLKNAPHTYIELASNDWNHKYTREEAAFPTAFVKNNKYWPPVARVDNVYGDRNLVCSCPSMDEYKDEAA

SEQ ID NO: 99365 - protein, 546 aa, Unknown
  Bacterial polypetide isolated from the Sargasso Sea
GFGISLDELSNEKEIKDILTFIANLIEKEEDLEHIKFDNVFHLESLALRNSAWMQQDIFTNYQSETELMRYIFRLAEKDFSLVDGMMPLGSCTMKLNSAAELNPVSWANLSSIHPFSPQDQTKGYSKIISDLEKWISEIVGLKSVSFQPNAGSQGEFAGLLAINSYFESKGELLRKKCLIPKSAHGTNPASAVMAGFDVLTVECDDEGNIDFQDLSIKVKKFDNQIGALMLTYPSTHGVFELQIRKICDLIHSVGGFVYLDGANLNAQVGLCKPGNYGVDVCHLNLHKTFCIPHGGGGPGVGPVAASETLSPFLPTHSLMDNNLSISPNYVSSAKYGSASILPISWMYIKMAGLSGLRKATMHAILSANYIAHSLKHKFKILYKGKNNFVAHECILDFRDLKSKTGLSVNDLAKRLIDYSFHAPTISWPVPETIMIEPTESECLVELDRFCESMLLIGEEISEIEKNSELKNNNVISNAPHTLKELIADNWHYPYSKEQASFPYKTPTSIKFWSSVSRINNAYGDRNLICSCNVNQGETFEEKKCA

SEQ ID NO: 99366 - protein, 956 aa, Unknown
  Bacterial polypetide isolated from the Sargasso Sea
MLPNSEKDFLKRHIGPSKEDQSKMLKELNYKSLDDLIDSTVPEKIKFRGELNIGESNSEYEALRKLRSISKKNQVYSNFIGMGYYGTYTPYVILRNILENPGWYTSYTPYQPEVAQGRLEMLLNFQQMIVDFTGMDIANASLLDEGTAAAEAMGLSHRLNKKDSNLVFVSEDCHPQTINVVQTRAEPLGLKVLVGKEDEVLEQLKEDLVCGILQYPGTLGDIKDPSEAISKIHKKNGKAVLACDLLALAKLKTPRELGADIAVGSSQRFGIPMGYGGPHAAFFATKDEYKRSMPGRIVGVSVDRHGNKAYRLSLQTREQHIRRDKATSNICTAQALLAIVSAAYSIYHGPDGIKNISERVSQLAKSFADKIKQSGYELYSNYFFDTVTIITKEKTDQIYKNALNQKVNIRKVNSEMLAVSFDERKNVYRVNQLLKIFNAAESIKKEDPSVSLPNLPKNLLRTSKYLEHPVFNSYHSETEMLRYLKRLEDKDIALNRTMIALGSCTMKLNAAAEMIPISWKEFAEPHPFVPIEQMEGFRDLFTDLKNWLRSITGFSGVSLQPNAGAQGEYAGLMVIRKYHLDRDEGNRNICLIPSSAHGTNPASAQMTGMKVVVVNCDKEGNVDFDDLKKKAEQHSENLGALMVTYPSTHGVFEEKISDICELVHKHGGQVYMDGANLNALVGIAKPGNFGPDVCHINLHKTFCIPHGGGGPGMGPIACKKHLQVYLPNHPVIKDCGPTSGIGAVSAAPWGSSSILSISWMYIKMMGSTGLKLATQVAILNANYIAHRLKDHFPILYKGSNGNVAHECIIDIRKIKSETGITEEDIAKRLIDYGFHAPTMSWPVAGTMMIEPTESESLTEIDRFCETLIKIKKEIDMIKSGKFDKVDNPIKNAPHTDLELSSDEWKHKYTREEAAYPSKYLKTNKFWPPVARVDNVYGDKNIFCTCPSIDEFKEDAA

SEQ ID NO: 99367 - protein, 591 aa, Unknown
  Bacterial polypetide isolated from the Sargasso Sea
IMKSPGFYDADIVIGSSQRFGVPMGFGGPHAAFFATKDEFKRLMPGRLIGVSVDRNNKRSYRMALQTREQHIRREKATSNICTAQALLAIIAAAYAIYHGPERLKNIATTINYNARYLKKSLEKLGFKILSRRYFDTLVIQDNKAKEWFNKSVEEGMNFRLIDDKTFSLTIDETTTLEDIDNLIIFFNTENKTLDAKIIEENLDEIFKEDDLLRDDKILTHPIFNIYHSETEMMRYLKKLENKDIALNRSMIPLGSCTMKLNAASEMLPITLPGFANAHPFLEKHQREGYNQMLRELISMLKDITGFDAISLQPNAGAQGEFAGLLAIKKYHEANKQGDRNICLIPNSAHGTNPASAQMCGMEVSIVKCDNLGNVDLNHLDEKIKEAGNKLAALMITYPSTHGVFEESISIICEKIHNAGGQVYMDGANLNAMVGIAKPGKFGPDVSHMNLHKTFCIPHGGGGPGMGPIGVKSHLKNFLPGHPIVQNELGLTSLDAVSAAPWGSPSILPISYSYISMMGDEGLKLATQVAILNANYIKEKLLDFFPLLYSGKNGMVAHECIIDIRPIKEELNISEEDIAKRLIDYGFHAPT

SEQ ID NO: 99368 - protein, 198 aa, Unknown
  Bacterial polypetide isolated from the Sargasso Sea
MLPNSEKDFLIRHIGPSKEDQSKMLKELNYQSLDDLIDNTVPEKIKFKGELNIGESNSEYEALRKLRAISKKNQVYSNFIGMGYYGTYTPYVILRNILENPGWYTSYTPYQPEVAQGRLEMLLNFQQMIVDFTGMDIANASLLDEGTAAAEAMGLCHRLNKKDSNLVFVSEDCHPQTIDVIQTRAEPISLKVLVGKER

SEQ ID NO: 99369 - protein, 317 aa, Unknown
  Bacterial polypetide isolated from the Sargasso Sea
MLTYPSTHGVLKLQIRKICDLIHSVGGFVYLDGANLNAQVGLCKPGNYGVDVCHLNLHKTFCIPHGGGGPGVGPVAASETLSPYLPTHSLMDNYLSNSFNFVSSAKHGSASILPISWMYIKMAGLSGLRKATSHAILSANYIAHSLKHKFKILYKGKNNFVAHECILDFRDLKSKTGLSVNDLAKRLIDYSFHAPTISWPVPETIMIEPTESESLAEVDRFCEAMLLIGEEISEIENNHELKNNNVISNAPHTLKELIADNWQYPYSKEKASFPYKTPTTIKFWSSVSRINNAYGDRNLICSCNVNQDETLEEKKCA

SEQ ID NO: 99370 - protein, 154 aa, Unknown
  Bacterial polypetide isolated from the Sargasso Sea
MIDDNSKEFIKRHIGPSEEDQSKMLQYIGYKSLEELMENTVPEKILLKDELKIDQPMSENDALKKLKSISKKNKIFRNFIGMGYYNSITPNVILRNILENPGWYTSYTPYQPEVAQGRLEMLLNFQQSIIDLTGMDIANASLLDEATATAEAVG

SEQ ID NO: 99371 - protein, 267 aa, Unknown
  Bacterial polypetide isolated from the Sargasso Sea
MKESRFYNRHIGPNRNEINKMLSTLELNSLDELLNQTVPEGIRLKKPLSIEEDISENEFLNEMQEHAEKNKCFDTYIGQGYHPTITPAVIKRNILENPGWYTSYTPYQAEIAQGRLEALFNFQSVVSDLTGMEIANASLLDESSAAAEAMTMLFYLRDSVQKKNNSIKFFVSDQVLPQTISVLKTRANPLGIKLMIGSIDSVNLSDGFFGVLIQYPGKYGEIIDLGTAIKKAKKVNVKVVVAADLLSLTVLEAPRELRCRCCCWYNP

SEQ ID NO: 99372 - protein, 366 aa, Unknown
  Bacterial polypetide isolated from the Sargasso Sea
LLRTSKYLEHPVFNSYHSETEMLRYLKKLEDKDIALNRTMIALGSCTMKLNATAEMIPISWRELAEPHPFVPVEQMEGYREMFTDLKNWLRSITGFSGVSLQPNAGAQGEYAGLMVIRKYHLDRGDKNRNICLIPSSAHGTNPASAQMVGMKVVVVDCDKEGNVDFEDLKKKAELHSDNLGALMVTYPSTHGVFEEKIKDICEVIHEHGGQVYMDGANLNALVGVAKPGNFGPDVCHINLHKTFCIPHGGGGPGMGPIACKRHLQVYLPNHPVVKDCGPASGIGAVSAAPWGSSSILSISWMYIKMMGSEGVKLATQIAILNANYIANRLKDHYPILYKGSNGNVAHECIIDIRSIKSETGNQKKI

SEQ ID NO: 99373 - protein, 355 aa, Unknown
  Bacterial polypetide isolated from the Sargasso Sea
KNGKAVLVCDLLALAKLKTPAELGADIAVGSSQRFGIPMGYGGPHAAFFATKDEFKRSMPGRIIGVSVDRHGNKAYRLALQTREQHIRRDKATSNICTAQALLAIVSAAYAIYHGPNGIRKISERVSQLANNFADKIKKSGYEIYSNNFFDTVVIKTKDKTEKIFKNALDQKVNIRKVNSEMLAVSFDEKKNVYRANQLLKIFNCAESIKDNPTESLPNLPKNLLRTSKYLEHTVFNSYHSETEMLRYLKRLEDKDIALNRSMIALGSCTMKLNAVAEMIPISWREFSEPHPFVPIEQMEGFRTLFTDLKNWLRSITGFSGVSLQPNAGAQGEYAGLMVIRKYHIERGEENRNVC

SEQ ID NO: 99374 - protein, 371 aa, Unknown
  Bacterial polypetide isolated from the Sargasso Sea
NRNVCLIPDSAHGTNPASAQMCGMKVVVVNCDDDGNVDINDLKNKAEKHSKDLAALMVTYPSTHGVFEEKIMDICEVIHKHGGQVYMDGANLNALVGVAKPGKFGPDVCHINLHKTFCIPHGGGGPGMGPIACAEHLADFLPTHEIIKEAGPKNGMGAVSAAPWGSSSILPISWMYIKMMGAEGLKKASQVSILNANYISKKLSKDYEVLYTGKNGNVAHECIIDIRPIKASSGISEEDLAKRLIDFGYHAPTMSWPVAGTIMIEPTESENLEEIDKFCNALIKIKKEINLVESSKFDKIDNPLKNAPHTYLELASSEWKHAYSREEAAFPTEYVKNNKYWAPVARVDNVFGDRNLVCSCPSMDEYKDEAA

SEQ ID NO: 99375 - protein, 441 aa, Unknown
  Bacterial polypetide isolated from the Sargasso Sea
EFIYRHIGPSEEEQKTMLKAVGYSSLEDLMENTVPEKILLKNELKISDSLSENDALKKLKSISKQNKIFRNFIGMGYYNSFTPNVILRNILENPGWYTSYTPYQPEVAQGRLEMLLNFQQLIIDLTGMDIANASLLDEATAAAEAVGLSQRLDKNDSKKIFVSSSCNPQTIDLIKTRTEPFGLTLIIGNEKEDLTNINENIICGVLAYPGTLGDIQDPSESISQIHKKNGKAILICDLLALTRLKTPAELGADIAVGSAQRFGIPMGYGGPHAAFFATKEEFKRSMPGRIIGVSVDRHGKKAYRLSLQTREQHIRRDKATSNICTAQALLAIISAAFAIYHGPKGILKIANRTSTLAKLFADGIKSEFEILSENFFDTVTIKTKNKTEAIFKKALDENINLRKVDNETLSVAFDEAKKLDDVNILFKIFSIKKTLDQNSKV

SEQ ID NO: 99376 - protein, 350 aa, Unknown
  Bacterial polypetide isolated from the Sargasso Sea
MENLNKINLFSKRHLGSGETDINHMLKEVGYDSMSSFIDSVVPGSILKRNAVQIGEEKTEEEVLEELRAIASKNKVFKSFIGQGHYNNFTPSVILRNVFENPGWYTSYTPYQPEISQGRLEALINFQTMISDLTAMELSNASLLDEATAAAEAMTLAKRSSKSKSDSFFVDENSFENTINVLKTRAEPLGIKLIFGNPIDLSSYEIFGAFLQYPGSNGKITDMSQHIKSCHDQSALAVIGSDLLALTILKPPGEMGADIVIGSSQRFGVPLGCGGPHAAFMAVSDKLKRSMPGRIVGASVDSNGDVAYRLALQTREQHIRREKATSNICTAQALLALWAVFIRSIMAKKD

SEQ ID NO: 99377 - protein, 449 aa, Unknown
  Bacterial polypetide isolated from the Sargasso Sea
MIPLGSCTMKLNATVEMIPISWPEFNSIHPFAPLNQAKGYKKIINELEEMLYKVTGFDAVSFQPNSGAQGEYAGLLSIREYHKANNSNRDICLIPESAHGTNPASAIMAGLKVVIVRCDDHGNIDFKDLSKKVDEAGDRLSSLMVTYPSTHGVFEHNIDQICDLIHSNGGLVYMDGANLNAMVGVCKPGKFGADVMHINLHKTFCIPHGGGGPGMGPICVNEKLKPHLPQHSFTDKDFSYSVSSSPFGSASILLISYIYMKLMAANGLLKASQVAILSANYMAKRLEKDYSILYKGKSGLNAHEFIVDCRSFKSTANITNEDIAKRLIDYGFHAPTMSWPIPGTLMIEPTESEAKSELDKFCDAMIAIRKEIEEIESGKMPQEDNVLVNSPHTVHDICDDWNHPYSKENAVFPTKWNKENKFWPYVSRIDNAFGDRNFFCVCPDIDSYK

SEQ ID NO: 99378 - protein, 208 aa, Unknown
  Bacterial polypetide isolated from the Sargasso Sea
MPFTPTDYLPYDFANRRHIGPSPAEMAHMLETLGLSNLDSLIDETLPKSIRQKNPLNFGKPKSERALLSHMRVTASKNKVLTSLIGQGYHGTVTPPVIQRNILENPAWYTAYTPYQPEISQGRLEALLNYQTMISDLTGLEIANASLLDEATACAEAMTMAERVAKSKAKAFFIDENCHIQNIEVMKTRARPLGIEIVTGDPDKLNPA

SEQ ID NO: 99379 - protein, 379 aa, Unknown
  Bacterial polypetide isolated from the Sargasso Sea
FGALHPFVPLNQAQGYKHLFDDLCNWLGDITGLPGVSLQPNSGAQGEYAGLMVIRAFHLSKGDTNRTICLIPESAHGTNPASAIMCGMEVVVVKCDSNGNVDLNDLKNKASQYQNNLSALMITYPSTHGVFENTIQEICSIVHSYDGQVYMDGANLNAMVGISKVSDIGVDVCHINLHKTFSIPHGGGGPGMGPICSAEHLAPFLPSHDVIPCNNSSKSISAVSAAPWGSAGVLPISWSYMSLLGNIGMKKATSIAILNANYMAKLLEDHFPILYRGEKGFNAHEFIIDLRPIRKESGITDEDIAKRLMDYGFHAPTMSWPVPGTLMIEPTESESKTELDKFCSAMISIKKEIDDVKNGKADPEDNLLKNAPHTAESIA

SEQ ID NO: 99380 - protein, 281 aa, Unknown
  Bacterial polypetide isolated from the Sargasso Sea
MFKENFTRRHIGPNSSDLNKILSTIGVNSIEQLLKQTIPEKIRLKKDLNIPEGISEMEFLKEIKKLSSLNQKFKTYIGLGYHDTFTPSVIQRNILENPGWYTAYTPYQAEISQGRLEALLNFQTMVCDITKMEIANASLLDEGTSAAEAMIMMYNNRSKDQKLTNQNKFYVDSNIFPQTLAVLSTRAKPLNIELVVGDLKELNENEFFGCIIQYPGKDGKLEEIDNLLESINNENLKVVIAVDLMSIVLIEPPNTDKIDVVVGTTQRFGIPLGYGGPHAAF

SEQ ID NO: 99381 - protein, 962 aa, Unknown
  Bacterial polypetide isolated from the Sargasso Sea
MTKQTLTQLEQHDLFLRRHIGPDSSQQQEMLNYVGAESLDDLTAQIVPESIRLSQELSIGDSCGEAEGIAYIRGLAKQNQVFKSYIGMGYYGTQVPNVILRNVFENPGWYTAYTPYQPEIAQGRLEAILNFQQVSMDLTGLDLASASLLDEATAAAEAMALAKRVSKAKKANIFFVADDVFPQTLDVVKTRAECFGFEVVVGPAHEAVNHELFGALFQYSNRFGQITDFTDLFAELRAKNVIVTVAADIMALVLLKSPGAMGADVVFGSAQRFGVPMGFGGPHAAFFVARDEHKRSMPGRIIGVSKDTRGNRALRMAMQTREQHIRREKANSNICTAQILLANMASFYAVFHGPQGLKTIASRINRFTDILAAGLQAKGVSLVNNTWFDTISIKGLDVAAVNARALAAEMNLRFDADGIVGVSLDETTIRTDIEALFDVILGAGHGLDVAALDAQIVAQGSQSIPASLVRQDAILSHPTFNRYQSETEMMRYIKRLESKDLALNYSMISLGSCTMKLNAAVEMIPVSWPEFANMHPFCPLDQAKGYTQLIEELSSWLVNVTGYDAVCIQPNSGAQGEYAGLLAIRKYHESRGEAHRNICLIPQSAHGTNPASAQLAGMQVVVTACDKQGNVDLEDLKAKAAEVAENLSCIMITYPSTHGVYEESIREICNIVHQHGGQVYLDGANMNAQVGLTSPGFIGADVSHLNLHKTFAIPHGGGGPGMGPIGVKAHLAPFVAGHVVVKPGRESDNNGAVSAAPYGSAGILPISWMYIKLLGSNGLKKSTQTALLNANYVMKKLSEHYPVLFRGRNDRVAHECIIDLRPIKEASGVTEMDIAKRLNDYGFHAPTMSFPVAGTLMIEPTESESKVELDRFIDAMVSIRAEIAKVEAGEWPADNNPLHNAPHTMADIMDPAFDSRPYSREVAVFPSAAVRTNKFWPTVNRIDDVYGDRNLFCACVPLSDYE

SEQ ID NO: 99382 - protein, 452 aa, Unknown
  Bacterial polypetide isolated from the Sargasso Sea
LQRYFKKYTFENPGWYTQYTPYQPEISQGRLEALLNYQTMITQITALPIANASLLDEGTAASEAMLMLYRKNKSEKTQFLVDKECFQQTIDVIISRAEPLNIEIIVTDFKNFDFTNAFGCIVQYPNRYGQISSDNDYKRVVSDAHNSNCKVIFASDLMCLQLFEAPGNLGADIAVGNSQRFGVPLGYGGPHAAFMSTSEEFKRDIPGRIVGVSQDRRGNQAYRLTLQTREQHIRREKATSNICTAQVLLAIISGMYALFHGPDDLKNIAKRIHSHTKELADKISKLGHEIVTNDNSFFDTVVIKLSNMSIDSLKDKALEHNFNLMYHDNGLVGISLDEKTNYSEVETLANLFDVSNDSKNSYNIFKPNRVGDILTHPIFHSVNSETEMLRYINKLEKRDLSLNYSMIPLGSCTMKLNATVEMIPISWPEFNSIHPFAPLNQAKGYKKIINEL

SEQ ID NO: 99383 - protein, 392 aa, Unknown
  Bacterial polypetide isolated from the Sargasso Sea
MLKNAQKDFIQRHIGPSEEEQNIMLQELGFKNLDELIKNTVPEKILFKDDLGIGDPNSEYKALRKLKNISKKNKVYSSFIGMGYYGTYTPYVILRNILENPGWYTSYTPYQPEVAQGRLEMLLNFQQMVIDFTGMDIANASLLDEGTAAAEAVGLSYRITKSKTKKVFVSKNCHPQTIEVVKTRAEPLGLEIIVGDEDKDIKEEVICGIIQYPGTLGDIKDPSEAISKIHKHNGKAVLVCDLLALAKLKTPAELGADIAVGSSQRFGIPMGYGGPHAAFFATKDEYKRSMPGRIVGVSVDRHGKKAYRLSLQTREQHIRRDKATSNICTAQALLAIVSAAYAIYHGPKGIRKISESVSQLTKNFADKLKQSGYELYSNHFFDTITGIKKRPT

SEQ ID NO: 99384 - protein, 566 aa, Unknown
  Bacterial polypetide isolated from the Sargasso Sea
PALLAIVSAAYAIYHGPVGIKIIAERVSQLAKNFADKLKQSGYEIYSDHFFDTVTIVTKDKTDQIYKNALDQKVNIRKVNSEMLAVSFDEKKNVYRVNQLLKIFNAAESIKKEDPTVSLPNLPKNLLRTSKYLEHPVFNSYHSETEMLRYLKKLEDKDIALNRTMIALGSCTMKLNATAEMIPISWRELAEPHPFVPIEQMEGYRDLFTDLKNWLRSITGFSGVSLQPNAGAQGEYAGLMVIRKYHLDRGEENRNICLIPSSAHGTNPASAQMVGMKVVVVDCDKEGNVDFEDLKKKAEIHSENLGALMVTYPSTHGVFEEKITEICELIHKHGGQVYMDGANLNALVGIARPGNFGPDVCHINLHKTFCIPHGGGGPGMGPIACKRHLQVYLPNHPVVKDCGPATGIGAVSAAPWGSSSILSISWMYIKMMGAEGLKLATQVAILNANYIAHRLKDHYPILYKGSNGNVAHECIIDIRSIKSETGITEEDIAKRLIDYGFHAPTMSWPVAGTMMIEPTESESLSELDRFCDTLISIKSEIDMIKLGKFDKVDNPIKKMRLILILN

SEQ ID NO: 99385 - protein, 221 aa, Unknown
  Bacterial polypetide isolated from the Sargasso Sea
MIKDFPNRHIGPRDDQIQEMLSELGFSSLEDLSNKVIPPNIILDSKMDLPNKMSEPETINRLRELANENSVYNSFIGMGYYGTFLPAVIQRNILENPGWYTQYTPYQAEISQGRLEALLNFQTMVSDITGLPMANASLLDEATAAAEAMLMFFNTTKNNEKRVFLVSESCHPQTIDVLKTRAEPLGITLKIIEITTQHFNQDVFGAIVQYPDTNGSIHRSN

SEQ ID NO: 99386 - protein, 238 aa, Unknown
  Bacterial polypetide isolated from the Sargasso Sea
MGKLSLKMEKSLLRLALQTREQHIRREKATSNICTAQSLLAIISSFYAIYHGPSGLTQIAKRLVELRINLESSLAALGFDIPDGIRFDSVDVYSEHSQRIHNEALKNGYNLRILPLGSTIENSTGFGISLDELSNEKEIKDILTFIANLIEKEEDLEHIKFDKEFHLESLALRSSAWMQQDIFTNYQSETELMRYIFRLAEKDFSLVDGMMPLGSCTMKLNSAAELNPVSWAILSSMH

SEQ ID NO: 99387 - protein, 556 aa, Unknown
  Bacterial polypetide isolated from the Sargasso Sea
KAKINFSYIDDETVSISLNETTNKKSLNKIFNVFNLYKNISVKKNIIVNVDSVLKIRESMHRISSFMTQDVFNSYHSETSLMRYVKSLELKDLALNHSMISLGSCTMKLNAAAEMLPLSSSNWNNIHPFAPVNQAKGYHKVLNFLTAQLNEITGFHATSIQPNSGAQGEYAGLMVIRAYHFSKGNPNRNICLIPASAHGTNPASAIMAGMKVVVIKTDQNGNIDLEDLKEKVKTHKDNLAALMITYPSTHGVFEVEIKNITKLIHDNGGQVYMDGANMNAQVGLTNPSIIGADVCHLNLHKTFAIPHGGGGPGVGPICVAKHLSKFLPSNPIIKTGGKNPIKGISGAPWGSALACIISYGYIKMLGKRGLKKSTEIAILNANYIKKSLEGAYEILYTGENNRSGHELIIDCRSFRKKNIGVIDIAKRLMDYGFHAPTVSFPVAETMMIEPTESENLCEIDRFCQAMISIRLEIESDNPEDIEILKNAPHTLSMITNDNWPYKYTRKKAAFPLDFVQKNKFWPSVRRVNEAFGDRNLICSCPSIEDFKNTDLQSIKK

SEQ ID NO: 99388 - protein, 239 aa, Unknown
  Bacterial polypetide isolated from the Sargasso Sea
AVAAHLAPFLPGHPLVPCGGEQAIGPVSAAPWGSASILPISWMYIRLMGGAGLRQATAVALLAANDLAERLEPHFPVLYRGANGRVAHECILDLRPLKRSAGLEVDDLAKRLMDYGFHAPTVSWPVAGTVMVEPTESESLLELDRFVEAMMAIRAEAAAIEAGLCDRDDNPLRRAPHTLAAVTADVWDRPYSREQAAYPVQGLRSNKLWPAVSRIDNAFGDRNLVCTCPSVEELAGAAS

SEQ ID NO: 99389 - protein, 389 aa, Unknown
  Bacterial polypetide isolated from the Sargasso Sea
GSQGEYAGLLIIHAYHASRGEAHRNVCLIPASAHGTNPASAQMAGMQVVVVACDAQGNVDIEDLKKKADQHADKLAAIMITYPSTHGVFEANVREICEIVHAHGGQVYVDGANMNAMVGLCAPGQFGGDVSHLNLHKTFCIPHGGGGPGVGPVAVGAHLAQFLPNQIAAGYERAPNGIGAVSGAPYGSASILPISWMYIAMMGAKNLTAATETAILNANYVAKKLAPHYPVLYSGPGGLVAHECILDLRPIKETSGITVDDVAKRLADYGFHAPTMSFPVPGTLMVEPTESESKEELDRFIEAMIAIRDEIRAVEEGRSDREDNPLKHAPHTAAVVIANEWKHAYARETAAYPLPTLIAKKYWPPVGRADNVYGDRNLFCSCVPIADYE

SEQ ID NO: 99390 - protein, 423 aa, Unknown
  Bacterial polypetide isolated from the Sargasso Sea
AIYHGPEGILKIANRTSKLAKIFADGLKSGGYQLHSENFFDTVTVKTNEKTDTINNKALSEKINLRVVDKNTLSVAFDEVKRVDHVNTLLKIFGIKKTFSNTDKVDLTNLPKNLLRTSKYLTHPIFHKYHSETEMLRYLKRLEDCDIALNRSMIALGSCTMKLNATAELIPVTWKEFSLPHPFVPQDQMKGYKVLFNDLVNDLKEITGFDAVSLQPNSGAQGEYSGLMTIRKFHLNNNQKNRNVCLIPESAHGTNPASAQMCGMKVVVINCDDEGNVDLEDLKDKVNKHSKDLAALMVTYPSTHGVFEEKISEICDYVHKAGGQVYMDGANLNALVGIAKPGKFGPDVCHINLHKTFCIPHGGGGPGMGPIACAKHLKDFLPNHNITKNNRSEKSLGSVSAAPWGSASILPISWMYIKMMGAE

SEQ ID NO: 99391 - protein, 158 aa, Unknown
  Bacterial polypetide isolated from the Sargasso Sea
KNGNVAHECIIDLRPIKSKSGISEEDIAKRLIDYGYHAPTMSWPVAGTLMIEPTESENLAEINRFCNALISIKNEIDKVDNGSFDKKDNPLKNAPHTHLELSADEWKHLYKREEAAFPNEYLKDNKFWPPVGRVDNVFGDRNLVCSCPSLQEYKEEAA

SEQ ID NO: 99392 - protein, 252 aa, Unknown
  Bacterial polypetide isolated from the Sargasso Sea
HGGGGPGVGAIGLKKHLADFAPGHPIFKNEIGLTTQEAVSAAPWGSASILPISYSYISMMGDDGLKLATQVAILNANYIKERLKNYYPILYTGKNNMVAHEFIIDIRPFKQELNISDEDIAKRLIDYGFHAPTMSFPVPGTLMIEPTESESKEELDRFCEAMISIHNEITMIRDGKFDKVDNPIKNAPHTIEEVSSDNWDHKYSRKDAAYPHAYLINNKYWSPVSRIDNVYGDRNLFCVCPPIDEYEEVKTG

SEQ ID NO: 99393 - protein, 348 aa, Unknown
  Bacterial polypetide isolated from the Sargasso Sea
MVGMKVVVVNCDKEGNVDFEDLKKKAEIHSENLGALMVTYPSTHGVFEEKITDICDLIHEHGGQVYMDGANLNALVGIAKPGNFGPDVCHINLHKTFCIPHGGGGPGMGPIACKRHLEIYLPNHPVVKDCGPATGIGPVSAAPWGSSSILSISWMYIKMMGSEGLKHATQIAILNANYLARRLKDHYPILYKGTKGNVAHECIIDIRSIKSETGITEEDIAKRLIDFGFHAPTMSWPVAGTMMIEPTESESLSELDRFCDTLIKIKSEIDKIKSGHFDKVDNPIKNAPHTDLELASDVWDHKYSREEAAYPAKFLRANKFWPPVARVDNVYGDKNIFCTCPSMDDFKG

SEQ ID NO: 99394 - protein, 406 aa, Unknown
  Bacterial polypetide isolated from the Sargasso Sea
ITGFSGVSLQPNAGAQGEYAGLMVIRKYHLDRGEANRNICLIPSSAHGTNPASAQMVGMKVVVVNCDKEGNVDFDDLKKKAEQHSENLGALMVTYPSTHGVFEEKITDICELVHKHGGQVYMDGANLNALVGVAKPGNFGPDVCHINLHKTFCIPHGGGGPGMGPIACKRHLQVYLPNHPVIKDCGPTTGIGAVSAAPWGSSSILSISWMYIKMMGSAGLKLASQVAILNANYIAHRLKDHFPILYKGSNGNVAHECIIDIRNIKSETGVTEEDIAKRLIDFGFHAPTMSWPVAGTMMIEPTESEGLSELDRFCDTLIKIKQEIEKIKSGEFDKLDNPIKNAPHTDSELASDNWTHNYSREEAAYPAKFLRANKFWPPVARVDNVYGDKNIFCTCPSMDEFKEDAA

SEQ ID NO: 99395 - protein, 153 aa, Unknown
  Bacterial polypetide isolated from the Sargasso Sea
AHECIIDIRKIKIDTGITEEDIAKRLIDFGYHAPTMSWPVAGTMMIEPTESESLNEINRFCSALQKIKQEIDKVKSGDYDKVDNPLKNAPHTHVELSSNKWEHKYEREEAAYPSEILKTVKYWPPVARVDNVYGDKNLFCTCPSMDEYEDSAA

SEQ ID NO: 99396 - protein, 494 aa, Unknown
  Bacterial polypetide isolated from the Sargasso Sea
IVSAAYAIYHGPNGIKKISERVSQLANNFADKIKKSGYEIYSNNFFDTVVIKTKDKTEKIFKNALDQKVNIRKVNSEMLAVSFDEKKNVYRANQLLKIFNCAESIKDNPTESLPNLPKNLLRTSKYLEHTVFNSYHSETEMLRYLKRLEDKDIALNRSMIALGSCTMKLNAVAEMIPISWREFSEPHPFVPIEQMDGFRTLFTDLKNWLRSITGFSGVSLQPNAGAQGEYAGLMVIRKYHIERGEKNRNVCLIPSSAHGTNPASAQMVGMKVVVVNCDKEGNVDFEDLKKKSELHSENLGALMVTYPSTHGVFEEKISDICELIHKHGGQVYMDGANLNALVGIAKPGNFGPDVCHINLHKTFCIPHGGGGPGMGPIACKKHLEIYLPKHPVVEDCGPATGIGPVSAAPWGSSSILSISWMYIKMMGSEGLKLATQIAILNANYIAHRLKNHFPILYKGSKGNVAHECIIDIRTIKNETGITEEDIAKRLIDFG

SEQ ID NO: 99397 - protein, 692 aa, Unknown
  Bacterial polypetide isolated from the Sargasso Sea
NVIFRNILENPGWYTSYTPYQPEVAQGRLEMLLNFQQSIIDLTGMDIANASLLDEATATAEAVGLSQRLDKTNSKKIFISSNCNPQTIDLIKTRTNPFGLELIIGDEKKDLTKINEDIICGVLSYPGTLGEINDPSESISQIHKKNGKAILVCDLLALARLKTPAELGADIAVGSAQRFGIPMGYGGPHAAFFATKEEFKRSMPGRIIGVSKDRHGKKAYRLSLQTREQHIRRDKATSNICTAQALLAIISAAFAIYHGPEGILKIANRTSKLAKIFADNIKTGGYKILSDHFFDTVTIKTNEKTSSIYEAALKENINLRKVDKEHLSVAFDEAKKLDDVNLLLKLFGVSKIIKQDVKVELDNLPKNLLRTSKYLTHPVFNKYHSETEMLRYLKKLEDCDIALNRSMIALGSCTMKLNATAELIPITWKEFSLPHPFVPTNQMEGYKILFNDLINDLKEITGYDAVSLQPNSGAQGEYAGLMTIRKFHKNNKQENRNVCLIPDSAHGTNPASAQMCGMKVVVVNCDEDGNVDIDDLKNKAEKYSKDLAALMVTYPSTHGVFEEKIMDICEVIHNHGGQVYMDGANLNALVGVAKPGKFGPDVCHINLHKTFCIPHGGGGPGMGPIACAKHLADFLPTHEIIKEAGPKNGMGAVSAAPWGSSSILPISWMYIKMMGAEGLKKASQVSILNANY

SEQ ID NO: 99398 - protein, 484 aa, Unknown
  Bacterial polypetide isolated from the Sargasso Sea
MIDDNSKEFIKRHIGPSDNKQSKMLQHVGYSSLEDLMKNTVPEKILLKDDLNIDEPMSENDALKKLKSISKKNKIFRNFIGMGYYNSITPNVILRNILENPGWYTSYTPYQPEVAQGRLEMLLNFQQTIIDLTGMDIANASLLDEATATAEAVGLSQRLDKTNAKKIFISSNCNPQTIDLIKTRTKPFGLELIIGDEKKELLNINQNIICGVLAYPGTLGEIIDPSESISQIHKRNGKAILICDLLSLARLKTPAELGADIAVGSAQRFGIPMGYGGPHAAFFATKEEFKRSMPGRIIGVSKDRHGKKAYRLSLQTREQHIRRDKATSNICTAQALLAIISAAFAIYHGPDGILKIANRTSKLAKLFADEIKKGGFQILSDYFFDTVTIKTNDKTNSIYQSALNKNINLRKVDNKHISVAFDEAKKLNDVNILLKIFGVSKVINQDVKVELNNLPKNLLRTSKYLAHPVFNKYHSETEMLRYLK

SEQ ID NO: 99399 - protein, 372 aa, Unknown
  Bacterial polypetide isolated from the Sargasso Sea
GYKILFNDLINDLKEITGYDAVSLQPNSGAQGEYAGLMTIRKFHESNKQGDRDVCLIPNSAHGTNPASAQMSGMKVVVVNCDEDGNVDLDDLKNKAEKYSKNLAALMVTYPSTHGVFEEKIIEICDVIHKHGGQVYMDGANLNALVGIAKPGKFGPDVCHINLHKTFCIPHGGGGPGMGPIACAKHLADFLPTHEIIKDAGPKNGMGAVSAAPWGSSSILPISWMYIKMMGAEGLKKASQISILNANYISKKLSKDYKVLYTGKNGNVAHECIIDIRPIKASSGISEEDLAKRLIDFGYHAPTMSWPVAGTIMIEPTESENLEEIDKFCNALIKIKKEIDLVESSKFDKIDNPLKSAPHTYIELASNDWSHK

SEQ ID NO: 99400 - protein, 143 aa, Unknown
  Bacterial polypetide isolated from the Sargasso Sea
LREIKNQYGVSEEDIAKRLMDYGFHAPTMSWPVNGTMMIEPTESESREEIDRFCEALISIKDEILKIADGKYHKNDNPLKNAPHTASHIASDDWPHAYSRNEAAYPANHLKNHKYWPPVGRIDNAFGDRNLICTCPPASEYSD

SEQ ID NO: 99401 - protein, 658 aa, Unknown
  Bacterial polypetide isolated from the Sargasso Sea
KEKFSRKMPGRLVGVSQDKTGLKAYRLALQTREQHIRREKATSNICTAQALLAIMAGLYGVWHGPNGLKNIAMKVNQYASKFANLALEAGFDIRHDDFFDTVVVETNDKTDEYVKRALNENINIRKLENAVSLSFDELFNDEVIDKLKIAFNINDKIKVKNNFHINPSLHRKEGFLEHPIFSSISSETEMLRYIRHLSDRDLALDRTMIPLGSCTMKLNASTEMMPITWPEFSNIHPFAPKDQTLGYKKLIDELEISLCTLTGYDGISLQPNAGSQGEFAGLLAIRKFHQSNGENNRNICLIPSSAHGTNPASAVMAGMTVVVVSCDKNGNIDVNDLEEKAREHKENLAAMMVTYPSTHGVFEKDIKKVCEIIHKYGGQVYVDGANLNALIGLVSLTEIGADVSHLNLHKTFCIPHGGGGPGVGPVAVKKHLIPFLPGNVFDETSAISSTTYGSAGILPISWSYISMMGEEGLREATKTAILSANYIANKLRPYYPILFTDEKGMVAHECILDINEITSNTNITNEDISKRLIDYGFHAPTMSWPVPNTLMVEPTESEPMSEVDRFCDAMISIAKEIDEVKNGNWSKEDNPVINAPHTVETLTQENWSHPYSRQIALANLSEKSNKYFPPVGRIDNVFGDRNLVCSCPPIEAYEHEQT

SEQ ID NO: 99402 - protein, 702 aa, Unknown
  Bacterial polypetide isolated from the Sargasso Sea
SEAKQMLQDLGYNDMDKFLKDLMPESIFDLSALKLPKPLDEASALKNLKAISKKNKVYKSFIGQGFYGCNVPTVIKRNVFENPGWYTSYTPYQPEIAQGRLEALMNYQTMVADLTGMDISNASLLDEPTAAAEAMMLANRVAKSKSNVFFIHENSFPQSIAIMKSRAKPLGIEIEVGKEMDSKKEYFGCYVQYPGDDGSIIDFSAVSESIHAQGGLLIVGSDLLALTLLKPPSEFGADIVVGSSQRFGVPMGFGGPHAGFIAVKDSHKRSLPGRLIGLSKDQQDRPCYRLALQTREQHIRREKATSNICTAQALLAIMSGFYAIYHGPEGLKEIAIRINGLTKDLANKLIDKGLEIKSETFFDTLVVKVKDAKKIHEKANANGMNLRDISNDSVGISLDETSTEDDVKAIIEIFDNEQNKNSKIEQSWSKEFNRATDFLTHEVFNSHHSETQILRYIRSLADKDIALDRSMIPLGSCTMKLNATTEMIPVGWNGFANMHPHAPEDQAQGYLEIINDLENWLTQITGYKAISLQPNAGSQGEYAGLLAIDGYHKANKDLSRNICLIPESAHGTNPASAQMVGYEVVVIDCDENGDIDMKDLKKKADLHNKNIAAMMITYPSTHGVFEERVKEVCELIHGHGGFIYIDGANFNAMVGMCYPGQFGGDVSHLNLHKTFCIPHGGGGPGVGPIGVVKELVPYLPAD

SEQ ID NO: 99403 - protein, 258 aa, Unknown
  Bacterial polypetide isolated from the Sargasso Sea
HKTFCIPHGGGGPGMGPIACKRHLQVYLPNHPVIKDCGPTSGIGAVSAAPWGSSSILSISWMYIKMMGSAGLKLATQVAILNANYIAHRLKDHFPILYKGSNGNVAHECIIDIRNIKSETGITEEDIAKRLIDYGFHAPTMSWPVAGTMMIEPTESENLREINRFCDTLIKIKSEIDNIKSGKFDKIDNPIKNAPHTDLELSSDKWSHKYTREEAAYPSKYLKSNKFWPPVARVDNVYGDKNIFCTCPSMDEFKEDAA

SEQ ID NO: 99404 - protein, 272 aa, Unknown
  Bacterial polypetide isolated from the Sargasso Sea
NPGNFGPDVCHINLHKTFCIPHGGGGPGMGPIACKRHLQVYLPNHPVVKDCGPASGIGAVSAAPWGSSSILSISWMYIKMMGSEGVKLATQIAILNANYIANRLKDHYPILYKGSNGNVAHECIIDIRSIKSETGISEEDIAKRLIDYGFHAPTMSWPVAGTMMIEPTESESLSELDRFCDTLISIKEEIDMVKSGKFDKVDNPIKNAPHTDIELASDEWNHKYSREQAAYPAKFLKANKFWPPVARVDNVYGDKNIFCTCPSMDEFKEDAA

SEQ ID NO: 99405 - protein, 706 aa, Unknown
  Bacterial polypetide isolated from the Sargasso Sea
CKVIFASDLMCLQLFEAPGNLGADIAVGNSQRFGVPLGYGGPHAAFMSTSEEFKRDIPGRIVGVSQDRRGNQAYRLTLQTREQHIRREKATSNICTAQVLLAIISGMYALFHGPDDLKNIARRIHSHTKELADKIANLGHEIVTNDNSFFDTIVIKLSNMSIDSLKDRALKHNFNLMYHDNGLIGISLDEKTDFAEVETLANLFDAHNDSKNSYNIFKPNRVGDILTHPIFHSINSETEMLRYINKLEKRDLSLNYSMIPLGSCTMKLNATVEMIPISWPEFNSIHPFAPLSQAKGYEKIINELEEMLYKVTGFDAVSFQPNSGAQGEYAGLLSIREYHKANNSKRDICLIPESAHGTNPASAIMAGLKVVIVKCDDHGNIDFKDLSAKVDEAGDRLSSLMVTYPSTHGVFEHNIDEICNLIHENGGLVYMDGANLNAMVGVCKPGKFGADVMHINLHKTFCIPHGGGGPGMGPICVNEKLKPHLPKHSFTDEDFSYSVSSSPFGSASILLISYIYMKLMAANGLLKASQVAILSANYMAKRLENDYSILYRGKSGLNAHEFIVDCRSFKSTANITNEDIAKRLIDYGFHAPTMSWPIPGTLMIEPTESETKSELDKFCDAMIAIKQEIVDIESGKMPQEDNVLVNAPHTVNDICDDWNHPYSKESAVFPTQWNKENKFWPYVSRIDNAFGDRNFFCVCPDINSYK

SEQ ID NO: 99406 - protein, 398 aa, Unknown
  Bacterial polypetide isolated from the Sargasso Sea
MAKNSTQNFSHRHIGPNDHEINEMLSFLGYESIDELIHKTIPDNILLKDKLDVGDGLSEHEFLKTIKSVARKNKIVKSFIGMGYYGTITPPVILRNILENPGWYTAYTPYQAEISQGRLEALLNFQTMVTDMTGLEIANASLLDEATAAAEAMVLMYRSSKNGDQFFVADDCHPQTIDVLKTRAEPIGIQLVIDSPNKFNFTDQVFGYLIQCPTTDGKVFDYSVICDKAHQVGAFVAVATDLLSLAIIPEPGSFDADIAIGNSQRFGVPLGFGGPHAAFLAAKENFKRKMPGRIIGLSKDSHDNQALRMALQTREQHIRRDKATSNICTAQVLLSVIAGMYAVYHGPKGIYQIAHSVHSNARKLATALTNGGYKIVHDQFFDTIRISLNGKNPELEKA

SEQ ID NO: 99407 - protein, 412 aa, Unknown
  Bacterial polypetide isolated from the Sargasso Sea
MFESLSKWLVDITGLHSCSLQPNSGAQGEYAGLMVIRAYHRDNGDNNRTVCLIPESAHGTNPASAVMAGMDVVVIKCDESGNIDVQDLKEKSMANKSNLSALMITYPSTHGVFEESVSEICDIIHSNGGQVYLDGANLNAMVGLSRLGDFGADVCHINLHKTFAIPHGGGGPGMGPICVGEHLSPYLPGHPVLSNDSKSISAISAAPFGSAGILPISWGYISMLGNEGVKRASQIAILNANYMAKRLENDYKILFRGVNGTSAHEFIIDLRGLKNDTGISDEDIAKRLIDYGFHAPTMSWPVPGTLMIEPTESESKKELDRFCDAMVSIKKEIDDVVNGKFDSEDNPLKNAPHTALSIMNDNWNHKYSREAAAYPAAWLKDYKYWPSVGRVDNAFGDRNLICTCPPIDDYNK

SEQ ID NO: 99408 - protein, 417 aa, Unknown
  Bacterial polypetide isolated from the Sargasso Sea
SLNNSMIPLGSCTMKLNGTTEMIPVTWQNFCDIHPFSPLDQTKGYSRLIDELSSWLSRLTGFDSCSMQPNSGAQGEYAGLLVIRAYHIKNGDGHRNICLVPESAHGTNPASAIMAGMKVEIVSCDSKGNINLNELKGKSEKHSNNLSAIMLTYPSTHGVFENDIEEACEIVHRNGGQVYIDGANLNAMVGLCKPGEFGGDVMHINLHKTFCIPHGGGGPGMGPIVCKNHLKEFLPSHVIYEKTKYSAGAVSASPFGSSSILVISWAYIAMLNSLGLQLATKLAILNANYMAKRLEGHYPILFKGENGFNAHEFIIDLREIKNQYGVTEEDIAKRLMDYGYHAPTMSWPVNGTMMIEPTESESKEEIDRFCEALISIKDEILKIADGRYHQSDNPIKNAPHTATNIASDNWPHQILTQ

SEQ ID NO: 99409 - protein, 256 aa, Unknown
  Bacterial polypetide isolated from the Sargasso Sea
TFCIPHGGGGPGMGPIACAKHLKDFLPNHNITKNNRSEKSLGSVSAAPWGSASILPISWMYIKMMGAEGLRKASEVAILNANYISKKLSDHYKVLYKGKNGNVAHECIIDLRPIKSKSGISEEDIAKRLIDYGYHAPTMSWPVAGTLMIEPTESENLAEINRFCNALISIKKEIDKVDNGSFDKKDNPLKNAPHTHLELSADEWKHLYKREEAAFPNEYLKVNKFWPPVGRVDNVFGDRNLVCSCPTLQEYKEDAA

SEQ ID NO: 99410 - protein, 272 aa, Unknown
  Bacterial polypetide isolated from the Sargasso Sea
LRMDPAQWRWLLAFTLACRRSVNRRNAGQLLELALYSQAVLAQWRKEQNLGDFAWRRNGKLVAFRSERAFAQGREQLTDPTSQQVLAAAELRGLEPALDGVPFVGGVFTAGEEVGDCHLFCLRLEALLRASGQCRFLLGRPVTQLVQRQGQVVALQLGDQQLDVEQLVLCAGHRGPGLALPGVQIPVYPLKGYSLTAPISAGHLPPEVSLTDYERKIVYARLGQQLRVAAMVDIVGFDESVDMRRLQSMRRLALETLPRAADYGQAVEWAGM

SEQ ID NO: 99411 - protein, 288 aa, Unknown
  Bacterial polypetide isolated from the Sargasso Sea
MRKKFEFNLLKKGLLHIYDNENELQAAREKKNWIEQDGMEWDYLDLDEIEDLEPAFKTEKNTKKIVGGIYTKSDASGDIHKFCVNLHKVLEDKYKLDSKFNSEVETIYKEKDCVIVSISDGNITEGLEFDKVAICAGVDTQKFANVLGDRMQVYPVKGYSVTINLNDQVSQEAAPKVSLIDDPVKIVSSRLGNRLRVAGTAELAGYNKDIRQDRVRPLLNWVKKYFPDVSTESYTPWAGLRPMTPDMMPLLFESNLGDIFYNTGHGHLGWTLSAETAEILAKKILNET

SEQ ID NO: 99412 - protein, 282 aa, Unknown
  Bacterial polypetide isolated from the Sargasso Sea
SPKALKIWIKTLFHDHPVFRMNLSLDPQLVRWGFKFLAQCTNSMAVQNSLDKHRISTYSQKILNQVVAETGVKYEQNTKGLLFLYRNQQAFEEGIKHIELLKGVGQKLETADKDRVLEIIPELQSSEDQISGGIFSPDDESGDSRIFCQQLMDICRSMGGIFLHDVTIERLEASGGLIKRVVSNKGVYTADRYVLCLGSWSPLLVRSSLGIRLTIYPVKGYSITVPVENHHTPPVIGGLHEEDFLGFAPMGDHFRISSVSEFSGYDVGHTPEDFEHIFKCAK

SEQ ID NO: 99413 - protein, 262 aa, Unknown
  Bacterial polypetide isolated from the Sargasso Sea
TAYQLLERGYTVSVFDKNRYAAMETSFANGGQLSACNAEVWNNWSTIVKGIQWMLKKDAPLLFSPKLNLHKISWIIDFISNIPNHKKNTILTAKMAINSRDEFKRILKKENIELDLEERGIMHLCECDASLKHGRQVNKWLLEAGLDRKEISKDEMLSIEPTLNLKNFIGGFYTKSDMSGDIHKFTKLLADACEKKGVKFFYETEIVKVIHDNKQPILSFSQSNEIHKQNFDGIVVCAGVNSKFIANNLGDKINIYPVKGYS

SEQ ID NO: 99414 - protein, 285 aa, Unknown
  Bacterial polypetide isolated from the Sargasso Sea
SFANGGQLSASNAEVWNSWATMLKGVKWMFQSDAPLLMNPWPSWHKYSWMAEFAAQIPYARANTVETVRLAISARQLLLDHAAKYDFDFNAEHRGILHFYATEKEYHHAEKVTKLYAEGGLERYAVTPKEIHDLEPALDPSKYIGGFFTPSDFTGDIHRYTKGLAAGIAKEGVRFRCGVDVGRVQKLVARDGVIDVVLGDPTGFFEGPTFYGGHGSMYARMPTSPAGETETLTFDGVVVCAGVRSRDFAAQLGDRVNICNTRGWSPNPRDRAADLPRLLPPHALT

SEQ ID NO: 99415 - protein, 163 aa, Unknown
  Bacterial polypetide isolated from the Sargasso Sea
MNAITRFDMTPKQIALIKDTIAKDCNRDEFDLFCEVAKAKGLDPFLGQIIPMVFSKTDAEKRKMTIIITRDGQRVIAQRCGDYRAASKPPTYEIDKDLVSPTNPLGIVSATVYLWKQDPKTSEWHEIAGQAYWDEFAPIKQMPTGGYEYVDTGEVWADSGKPK

SEQ ID NO: 99416 - protein, 61 aa, Unknown
  Bacterial polypetide isolated from the Sargasso Sea
MRVVILGSGVVGVTSAWYLSQAGHDVTVIDREPGPALETSAANAGQISPGYAAPWAAPGVP

SEQ ID NO: 99417 - protein, 261 aa, Unknown
  Bacterial polypetide isolated from the Sargasso Sea
MHALICGAGLIGVTTAYYLAKAGHEVTVVDRRDGPAEESSFANGGQLSPSYVDPWGSSGNLKRMLGWIGRRHARLLYRLRLDPRLWEWTVRFLASCTEKSLARNTERMLRIAMYSLSQLQALREELGIEYGQDTNGILHIFRSRDAFERALLQAQRVTDLGCSREPIGRDECLILEPALAHAVDTLAGAFYSPLDEIGDAHAFCLALAEKCEAMGVRFYFDTSISSITRREFKIVDIRTTKGPFRADSFVIALGSYSALVA

SEQ ID NO: 99418 - protein, 255 aa, Unknown
  Bacterial polypetide isolated from the Sargasso Sea
MNPQDNPLSHLFDNNDAWVKHKLEDDPQFFARLAHQQAPEYLWIGCSDSRVPANEIIGLPPGEVFVHRNIANVVVHSDLNCLSVIQFAVDILRVKHIMVVGHYGCSGVNAALLNRRVGLADNWLHHVQDVRERHTALLDAWPVGEARYRRLIELNAIEQVVNVCRTTIVNDAWARGQSLTVHGLVYGVHDGRMRNLGMAVSSFDALDETYKRCVAALVAGGEHAPDNDMIAADAARLEGVAQAVAATLKPCDDAK

SEQ ID NO: 99419 - protein, 410 aa, Unknown
  Bacterial polypetide isolated from the Sargasso Sea
MKNIAIIGAGITGITTAYQLLERGYSVSVFDKNRYAAMETSFANGGQLSACNAEVWNSWSTIAKGIQWMLKKDAPLLFNPKLNFHKIGWLLSFISNIPNHKKNTILTAKMAIESRNEFKRILKIEKINLDLEEKGIMHLCDNHDSLKHGRRVNSWLAEAGLIRTEVTLDEMLSIEPTLNLKNFVGGFYTKSDMSGDIHKFTKLLADACEKKGAKFFYETEITRVSHNNQQPLITFKKSDQLQKQNYDCIVICAGVNSKFIATELGDIVNIYPVKGYSITLLLNDKESINNAPYVSLLDDKAKIVSSRLGKNRFRVAGTAEFNGYNKDIRADRINPLVKWCNELFPKVSTEHAIPWAGLRPMTPSMIPKVGSGNLPGVFYNTGHGHLGWTLSAFTSQQISDHIVRKDNYTD

SEQ ID NO: 99420 - protein, 403 aa, Unknown
  Bacterial polypetide isolated from the Sargasso Sea
MSRIAIIGAGITGVTTAHALAQRGHHVTVFERHRYAAMETSFANGGQLSASNAEVWNSAATVLRGLRWMLTRDAPLLLNPMPTWHKYSWMGEFLRQIPHYRANTVETVRLAIAAREHLFSIAEREGIDFDLERRGILHIYKTRKEFDAANKVNALLREGGLDRNPVTATELQRIEPTLHGDFFGGFFTPSDSTGDIHKFTRGLADACARHGVEFHYDAEITAIEQPAEGRFSLTVNLAGESQRFAFERIVVCAGVKSRDFAAMLGDHVNVYPVKGYSITVCLDDEVSQQRAPWVSLLDDSAKIVTSRLGVDRFRVAGTAEINGFNRDIRSDRIAPLVDWTRRHFPEVSTSRVIPWAGLRPMLPSMLPKVGRGKRCGVFYNTGHGHLGWTLSAATAQAVAGVIE

SEQ ID NO: 99421 - protein, 393 aa, Unknown
  Bacterial polypetide isolated from the Sargasso Sea
KRVTKVTILDSRRYPAMATSYANGGQLSASNAETWNTTKNVIDGFKWMFTPDAPLLFNPSPEIQKYKWMFGFLLATLKSEHKKNTLETIDVAKKAREIYFRIADEEGIEFELLKKGILRFYDSEKEFKLDKNKASWLNQDGMEWDILTTEEVINLEPAFRNNKNFDKILGGIYTKSDASGDIHKFCTNLEQVLVDKYDANLQLSATVEQINKQNKELIVSIKKEDAVIQEAFDNVIVCAGVNTQKFANMLGDKMNVYPVKGYSVTINLKDDTSKECAPSVSLIDQPVKIVASRLGDRFRVAGTAELAGINTDIRQDRIRPLLKWIEKYFPQVSTETYTPWAGLRPMTPNMMPITSESKIRGIFYHTGHGHLGWTLSAQTAKIVADKLDYNMNN

SEQ ID NO: 99422 - protein, 412 aa, Unknown
  Bacterial polypetide isolated from the Sargasso Sea
MKRIGVIGSGIAGITTAYSLAKRGHEVTLIDARRYPAMATSYANGGQLSASNAETWNTAKNLFNGIKWMFQKDAPLLFNPTPNINKYKWMLGFLAATFSGKHKSNTLKTIDMAKKAREHYFKIADDEKIEFNLLKKGLLHIYDNENELQAAREKKNWIEQDGMEWDYLDLDEIEDLEPAFRTDKNTKKIVGGIYTKSDASGDIHKFCANLHKVLEDKYKLISKFNSEVETIYKEKDCVIVSISDGNITEGLEFDKVAICAGVDTQKFANVLGDRMQVYPVKGYSVTINLNDQVSQEAAPKVSLIDDPVKIVSSRLGNRLRVAGTAELAGYNKDIRQDRVRPLLNWVKKYFPDVSTESYTPWAGLRPMTPDMMPLLFESNLGDIFYNTGHGHLGWTLSAETAEILAKKILNET

SEQ ID NO: 99423 - protein, 158 aa, Unknown
  Bacterial polypetide isolated from the Sargasso Sea
MRVLVLGSGVIGVTSAYYLARAGFDVVVVDRQPAAAMETSFANAGQVSPGYASPWAAPGVPLKAIKWLLQRHAPLAIKATADIDQYLWMAQMLRNCTASRYAVNKERMVRLSEYSRDCLDELRAETGIAYEGRSLGTTQLFRTQAQLDGAAKDIAVLK

SEQ ID NO: 99424 - protein, 283 aa, Unknown
  Bacterial polypetide isolated from the Sargasso Sea
LTGDVDQYLWMAQMLRNCTASRYAVNKERMVRLSEYSRDCLDELRAETGINYENRSLGTTQLFRTQAQVDAAAKDIAVLEQSGVPYELLDRDGIARVEPALAGVKDILAGALRLPNDQTGDCQLFTTKLADMALKLGVEFRFGQDIQRLDFAGDRINGVWIDGKLETADRYVLALGSYSPQMLKPLGIKAPVYPLKGYSLTVPITNSDMAPTSTILDETYKVAITRFDNRIRVGGMAEIAGFDLSLNPRRRETLEMIVNDLYPRGGDLSQASFWTGLRPATPD

SEQ ID NO: 99425 - protein, 250 aa, Unknown
  Bacterial polypetide isolated from the Sargasso Sea
MRVLVLGSGVIGTASAYYLARQGFEVVVVDRQNGPALETSFANAGQVSPGYASPWAAPGVPLKAIKWLLQKHAPLAIKATGDVDQYLWMAQMLRNCTASRYAINKERMVRLSEYSRDCLDELRAETGIAYEGRQLGTTQLFRTQAQVDAAAKDIAVLEASGVPFELLDRDGIARVEPALAGVKHKLAGALRLPNDQTGDCQMFTTKLADMAKALGVEFRFGQNIQRLDAVGDRINGVWIDGKLETADRYV

SEQ ID NO: 99426 - protein, 417 aa, Unknown
  Bacterial polypetide isolated from the Sargasso Sea
MDIVVLGGGVVGVTSAWYLAKAGHKVTLLERRDGVALETSHANAGQISPGYAAPWAAPGIPLKAAKWLLQKHAPFTVRPTSDPFQLRWMLKMFANCTPAAYAVNKGRMVRLAEYSRDCMKLLRDELSIDYEGRQLGTLQLFRSQAQLDASKRDIEVLEEYGVPYQSLDAAGCEGAEPALARVRGKIVGGLRLPGDETGDCFRFTKAMAAEAQRLGVKFVFNCAIDEIELAQGRAVAVRAGEQRFKADAIVCALGSYATGFLRPLGLDLPVYPVKGYSLTLPMINAEASPRSTVLDETYKVAITRFDERIRVGGMAELSGYNLALNPKRHDTLAMVVGDLFPEGGDISRADFWTGLRPMTPDGTPLVGPSPIPGLWLNTGHGTLGWTMAAGSGQLLCDLISGSDTAISDEGLTLARYG

SEQ ID NO: 99427 - protein, 428 aa, Unknown
  Bacterial polypetide isolated from the Sargasso Sea
MRVVILGSGVVGVASAYYLARAGHEVTVIDREAGPALETSFANAGQISPGYAAPWAAPGVPLKAVKWMFEKHAPLAIRLDGTRFQLQWMYQMLRNCTAERYAVNKGRMVRLAEYSRDCLQALRADTGIQYEGRTGGTLQLFRTQQQLDGAAKDIAVLQEANVPFELLSPADLKKAEPALAAVSHKLTGGLRLPGDETGDCQLFTTRLAALAESLGVKFRYNTPIDALAIAGGKIAGVQCGSETVRADAYVVALGSYSTSLISNLMKIPVYPLKGYSITAPIVNEAAAPVSTVLDETYKIAITRFDQRIRVGGMAEIVGFDKKLRAARRETLEMCVNDLFPGGGDTSKATFWTGLRPMTPDGTPIVGRTPVSNLFLNTGHGTLGWTMSCGSGQLLADLISGKMPAIQADDLSVHRYLKDVAGQTRPAYA

SEQ ID NO: 99428 - protein, 318 aa, Unknown
  Bacterial polypetide isolated from the Sargasso Sea
RDCLMDLRTDSGVDYEHREQGTLQVFRTQKQMDAAAKDIAVLERCGVPYEVLDRDGCVRAEPGLAASADKIVGGLRLPNDETGDCHLFTTRLAAKAAELGVTFRYNCAIDELHSDGKQITGVRLQNGEVLTADRYVLALGSFSPKLARPLGFDLPIYPVKGYSLTLPVADDAMAPVSTIMDETYKVAVTRFADRIRVGGMAELTGFDDTLKEKRRATLEMVVSDLFPQGGKVAEATFWTGFRPMTPDGTPIIGASSLRNLYFNTGHGTLGWTMSCGSSKLLADLLSGEKPALNAGDYSFDRYSNHKEHQHHGHPASAH

SEQ ID NO: 99429 - protein, 147 aa, Unknown
  Bacterial polypetide isolated from the Sargasso Sea
VNEAAAPVSTVLDETYKIAITRFDDRIRVGGMAEIVGFDKSLREARRETLELCVNDLFPGGGDTSKATFWTGLRPMTPDGTPIVGRTPLPNLFLNTGHGTLGWTMSCGSGQLLADVMSGKQPAIKADDLSVHRYLGETAGAHRPAYA

SEQ ID NO: 99430 - protein, 286 aa, Unknown
  Bacterial polypetide isolated from the Sargasso Sea
QQQLDGAANDIAVLERAGVPYELLSREDLVRSEPGLASTRHKLAGGLRLPNDETGDCQLFTTRLAAMAEKLGVRFRFNSTINSLIFKNDAVRGALVDGQPIDADLVVVALGSYSTPFLKNLVNVPVYPLKGFSITVPMTDAGKSPVSTILDETYKVAVTRFDDRIRVGGMAQIVGYDKRLDPGKRKTLEFVVNDLFPGAGDVSRATFWTGLRPMTPDGTPIVGQTPVRGLWLNTGHGTLGWTMACGSGKLLSDLVSGRSPAIRSDDLSVYRYLGGTQMPATKPALA

SEQ ID NO: 99431 - protein, 298 aa, Unknown
  Bacterial polypetide isolated from the Sargasso Sea
SGREYLNLEHKNGLEPGKNGQTLYSYNLSTIDIVDDAVRIAKFEQNNWEKTSIENIKEIMGKCATIMEENRPRLIAAMIRDGGKTISEADPEISEAIDFVRFYSLAAEKLDEESSPLGVVVVAPPWNFPYAIPMGGIVAALVSGNTVIFKPPPETVLVAWELVNQLWEAGVPKSVLHFLPTDENEIGKHLITHNDVDSIVLTGSYETALLFKKWNPSLRLLAETSGKNSIVVTASADIDAAVKDIIDSAFGHAGQKCSAASLVIVEQSIYNNPNFFKQLKDAVTSLKVGDPADFSTSV

SEQ ID NO: 99432 - protein, 323 aa, Unknown
  Bacterial polypetide isolated from the Sargasso Sea
ALRLCECFWKGGISRKTLQLVPCMGSVAGQQLVNDPAVAAVVLTGATKTARSLLKHNPKLRLFAETGGKNATIVTSLADRELAIKHIIESAFAHSGQKCSATSLLVLEAEVFDDPHFKSALIDAASSLSVGSAWNLSTRVGPLIDPPNENLQKGLTELDDGEAWALQPEIDKDNPRLISPGIKWGVRSGSYSHQTEFFGPLLSVLRADDLPHAIKIANQTPYGLTSGLESLDDREQELWTRSIQAGNLYINRPTTGAIVLRQPFGGILNSSFGPEIKAGGPHYVNLFTRFENCGFEVEEKPSGALEQLYDSLANEASHWKLST

SEQ ID NO: 99433 - protein, 280 aa, Unknown
  Bacterial polypetide isolated from the Sargasso Sea
KNVDRYVMLGDVCAKSAELMRDPEIELFFAKLIQRVMPKSINQCLGEVRVTRIFLENFAGDGVRFLARGFSNPGDHDGQESKGYRWPFGPVVLIAPFNFPLEIPVLQFMGALFMGNRPLVKTDSKVSIVFEQFLRMAIHCGLPASDSDFIHCDGKNMDQLITDGKEYIRHLQFTGSSDVAEHLANKMDGRIKIEDAGFDWKIIGPDFEQDWLDYVAWQCDEDAYNASGQKCSAQSILFVHNNWSEHLIPKISELAKRRNLDNLTVGPILTWDNVQIKSHI

SEQ ID NO: 99434 - protein, 283 aa, Unknown
  Bacterial polypetide isolated from the Sargasso Sea
MGNTVVWKASRTQIYSADVIMKVFKEAGLPDGVINLVHTSGRTAGEVIFKHPDFGGIHFTGSTAVFQHFWKEIGDNISTYKSYPRIVGETGGKDFIIAHKSADPLAVSTAIIRGGFEFQGQKCSAPSRVYIPNNLWSKIKQNLVDEISTIKIGNPEDFSNFMNAVIDEKAFNNITSYIDYAKNSDNHEVLIGGKYDKSKGYFIEPTIILSSNPKSKLMCEEIFGPIVTIYIYDAEKYEETIALVNETSPYALTGAVFSNNKEAIDIASKKLENAAGNFYINDK

SEQ ID NO: 99435 - protein, 254 aa, Unknown
  Bacterial polypetide isolated from the Sargasso Sea
AVYACYFLMELLKEAGLPDGVINFLPGSGSTVGDPILNHSSLAGVHFTGSTNTFNYIWKTIGSNIGQYKTYPRIVGETGGKDYCLAHESCDIDVLVTAMVRGAYEYQGQKCSAMSRAYIPKSLWPEVKEKFIAEVKTIKVGSPKDFSNFMNAVIDKSAFDTISEYIHFAKDHDDAEIVAGGNCDDSIGYFIEPTAILTTDPKFKTMKDEIFGPVLTIYLYDTNKWDETIKLVDTTSEYGLTGCIIASDEKIIKQ

SEQ ID NO: 99436 - protein, 488 aa, Unknown
  Bacterial polypetide isolated from the Sargasso Sea
MGVVVVAPPWNFPYAIPMGGIVAALVSGNTVIFKPPPETVLVAWELVNQLWEAGVPKSVLHFLPTDENEIGKHLITHNDVDSIVLTGSYETALLFKKWNPSLRLLAETSGKNSIVVTASADIDAAVKDIIDSAFGHAGQKCSAASLVIVEQSIYNNPHFFKQLKDAVTSLKVGDPADFSTSVGPLISPVNKNLSKVIEELEEGEEWLVEPKQLESVYLWSPGVKINVQPGSWTHQNEWFGPVLGIMNAKDLEQAVDWQNSVPYGLTAGIQSLNEKECEYWIENVEAGNLYVNRTTTGAVVDRHPFGGWKKSSFGPTAKTGGSHYVSMFREYQPVENIESLKYEFKLTWEEIGNKSIKLGDTESERNFKRYVPYKSILLVTEEDFSKDLESFIFWISDLLNINIKIISQETLLGPDSNLDLSLFEKIRWTATSQEIPTQIFSSGATVDERGLSQNGKQELLCWVKEQSISITNHRYGNIGSGPQPFNNW

SEQ ID NO: 99437 - protein, 463 aa, Unknown
  Bacterial polypetide isolated from the Sargasso Sea
MNKNTPARCQNLVSGEWKDDDNEYTKIPDPLNGDDFILVPNTTDATEFIENLRNCPKSGLHNPIKNVYRYVMLGDVCAKSAELMRDPEIELFFAKLIQRVMPKSINQCLGEVRVTRVFLENFAGDGVRFLARGFSNPGDHDGQESKGYRWPFGPVVLIAPFNFPLEIPVLQFMGALFMGNRPLVKSDSKVSIVFEQFLRMAIHCGLPASDSDFIHCDGKNMDQLITDGKEYIRHLQFTGSSDVAEHLANKMDGRIKIEDAGFDWKIIGPDFEQDWLDYVAWQCDEDAYNASGQKCSAQSILFVHNNWSEHLIPKISELANRRNLDNLTVGPVLTWDNVQIKSHIDALLKIDGSSVLFGNEKLENHQIPEVYGSIKPTAVQIPIEALLTDHFELITTELFGPFQVVIEYSDDQLSIVLDALERIEMNLTAAVVSNDLAFQQKILGNTVNGTTYTGMRARTTGAP

SEQ ID NO: 99438 - protein, 309 aa, Unknown
  Bacterial polypetide isolated from the Sargasso Sea
GGLPASDSDFIHCDGKNMDQLITDGKEYIRHLQFTGSSDVAEHLANKMDGRIKIEDAGFDWKIIGPDFEQDWLDYVAWQCDEDAYNASGQKCSAQSILFVHNNWSEYLIPKITELANRRNLDNLSVGPVLTWDNVQIKSHINALLKIDGSSVLFGNEKLEDHQIPEVYGSIKPTAVQIPIEALLTDHFELITTELFGPFQVVIEYSDDQLSIVLDALERIEMNLTAAVVSNDLAFQQKILGHTVNGTTYTGMRARTTGAPQNHWFGPSGDPRAAGIGTPEAIINTWSGHREIIYDIGPIKTDWNIPESQ

SEQ ID NO: 99439 - protein, 512 aa, Unknown
  Bacterial polypetide isolated from the Sargasso Sea
MNNNSPARCQNLVSGEWKNDESEYSKIPDPLTGEDFLLVPNTSDTAEFIKNLSNCPKSGLHNPIKNVERYVMLGDVCAKSAELMRDPEIELFFAKLIQRVMPKSINQCIGEVRVTRVFLENFAGDGVRFLARGFSNPGDHNGQESNGYRWPFGSVVLIAPFNFPLEIPVLQFMGALFMGNRPLVKSDSKVSIVFEQFLRMAIHCGLPASDTDLIHCDGATMDQLIKKGKEHIRQIQFTGSSAVAEHLAKEVNGKIKIEDAGFDWKIIGPDFKPEWLDYVAWQCDEDAYNASGQKCSAQSILFVHSNWYDQLIPKITELANRRNLENLTVGPVLTWNNDRIKSHIDDLLEIKGSKVLFGNEKLENHEIPEVYGSIKPTAIQVPIEALLSEHFELITTELFGPFQVIIKYEDHDLSIVMTALEKIRMNLTAAVVSNDLQFQQKILGNTVNGTTYAGMRARTTGAPQNHWFGPSGDPRSAGIGTPEAIINTWSGHREIIHDVGPIKSDWETPESQ

SEQ ID NO: 99440 - protein, 319 aa, Unknown
  Bacterial polypetide isolated from the Sargasso Sea
PEIRPLEGFVLSITPFNFTSIAANLPSAPAIVGCTSVWKPSRNSYHSNYVLMQLMMDAGLPPGVINFLPGSGAEITGAALSNPDFAGLHFTGSTSTFQGLWQEIAKALPDLRSYPRIVGETGGKDFVVAHPDCDHRGLLVALLRGSFEYQGQKCSAASRAYIPSSVWDAIGDDLCSEVSKIKMGDARDFTNFMTAVIDQRAFDKISGYIERAKEDDSCEVVVGGGHDDSTGWFIEPTIIVTTNPASETMCEEIFGPVLTVYVYEDDDFEGALETCDKGSPYALTGSIFANNEEDVQRAFEALRFAAGNFYIHDKSTRSR

SEQ ID NO: 99441 - protein, 176 aa, Unknown
  Bacterial polypetide isolated from the Sargasso Sea
FAGLHFTGSTSTFQGLWQEIAKALPDLRSYPRIVGETGGKDFVVAHPDCDHRGLLVALLRGSFEYQGQKCSAASRAYIPSSVWDAIGDDLCSEVSKIKMGDARDFTNFMTAVIDQRAFDKISGYIERAKDDDSCEVVVGGGHDDSTGWFIEPTIIVTTNPASETMCEEIFGPVLTV

SEQ ID NO: 99442 - protein, 230 aa, Unknown
  Bacterial polypetide isolated from the Sargasso Sea
SVWKPSRNSYHSNYVLMQLMMDAGLPPGVINFLPGSGAEITGAALSNPDFAGLHFTGSTSTFQGLWQEIAKALPDLRSYPRIVGETGGKDFVVAHPDCDHRGLLVALLRGSFEYQGQKCSAASRAYIPSSVWDAIGDDLCSEVSRIRMGDARDFTNFMTAVIDQRAFDKISGYIERAKEDDSCEVVVGGGHDDSTGWFIEPTIIVTTNPASETMCEEIFGPVLTVYVYED

SEQ ID NO: 99443 - protein, 229 aa, Unknown
  Bacterial polypetide isolated from the Sargasso Sea
MVRGAFEYQGQKCSALSRAYIPTSIWPELSKSYLKKVNEIKVGDVENFSNFMNAVIDKAAFDSIKSYIENAKNDADAEIITGGDYDESVGYFIEPTTILTNDPKYTTMCEEIFGPVLTVYLYDPKKWEETLHLVNTTSPYALTGCVWGKDSEAINFATEKLTHAAGNFYINDKPTGAVVGQQPFGGSRASGTNDKAGSIFNLIRWVSMRTIKETFDPPKDFEYPFMNDE

SEQ ID NO: 99444 - protein, 318 aa, Unknown
  Bacterial polypetide isolated from the Sargasso Sea
YNEFNNWTNLSIKRRSELLLKAAYLLKINRGKLIYTIVNDVGKIITQADSEVSESIDFIHYYVNQAIKSWEIDGIKFKSKGPVLVTTPWNFPCAIPIGCICAALVTGNTVIFKPAPEAEKVGFEIVQLFWMAGIPKNVLQFVVCPEDKVGMSLLKDSRIKVLSLTGSTKTAKLFQTSNPSAQLIAETGGKNTIIISNQADIDLAIKGLVDSAFGFSGQKCSAASLCICHKDVYESDYFKSKLKDAVTSLIVGLSDDVKTDISPLISRPNLRLQRTFLHCDDNEFWLVEPKQSSYNPQLWSPGIKYGVKAGSFFIKQSV

SEQ ID NO: 99445 - protein, 165 aa, Unknown
  Bacterial polypetide isolated from the Sargasso Sea
IIYFEFAKKSKDASILSGGGYDDSKGYFIQPTTILTTDPHFKTMEKEIFGPVLTIYIYDPKNWDHVINLVNSTSPYALTGCIMGYEKKAMDEAKNRLIHSAGNFYINDKPTGAVVGQQPFGGSRASGTNDKAGSDLNLQRWVSVRTVKETFDTPIDYRYPFLQDD

SEQ ID NO: 99446 - protein, 304 aa, Unknown
  Bacterial polypetide isolated from the Sargasso Sea
MPEGVINLVSGDPEMISEIALKHSEFSGLHFTGSTSVFRDLWKKIGNNISLYRDYPRIVGETGGKDFIFCHPTANIDATSTAIIRGAFEFQGQKCSAASRIYIPESISKKLIDKVIDQTKTIKIGSPIDFNNFMTAVIHENAFDRISNYIDFAKSSDDCVILHGGNYDKSVGYFVEPTILLTKNHQFKTMQEEIFGPVVTMFIYKDEEWLEMLDIVDKTSDYALTGAFISENEDSIDIALNKLRYSAGNFYINDKPSGAVVGQQPFGGCRASGTDDKAGSKLNLLRWVSPRLVSRTHNPPTKYP

SEQ ID NO: 99447 - protein, 263 aa, Unknown
  Bacterial polypetide isolated from the Sargasso Sea
MVDIKRTPRIVGETGGKDYCLAHESCDIDVLVTAMIRGAFEYQGQKCSAMSRAYIPKSLWPKVKEKFISEVKTIKVGSPKDFTNFMNAVIDKSAFDTISNYIQFAKEHDDAEIVTGGSCDDSLGYFIDPTAILTTDPQFKTMKEEIFGPVLTIYLYDNDKWDETIRLVDTTSEFGLTGCIIASDDEIIKQTTKKLTHSAGNFYINDKPTGAVVGQQPFGGSRASGTNDKAGSELNLLRWVSVRTIKENFEPPKNYRYPFLENE

SEQ ID NO: 99448 - protein, 297 aa, Unknown
  Bacterial polypetide isolated from the Sargasso Sea
RPLEGFVLSITPFNFTSIAANLPSAPAIVGCTSVWKPSRNSYHSNYVLMQLMMDAGLPPGVINFLPGSGAEITGAALSNPDFAGLHFTGSTSTFQGLWQEIAKALPDLRSYPRIVGETGGKDFVVAHPDCDHRGLLVALLRGSFEYQGQKCSAASRAYIPSSVWDAIGDDLCSEVSKIKMGDARDFTNFMTAVIDQRAFDKISGYIERAKDDDSCEVVVGGGHDDSTGWFIEPTIIVTTNPASETMCEEIFGPVLTVYVYDDDDFEGALETCDKGSPYALTGSIFANNEEDVQRAFE

SEQ ID NO: 99449 - protein, 234 aa, Unknown
  Bacterial polypetide isolated from the Sargasso Sea
GLLVALLRGSFEYQGQKCSAASRAYIPASVWDAIGDDLCSEVSKIKMGDAADFTNFMTAVIDQRAFDKISGYIQRARDDDACEVVVGGGHDDSAGWFIEPTIIVTSNPVSETMCEEIFGPVLTVFVYEDEDFEGALEMCDKGSPYALTGSIFANNEEDVKRAFDALRFAAGNFYINDKPTGAVVAQQPFGGARASGTNDKAGGPLNLLRWISPRSVKRTLDIPQDWGYPFMEPE

SEQ ID NO: 99450 - protein, 284 aa, Unknown
  Bacterial polypetide isolated from the Sargasso Sea
YRSLEGFVFAIAPFNFTSIAGNLPAAPALMGNVSLWKPASSAILACYYLMEMFKEAGLPDGVINFLPGDGKIVGDPILNNSNLAGVHFTGSTKTFNHIWKTIGSNIDNYKTYPRIVGETGGKDFCLAHSSSDEEVLVTAMVRGAFEYQGQKCSAMSRAYIPSSIWPSVEDKLISELDTIKVGSPRDCSNFMNAVIDKSAFDNITSYIDYAMKDNDAKIIFGGGCNDSKGYFIEPTVILTTNPNFKTMEEEIFGPVLTIFVYEDEDWEETINLVDATSSYALTGC

SEQ ID NO: 99451 - protein, 464 aa, Unknown
  Bacterial polypetide isolated from the Sargasso Sea
VNLAIESSMDAWDSWSKIELNERCAIFNKAADLLSTKWRDTINAATMLNMSKNVYQSEIDAACEMIDFFRFNSWYAYELSKQQPMYSSEFVKNSLEMRPLEGFIFAVSPFNFASIGGNLPSSPALMGNVALWKPASSAVLPAYYIMKLLQEAGLPDGVINFIPGSGSKIGPQVMDSPNLAGIHFTGSTTVFKGMWETIGKNINKYKSYPRIVGETGGKDFCIAHESANIEVLTTAMIRGAFEYQGQKCSAMSRAYIPSSIWPTLKDLLLDEVEKITVGSPEDFTNFMNAVIDRPAYESIKEYVEICKSSSDAEIISGGNCDDTKGYFIEPTIVLTSNPKFRTMCEEIFGPVLTIFTYDPKDWSKTLDLIDNTSDYALTGCVISDNKDAILEAKNTLNHAAGNFYINDKPTGAVVGQQPFGGSRASGTNDKAGSMFNLIRWVSMRTIKEVLDSPKDYRYPFMDES

SEQ ID NO: 99452 - protein, 540 aa, Unknown
  Bacterial polypetide isolated from the Sargasso Sea
MSSIPKPINEPIRNYEPGSPEKASLKEKLAELSQKEIEIPLIIGGQEIRTGDTGKCIMPHNHGHVLATFHQAGEKEVTQAIESSQAAWKQWSTTPLQERAAIFLKMAELLTGPYRDTINAATMLNMSKNVFQAEIDAACELIDFWNFNCWFAQELYNHQPMYSPEPTKNSMEHRSLEGFVFAVTPFNFTSIAANLPSAPALMGNVAIWKPASSTVYPAYFIMKLFKEAGLPDGVINFIPGRGSVVGPLVMDHPNLAGVHFTGSTSVFQNMWEHIGGNIKQYASYPRIVGETGGKDFCIAHESVNKEALVTAMVRGAYEFQGQKCSAMSRAYIPSSIWSDIEEKLLTEMATITMGDPSDFSNFMNAVIDKNAFDSIKEFIDDAARADDAEIIFGGKCDDSIGYFIEPTIIITKNPMFRTMCEEIFGPVLTIYIYDSSEWKETLKLVDSTSPYALTGCVMANDTHAIAEASTILKHAAGNFYINDKPTGAVVGQQPFGGSRASGTNDKAGSMFNLARWVSQRTIKENFDPPTDYRYPFMEEK

SEQ ID NO: 99453 - protein, 354 aa, Unknown
  Bacterial polypetide isolated from the Sargasso Sea
PFNFTAIAANLCAAPALMGNVVVWKPSQSQIYSAQVIVELFKEAGLPDGVVNMVTVGGKEAGDVIFNHKEFAGLHFTGSTTVFRNLWKGIGNNLEKYRSYPRIVGETGGKDFVVAHKTAKPSHVATALSRGAFEYQGQKCSAASRAYIPDNIWEEVKEILVKQVSSFKMGSPEDTNNFINAVIDAKSFNNIKDYLAYSKDSSEAEVIVGGNCYGDEGYFVEPTVIVTTNPSFKTMVEEIFGPVLTIYVYNANKFEETLDLVDSTSEYALTGAIISQDREAIRLASKKLVNSAGNFYINDKPTGAVVGQQPFGGARGSGTNDKAGASMNLLRWVSARTIKETFDTPSDYKYPFLG

SEQ ID NO: 99454 - protein, 288 aa, Unknown
  Bacterial polypetide isolated from the Sargasso Sea
PSLAGVHFTGSTNTFNHIWKTIGSNIDQYKTYPRIVGETGGKDYCLAHESCDIDVLVTAMVRGAFEYQGQKCSAMSRAYIPKSLWPEVKEKFISEVKTIKVGSPKDFTNFMNAVIDKSAFDAISNYIQFAKEHDDAEIVTGGNCDDSLGYFIDPTAILTTDPQFKTMKEEIFGPVLTIYLYDTDKWDETIDLVDTTSEYGLTGCIIASDDEIIKKTTKKLTHSAGNFYINDKPTGAVVGQQPFGGSRASGTNDKAGSELNLLRWVSVRTIKENFEPPKNYRYPFLEKK

SEQ ID NO: 99455 - protein, 540 aa, Unknown
  Bacterial polypetide isolated from the Sargasso Sea
MDKNFKAINEPIIDFEPGSEHRKLLLEEIERQSSRQKDIPIIINGKEIRTGNTKPCTKPQDHGHILGHYHEAGPEEIQMAIDSSLNAWKTWSNTSLEERSKIFKKVADLIAGPYRYKINAAAMLDIGKSVFQAEVDASCELIDFLNFNIEFAHTMQNSFTPISPDGMKNELEFRPLEGFVFAIAPFNFFSIGGNLAISPAIVGNTVLWKPAPSAVYSAYYIMELYKEAGLPDGVINFIPGDGPSIGDQVLSHKELAGVHFTGSTKTFKHLWKKVSNNLDIYRNYPKIVGETGGKDFCIAHESADIQGLVTAMVRGAFEYQGQKCSAMSRAYLPKSKWAEIHEKLVSEIETIDVGPPEDFKNFVNAVIDETAFDKIASYLDYAKTSNDCEILCGGGYDKSKGYFVEPTVILAKDPHFKTLEEEIFGPVLTIFVYENENWDETLELIDNTSPYALTGCVFSEDRDIVDEVRSKLRFSAGNFYINDKPTGAVVGQQPFGGSRASGTNDKGGSMLNLLRWTSPRTIKETFEPPHNYRYPFMDEE

SEQ ID NO: 99456 - protein, 517 aa, Unknown
  Bacterial polypetide isolated from the Sargasso Sea
LLLEEIERQSSRQKDIPIIINGKEIRTGNTKPCTKPQEHGHILGHYHEAGPEEIQMAIDSSLEAWKTWSNTSLEERAKIFKKVADLIAGPYRYKINAAAMLDIGKSVFQAEVDASCELIDFLNFNIEFAYTMQNSFTPISPDGMKNELEFRPLEGFVFAIAPFNFFSIGGNLAISPAIVGNTVLWKPAPSAVYSAYYIMELYKEAGLPDGVINFIPGDGPSIGDQVLGHKELAGVHFTGSTKTFKHLWKKVSDNLDIYRNYPKIVGETGGKDFCIAHESADIQGLVTAMVRGAFEYQGQKCSAMSRAYLPKSKWNEIQEKLLNEIKTIDVGPPEDFKNFVNAVIDETAFDKIASYLDYAKESNDCEVLCGGGYDKSKGYFVEPTVILTTDPHFKTLEEEIFGPVLTIFVYENENWNETLELIDNTSPYALTGCVFSEDRDIVEEVRSKLRFSAGNFYINDKPTGAVVGQQPFGGSRASGTNDKGGSMLNLLRWTSPRTIKETFEPPHNYRYPFMDEE

SEQ ID NO: 99457 - protein, 356 aa, Unknown
  Bacterial polypetide isolated from the Sargasso Sea
PFNFTSIAGNLPCAPALMGNVAIWKPASSAVLPCYYLMEMLKEAGLPDGVINFLPGSGSKVGDPVLTNPNLSGVHFTGSTQTFQHIWKTIGKNIDRYKTYPRIVGETGGKDFCLAHESVNIDQLATAMIRGAFEFQGQKCSAMSRAYIPTSIWGKLKTTYLSELGSVKVGNPRDFTNFMNAVIDKNAFDSITEYIEYAKESPDAEIISGGTYDDSTGYFIDPTTIITTDPNFKTMEEEIFGPVLTVYLYEPSDWERTMDLVDQTSPYALTGCVMGNDQSAIKKAKDRLTHSAGNFYINDKPTGAVVGQQPFGGSRASGTNDKAGSELNLQRWISIRTIKETFDTPTDYRYPFLEED

SEQ ID NO: 99458 - protein, 540 aa, Unknown
  Bacterial polypetide isolated from the Sargasso Sea
MNQKKYAVNEPVKSYEPGSQERHNIQKKYDEMANQSIDIPIIINGKEYRTEEIGECIMPHDHQNIIATFHKAGKKEAELAINNALEVWKTWSRTSLEERTEIFKRAAELLQGKWRDTINAATMLNQSKNVYQAEIDSACELIDFFNFNSQYAEEIYNNQPLISPDGVKNHLEYRPLEGFIFAITPFNFTSIAGNLPSAPALMGNVALWKPASSAVLPCYYLMKMLEEAGLPNGVINFLPGSGGKVGNPVLSNPNLAGVHFTGSTETFQHIWKSIGNNINNYKTYPRIVGETGGKDFCIAHESVDIEELSTAMIRGAFEFQGQKCSAMSRAYIPTNIWEQLKKVYLSEIETIKVGSPRDFSNFVNAVIDKNAFDSITNYIEFARNAASADIISGGSYDDSKGYFIEPTTILTTDPYFKTMVEEIFGPVLTIYLYNPEDWNSTLDLVDKTSPYALTGCVMGKDKNAIQKAKDHLTHSAGNFYINDKPTGAVVGQQPFGGSRASGTNDKAGSELNLQRWISIRTVKETFDPPKDYRYPFLNED

SEQ ID NO: 99459 - protein, 335 aa, Unknown
  Bacterial polypetide isolated from the Sargasso Sea
NVVYGKPSDNQVLTAKIPWDILKKAGLLDGVINMVTGDPEMITDIALKHPEFSGLHFTGSTSVFRDLWKKIGNNINLYRDYPRIVGETGGKDFIFCHPSANIDATSTAIIRGAFEYQGQKCSAASRIYIPNSISKNLINKVIDETKTIKMGSPIDFNNFMTAVIHKGAFERISSYIDYAKSSDDCEILCGGNYDDTVGYFVEPTIILTTNHQFKTMKEEIFGPVVTLYVYDDENWEEMLDIVDKTSDYALTGAFISQDEESIELALNKLKYSAGNFYVNDKPSGAVVGQQPFGGCRASGTDDKAGSKLNLLRWVSPRLVSRTHNPPTSYPYDYMD

SEQ ID NO: 99460 - protein, 268 aa, Unknown
  Bacterial polypetide isolated from the Sargasso Sea
MVSYAQGIDALNQSLSELRDIDVSFEFFPPKTEAMEQTLWKSVERLAPLKPSYMSVTYGANSGERDRTHDVVKRIQQQTGVAAVPHLTCVDASRDELKQIAKDYWDSGIRRIVALRGDLPPGVEKTEMYASDLVALLKDVADFDISVAAYPEKHPEAPNAQFDLLNLKRKAEAGATEAITQFFFDTSVYLRFRDRAAAAGVDLDIVPGILPVTNYQTLVKFAGFTNVHVPGWLHKMFDGLDADDQATRNLIGANIAMDQVKVLAKEGV

SEQ ID NO: 99461 - protein, 298 aa, Unknown
  Bacterial polypetide isolated from the Sargasso Sea
IILNIERIMEEKLKIITKLQKNSNPNVSFEFFPPKSQQMEIQLWNSINRLMPLESKFVSVTYGAGGSTRERTHNTVVKILKETKLIPAAHLTCVDSSKSEVNKVATSYWNSGVRKIVALRGDSPIKGKNFEPHPLGYNNAADLVGGLKKIADFDIIVASYPEIHVESKDLKSDLDNLKKKIDAGASQTITQLFFDVDIYLKWLDKVRSAGISIPVIPGIMPITNFNNAEKFCKMCGASIPIWLKKIFQGLDDDSETRKLIGATIAAEQCRILQSEGINDFHFYTLNRADLTYAICHIL

SEQ ID NO: 99462 - protein, 198 aa, Unknown
  Bacterial polypetide isolated from the Sargasso Sea
VRSGEHYWKSGIRDIVALRGDLPAGSPKPTRFAADLVRLLRSVADFDISVAAYPEVHPDAANAQADLINLKRKIDAGASRAITQFFFDVESYLRFRDRCVAAGIDVEIVPGILPVTNFTQLKRFAGMTNVSLPSWLHKQFDGLENDAGTRQLVGANVAIDMVKVLSREGVKDFHFYTLNRAELTYAICHTLGVRPKAV

SEQ ID NO: 99463 - protein, 277 aa, Unknown
  Bacterial polypetide isolated from the Sargasso Sea
MDISFEFFPPSSETAEIVLWDSIKLLEPLNPSFVSVTYGAGGTTRDRTHNCVKKIIDETTLEPAAHLTCVNSTKDEIKEITDRYKKIGVKHIVAVRGDMPNFDNFKPHPKGYKTSIDLVKNLSEQNFNVTVSAYPEKHPDALSFDEDIEFLKRKIDAGATQAITQFCFDFQIILAYRDLLQKHNINIPIIPGLMPTTNFKGIQKMSKQCSTSIPKWLENKYNGLEDRLDERKKVSKEVAIDFCQKLISNDFRAIHFYTLNQSELTLSVCQSLNISDE

SEQ ID NO: 99464 - protein, 277 aa, Unknown
  Bacterial polypetide isolated from the Sargasso Sea
MSADPTVSFEFFPPRDEIGEQKLINEVLPHLAMFNPEFVSVTYGAGGSTKKGTFSVIRKLRSQKLDPIPHLSVGNDSDHEIIEVIHAYRKLGVTNILALRGDAPSGYGASQIKNAAYLVRLIRKEFGDDLGILVAAYPEIHPESETLEIDISFFKEKVEAGADSAITQFFYNPDAYDNFLNVIDKKNIRIPIVPGVMPIQNVDGLLRMSKQCKAEIPRWLEYSLKNQQEDLQKFAIELVTRLCDRLIELGAPGLHFYTLNRWGAVSRICKNLNLQRE

SEQ ID NO: 99465 - protein, 277 aa, Unknown
  Bacterial polypetide isolated from the Sargasso Sea
MDISFEFFPPNTSQAETVLWDSIKLLEPLKPNFVSVTYGAGGTTRNRTHNCVKKIIEETNLEPAAHLTCVNSSKNEIKLITDDYKKIGVKHIVALRGDMPNFENFKPHPNGYKSSIDLVHNLSQENFIVTVSAYPEKHPDSGSIEEDIEFLKRKIDAGATQAITQFCFDFEIILAYRDLLQKNNINIPIIPGIMPTTNFKGVKKMSKQCSTSIPKWIEKKYKGLENNLSERKKVAKEIAIDFCQKLMINDFKAIHFYTLNQSELTLSVCQDLNISYE

SEQ ID NO: 99466 - protein, 538 aa, Unknown
  Bacterial polypetide isolated from the Sargasso Sea
ITWGAGGSTADRTLDMSKTIQKYFGLDVMMHLTCTNMSIDLINSVLLEAKKNNIYNILALRGDPPEGSKEWQKKNQAFNYGADLVRYIRKNFDDTFFLAVGGYPETHQEQTDPNLDIQYLKEKVDAGVDMVVTQLFYDIDKFLTFRDKCISNGIDVPIIPGIMPIHNYARFKKFTQFCNVKIPNSIIKKIEPIKNDDSSVINYGIEQGATMCEKLIKEGVPGLHFYTLNLEHSVKEILNSIGLVSDEKANRDLPWRQSSDQNRKSAEDVRPIFWSNRPISYLTRTENWDDFPNGRWGDISSPTFGELNQYHAIRAGSKINEIRKKRKRIWGEPKSIKDISNVFVSFCKGDINSLPWCETKLAIESEHISKELVTLNKAGCFTINSQPNVNGISSADPNFGWGSEDGMVYQKAYLEFFTSKNNLDAILEKIKSNKNISYQAVNKSGDIISNVKRDNVNVVTWGVFPGEKIKQPTIVDAMSFMIWKDEAFSLWINDWAFIYEKDSISYSIINNIYENYFLVNIVDNDFISSNMIKQLLEK

SEQ ID NO: 99467 - protein, 277 aa, Unknown
  Bacterial polypetide isolated from the Sargasso Sea
MDISFEFFPPSSNKAETVLWESIKILEPLKPNFVSVTYGAGGTTRERTHNCVKKIIDETNLEPAAHLTCVNSSKDEIKEITDSYKKIGVKHIVALRGDMPNFEDFEPHPKGYKSSIDLVKNLSQQDFNVTVSAYPEKHPDASSFDEDIEFLKRKIDAGATQAITQFCFDFQIILAYRDLLQKHNINIPIIPGLMPTTNFKGIQKMSKQCSTSIPKWLENKYNGLEDRLDERKKVSKEIAIDFCQKLISNDFRAIHFYTLNQSELTLSVCQSLNISDE

SEQ ID NO: 99468 - protein, 276 aa, Unknown
  Bacterial polypetide isolated from the Sargasso Sea
MNPIELSFEFFPPKTQEGVDKLRATRAQLAPLKPKFVSVTFGAGGSTQQGTLDTVVDMAKEGLEAAPHVSCIGSSKESLRAILNEYRAHGIRHIVALRGDLPSGMGEVGELRYASELVSFIRAEFGDWFWVEVAGYPEYHPQSRSPRHDLENFAHKVKAGANSAITQYFFNADAYFRFVDDARKLGVDVPIVPGIMPITNFSQLMRFSEMCGAEVPRWIARRLESFGDDRESIRAFGLDAVTDLCQRLIDAKVPGLHFYTLNGAAATKAICERLGA

SEQ ID NO: 99469 - protein, 298 aa, Unknown
  Bacterial polypetide isolated from the Sargasso Sea
MGFHSARQVEALNQSLADLSGDISVSFEFFPPNSEGMENTLWQSIERLKVLEPKFVSVTYGANSGTRDRTHKVIKDIKERTGLIAAPHLTCIDASRDELRTIARDYWNSGIRHIVALRGDLPQGLEKPEMYATDLVALLKAEADFDISVAAYPEGHPEARSAQSDLLNLKRKIDAGANRAITQFFFDVETYLRFRDRCAAIGIDAEIVPGILPVSNYQTLAKFAGFTNVKIPRWMHQRFEGLDDDQMTRNMVGASIAIDQVRVLSQEGVKDFHFYTLNRSELTYAICHTLGVRPKGQP

SEQ ID NO: 99470 - protein, 285 aa, Unknown
  Bacterial polypetide isolated from the Sargasso Sea
MQDVAGKVNVSFEFFPPKTEQMENTLWQSIERLAPLAPSFVSVTYGANSGERDRTHDIIKSIKQRTGLIAAPHLTCVDASRAELERIAKDYWDNGIRHIVALRGDLPPGNKEKPALYAADLVEILRSVADFDISVAAYPEVHPESPNAQFDLLNLKRKVDAGASRAITQFFFDPEKYLRYRDRCAAIGIDVEIVPGILPVTNFQQLQKFATMTNVAIPSWMNKAYEGLEQDATTRNLVAANIAMEMVKVLSREGVNHFHFYTLNRSELTYAICHLLGVRPQSAIA

SEQ ID NO: 99471 - protein, 166 aa, Unknown
  Bacterial polypetide isolated from the Sargasso Sea
MYASDLVTLLKDVADFDISVAAYPEVHPEAKSAQADLLNLKRKVDAGANRAITQFFFDVESYLRFRDRCVSAGIDVEIIPGILPVSNFKQAKKFADMTNVRIPAWMSTMFDGLDDDAETRKLVGANIAMDMVKILSREGVKDFHFYTLNRAEMSYAICHTLGVRPN

SEQ ID NO: 99472 - protein, 297 aa, Unknown
  Bacterial polypetide isolated from the Sargasso Sea
MAFHHAQHSHSLNQSLSELNGDINVSFEFFPPSTPEMEQILWNSIRRLEPLNPKFVSVTYGANSGVRDRTHGVIERIQQETNLVAAPHLTLVDASDEELLDLAKHYWKSGIRDIVALRGDLPAGSPKPTRFAVDLVRLLRSVADFDISVAAYPEVHPDAANAQADLINLKRKIDAGASRAITQFFFDVESYLRFRDRCVAAGIDVEIVPGILPVTNFTQLKRFAGMTNVSLPSWLHKQFDGLENDAGTRQLVGANVAIDMVKVLSREGVKDFHFYTLNRAELTYAICHTLGVRPKAV

SEQ ID NO: 99473 - protein, 297 aa, Unknown
  Bacterial polypetide isolated from the Sargasso Sea
MAFHHAQHSHSLNQSLSELNGDINVSFEFFPPSTPEMEQILWNSIRRLEPLNPKFVSVTYGANSGVRDRTHGVIERIQKETNLVAAPHLTLVDASDEELLDLAKHYWKSGIRDIVALRGDLPAGSPKPTRFAADLVRLLRSVADFDISVAAYPEVHPDAANAQADLINLKRKIDAGASRAITQFFFDVESYLRFRDRCVAAGIDVEIVPGILPVTNFTQLKRFAGMTNVSLPSWLHKQFDGLENDAGTRQLVGANVAIDMVKVLSREGVKDFHFYTLNRAELTYAICHTLGVRPKAV

SEQ ID NO: 99474 - protein, 294 aa, Unknown
  Bacterial polypetide isolated from the Sargasso Sea
MSFFHANQREALNQSLAEVQGQINVSFEFFPPRTSEMEQTLWKSIDRLSSLKPKFVSVTYGANSGERDRTHSIIKGIKERTGLEAAPHLTCIDASRDELRAIAEDYWNNGIRHIVALRGDLPPGSGKPDMYAADLVTLLKEVGDFDISVAAYPEVHPEAKSAQADLLNLKRKVEAGANRAITQFFFDVESYLRFRDRCVSAGIDVEIIPGILPVSNFKQAKKFADMTNVRIPTWMSKMFEGLDNDAETRQLVGANIAMDMVKILSREGVKDFHFYTLNRAEMSYAICHTLGVRP

SEQ ID NO: 99475 - protein, 168 aa, Unknown
  Bacterial polypetide isolated from the Sargasso Sea
MKPEVVLVVAVAANGVIGMTGGLPWHLPQDLSRVKAITMGKPLIMGRKTYESIGRPLPGRKTIVITRAKISFPPEVKVVKSFGCAVRYAEEYANDMGVDEIVAFGGARVYESAIPIAKKIYKTEVDLHPDGDTFFPEYKRDEWREVARTDFAAQNNSFAYSYVQLDRI

SEQ ID NO: 99476 - protein, 145 aa, Unknown
  Bacterial polypetide isolated from the Sargasso Sea
MKTISHLVAVSNDLVIGVDNDLPWNLKDDLAHFKKYTLNKIIIMGRKTYESIGRPLPNRINYVISRTLKKIDGAYVFNNLENAMNSAEKHNKKENQNNEIIIIGGGYLFKQTSSSVNKLVITRVDCNVKGDIYYPKIDMSNWKKF

SEQ ID NO: 99477 - protein, 191 aa, Unknown
  Bacterial polypetide isolated from the Sargasso Sea
MRAEPARAAVPVKSTPFRFFFPPTFMTTLTLIVARARNGIIGRDNQLPWKLPEDLAFFKRTTMGAPIVMGRKTHESIGRPLPGRRNIVVTRDATRRFDGCDTVTSLGDALTLAARDGVPEAFLIGGAQLYTEGLALADKLVVTEIDADFDGDASFPAPDAAQWQEVSRDAHQAAAPNTFGYAFVVYERKRG

SEQ ID NO: 99478 - protein, 161 aa, Unknown
  Bacterial polypetide isolated from the Sargasso Sea
MKIILIAALDKGRVIGSEGSIPWNIQEDLNYFKEKTTNKAIIMGRKTYESIGRPLPNRLNIVMTRSIEEIKGVKIALDKEKALEEAKRFSSEIFIIGGEFIYKEFMELASVMLLTEIDLKTKGDAFFPKWNKSEWKETSRHSRIDVLENISYDFVRYERKN

SEQ ID NO: 99479 - protein, 160 aa, Unknown
  Bacterial polypetide isolated from the Sargasso Sea
MRIAMIAAMANNRVIGKDNKMPWHLPEDLRHFKAMTLGKPVVMGRKTFESIGRPLPGRHNIVISRQADLQIEGVTCVTSFEDAKLAAGDCEELVVIGGGQLYQQLLPQADRLYLTQISLEVDGDTFFPAWDSDKWQETESLTSINADGLEYRFINLAKKC

SEQ ID NO: 99480 - protein, 160 aa, Unknown
  Bacterial polypetide isolated from the Sargasso Sea
MRIAMIAAMANNRVIGKDNKMPWHLPEDLRHFKAMTLGKPVVMGRKTFESIGRPLPGRHNIVISRQADLLIEGVTCVTSFEAAKEAAGDCEELVVIGGGQLYQQLLPQADRLYLTQINLDVEGDTFFPAWKNDEWQETESVAAINADGLEYRFINLAKKC

SEQ ID NO: 99481 - protein, 167 aa, Unknown
  Bacterial polypetide isolated from the Sargasso Sea
MIISAVVAMNSSLLIGKDNDLPWKLKDDLEHFKTYTLGKPIIMGRKTYESIGRPLPDRLNVVVSRTINEIDNLITVTSLKKAINEARIYCESHGQNEIVLIGGAGIFKEGLKILNKLVITWVDADDLEGDVYFPSFNINEWKEIDSKDFSRSADNQFDFTVKEYLKL

SEQ ID NO: 99482 - protein, 162 aa, Unknown
  Bacterial polypetide isolated from the Sargasso Sea
MNNLSIIVAYSKNRAIGKNNQLPWKLSEDLKNFKKITMGNSIIMGRKTFESIGFILKGRQNIVISKTSKFQGVTMSSSITDSINKAKKSKEIFFIGGQDIFEQTISLVDKIYLTRINEEIDGDRFFPEFDFNQWEVIEKKEFSKNEFNSHSFSFDVLKRLNT

SEQ ID NO: 99483 - protein, 169 aa, Unknown
  Bacterial polypetide isolated from the Sargasso Sea
MNIIISHVVALSNNNVIGVDNNLPWNLKTDLNHFKNYTTNKIIVMGRKTFESIGRPLPNRLNFVVSRTIDEIENAFVFKSTKEAIDAAKKKCLDDGNYNEIVIIGGGYLFKDTLEITNKLVLTNVDCDINGDVYYPDIDFKFWKEKSSENFSRNEDNDYNFTVKVYEKI

SEQ ID NO: 99484 - protein, 168 aa, Unknown
  Bacterial polypetide isolated from the Sargasso Sea
MKIISHVVALSNNNVIGVDNDLPWNLKRDLLHFKEYTTNKIIIMGRKTYESIGRPLPNRINYVVSRTIDKIEGAFVFDSIDDAICDAKAYCIELNLEEIVIIGGGFLFRDTLSITNKLVLTRVDCNVEGDVFYPDINLKEWDEISSENFTKNSENEYDFAVVTYKRIT

SEQ ID NO: 99485 - protein, 168 aa, Unknown
  Bacterial polypetide isolated from the Sargasso Sea
MKTIISHVVALSNNRVIGKDNDLPWNLKTDLKHFKEYTTNKILLMGRKTFESIGRPLPNRTNIIVSNTIQSIEGAEVFSDLNSALSKAKEKCETLDKNEIVIIGGGFLFNDTLDIVNKLVLTRVDCEIDGDIFYPEIDLMNWNKISSERYLKDNENEFDFVVEVFTKN

SEQ ID NO: 99486 - protein, 87 aa, Unknown
  Bacterial polypetide isolated from the Sargasso Sea
MIISHLVALSNNNVIGVDNDLPWRLKKDLQHFSAYTQNKVIVMGRKTFESIGRPLPNRKNIVISSTISSTSEVQVVNSLEQAISEAR

SEQ ID NO: 99487 - protein, 161 aa, Unknown
  Bacterial polypetide isolated from the Sargasso Sea
MKIILIAALDKGRVIGSEGSIPWNIQEDLNYFKEKTTNKAIIMGRKTFESIGRPLPNRLNIVMTRSKEQIDDVIIAPNREVAIEQGRGFSSEIFVIGGEYIYKEFLEMASEMLLTEIDLDTEGDTYFPKWEESEWLEVSREAKKDDSQKINYEFVRYKRKN

SEQ ID NO: 99488 - protein, 87 aa, Unknown
  Bacterial polypetide isolated from the Sargasso Sea
MISISIIVAHASNYVIGKDGKLPWHIPADLKYFKELTYGSPIIMGRKTFESIGRPLPGRHNIIITRNSEYHNDDCAVVFDFSAALKE

SEQ ID NO: 99489 - protein, 168 aa, Unknown
  Bacterial polypetide isolated from the Sargasso Sea
MKTIISHVVALSNNRVIGKDNDLPWNLKTDLKHFKEYTTNKILIMGRKTFESIGRPLPNRTNIIVSKTIESIEGAEVFSDLNSALNKAKESCETLDKNEIVIIGGGFLFNDTLDIVNKLVLTRVDCEIDGDIFYPEINLMNWNKISSEEYLKDNENEFDFVVEVFTKN

SEQ ID NO: 99490 - protein, 162 aa, Unknown
  Bacterial polypetide isolated from the Sargasso Sea
MISMIAAMAHDRVIGLDNQMPWHLPADLAHFKRVTLGKPVLMGRKTFESIGRPLPGRRNLVISRNPDYRADGVEVIDSVEAALALLAGSDVAELMVIGGGHLYGQLLPRADRLYLTRIDLAVEGDTRFPAFDEGDWSCIERESHQPDEKNPHSYCFETWQRR

SEQ ID NO: 99491 - protein, 176 aa, Unknown
  Bacterial polypetide isolated from the Sargasso Sea
MKNVFPLTCIVAVSSDKIIGDGEKLLWHIPEDLKRLKLMTMGNPLIMGRKTFESIGRPLPGRANIVITRNQNFKSEGAYIVNSLDSAIEKSNSWIYENFNNREIKSKKIFLFGGGQIYNLALKFCRSIEMTIVDIVVGKGIKFPNINENEWSKQLKQKKKSKQKNLHFSYWTFTRK

SEQ ID NO: 99492 - protein, 159 aa, Unknown
  Bacterial polypetide isolated from the Sargasso Sea
MIAAMANNRVIGLDNKMPWHLPADLQHFKAVTTGKPVIMGRKTFESIGRPLPGRRNIIITRNTEYKAEGIETVTSPEAALSLVCGVEEVMIIGGGNVYQQFLTQAERLYLTFIDLDVEGDTQFPDYQAIANWEVKEEQVKQPDEKNKHSYKFVTLYKYC

SEQ ID NO: 99493 - protein, 168 aa, Unknown
  Bacterial polypetide isolated from the Sargasso Sea
MIIISHVVALSNNRVIGVNNDLPWSLKKDLAHFKAYTTNKIIIMGRKTFESIGRPLPNRINFVVSTTITEIEGAKVFKSTEEALSEANKLCIELNYEEIVIIGGGYLFRDTLSIVNKLVLTEVDCEINGDVYYPDIDLDSWQNTETSEHKKDSENEFDFKVLVYEKIK

SEQ ID NO: 99494 - protein, 167 aa, Unknown
  Bacterial polypetide isolated from the Sargasso Sea
MIISILVAMNEELLIGVNNDLPWKLQDDLEHFKNYSLNKPIIMGRKTFESIGRPLPNRKNIVVSSSMKEQDGIKVFNNLNDAIAFSKKYNEENDIDEIILIGGAKVFAEGLKQTTKLVISWVDANSIKGDVYFPEFNKQEWREVDSKKFLKSEKNQYDFEIKEYLRK

SEQ ID NO: 99495 - protein, 167 aa, Unknown
  Bacterial polypetide isolated from the Sargasso Sea
MIISHLVALSNNFVIGVNNDLPWKLKKDLQHFSAYTQNKAIVMGRKTFESIGRPLPNRKNIVISSTLNAQDGIEIVPTLDQGIELASQWNKNTTGSKEVVLIGGGYVFEESKNIVNKLVLTRVKCEIEGDVFYPQIDLSNWEKVSTESFKRDDENEYEFSVETFIKN

SEQ ID NO: 99496 - protein, 196 aa, Unknown
  Bacterial polypetide isolated from the Sargasso Sea
MAGDTRPGTRPGRALSPQVESSWLRSPFHSMTTLTLIVARANNGVIGRDNQLPWRLPEDLAFFKRTTMGAPIIMGRKTHESIGRPLPGRRNIVVTRDATRRFQGCDAATTLADALKLAAQDQAPEAFLIGGAQLYAEGLRQADKLIVTEISADFEGDATFPELDENEWEEVAHETHRADAPNDFDYAFVTYKRKGA

SEQ ID NO: 99497 - protein, 162 aa, Unknown
  Bacterial polypetide isolated from the Sargasso Sea
MISMIAAMAHDRVIGLDNQMPWHLPADLAHFKRVTLGKPVLMGRKTFESIGRPLPGRRNLVISRNPDYRADGVEVIDSVEAALALLAGSDVAELMVIGGGHLYGQLLPRADRLYLTRIDLAVEGDTRFPAFDEGDWSCIERESHQPDEKNPHPYCFETWQRR

SEQ ID NO: 99498 - protein, 308 aa, Unknown
  Bacterial polypetide isolated from the Sargasso Sea
GEAHFFIYFGQNQVSIGYVVHLNYTNPYVSPFDEFQQYKTHPSVKKVLEGGKRISYGARAITAGGYQSVPKLFFPGGALIGCSAGFLNYPKIKGTHNAMESGILAAESIVENFINGNQADDLSNYQEKYKKSKIAKELKKVRNVKPFQSRYGVLLGTILSGLDMWLNTFGLTLPFTLGHIKPDYKTLRKASECKEIIYPKPDGEFSFDKLSSVFLSSTNHEEDQPAHLTLKDSNIPIKVNLVEYDEPAQRYCPAGVYEVLSADENSEPVFQINAQNCVHCKTCDIKDPSQNINWVVPQGGEGPLYGGM

SEQ ID NO: 99499 - protein, 347 aa, Unknown
  Bacterial polypetide isolated from the Sargasso Sea
MEIFANESTVFAEGCRGNLGKQLIKKFGLDKGKDPQHYGIGFKEIWEVDNEHHSEGLVMHTNGWPLPDDTPGGSYMYHAENKQVLLGLVVPLDYKNPHLSPYDEFQRWKTHPSIKKYLKKGKRLSYGARALIKGGLQSLPSMDFPGGHLIGCNAGTLNFSKIKGSHTAMKSGIEAAKVISEKIDGKDVTLDKQLKDTWLYKELYKSRNFNPFFHKFGGLIGAAMNVLDQLIFRGKLPFTLNHPVPDHDCLKEAKDCKKIEYPKYDNEITFDKLSSVYLSNTYHEEDQPCHLVLKDPDLPIMHNLEKYDEPAQRYCPAGVYEVVEENGEKRFQINSQNCIHCKTCDIK

SEQ ID NO: 99500 - protein, 63 aa, Unknown
  Bacterial polypetide isolated from the Sargasso Sea
APEQRYCPAGVYEIVREEDGSNPRLQINAQNCVHCKTCDIKDPGQNIVWVTPEGGGGPNYPNM

SEQ ID NO: 99501 - protein, 176 aa, Unknown
  Bacterial polypetide isolated from the Sargasso Sea
MNPHVLYKELYKTRNFGPALNKYGTILGGAFAFVDQNIMQGRFPFTWHNKNPDHEAISYSKDSEEINYPKPDGIISFDRLSSVFLSSTNHEEDQPSHLKLIDQTVPIKYNLPNYDEPAQRYCPAGVYEVVSDNDTPRFQINAQNCVHCKTCDIKDPTQNIIWTVPEGGGGPNYSGM

SEQ ID NO: 99502 - protein, 313 aa, Unknown
  Bacterial polypetide isolated from the Sargasso Sea
LHEEGLVMHTNGWPLPDDTPGGSYMYHTDKKQILLGLVIPLDYKNPYLSPYDEFQRWKSHPAIKKYLKNGRRISYGARALIKGGLQSLPSMEFPGGYLIGCNAGTMNFSKIKGSHTAMKSGIEAAKVIASNIEGDTKSLDEEVKKSWLYTELYRSRNFNPFFHKFGGLIGAGMNVIDQFIFRGNLPFTLNHPTPDHESLKFAKDCKKIDYPKYDNEITFDKLSSVYLSNTYHEEEQPCHLVLKDPDLPIAKTLELYDEPAQRYCPAGVYEIVEEDGKKRFQINSQNCIHCKTCDIKEPSQNINWVSPEGWWWP

SEQ ID NO: 99503 - protein, 282 aa, Unknown
  Bacterial polypetide isolated from the Sargasso Sea
IVVPLDYANPHLSPYDEFQKWKSHANVKKYLKNGKRLSYGARALIKGGLQSLPSMEFPGGYIVGCNAGTMNFSKIKGSHTAMKSGMEAAKVIAANINGENKSLDAEIKNSWLYTELYKSRNFGPFFHKFGGLIGAAFNAIDQFIFRGNLPFTLNHPVPDHECLKPAKDCKKIEYPKYDNEFTFDKLSSVYLSNTYHEEEQPCHLVLKDITIPIEKNLELYDEPAQRYCPAGVYEVVEEDGAKRFQINSQNCVHCKTCDIKEPSQNIDWVSPEGGGGPNYPNM

SEQ ID NO: 99504 - protein, 306 aa, Unknown
  Bacterial polypetide isolated from the Sargasso Sea
LNGDTSGGAFMYHIENNQVVVGLIVDLNYTNPHLSPFDEFQRMKHHPVFKQVLEGGERIAYGARAIAKGGLHSLPKMHFTGGLLVGCDAGTLNFAKIKGNHTAMKSGMIAAEVIFEALENEQANTDLVNYHTQFEQSWAYKELYQSRNFGPVMHKLGKFLGGAYNTLDQNVFNGALPFTFKDDVPDYSTLVDANIAEKIAYPKPDGSLSFDKLSSVFLSNTNHEESQPCHLKLKNAAIPIKVNLVKFDEPAQRYCPAGVYEVQEIEGNNEFVINAQNCVHCKTCDIKDPSQNITWVTPEGAGGPNY

SEQ ID NO: 99505 - protein, 229 aa, Unknown
  Bacterial polypetide isolated from the Sargasso Sea
MFMPGALLVGCDAGTLNMPKIKGSHTAMKSGMIAAETINEHLKENKDLSIFDQKFKNSWLYKELFEARNVKPSFGWGLILGIIFTGIDQILFRGKLPFTLKHKHADHETLKPAKDMPKIDYPKYDNVLTFDKTSSVYLTGTNHADNQPVHLKLKDPNLPINYTLEKFDEPAQRYCPAGVYEVQKENDANKFVINSQNCIHCKTCDIKEPSQNIVWVTPEGGGGPKYGNM

SEQ ID NO: 99506 - protein, 226 aa, Unknown
  Bacterial polypetide isolated from the Sargasso Sea
PGGLLIGCNAGTLVFSKIKGSHTAMKSGELAGEYTYNKLHGVEQDVYDKQIEKSWINKELYKSRNFGPLFHKFGALFGAAFNVIDQLIFRGNLPFTLNHPIPDHACLKKADELPKIDYPKPDGIYSFDKLSSVYLSNTNHEEDQPCHLQLRDSSIPISVNLPMYDEPAQRYCPAGVYEVVKKNGENKFVINAQNCVHCKTCDIKDPSQNITWVSPEGPGGPNYPNM

SEQ ID NO: 99507 - protein, 222 aa, Unknown
  Bacterial polypetide isolated from the Sargasso Sea
LVGCDAGTLNMPKIKGSHTAMKSGIIAAETIFESLIENKELSVFEEKFKKSWLYEELYKARNVKPSFSWGLILGIIFTGIDQILFRGRLPFTLKHKHADHETLLSANEMPKIDYPKPDNVITFDKTSSVYLTGTNHADNQPVHLKLKDPNLPISYTLEKFDEPAQRYCPAGVYEIQKENDINKFVINSQNCIHCKTCDIKEPSQNITWVTPEGGGGPKYGNM

SEQ ID NO: 99508 - protein, 252 aa, Unknown
  Bacterial polypetide isolated from the Sargasso Sea
TGGKRISYGARALIEGGLQSLPKMYMPGALLVGCDAGTLNMPKIKGSHTAMKSGMIAAETIIEYVKENKELSGYEKKFKNSWVYKELHAARNVKPSFSWGLILGIIFTGIDQILFRGKLPFTLKHKHADHETLKPANEMPKIDYPKYDNVLTFDKTSSVYLTGTNHADNQPVHLKLKDPNLPISYTLEKFDEPAQRYCPAGVYEVQKENDINKFVINSQNCIHCKTCDIKEPSQNITWVTPEGSGGPKYGNM

SEQ ID NO: 99509 - protein, 217 aa, Unknown
  Bacterial polypetide isolated from the Sargasso Sea
GTLNMPKIKGSHTAMKSGIIAAETINDYLSKSVSLAAYEDKFKSSWLYKELFSARNVKPSFNWGLIPAIIFTGIDQIIFRGKLPFTLKHKHADHEALQLAKDSKKIDYPKYDGIFTFDKTSSVYLTGTNHEADQPVHLQLKDKELPIKFTLNAYDEPSQRYCPAGVYEIDKTDIQNPKFVINAQNCIHCKTCDIKEPSQNINWVVPEGSGGPNYANM

SEQ ID NO: 99510 - protein, 221 aa, Unknown
  Bacterial polypetide isolated from the Sargasso Sea
GCDAGTLNMPKIKGSHTAMKSGIIAGETIVDHLTNSRPLSEFEKKFTKSWLYKELHAARNVKPSFNWGLIPAIIFTGIDQIIFRGKLPFTLKHKHADHQSLKLAKDSKKIEYPKYDGVYTFDKTSSVYLTGTNHEADQPVHLKLKDNDLPINYTLNKYDEPAQRYCPAGVYEVDKTNPALPKFVINAQNCIHCKTCDIKEPSQNITWVVPEGSGGPNYANM

SEQ ID NO: 99511 - protein, 238 aa, Unknown
  Bacterial polypetide isolated from the Sargasso Sea
KEGYKVYPKMYMPGALLVGCDAGTLNMPKIKGSHTAMKSGMIAAETIYEHLSKNLNLSTYELKFKESWVYKELYQARNVKPSFSWGLILGILFTGIDQILFKGKLPFTLNHKHADHEALKPAAEMPKIEYPKPDNVFTFDKTSSVYLTGTIHDDNQPVHLKLKDPNLPINYTLEKYDEPAQRYCPAGVYEVQTVNSEQKFVINAQNCIHCKTCDIKEPSQNITWVTPEGGGGPKYGNM

SEQ ID NO: 99512 - protein, 257 aa, Unknown
  Bacterial polypetide isolated from the Sargasso Sea
IKKIIEGGKRISYGARALIEGGFQSLPKMFMPGALLVGCDAGTLNMPKIKGSHTAMKSGIIAAETINEHLKENKDLSIYEDKFKNSWLHKELYEARNVKPSFSWGLILGIIFTGIDQILFRGKFPFTLKHKHADHETLKPANQMPKIDYPKYDNVITFDKTSSVYLTGTNHADNQPVHLKLKDPDLPINYTLEKFDEPAQRYCPAGVYEVQKENDVNKFVINSQNCIHCKTCDIKEPSQNITWVTPEGSGGPRYGNM

SEQ ID NO: 99513 - protein, 194 aa, Unknown
  Bacterial polypetide isolated from the Sargasso Sea
VFEAISQDKVEASTYHEKLHDSWLWSELYRVRNIRPSFSKGFVPGMIYSALDTYIFKGNAPWTFRHHADHLQLKEAKLCKKIDYPKPDNVVSFDRNSSVYLSSTNHEENQPAHLKLIDNTIPIDVNLEKYDSPEQRYCPAGVYEIVQAEDNSDPYLQINAQNCVHCKTCDIKDPTQNISWVTPEGGGGPNYPNM

SEQ ID NO: 99514 - protein, 197 aa, Unknown
  Bacterial polypetide isolated from the Sargasso Sea
IAAETINDHIVSGKDLSIYGEKFKNSWLYKELHEARNVKPSFGWGLILGIIFTGIDQILFRGKLPFTLKHKHADHETLKPANEMPKIEYPKPDNIITFDKTSSVYLTGTNHADNQPVHLQLKDPNLPINYTLEKFDEPAQRYCPAGVYEIQKENDVNKFVINSQNCIHCKTCDIKEPSQNITWVTPEGGGGPKYGNM

SEQ ID NO: 99515 - protein, 263 aa, Unknown
  Bacterial polypetide isolated from the Sargasso Sea
HTAGWPLDNATYGGSFCYHAENKQIFLGYVIGLDYKNPYLSPYDEFQKFKTHPAIKKILTNGKRIAYGARALIEGGIQSLPKMYMPGALLVGCDAGTLNMPKIKGSHTAMKSGIIAAETINDYLNKSAPLSLYEDKFKSSWLYKELFAARNVKPSFNWGLIPAIIFTGIDQIIFRGKLPFTLKHKHADHEALQLAKDSKKIDYPKYDGIFTFDKTSSVYLTGTNHEADQPVHLQLKDKELPITFTLNAYDEPSQRYCPAGVYE

SEQ ID NO: 99516 - protein, 232 aa, Unknown
  Bacterial polypetide isolated from the Sargasso Sea
LPKMEFPGGLLIGCNVGTLVFSKIKGSHTAMKSGELAGEYTYNKLHGVEQDVYDKQIEKSWINKELYKSRNFGPLFHKFGALFGAAFNVIDQLIFRGNLPFTLNHPIPDHACLKKADELPKIDYPKPDGIYSFDKLSSVYLSNTNHEEDQPCHLQLRDSSIPISVNLPMYDEPAQRYCPAGVYEVVKKNGENKFVINAQNCVHCKTCDIKDPSQNITWVSPEGPGGPNYPNM

SEQ ID NO: 99517 - protein, 286 aa, Unknown
  Bacterial polypetide isolated from the Sargasso Sea
FLGYVIGLDYKNPHLSPYDEFQRFKTHPAIRKIIEGEKRISYGARALIEGGFQSLPQMFMPGALLVGCDAGTLNMPKIKGSHTAMKSGMIAAETINEHLKDNKDLSIIEQKFKNSWLYKELFEARNVKPSFRWGLILGIIFTGIDQILFRGKMPFTLKHKHADHETLRPAKDMPKIDYPKYDNVLTFDKTSSVYLTGTNHADNQPVHLKLKDPNLPINYTLEKFDEPAQRYCPAGVYEVQKENEVNKFVINAQNCIHCKTCDIKEPSQNIIWVTPEGGGGPKYGNM

SEQ ID NO: 99518 - protein, 214 aa, Unknown
  Bacterial polypetide isolated from the Sargasso Sea
LNMPKIKGSHTAMKSGMIAAETINEHLKENKDLSIFDQKFKNSWLYKELFEARNVKPSFSWGLILGIIFTGIDQILFRGKLPFTLKHKHADHETLKPAKDMPKIDYPKYDNVLTFDKTSSVYLTGTNHTDNQPVHLKLKDPNIPINYTLEKFDEPAQRYCPAGVYEVQKENDANKFVINSQNCIHCKTCDIKEPSQNIVWVTPEGGGGPKYGNM

SEQ ID NO: 99519 - protein, 213 aa, Unknown
  Bacterial polypetide isolated from the Sargasso Sea
VFSKIKGSHTAMKSGEVAGQHIFEELQESSNESYDSRIKNSWIYDELYKSRNFGPFFHKYGALIGAAFNAVDQFIFRGKLPFTLNHPTPDYACLKKADEMPKIEYSKPDGIYSFDKLSSVYLSNTNHEEDQPCHLQLKDSSIPISVNLPMYDEPAQRYCPAGVYEVVEKDNEKKFVINAQNCVHCKTCDIKDPSQNINWVTPEGPGGPNYPNM

SEQ ID NO: 99520 - protein, 209 aa, Unknown
  Bacterial polypetide isolated from the Sargasso Sea
IKGSHTAMKSGMIAADTINEHLKENKDLSIYENKFKNSWLYKELYEARNVKPSFSWGLILGIIFTGIDQILFRGKLPFTLKHKHADHETLKPANQMPKINYPKYDNVITFDKTSSVYLTGTNHTDNQPVHLKLKDPDLPINYTLEKFDEPAQRYCPAGVYEVQKENDINKFVINSQNCIHCKTCDIKEPSQNITWVTPEGSGGPRYGNM

SEQ ID NO: 99521 - protein, 269 aa, Unknown
  Bacterial polypetide isolated from the Sargasso Sea
YPGFPASEVLFNDRGAVKGVATGEMGRGREGEPKAAYEPGMELHAKYTVFAEGCRGHLGKQLIKQYALDHDASPQHYGIGLKELWRIDPALHQPGLVVHGAGWPLSEQGASGGAFLYHLEDCQVALGLIVDLNYDNPYLSPFDELQRFKTHSKIAPTLAGGERLSYGARAITKGGFNSLPKMSLPGAFIVGCDAGTLNFAKIKGTHTAMKSGMLAADTIMEVLPDGDPGGKDHTHYDSHLRSSWLYPELKVARNFGPALHKFGPYIGGA

SEQ ID NO: 99522 - protein, 242 aa, Unknown
  Bacterial polypetide isolated from the Sargasso Sea
RALIKGGLQSLPKMEFPGGLLVGDNAGTLNFSKIKGSHTAMKSGILAGEHIFESLQNTVTKTFDEKINNSWIYDELYKSRNFGPIFHKFGAFIGAALNAIDQFIFRGNLPLTLNHPTPDHACMKESNKMPKIDYPKPDGIYSFDKLSSVYLSNTNHEEDQPCHLQLKDSSIPISINLPMYDEPAQRYCPAGVYEVVEKNNEHKFVINGQNCVHCKTCDIKDPSQNINWVTPEGPGGPNYPNM

SEQ ID NO: 99523 - protein, 322 aa, Unknown
  Bacterial polypetide isolated from the Sargasso Sea
ALNELIPDWKEKNCPLNVPVKKDKLMFLFKKFGISIPSFVMPPMNNHGNYVTSLGNLCRWLATQAEDMGIEIFPGFPASEILYENDKVVGVRTGDMGVGQDGEQKPGFEAGIDIKAKYTIFGEGCRGHLGKQLIAKYELDKDKDPQHYGIGFKEVWKIKDEVHEEGLVIHTNGWPSAKNTPAGSYLYHADNNEVYLGYVVPLDYENPHLSPFDEFQTWKTHPSIKPYLEGGERLTYGARALIKGGIQSLPSMEFPGGVLVGDNAGTLNFSKIKGSHTAMKSGMLAAEAIFNNIDSEGTLQFDEMIAGSWIHAELHKSRNFGP

SEQ ID NO: 99524 - protein, 260 aa, Unknown
  Bacterial polypetide isolated from the Sargasso Sea
DVKKLLQGGKRISYGARALIEGGLQSLPQMHMPGALLIGCDAGTLNMPKIKGSHTAMKSGIIAAEVIENHISKNEDLSSYEDKFKNSWVHKELHQARNVKPSFQWGLIPAMIFTGIDQKLFGGKLPFTLQHKHADHETLIPAKDAKKITYPKYDGVLTFDKPSSVYLSGTNHSDDQPCHLLLNDKDLSTTYTIEEYDEPAQRYCPAGVYEVEFDEEIQKKVLKINSQNCIHCKTCDIKEPSQNIEWVTPEGGGGPIYSGT

SEQ ID NO: 99525 - protein, 225 aa, Unknown
  Bacterial polypetide isolated from the Sargasso Sea
GALLVGCDAGTLNMPKIKGSHTAMKSGMIAAETIHEHFKDNKDLSVFEEKFNNSWLKKELYEARNVKPSFSWGLILGIIFTGIDQILFRGKLPFTLKHKHADHETLKLAKEMPKIDYPKPDNVITFDKTSSVYLTGTNHTDNQPVHLKLKDPDLPIKYTLEKFDEPAQRYCPAGVYEVQKENNIHKFIINSQNCIHCKTCDIKEPSQNITWVTPEGGGGPKYGNM

SEQ ID NO: 99526 - protein, 212 aa, Unknown
  Bacterial polypetide isolated from the Sargasso Sea
MPKIKGSHTAMKSGILAAEAINEHIQSKKDLSLYEELFKKSWLYKELYQARNVKPSFSWGLILGIIFTGIDQILFRGKLPFTLRHKHADHETLKPADKMPKIDYPKPDNVITFDKTSSVYLTGTNHEDNQPVHLQLKDKDLPIKYTLEKYDEPAQRYCPAGVYEVQKENNINKFVINAQNCIHCKTCDIKEPSQNIIWVTPEGGGGPKYGNM

SEQ ID NO: 99527 - protein, 276 aa, Unknown
  Bacterial polypetide isolated from the Sargasso Sea
LCRWLAQQAENLGVEIYPGFAAQEALIDENGVVRGIVTGDLGVDREGNPKEGYYTPGMELRAKYTLFAEGCRGHIGKQLIKKYNLDSEADAQHYGIGIKEIWDIDPAKHEQGLVVHTAGWPMDIMGTENTGGSFLYHLENNQVVVGLIIDLSYANPHLSPFDEFQRYKHHPVIAKYLEGGKRVAYGARAICKGGINSLPKMVFPGGALIGCDLGTLNFAKIKGSHTAMKSGMLAADAIAEALAAGREGGDELNNYVDGFKASWLYDELFRSRNFGA

SEQ ID NO: 99528 - protein, 75 aa, Unknown
  Bacterial polypetide isolated from the Sargasso Sea
DPDVPMSYNYPEFSGPEERYCPAGVYEYVLVENNTKLQINAQNCVHCKTCDIKDPSQNINWIVPEGGGGPNYPNM

SEQ ID NO: 99529 - protein, 271 aa, Unknown
  Bacterial polypetide isolated from the Sargasso Sea
YDEFQRFKTHSAISKFLKGGKRLSYGARALIEGGIQSLPQMYMPGGLLIGCDAGTLNMPKIKGSHTAMKSGILAAESAYDFIKNKTPLSSYEKKFNNSWAYKELYLARNVKPSFNWGLIPAIIFTGLDQVIFRGKLPFTLKHPHADHETLIPANKAKKIQYPKYDNILTFDKTSSVYLTGTNHEENQPVHLQLKDQNLPISYCLEKYDEPSQRYCPAGVYEIQKDSEELNPKFVINAQNCIHCKTCDIKEPSQNINWVTPEGAGGPNYANM

SEQ ID NO: 99530 - protein, 286 aa, Unknown
  Bacterial polypetide isolated from the Sargasso Sea
FLGYVIGLDYKNPHLSPYDEFQRFKTHPAIKKIIEGGKRISYGARALIEGGFQSLPKMFMPGALLVGCDAGTLNMPKIKGSHTAMKSGLIAAETINEHLKENKDLSIYEDKFKNSWLYKELYEARNVKPSFSWGLILGIIFTGIDQILFRGKLPFTLKHKHADHETLKPANQMPKIDYPKYDNIITFDKTSSVYLTGTNHADNQPVHLKLKDPDLPINYTLKKFDEPAQRYCPAGVYEVQKENDVNKFVINSQNCIHCKTCDIKEPSQNITWVTPEGSGGPRYGNM

SEQ ID NO: 99531 - protein, 255 aa, Unknown
  Bacterial polypetide isolated from the Sargasso Sea
KIIEGGKRISYGARALIEGGFQSLPKMFMPGALLVGCDAGTLNMPKIKGSHTAMKSGMIAAETINEHLKENKNLSIYEEKFKNTWLHKELYQARNVKPSFSWGLILGIIFTGIDQILFRGKLPFTLKHKHADHETLKPANQMPKIDYPKYDNIITFDKTTSVYLTGTNHADNQPIHLKLKDPDLPIKYTLEKYDEPAQRYCPAGVYEVQNENDVNKFVINSQNCIHCKTCDIKEPSQNITWVTPESNGGPRYGNM

SEQ ID NO: 99532 - protein, 147 aa, Unknown
  Bacterial polypetide isolated from the Sargasso Sea
AFNTLEQNFFNGNLFFTMKDEHKDYAQLKEAKDAKEISYPKPDGVLSFDKLSSVFLSNTNHEEDQPCHLKLKDPSIPLQVNLPKFAEPAQRYCPAGVYEVIEEEGEKRFQINAQNCVHCKTCDIKDPSQNIKWVVPEGAGGPNYPNM

SEQ ID NO: 99533 - protein, 126 aa, Unknown
  Bacterial polypetide isolated from the Sargasso Sea
VPDHACLKEANQMPKIEYPKPDGVISFDKLSSVFLSNTNHEEDQPCHLVLKDPSIPLDINLPKYDEPAQRYCPAGVYEIVEKDGEKSFQINAQNCVHCKTCDIKDPSQNINWVTPEGAGGPNYPNM

SEQ ID NO: 99534 - protein, 301 aa, Unknown
  Bacterial polypetide isolated from the Sargasso Sea
KTYKSFKLRQNSQHQTYGMDLKELWEVKPENSNPGEVFHSIGWPLDNETYGGSFLYHLDKNLVSFGFVIGLDYKNPHLSPYEEFQRFKLHPKIKHIFEGGRRISYGARALNEGGFQSLPKLSFPGGAILGCDAGTLNTPKIKGTHTAMKSGMIASDLVFKELVSESRNDEISNLNKSFMNSWAGQELKNARNVRPSFKYGLKVGMILSGIDQIIFRGKAPWTLKHAEEDHLALKKKDEAKIIKYPKPDGKITFDRLTNVSYTSTYHEENQPCHLKLNDEKLPISNNLLLYDSPEQRYCPAG

SEQ ID NO: 99535 - protein, 311 aa, Unknown
  Bacterial polypetide isolated from the Sargasso Sea
QDKSPQQYGIGFKEIWEIDNSQHEEGLVMHTAGWPLDNATYGGSFCYHAENKQIFLGYVIGLDYKNPYLSPYDEFQKFKTHPAIKKILTNGKRIAYGARALIEGGIQSLPKMFMPGALLVGCDAGTLNMPKIKGSHTAMKSGIIAAETINDYLSKSAPLAAYEDKFKRSWLYKELFAARNVKPSFNWGLIPAIIFTGIDQIIFRGKLPFTLKHRHSDHEALQLAKDSKKIDYPKYDGIFTFDKTSSVYLTGTNHEADQPVHLQLKDKELPIKFTLNAYDEPSQRYCPAGVYEIDKTDIQNPKFVINAQNCI

SEQ ID NO: 99536 - protein, 161 aa, Unknown
  Bacterial polypetide isolated from the Sargasso Sea
MGALFHKYGIALGGLILGIEQFLFRGKMPFTWRHKTPDYACMKKAKEAKKIDYPKPDGVVSFDKLSSVFLSNTNHEEDQPCHLTLKDASIPIAVNLPEYDEPAQRYCPAGVYEVVEKEGEKKFQINAQNCVHCKTCDIKDPSQNIVWVTPEGMGGPNYPNM

SEQ ID NO: 99537 - protein, 230 aa, Unknown
  Bacterial polypetide isolated from the Sargasso Sea
MFMPGALLVGCDAGTLNMPKIKGSHTAMKSGIIAAETINDYLSKSVPLAAYEDKFKRSWLYKELFAARNVKPSFNWGLIPAIIFTGIDQIIFRGKLPFTLKHKHADHESLQLAKDSKKIDYPKYDGIFTFDKTSSVYLTGTNHEADQPIHLQLKDKELPIKFTLNAYDEPSQRYCPAGVYEIDKTDIQNPKFVINAQNCIHCKTCDIKEPSQNINWVVPEGSGGPNYANM

SEQ ID NO: 99538 - protein, 230 aa, Unknown
  Bacterial polypetide isolated from the Sargasso Sea
FPGGAILGCNAGTLNTPKINGTHTAMKSGMIAAQEVFENLQNNIESYELKKLNSNFLKSWAGKELKSARNVRPSFNFGLKIGMILTGIDQLIFRGNAPWTLKHGEPDHEALRSKDKSKKIDYPKPDGVLTFDRLTNVSFSSTYHEENQPCHLKIINEEIPISNNYKIYDSPEQRYCPAGVYEVLFDKEIPKLQINSQNCIHCKTCDIKDPKQNIMWVAPEGGGGPNYTNM

SEQ ID NO: 99539 - protein, 68 aa, Unknown
  Bacterial polypetide isolated from the Sargasso Sea
MVEYDEPAQRYCPAGVYEVLSSDENSEPVFQINAQNCVHCKTCDIKDPSQNINWVVPQGGEGPLYGGM

SEQ ID NO: 99540 - protein, 208 aa, Unknown
  Bacterial polypetide isolated from the Sargasso Sea
GSHTAMKSGIIAAETINDYLYNDSPLSKYEVNFHKSWAYKELYKARNVKPSFSWGLIPAIIFTGIDQIIFRGYLPITLKHSHADHETLLPARKSKKIEYPKYDGKITFDKTSSVYLTGTNHEENQPVHLRLIDENLPIKYTLEEYDEPAQRYCPAGVYEIDRSLEEKPKFIINAQNCIHCKTCDIKEPSQNIKWVTPEGAGGPNYANM

SEQ ID NO: 99541 - protein, 290 aa, Unknown
  Bacterial polypetide isolated from the Sargasso Sea
NKQVFLGYVIGLDYKNPHLSPFDEFQRFKTHPAIRKVISGGKRISYGARALIEGGLQSLPKMYMPGALLVGCDAGTLNMPKIKGSHTAMKSGMIAAETIIENIKENKDLSNYEEKFKNSWVYKELHAARNVKPSFSWGLILGIIFTGIDQILFKGKLPFTLKHKHADHETLKPANEMPKIEYPKYDNVITFDKTSSVYLTGTNHEDNQPVHLKLKDPNLPINYTLEKFDEPAQRYCPAGVYEIQKENDVNKFVINSQNCIHCKTCDIKEPSQNITWVTPEGSGGPKYGNM

SEQ ID NO: 99542 - protein, 268 aa, Unknown
  Bacterial polypetide isolated from the Sargasso Sea
MNSKDLKLIQQYKKIIEGGKRISYGARALIEGGFQSLPKMYMPGALLIGCDAGTLNMPKIKGSHTAMKSGIIAAETINEHIKSEKKLSLYEEKFKKSWLHEELYKARNVKPSFSWGLILGIIFTGIDQILFRGKLPFTLKHKHADHETLKPANEMPKIEYPKPDNKITFDKTTSVYLTGTNHADNQPVHLKLKDPNLPIDYTLQKFDEPAQRYCPAGVYEVQKENEVNKFVINSQNCIHCKTCDIKEPSQNITWVTPEGGGGPKYGNM

SEQ ID NO: 99543 - protein, 326 aa, Unknown
  Bacterial polypetide isolated from the Sargasso Sea
SYDNHGNYVTSLGNLCRWLATQAEDMGIEIFPGFPASEILYENDKVVGVRTGDMGVGLDGEQKPGFEAGIDIKAKYTIFGEGCRGHLGKQLIAKYELDKDKDPQHYGIGFKEVWKIKDEVHAEGLVIHTNGWPSAKNTPAGSYLYHADNNEVYLGYVVPLDYENPHLSPFEEFQTWKTHPSIKKYLEGGERLTYGARALIKGGIQSLPSMEFPGGVIVGDNAGTLNFSKIKGSHTAMKSGMLAAEAIFNNIDSEDTLQFDEMIAGSWIYAELHKSRNFGPMFHKFGALIGAAFNAIDQLIFRGNLPFTLHHTTPDYACLNLQLICR

SEQ ID NO: 99544 - protein, 271 aa, Unknown
  Bacterial polypetide isolated from the Sargasso Sea
CFRARALNELFPDWKERGAPLNTPVTSDQFLFLTQNNSFKLPTPPQMNNHGNFIISLGNLCRWLAEQAEALGVEIYPGFAASEILFSEDGSVKGVATGDMGRGKDGTETENFTPGIELHAKQTIFSEGSRGSLTKILFDKFDLRSDADPQTYAIGIKELWEVEPEKHQKGLALHSVGWPIDGSTYGGSFIYHLEGNQVSVGYVIGLDYKNPHLSPFDEFQRFKTHPKIRPLFEGGRRVAYGARALNEGGFQSIPKLTFPGGLIVGCGAGFL

SEQ ID NO: 99545 - protein, 261 aa, Unknown
  Bacterial polypetide isolated from the Sargasso Sea
THPAISKMLNGGKRISYGARALIEGGIQSLPKMHMPGALLIGCDAGTLNMPKIKGSHTAMKSGLIAAETIVEHLKDKKDLSIYEEKFKKSWAYKELYEARNVKPSFSWGLILGIIFTGIDQILFRGKLPFTLKHKHADHETLKLASEMPVIEYPKPDNVLTFDKTSSVYLTGTNHEDNQPVHLQLKDKELPIKYTLEKYDEPAQRYCPAGVYEVQIENNIPKFVINAQNCIHCKTCDIKEPSQNITWVTPEGSGGPRYGNM

SEQ ID NO: 99546 - protein, 97 aa, Unknown
  Bacterial polypetide isolated from the Sargasso Sea
TDSVYLSGTNHEENQPIHLQIRDSKVPIEHNLKIYDAPEQRYCPAGVYEIISSDEGDVLQINAQNCVHCKTCDIKDPLQNINWVTPEGGGGPNYPNM

SEQ ID NO: 99547 - protein, 289 aa, Unknown
  Bacterial polypetide isolated from the Sargasso Sea
GGSFVYHAENKEVYLGYVIGLDYQNPHLSPFDEFQRFKTHPAISKMLNGGKRISYGARALIEGGIQSLPKMYMPGALLIGCDAGTLNMPKIKGSHTAMKSGLIAAETIVEHLKDKKDLSIYEEKFKKSWVYDELHAARNVKPSFSWGLILGIIFTGIDQILFRGKLPFTLKHKHADHETLKPANKMPVIEYPKPDNILTFDKTSSVYLTGTNHEDNQPVHLQLKDKELPIKYTLEKYDEPAQRYCPAGVYEVQIENNVPKFVINSQNCIHSKTCDIKEPSQNITWVTPE

SEQ ID NO: 99548 - protein, 212 aa, Unknown
  Bacterial polypetide isolated from the Sargasso Sea
PKIKGSHTAMKSGMIAAETINEYITKNISLSEYENKFKNSWVYNELYKARNVKPSFKWSLIPAIIFTGIDQIIFRGYLPFTLKHSHADYESLISARKATKIDYPKYDGKLTFDKTSSVFLTGTNHESDQPVHLKLKQPELPINYTLKEFDEPAQRYCPAGVYEVDRSEDNKPKFVINAQNCIHCKTCDIKEPSQNITWVTPEGAGGPNYANM

SEQ ID NO: 99549 - protein, 277 aa, Unknown
  Bacterial polypetide isolated from the Sargasso Sea
YKNPHLSPFDEFQRFKTHPAIRKIISGGKRISYGARALIEGGLQSLPKMYMPGALLVGCDAGTLNMPKIKGSHTAMKSGMIAAETIIENIKENKDLSNYEEKFKNSWVYKELHAARNVKPSFSWGLILGIIFTGIDQILFKGKLPFTLKHKHADHETLKPANEMPKIEYPKYDNVITFDKTSSVYLTGTNHEDNQPVHLKLKDPNLPINYTLEKFDEPAQRYCPAGVYEVQKENDVNKFVINSQNCIHCKTCDIKEPSQNITWVTPEGSGGPKYGNM

SEQ ID NO: 99550 - protein, 293 aa, Unknown
  Bacterial polypetide isolated from the Sargasso Sea
NHEEGLVMHTAGWPLDNNTYGGSFIYHAQNKQIFLGYVIGLDYKNPHLSPFDEFQRFKTHPAIKKIIHNGKRISYGARALIEGGFQSLPKMFMPGALLIGCDAGTLNMPKIKGSHTAMKSGLIAAEAINEHLKDSKDLSNFEQKFKESWLFEELFKARNVKPSFSWGLIIGIIFTGIDQILFRGKLPFTLKHKHADHETLKSAKEMPKIDYPKPDNVITFDKTSSVYLSGTNHAENQPIHLQLKDPNLPISYTLEEYDEPAQRYCPAGVYEVQRENGVNKFVINSQKLHPIVK

SEQ ID NO: 99551 - protein, 282 aa, Unknown
  Bacterial polypetide isolated from the Sargasso Sea
VIGLDYQNPHLSFFDEFQRFKTHPDIKKIIEGGKRITYGARALIEGGIQSLPQMFMPGALLVGCDAGTLNMPKIKGSHTAMKSGMIAAETIYEHLTKNLNLSTYEQKFKESWVYKELHEARNVKPSFSWGLILGILFTGIDQILFRGKLPFTLKHKHADHEALKPADKMPKIDYPKPDNVITFDKTSSVYLTGTIHDDNQPVHLKLKDPDLPIKYTLEKFDEPAQRYCPAGVYEVQEVNSVQKFVINAQNCIHCKTCDIKEPSQNITWVTPEGGGGPKYGNM

SEQ ID NO: 99552 - protein, 372 aa, Unknown
  Bacterial polypetide isolated from the Sargasso Sea
ELRGKYTVFAEGCRGHLGKELIARFELDKDCSPQHYALGFKEIWDVPAEQHQQGLVVHSAGWPLQQDTSGGGYLYHAEGQQVVVGLIVDLNYSNPHLSPFEEFQRYKQHPVIKQYLQGGKRVSYGARAIAKGGLNSLPKMTFPGGVLVGCDAGTLNFAKIKGNHTAMKSGMLAAETIFAALQQDKTGADLTEFAEHFKQSWLFDELFRSRNFGPAMHKFGSFWGGAFNTLDQNIFAGKLPFTLKDNTVDHLTLRTAAEAPKIKYAKPDNQLSFDRLSSVYLSNTNHEEDQPCHLKLADASIPVTVNLALYDEPAQRYCPAGVYEIIEENNQPRLQINAQNCIHCKTCDIKDPRQNITWVTPEGAGGPNYPNM

SEQ ID NO: 99553 - protein, 237 aa, Unknown
  Bacterial polypetide isolated from the Sargasso Sea
GGLQSLPKMDFPGGLLIGCNAGTLVFSKIKGSHTAMKSGELAGKHAFDKIHNNIETSFDSVIKESWIYNELYKSRNFGPIFHKFGALLGAAINVIDQFIFRGNMPITMRHATPDYACLKKANEMPKIEYEKPDGIYSFDKLSSVYLSNTNHEEDQPCHLQLKDPSIPILVNLPMYDEPAQRYCPAGVYEVVEKNNEKKFVINAQNCVHCKTCDIKDPSQNINWVSPEGPGGPNYPNM

SEQ ID NO: 99554 - protein, 533 aa, Unknown
  Bacterial polypetide isolated from the Sargasso Sea
MEVNRESMEYDVVIVGAGPSGLATAIKIKQLNPETNVCILEKGSEVGAHILSGNVFETRALDELIPDWKIKNAPIKTKVKKEKFLFLSNNSSLSWPTWLLPSVQKNHNNYIISLANLCRWLATEAENLGVEIFPGFAASKILFSDDDQIIGVQTGDMGVDKEGNKKESFEPGINIMAKVTVLAEGCRGHLGKELIKKYNLSKGKSPQQYGIGFKEIWEVEESQHDEGLVMHTAGWPLDNSTYGGSFCYHADSRQVFLGYVIGLDYKNPYLSPYDEFQKFKTHPSIKKILTNGKRIAYGARALIEGGIQSLPKMYMPGALLVGCDAGTLNMPKIKGSHTAMKSGILAAETIIDYLNKSIPLSSYEKKFKKSWLYTELFTARNVKPSFNWGLIPAIIFTGIDQIIFRGRLPFTLKHKHSDHESLQSAKNSKQIDYPKYDGVFTFDKTSSVYLTGTNHEADQPVHLQLKDKDLPISYTLNEYDEPSQRYCPAGVYEVDKTDPEVPKFIINAQNCIHCKTCDIKEPSQNITWGCTRG

SEQ ID NO: 99555 - protein, 549 aa, Unknown
  Bacterial polypetide isolated from the Sargasso Sea
MERESMEFDVVIVGAGPAGLATACRLMQISQSSGKEITVCVVEKGSEVGAHILSGAVFEPRVLDELFSDWRDSGAPVTTAVTHDEIYLLNSATDSKLMPNAFVPKTMHNEGNYIVSVGNLCRWLATRAEALGVEIFPGFAASELLFNEDNSVKGILIGDMGVGADGQPKDSFMPGMELHAKYTVFSEGCRGHLGKQLIAKYHLDNGKTPQHYGLGFKEIWKVPAEQHEQGKVVHTGGWPLTDGASGGGFLYHMEDNQIAVGLIIDLNYKNPHLSPFDEFQRYKTHPVIAKYLTGSERLTYGARAITKGGLNSLPKMSFPGGLLIGCDAGTLNFAKIKGTHTAMKSGIVAAETLAKAMLAEVEGGKDLDCFQTHLEESWLHEELYKSRNFGPAMHKFGTFLGGAFNYIDQNWFGGKFPITLRDEHPDYAQMAPVSAYNKIDYPKPDGKLSFDKLSSVYLSSTYHEEDQPCHLRLKDNSIPLGINLTQFNEPAQRYCPAGVYEIVEEAGQPKFVINAQNCIHCKTCDIKDPSQNITWVTPEGGGGPNYPNM

SEQ ID NO: 99556 - protein, 293 aa, Unknown
  Bacterial polypetide isolated from the Sargasso Sea
MAENKQVFLGYVIGLDYKNPHLSPYDEFQRFKTHPEIKKILEGGKRISYGARALIEGGFQSLPKMFMPGALLIGCDAGTLNMPKIKGSHTAMKSGIIAADTINEHLKENKDLSIYEDKFKNSWLHKELYQARNVKPSFSWGLILGIIFTGIDQILFRGKLPFTLKHKHADHETLKPANQMPKIDYPKYDNVITFDKTSSVYLTGTNHADNQPVHLKLKDPDLPINYTLEKFDEPAQRYCPAGVYEVQKENDVNKFVINSQNCIHCKTCDIKEPSQNITWVTPEGSGGPRYGNM

SEQ ID NO: 99557 - protein, 540 aa, Unknown
  Bacterial polypetide isolated from the Sargasso Sea
MHRETMEYDVVIVGGGPSGLAASIKFAQLNKKNNTNYSICLLEKGSEIGAHILSGNVFQPNALDELIPNWKELNAPLNVPVKKDKIMYLLKNIGIPVPSFLMPTMNNHGNYVISLGNLCRWLSEQAESLGVEVFPGFPASKLIIENDEVVGVQTGDMGISESGDLKPGHEAGIEIRAKYTVLGEGCRGHLGKQIIEKYKLSDNKDPQHYGIGFKEVWKIDPKLHQEGLVIHTNGWPCSDIAAGSYFYHGENNEAYLGYVIPLDYKNPHLSPFDEFQRWKTHPSIKKYLEGGERLSYGARALIKGGLQSLPKMQFPGGLLIGCNAGTMVFSKIKGSHTAMKSGEIAGEHIFESLQGNINDDYDSKIEKSWIYKELFRSRNFGPLFHKYGALIGAAMNVIDQFIFRGNLPFTLNHPTPDYACLMKADEMKKIEYPKPDGIYSFDKLSSVYLSNTNHEEDQPCHLQLKDSSIPISVNLPMYDEPAQRYCPAGVYEVVEEENEKKFVINAQNCVHCKTCDIKDPSQNINWVTPEGPGGPNYPNM

SEQ ID NO: 99558 - protein, 425 aa, Unknown
  Bacterial polypetide isolated from the Sargasso Sea
LCRWLAEQAEALGVEIFPGFPASEILYKEDGSVKGVITQDMGLDKEGNKKDGYEPGMELHAKVTVFAEGCRGHLGKQLIKKFDLDKGKDPQQYGIGFKEIWKIDEKNHQEGLVMHTAGWPLDKNTYGGSFIYHAENKEVYLGYVIGLDYKNPHLSPFDEFQRFKTHPAIRKMLDGGKRISYGARALIEGGFQSLPKMFMPNALLIGCDAGTLNMPKIKGSHTAMKSGIVAAETIIEHLNDAKDLSIYEEKFKKSWVYKELFEARNVKPSFSWGLILGIIFTGIDQIIFRGKLPFTLKHKHADHETLKPANEMPVIDYPKPDNVITFDKTSSVYLTGTNHTDNQPVHLKLKDKDLPIRYTLDRFDEPAQRYCPAGVYEVQVENDVPKFVINSQNCIHCKTCDIKEPSQNITWVTPEGSGGPRYGNM

SEQ ID NO: 99559 - protein, 459 aa, Unknown
  Bacterial polypetide isolated from the Sargasso Sea
CVVEKGSEVGAHILSGNVFDPKALNELIPDWKELGAPLNTPVKKDSVRYLINESSNFSIPTLFATTFKNHGNYIMSLGNFCRWLGEYAEGLEIDIFPGFTASQLIFDNETVIGVSTGDMGIDSSGEKKPSFEPGIDLLAKYTVLSEGCRGHLGKQVINRFNLDRDSDPQHYGIGFKEVWDIKPDLHEEGLVVHTMGWPAAKGVLSGSYFYHGENNQAFLGYIVPLDYDNPHISPFDEFQQWKHQTSIKKYLEGGTRTAYGARALIKGGYQSIPKMHFPGGLLVGDDAGTMNFPRIKGTHTAMKSGMIGAESIYEEFFQEESKKDLANFKTNLESSWLEKELHKARNFLPFIHKFGTLLGVAFAGMDQLIFRGKLPFTLHHDEPDHQCLKEADQMPKIEYPKPDGVISFDKLSSVFLSNTNHEEDQPCHLVLKDPSIPIDVNLPKYDEPAQRYCPAGVYE

SEQ ID NO: 99560 - protein, 542 aa, Unknown
  Bacterial polypetide isolated from the Sargasso Sea
MERESMDYDVVIIGGGPSGFGTAIKLAQIFKETNQDKTICVLEKSAEIGGHILSGNVFQTTALDELIPDWKDKDAPIKVEAKKDILKFLVNEKFSFSIPSFLMPTMQNHGNYIISLGNLCRWLAEQAEALGVDVFPGFPAAEIIYKDDRVAGVITGDMGVDAEGNPKDSFQPGMEIIANEATVFAEGCRGHLGKELIKKFALDEGKDPQHYGIGFKEIWEVDNDLHEEGLVMHTNGWPLPNDTPGGSYMYHAENKQILLGIVVPLDYSNPHLSPYDEFQKWKSHAAIKKYLKNGKRLSYGARALIKGGLQSLPSMEFPGGYLVGCNAGTMNFSKIKGSHTAMKSGMEAAKVIAANINGENKSLDAEIKNSWLYTELYKSRNFGPFFHKFGGFIGAAFNAIDQFIFRGNLPFTLNHPVPDHECLKPAKDCKKIEYPKYDNEVTFDKLSSVYLSNTYHEEEQPCHLVLKDITIPIEKNLELYDEPAQRYCPAGVYEVVEEAGSKRFQINSQNCVHCKTCDIKEPSQNIDWVSPEGGGGPNYPNM

SEQ ID NO: 99561 - protein, 485 aa, Unknown
  Bacterial polypetide isolated from the Sargasso Sea
ALDELIPNWKELNSPISTPVTSEDFLFYTKTKSMKVPNFFLPNVLKNHGNYIISLSNLCKWLGEFAENLGVEIFPGFAASKLLYDNEQKVIGVQTGDMGLDKDFKPKDNYEPGINIKGKVTVLSEGCRGHLGKEVLKKFNLDSNNKSPQQYGIGFKEIWEINSENHQLGKVSHSVGWPLESDTYGGSFCYHAENNQIYLGYVIGLDYKNPYLSPYDEFQQFKTHPDIKKLLDGGKRISYGARALIEGGLQSLPQMYMPGALLIGCDAGTLNMPKIKGSHTAMKSGIIAAEVINDHINSNKELSEYESKFKNSWVFEELYKARNVKPSFQWGLIPAMIFTGLDQKIFGGKLPFTLQHKHADHESLIPAKKAKKITYPKYDGVITFDKPSSVYLSGTNHADDQPNHLLLNDKDLSTNFTIEEYDEPAQRYCPAGVYEVEFDNDLQKKILKINSQNCIHCKTCDIKEPSQNIEWVTPEGGGGPIYSGT

SEQ ID NO: 99562 - protein, 542 aa, Unknown
  Bacterial polypetide isolated from the Sargasso Sea
MARESMDYDVVIVGGGPSGLSAAIKLAQLFKEKKQEKSICVLEKSAEIGGHILSGNVFETTALDELIPDWKEKNAPLNVPVKKDAIKFLLNDKLSIPVPSFLMPTMNNHGNYIISLANLCRWLAEQAESLGVDIFPGFPAAEIIYKEGKVAGVITGDMGKDSKGNEKDSFQPGMEIFANESTVFAEGCRGNLGKQLIKKFELDKGKDPQHYGIGFKEIWEVDNEHHSEGLVMHTNGWPLPDDTPGGSYMYHAENKQVLLGLVVPLDYKNPHLSPYDEFQRWKTHPSIKKYLKKGKRLSYGARALIKGGLQSLPSMDFPGGHLIGCNAGTLNFSKIKGSHTAMKSGIEAAKVISEKIDGKDVTLDKQLKETWLYKELYKSRNFNPFFHKFGGLIGAAMNVLDQLIFRGKLPFTLNHPVPDHDCLKEAKDCKKIEYPKYDNEITFDKLSSVYLSNTYHEEDQPCHLVLKDPDLPIMHNLEKYDEPAQRYCPAGVYEVVEENGEKRFQINSQNCIHCKTCDIKEPSQNINWITPEGGGGPNYPNM

SEQ ID NO: 99563 - protein, 539 aa, Unknown
  Bacterial polypetide isolated from the Sargasso Sea
MSRESMEYDVVIIGGGPSGLSTAIKLKQLDPNLNVCILEKASEIGAHILSGNVFETRALDELLPNWRELNSPIKTKVTKEKFLFLGKTKSLSWPTWLLPAVQQNHKNYIISLANLCRWLAEQAENLGVEIFPGFPASEVLYNDDGSVKGVATQDMGIDKEGNKKDSFEPGIELLGKVTVFAEGCRGHLGKELIQKFDLNKGKDPQQYGIGFKEIWEIDENNHEEGLVMHTAGWPLDNSTYGGSFMYHAENKQIFLGYVIGLDYKNPHLSPYDEFQKFKTHPAIKKIIEGGKRISYGARALIEGGFQSLPQMFMPGALLVGCDAGTLNMPKIKGSHTAMKSGMIAAETINEHLKENKDLSIFDQKFKNSWLYKELFEARNVKPSFSWGLILGIIFTGIDQILFRGKLPFTLKHKHADHETLKPAKDMPKIDYPKYDNVLTFDKTSSVYLTGTNHADNQPVHLKLKDSNLPINYTLEKFDEPAQRYCPAGVYEVQKENDVNKFVINSQNCIHCKTCDIKEPSQNIVWVTPEGGGGPKYGNM

SEQ ID NO: 99564 - protein, 541 aa, Unknown
  Bacterial polypetide isolated from the Sargasso Sea
MHRETMEYDVVIVGGGPSGLAAAIKLGQLNKEHNANLEICLLEKGSEIGAHILSGNVFQPNALDELIPDWHTLSAPLNTPVKKDKLLFLLKNIGIPIPTFVMPPMNNHGNYVISLGNLCRWLGQQAENLGIEIFPGFPASKLLFENDKVVGVQTGDMGISESGELKPGHEPGIEIRAKYTILGEGCRGHLGKQIINKYNLSDGKDPQHYGIGFKEVWKLDKNLHEPGLVIHTNGWPTSFDTASGSYFYHGENDEAYIGYVVPLDYKNPHLSPFDEFQMWKTHPSIKKYLKGGERISYGARALIKGGLQSLPKMEFPGGLLVGDNAGTLNFSKIKGSHTAMKSGILAGEHIFNSLQNNVTKTFDVIINNSWIYDELYKSRNFGPIFHKFGAFLGAALNAIDQFIFRGNLPLTLNHPTPDYACMKESNKMPKIDYPKPDGIYSFDKLSSVYLSNTNHEEDQPCHLQLNDSSIPISINLPMYDEPAQRYCPAGVYEVVEKDNEHKFVINGQNCVHCKTCDIKDPSQNINWVTPEGPGGPNYPNM

SEQ ID NO: 99565 - protein, 531 aa, Unknown
  Bacterial polypetide isolated from the Sargasso Sea
MEYDVLIVGAGPAGLSAAIQIKQLSQKSNLDISVCVLEKASEIGAHILSGAVIETSALDKLLPNWKELDSPIKTKVKKDKLSYLGKDWSINFPQFLLPPMMKNHGNYIVSLGNVCKWLSEVAENLGVEIYPGFSAAEVLIDDNGKVYGVATGDMGVSRDGSAKDSWESGMELHAKYTLFSEGARGSLSKFLIDNFNLSEDRDHQKYAIGIKELWEIKDENHQEGLVEHSMGWPLSDGTGGGSFLYHFGQNQVSIGYVVHLNYTNPYVSPFDEFQQYKTHPSVKKVLEGGKRISYGARAITAGGYQSVPKLFFPGGALIGCSAGFLNYPKIKGTHNAMESGILVAESIVENFVNGNQTDDLSNYQEKYEKSKIAKELKKVRNVKPFQSRYGVILGTILSGLDMWLNTFGITLPFTLGHIKPDYKTLRKASECKEIIYPKPDGEFSFDKLSSVFLSSTNHEEDQPAHLTLKDSNIPIKVNLVEYDEPAQRYCPAGVYEVLSADENSEPVFQINAQNCVHCKTCDIKDPSQNIN

SEQ ID NO: 99566 - protein, 450 aa, Unknown
  Bacterial polypetide isolated from the Sargasso Sea
SLSWPTLLLPKVQQNHKNYIISLANLCRWLGGQAESLGVEIFPGFPASEVLYNEDGSVKGIATQDMGLDKQGNKKDSYEPGMELHAKVTVFAEGCRGHLGKELIKKFNLNEGKDPQQYGIGFKEIWEVDEKNHTEGLVMHTAGWPLDNSTYGGSFMYHAENKQIFLGYVIGLDYKNPHLSPFDEFQRFKTHPAIKKIIEGGKRISYGARALIEGGIQSLPKMYMPGALLVGCDAGTLNMPKIKGSHTAMKSGMIAAETIVDHFNLKKTLSLYEEKFKNSWVYKELHEARNVKPSFSWGLILGIIFTGIDQILFRGKLPFTLKHKHADHETLKPANSMPKIEYPKPDNVITFDKTSSVYLTGTNHADNQPVHLKLKDPNLPISYTLEKFDEPAQRYCPAGVYEVQQENNINKFVINAQNCIHCKTCDIKEPSQNITWVTPEGGGGPKYGNM

SEQ ID NO: 99567 - protein, 345 aa, Unknown
  Bacterial polypetide isolated from the Sargasso Sea
KFELNKGKDPQQYGIGFKEIWEIENKNHEEGLVMHTAGWPLDNNTYGGSFMYHAENKQVFVGYVIGLDYKNPHLSPYDEFQRFKTHPAIKKIIEGGKRISYGARALIEGGFQSLPKMFMPGALLVGCDAGTLNMPKIKGSHTAMKSGMIAAETINEHLKENKDLSIYEKKFKNSWLHKELYEARNVKPSFSWGLILGIIFTGIDQILFRGKLPFTLKHKHADHETLKPANQMPKIDYPKYDNVITFDKTSSVYLTGTNHADNQPVHLKLKDPDLPINYTLEKFDEPAQRYCPAGVYEVQKENDVNKFVINSQNCIHCKTCDIKEPSQNITWVTPEGSGGPRYGNM

SEQ ID NO: 99568 - protein, 320 aa, Unknown
  Bacterial polypetide isolated from the Sargasso Sea
EHDEGMVMHTTGWPLDNSDYGGSFCYHAEKNQVFIGYVIGLDYQNPFLSPYDEFQRFKTHPVIAKILKDGKRISYGARALIEGGFQSLPTMHMPGALIVGCDAGTLNMPKIKGSHTAMKSGMIAAETINEYITVNKPLSEYENKFKTSWVYKELYTARNVKPSFQWSLIPAIIFTGIDQIIFRGYLPFTLKHSHADHETLIPAHKAKKIDYPKYDGKLTFDKTSSVYLTGTNHEADQPVHLKLKDPDLPINYTLNEFDEPSQRYCPAGVYEVDRTIQNDPKFVINAQNCIHCKTCDIKEPSQNITWVTPEGAGGPNYANM

SEQ ID NO: 99569 - protein, 237 aa, Unknown
  Bacterial polypetide isolated from the Sargasso Sea
LFFPGGALIGCSAGFLNYPKIKGTHNAMESGMIAAESIVENFISGSDNEDLSNYQEKYENSRIAKELKKVRNVKPFQSRYGALLGTLLSGIDMWLNTFGITLPFTLGHIKPDYKTLRKASECEKIIYPKPDGQFSFDKLSSVFLSSTNHEEDQPAHLTLKDSSIPIKVNLVDYDEPAQRYCPAGVYEVLSSDDNSEPVFQINAQNCVHCKTCDIKDPSQNINWVVPQGGEGPLYGGM

SEQ ID NO: 99570 - protein, 329 aa, Unknown
  Bacterial polypetide isolated from the Sargasso Sea
VEPHKHQKGLTLHSVGWPIDGSTYGGSFIYHLEGNQVSVGYVIGLDYKNPHLSPFDEFQRFKTHPKIKPLFEGGRRISYGARALNEGGFQSIPKLTFPGGLIVGCGAGFLNVPKIKGTHTAMKSGITAAEALEAAFRLQGIEPGAELHDYEERLKKTWLWEELYKVRNIRPGFRAGLTFGLINAGIDTILFRGRAPWTLRNHDDHDSLQLAAHCQKIDYPKPDGVVSFDKPSSVFLSNTNHEENQPVHLRLNDPSIPVDLNLRLYDAPEQRFCPAGVYEIIADEDGDNPQLQINAQNCVHCKTCDIKDTSQNINWVVPEGGGGPNYPNM

SEQ ID NO: 99571 - protein, 480 aa, Unknown
  Bacterial polypetide isolated from the Sargasso Sea
DELIPNWKDLNPPIKTKVTKEKFLFLGKTKSLSWPTWLLPAVQKNHKNYIISLANLCRWLAEQAEALGVEIFPGFPASEILFNDDGSVKGVATQDMGIDKQGNQKDSFEPGIELIGKVTVFAEGCRGHLGKQLIKKFNLNKDKDPQQYGIGFKEIWEIDEKNHEEGLVMHTAGWPLDKNTYGGSFIYHAENKQVFLGYVIGLDYQNPHLSPFDEFQRFKTHPSIKKIIEGGKRISYGARALIEGGIQSLPKMFMPGALLIGCDAGTLNMPKIKGSHTAMKSGILAAEAINEHIQSKKDLSLYEELFKKSWLYKELYQARNVKPSFNWGLILGIIFTGIDQILFRGKLPFTLGHKHSDHETLKPADKMPKIDYPKPDNVITFDKTSSVYLTGTNHEDNQPVHLQLKDEDLPIKYTLEKYDEPAQRYCPAGVYEVQKENDINKFVINAQNCIHCKTCDIKEPSQNIVWVTPEGGGGPKYGNM

SEQ ID NO: 99572 - protein, 539 aa, Unknown
  Bacterial polypetide isolated from the Sargasso Sea
MSRETMEYDVVIVGGGPSGLSTAIKLKQLDPNLNVCLLEKASEIGAHILSGNVFETRALDELLPNWQELNSPIKTKVTKEKFLFLGKKKSLSWPTWLLPSVQQNHNNYIISLANLCRWLAEQAESLGVEIFPGFPANEILYNDNGSVKGVATQDMGIDKDGNKKDSFEPGIELLGKVTVFAEGCRGHLGKKLIKKFELDKNKDPQQYGIGFKEIWEIDEKNHEEGLVMHTAGWPLDNNTYGGSFMYHAENKQVFLGYVIGLDYQNPHLSPFDEFQRFKTHPAIKKIIEGGKRISYGARALIEGGFQSLPKMFMPGALLIGCDAGTLNMPKIKGSHTAMKSGIIAAETIIQNIKEKKDLSIYEDNLKKSWLYEELYKARNVKPSFSWGLILGIIFTGIDQILFRGKLPFTLKHKHADHETLKLASEMPKIDYPKPDNVITFDKTSSVYLTGTNHADNQPVHLQLKDPNLPINYTLEKYDEPAQRYCPAGVYEVQIENGSNKFVINSQNCIHCKTCDIKEPSQNITWVTPEGGGGPKYGNM

SEQ ID NO: 99573 - protein, 492 aa, Unknown
  Bacterial polypetide isolated from the Sargasso Sea
VTAIKLKQLDANLNVCVLEKASEIGAHILSGNVFETRALDELLPNWKDLKSPIKTKVSKEKFLFLGKTKSLSWPTWLLPSVQQNHKNYIISLANLCRWLAEQAEALGVEIFPGFPASEILYDDKGVVKGVVTQDMGIDKEGNKKDSFEPGIELLGKVTVFAEGCRGHLGKQLIKKFELDKGKDPQQYGIGFKEIWEINEENHEEGLVMHTAGWPLDNNTYGGSFIYHAENKQVFLGYVIGLDYKNPHLSPFDEFQRFKTHPAIRKMIQGGKRISYGARALIEGGFQSLPKMYMPGALLIGCDAGTLNMPKIKGSHTAMKSGIIAAETIVEHFKSKKDLSLYEENFKKSWLYEELYKARNVKPSFSWGLILGIIFTGIDQILFRGRLPLTLKHKHADHETLKPANEMPKIEYPKPDNKITFDKTSSVYLTGTNHADNQPVHLQLKDPNLPISYTLEKFDEPAQRYCPAGVYEIQKENDINKFVINSQKLYSIV

SEQ ID NO: 99574 - protein, 322 aa, Unknown
  Bacterial polypetide isolated from the Sargasso Sea
LHKEGTVMHTAGWPANGTVSGSYCYHGKNNQLYMGYVIPLDYKNPYLSPYDEFQQWKHHSGISKLLKDGTRVAYGARALIKGGYQSRPKMSFNGGLIVGDNAGTLNFPKIKGTHTAMKSGMIAAETVFDALENNNIGSDLVIYEDNIQNSWLQKELYKARNFGPLLHMFGNFVGPILAAIDQFIFRGNLPFTLNHPTPDYACLEDASKMSKIDYPKPDGVISFDKLSSVYLSNTTHEEDQPCHLKLKDENIPISVNLPKYAEPAQRYCPAGVYEVVNENNQDKFVINAQNCVHCKTCDIKDPSQNITWVTPEGMGGPNYLNM

SEQ ID NO: 99575 - protein, 524 aa, Unknown
  Bacterial polypetide isolated from the Sargasso Sea
SGLAAAIKFAQLNKENNTDYSICLLEKGSEIGAHILSGNVFQPNALDELIPNWKELNAPLNVPVKKDKLLFLLEKIGIPVPSFVMPPMNNHGNFVISLGNLCRWLGEQAEQMGVEIFPGFPASKILIEDDKVVGVQTGDMGISESGEVKPGHEPGIEIRARYTILGEGCRGHLGKQVIQKFNLSDGKDPQHYGIGFKEVWKIKPELHEEGLVVHTNGWPTPFDTPSGSYLYHGENNEIYLGYVIPLDYKNPHLSPFDEFQKWKTHPSIKKYLEGGERITYGARALIKGGLQSLPKMEFPGGLLIGCNAGTLIFSKIKGSHTAMKSGEIAGQHIFEELQESSNESYDSRIKNSWIYDELYKSRNFGPFFHKYGALIGAAFNAVDQFIFRGKLPFTLNHPTPDYACLKKADEMPKIEYSKPDGVYSFDKLSSVYLSNTNHEEDQPCHLQLKDASIPISVNLPMYDEPAQRYCPAGVYEVVEKDNQKKFVVNAQNCVHCKTCDIKDPSQNINWVSPEGPGGPNYPNM

SEQ ID NO: 99576 - protein, 549 aa, Unknown
  Bacterial polypetide isolated from the Sargasso Sea
MERESMEFDVVIVGAGPAGLATACRLMQISKDSGKEITVCVVEKGSEVGAHILSGAVFEPRVLDELFSDWRDKGAPVTTAVTHDEIYLLNSATDSKLMPNAFVPKTMHNEGNYIVSVGNLCRWLATRAEELGVEIFPGFAASELLFNEDNSVKGILIGDMGVGTDGQPKDSFMPGMELHAKYTVFSEGCRGHLGKQLIAKYHLDNGKTPQHYGLGFKEIWKVPAEQHEQGKVVHTGGWPLTDGASGGGFLYHMEDNQIAVGLIIDLNYKNPHLSPFDEFQRYKTHPVIAKYLTGGERLSYGARAITKGGLNSLPKMSFPGGLLIGCDAGTLNFAKIKGTHTAMKSGIVAAETLAKAMMAEVEGGKDLDCFQTHLEESWLHEELYKSRNFGPAMHKFGTFLGGAFNYIDQNWFGGKFPITLRDEHPDYAQMAPVSAYNKIDYPKPDGKLSFDKLSSVYLSSTYHEEDQPCHLRLKDNSIPLGINLTQFNEPAQRYCPAGVYEIVEEAGQPKFVINAQNCIHCKTCDIKDPSQNITWVTPEGGGGPNYPNM

SEQ ID NO: 99577 - protein, 371 aa, Unknown
  Bacterial polypetide isolated from the Sargasso Sea
PGIEIRAKYTILGEGCRGHLGKQIIKKFNLSEDKDPQHYGIGFKEVWKIKPELHQEGLVIHTNGWPTSTDTPSGSYFYHGENNEAYIGYVIPLDYKNPHLSPFDEFQKWKTHPAIKKYLKDGERLSYGARALIKGGLQSLPKMEFPGGLLVGDNAGTLIFSKIKGSHTAMKSGVIAGEHIFELLEGKSSTTFDEKIKNSWIHKELYKSRNFGPIFHKFGALLGAAFNAIDQFIFRGNLPFTLNHATPDHACLKKADEMPKIEYPKPDGIYSFDKLSSVYLSNTNHEEDQPCHLQLKDPTIPISVNLPMYDEPAQRYCPAGVYEVVNKDNENKFVINAQNCVHCKTCDIKDPSQNINWVSPEGPGGPNYPNM

SEQ ID NO: 99578 - protein, 297 aa, Unknown
  Bacterial polypetide isolated from the Sargasso Sea
MGKNNQLYMGYVVPLDYKNPYLSPYDEFQQWKHHSGISKLLKDGTRVAYGARALIKGGYQSRPKMSFNGGLIVGDNAGTLNFPKIKGTHTAMKSGMIAADTVFDALENNNFGSDLVIYEDNIRNSWLQKELYKARNFGPLLHKFGNFVGPILAAIDQFIFRGNLPFTLNHPTPDYACLEDASKMSKIKYPKPDGVISFDKLSSVYLSNTTHEEDQPCHLKLKDENIPISVNLPKYAEPAQRYCPAGVYEVVNEGGQDKFVINAQNCVHCKTCDIKDPSQNITWVTPEGMGGPNYLNM

SEQ ID NO: 99579 - protein, 547 aa, Unknown
  Bacterial polypetide isolated from the Sargasso Sea
MERDVMEYDVLVVGAGPAGLSTAIKFAQLNKKNNTNHSICVIEKGSEVGAHILSGNVFEPTALNELIPDWKDKEAPLDTPVKKDIVRYLVNENISIPVPLPGFFMPNFNNHGNYIMSLANFCRWLAKEAESLGVEIFAGFTASEIIIENDELKGIVTGEMGVSKDGEKKPSYQPSMELRAKYTVLSEGCRGHLGKQIIKKFNLDQGKDPQHYGIGFKEIWDIKPELHKEGTVMHTAGWPAKGTASGSYCYHGKNNQLYMGYVVPLDYKNPYLSPYDEFQQWKHNSGISKLLKDGTRVAYGARALIKGGFQSRPKMSFNGGLIVGDNAGTLNFPKIKGTHTAMKSGMIAAEVIYEAIENNNISSDLVLYEDRIQKSWLQKELYKARNFGPLLHKFGNLFGPILAAIDQFVFRGNLPFTLNHPTPDYACLEDASKMPKINYPKPDGVISFDKLSSVYLSNTTHEEDQPCHLKLRDENIPISVNLPKYAEPAQRYCPAGVYEVVNENNQDKFVINAQNCVHCKTCDIKDPSQNITWVTPEGMGGPNYLNM

SEQ ID NO: 99580 - protein, 490 aa, Unknown
  Bacterial polypetide isolated from the Sargasso Sea
PRVLDELFSDWRDSGAPVTTAVTHDEIYLLNSATDSKLMPNAFVPKTMHNEGNYIVSVGNLCRWLATRAEALGVEIFPGFAASELLFNEDNSVKGILIGDMGIGADGQPKDSFMPGMELHAKYTVFSEGCRGHLGKQLIAKYHLDNGKTPQHYGLGFKEIWKVPAEQHEQGKVVHTGGWPLTDGASGGGFLYHMEDNQIAVGLIIDLNYKNPHLSPFDEFQRYKTHPVIAKYLTGGERLTYGARAITKGGLNSLPKMSFPGGLLIGCDAGTLNFAKIKGTHTAMKSGIVAAETLAKAMLAEVEGGKDLDCFQTHLEESWLHEELYKSRNFGPAMHKFGTFLGGAFNYIDQNWFGGKFPITLRDEHPDYAQMAPVSAYCKIDYPKPDGKLSFDKLSSVYLSSTYHEEDQPCHLRLKDSSIPLGINLTQFNEPAQRYCPAGVYEIVEEAGQPKFVINAQNCIHCKTCDIKDPSQNITWVTPEGGGGPNYPNM

SEQ ID NO: 99581 - protein, 545 aa, Unknown
  Bacterial polypetide isolated from the Sargasso Sea
MVEEIKREVMEYDVIIVGAGPAGLSTAIKLRQLDSEISVCILEKGSEVGAHILSGNVFETRALDELIPTWKEEGAPIKTKVKKEKFMFLSQNSSLSWPTWLLPSVQKNHNNYIISLGNLCRWLADKAESLGVEIFPGFAASKLLYNSDNSLKGVQTGDMGLDKDGNQKDNFEPGIEIHGKVTILAEGCRGHLGKQVIKKFELNKNKSPQQYGIGFKEIWEIDNNNHEEGLVMHTTGWPLDNKTYGGSFCYHAENNQVFIGYVIGLDYKNPHLSPYDEFQRFKTHSSISKLLKGGKRLSYGARALIEGGIQSLPQMYMPGGLLIGCDAGTLNMPKIKGSHTAMKSGILAAESAYDFIRNKTSLSSYEKKFKNSWAYKELYLARNVKPSFNWGLIPAIIFTGLDQVIFRGKLPFTLKHPHADHETLIPANKAKKIQYPKYDNILTFDKTSSVYLTGTNHEENQPVHLQLNDKNLPINYCLEKYDEPSQRYCPAGVYEVQKDSQGLNPQFVINAQNCIHCKTCDIKEPSQNINWVTPEGAGGPNYANM

SEQ ID NO: 99582 - protein, 518 aa, Unknown
  Bacterial polypetide isolated from the Sargasso Sea
TAIKLKQLDPNLNVCILEKASEIGAHILSGNVFETRALDELLPNWRELNSPIKTKVTKEKFLFLGKTKSLSWPTWLLPAVQQNHKNYIISLANLCRWLAEQAENLGVEIFPGFPASEVLYNDDGSVKGVATQDMGIDKEGNKKDSFEPGIELLGKVTVFAEGCRGHLGKELIQKFDLNKGKDPQQYGIGFKEIWEIDENNHEEGLVMHTAGWPLDNSTYGGSFMYHAENKQIFLGYVIGLDYKNPHLSPYDEFQRFKTHPAIKKIIEGGKRISYGARALIEGGFQSLPQMFMPGALLVGCDAGTLNMPKIKGSHTAMKSGMIAAETINEHLKENKDLSIFDQKFKNSWLYKELFEARNVKPSFSWGLILGIIFTGIDQILFRGKLPFTLKHKHADHETLKTAKDMPKIDYPKYDNVLTFDKTSSVYLTGTNHADNQPVHLKLKDPNLPINYTLEKFDEPAQRYCPAGVYEVQKENDVNKFVINSQNCIHCKTCDIKEPSQNIVWVTPEGGRWTKNTEI

SEQ ID NO: 99583 - protein, 341 aa, Unknown
  Bacterial polypetide isolated from the Sargasso Sea
NKGKDPQQYGIGFKEIWEIEDKNHEEGLVMHTAGWPLDNNTYGGSFMYHAENKQVFLGYVIGLDYKNPHLSPYDEFQRFKTHPAIKKIIEGGKRISYGARALIEGGFQSLPKMFMPGALLVGCDAGTLNMPKIKGSHTAMKSGIIAAETINEHLKENKDLSIYEDKFKKSWLHKELYEARNVKPSFSWGLILGIIFTGIDQILFRGKLPFTLKHKHADHETLKPANQMPKIDYPKYDNVITFDKTSSVYLTGTNHADNQPVHLKLKDPDLPINYTLEKFDEPAQRYCPAGVYEVQKENDVNKFVINSQNCIHCKTCDIKEPSQNITWVTPEGSGGPRYGNM

SEQ ID NO: 99584 - protein, 489 aa, Unknown
  Bacterial polypetide isolated from the Sargasso Sea
EKGSEIGAHILSGNVFQPNALDELIPNWKELNAPLNVPVKKDKLLFLLEKVGIPVPSFILPPMNNHGNYVISLGNLCRWLGEQAEQMGVEIFPGFPASKILIENDKVVGVQTGDMGISESGEVKPGHEPGIEIRAKYTILGEGCRGHLGKQIIQKFNLSDGKDPQHYGIGFKEVWKIKPELHEEGLVVHTNGWPTPFDTPSGSYLYHGENNEIYLGYVVPLDYKNPHLSPFDEFQKWKTHPSIKKYLEGGERITYGARALIKGGLQSLPKMEFPGGLLIGCNAGTLVFSKIKGSHTAMKSGEIAGQHIFEELQESSNESYDARIKNSWIYDELYKSRNFGPFFHKYGALIGAAFNAVDQFIFRGKLPFTLNHPTPDYACLKKADEMPKIEYSKPDGIYSFDKLSSVYLSNTNHEEDQPCHLQLKDISIPISVNLPMYDEPAQRYCPAGVYEVVEKDNQKKFVINAQNCVHCKTCDIKDPSQNINWVSPE

SEQ ID NO: 99585 - protein, 541 aa, Unknown
  Bacterial polypetide isolated from the Sargasso Sea
MHRETMEYDVVIVGGGPSGLATAIKFAQLNNENNTNYSICLLEKGSEIGAHILSGNVFQPNALDELIPNWKELNAPLNVPVKKDKLLFLLKNIGIPIPSFVMPPMNNHGNYVISLGNLCRWLGEQAENLGVEVFPGFPASKLLIEEDKVVGVQTGDMGISENGEFKPGHEPGIEIRAKHTILGEGCRGHLGKQIINKFNLNENKDPQHYGIGFKEVWKIKPELHQEGLVIHTNGWPTSTDTPSGSYFYHGENNEAYIGYVIPLDYKNPHLSPFDEFQKWKTHPSIKKYLEDGERLSYGARALIKGGLQSLPKMEFPGGLLIGDNAGTLVFSKIKGSHTAMKSGLIAGEHVFDLLQNNASSTFDEKIKNSWIHKELHKSRNFGPIFHKFGALLGAAFNAIDQFIFRGNLPFTLNHPTPDYACLKKADEMPQIEYPKPDGVYSFDKLSSVYLSNTNHEEDQPCHLQLKDPTIPISVNLPMYDEPAQRYCPAGVYEVVNKGNENKFVINAQNCVHCKTCDIKDPSQNINWVSPEGPGGPNYPNM

SEQ ID NO: 99586 - protein, 265 aa, Unknown
  Bacterial polypetide isolated from the Sargasso Sea
HQSSINKYLKGGSRVSYGARALIKGGYQSRPKMSFPGGLLIGDNAGTMNFPRIKGAHTAMKSGIIAGETIANAFLSDNLEEDLNSYEENFINSWLNKELYKARNWNPFLHKYGQYLGVLLAGMDQFIFRGKLPFTLNALEPDHETLKPADQMPKIEYPKPDGVTSFDKLSSVFLSNTNHAEDQPCHLVLKDNSIPIESNLPLYDEPAQRYCPAGVYEVIEEDGEKKFQINSQNCVHCKTCDIKDPAQNITWVTPEGMGGPNYPNM

SEQ ID NO: 99587 - protein, 262 aa, Unknown
  Bacterial polypetide isolated from the Sargasso Sea
KTHPAIKKIIEGGKRISYGARALIEGGFQSLPKMFMPGALLVGCDAGTLNMPKIKGSHTAMKSGIIAAETINEHIKENKDLSIYEDKFKNSWLYKELFEARNVKPSFSWGLILGIIFTGIDQILFRGKLPFTLKHKHADHETLKPANQMPKIDYPKYDNVITFDKTSSVYLTGTNHADNQPVHLKLKDPDLPINYTLEKFDEPAQRYCPAGVYEVQKENDVNKFVINSQNCIHCKTCDIKEPSQNITWVTPEGSGGPRYGNM

SEQ ID NO: 99588 - protein, 390 aa, Unknown
  Bacterial polypetide isolated from the Sargasso Sea
NLCRWLAEQAEVLGVEIFPGFPASEILYNEDGSVKGVITQDMGLDKEGNKKDGYEPGMELHAKVTVFAEGCRGHLGKQLIKKFDLDSGKDPQQYGIGFKEIWKIDEKNHQEGLVMHTAGWPLDKNTYGGSFVYHAENKEVYLGYVIGLDYKNPHLSPFDEFQRFKTHPAIRKMLEGGKRISYGARALIEGGFQSLPKMFMPGALLIGCDAGTLNMPKIKGSHTAMKSGLVAAETITEHLNESKDLSIYEEKFKKSWAFKELYEARNVKPSFSWGLVLGIIFTGIDQIIFRGKLPLTLKHKHADHETLKPANEMPVIDYPKPDNLITFDKTSSVYLTGTNHTDNQPVHLKLKDKDLPIRYTLDRFNEPAQRYCPAGVYEVQVENDIPKFVI

SEQ ID NO: 99589 - protein, 257 aa, Unknown
  Bacterial polypetide isolated from the Sargasso Sea
YKKIIEGGKRISYGARALIEGGIQSLPQMFMPGALLVGCDAGTLNMPKIKGSHTAMKSGMIAAETIYEHLTKNINLSAYEQKFKESWVYKELYEARNVKPSFSWGLILGILFTGIDQILFRGKLPFTLKHKHADHEALKPADKMPKIDYPKPDNVITFDKTSSVYLTGTIHDDNQPVHLKLKDPDLPIKYTLEKFDEPAQRYCPAGVYEVQEVNSVQKFVINAQNCIHCKTCDIKEPSQNITWVTPEGGGGPKYGNM

SEQ ID NO: 99590 - protein, 290 aa, Unknown
  Bacterial polypetide isolated from the Sargasso Sea
FLGYVVNLDYQNPHLSPYDEFQQWKLHPSIKKLLKNGTRVAYGARSLAKGGIQSLPKMSFPGGLLIGCNAGTMNYPKIKGTHTAMKSGMLAAETIFDAFQNNTVQDELEEFQTKFKESWLAKELYKARNFGPLLHKFGSLWGAMLAAIDQFVFRGNLPFTLQVKTPDYKSLKAADQCSPITYPKPDGIYSFDKLSSVYLSNTSHEEDQPCHLKLKDPNIPISHNLPIYDEPAQRYCPAGVYEVVEEDGLKKFVINAQNCVHCKTCDIKDPSQNITWVTPEGMGGPNYPNM

SEQ ID NO: 99591 - protein, 216 aa, Unknown
  Bacterial polypetide isolated from the Sargasso Sea
KGTHNAMESGILVAESIVENFVNGNQTDDLSNYQEKYEKSKIAKELKKVRNVKPFQSRYGVILGTILSGLDMWLNTFGITLPFTLGHIKPDYKTLRKASECKEIIYPKPDGEFSFDKLSSVFLSSTNHEEDQPAHLTLKDSNIPIKVNLVEYDEPAQRYCPAGVYEVLSADENSEPVFQINAQNCVHCKTCDIKDPSQNINWVVPQGGEGPLYGGM

SEQ ID NO: 99592 - protein, 284 aa, Unknown
  Bacterial polypetide isolated from the Sargasso Sea
GYVIPLDYKNPHLSPFDEFQKWKTHPAIKKYLHEGERLTYGARALIKGGLQSLPKMEFPGGLLIGCNAGTLVFSKIKGSHTAMKSGEIAGQHIYEELQGTSDQSYDSRIKNSWVYSELYKSRNFGPFFHKFGALIGAAFNAIDQFIFRGKLPFTLNHATPDYACLKKSDEMPKIDYPKPDGIYSFDKLSSVYLSNTNHEEDQPCHLQLKDPTIPISVNLPMYDEPAQRYCPAGVYEVVEKDNEKKFVINAQNCVHCKTCDIKDPSQNINWVTPEGPGGPNYPNM

SEQ ID NO: 99593 - protein, 228 aa, Unknown
  Bacterial polypetide isolated from the Sargasso Sea
GLIVGDNAGTLNFPKIKGTHTAMKSGMIAAETVFDALENNNIGSDLVIYEDNIQNSWLQKELYKARNFGPLLHKFGNFVGPILAAIDQFIFRGNLPFTLNHPTPDYACLEDASKMPKINYPKPDGVISFDKLSSVYLSNTTHEEDQPCHLKLKDENIPISVNLPKYAEPAQRYCPAGVYEVVNEDSKDKFVINAQNCVHCKTCDIKDPSQNITWVTPEGMGGPNYLNM

SEQ ID NO: 99594 - protein, 392 aa, Unknown
  Bacterial polypetide isolated from the Sargasso Sea
EQAEQMGVEIFPGFPASKILIEDDKVVGVQTGDMGISESGEVKPGHEPGIEIRARYTILGEGCRGHLGKQVIQKFNLSDGKDPQHYGIGFKEVWKIKPELHEEGLVVHTNGWPTPFDTPSGSYLYHGENNEIYLGYVIPLDYKNPHLSPFDEFQKWKTHPSIKKYLKGGERITYGARALIKGGLQSLPKMEFPGGLLIGCNAGTLVFSKIKGSHTAMKSGEVAGQHIFEELQESSNESYDSRIKNSWIYDELYKSRNFGPFFHKYGALIGAAFNAVDQFIFRGKLPFTLNHPTPDYACLKKADEMPKIEYSKPDGIYSFDKLSSVYLSNTNHEEDQPCHLQLKDSSIPISVNLPMYDEPAQRYCPAGVYEVVEKDNEKKFIINAQNCVHCKT

SEQ ID NO: 99595 - protein, 304 aa, Unknown
  Bacterial polypetide isolated from the Sargasso Sea
VGAHILSGAVLEPRALNELFPDWKERGAPLNTPVTSDQFLFLTQNNSFKLPTPPQMNNHGNFIISLGNLCRWLAEQAEALGVEIYPGFAASEILFNEDGSVKGVATGDMGRGKDGTETENFTPGIELHAKQTVFSEGSRGSLTKILFDKFNLRSDADPQTYAIGIKELWEVKPEKHQEGLALHSVGWPIDGSTYGGSFIYHLEGNQVSVGYVIGLDYKNPHLSPFDEFQRFKTHPKIRPLFEGGRRVAYGARALNEGGFQSIPKLTFPGGLIVGCGAGFLNVPKIKGTHTAMKSGMTAAEAVEN

SEQ ID NO: 99596 - protein, 233 aa, Unknown
  Bacterial polypetide isolated from the Sargasso Sea
MHFPGGMLVGDDAGTMNFPRIKGTHTAMKSGMIAAESLFEEFYKESPKADVDSFSENLKSSWLETELHKARNFLPFTHKYGTLLGVALAGVDQLIFRGKLPFTLHHDTPDHECLKEASDMPEINYPKPDGEISFDKLSSVFLSNTNHEEDQPCHLVLSDPSIPLSVNLPKYDEPAQRYCPAGVYEIVEKDGEKQFQINAQNCVHCKTCDIKDPSQNINWVTPEGAGGPNYPNM

SEQ ID NO: 99597 - protein, 361 aa, Unknown
  Bacterial polypetide isolated from the Sargasso Sea
AEGCRGHLGKKLIAKYELDKDKDPQHYGIGFKEVWDVPAEVHSEGTVMHTFGWPSKSKAGSYFYHGENNQVYIGLVVPLDYSNPHLSPFDEFQQWKQHKDIKKILENGTRVAYGARALIKGGYQSRPKMSFPGGLIVGDNAGTLVFTKIKGTHTAMKSGMLAAETVFDAIQNNNLDADLETYEEKFDSSWIQTDLYKSRNMTPLLHKYGSWIGGILMAIEQFLFRGRYPFTLTHKTPDYACMKKASECEKIDYPKPDGKISFDKLSSVFLSNTNHEEDQPCHLTLKDSSIPINVNLPTYDEPAQRYCPAGVYEVVEKDGEHKFQINAQNCVHCKTCDIKDPSQNIVWITPEGMGGPNYPNM

SEQ ID NO: 99598 - protein, 552 aa, Unknown
  Bacterial polypetide isolated from the Sargasso Sea
MQEENTRESIEVDVLIIGAGPAGLATAIKLKTEANKNNQEINIVVLEKGSEVGAHILSGAVIDPIGLDMLLPNWRDLDPPAMSEVIDDRFYILGPAGSLRIPNFFFPRLMSNHNCFATSLSNVVKWLGGIAQSLGIEVYPGFPASEIIYQGDRVVGVITGDFGISRNGEKKDSFMQGMEIRAKYTVFAEGARGHLTKKVIEKFQLDKESDFQKYGIGLKELWEIPEENHKPGLVQHTMGWPLDNKTGGGSFMYHFGKNLVSIGFVVHLNYKNPSLSPFEEFQRYKTHPLIKDILSGGKRLSYGARVISEGGYQSVPKLTFPGGLLVGCAAGFVNVPRIKGSHNAIVSGVLAANALLESFTSKKISEELSSYQDMYNKSTIAKELSKVRNIKPLWSKFGTLVGVALGGIDMWLRDLGINIPFTMSHKKPDHLTLQKKSASKKIEYPKPDGVYSFDRLSSVYLSSTNHEEDQPVHLNVGDFGLQTSSEYHDYGGPSANYCPAGVYEWILEGESPKFQINAQNCVHCKTCDIKDPNQNINWQVPEGGGGPNYSNM

SEQ ID NO: 99599 - protein, 232 aa, Unknown
  Bacterial polypetide isolated from the Sargasso Sea
PGGLLVGCEAGTLNFAKIKGNHTAMKSGMLAAESIFEAISENAEAPVKELTSFTEKFKSSWLYDELFRSRNFGPAIHKLGNFWGGAFNTLEQNIFNGNLFFTMKDEHKDYAQLKEAKDAKEISYPKPDGVLSFDKLSSVFLSNTNHEEDQPCHLKLKDPSIPLQVNLPKFAEPAQRYCPAGVYEVIEEEGEKRFQINAQNCVHCKTCDIKDPSQNIKWVVPEGAGGPNYPNM

SEQ ID NO: 99600 - protein, 523 aa, Unknown
  Bacterial polypetide isolated from the Sargasso Sea
IKLKQQAIEASKEMSICVVEKGSEVGAHILSGNVFDPKALDELIPDWKELGAPLNTPVKKDSVRYLLNEKSNFSIPTLFATTFKNHGNYIMSLGNFCRWMAEYAEGLEIDIFPGFTASELIISNGVVVGIATGDMGVDVNGEKKDSYEPGINLMAKYTILSEGCRGHLGKQAISLFNLNEDRDPQHYGIGFKEVWDLDPSVHEEGLVVHTMGWPAAKGVLSGSYLYHGENNQAFLGYIVPLDYDNPHISPFDEFQQWKHQASIQKYLEGGTRTAYGARALIKGGHQSIPKMHFPGGMLVGDDAGTMNFPRIKGTHTAMKSGMIAAESLFEEFYKENPMTDLNTVTANFKSSWLETELHKARNFLPFIHKYGTLLGVALAGIDQLIFRGKLPFTLHHDQPDHECLKEVSEMPRIDYPKPDGVISFDKLSSVFLSNTNHEEDQPCHLVLKDPSIPLSVNLPKYDEPAQRYCPAGVYEIVEKEGEKQFQINAQNCVHCKTCDIKDPSQNINWITPEGAGGPNYPNM

SEQ ID NO: 99601 - protein, 241 aa, Unknown
  Bacterial polypetide isolated from the Sargasso Sea
GGLQALTANAFAGGLIVGDDSGFLNPLKIKGSHTAMKSGMLGAEAVFEELVLGNSATTPSTFEEKFKSSWLFDELHRARNFGPMAHKLGTLFGGVYSSIERFIRPIARWTFSDPTPDYATLKEASMVAKIEYPKPDGVISFDKLSSVFLSNTYHEEDQPCHLTLEDPDIPISINLPKYDEPAQRYCPAGVYEVLEEENGAPKFQINAQNCVHCKTCDIKDPAQNITWVVPEGAGGPNYPNM

SEQ ID NO: 99602 - protein, 276 aa, Unknown
  Bacterial polypetide isolated from the Sargasso Sea
EFQEWKQHKDIKRILEKGTRVAYGARALIKGGYQSRPKMSFPGGLIVGDNAGTLNFPKIKGTHTAMKSGMIASEVVFDAITNENYEQDLLKYEELFQESWINSELYKARNWGPLLHKGLAWGFKGLIGVALASIDQLIFRGKLPFTLNHSTPDYACTKKSSECKKIDYPKPDGIVSFDKLSSVFLSNTNHEEDQPCHLQLKDPSIPINVNLPIYDEPAQRYCPAGVYEVVEKDGTYSFQINAQNCVHCKTCDIKDPSQNIKWVTPEGMGGPNYPNM

SEQ ID NO: 99603 - protein, 549 aa, Unknown
  Bacterial polypetide isolated from the Sargasso Sea
MENIERESMEYDVVIVGAGPAGLSTAIKLKQQAIEASKEMSICVVEKGSEVGAHILSGNVFDPKALDELIPDWKELGAPLNTPVKKDSVRYLLNEKLNFSIPTLFATTFKNHGNYIMSLGNFCRWMAEYAEGLEIDIFPGFTASELIIDNGVVVGIATGDMGVDVNGEKKDSYEPGINLMAKYTILSEGCRGHLGKQAISLFNLNEDKDPQHYGIGFKEVWDLDPSVHEEGLVVHTMGWPAAKGVLSGSYLYHGENNQAFLGYIVPLDYDNPHISPFDEFQQWKHQASIQKYLAGGTRTAYGARALIKGGHQSIPKMHFPGGMLVGDDAGTMNFPRIKGTHTAMKSGMIAAESLFEEFYKENPMTDLNTVTANFKSSWLETELHKARNFLPFIHKYGTLLGVALAGIDQLIFRGKLPFTLHHDQPDHECLKEASEMPRIDYPKPDGVISFDKLSSVFLSNTNHEEDQPCHLVLKDPSIPLSVNLPKYDEPAQRYCPAGVYEIVEKEGQKQFQINAQNCVHCKTCDIKDPSQNINWITPEGAGGPNYPNM

SEQ ID NO: 99604 - protein, 541 aa, Unknown
  Bacterial polypetide isolated from the Sargasso Sea
MEREVMEYDVVIVGGGPSGLSAAIKLAQLARDNDKSLEICLLEKGSEIGAHILSGNVFQPTALNELIPDWKEKNCPLNVPVKKDKLMFMFEKFSLPIPSFVMPPMNNHGNYVASLANLCRWLATQAEDLGVEIFPGFPASEILYEGDRVVGVRTGDMGVGLDGEQKAGYEAGIDIKAKYTIFGEGCRGHLGKQLISKFELDKDKDPQHYGIGFKEIWKIKDEMHEEGLVIHTNGWPSAKNTPAGSYLYHADNNEVYLGYVVPLDYENPYLSPYDEFQTWKTHPSIRRYLEGGERITYGARALIKGGLQSLPSMEFPGGVLVGDNAGTLVFSKIKGSHTAMKSGMLAAEAIFKNIDNESDLEFNDLVKSSWIHTELHKSRNFGPMFHKFGSLIGAAFNAMDQLIFRGKLPFTLRHTTPDYACMKPAADMPKIEYPKPDGKISFDKLSSVFLSNTYHEEDQPCHLKLKDSTIPILQNLPMYDEPAQRYCPAGVYEVVEKDNEPKFVINGQNCVHCKTCDIKDPSQNITWVTPEGTGGPNYPNM

SEQ ID NO: 99605 - protein, 224 aa, Unknown
  Bacterial polypetide isolated from the Sargasso Sea
IDLDDKQVTLHMDSGKRLSADALLWSNGRTGNTDLLQLENAGLTANHRGQLDVDETYRTSIENIFAAGDVIGWPALASAAYNQGSTAATYARGDNTFKHVNDVPTGIYTLPEISSVGMTERELTDKKVPYEVGRAFFKDTARGQISGQKEGMLKILFHIDTYELLGIHCFGAEATEIIHIGQAILKQQNSGNDIRYFVDTTFNYPTMAEAYRIAALNGLNRLGF

SEQ ID NO: 99606 - protein, 337 aa, Unknown
  Bacterial polypetide isolated from the Sargasso Sea
FVDEHTIALECHDGTVETLTADKFVMPCGSRPYRPVDVDFSHPRVYDSDSILSLHHEPRHVLIYGAGVIGCEYASIFRGMDVKVDLINTRDRLLAFLDQEMSDSLSYHFWNSGVVIRHNEEYEKIEGCDDGVIMHLKSGKKLKADCLLYANGRTGNTDSLALENIGLKTDSRGQLKVNSMYQTALPHVYAVGDVIGYPSLASAAYDQGRIAAQALVKGEATAHLIEDIPTGIYTIPEISSVGKTEQQLTAMKVPYEVGRAQFKHLARAQIVGMSVGTLKILFHRETKEILGIHCFGERAAEIIHIGQAIMEQKGGGNTIEYFVNTTFNYPTMAEAYR

SEQ ID NO: 99607 - protein, 157 aa, Unknown
  Bacterial polypetide isolated from the Sargasso Sea
AGDVIGWPSLASAAHDQGRSAAGSIVDNGSWRYVNDVPTGIYTIPEISSIGKNEHELTKAKVPYEVGKAFFKSMARAQIAGEPQGMLKILFHRETLEVLGVHCFGYQASEIVHIGQAIMNQPGEQNTLKYFVNTTFNYPTMAEAYRVAAYDGLNRLF

SEQ ID NO: 99608 - protein, 244 aa, Unknown
  Bacterial polypetide isolated from the Sargasso Sea
LSYHLWNNGVLIRHNEAYSSVEATDDSVILNLESGKRMRADCLLFANGRTGNTDTLKLENIGLKADGRGQLKVNENYQTDVDNVFAVGDVIGYPSLASAAYNQGRFAAEAMLGIKTHSALVEDIPSGIYTIPEISSVGKTEQELTAAKVPYEVGRAQFKHLARAQIASTQTGSLKILFHRETKEILGIHCFGERASEIVHIGQAIMQQKGEGNTIDYFVNTTFNYPTMAEAYRVAAINGLNRIF

SEQ ID NO: 99609 - protein, 229 aa, Unknown
  Bacterial polypetide isolated from the Sargasso Sea
MAVYNYDVVVLGSGPAGEGAAMNAAKAGRKVAMVDDRRQVGGNCTHLGTIPSKALRHSVRQIMQFNTNPMFRAIGEPRWFSFPDVLKSAEKVIAKQVASRTGYYARNRVDVFFGTGSFADEQTVEVVCPNGVVEKLNAKHIIIATGSRPYRPADIDFHHPRVYDSDTILSLSHTPRKLIVYGAGVIGCEYASIFSGLGVLVELVDNRGQLLSFLDSEISQALSYHFSNN

SEQ ID NO: 99610 - protein, 471 aa, Unknown
  Bacterial polypetide isolated from the Sargasso Sea
MAVYNYDVVVLGSGPAGEGAAMNAAKAGRKVAVVDNRPLVGGNCTHLGTIPSKALRHSVRQIMQFNTNPMFRQIGEPRWFSFPDVLKSAEKVIAKQVTSRTGYYARNRIDTYFGTASFADEQTVEVVCLNGVVEKLVAKQIVIATGSRPYRPADVDFRHPRIYDSDTILSLGHTPRRLIIYGAGVIGCEYASIFSGLGVLVDLIDNRDQLLSFLDSEISDALSYHLRNNNVLIRHNEEYERIEGVENGVVLHLKSGKKIKADALLWCNGRTGNTDQLGLENIGIAVNSRGQIQVDEHYRTEVSNIYAAGDVIGWPSLASAAADQGRSAAGSIVDNGSWRFVDDVPTGIYTIPEISSIGKTERELTQAKVPYEVGKAFFKGMARAQISVEPVGMLKILFHRETLEVLGVHCFGYQASEIVHIGQAIMNQKGEANSIKYFINTTFNYPTMAEAYRVAAFDGLNRLFERLRPAA

SEQ ID NO: 99611 - protein, 359 aa, Unknown
  Bacterial polypetide isolated from the Sargasso Sea
NRVTLFHGEASFVDAHTLEITRKDGSKDTVTAGQIAIATGSRPYCPKDIDFNHPRIYNSDTILSLDHDPKSIIIYGAGVIGSEYASIFRGLGVKVDLVNMRDRLLSFLDDEISDALSYHLWNNGVLIRHNEAYSSVEATDDSVILNLESGKRMRADCLLFANGRTGNTDTLKLENIGLKADGRGQLKVNENYQTDVDNVFAVGDVIGYPSLASAAYNQGRFAAEAMLGIKTHSALVEDIPSGIYTIPEISSVGKTEQELTAAKVPYEVGRAQFKHLARAQIASTQTGSLKILFHRETKEILGIHCFGERASEIVHIGQAIMQQKGEGNTIDYFVNTTFNYPTMAEAYRVAAINGLNRIF

SEQ ID NO: 99612 - protein, 369 aa, Unknown
  Bacterial polypetide isolated from the Sargasso Sea
MIERFGATRKATPTPNPDRASRWKINKSAQYTKGVPKAMGQATHICTACGYIYQETKPFEELPEDYVCPSCSAPKSKFEAMKTEEAPKSARPVVEYPEGTLVALKPGETIKLKLIEKEQVTANSVRVRFELPSPEHILGLPVGQHVTMTIDGVSRPYTPISRDADKGFMDLLVKIYDNGALTQKLNAVEIGSTVDFEGPKGLVTYTARGEFSTQNPATGDVAKKSCKSIAMIAGGTGITPMLQVIRQIFNDVGDTTRVNVLFANVSSADILMKKELDELASAHKNLTVHYAIDADEPGWTGEVGYISAEMMKKCELFKPSGLMNKLFASADKVDKDTAVLVCGPPAMVERAVVPALDALKVSTDSRIFF

SEQ ID NO: 99613 - protein, 210 aa, Unknown
  Bacterial polypetide isolated from the Sargasso Sea
TSLVALMQDDMKKLIAYSSVAHMGFVTMGIFTFNKQGIEGSIVQMFSHGLISAALFLCVGVLYERTHSRMIKSYGGIVQVLPKYSFLLMIFALGTLGLPGTSGFVGEFLILVGTFKVNILVAVLGSIGVILAAAYILWLYKRVVFGKLENPQLKKIKDVNFSEGSILIILSFMVLFFGMYPEPLFETVNVSVDNLINNYNLEIGKEITLK

SEQ ID NO: 99614 - protein, 285 aa, Unknown
  Bacterial polypetide isolated from the Sargasso Sea
KIAAVPFHQWTPDVYEGSPTPVVAFLSVGSKTAGFAFAIRILSTTFSSFDEEWKLLFTILAILSMALGNVVALAQTSMKRMLAYSSIGQAGFVMIGIVSGTQDGLSAAVLYLAAYLFMNLGAFSCVILFSLRTGSDRILDYSGLYQKDPLITLGLSLCLLSLGGLPPMLGFFGKIYLFFAGWANHQYLLVIVGLVTSVISIYYYISVIKMMVVKEPQEASEIVKSYPEINWGIVGLPPLRIALYTCVAVTALGGILSNPLFKLANTAVSETPFLQDIIATANNIS

SEQ ID NO: 99615 - protein, 296 aa, Unknown
  Bacterial polypetide isolated from the Sargasso Sea
VVAGMQSRVGPDRAGPFGILQTLADAIKLLLKEQIMPLKADRAMYILAPILALVPSFLIFMIIPLGPDIDLEINGQSITIPLVGADLNVGVLFFLALSSIAVYSVVLAGWSSGSKYPLLGGVRASAQMISYEAAMGLSLVPVILYSGSMSMTEIVKSQEGHLSSPIPFLDAIVSFIPKWNVFPQFVAFAIFFVASIAEVNRAPFDLVEAEQELVGGFHTEYSGFRFAMFFLAEYINMFNMCAITATFFLGGWLGPTFSNFLPPLISALMPAFWLGIKTFALLFIYVWIRATYLAKI

SEQ ID NO: 99616 - protein, 202 aa, Unknown
  Bacterial polypetide isolated from the Sargasso Sea
MKKLQKIIPIAQEDRLSKAINIPGSKSITNRAFLLSSLSVLDAKDGEYAYLNGVLDSNDTRAFYNCIQGLGFDILEVSQNKYKISAISKDSILKNWKSNPPKIYCHDAGTAVRFLVPMIAALGGFGVEVSASKQMTNRPIQALIEALELQGSKFRYTYTPGSLPLLIEKNKDSLGLRGGKLLVDTKDSSQFISGLLMVAPFA

SEQ ID NO: 99617 - protein, 114 aa, Unknown
  Bacterial polypetide isolated from the Sargasso Sea
EYSGFRFAMFFLAEYINMFNMCAITATFFLGGWLGPTFSNFLPPLISGLMPAFWLGIKTFGLLFIYVWIRATLPRLRYDQLMELGWKRMIPISLIWLLLSSVVLGIRQFGLPWS

SEQ ID NO: 99618 - protein, 264 aa, Unknown
  Bacterial polypetide isolated from the Sargasso Sea
VLLWVRASGRPCASIRGTWAGSASLPLVDACLFQAVLFRGLEQTGAGLGSVLIDSQPLMVALLARALFAESINPVGWLGLGLGLAGVLCLGVPADLLRHWWLLAERPAMQDLLQAGEAWMLLAALAMAFGTVLIRFASRHSDPVVTTGWHMLLGSLPLLLLSCLERGFAPPAWSGFDWTRMAFASLLGSALAYGLFFWFASRRDLTGFSSLGFLTPVFALATGGWFLGERLAPLQWFGVFLVLLSVLCVSQRRRLWEPAESQAA

SEQ ID NO: 99619 - protein, 257 aa, Unknown
  Bacterial polypetide isolated from the Sargasso Sea
MISSANFIYLALLPPLLAPIFIFIFKNNQNLRDSVGLIGSLISFYATINITNDLMNGGSPTLYLFNIFSDLSLSFKVTPLGAVFGLLCSGLWILAAIYSIGYMRGNNEKNQTRFYIFYSLSIFGALCVAWSSNLLVLFIFYEFLTFATYPLVVHKETDESIKASRLYLGILVGSSLMLFLPAIIWVWYSVGTLNFADGGILNNTFDPAYAPILLFLFVFGIGKAALMPLHWWLPAAMVAPTPVSALLHAVAVVKAGV

SEQ ID NO: 99620 - protein, 277 aa, Unknown
  Bacterial polypetide isolated from the Sargasso Sea
KIKNDSPDVHVNYSTQLLMLKNFKEGFKEYEWRKKSKSFFDYINYDKLNLKSRVWDGEDLKNKKLLVISEQGIGDLIQFTRYLYEIKKKYSAKIIIYLKSKKFSHFFSQNSFSTIFEGDNIPQHDYHIHLLSILKVFYKKNNLFVRPVNFFQKNIKVEKKWIENLKKYNGIKIGINCKTSLLKKNIPIQFFIDLAKINKFYFIVLQKEFDFNATKKFKNILYFDDMDISKDAFIDSIEIIKKLDLIITADTSIAHLSATLGKETWIPLPFISDWRCS

SEQ ID NO: 99621 - protein, 153 aa, Unknown
  Bacterial polypetide isolated from the Sargasso Sea
CAPSWRKAQDIPYNIFLFSFGFFCPLTIITITSTIVIFSIKQDSKSIISENIKSSVLSRQYKAIKMVCSPQINGRFNTSSLQFLCFYHFLCVQVLVLVGVFLFCWGPYAVLSLAGILGLSGSVPAPLTVLPLMMAKSSVLWSPIIYITMHPPV

SEQ ID NO: 99622 - protein, 306 aa, Unknown
  Bacterial polypetide isolated from the Sargasso Sea
GEAVSQRISDLSDGRIVVNHYAGGERVGPLDVFTEVSSGNAQMYNSADYYWVGQHPGWGFFAAVPFGLISTEINGWIRHGGGQELWDELADGFGLKNFMAGNSGVQMGGWFNKEINSADDFKGLKMRMPGLGGMMVTKLGASVVGMPGGQIYENLVNGTIDACEWVGPWNDERSRFYEAAKYYYWPGMHEPGTLITLGCNKSWLTSLSKTDQMIIEHAATVQNEMMVTEYNANNGAALQRLINDHGVELREFNDDVIDAMGEASEELYAELAEGNELTGRILDSFLKARSDIGNWLKIADPWIYCS

SEQ ID NO: 99623 - protein, 278 aa, Unknown
  Bacterial polypetide isolated from the Sargasso Sea
MSAEIILALIKPLLVLGLLLTNTIILIWLERKVVAGMQSRVGPDRAGPFGILQTLADAIKLLLKEQILPMKADKAMYLLAPIIALVPSFLIFMIIPLGPGFELTLGGETKFIDMVGADINVGVLFFLAISSLAVYSVVLAGWSSGSKYPLLGGVRASAQMISYEAAMGLSLVPVILYSGSMSMTKIVESQAGNLSSTIPIVDSIVSFIPNWNIFPQFLAFGIFFVASIAEVNRAPFDLVEAEQELVGGFHTEYSGFRFAMFFLAEYINMFNMCAITAT

SEQ ID NO: 99624 - protein, 281 aa, Unknown
  Bacterial polypetide isolated from the Sargasso Sea
APWLLALLPLFSLFQFARLVPRIADGEALTGGYDWVPSLVLSFSFLIDGLSLTFALLITGIGTLIVLYSGGYMKGHPQQARFLSFMFMFMGAMLGVVISDGLLMLFIFWELTSITSFLLIGFDHEKDASRRAAIQALVVTGGGGLFLLAGVLTIQYITGANGLSELLASGDVLRQSPLYIAAFILVLGGAFTKSAQFPFHFWLPNAMEAPTPVSAYLHSATMVKAGVYLLMRLNPVMGDTAAWMTVLPVFGGVTLIIGTVLAVRQTDLKLMLAYTTVASLG

SEQ ID NO: 99625 - protein, 320 aa, Unknown
  Bacterial polypetide isolated from the Sargasso Sea
MYKILKNSWALFTGYGILMIAHGFQGNLLGVRAVIENFNVLATGIMMSGYFVGYFAGANTIPGMVSKVGHIRVFAAFASMASLSILIHAIFVNPVIWTIGRFLTGYSLVAIFIVMESWLNDRATNRTRGQLLSIYMLLTLLALSSGSLLLNFSSPEKYEPFILISLLLSLALVPILLTKRKAPKFQKLGSLNIKSLYKISPLAAVSMFCNGFIHSAIFTLAAVYAATMNFSIFEISLLIFLISFAGGIFQWPIGFLSDKSDRRMIIIVCTFSASIFCILAIYASGTSLGNMYLATSLGLDKVMFFIYATLYAGMALPFSL

SEQ ID NO: 99626 - protein, 200 aa, Unknown
  Bacterial polypetide isolated from the Sargasso Sea
MSYKSIFNKELFSGKNIIVTGGGSGIGRCIAHELSSLGSYIILIGRNEEKLKKVMKEIKSSNGNASYYVCDIREEEKVQQCTKEIFDQFKVIYGLVNNAGGQFPSPAEYISQKGFETVVRTNLVGGFLFSREVFNQGMIKTGGNIVNITADMWNGMPGMSHSGAARSGMDNLTKTLAYEWGYAGVRVNSVAPGIYCVKWA

SEQ ID NO: 99627 - protein, 182 aa, Unknown
  Bacterial polypetide isolated from the Sargasso Sea
MKNIQILKRLYNDYTKYFLNKIFLAVFFSVLVAGSTSATAWLLDPAIEKIFLNRDETLIFVIPFFIIIAFSTKGISLYMAKVIMIQVAEEVKKKIQVEMLKSFINSDTETIESKHSGNYVSNLNFDVNQITGMLSSSFLALFKDGLTLIGLLIVMFLQNWRLSLIAIIMIPLASLAAKRLAK

SEQ ID NO: 99628 - protein, 201 aa, Unknown
  Bacterial polypetide isolated from the Sargasso Sea
MCIIAVLSMFVGNLGAIMQTNIKRMLAFSSISHAGYLLIAVIAKSSLAGSGLLFYMLAYAFTTFGAFGIIILLGKKEEENLELENYSGLAYKRPILALSMTVFLLSLGGLPPFAGFVAKFYIFSAAIEEGFVTLVVIAVLNSAISFYYYLKVVVFMYMKEPNSEFQISLTPMTLFVVIVGIIGTVELGIFPDPIIALTSLH

SEQ ID NO: 99629 - protein, 265 aa, Unknown
  Bacterial polypetide isolated from the Sargasso Sea
MLAVTIAGIPLFVLMALNATVAVYVERKVSAFMMDRIGPMGQGPGLHAGKWGVLQTIADALKLLIKEDTIPSSADKLLFKVAPFIIFIGAFLGIAVLPFSSVIQVVDVNIGVFYIIAVGSIGVHGIVMAGWASNNKWSLYGAMRSAAQIISYEIPAGLSIIVPIMMAGTMNLQSMIEFQSGTVWGILPNWIIFNNPFSFLAFFIFFISAVAETNRTPFDIPEAESELVAGWMTEYSGFRWAVFFLSEYANMFVVSGLAAVGFLGG

SEQ ID NO: 99630 - protein, 304 aa, Unknown
  Bacterial polypetide isolated from the Sargasso Sea
MDMIQIDNQNENALFEAVPGGSPYNLAMAAGRQGVKVGYVTPISKDKNGEQLAQNLLNSNVSLLGPRVTAPTSLAMVHIDDGIPSYSFYREGTAERLVTLDSLSKNLTSEVSIFHIGSLALTGGEDALVWEEFVKRTRESNVKVSLDPNVRPSLIAEPDVYRQRIKNLMTEVDILKLSDEDLLWLFNDSADETNALAELEVISRAEILIVTKGSQGSAIFHEKKWHEITSHPVEKLSDTVGAGDTFMASVLAWVMKKEKLNELAMLELNEKKDFTHYAAKAAAINAKSQVVPTMGKRVAIEIKS

SEQ ID NO: 99631 - protein, 264 aa, Unknown
  Bacterial polypetide isolated from the Sargasso Sea
MKEKLFSYISFYQWWKSIDKPILSLILILFLAGLFFSLVSTSLIASDKLDTNTYFFFFKHTVFVLLGFFLIFILSFIPEKEIYRISLIFFCLSLVLLLLVPIIGVEIKGSKRWIDLLVLPRIQPIEFVKPFLIVIISMIICSQKYTNFNLKYFLSFLLTMSISSLLILQPDIGQTLLIGFSWLVLIFISGISIFLLSLVFFISLTAIVSIISYLPQFKYIKDRLFSFFNPETGTHNFQSDKALEAIISGGFFGKGIGEGTLKNR

SEQ ID NO: 99632 - protein, 254 aa, Unknown
  Bacterial polypetide isolated from the Sargasso Sea
MLKKINLKNKIALVTGAGKGLGKACAIALAEAGAKVIILSRTKSDLIKVNKIIKKTKGSSQLFVCDVTNLEDLKKVLRKISRLDILVNNAGNNRPQHFTKVSQENMEYLTDLNMKAAFNVAQLCSQKMVKAKNRKKIGGSIIHMSSQLGRVGCEGRNIYNMNKFGVEGLSRGMACELAPYNIRVNTICPTFVETPMVKKFFKNKKFKSKMLKNIPLGRVAKESDVATAVAFLAADSSEMITGTSLLVDGGWTAQ

SEQ ID NO: 99633 - protein, 299 aa, Unknown
  Bacterial polypetide isolated from the Sargasso Sea
DAHVEAPTPGSVILAAVLLKMGTYGFLRFLLPFFPLASQHPTVVTTMLVLAVIGILYTAWVAAVQPDAKKLVAYTSVAHMGFVVLGVFALNVNGLQGGLVVMISHGISTGALFLLLGMLYERRHTRRIADFGGIARVAPWFATAFMITALASIGLPGTSGFVGEFLALMGAFESHPTIAFFATLGVIFAAYYMLPMLQTIFFNKLETAENREVEDLKGREIAILSPLCALMIIIGCNPTPILERMEPSVRIVLERIEKAGEGSSVLNVIEVASPAQAEEVAQPEGLNQGSRSGLADGEG

SEQ ID NO: 99634 - protein, 258 aa, Unknown
  Bacterial polypetide isolated from the Sargasso Sea
LPDAHVEAPTAGSIILAGILLKMGGYGFLRFSIPMFPDASIYFQPLIFALSCVAIIYTSLVAFAQEDIKKLIAYSSVAHMGFVTIGIFSFNQHGLDGAIFQMISHGLISGALFLSIGVLYERTHTRDINSFGDYASKMPRFSVFLMIITLGSVGLPGTSGFIGEFLVLLGVWKISPLVTILAGSSLILGAVYMLRFYRKIAFGLYNTSSTLEIKEINYREFLLFLPLTVLIIILGVFPNLLLVFFNQPNLFIIDLLNG

SEQ ID NO: 99635 - protein, 265 aa, Unknown
  Bacterial polypetide isolated from the Sargasso Sea
TWLPDAHVEAPTARSVLLAAILLKMAGYGFIRFSLGLFPVASEVFTPLIYTLSVIAIIFTSLIALMQEDMKKLIAYSSVAHMGFVTLGIFTLQQQGIEGSIIQMISHGLVSAALFLCVGVVYDRMHSRMINSYGGIVTIIPKYSILFMLFTLAALGLPGTSGFIGEFLILMGAFKDNFLVAVIASLGVILGAAYMLWLYKRVVFGKLVNEDLKKMFDLNRSEYLILSCLAVPTLFFGFYPDPLINTIEVSVTDLINMHNTNIASK

SEQ ID NO: 99636 - protein, 220 aa, Unknown
  Bacterial polypetide isolated from the Sargasso Sea
RSAPGLGKAPKEQDLSSYDYFYAHLDVVIVGGGISGLVTANNLASLGLKILLVEQKHFFGGYTLSEEFKINNLDSSKFIKNLEDDLSKNKNVILKKNFSVVGVHDHSYLLGLENLEVLESEGQSSIRHRLWRIRTKHMILATGAIERPLVFAGNDIPGVILSSAASEFYKLYGISPGDRVILITNNDSAYSSVIELFSAGIGIPLVIDVREKSVGELPLK

SEQ ID NO: 99637 - protein, 85 aa, Unknown
  Bacterial polypetide isolated from the Sargasso Sea
MEKITKNLQLILLAIILLSTVIAVGIEIKAMFLNQSVTLADLLLMFLYLEVLAMVRVFWNQQSISITLPLLIAITALSRFIICKE

SEQ ID NO: 99638 - protein, 302 aa, Unknown
  Bacterial polypetide isolated from the Sargasso Sea
SYLLSGYLKRDPRSSEAALKYLLVGSAAAAVYLYGSSFLYGLSGSTNLTTIGLEIINKPSFITSLALVFVLSTVAFKIAAVPFHQWTPDVYEGSPTPVVAFLSVGSKTAGFAFAIRILSTTFSSFDEEWKLLFTILAILSMALGNVVALAQTSMKRMLAYSSIGQAGFVMIGIVSGTQDGLSAAVLYLAAYLFMNLGAFSCVILFSLRTGSDRILDYSGLYQKDPLITLGLSLCLLSLGGLPPMLGFFGKIYLFFAGWANHQYLLVIVGLVTSVISIYYYISVIKMMVVKEPQEASEIVKSY

SEQ ID NO: 99639 - protein, 212 aa, Unknown
  Bacterial polypetide isolated from the Sargasso Sea
MKKNFKRRDFIKKAGVAAAAATAVSSFPAPAIAADRIEVNCVATWGRGYPGLGTGGEAVSQRISDLSDGRIVVNHYAGGERVGPLDVFTEVSSGNAQMYNSADYYWVGQHPGWGFFAAVPFGLISTEINGWIRHGGGQELWDELADGFGLKNFMAGNSGVQMGGWFNKEINSADDFKGLKMRMPGLGGMMVTKLGASVVGMPGGQIYENLVN

SEQ ID NO: 99640 - protein, 121 aa, Unknown
  Bacterial polypetide isolated from the Sargasso Sea
LIKNLGIDWREGEKYFAQSLVDYDVLVNNGNWQWVSGSGADSQQYIRVFNPELQSKRYDLDAEYIKFWLPQLKNIPSKELHEWSKYHKNYDMKKINYFEPIIDYKNSKKKMMELYKKALHP

SEQ ID NO: 99641 - protein, 84 aa, Unknown
  Bacterial polypetide isolated from the Sargasso Sea
MIKILKNSWALFTGYFILMIAHGLQGNLLGVRSVIEDFNFIATGAIMSGYFVGYFSGANIIPKLVGKVGHIRVFAAFASMASLS

SEQ ID NO: 99642 - protein, 33 aa, Unknown
  Bacterial polypetide isolated from the Sargasso Sea
RAAIKAFVVNRVGDFGLALGIFLIFYILWYSQL

SEQ ID NO: 99643 - protein, 207 aa, Unknown
  Bacterial polypetide isolated from the Sargasso Sea
MKEKLFSYISFYQWWKSIDKPILSLISLLFLVGLFFSLVSTSLIASDKLDTNTYFFFFKHTVFVFFGFFLIFFFSFIPEKEIYRVSIIFFCLSLVLLLLVPITGVEIKGSKRWIDLVILPRIQPIEFVKPFLIVTISMIICSQKYTNFNLRYFLSFLLTMLISSLLILQPDIGQTLLIGFSWLVLIFISGINIFFLSLVFFISLTGI

SEQ ID NO: 99644 - protein, 283 aa, Unknown
  Bacterial polypetide isolated from the Sargasso Sea
MVCQLYGALRHLHSLGVLHRDVKLENLLCDTRVRPPAVKLCDLGHATRLDDLGSDRNFFGTPGYAAPEVTQGPLWTTAADAWAMGVVMFALLSNALPFEEAHGWKRPADFSSRVWWKVSLEAKLLLQALLEPNLSERGGLDTFEASAWPRMRFDGTTAGVPEPHGIRHAYSMRDMSVIGGPNAAMQHAASWSDGLDLSACSTPTASLAAASAATGATSAATPNPQSFSAMVSAAAAAAVRSNGPPAANATSTFPGAPQPPGFYTGPSAAVLSAAMPSAAMPSA

SEQ ID NO: 99645 - protein, 178 aa, Unknown
  Bacterial polypetide isolated from the Sargasso Sea
SVQELKKFGPFNILVNNAGNNIPEHFCDVTEDNFDKVIQLNVKSAFFVAQAVAQGMVESGIKGSIIHISSQMGIVGGKKRTVYCSSKHAMEGFSKSMALDLAENGIRVNTVCPTFVETELTRPFMAEKEFKDYVLSRIPLGHVGQTEDVADAVLFLASDMSKMVTGSAIKVDGGWTAI

SEQ ID NO: 99646 - protein, 257 aa, Unknown
  Bacterial polypetide isolated from the Sargasso Sea
LLMLIGTLALTGFPFLSGFYSKDLIIEFAYLKGNTVGYYACGIGIFTAFLTSIYSWRLIFKTFHGDYKNEKYQITSVHESPIIMIGPLIVLAFGSVLAGFIFKDLFMGYSSFLDFWQGSIFFLESLPKDHPPGYILYLTPILVIISIPLSYYIFLKNKSSLDAIVKSNRPIYLFLKNKWYFDELYEVLFVKSSKFLGRYFWKKIDGLIIDRFGPDGLSNLFKYFSIKAVKFQSGFIYQYAFVMLIGFSLILTFIIIK

SEQ ID NO: 99647 - protein, 284 aa, Unknown
  Bacterial polypetide isolated from the Sargasso Sea
DNKKPSFITSLALVFVLSTVAFKIAAVPFHQWTPDVYEGSPTPVVAFLSVGSKTAGFAFAIRILSTTFSSFDEEWKLLFTILAILSMALGNVVALAQTSMKRMLAYSSIGQAGFVMIGIVSGTQDGLSAAVLYLAAYLFMNLGAFSCVILFSLRTGSDRILDYSGLYQKDPLITLGLSLCLLSLGGLPPMLGFFGKIYLFFAGWANHQYLLVIVGLVTSVISIYYYISVIKMMVVKEPQEASEIVKSYPEINWGIVGLPPLRIALYTCVAVTALGGILSNPLFK

SEQ ID NO: 99648 - protein, 216 aa, Unknown
  Bacterial polypetide isolated from the Sargasso Sea
LVTGAGKGLGKACSIALAEAGAKVIILSRTKSDLDKVSKVIKKTKGSSKSFVCDVTNTEEFKKILRKIARLDILVNNAGNNRPEHFTKVKKINMEYLTNLNMKAAFNVAQLCSQKMVKTKNRKKIGGSIIHMSSQLGKVGCEGRNVYNMNKFGVEGLARGMAVELASYNIRVNTVCPTFVETPMVKKFFKNKKFKNQMLKNIPLGRVAKESDVATA

SEQ ID NO: 99649 - protein, 141 aa, Unknown
  Bacterial polypetide isolated from the Sargasso Sea
MYRDFGTIFVFIFIGIVLIYLPLLIQKLLAPNNPNPDKLATYECGEESEGSAWVQFNIRFYVVALIFLIFDVEVVFLFPWAVVFNDLGLLALVEMGIFLLILLVGLAYVWKRSDLDWVKYNVKYGRGRYSSLIQKSNTPRE

SEQ ID NO: 99650 - protein, 116 aa, Unknown
  Bacterial polypetide isolated from the Sargasso Sea
MYRDFGTVFFAVILGIVMVAIPLVISWLVAPSNKTKDKLDTYECGEEAEGSAWLQFNIRFYIIALIFLIFDVEVVFLFPWAVVFKEMGLLALIEMGIFLLILIAGLAYVWVKSDLD

SEQ ID NO: 99651 - protein, 107 aa, Unknown
  Bacterial polypetide isolated from the Sargasso Sea
MELSIIFLPLIASIISGFFGRYIGDRNSEIVTSALVSISALLSIYVLYQVIINQYEENIVIATWISSGSLDVNWSMLIDPLSAVMLVVVTSVSALVHIYSIGYMSHD

SEQ ID NO: 99652 - protein, 289 aa, Unknown
  Bacterial polypetide isolated from the Sargasso Sea
WMPILGGIWSLIIGDQQEKVVKHFSLLISLATFLFSIILYYQFDNNFLGMQFIEEFYWIESFSIKYHLGVDGIALPLIMLTSFTTVIVVLAAWEVIDEYISFYMCAFLILTGLMNGVFAALDSILFYVFWEAMLIPMFLIIGIWGGPNRVYATIKFFLYTFLGSVFMLVALLYLYSISGSFNIEDMQQTSLGLTAQKLIFIAFFLAFAVKIPMWPIHTWLPDAHVEAPTGGSVVLAAIMLKMGGYGFLRFSLPIAPDASFFFATPMILLSLIAIVYIGFVALVQEDRKN

SEQ ID NO: 99653 - protein, 279 aa, Unknown
  Bacterial polypetide isolated from the Sargasso Sea
MNLSQIEWGKKFNLVHKAKKVKGQKWHWVEAGSGDPVILLHGIPESWKCWKHQIPKLSTQFKVYALDLKGYGQSDKSDGDYSMNNVASEIISLLDSLKIDKFRIAGHDWGVAIADNIIDQIPDRVERYIRCCLSLHNYDPRNSLHHQWNSENPDAATRLMNKSEAYVKVWFESSCKPELIPDQKEINEIVKEFSYPGIGNAVPRYFRDITKNKPVDLSKFTMPILYIHGEHDPRQPIEYCFGMEKHLPGLEAILVLDSGHFITRERPIDTTNAMMWFFN

SEQ ID NO: 99654 - protein, 105 aa, Unknown
  Bacterial polypetide isolated from the Sargasso Sea
MEILILFLPLIASIISGFFGKYIGDRNSEIVTSALVSISAIFSIIILYQVIFNQYEDNIVIATWINSGSLDVNWSMLIDPLSAVMLVVVTSISSLVHIYSIGYMS

SEQ ID NO: 99655 - protein, 233 aa, Unknown
  Bacterial polypetide isolated from the Sargasso Sea
SFLLNPNYAEAYYNMGNSLQRKGKLSEAIEYFNKALVIKRDYAEAHMNLGVLFTIQSKYIDAINTYNKALLINPNYAEAYYNMGNSLRHQGKLSEAVVSFKKALTIKTDYAEAYMNMGLVLKDQDKLEEAIESFKSAITIKEDFAEAYMNMGITFTEQNKIDKAIKTYNKALLIKPNYAEAYYNLSFSYNLRGDLHKGLKLYEWRLKKKKPLAMMPKENFEWDGKKSVLGKIF

SEQ ID NO: 99656 - protein, 268 aa, Unknown
  Bacterial polypetide isolated from the Sargasso Sea
MSYKSIFNKELFSGKNIIVTGGGSGIGRCIAHELSSLGSYIILIGRNKEKLKKVMKEIKSSNGNASYYVCDIREEEKVQQCTKEIFDQYKVIYGLVNNAGGQFPSPAEYISQKGFETVVRTNLVGGFLFSREVFNQGMIKTGGNIVNITADMWNGMPGMSHSGAARSGMDNLTKTLAYEWGYAGVRVNSVAPGYIASSGLDTYDDGIIKEIIPKLKKIVPLKRMGTEAEVSAAVCFLLSEAAAYINGICIQVDGGSPLGSNFWPLKET

SEQ ID NO: 99657 - protein, 190 aa, Unknown
  Bacterial polypetide isolated from the Sargasso Sea
MSYDILITGLIIVAQILAVLVPVLISVAFLVYAERKVLALIQLRRGPNIVGPFGILQSFADALKLITKENIIPSGSNKIVFILAPIITMVLSLAGWAVIPFAPGWVLSDINVGIMYLFAVSSLGVYGIIMAGWASNSQYPFLGALRSAAQMVSYEVSIGFVIITVLLCVGSLNLSKIVLAQQTVWFAIPL

SEQ ID NO: 99658 - protein, 283 aa, Unknown
  Bacterial polypetide isolated from the Sargasso Sea
MLVLTLGMGIGRFLYTPMLPVLLSEGQFTFDQLSWIASANYAGYLAGSLLFSFGLFHLPSRLRPMLLTSALATAGLILAMASLTQPALVMLIRFLAGVASAGMMIFGSMIVLHHTRHPFVIAALFSGVGAGILLGNEYVISGLHFALSSHTLWLGAAAASALFFVLLVILLPSRDHVLPAAAPVKTEHQPMSWWLLALLYGLAGFGYIIVATYLPLMAKSAGSPLLTAHLWSLVGISIIPGCFAWLWAARRWGVLQCLTANLLIQSACVLMTLASGSLPLLVI

SEQ ID NO: 99659 - protein, 209 aa, Unknown
  Bacterial polypetide isolated from the Sargasso Sea
MFTHNLDPILINFGFISLRWYSLAYIFGILIGWWYGKKIIKKFKNKHGNFLADDFDDLITYLIFGIVIGGRVGYVIFYNLNYYIENPLDIIKIWQGGMSFHGALIGIIIGTFFFSYRRDKNALFFLDIIACVSPIGIFFGRIANFINGELVGKISSMPWSVIFPNVDMMPRHPSQIYEAILEGVILFLIVNFFINKKEYIIGTCSYIFL

SEQ ID NO: 99660 - protein, 235 aa, Unknown
  Bacterial polypetide isolated from the Sargasso Sea
MKEKLFSYISFYQWWKSLDKLILSLILILFLAGLFFSLVSTSLIASDKLDTNTYFFFFKHIVFVFIGFFLIFFLSFISEKEIYRISIIIFCLSLVLLFLVPIIGVEIKGSKRWIDLLLLPRIQPIEFVKPFLIVIISMIICSQKYTNFNLKYFLSFLLTILISSLLILQPDIGQTLLIGFSWLVLIFISGINIFFLSLVFFISLTVIASIISYLPQFKYIKDRLFSFFNPETGTH

SEQ ID NO: 99661 - protein, 147 aa, Unknown
  Bacterial polypetide isolated from the Sargasso Sea
MFTHNLDPILFEFGLISIKWYSLAYIFGILIGWWYGKKIILKKTHILKKKFEIKFFDDLITYIIVSIILGGRLGYVFFYNLEYYLNNPLDIIKIWEGGMSFHGALLGIIIGTFIFAKKNDIKTFFLLDILACASPIGIFLGRIANFI

SEQ ID NO: 99662 - protein, 274 aa, Unknown
  Bacterial polypetide isolated from the Sargasso Sea
LPDAHTQAPTVGSVILAAVLLKLGTYGFIRIAIPMLPEAAAAWAPFIGLLAVIGIIYGALGCLAQRDMKRLIAFSSVAHMGFVMLGISTLTDFGINAAVFGMVAHGLITGMLFFIAGSMKDRYHTLDMGRLGGLLVSAPRLGWILGFSAMASLGLPGLAGFWGEFPAILASYNPASILPEGTFRGYMVVAALGTVLAAGYLLWMLQKTAMGNPKEEFADNEEITDVKKHEWIAWAPILALILLFGLYPRPIFKTTDDAVVKSLTVDIQGEEFEN

SEQ ID NO: 99663 - protein, 313 aa, Unknown
  Bacterial polypetide isolated from the Sargasso Sea
MNLYTPYRGLLLFHGLGSGKTCSSIAIAEGFKHVQNIMVLTPKSLISNYIEELKNCGDPIYKTNYFWTFHAIYEDINSKSSVKANLIEQFTTELSLSEAFLHKKGGAWVPDSTLQPNFNSLTLDQQKQIMEQINHMIYSKYTLVPYNGLRKDNVNQKLQTFNGTKNPFDDKVVVVDEAHNFVSTITNKIKTKKYDTVPYMLYRWLLSAHNCRIVFLSGTPIINSPLEIAVLFNILRGLIYEWTIVLRTKESLTINTEYFLKLFKKQSLASISSDKPITISEVLDDVNYKPSTHTLKFTRNPSGFLNNSKIQHT

SEQ ID NO: 99664 - protein, 67 aa, Unknown
  Bacterial polypetide isolated from the Sargasso Sea
MLVFLLSVIGKILGLVVPLLVAVAYLTLAERKVMASMQRRKGPNVVGFFGLLQPLADGLKLLIKEPV

SEQ ID NO: 99665 - protein, 138 aa, Unknown
  Bacterial polypetide isolated from the Sargasso Sea
MYRDFGTVFFAVILGIVMVAIPLVISWLVAPSNKTKDKLDTYECGEEAEGSAWLQFNIRFYIIALIFLIFDVEVVFLFPWAVVFKEMGLLALIEMGIFLLILITGLAYVWVKSDLDWVKRRIKYGGGRYKQIAGSTED

SEQ ID NO: 99666 - protein, 98 aa, Unknown
  Bacterial polypetide isolated from the Sargasso Sea
TYECGEVVEGSAWLQFNIRFYVIALIFLIFDVEVIFLFPWAVVFKDLGLLALIEMGIFLLILSVGLAYVWVKSDLDWVKRRVRYGTGRYKNIAIDQES

SEQ ID NO: 99667 - protein, 123 aa, Unknown
  Bacterial polypetide isolated from the Sargasso Sea
MEKFIIFLPLFAAIISGFFGKIIGNRASQITTSLFVSVSALLSIFVFYDVISNGYSNNILIAKWINSGLLDVNWSIKIDQLSAVMLVVVTLVSAIVHVYSIGYMSHDPHQPRFMSYLSLFTFS

SEQ ID NO: 99668 - protein, 261 aa, Unknown
  Bacterial polypetide isolated from the Sargasso Sea
MYIHNLDPILFDFGIVVIRWYSLAYIFGILIGWWYGKKIVLKKSLIGKNYFETDKFDDLITYLIVSIIIGGRIGYVIFYNLGYYLQNPLDIIKIWEGGMSFHGAIIGVVVGTYIFSKKMKIKTFFLLDIVACVSPIGIFLGRIANFINGELIGKTTNVYWGVIFPKVDNLLRHPSQLYQAILEGFILFLIMNYVINKKDYKIGDCSYLFLIFYGLFRIFSEFFRQPDVQIGYVLGSITLGMILSIVMIFAGIILYFKKNEI

SEQ ID NO: 99669 - protein, 138 aa, Unknown
  Bacterial polypetide isolated from the Sargasso Sea
MYRDFGTVFFAVILGIVMVAIPLVISWLVAPSNKTKDKLDTYECGEEAEGSAWLQFNIRFYIIALIFLIFDVEVVFLFPWAVVFKEMGLLALIEMGIFLLILIAGLAYVWVKSDLDWVKRRIKYGGGRYKQIAGSTED

SEQ ID NO: 99670 - protein, 156 aa, Unknown
  Bacterial polypetide isolated from the Sargasso Sea
MHKGTKQRFSIFVLIVLSITLIFIETIQTKPLNYVRAFVKDVIYHATSVVTAPSRSLGSFSLYVKEHINLYKDYSELKKENTELKNKISKSDYLELENNQLKQLFEEQMALPENFVSARVMIDKQSPYLNSFIINIGGNKKIKNGLEVLNGKNFIG

SEQ ID NO: 99671 - protein, 213 aa, Unknown
  Bacterial polypetide isolated from the Sargasso Sea
SPEAPYSVKHFIDDVNSLIPKIHSRNKAIIICGGSAMYLKSLLYGYTPLKRLPVSERPQGSKESLWNQLHIIDKALADKTPYQNKQRVQRYLELYAIYKKPPSELFQSHSFQSDKYKVIGLSIEKENLKEKISNRVDLMIAHGLVDEVHTLMEKYNHGSPAFSAIGYKEVIQYLQGKFSKDFMIDLIKKNTIYYAKKQMTWFRIFDDVHWINQ

SEQ ID NO: 99672 - protein, 229 aa, Unknown
  Bacterial polypetide isolated from the Sargasso Sea
MFTHNFDPVLFDLSFISIRWYSLAYIFGILIGWWYGKKIILRRFTFVKNKFDLKEFDNLVTYLIISIIIGGRIGYIVFYNFGYYLNNPLSIFKIWEGGMSFHGALIGVTVGTILFSQKKNIQSLFLLDIIACVSPIGIFLGRIANFINGELVGKVTSVPWGVIFPNIDMVPRHPSQIYEAFLEGVLLFLIMNSIIFKKNYITGTCAYLFLINYGIFRIISELFREPDTQ

SEQ ID NO: 99673 - protein, 96 aa, Unknown
  Bacterial polypetide isolated from the Sargasso Sea
MYRDFGTVFFAVIMGIVMVSIPLIISWLIAPSNKTKDKLDTYECGEEAEGSAWLQFNIRFYIIALIFLIFDVEVVFLFPWAVVFKEMGLIALIEMG

SEQ ID NO: 99674 - protein, 136 aa, Unknown
  Bacterial polypetide isolated from the Sargasso Sea
MYRDFGTVFFTSIVAIIFVVVPLVIAWLVAPSNKTKEKLETYECGEVVEGSAWLQFNIRFYVIALIFLIFDVEVVFLFPWAVVFKDLGLLALIEMGIFLSILVVGLAYVWVKSDLDWVKRKVRYGTGRYSKIAMDQ

SEQ ID NO: 99675 - protein, 101 aa, Unknown
  Bacterial polypetide isolated from the Sargasso Sea
MELSIIFLPLIASIISGFFGRYIGDRNSEIVTSVLVSISAFLSIYVLYQVIVNQYEENIVIATWISSGSLDVNWSMLIDPLSAVMLVVVTSVSALVHIYSI

SEQ ID NO: 99676 - protein, 102 aa, Unknown
  Bacterial polypetide isolated from the Sargasso Sea
MSYVLVFAPLIGFLLTICFGKLLGDRISQILTSSLVLVSTLISFFYFFKFISNDTAIINDQIINWLSSGKLNFDWSIYIDPLTSLMLVIITLISFLVHIYSI

SEQ ID NO: 99677 - protein, 242 aa, Unknown
  Bacterial polypetide isolated from the Sargasso Sea
VGDLAFATVSVLWSGFKKDFTKFKDLLKKELNFNQDVYFYMRLIAVVADRSALLDDIEKMTPSELRKTWKLVKTILPEILKAFKTELNIFSDKDLVTKNVIYIIAAYLSKRPNNSFKSKNDRKMWMYFVLLASVHRRYSGSGGDNKINIDADKAREGDINKVIRNIDEQANVREIHPNLVKGADGSKSNPIFWSYSLMLRKNGAQDWVTGIEFFPPKSDLSPTHIHHIFPKAKLDEIRELKQ

SEQ ID NO: 99678 - protein, 91 aa, Unknown
  Bacterial polypetide isolated from the Sargasso Sea
MRAYSACILFALFFLGGWQLPFEDTLVSLPYVGVIFDFLANATPGLLVLLLKAYLMFAFFVWVRASLHRVRTDQILEFGWRWLLPASMDNL

SEQ ID NO: 99679 - protein, 273 aa, Unknown
  Bacterial polypetide isolated from the Sargasso Sea
GELGMTAQLVLMGALLIGFGIKIPLFPFHTWLPDAHTEASTPVSVLLAGVLLKLGTYGLLRFCLGLFPEAWQLASPWLAAWAAISVLYGSLAAIAQTDMKRMVAYSSVGHMGYVLLAAAAATPLGLMGALFQMISHGLISGVLFLLVGVVYARTGTRDLNVLRGLLNPQRGLPLTGSLMIIGVMASAGIPGMAGFISEFLIFRGSLQPFPIATLLSMVGSGLTAVYFLLLVNRAFFGRLAIAPGEVVNPRILDRVALREQVPAIALSLGVLVL

SEQ ID NO: 99680 - protein, 187 aa, Unknown
  Bacterial polypetide isolated from the Sargasso Sea
NMGSPLYFCYHYQSHHFFPIPPDVLLIALCLGMHSKALYFAFVCSLASVLGAMIGFAIGYFTWWNSVGEYSTVALFFFNNIPGFSEELFSTIQQKFDLYNFFIVFTAGFTPIPFKVITISSGAFNINFPMFIIASTISRSARFFLVAILIKKFGEPIKGFIDRYFNILSILFTVLLIGGFFLIKVLL

SEQ ID NO: 99681 - protein, 250 aa, Unknown
  Bacterial polypetide isolated from the Sargasso Sea
MENSPFVLIPQIGVAWHVGADALSLPMIWLTALVVPVSMLVEWDAKRGHQFHPLLLIMEGAMIGVFVSLDLFVFYVFWEMTLIPMFFLILMWGGEDRRYAAMKFFIYTFTASVVMLIGILVMYFNTGSTIAERSFDMVHMLESGDQMTEGLRHLVWVLLLIGFATKMPSVPVHTWLPDAHVQAPTAGSMILAGVMLKMGAYGFLRVAVTAFPGSTVVFTPLLVGLGMVSLVYGAWVCMGQTNLKRMVAYS

SEQ ID NO: 99682 - protein, 119 aa, Unknown
  Bacterial polypetide isolated from the Sargasso Sea
LLIQKLLAPNNPNPDKLATYECGEESEGSAWVQFNIRFYVVALIFLIFDVEVVFLFPWAVVFNDLGLLALVEMGIFLLILLVGLAYVWKRSDLDWVKYNVKYGRGRYSSLIQKSNTPRE

SEQ ID NO: 99683 - protein, 137 aa, Unknown
  Bacterial polypetide isolated from the Sargasso Sea
MVNNLNPVLIDLGIIKIHWYSLAYIFGILIGWWYGRFLIKKKVRFIDQENYIKNFDDLISYIIIGVIIGGRLGYVIFYNPSYFIESPIQIFKLWEGGMSFHGGLIGVIVSTYIFSNLKKLNYKVYFDLICCVAPIGI

SEQ ID NO: 99684 - protein, 161 aa, Unknown
  Bacterial polypetide isolated from the Sargasso Sea
MGVVLMIFYWLYYNRILKNLLNTTKNYYFFKFGILSASFLLLHVFFLGWTFENEILTKLRRTLVIFFILFEVLAQTFLIKQIFSIKDKINNYLNLIIVYLKLLFVFLVCSSTIIILTILIFYDLDAKFDYILEWNYFLLLLIFYFLSFLMWKKLIRNPASS

SEQ ID NO: 99685 - protein, 144 aa, Unknown
  Bacterial polypetide isolated from the Sargasso Sea
KPELIPDQKEINEIVKEFSYPGIGNAVPRYFRDIPKNKPVDLSKFTMPILYIHGEHDPRQPIEYCFGMEKHLPGLEAILVLDSGHFITRERPIDTTNAMMWFFNSMLGSGLKIFKRSKELGLPTKPTKALKNKFGVNSVKFDKK

SEQ ID NO: 99686 - protein, 110 aa, Unknown
  Bacterial polypetide isolated from the Sargasso Sea
TTYYLLPTTTTTTTTTTTTTTRTTTTTTTTTTTTTTTTTTTTTTTTTYYYYYTTTTTTTTTTTTTITTFTTTTTTTTTIITITTTTTTTTIITITTTTTTTTNIRRPWGG

SEQ ID NO: 99687 - protein, 147 aa, Unknown
  Bacterial polypetide isolated from the Sargasso Sea
WFDSSCKQETKPSEDDIQMIIAEFSYPGIAESVPKYFRDTRKSVPVDYSKFTMPILYIHGEHDPRQPIEYARGMEEHLPGLQAILVLDCGHFSTLERPQDVTNAMMWFFHSMLGAGLPIFDRSRHYGLPTKPVGVVENWGVNPGMKN

SEQ ID NO: 99688 - protein, 119 aa, Unknown
  Bacterial polypetide isolated from the Sargasso Sea
MVRLIGNVLVSGLAIILLSSCAAGVKVIDTYKIEKKREPLALADPKPLELQDIDWIIITKDNADEVFEKIKNDKNGDYALFALTDNGYEKLALNFADIRNKIAEQRQIILSYKDYYESE

SEQ ID NO: 99689 - protein, 685 aa, Unknown
  Bacterial polypetide isolated from the Sargasso Sea
GPNGVEPITPTQLLAYHLDLAQLASGRSFIGAMASAQPPGSGTQARTALPVPEQDPAALLTSEGIGSNGWALGADRSSNANSLLLGNPHFPWDGELRFYEQHLQIPGELNVTGATMMGFPAILIGFNEQLGWTHTVSQSKRFTLYQLTLDPANPLRYRYGDQWREMSQKEIAVQVRQADGSLQPYVQTVYASHFGPMVNLASLSPSLGWTSSSAISFRDANAGNYKMLEQWLAMARAQSTPAFFDALAEHQGVPWVNTLLIDKTGQASYVDATQVPRLGTKAEAWWRAASQTPQLAPIWLDGEGSVLLPGNDPDFEWVDSGQTRVLGLVPLSQAPRQTRSDYVYNANSSHWLTNLAAPLEGYSILYGPEQTVRSPRTRYNAQLISTPDTMGLTGSDRRFTLQSLQRVLTHNGSLFAHELRDPLLARCQAHPLIQLTSGPLDLTPSCNALANWDGEYQLESRGAHLMREWLTAFRTSGHRDIKDALFAIPFDPAHGATTPSGLAPWSGAPDLDPALLALAQAQQRLQAAGIAPDAELGALQFVQKAAGLTPIALPGGNSFEGMFNMVQTNLPSRSSSDLANIVTGKAVAGTTLRSLDDDGDGQPELRYRANYGSSFVLALQFDAAGPKAERFLSYGQSHDPESPHFTDQTEQFARQQWQPMRFTEQEIAAHQERTLHLKVLRTTSP

SEQ ID NO: 99690 - protein, 129 aa, Unknown
  Bacterial polypetide isolated from the Sargasso Sea
MNALWIPAWYELDPSIVVGVTEEFVFHKPATNEALRFYSGAKETDAVKATGAISSIHHRVLGDIESVDAQGLDYTVVLKDGRRLLVNAEEDPGLIYEWVDDSWQPSEMVIQDWQLDVKFTSLSPFKTVD

SEQ ID NO: 99691 - protein, 705 aa, Unknown
  Bacterial polypetide isolated from the Sargasso Sea
MIRPTVEWNATIVCYLLMFSCLVSPTVIGVPPVIAYMMAVIWFLLGNKYFKEARSHFSFINGLWRIKPFHMHPNDLPGTDDTIYLGRGFLITPIHTQRLYELNNETTRKYMNPPAMYFWFRKAEAFFGRLSKFFLIGIPFAMAAAALREPRWYNPFPYFPIDLLDPNNTYGNPYLHGVGGDEEQDLFAPFADSNSHTLVLGTTRQGKTINAGIVVTQDIMRFSKSKSGDDCAVIMIDPKGDLELAVRMFIAAYRAGKADKFYFFHLAYPHLSVRYNSIAEYSRETEVATRTTNPLSDSGNSKVFKDFAWQFINISAMALKRMGKTPTYKIISKYLKDPELLAEDYINRVIRDDELDGIIHAIADKIENNKKDLSPQERSKNPRSIALTKLISDPPEDYVDLIRNDDVLRSIADGLKHDRSYYDKITASAKPHLDKLTSGAVADLISPNYDDVKDQRPIIDLKQIISSGGILYAGLDFQSDPVTGAAVGNGFLTEILSISGEIYNYGIDNGMPIEKDKKRRKPMVRLHIDEANEIFGKEFNPILNKAGGSGVSVVAYTQTISDAEVKLESPALAAQALGNFGTIISFKVRGQDTSTYLSELTQMVRVMTDTPDTKAADGMGSAADGQFKSSNSDSASFAEERLIPEYAFRDLPKGQAYVYAQSRWYKVRMPIFLKDEDMPKDLAEMERVIASVRGYSTSKLREYVR

SEQ ID NO: 99692 - protein, 330 aa, Unknown
  Bacterial polypetide isolated from the Sargasso Sea
MLIPCLAVFGFITVYALIVIYAELKVSSFIQDKVGPMGQGVGLHAGKWGLLQPVADALKLLLKEDIIPSSADKPLFILAPFMIFIGAFISFIAIPFGDSIIIADLNIGLFYILGVGSIAVLSLILAGWASNNKWSLYGGMRSAAQIVSYEIPAGLSLIVVIMLAGTLNMQDIIAYQAGGMFNWIIFDNPFVPITFVVYFISAIAETNRTPFDLPESESELVAGFATEYSGMRYAFFFLSEYANMFVVSAVAAAGFLGGWHSPIAGFMDSSAWGVFWMVSKTFFLIFVMIWLRWTLPRLRVDQLMNVCWKVFLPLALINIFGVAIWTVVFN

SEQ ID NO: 99693 - protein, 234 aa, Unknown
  Bacterial polypetide isolated from the Sargasso Sea
MILFLPLVAFVINIFFGKRLPRQGDWVSVGAILTTLLLSLILLFSMFANGNSSFSHEVIMPWIDLGAFQIDLGFWVDNITIVMLVVVALISSMTHLFSIEYMKGDVRYNRYYAYLGLFTFSMNGIVLANNLISLYIFWELVGVSSFLLIGHWFEKHSAADASKKAFLTNRVGDIGFFIGIMLIFTAVNSFNFQDVFQGVNQGLITGSLLTLAGIGLFMGAVGKSSQFPLHIWLP

SEQ ID NO: 99694 - protein, 138 aa, Unknown
  Bacterial polypetide isolated from the Sargasso Sea
MYRDFGTVFFTSIVAIIFVIVPLVIAWLVAPSNKTKEKLETYECGEVVEGSAWLQFNIRFYVIALIFLIFDVEVVFLFPWAVVFKELGLLALIEMGIFLLILVVGLAYVWVKSDLDWVKRRVRYGAGRYSKIAMDQDK

SEQ ID NO: 99695 - protein, 264 aa, Unknown
  Bacterial polypetide isolated from the Sargasso Sea
MVHNFDPVLIDLGIIKIHWYSLAYVFGILIGWWYGRLIITKKIHGSDQENYLKNFDDLVSYIIIGVIVGGRLGYVIFYNLTFFLNQPIEIFKLWEGGMSFHGGLIGVILSTYIFSKVKKLNYKIYFDIICCAAPIGIFLGRIANFINSELYGTPTDKPWGIIFPEIDNLNRHPSQLYEAFLEGIVLFVLINFLFLKKNFNHGLISFLFLIFYGIFRIISEFYREPDKHIGYIFDFISLGSLLSIGMMIFAILFILKINFNEQNK

SEQ ID NO: 99696 - protein, 380 aa, Unknown
  Bacterial polypetide isolated from the Sargasso Sea
FFVFFEIVLLPMYFMIGIWGDKTVRTVAGFKNQIETRLYASIKFFVFTLFGSAFMLLGFLGLYYRGNRTFSIPELIELGTNGAFTGTFAMLVFAVLFLGFAVKVPMWPLHTWLPDAHTAAPTVGSVLLAAILLKLGSYGFVRIAIPILPEQAKAWAPAIAILSAIGIIYGSLACLAQTDLKRLIAFSSVGHMGFVMLGIASLTPIGINAAMIGMVAHGVITGLLFFLSGSMAHTYHTRDMGRLGGNMKLLPKTGALLGFTAMASLGLPGLAGFWGEFMALLGAFNPLDGLNVTVFRGSMVAGAIGTVLTAGYLLWMLQRVNLGEPSDEWNEMELHDADGYELAAWIPLVILTILIGVFPKLIFGATNDAVVSLLSKAFGG

SEQ ID NO: 99697 - protein, 1026 aa, Unknown
  Bacterial polypetide isolated from the Sargasso Sea
MIKAFVENGRLVSLVIALLLVAGFGAMSSLPRTEDPHITNRFASVITPYPGASAERVEALVTEVLENQLRRLEEIKLIQSTSRPGISVIQLELKDTVTDTAPVWSRARDLLADARNTLPDDIQTPTLDDQVGYAYTAILSLVWNDNSQPRVDMLNRYAKELQSRLRLLSGTDFVKLYGAPEEEILVQLDGYKMSQLQLTPGTIAKILSSADSKIAAGEINNNHFRALVEVSGELDSQNRIRQVPLKVDNDGQIIRLGDIATISRQAKKPADSIALVDGEQSVFVAARMLNNTRVDIWQGQVKQLVDELNNELPANIKVQWLFEQNSYTSDRLGGLVINLIQGFVIILTVLLLTLGLRNAIIVALSLPLTALFTLACMKYIGLPIHQMSVTGLVVALGIMVDNAIVIVDAISQRRQQGMSRLNAVTETLHHLWLPLAGSTITTILAFAPIVLMPGAAGEFVSGIAISVMFALFGSYVISHTLIAGLAGRFSLEGKHPIWYQHGINMPLVSGYFQASLRFALNRPLLSATLIGIIPLLGFYASGKMTEQFFPPSDRDMFQIELYLAPHVSLENTLNQVQLMDKQLHQIEGISQVDWVVGGNTPSFYYNLTQRQQGATNYAQAMVKASDFERANALIPELQQSLDKDFPEAQVLVRKLEQGPPFNAPVELMIFGPNLETLRTLGDEIRHILAATPDVIHTRATLSAGAPKVWLQVNEDASLISGLSLTDIARQVQMSTTGVIGGSVLEQTESLPIRVRLGESSREQASRIAEIQLMTPSGTAVPLSALSHNEVQVSRGAIPRRNGQRVNTIEAYIVSGVLPAQVLNDVKDKVAAIKLPAGYRIEIGGESAKRNEAVGNLLSNIILVVTLLLATVVLSFNSFRLTAIILLSALQSAGLGLLAVYVFGYPFGFPVIIALLGLMGLAINAAIVILAELEDTPNGRAGDKAVIINIVSGCGRHISSTTITTVGGFIPLIIAGGGFWPPFAIAIAGGTLLTTLLSLVWVPTMYLLLMKNRNRSDTSPLSPQIAS

SEQ ID NO: 99698 - protein, 494 aa, Unknown
  Bacterial polypetide isolated from the Sargasso Sea
MLDFIVTITIFFPALTAIFLLLLNDRKKIVITSISSSVLTFLLSLVVFLSYDKSKGGIQFIDHFQWIDSLNIKSSYLVGVDGFSAPLVLLTGLLSMVACMASWRIEKRVKEYFIWILLLVTSVMGVFTALDLLLFFVFFEFELIPMYMLISIWGSGRKEYSATKFVIFTLAGGAFMLVAILALFSSESVTNLSMVSIDELGIIGIPELIAGQKLIIPASIIFIFFFIAFAVKLPLWPFHNWLPDAHTDAPTAVSIMLAGVLLKMAGYGLFRINLGFFQETYGFQIFDYTNFLVILGTISIIYGAIVTLRQTDLKRLIAYSSISHMGYVLLGFSAITKNGDFSYYALNGSAMQMFTHGTITGLSFLTVGLIYDRTHTRDINKLGAIARKMPMVALFFVISGLASLGLPGLSGFVSEIMVFLGTYKVYPVETIISAFGVVLAAGYILWMTQRALFGDNNLDKSDKTYDFNSLKDANSLDLLPAFIITIPIILIGFF

SEQ ID NO: 99699 - protein, 387 aa, Unknown
  Bacterial polypetide isolated from the Sargasso Sea
MVTWLVAFGSNISALWILNANGWMQYPTGAHFNIDTLRMEMSSFSELVFNPISQVKFVHTVMSGYVTGAMFVMSISAWYLLRGRNREFARRSFAVGSVFGTLAILGTLQLGDSSAYEVAQRQPVKLAAMEGEWQTEPAPAPFHVIAWPQQEQERNAFAVKIPALLGILATHSLDTPVPGLKNLMEDALPRLQRGREAWLLMQEIAKGNRTPQVLNAFHAVEKDLGYGILLANYAPDMNHVTPEQYQAAQRGAIPQVAPVFWSFRIMIACGSLLLLVMAIALIQTLRWRIDQHRWVLHMTLWSLPLPWIAIEAGWFMTEFGRQPWAIQDILPTWYAHSALSAGQLAFSMGLILTLYTLFLIAEVYLMQKYARLGPDAMHNQQPAQQQG

SEQ ID NO: 99700 - protein, 138 aa, Unknown
  Bacterial polypetide isolated from the Sargasso Sea
MYRDFGTVFFTSIVAIIFVVVPLVIAWLVAPSNKTKEKLETYECGEVVEGSAWLQFNIRFYVIALIFLIFDVEVVFLFPWAVVFKDLGLLALIEMGIFLSILVVGLAYVWVKSDLDWVKRKVRYGTGRYSKIAMDQEE

SEQ ID NO: 99701 - protein, 492 aa, Unknown
  Bacterial polypetide isolated from the Sargasso Sea
MGFDKIKKEIIMNVDYFKSALLHHSKGNWNKAKEIYEHILKSNPNNYSVLQNYGPLLSQLKEYKLAKNIFEKSLKIKPKDPLLLYNYAKFYHDQRIFEKAIQLYKESYEIEPRNNFSMYNIGNIYFSINKLDLAINAYKNSLKNNPKNFLAYNNLANSYKQTGNFNEAIETYKKSIEIKNNNPDVHVNYGTQLLMTENFEQGFEEYEWRKKSKSFLDYINYDKLNLKSKIWDGENLDNKKLLVISEQGIGDLIQFARYLYKIKNKYKVEITIILKSKKFLHFFDKKIFNLISDINLIPKHHYHIHLLSIPRVFYNENDLFVPTVNFFQKNDHVEKKWIDILNKYKGTKIGINSNTSLIKKNIPFDYFLNLASSFDFTFFVLQKEIDNKKIDKFKNIIFFKNIDKSENAFIDSIEIIKQLDLVITADTALAHISGTLGKKTWIPLPFVSDWRWFLDKKSTKWYDNVSLYRSKQINNWESSFKMINEDLKKTFK

SEQ ID NO: 99702 - protein, 126 aa, Unknown
  Bacterial polypetide isolated from the Sargasso Sea
MDVFVNDWMAVALSVLVGAGAIMGLFIASFIFSAKRKSQIKLTTYECGIPSEGFTWANINFRFYIFGILFLIFDVEAVFLFPWALIFLEQNSLGNPIPFYAMMMFLVILFFAILYGWRKGVFEWQK

SEQ ID NO: 99703 - protein, 206 aa, Unknown
  Bacterial polypetide isolated from the Sargasso Sea
MNYFKRLYNWVLHWSNTKYGVPALFLLSLSESSFFPIPPDVLLIALCLGMHSKALYFAFVCSLASVLGAMIGFAIGYFTWWNSVGEYSTVALFFFNNIPGFSEELFSTIQQKFDLYNFFIVFTAGFTPIPFKVITISSGAFNINFPMFIIASTISRSARFFLVAILIKKFGEPIKGFIDRYFNILSILFTVLLIGGFFLIKGIVIA

SEQ ID NO: 99704 - protein, 194 aa, Unknown
  Bacterial polypetide isolated from the Sargasso Sea
QTDLKRLIAYSSVSHMGLVLVGIGSFTSAGLTGAGMQLFTHGTITGLLFLCVGLVYDKAHTRSIPELGGLFVRMPLVAIAFTIAGLASLGLPALSGFVSEILVFSGAFPGFPILTILAVLGIILAAGYILWMLERVLFGEVKPKVQHVSDATVLEAFPLILLVIMIVALGIFPGILIDVLDQAILPVVTKFGGV

SEQ ID NO: 99705 - protein, 518 aa, Unknown
  Bacterial polypetide isolated from the Sargasso Sea
MALSPIVVGLLLMALPHLLPEDYSAQVRRVSRNICMGVALALLAISTWAAATSLSDIDWMSIAFGQYELENTPFEVIPQIGVSWHVGADALSLPMIWLTALVVPLSMLVEWDAKKGHYFHPLLLVMEGAMIGVFVSLDLFVFYVFWELTLIPMFFLILVWGGEDRRYAAMKFFIYTFTASVLMLIGILVMYFNTGATLSERSFDMAAMLDSGAQMSEGLRHLVWFLLLVGFATKMPSVPVHTWLPDAHVQAPTAGSMILAGVMLKMGAYGFLRVAVTAFPGSTVVFVPLLVVLGMASLAYGAWVCMGQTNLKRMVAYSSVSHMGLIFLGIATMQPLGIAGALFMMFAHGIISPLLFAVAGAFKHHYHTLEIGSMRGIAHHSPWLAGHMMLGWMASLGLPLMAGFVAEVAVMIAFWMTFGWLVLIPALTLVITAVYYLASMQRTIFESNDPHQGSLPDTLDHEPRDITWHENAGMAILGALTILFGILPFFFWDMMSYWGTEVMVEALADAMQSEGVTP

SEQ ID NO: 99706 - protein, 526 aa, Unknown
  Bacterial polypetide isolated from the Sargasso Sea
MTNILETFSNGLGISLVVFLPLVSAIFILFIPKTQEFLIKITTLGASVVTFLLSLIVAYQFDYDKAHTFQLGNKLSWIESINSNYEIGIDGISLPLLLLSTFISVLAIIYSFEHLPEPVNPKGMMSLILVLETGMNGTFVALDLILFFVFFELVLLPMYFMIGIWGDRTVRSVAGLKNEIETRLYASIKFFVFTLFGSAFMLLGFLGLYFRGNKTFSIPELIELGTSGAFTGTFATLVFAVLFLGFAVKVPMWPLHTWLPDAHTAAPTVGSVLLAAILLKLGSYGFVRIALPILPEQAKAWAPAIAILSAIGIIYGSLACLAQTDLKRLIAFSSVGHMGFVMLGISSLTSIGINAAMIGMVAHGIITGLLFFISGSMAHTYHTRDMGRLGGNMKLLPKTGALLGFTAMASLGLPGLAGFWGEFMALLGAYNPLSGLNITVFRTSMVAGAIGTVLTAGYLLWMLQRVNLGEPKEEWIGQDLHDADNYELAAWIPLVILTVLIGVFPKLIFGSTNDAVINLVTKAFGG

SEQ ID NO: 99707 - protein, 257 aa, Unknown
  Bacterial polypetide isolated from the Sargasso Sea
MEHPRIEVRNLKKSFREKVILDGINLKVCAGKSLVIIGASGSGKSVLTRCIVGLLKPDNGDILLDGQLLNPDLMNNRAFIASSIGYLFQNAALFDSLTVLENVSFGPLFMQNRNIKDANEIAKEIMLKLDINPKFWFLHPKELSGSSRKIVAIARALAVKPKVIIFDEPSTGLDVRASKKLDSLIRDCVEKENITSITITHDMNSARRIADDIAMLHEGKFIWSGKSNQMNKSNNISVERFIQPFLDTNCNTIRGSQ

SEQ ID NO: 99708 - protein, 69 aa, Unknown
  Bacterial polypetide isolated from the Sargasso Sea
PADDSLGVSVLKVLVFAVKTAFFLFVFIWVRWTVPRFRYDQVMRLGWKYLLPIALANVFVTGLVLTLTS

SEQ ID NO: 99709 - protein, 420 aa, Unknown
  Bacterial polypetide isolated from the Sargasso Sea
MELNKYKYSDMIITDHTFLVPLDYENKDGKEISIFAREIERKETVNKNLSYLVFFQGGPGYESPRPITDSGWIKRASEEYKILLLDQRGTGLSTPVSVDSFKGMNDSELSDYLTFFRADNIVRDAEEIRKNLIQNKKWSVLGQSFGGFCATNYLSFYPNSLEKVFITGGLPPLSAHPDDIYRSTYKRVIQKNKEFYDIFPQAKINSRKIADHLMENEVLLPNGDTLSVERFQQLGLNLGFSDGMATLNFLFERAFSNEKLSYSFLKGVLSLQTFDTNPIFTVLHEACYAQAFSTDWSAYRILDEYPEFNTENDELFFTGEMLYPWMLDSFKALKPLKGAANILAKKNDWPMLYSEKKLRENQVSTAAAVYTNDMYVDREYSMELAGIIPNMSIWETETLEHNALRSNGKLVLDSLFSRIK

SEQ ID NO: 99710 - protein, 261 aa, Unknown
  Bacterial polypetide isolated from the Sargasso Sea
MFYHNLDPIIFDFGFLEVRWYSLAYIFGILIGWWYGKIIIIKKFQTFEEKFNLTLFDDLITYLIISIILGGRLGYVIFYDMNYYLKNPFDIVKIWQGGMSFHGAMLGIIIGTFIFSKKNNIKTFFLLDIIACVSPIGIFLGRIANFINSELVGKASDVYWAVIFPKIDNVARHPSQLYEAFLEGLILFLILNYLIFKKNYKIGNCSFSFLIYYGVFRIFSEFFRLPDIQIGYIFGFVSMGMLLSTFMIFAGIVLYLKRNDL

SEQ ID NO: 99711 - protein, 470 aa, Unknown
  Bacterial polypetide isolated from the Sargasso Sea
IEQGNLGLVRHSLLERQRLRRNARHLVQRLPFLFPVMEKDGVFDKRLAKAFESLLWTYDIAGGWREGILHQKLSKAEVLSHCPTFNEENLTGGFMYFDARVDDARLTLNLARTAAFHGAAVVNHAKVVEITRNGHGSVDGVIVHADEREIRVRGGVVVMATGVWLRDWNGRKKDDPAALQIRPAKGVHVAIPWLKIRNDCTVTIPVPGRSRRATITRWGNVSYLGTTDEDYQGNLDDVCCTRQELDFLIEGARSALKTDLQAEDVVGSIAGCRPLVGPPGGKTLEMKRNHEIHTAPDGLVTIVGGKLTTSRHMAEQTIDAAQKVIGKRAKCRTKSAYLLGAAGYDAQAIVASGGLSAQLGERYGTEARFVTDILEGDSSLLKPIVEGLPYTEAEVLYAVRHELARNVDDVLSRRIRARLMARDASARAAVRVGEILQTELGLSAAAVAKQVSDYVAAVEHEKSVLMGETE

SEQ ID NO: 99712 - protein, 137 aa, Unknown
  Bacterial polypetide isolated from the Sargasso Sea
MLAGIHHVALICSDYQRSKHFYTEILGLKVLAEHYRAERLSYKLDLQLPDGSQLELFSFPNPPPRPSTPEAQGLRHLAFQVLDVAQVVSHLEQHGIAVEPVRIDPYTERAYTFFKDPDDLPLELYQISPSSLKPQLR

SEQ ID NO: 99713 - protein, 384 aa, Unknown
  Bacterial polypetide isolated from the Sargasso Sea
MHSTPSFAQQQTRRTGPLFNWLAVITLIYLILVAVGAVSHGFKGFSGGAEGAAQIFAFANNPFVALLLGILATALVQSSSTVTSVIVGLVAGGLPIGMAIPMVMGANLGTTITNTIVSLGHIRDRGEFRRAFAAATVHDFFNLLAVFIFLPLELMFGLLQKSAEALADLLAGSADMSMQGMDFMKPLLSPALTFIDGLVAFLPGKGPAIATICIGILLILGCVTWLGKVLQRVLVGRARDLLHRALGRGPLTGIASGTLVTVMVQSSSTTTSLMIPLAGGGVFSTRQLYPFTLGANIGTTITALLAATAISGAGAKLALTIALVHVLFNLFAVVLIYGVPFLRELPVKAAEGLARVGSENKLLALGYVAGLFFALPALMMVAAK

SEQ ID NO: 99714 - protein, 1026 aa, Unknown
  Bacterial polypetide isolated from the Sargasso Sea
MIKAFVENGRLVSLVIALLLVAGFGAMSSLPRTEDPHITNRFASVITPYPGASAERVEALVTEVLENQLRRLEEIKLIQSTSRPGISVIQLELKDTVTDTDPVWSRARDLLADARNTLPDGIQTPTLDDQVGYAYTAILSLVWNDSSQPRVDMLNRYAKELQSRLRLLSGTDFVKLYGAPEEEILVQLDGYKMSQLQLTPGTIAKILSSADSKIAAGEINNNQFRALVEVSGELDSQSRIRQVPLKVDAQGQIIRLGDIAHISRQPKTPADSIALVDGEQGVFVAARMLNNTRVDIWQGQVKQLVDEFNQELPANIKVQWLFEQNSYTSERLGGLIVNLLQGFVIILAVLLLTLGLRNAIIVALSLPLTALFTLACMKYIGLPIHQMSVTGLVVALGIMVDNAIVIVDAIAQRRQQGMSRLSAVTETLHHLWLPLAGSTITTILAFAPIVLMPGAAGEFVGGIAMSVMFALLGSYVISHTLIAGLAGRFSLEGKHPVWYQHGINVPLVSGYFQASLRFALNRPLLSATLIGIIPLLGFYASGKMTEQFFPPSDRDMFQIELYLAPHVSLENTLNQVQLMDKQLHQIEGITQVDWVVGGNTPSFYYNLTQRQQGATNYAQAMVKVSDFERANALIPELQQTLDKAFPEAQVLVRKLEQGPPFNAPVELMIFGPNLETLRSLGDEVRNILAATPDVLHTRATLSAGAPKVWLQVNEDASLISGLTLTDIARQVQMATTGVIGGSVLEQTESLPIRVRLGDTSREQASRLSEIQLVTPSGTAVPLSALSHNEVQVSRGAIPRRNGQRVNTIEAYIVSGVLPAQVLNDVKDKIAAISLPAGYRIEIGGESAKRNEAVGNLLSNLILVVTLLLATVVLSFNSFRLTAIILLSALQSAGLGLLAVYVFGYPFGFPVIIALLGLMGLAINAAIVILAELEDTENARAGDKEVIITTVSSCGRHISSTTITTVGGFIPLIIAGGGFWPPFAIAIAGGTLLTTLLSLVWVPTMYLLLMKTRRKAQTAALPAQAAS

SEQ ID NO: 99715 - protein, 427 aa, Unknown
  Bacterial polypetide isolated from the Sargasso Sea
STFISVLAIIYSIEHLPEPKSPKGFLALILVLETGMNGTFVALDLILFFVFFEIVLLPMYFMIGIWGDKTVRTVAGLKNQIETRLYASIKFFVFTLFGSAFMLLGFLGLYYRGNRTFSIPELIELGTNGAFTGTFAMLVFAVLFLGFAVKVPMWPLHTWLPDAHTAAPTVGSVLLAAILLKLGSYGFVRIAIPILPEQAKVWAPAIAILSAIGIIYGSLACLAQTDLKRLIAFSSVGHMGFVMLGIASLTPIGINAAMIGMVAHGVITGLLFFLSGSMAHTYHTRDMGRLGGNMKLLPKTGALLGFTAMASLGLPGLAGFWGEFMALLGAFNPLDGLNVTVFRGSMVAGAIGTVLTAGYLLWMLQRVNLGEPSDEWSEMELHDADSYELAAWIPLVILTILIGVFPKLIFGATNDAVVSLLSKAFGG

SEQ ID NO: 99716 - protein, 273 aa, Unknown
  Bacterial polypetide isolated from the Sargasso Sea
MTASSTATTPPVFSLQRGSLPLLISIPHLGTQIPADIAATMTPAAQRTDDCDWHLDRLYAFAKRMGASILVPTYARYVIDLNRPPDGANLYPGQDTTGLLPVDTFDKEPLYLEGHLPTDAEVARRRDAYWKPYHDALVGELAALKAKHGKVLLWEAHSIRSHVPRFFEGRLPDFNFGTSNGASAVAGVAEELAAIVERHGAYSAVANGRFKGGYITREYGQPSQGVHAIQLELSQITYMEEQMPYAYDESLAVKVEPLLEELVATALQRVRAA

SEQ ID NO: 99717 - protein, 593 aa, Unknown
  Bacterial polypetide isolated from the Sargasso Sea
MTKNKITAILGPTNTGKTFLAIETMLSFESGMIGFPLRLLAREVYDKIIEKIDVSKVALITGEEKIIPLNAKYFLCTVESMPIDKDLEFVGIDEIQMCNDHERGHIFTDRLLNLRGEKLTMLMGSSAIKNILQKLDDDVEFIKKERLSKLTFGGQKKISRIERKSAIIAFSTEEVYAIAELTRRQKGGAAIVMGSLSPKTRNAQVNLYQSGDVDYLVATDAIGMGINMDLDHVYFSNIRKFDGKKIRRLSISEMGQISGRAGRYLNDGSFGITGECSEISSEEIEAIENHKFPEIVSIFWRNSKLNFKDKLSLIKSLDEKPGKSWLRRIGECEDEKVLKYFLKETSGINIEDNSEILRILWETCQIPDFVKKTYGHHVEVVGKVFNFLTSNTNKIPNEYMKKQLSLLDKIEGNVDSLSNRIANVRTWSYVSNKSNWVENQDYWIERTKRIEDKLSDRLHEELTKKFIDKRASVLSRGLKQDILFDTKIINDEKVMINNQYIGRLKGLKLDLDLKMDALDTDIKSLKKAAKQNVSPEIIKRINQILDTGLIELKNDNKIYWKSNPIAKLTPGIDYLNPQIHLIIDEMMEKDEKN

SEQ ID NO: 99718 - protein, 368 aa, Unknown
  Bacterial polypetide isolated from the Sargasso Sea
MKKNFKRRDFIKKAGVAAAAATAVSSFPAPAIAADRVEVNCVATWGRGYPGLGTGGEAVSQRISDLSDGRIVVNHYAGGERVGPLDVFTEVSSGNAQMYNSADYYWVGQHPGWGFFAAVPFGLISTEINGWIRHGGGQELWDELADGFGLKNFMAGNSGVQMGGWFNKEINSADDFKGLKMRMPGLGGMMVTKLGASVVGMPGGQIYENLVNGTIDACEWVGPWNDERSRFYEAAKYYYWPGMHEPGTLITLGCNKSWLTSLSKTDQMIIEHAATVQNEMMVTEYNANNGAALQRLINDHGVELREFNDDVIDAMGEASEELYAELAEGNELTGRILDSFLKARGDIGEWLKIADHGYTAQRRRVLEG

SEQ ID NO: 99719 - protein, 171 aa, Unknown
  Bacterial polypetide isolated from the Sargasso Sea
MFWKTNSLFYVLILFLLFNCAKMGVITGGEKDTIPPVLINSIPDQKAINVDTKEFSFLFDEVINTDEIKSKLIISPYSDIKYEVDAKKNSLILSFDSSFENNRTYIFNFADGIKDITEGNEAKTLKYVFSTGPILDSLIVFGEVVNPLTNKPQEDVLVALYDSSDSLGLFN

SEQ ID NO: 99720 - protein, 100 aa, Unknown
  Bacterial polypetide isolated from the Sargasso Sea
MSEIWNGYIWPGIWIVAKIIAIIVPVFLSVAYLTLAERKVIGAMQLRKGPNVVGSFGLLQPIADAIKLFLKETVIPANANRGVFIAAPCTTFILAIIAWA

SEQ ID NO: 99721 - protein, 465 aa, Unknown
  Bacterial polypetide isolated from the Sargasso Sea
MLLSLLLFIPLLGALALILWPGSPTSNRLREVSIVLLAVQCVASFALLLPFDPTDAGLQLIEQARWVHAIGLDYALAVDGLSLPLVLMNGVLCLVAAIASRSIENRPRIYFALLLVISGAVNGAFLAQNLLLFFLFYELELIPLWLLIAVWGGANRAYAATKFLIVTAVSGVLILAAFLGLAFVSGTMDFSLQPILAGELGITAQLVLMGALLIGFGIKIPLFPFHTWLPDAHTEASTPVSVLLAGVLLKLGTYGLLRFCLGLFPEAWQLASPWLAAWAAISVLYGSLAAIAQTDMKRMVAYSSVGHMGYVLLAAAAATPLGLMGALFQMVSHGLISGVLFLLVGVVYARTGTRDLNVLRGLLNPQRGLPLTGSLMIIGVMASAGIPGMAGFISEFLIFRGSLQPFPIATLLSMVGSGLTAVYFLLLVNRAFFGRLAIAPGEVVNPRILDPCCLAGTRCLPLLSA

SEQ ID NO: 99722 - protein, 141 aa, Unknown
  Bacterial polypetide isolated from the Sargasso Sea
MYRDFGTIFVFIFIGIVLIYLPLLIQKLLAPNNPNPDKLATYECGEESEGSAWVQFNIRFYIVALIFLIFDVEVVFLFPWAVVFNDLGLLALVEMGIFLLILLVGLAYVWKRSDLDWVKYNVKYGRGRYSSLIQKSNTPRE

SEQ ID NO: 99723 - protein, 306 aa, Unknown
  Bacterial polypetide isolated from the Sargasso Sea
MEIETKTATVNNINWHWAEAGDGEAVVLLHGIPESWRCWKHQIPKLASQFKVYAIDLKGYGLSDKSEGDYSMNKVASEILDLLDYLKIDTFRLAGHDWGVAISDNIIDQAPERVNRYVRCCLSLHNYDPRNSLHHQWNSENPELAAKLMNKSEAYVKVWFESSCKPELIPDETEINEIIEDFSHPGIGDAVPRYFRDIPKNKPVDLSKFTMPILYIHGEHDPRQPLEYCEGMEKHLPGLQAILVLDAGHFITRERPVETTNAMMWFFNSMLGSGLKLFDRSKELGLPTKPTAAPSKSFGVNSLKFD

SEQ ID NO: 99724 - protein, 144 aa, Unknown
  Bacterial polypetide isolated from the Sargasso Sea
MYRDFGTVLIFAMLAIVLVYVPLLISSLVAPSQKTPDKLDNYECGEEPEGSAWVQFNIRFYVIALIFLIFDVEVVFLFPWAMVFKEMGMVAFVEMGIFLLILIVGLAYVWKKGDLDWVKYNVKYGRGRYRQKASQTEGETIGSI

SEQ ID NO: 99725 - protein, 290 aa, Unknown
  Bacterial polypetide isolated from the Sargasso Sea
MSYKSIFNKESFSKKNVVVTGGGSGIGRCIAHELSSLGSDIILVGRNKEKLETVQKEIKSSNGNASFYVCDIREEDKVRQCTKEIYEEFNIIHGLVNNAGGQFPSPAEYISQKGFETVVRTNLVGGFLFSREVFSQGMINSGGNIVNITADMWNGMPGMSHSGAARSGMDNLTKTLAYEWGYAGVRVNSVAPGYIASSGLDTYDDSIIKEIIPKLKKTVPLKRMGTEAEVSAAVCFLLSDAAAYINGVCIRVDGGSPLGSGAWPLKETKKYKSFDGFHLSKLPDVLDGEL

SEQ ID NO: 99726 - protein, 201 aa, Unknown
  Bacterial polypetide isolated from the Sargasso Sea
MTYDILITGLIIIAQILAVVVPVLISVAFLVYAERKVLALIQLRRGPNIVGPFGILQSFADALKLITKENIIPSGSNKIVFILAPIITMVLSLAGWAVIPFAPGWVVSDINVGIMYLFAVSSLGVYGIIMAGWASNSQYPFLGALRSAAQMVSYEVSIGFVIITVLLCVGSLNLSKIVLAQQTVWFAIPLLPMFIIFFISA

SEQ ID NO: 99727 - protein, 141 aa, Unknown
  Bacterial polypetide isolated from the Sargasso Sea
MYRDFGTIFVFIFIGIVLIYLPLLIQKLLAPNNPNPDKLATYECGEESEGSAWVQFNIRFYVVALIFLIFDVEVVFLFPWAVVFNDLGLLALVEMGIFLLILLVGLAYVWKRSDLDWVKYNVKYGRGRYSSLIQKSNTSRE

SEQ ID NO: 99728 - protein, 114 aa, Unknown
  Bacterial polypetide isolated from the Sargasso Sea
LVAPNNPNPDKLATYECGEESEGSAWVQFNIRFYVVALIFLIFDVEVVFLFPWAVVFNDLGMLAFVEMAIFLIILLVGLAYVWKRADLDWVKYNVKYGRGRYASLFEKSKTVQE

SEQ ID NO: 99729 - protein, 219 aa, Unknown
  Bacterial polypetide isolated from the Sargasso Sea
MVLTIDRDNDLGVKSGIRGPVVGRKSCLTAALRLGIADPEESDTNAILGALHHHDRLAEGAGASDEVQIAILTGDVRVGPRSDRAIASQLDEVIQDFQPDAALLVTDGADDEASLPIVTSRVRVDTVEKVIVRQSKGIEGTYYYIVKAIEDPRFRSRLLVPLAVFLIIIGLGLILPNGIALIGSLPLLIGLWVLGKGLGLEAQMERVAMEMRDSATGGL

SEQ ID NO: 99730 - protein, 319 aa, Unknown
  Bacterial polypetide isolated from the Sargasso Sea
MFTSILTNIKKLTRELSDNPSAQAAVLFVASVIIIYLQREYIIETFIPNISDIVLTYVGYGFVTLSIFLIGVTATVNHFRKDSLIFWPQLVSTLLTVISIQLVMGAFKGPQGIVFKETTGGRFGKYLWEDFYIPGPLLLLLLLLIAFYISWPKFSLAKLKLSKLYFLSFLYFLRKIFKSKSKKPRIIEKKPYQETKDNIQQKIEEPRKKSLHDNYQPIKNNPTFEEKTKKIEEKIDTPKKPTRAFTFGKPWAIPEMSLLEYGPEASISSDESKLVAEKIEETLINHGIEVRVNQIKPGPTVTMYGLTPGWTRKTRRLKK

SEQ ID NO: 99731 - protein, 407 aa, Unknown
  Bacterial polypetide isolated from the Sargasso Sea
MNSIWGNDHHLEAVSRVNNRGYHGYWFLLPGFFQAFADFTKFAGKEHIVPKEADRTVYEVAPVIIISTTVLVFAFVPFGPHFYAASPELSVVFMMAIFGVAPLGVFFAGWASNNKYTLIGGMRSAAQLTAYEIPLLITVLGVCVISGSFNVIEIVDFQAQESNVWNLFMLPLGAALFLITMIAEVERIPFDMPEAEAELVEGWWTEYGGMRWGLMFAAEYQRCYAACLLFALFFLGGWEAPFQGTMESLPIAGGGLELLFSLIPGIAWVLIKAWLLFAVFVWIRASLHRVRTDQILEFGWQWLLPLSIVNLAIAMFLRVWVWDGSWGIVAPVVMILSGIVGLVILVADEDKEALESMTRPYSTYAVTKAYPGRHPQTSLEDLQRQYTAYTAVKAATSVSLSETEAGS

SEQ ID NO: 99732 - protein, 519 aa, Unknown
  Bacterial polypetide isolated from the Sargasso Sea
MESGLGLTIVVFLPLVSAIFIFLIPKKQEMLIKLVTLGSALLTFGVSLIVALQFDFNNAGDLQLGTKVSWISSINSNYEIGIDGISLPLLLLSTFISVLAIIYSFEHLPEPKNAKGMMSLILILETGMNGTFVALDLILFFVFFELVLLPMYFMIGIWGDKTVRSVSGLKNDIETRLYASIKFFVFTLFGSAFMLLGFLGLYFRGNRTFSIPELIELGSSGAFTGTFATLVFAVLFLGFAVKVPMWPLHTWLPDAHTAAPTVGSVLLAAILLKLGSYGFVRIALPILPEQAVAWAPAIAVLSAIGIIYGSLACLAQTDLKRLIAFSSVGHMGFVMLGISSLTSIGINAAMIGMVAHGIITGLLFFVSGSMAHTYHTRDMGRLGGNMKLLPKTGAILAFTAMASLGLPGLAGFWGEFMALLGAYNPLPGLNITIFRSSMVAGAIGTVLTAGYLLWMLQRVNLGEPKEEWLDKELHDADNYELVAWIPLVILTVLIGVFPKLIFGATNDAVIALVSKAFGG

SEQ ID NO: 99733 - protein, 522 aa, Unknown
  Bacterial polypetide isolated from the Sargasso Sea
MSSFSFLDSGLGLTIVVFLPLISAIFIFLIPKKQEMLIKLITLGSAIVTFLVSLVVALQFDFNDAAELQLGTKVSWISSINSNYEIGIDGISLPLLLLSTFISVLAIIYSFEHLPEPKNAKGMMSLILILETGMNGTFVALDLILFFVFFELVLLPMYFMIGIWGDKTVRSVSGLKNDIETRLYASIKFFVFTLFGSAFMLLGFLGLYFRGNKTFSIPELIELGTNGAFTGTFATLVFAVLFLGFAVKVPMWPLHTWLPDAHTAAPTVGSVLLAAILLKLGSYGFVRIALPILPEQAVAWAPAIAILSAIGIIYGSLACLAQTDLKRLIAFSSVGHMGFVMLGISSLTSIGINAAMIGMVAHGIITGLLFFVSGSMAHTYHTRDMGRLGGNMKLLPKTGAILAFTAMASLGLPGLAGFWGEFMALLGAYNPLPGLNVTIFRSSMVAGAIGTVLTAGYLLWMLQRVNLGEPKEEWIDQELHDADNYELVAWIPLVILTVLIGVFPKLIFGATNDAVIALVAKA

SEQ ID NO: 99734 - protein, 483 aa, Unknown
  Bacterial polypetide isolated from the Sargasso Sea
VVQLSILSSIVTFVLTVALFILYDKDKGGIQFIDHLNWIDSVNIKSSYLLGLDGLSAPLVLLTGLLGMVACMSSWRISHRYKEYFIWLLLLETSVLGVFTSLDLLLFFIFFEFELIPMYMLIGIWGSGRKEYSATKFVIFTLAGGAFMLIGILALFASDSVSTLAMVSIPEIGVQGIPDLIAGKDLIIPASFIFAFFFIAFAVKLPLWPLHNWLPDAHTDAPTAVSIMLAGVLLKMAGYGLFRINLGFFQETQGFTIFSVTELLALLGTISIVYGAIVTLRQTDLKRLIAYSSISHMGYVLLGFSAISKSGEFSLYSLNGAAMQMFTHGTITGLSFLAVGLIYDRTHTRDINKLGAIANKMPMVSLFFVISGLASLGLPGFSGFVSEIMIFLGSYKVFPAYTIVSAFGVVLAAGYILWMVQRSMFGSNNLEKDDKTYKYDELSDANFYDILPAFLITVPIILIGIIPSIFITFFDMGIKEILR

SEQ ID NO: 99735 - protein, 308 aa, Unknown
  Bacterial polypetide isolated from the Sargasso Sea
VSLSDIARLDTMVTVVDAFNFLRDYGSADALSERGIAATEEDDRTLVELLIEQIEFCDVLVVNKADLVSADELTRLQRILARINPRAVQVVTRFGEVPLADVLNTGRFDFDEASSAPGWLASLNQEHEHGHAHHGEADEFGIGNFIYRARRPFHPERLWALLHQEWQGVLRSKGFFWLATRNDIAGSLSQAGGACRHGPAGMWWAAQDRSEWPDGDDELAAEIAADWYGDPDDLSIGDRRQELVMIGVGIDPAVWKAKFDACLVTEEEYAAGPQAWQQFADPFPAWDFDEDDHDHDGHGHGEIVHRHD

SEQ ID NO: 99736 - protein, 254 aa, Unknown
  Bacterial polypetide isolated from the Sargasso Sea
MDFPILSSLILLPLLGAIFIFFSKSKSNTHLTSKYLALFVSFANFILSLYLWYLFDPSTPEFQFLEEQSWIKGFVNYKVGIDGISILFIVLTAFITPLCVVSVNSTIKYRLKDFLVAILVMESLMIGVFCSLDLVIFYLFFEGGLIPMFLIIGIWGGERRVYSAFKFFLYTLLGSVLMLVAIISIYWFTGSTDITYLYNLGIDEKYQYLLWLAFFSSFAVKTPMWPVHTWLPDAHVEAPTAGSVLLAAILLKMA

SEQ ID NO: 99737 - protein, 246 aa, Unknown
  Bacterial polypetide isolated from the Sargasso Sea
MISIMFSLLLVPLFSALLIFLIPNSRKETFRPIGIAFSLITLTQCVYLLFGEYAKTEFTILSTFQWIQSYGINLHFGLSGMSTLLLLLSSLLVFVSLLSIGKDHSESKGFVGSLLMLHFAINGVFISGDLISLFIFFEALLIPMYFLMGIWGGENRRYATIKFILYTVFGSVFIFIGTVYTAVLSFGVNGRLAVDFETLSSLSLLESQSKTLFLLFTFGFLIKVPIFPLHTWLPDAHVEAPTAGSI

SEQ ID NO: 99738 - protein, 199 aa, Unknown
  Bacterial polypetide isolated from the Sargasso Sea
MGLSLVPVILYSGSLSLVDIVSSQSGNLSTTIPILSSIVSFIPKWNIFPQFIAFGIFFIAAVAEVNRAPFDLVEAEQELVGGFHTEYSGFRFAMFFLAEYINMFNMCAITATFFLGGWLGPTFEGFLPPVLSAIMPIIWLGVKTFALLFIFVWIRATLPRLRYDQLMELGWKRLIPASLVWLILSAIVLGLRQFGLPWS

SEQ ID NO: 99739 - protein, 288 aa, Unknown
  Bacterial polypetide isolated from the Sargasso Sea
MNFPIISALILLPTIGSIFLFFSKDNSENKLTFKYVALFTSVVNFLLSIYLWFLFDTTISDFQFVEDRIWLVGFINYKVGIDGISILFIILTTFITPLCILSVNNTVKIRLRDFLIAILIMESFMIGVFCALDLFVFYLFFEAGLIPMFLIIGIWGGPRRVYSAFKFFLYTLLGSVLMLVAIISIYWITGTTDVIELYELGIDAKYQNLLWLAFFSSFAVKTPMWPVHTWLPDAHVEAPTAGSVLLAAILLKMAGYGFIRFSLGLFPVASDLFTPLIYILSIIAIIFT

SEQ ID NO: 99740 - protein, 327 aa, Unknown
  Bacterial polypetide isolated from the Sargasso Sea
LSLPLLLLSLVVVPLCLIYSWNHIPEPGNPKAFFVLLLILSTGMNGSFVAQDMILFFVFFEVVLLPMYFLIGVWGGEDRRYASLKFFLYTLFGSALMIISFLALFFLSKDASGELLQTFDMRILTDVAGVGIIKSTQVWIFAGLFMGFGIKVPMFPFHTWLPDAHTQAPTVGSVILAAVLLKLGTYGFVRIAIPFLPEGAIAWAPWIGLLAVIGIIYGALGCLAQKDMKRLIAFSSVAHMGFVMLGIATLTDFGINAAIFGMIAHGLITGMLFFVAGSVKERYHTLEISRLGGLLKSAPRMGWILGFASMASLGLPGLAGFWGEFPA

SEQ ID NO: 99741 - protein, 257 aa, Unknown
  Bacterial polypetide isolated from the Sargasso Sea
MYISYSLYILFLPLAAFLIQIFFGKKLPRQGDWVSIGAISITLILAISMFISMISKYDPKFSEEASFTWLDMGEFTIRLGFLVDNITIIMLLVVALISTCTHIFSTQYLKGDIRYSRYFAYLGLFTFSMNGIVLANNLMSMYMFWELVGVSSYLLIGHWFEKESAANASKKAFLTNRVGDIGFFIGIMLLYNAIGSFAFSDIFNGVSSGMIAGGTLTLAGVGLFLGAMGKSSQFPLHIWLPDAMEGPTPVSALMHAA

SEQ ID NO: 99742 - protein, 326 aa, Unknown
  Bacterial polypetide isolated from the Sargasso Sea
GLMGLSLPLLLLSLVVVPLCLIYSWNHVPEPGNTKAFFILILILSTGMNGSFVAQDMILFFVFFEVVLLPMYFLIGVWGGEDRRYASLKFFLYTLFGSALMIISFLALFFLSKDAAGEFLYTFDMRALTDAAGVGIIKSTQVWIFAGLFMGFGIKVPMFPFHTWLPDAHTQAPTVGSVILAAVLLKLGTYGFVRIAIPFLPEAAIAWAPWIGLLAVIGIIYGALGCLAQKDMKRLIAFSSVAHMGFVMLGIATLTDFGINAAIFGMVAHGLITGMLFFVAGSVKERYHTLEISRLGGLLKSAPKMGWILGFASMASLGLPGLAGFW

SEQ ID NO: 99743 - protein, 273 aa, Unknown
  Bacterial polypetide isolated from the Sargasso Sea
MNFPILTSIILLPSLGALFLLFLKNDFSNDYKSSKYISIFVTFLNFLVSLYIWYLFDTSNPDFQFVEEREWLKGFVNYKIGIDGISILFILLTTFITPLCIISVINTTKERLKEFLIAILIMESLMIGVFCSLDLVIFYLFFEGGLIPMFLIIGIWGGARRVYSAFKFFLFTLFGSILMLVAIISIYWLNGTTDIVKLYELSIDSKYQNLLWLAFFSSFAVKTPMWPVHTWLPDAHVEAPTAGSVLLAAILLKMAGYGFIRFSIGLFPVASRF

SEQ ID NO: 99744 - protein, 179 aa, Unknown
  Bacterial polypetide isolated from the Sargasso Sea
MFLITMLVCFSLVPFYCLLLITILVCFSLVPFYCLFLITILVWFSLVPFYCLLLITILVCFSLVPFYCLFLITALVCFSLVPFYCLFLITMLVCFNLVPFYCLFLITILVCFSLVPFYCLFLITMLVCFSLVPFYCLLLITILVCFSLVPFYCLFLITVLVCFAGWLLLFDSNHNTGVF

SEQ ID NO: 99745 - protein, 143 aa, Unknown
  Bacterial polypetide isolated from the Sargasso Sea
MFSYKLLFFLPLISTIFTYPFGVLLGDKTAQYFSSTLISIAAILSWFLFISFSMSPSPEIIIPVLEWFLVSGQFFNWGISVNSLTLLMLTLVLTVSALVHIYSIEYMAHDNSKVRFMTYLSLFTFCMVALVVSDNLIQLFFGW

SEQ ID NO: 99746 - protein, 243 aa, Unknown
  Bacterial polypetide isolated from the Sargasso Sea
MNFPILSSLILLPTIGALFILFTKSSSIKYQSSKYVALFISLANFLLSLYLWYVFDKNSVDFQFVENREWLSGFINYKVGIDGISILFVILTTFITPICIISVNATITNRLKDFLIAILIMETFMIGVFCSLDLVVFYLFFEAGLIPMFLIIGIWGGERRVYSAFKFFLYTLLGSVLMLVAIISIYWITGTTDVEKLYELGIKAEYQNLLWLAFFSSFAVKTPMWPVHTWLPDAHVEAPTGGS

SEQ ID NO: 99747 - protein, 325 aa, Unknown
  Bacterial polypetide isolated from the Sargasso Sea
MGFWGGETERYATIKFILYTVFGSIFILAGTIYTGVLSYLSSGNFALDFDSLSTLSITSSQSKILFLLFTFGFLIKVPIFPLHTWLPDAHVEAPTAGSILLAGVLLKVGAYGILRVSIPFFTEGFIEYQFLIATLSVVGIIYGAVVAIVQIDIKKLIAYSSISHMGFVMLGISAGRYLSLEGAVIQMINHGITSGALFMLVGFLYERRHTRRISDFGGLKKSMPIYAGIFLFTSFASIGLPGLNGFVGEFMILMGSFPTFNVLSSIAAFGVVLAAIYMLWAYQRMFNGELTHEDNKNVLDLNSKEIVSVAPLLILMCVIGLYPSF

SEQ ID NO: 99748 - protein, 183 aa, Unknown
  Bacterial polypetide isolated from the Sargasso Sea
MSKIVESQSGNLSSTIPAIDSIVRFIPNWNVFPQFLAFGIFFVASIAEVNRAPFDLVEAEQELVGGFHTEYSGFRFAMFFLAEYINMFNMCAITATFFLGGWLGPTFPGIFPPLLSAMMPTIWLGLKTVGLLFVYFWIRATLPRLRYDQLMELGWKRLIPISLIWLLVSAIVLGIRDFGLPWS

SEQ ID NO: 99749 - protein, 123 aa, Unknown
  Bacterial polypetide isolated from the Sargasso Sea
MEKLIIFLPLLASIISGFFGTKIGNKASQVTTSSFVSLSAILSIYIFYNVISNDYSNNIIIAKWISSGLLDVNWSIKIDQISSVMLVVVTLVSAVVHIYSIGYMSHDPHQPRFMSYLSLFTFA

SEQ ID NO: 99750 - protein, 250 aa, Unknown
  Bacterial polypetide isolated from the Sargasso Sea
MNFPILSSLILLPTIGALFILFTKSSSDKYQSAKYVALFISLANFLLSLYLWYIFDKNSIDFQFVENREWLSGFINYKVGIDGISILFIILTAFITPICIISVNATITNRLKDFLIAILIMETFMIGVFCSLDLVVFYLFFEAGLIPMFLIIGIWGGERRVYSAFKFFLYTLLGSVLMLVAIISIYWITGTTDVERLYEIGIQSEYQNLLWLAFFSSFAVKTPMWPVHTWLPDAHVEAPTAGSVLLAAIL

SEQ ID NO: 99751 - protein, 263 aa, Unknown
  Bacterial polypetide isolated from the Sargasso Sea
PDAHVEAPTAGSVLLAAILLKMAGYGFIRFSIGLFPIASENFVPLVYVLSLVAIVYTSLVALMQEDMKKLIAYSSVAHMGYVTLGIFTVTQQGLEGGIIQMISHGLVSAALFLCVGVVYDRMHSRLIKTYGGLASIMPKYAIFFMVFTLAAVGLPGTSGFVGEFLILMGVFKKSFLVATIASLGVILAVAYMLWLYKRVIFGELINKDLVKMLDLNKSEIFILTCLAIPTLFFGFYPETLLNTIDVSISNLIDTYNYKLSLRK

SEQ ID NO: 99752 - protein, 296 aa, Unknown
  Bacterial polypetide isolated from the Sargasso Sea
FIGITGTTDIVQLYEIGIDVKYQNLLWLAFFSSFAVKTPMWPVHTWLPDAHVEAPTAGSVLLAAILLKMAGYGFIRFSLGLFPIASEVFTPLIYTLSVIAIIFTSLIALMQEDMKKLIAYSSVAHMGFVTLGIFTLQQQGIEGSIIQMISHGLVSAALFLTVGVVYDRMHSRLISTYGGLVSVIPKYSILFMLFALASLGLPGTSGFIGEFLILMGAFKDNFLVAVIASIGVILGAAYMLWLYKRVVFGKLINEDLKKIIDLNRSEYFILSCLAAPILFFGFYPDPLINTIESFCD

SEQ ID NO: 99753 - protein, 205 aa, Unknown
  Bacterial polypetide isolated from the Sargasso Sea
MEKIIIFLPLLAALVSGFFGGKIGNRASQIITSSFVSISALLSIYIFYDVIINDYSNNILIAKWISSGLLDVNWSIKIDQLSAVMLVVVTLVSAIVHIYSIGYMYHDPHQPRFMSYLSLFTFAMLVLVTSDNFLQLFFGWEGVGLCSYFLIGFWFKKPKANAAAIKAFIVNRVGDFGFALGIFLVFYIFGTVNYEEVFYQVSIYK

SEQ ID NO: 99754 - protein, 189 aa, Unknown
  Bacterial polypetide isolated from the Sargasso Sea
MEFEYLIVFLPLVAAIISGFFGKFLGSRNSEILTSLFVSISSIFSFLIFYKVFNDGYTNNLEILTWINSGSFNVNWSIKIDALSSVMLVVVTLVSSIVHIYSIGYMSHDPHKQRFMAYLSLFTFSMLMLVTSDNFLQLFFGWEGVGLCSYFLIGFWFKKESANAAAIKAFVVNHVGDFGFALGIFLIFY

SEQ ID NO: 99755 - protein, 175 aa, Unknown
  Bacterial polypetide isolated from the Sargasso Sea
MEKLIIFLPLIASIISGFFGKLIGNRSSQIITSLFVSISALLSIFVFYEVINNNYSDNIVIAKWIASGNLNVNWSIKIDQISAVMLVVVTLVSALVHIYSIGYMSQDPHQPRFMSYLSLFTFAMLVLVTSDNFLQLFFGWEGVGLCSYFLIGFWFKKPTANAAAIKAFIVNRIGD

SEQ ID NO: 99756 - protein, 305 aa, Unknown
  Bacterial polypetide isolated from the Sargasso Sea
IADNVVANAVSRTAQLWIFGGMFLGFGIKVPMFPFHTWLPDAHTEAPTVGSVILAAVLLKLGTYGFVRIAIPLLPEAAVEWAPWIGLLAVIGIIYGAFCCLAQTDMKRLIAFSSVAHMGFVMLGISTLTDFGINAAIMGMVAHGLITGMLFFLAGSMKERYHTLEIKRLGGLLVQAPKMGWILGFCAMASLGLPGLAGFWGEFPAILSAYNPANGLPVETFRTFMVVAALGTVLAAGYLLWLLQRAAFGTPKDEFAEDPNIHDTTKTEWIAWAPLLALILALGIYPNLVFRTTDGAVDASLTPCL

SEQ ID NO: 99757 - protein, 284 aa, Unknown
  Bacterial polypetide isolated from the Sargasso Sea
MWLAFFSSFAVKTPMWPVHTWLPDAHVEAPTAGSVLLAAILLKMAGYGFIRFSLGLFPVASEVFTPLIYTLSVIAIIFTSLIALMQEDMKKLIAYSSVAHMGFVTLGIFTLQQQGIEGSIIQMISHGLVSAALFLTVGVVYDRMHSRLISTYGGLVSVIPKYSILFMLFALASLGLPGTSGFIGEFLILMGAFKDNFLVAVIASIGVILGAAYMLWLYKRVVFGKLLNEDLKKILDLNRSEYFILSCLAAPILFFGFYPDPLINTIEVSVTDLINTHNTNIVSK

SEQ ID NO: 99758 - protein, 240 aa, Unknown
  Bacterial polypetide isolated from the Sargasso Sea
MNFPILSSLILLPTLGALFILFTKSSNEKYQSSKYVALFISLANFLLSLYLWYVFDKNSVDFQFVENREWLSGFINYKVGIDGISILFIILTTFITPICIISVNATITNRLKDFLIAILIMETFMIGVFCSLDLVVFYLFFEAGLIPMFLIIGIWGGERRVYSAFKFFLYTLLGSVLMLVAIIAIYWITGTTDVEKLYELGIQVEYQNLLWLAFFSSFAVKTPMWPVHTWLPDAHVEAPT

SEQ ID NO: 99759 - protein, 306 aa, Unknown
  Bacterial polypetide isolated from the Sargasso Sea
RIFLMPILIMETFMIGVFCSLDLVVFYLFFEAGLIPMFLIIGIWGGERRVYSAFKFFLYTLLGSVLMLVAIISIYWITGTTDVEKLYELGIKAEYQNLLWLAFLSSFAVKTPMWPVHTWLPDAHVEAPTVGSVLLAAILLKMAGYGFIRFSLGLFPIASENFTMLVYALSLIAIIYTSLVALMQEDMKKLIAYSSVAHMGFVTLGIFTMTQQGIEGSIFQMISHGLVSAALFLSVGVVYERHHTRLINKYGGLVSIMPRYAIVFMVFTLGALGLPGTTGFIGEFLILMGAFEKNILVAMIASLGVI

SEQ ID NO: 99760 - protein, 226 aa, Unknown
  Bacterial polypetide isolated from the Sargasso Sea
EGFINYKVGIDGISILFIILTTFITFLCVISVNSTVQNRLKDFLLAILFMETMMIGVFCSLDLVIFYLFFEAGLIPMFLIIGIWGGQRRVYSAFKFFLYTLLGSVLMLVAIISIYWMTGTTDVIELYQIGIDPRYQNLLWLAFFSSFAVKTPMWPVHTWLPDAHVEAPTVGSVLLAAILLKMAGYGFIRFSVGLFPIASEYFVPLVFGLSLIAILYTSFVALMQEE

SEQ ID NO: 99761 - protein, 210 aa, Unknown
  Bacterial polypetide isolated from the Sargasso Sea
MVGYQFEEQVEWIAGSGISYHLGVDGISMPFILLSTFLTPLSILASWHSIKNRIREFMIAFLVLETMMVGMFASLDMMMFYLFFEGVLIPMFLIIGIWGGPRRVYAAFKFFLYTLAGSVLMLVGIMVMYLQAGTTDIPVLSDFNFPQELQYWLFIGFFASFAVKVPMWPVHTWLPDAHVEAPTAGSMILAGVLLKMGGYGFIRFSLPMFS

SEQ ID NO: 99762 - protein, 174 aa, Unknown
  Bacterial polypetide isolated from the Sargasso Sea
MEKLIIFLPLLASIISGFFGKIIGNKASQLITSFFVSVSALLSIYLFYDVINNSYTDNIIIAKWITSGLLDVNWSIKIDQLSAVMLVVVTLVSAIVHVYSIGYMSHDPHQPRFMSYLSLFTFAMLVLVTSDNFLQLFFGWEGVGLCSYFLIGFWFKKPTANAAAIKAFIVNRVG

SEQ ID NO: 99763 - protein, 275 aa, Unknown
  Bacterial polypetide isolated from the Sargasso Sea
FLYTFLGSVFMLIAIIYLYIQTGSYSIFDFYNLDLSRTEQILIFLAFLFAFAVKIPMWPVHTWLPDAHVEAPTGGSVILAAILLKMGGYGLLRFSLPITPDASSELSIFMVVLSLIAIIYIGMVALSQTDMKKLIAYSSVAHMGFVTLGTFVVFLNHEIASLDNMNLAISGAMIQMISHGLISGALFLCIGVMYDRIHSRQIEDYGGIALTMPRFAGLMVFFALANAALPGTSGFVGEVLVILASLKVNFWIALLSATTLVIGAAYTLWMIKRVI

SEQ ID NO: 99764 - protein, 39 aa, Unknown
  Bacterial polypetide isolated from the Sargasso Sea
WAISLGKIGVFGFTSMMIFLFILTIGFIYEWKKGALDWE

SEQ ID NO: 99765 - protein, 285 aa, Unknown
  Bacterial polypetide isolated from the Sargasso Sea
LYTLLGSVLMLVAIISIYWITGTTDVVQLYEIGIDVKYQNLLWLAFFSSFAVKTPMWPVHTWLPDAHVEAPTAGSVLLAAILLKMAGYGFIRFSLGLFPIASEVFTPLIYTLSVIAIIFTSLIALMQEDMKKLIAYSSVAHMGFVTLGIFTLQQQGIEGSIIQMISHGLVSAALFLTVGVVYDRMHSRLISTYGGLVSVIPKYSILFMLFALASLGLPGTSGFIGEFLILMGVFKDNFLVAVIASLGVILGAAYMLWLYKRVVFGKLINEDLKKILDLNRSEYFI

SEQ ID NO: 99766 - protein, 270 aa, Unknown
  Bacterial polypetide isolated from the Sargasso Sea
MWPVHTWLPDAHVEAPTAGSVLLAAILLKMAGYGFIRFSLGLFPVASEVFTPLIYTLSVIAIIFTSFIALMQEDMKKLIAYSSVAHMGFVTLGIFTLQQQGIEGSIIQMISHGLVSAALFLCVGVVYDRMHSRMINSYGGIVTIIPKYSILFMLFTLAALGLPGTSGFIGEFLILMGAFKDNFLVAVIASLGVILGAAYMLWLYKRVVFGKLVNEDLKKMFDLNRSEYLILSCLAFPTLFFGFYPDPLINTIEVSVTDLINMHNTNIASK

SEQ ID NO: 99767 - protein, 303 aa, Unknown
  Bacterial polypetide isolated from the Sargasso Sea
NIQLSQEAPLGLTAQKLIFIAFFLAFAVKIPMWPVHTWLPDAHVEAPTGGSVILAAIMLKMGGYGFLRFSLPIAPDASLYFANTMILLSLIAIVYIGFVALVQEDMKKLIAYSSISHMGFVTLGFFIPFGIIAATNSNAGAVMGMEGAMMQMISHGFISAALFLCVGVMYDRLHSRMIKDYGGVVNSMPYFAAFMMLFAMANSGLPGTSGFVGEFLVILSSFKLNFWIAFTAALTLILGAAYTLWMYKRVIFGEAIREEVSELKDIDAREGFILFLLAGVILLFGVWHAPLFDVMHVTIQQLI

SEQ ID NO: 99768 - protein, 302 aa, Unknown
  Bacterial polypetide isolated from the Sargasso Sea
DSLAAQAVASQKLQQAEREASESQAKAKQVQLEKQEMEKTARSEKDDAEKAEAKAVAEQRNAEAVQRQGILAKSAAGKEMLRAKSMEANARAAELEAQQSQKSASRTQANARAAELEAQHSQKSASRTQAAATAEMADAKQQQANAAILQQKAKHAEAAAQQSQHDSAQIKAVAQKEENAARQQEADAASIKKDSLAAQAVASQKLQQAEREASESQAKAKQVQLEKQEMEKTARSEKDDAEKAEAKAVAEQRNAEAVQRQGILAKSAAGKEMLRAKSMEANARAAELEAQQSQKSASRTQA

SEQ ID NO: 99769 - protein, 133 aa, Unknown
  Bacterial polypetide isolated from the Sargasso Sea
FFISAVAETNRTPFDIPEAESELVAGWMTEYSGFRWAVFFLSEYANMFVVSGLAAVGFLGGWLSPIPGLFNSPIWGLFWFTGKIIFLIFIMMWFRWTFPRLRVDQLMHVCWKVFIPIAMFNIFGVGIWKLIIG

SEQ ID NO: 99770 - protein, 64 aa, Unknown
  Bacterial polypetide isolated from the Sargasso Sea
LYEIGIDVKYQNLLWLAFFISFAVKTPMWPVHTWLPDAHVEAPTAGSVLLAAILLKMAGYGFIR

SEQ ID NO: 99771 - protein, 265 aa, Unknown
  Bacterial polypetide isolated from the Sargasso Sea
QLYESGIDVKYQNLLWLAFFSSFAVKTPMWPVHTWLPDAHVEAPTAGSVLLAAILLKMAGYGFIRFSLGLFPFASEVFTPLIYTLSVIAIIFTSLIALMQEDMKKLIAYSSVAHMGFVTLGIFTIQQQGIEGSIIQMISHGLVSAALFLCVGVVYDRMHSRLITTYGGVVTIIPKYAILFMIFTLAALGLPGTSGFVGEFLILMAAFKDNFLVAVLASLGVILGAAYMLWLYKRVIFGKLINSELKKMIDLNKSETFTLTCLAIP

SEQ ID NO: 99772 - protein, 281 aa, Unknown
  Bacterial polypetide isolated from the Sargasso Sea
YLSSFIFITINSELFFIFFVKSSSGKYQASKYIALFIAIANFILSIYLWYLFDKDSTKFQFVENREWLLGFVNYKVGIDGISILFIILTTFITSICIILVNSTIKKKLKDFLIAILVMETFMIGVFCSLDLLVFYLFFEAGLIPMFLIIGIWGGKRRVYSAFKFFLYTLLGSVLMLVAIISIYWITGTTDVEKLYEIGIDTKYQNLLWLAFFSSFAVKTPMWPVHTWLPDAHVEAPTAGSVLLAAILLKMAGYGFIRFSLGLFPIASEYFVPLVYFLSLVA

SEQ ID NO: 99773 - protein, 279 aa, Unknown
  Bacterial polypetide isolated from the Sargasso Sea
MLPTIGALFILFTKSSSGKYQSSKYVALFISLANFLLSLYLWYVFDKNSVDFQFVENREWLSGFINYKVGIDGISILFVILTTFITPICIISVNATIKNRLKDFLIAILIMETFMIGVFCSLDLVVFYLFFEAGLIPMFLIIGIWGGERRVYSAFKFFLYTLLGSVLMLVAIISIYWITGTTDVEKLYELGINAEYQNLLWLAFFSSFAVKTPMWPVHTWLPDAHVEAPTVGSVLLAAILLKMAGYGFIRFSIGLFPIASENFTMLVYILSLICIIYTS

SEQ ID NO: 99774 - protein, 35 aa, Unknown
  Bacterial polypetide isolated from the Sargasso Sea
TAIFAASVALVQNDIKKIVAYSTCSQLGYMFSQQG

SEQ ID NO: 99775 - protein, 53 aa, Unknown
  Bacterial polypetide isolated from the Sargasso Sea
LFIIFDLEIAFLFPWAISLGKIGLFGFISMMIFLFILTIGFIYEWKKGALDWE

SEQ ID NO: 99776 - protein, 293 aa, Unknown
  Bacterial polypetide isolated from the Sargasso Sea
MNYDILITGLIIVAQILAVVVPVLISVAFLVYAERKVLALIQLRRGPNIVGPFGILQSFADALKLITKENIIPSGSNKIVFILAPIITMVLSLAGWAVIPFAPGWVISDINVGIMYLFAVSSLGVYGIIMAGWASNSQYPFLGALRSAAQMVSYEVSIGFVIITVLLCVGSLNLSKIVLAQQTVWFAIPLLPMFIIFFISALAETNRLPFDLPEDESTLVAGFFTEYSSASFVLFFLGEYASMILMSSMTVILFLGGWLPPFDVYPLNVVPGVIWFTVKVIFILFLFIWVRGT

SEQ ID NO: 99777 - protein, 256 aa, Unknown
  Bacterial polypetide isolated from the Sargasso Sea
ALFTTIVNFLISFYLWISFDQSTSNFQFIEDRTWIEGFINYKVGVDGISILFIILTTFITPLCIISVNNSVKNRLRDFLIAILIMESFMIGVFCALDLVVFYLFFEAGLIPMFLIIGIWGGPKRVYSAFKFFLYTLLGSVLMLVAIISIYWITGTTDVIQLYELGIDAKYQNLLWLAFFSSFAVKTPMWPVHTWLPDAHVEAPTAGSVLLAAILLKMAGYGFIRFSLGLFPVASEVFTPLIYTLSVIAIIFTSFIA

SEQ ID NO: 99778 - protein, 296 aa, Unknown
  Bacterial polypetide isolated from the Sargasso Sea
FFLYTLLGSVLMLVAIISIYWISGTTDVEKLYEIGIDSKYQNLLWLAFFSSFAVKTPMWPVHTWLPDAHVEAPTAGSVLLAAILLKMAGYGFIRFSLGLFPIASEYFVPLIYFLSLVAIIYTSLVALMQEDMKKLIAYSSVAHMGFVTLGIFTMTQQGIEGSIFQMISHGLVSAALFLSVGVLYERHHTRLINKYGGLVQIMPKYAIVLMVFTLGSIGLPGTSGFIGEFLILIGAFKKSFLVATIASLGVILGAAYMLWLYKRIIFGEIINSELKSSLDLKKFEILILFSLVVPII

SEQ ID NO: 99779 - protein, 119 aa, Unknown
  Bacterial polypetide isolated from the Sargasso Sea
MEISILALPLIASIISGFFGKFIGDRNSEIVTSLLVSISAVLSAIVFYEVIFNQYEENIKIATWINSGSLEVNWSMKIDALSSVMLVVVTFISALVHIYSIGYMSHDPHKPRFMAYLSL

SEQ ID NO: 99780 - protein, 300 aa, Unknown
  Bacterial polypetide isolated from the Sargasso Sea
MDFPILSSLILLPTIGAFFIFFVKSSNKTYQASKYIALFIALANFIISLYLWYEFDNSTSEFQFTENRVWIKNFINYKVGVDGISILFILLTTFVSTICIITVNYTVSTRLKDFLIAILLMASLMIGVFCSLDLVIFYLFFEGGLIPMFLIIGIWGGKRRVYSAFKFFLYTLLGSVLMLIAIISIYWFSGTTDIEKLYSIGIEAKYQNLLWLAFFSSFAVKTPMWPVHTWLPDAHVEAPTAGSVLLAAILLKMAGYGFIRFSLGLFPLASDYFVPLIYFLSLVAIIYTSLVALMQEDRKN

SEQ ID NO: 99781 - protein, 148 aa, Unknown
  Bacterial polypetide isolated from the Sargasso Sea
MEYAVIFLPLLGTIIGYLSKYFGDIASQLLTTLTVCIAAILSLAIFYNGLVHDNYGNYIILEWIKSGDFQINWSINIDPLSSIMLVIVTLVSALVHIYSIGYMNHDPFKPRFMSYLSLFTFAMLVLVVSDNFIQLFFGWEGVGLSSYL

SEQ ID NO: 99782 - protein, 279 aa, Unknown
  Bacterial polypetide isolated from the Sargasso Sea
EAPTAGSMILAGILLKLGGYGMLRLSLPIFPEASFYFAPYVFFLSIVAILYTSLVALVQKDVKKLIAYSSIAHMGFVTLGMFTVTALGINGSIFQMISHGLVSAGLFFCVGVVYERFHTRVIAHYGGLAAKMPRYATLFLILTMASIGVPGTSGFLGEFFVILGTFSIAPMWAVLAALGVIFSAAYGLLLYRRMMFDKLNTEHLSLKNMFDLKASEMSVLLLLTVPAILFGLYPKPITELISPYTEHLMAHVHKKTQDTHSGSAYMSSTSTHRGGSHDA

SEQ ID NO: 99783 - protein, 172 aa, Unknown
  Bacterial polypetide isolated from the Sargasso Sea
MYALAIFLPLIGAILAGFGGRWLGDRGAQIVTSGCMLLSAVLGCIILAEVGLGGNPQTVELFSWINSGSFEVNWTLRFDTLTAVMVFVVTVVSSMVHVYSIGYMSHDPHIPRFMSYLSFFTFFMLMLVTADNLLQMFFGWEGVGLCSYLLIGFWYEKPEANGAAIKAFVVNR

SEQ ID NO: 99784 - protein, 276 aa, Unknown
  Bacterial polypetide isolated from the Sargasso Sea
MTYDILITGLIIIAQILAVVVPVLISVAFLVYAERKVLALIQLRRGPNIVGPFGILQSFADALKLITKENIIPSGSNKIVFILAPIITMVLSLAGWAVIPFAPGWVVSDINVGIMYLFAVSSLGVYGIIMAGWASNSQYPFLGALRSAAQMVSYEVSIGFVIITVLLCVGSLNLSKIVLAQQTVWFAIPLLPMFIIFFISALAETNRLPFDLPEDESTLVAGFFTEYSSASFVLFFLGEYASMILMSSMTVILFLGGWLPPFDVYPIKCCSWSNLV

SEQ ID NO: 99785 - protein, 174 aa, Unknown
  Bacterial polypetide isolated from the Sargasso Sea
MDFEYLIIFLPLLGSIISGFFGNILGSRNSEIITSLFVSISAIFSFLIFYKVLNENYTNNLIIFSWINSGTLNVNWSINIDALSAVMLIVVTLVSSLVHVYSIGYMSHDPHKQRFMAYLSLFTFSMLMLVTSDNFLQLFFGWEGVGLCSYFLIGFWFKKETANAAAIKAFVVNR

SEQ ID NO: 99786 - protein, 139 aa, Unknown
  Bacterial polypetide isolated from the Sargasso Sea
MEFAILFLPLFGALLGYFGKSFGNFFSEVITSFFTSIAAVLSVVVFYNGVNYDIYGNYKIFEWVSSGNFIVNWSINIDPLSSIMLVVVTSISALVHIYSIGYMSEDPHKPRFMSYLSLFTFSMLALVVSDNFFTLFFGW

SEQ ID NO: 99787 - protein, 114 aa, Unknown
  Bacterial polypetide isolated from the Sargasso Sea
VAGFFTEYSSISFGLFFLAEYANMILMSSLTVILFLGGWYPPLDIFPLNVIPGIFWFTLKVFLILFVFLWVRATFPRYRYDQLMRLGWKIFLPLTLVWVVITSSFLFYFGLLPS

SEQ ID NO: 99788 - protein, 133 aa, Unknown
  Bacterial polypetide isolated from the Sargasso Sea
MPYAIIFLPLIGSIIGYFGKSFTKYFSEITTSIFVSISAVLSMIVFWKVINNDYSGNFLIFEWINSGNFVANWSIYIDTLSSLMLVIVTLISALVHIYSIGYMSHDPHKPRFMSYLSLFTFFHVSLCSSDIFL

SEQ ID NO: 99789 - protein, 299 aa, Unknown
  Bacterial polypetide isolated from the Sargasso Sea
FPILSSLILLPTIGALFILFTKSSSGKYQSSKYVALFISLANFLLSLYLWYVFDKNSVDFQFVENREWLSGFINYKVGIDGISILFVILTTFITPICIISVNATITNRLKDFLIAILIMETFMIGVFCSLDLVVFYLFFEAGLIPMFLIIGIWGGERRVYSAFKFFLYTLLGSVLMLVAIISIYWITGTTDVEKLYELGINAEYQNLLWLAFFSSFAVKTPMWPVHTWLPDAHVEAPTVGSVLLAAILLKMAGYGFIRFSLGLFPIASENFTMLVYILSLIAIIYTSLVALMQEDMKKL

SEQ ID NO: 99790 - protein, 42 aa, Unknown
  Bacterial polypetide isolated from the Sargasso Sea
FISLGISLGSIGLFGFWSMMIFLLILTIGFIYEWKKGALEWE

SEQ ID NO: 99791 - protein, 249 aa, Unknown
  Bacterial polypetide isolated from the Sargasso Sea
MLVAIISIYWITGTTDIIYLYSLGIDEKYQYLLWLAFFSSFAVKTPMWPVHTWLPDAHVEAPTAGSVLLAAILLKMAGYGFIRFSVGLFPVASEYFIPMIYILSLIAIIYTSLVALMQKDMKKLIAYSSVAHMGFVTLGIFTFTQQGLDGSIFQMISHGLISAALFLSVGVIYERMHTRLISNYGGLVLVMPKYAIVLMVFTLGAVGLPGTSGFIGEFLILIGAFKKSFLVAAIASIGVILSAAYMFWL

SEQ ID NO: 99792 - protein, 227 aa, Unknown
  Bacterial polypetide isolated from the Sargasso Sea
VVIAGWQVIQSRVAQYFAAFLIMEGLMIGVFCALDGILFYLFWEAMLIPMFLIIGVWGGPNRVYAAIKFFLYTPLGSLLMLVALLYLYRASGGLFDLLVFHHLPLSGSVQTLVFLAFFAAFAVKIPMVPVHTWLPDAHVEAPTGGSVILAAITLKMGAYGFLRIAMPIAPDAAQQIAPVIIGLSLLAVVYIALIALVQQDMKKLIAYSSISHMGFVTLGFFVFETRA

SEQ ID NO: 99793 - protein, 222 aa, Unknown
  Bacterial polypetide isolated from the Sargasso Sea
IDGISFPLILLTTFITPIVLLTARTSNKINLYQYLASFLILEGLMIGVFSALDAFLFYVFWEAMLIPMFIIIGIWGGENRVYATIKFFLYTFLGSVFMLIAIIYLYISTGSYSIFDFYNLDLSRMEQILIFLAFLFAFAVKIPMWPVHTWLPDAHVEAPTGGSVILAAILLKMGGYGLLRFSLPITPAASNELSMLMVIFSLIAIIYIGMVALSQTDMKKLI

SEQ ID NO: 99794 - protein, 259 aa, Unknown
  Bacterial polypetide isolated from the Sargasso Sea
MNFPILSSLILLPTIGALFIFFVRSSNSQYQSSKYVALFITFSNFILSLYLWIVFDKSIVDFQFVEEREWISGFVNYKVGVDGISILFILLTTFITPICVITVNATIKNRLKDFLIAILILETFMIGVFCSLDLVVFYLFFEAGLIPMFLIIGIWGGERRVYSAFKFFLFTLLGSVLMLVAIISIYWITGTTDVINLYELGIDAKYQNLLWLAFFSSFAVKTPMWPVHTWLPDAHVEAPTAGSVLLAAILLKMAGYGFI

SEQ ID NO: 99795 - protein, 269 aa, Unknown
  Bacterial polypetide isolated from the Sargasso Sea
GLSILGLPDAHVEAPTAGSVLLAAILLKMAGYGFIRFSLGLFPIASEVFTPLIYALSVIAIIVTSLIALMQEDMKKLIAYSSVAHMGFVTLGVFTIQQQGIEGSIIQMISHGLVSAALFLCVGVVYDRMHSRLISSYGGIVTIIPKYSILFMIFTLAALGLPGTSGFVGEFLILMAVFKDNFLVAVLASIGVILGAAYMLWLYKRVIFGKLINSDLKSMMDLDRSEYFILTCLAIPTLYFGFYPDPLINTIEVSVNDLIDMYNKNLLIK

SEQ ID NO: 99796 - protein, 266 aa, Unknown
  Bacterial polypetide isolated from the Sargasso Sea
YQNLLWLAFFSSFAVKTPMWPVHTWLPDAHVEAPTVGSVLLAAILLKMAGYGFIRFSLGLFPIASENFTVLIYILSLIAIIYTSLVALMQEDMKKLIAYSSVAHMGFVTLGIFTMTQQGIEGSIFQMISHGLVSAALFLSVGVVYERHHTRLINKYGGLVSIMPRYAIVFMVFTLGALGLPGTTGFIGEFLILLGAFEKNTLVAMIASLGVILGAAYMLWLFKRVVFGEMNNQELKNMKDLKPFEIITLSALVIPILFFVFIQSLK

SEQ ID NO: 99797 - protein, 258 aa, Unknown
  Bacterial polypetide isolated from the Sargasso Sea
MNFPILSSLILLPTIGALFIFFVRSSNSQYQSSKYVALFITLANFFLSLYLWIVFDKSIVDFQFVEEREWISGFVNYKVGVDGISILFILLTTFITPICVITVNATIKNRLKDFLIAILILETFMIGVFCSLDLVVFYLFFEAGLIPMFLIIGIWGGERRVYSAFKFFLYTLLGSVLMLVAIISIYWITGTTDVIKLYELGIDAKYQNLLWLAFFSSFAVKTPMWPVHTWLPDAHVEAPTAGSVLLAAILLKMAGYGF

SEQ ID NO: 99798 - protein, 259 aa, Unknown
  Bacterial polypetide isolated from the Sargasso Sea
MIGKNYGSLSYWLSIFSSSLVFVISLYALSMYDSSQTGIQFELITSWIERFDINYHLGVDGISFPLILLTTFITPIVLLTSRTSEKPNLHQYLASFLILEGLMIGVFSALDAFLFYVFWEAMLIPMFIIIGIWGGKNRVYATIKFFLYTFLGSVFMLIAIIYLYIQTGSYSIFDFYNIDLSRTEQILIFLAFLFAFAVKIPMWPVHTWLPDAHVEAPTGGSVILAAILLKMGGYGLLRFSLPITPNASSELSIVMVVLS

SEQ ID NO: 99799 - protein, 275 aa, Unknown
  Bacterial polypetide isolated from the Sargasso Sea
LILNIKNLLWLAFFTSFAVKTPMWPVHTWLPDAHVEAPTAGSVLLAAILLKMAGYGFIRFSLGLFPVASEYFIPLIYILSLVAIIYTSLVALMQDDMKKLIAYSSVAHMGFVTLGIFTMTQQGIEGSIFQMISHGLVSAALFLSVGVIYDRMHTRLISQYGGIVSIMPKYAIVFMIFTLGAIGLPGTSGFIGEFLILMGTFKKNFLVATIASFGVILAAAYMLWLYKRVVFGKLINDNLKKMVDLKKSEILILWSLAVPTILFGFYPEPLINTIE

SEQ ID NO: 99800 - protein, 245 aa, Unknown
  Bacterial polypetide isolated from the Sargasso Sea
MLQIAIVTICLILTVVFLVYFERKVIGYMHARVGPNRVGPKGTLQSIADTIKLLLKEVIIPDKADRFFFLLSPLLLLIPALAAWAVIPFSPEFIIADINAGLLYLLALTSFGVYGVILAGWASNSKYAFLGSMRAAAQMVAYEIAMGFALVGVLMAGGSLKLGEIVAAQSGGVLSWFWIPLFPLFIVYFISGIAETNRHPFDLAEGEAEIVAGFHVEYSGIGFAIFFLAEYINMALISVLTSIMF

SEQ ID NO: 99801 - protein, 136 aa, Unknown
  Bacterial polypetide isolated from the Sargasso Sea
MEISIIALPLIASIISGFFGKLIGDRNSEIVTSLLVSISAVLSAIVFYEVIFNQYVENIKIATWISSGSLEVNWSMKIDALSSVMLVVVTFISALVHIYSIGYMSHDPHKPRFMAYLSLFTFAMLMLVTADNFIQL

SEQ ID NO: 99802 - protein, 298 aa, Unknown
  Bacterial polypetide isolated from the Sargasso Sea
KFFLYTLLGSVLMLVAIIYIYWIAGTTDVEKLYQIGIDAKYQKILWLAFFSSFAVKTPMWPVHTWLPDAHVEAPTAGSVLLAAILLKMAGYGFIRFSIGLFPIGSEYFVSLIYILSLIAIIYTSLIALMQDDMKKLIAYSSVAHMGFVTLGIFTMTQQGLEGSIFQMISHGIISAALFLCVGVIYERMHTREIKKYGGIVEVMPRYSIVLMIFTLGALGLPGTTGFVGEFLILMGAFKDNFLVAVIASIGVILGAAYMLWLYKRVVFGELINKDLKNLIDLNKSELIILIALAIPSLY

SEQ ID NO: 99803 - protein, 266 aa, Unknown
  Bacterial polypetide isolated from the Sargasso Sea
MFLIIGIWGGSRRIYSAFKFFLFTLLGSVLMLVAIISIYWITGTTDVTQIYEIKIPVEYQYLLWLAFFSSFAVKLPMWPVHTWLPDAHVEAPTAGSVILAAILLKMGGYGFLRFSVGMFPIASEYFVPLIFSLSIIAILYTSFVALMQDDMKKLVAYSSVAHMGFVTLGIFTFNKQGIEGSILQMVSHGLISAALFLSVGVLYDRVHSRLINSYGGIVNILPKYSFILMVFVLAALGLPGTSGFIGEFLVLIGTFKINFLAGILAS

SEQ ID NO: 99804 - protein, 152 aa, Unknown
  Bacterial polypetide isolated from the Sargasso Sea
MIELLSSNFIYLLIIVGICLLIFVPLLLGVIIALYADRKIWAAVQKRRGPNVVGPYGLFQIPADGLKFIFKEIIIPDGSDKIVFLIAPIVTLALSIAAWAVVPVQAGVVLSNINVGILYIFAISSLGVYGILMAGWSSNSKYPFFGALRSAA

SEQ ID NO: 99805 - protein, 139 aa, Unknown
  Bacterial polypetide isolated from the Sargasso Sea
MEYAILFLPLIGSLIGYLGKSLTKYFAEISTSLFVSISAVLSVLVFWNGIQNDIYGNYLIFEWISSGGFKANWSINVDPLSSVMLVVVTFVSSLVHIYSIGYMSHDPHKPRFMSYLSLFTFSMLALVVSDNFLQLFFGG

SEQ ID NO: 99806 - protein, 259 aa, Unknown
  Bacterial polypetide isolated from the Sargasso Sea
MNFPILSSLILLPTIGALFIFFTRSSKKNNNTVKYVALFTSFVNFFLSIYLWALFDQTTSDFQFVEDRVWIENFINYKVGIDGISILFILLTTFITPLCIISITNSIKNRLSEFLIAVLIMESFMIGVFSSLDLVIFYLFFEAGLIPMFLIIGIWGGTRRVYSAFKFFLYTLLGSVLMLVAIISIYWITGTTDVVELYKIGIDVKYQNLLWLAFFSSFAVKTPMWPVHTWLPDAHVEAPTAGSVLLAAILLKMAGYGFI

SEQ ID NO: 99807 - protein, 157 aa, Unknown
  Bacterial polypetide isolated from the Sargasso Sea
MEYLILFLPLIGSIISGFFGKTIGDKLSQLITCILVSISALLSLIIFFKVVSSGYEHNAIIATWINSGSLNVNWSIKVDALSAVMLVVVTLVSSLVHIYSVGYMSHDPHKPRFMSYLSLFTFAMLTLVTSDNFLQLFFGWEGVGLCSYFLIGFWYKK

SEQ ID NO: 99808 - protein, 289 aa, Unknown
  Bacterial polypetide isolated from the Sargasso Sea
GTTDIIKLYEIGINANFQNLLWLAFFSSFAVKTPMWPVHTWLPDAHVEAPTAGSVLLAAILLKMAGYGFIRFSIGLFPIASEFFTPLIYFLSLVAIIYTSFVALMQDDMKKLIAYSSVAHMGYVTLGIFTNTQQGLEGSIVQMISHGLVSAALFLSVGVLYDRTHSRLIKTYGGLVSIMPKYSILLMIFTLAALGLPGTSGFVGEFLILMGAFRDNFLVATVACFGVILGAAYMLWLYKRVIFGKLNNEDLLKINDLNKSEFLILLIIAIPTLFFGFYPEPLLNTIQIS

SEQ ID NO: 99809 - protein, 267 aa, Unknown
  Bacterial polypetide isolated from the Sargasso Sea
LWLAFFSSFAVKTPMWPVHTWLPDAHVEAPTAGSVLLAAILLKMAGYGFIRFSLGLFPVASEVFTPLIYTLSVIAIIFTSFIALMQEDMKKLIAYSSVAHMGFVTLGIFTLQQQGIEGSIIQMISHGLVSAALFLCVGVVYDRMHSRLIKSYGGIVTIIPKYSILFMLFTLAALGLPGTSGFIGEFLILMGAFKDNFLVAVIASFGVILGAAYMLWLYKRVVFGKLVNEDLKQMVDLNRSEYLILTCLAVPTLFFGFYPEPLFNTIE

SEQ ID NO: 99810 - protein, 245 aa, Unknown
  Bacterial polypetide isolated from the Sargasso Sea
MNFPILSSLILLPIIGSFFIIFIKSSNKDNQSIKLIALFTSFSNFLLSLYLWYQFDNSIYEFQFIENKKWLIGLINYKVGVDGISILFILLTTFIIPLCIISVNHTIKHRNKEFLIAILLMESLMIGVFCSLDLVIFYLFFEGGLIPMFLIIGIWGGQRRVYSAFKFFLYTLLGSVLMLIAIISIYWITGTTDFVEIYNQGIDFKYQKLLWLAFFSSFAVKTPMWPVHTWLPDAHVEAPTAGSVI

SEQ ID NO: 99811 - protein, 132 aa, Unknown
  Bacterial polypetide isolated from the Sargasso Sea
MELSIIFLPLIASIISGFFGKFIGDRNSEIVTSALVSISALLSIFVLFQVIVNQYEENIVIATWINSGSLDVNWSMLIDPLSAVMLVVVTSVSSLVHIYSIGYMSHDPHKPRFMAYLSLFTFAMLMLVTSDN

SEQ ID NO: 99812 - protein, 280 aa, Unknown
  Bacterial polypetide isolated from the Sargasso Sea
IWGGPRKVYSAFKFFLFTLLGSVLMLVAIIAIYWISGTTDITEIYQIGIPSEYQYLLWLAFFSSFAVKLPMWPVHTWLPDAHVEAPTAGSVVLAAILLKMGGYGFIRFSVGMFPVASEYFTPLIFSLSTIAVIYTSLIALMQKDMKKLIAYSSVAHMGYVTIGIFTFNKQGIEGSIVQMFSHGLISAALFLSVGVLYDRTHSRLIKTYGGIVNLMPKYSFLFMIFVLGTLGLPGTSGFVGEFLVLVGVFKVNYLVTILASIGVILAAAYILWLYKRVVFG

SEQ ID NO: 99813 - protein, 143 aa, Unknown
  Bacterial polypetide isolated from the Sargasso Sea
MAHSIVILPLLGFLIACALSFFKRNAFIDRLADIITCTFIVLTAFFSFYIFIVDIGNPSVVSLKLFTWIESGSFSADWSIYLDTVTRVMLVVITSVSALVHIYSIGYMSHDDSKPRFMGYLSLFTFAMIMLVTADNFLNYFLA

SEQ ID NO: 99814 - protein, 266 aa, Unknown
  Bacterial polypetide isolated from the Sargasso Sea
PDAHVEAPTAGSVLLAAILLKMAGYGFIRFSLGLFPIASEYFVPFIYTLSLIAIIYTSLVALMQEDMKKLIAYSSVAHMGFVTLGIFTMTQQGIEGSIFQMISHGLVSAALFLSVGVVYERLHTRLISKYGGLETIMPKYAIVLMVFTLGALGLPGTSGFIGEFLVLMGTFKKNFLVAAITSLGVILGAAYMLWLYKRIIFGEITNEEVKSMNDLKRFEIIILFMLVVPIILFGFYPEPLMSSMETSVENLLNIYNLNLTNNLSLK

SEQ ID NO: 99815 - protein, 321 aa, Unknown
  Bacterial polypetide isolated from the Sargasso Sea
RRVYSAFKFFLYTLLGSVLMLVAIISIYWITGTTDVVKLYEIGIDVKYQNLLWLAFFSSFAVKTPMWPVHTWLPDAHVEAPTAGSVLLAAILLKMAGYGFIRFSLGLFPVASETFTPLIYVLSVIAIIFTSLIALMQEDMKKLIAYSSVAHMGFVTLGIFTLQQQGIEGSIIQMISHGLVSAALFLTVGVVYDRMHSRLISAYGGLVSVIPKYSILFMIFALASLGLPGTSGFIGEFLILMGAFKDNFLVAVIASLGVILGAAYMLWLYKRVVFGKLINEDLKKIVDLNRSEYFILSCLAAPILFYGFYPDPLINTIEVSV

SEQ ID NO: 99816 - protein, 280 aa, Unknown
  Bacterial polypetide isolated from the Sargasso Sea
HLFTHAFFKALLFLSAGAVIISMHHEQDIRKMGNLRAYLPITYKCFLIGTLCLVGFPLTSGFFSKDLILISLYNDDNFLSLFSYVILVIGTFVTSMYSFRLLFLVFHGNERFKSQKITEQGLSMLIPLTILSVLAVISGACINFFLELNIYSTENKNINYSGILDFILHGILSLPTLFIFVAFWISKKLYLDNYSIQNNSFIIEKILSIVKNKFYFDEIFFLLANTFIKIGSFFSNIIDYKLIDQKLIIGIPKIIDRLSFKAKKMQTGYLYHSAFSIIFH

SEQ ID NO: 99817 - protein, 283 aa, Unknown
  Bacterial polypetide isolated from the Sargasso Sea
KNSVDFQFVENREWLSGFINYKVGIDGISILFVILTTFITPICIISVNATITNRLKDFLIAILIMETFMIGVFCSLDLVVFYLFFEAGLIPMFLIIGIWGGERRVYSAFKFFLYTLLGSVLMLVAIISIYWITGTTDVEKLYELGIKAEYQNLLWLAFFSSFAVKTPMWPVHTWLPDAHVEAPTVGSVLLAAILLKMAGYGFIRFSLGLFPIASENFTILVYILSLIAIIYTSLVALMQEDMKKLIAYSSVAHMGFVTLGIFTMTQQGIEGSIFQMISHGLVS

SEQ ID NO: 99818 - protein, 142 aa, Unknown
  Bacterial polypetide isolated from the Sargasso Sea
MEYLILFLPLIGSVISGFFGKKIGDRNSQILTSSFVSISAILSLYILYKVIISDYSNNLVIATWINSGALNVNWSIKIDSLSAVMFVVVNFVSALVHIYSIGYMSHDPHKTRFMAYLSLFTFAMLTLVSSDNFIQLFFGWEG

SEQ ID NO: 99819 - protein, 131 aa, Unknown
  Bacterial polypetide isolated from the Sargasso Sea
MEYLILFLPLVAAIVSGFFGKLIGDRFSEIITSLFVSISAILSFFIFYKVINHGYSNNLIISTWINSGTLNVNWSINIDTLSSVMLVVVTLVSSLVHIYSIGYMSHDPHKPRFMSYLSLFTFAMLTLVTSE

SEQ ID NO: 99820 - protein, 304 aa, Unknown
  Bacterial polypetide isolated from the Sargasso Sea
SEFWGGPKRVYSAFKFFLYTLLGSVLMLVAIISIYWIAGTTDVIQLYELGIDAKYQNLLWLAFFSSFAVKTPMWPVHTWLPDAHVEAPTAGSVLLAAILLKMAGYGFIRFSLGLFPVASEVFTPLIYTLSVIAIIFTSLIALMQEDMKKLIAYSSVAHMGFVTLGIFTLQQQGIEGSIIQMISHGLVSAALFLCVGVVYDRMHSRMINSYGGIVAIIPKYSILFMLFTLAALGLPGTSGFIGEFLILMGAFKDNFLVAVIASLGVILGAAYMLWLYKRVVFGKLVNEDLKKMFDLNRSEYLILS

SEQ ID NO: 99821 - protein, 144 aa, Unknown
  Bacterial polypetide isolated from the Sargasso Sea
MAEVWDVYIWPTAWIVIKVLGIVIPILLSVAYLTYAERKVIGAMQQRRGPNVVGPFGLLQPIADAIKLFLKETIIPNKANRGVFLAAPCITFILAIVAWAVIPFGEQMILANINVGILYLFAISSLGVYGILMAGWASNSRYAF

SEQ ID NO: 99822 - protein, 139 aa, Unknown
  Bacterial polypetide isolated from the Sargasso Sea
MEYAVIFLPLFGTIVGYLSKYLGDIASQLFTTFSVCLSAVLSIAIFYNGIVHDSYGNYLIYEWISSGSFQANWSINIDPLTSIMLVVVTLVSALVHIYSIGYMNHDPNKPRFMSYLSLFTFSMLVLVVSDNFLQLFFGW

SEQ ID NO: 99823 - protein, 260 aa, Unknown
  Bacterial polypetide isolated from the Sargasso Sea
TTDVEKLYELGIQVEYQNLLWLAFFSSFAVKTPMWPVHTWLPDAHVEAPTVGSVLLAAILLKMAGYGFIRFSLGLFPIASENFTMLVYVLSLIAIIYTSLVALMQEDMKKLIAYSSVAHMGFVTLGIFTMTQQGIEGSIFQMISHGLVSAALFLSVGVVYERHHTRLINKYGGLVSIMPRYAIVFMVFTLGALGLPGTTGFIGEFLILMGAFEKNILVAMIASLGVILGAAYMLWLFKRVVFGEMNNQELKTMRDLKTFE

SEQ ID NO: 99824 - protein, 316 aa, Unknown
  Bacterial polypetide isolated from the Sargasso Sea
MLVAIISIYWINGTTDIVQLYELGIDKKYQNLLWLAFFSSFAVKTPMWPVHTWLPDAHVEAPTAGSVLLAAILLKMAGYGFIRFSIGLFPDASVYFTPLIFSLSLVAIIYTSLVALMQEDMKKLIAYSSVAHMGYVTLGIFTFNEQGLQGSIIQMISHGLISAALFLCVGVVYERTKTRIINDYGGLVSIMPRYSIVLMIFTLGAVGLPGTSGFIGEFLILMGAFKVNFLVATIASFGVILAAAYMLWLYKRLIFGKLINEKLLKILDLKKHEIIILWLLAIPSLFFGFYPMPLIETIEVSLNDIINIYASNSSLN

SEQ ID NO: 99825 - protein, 228 aa, Unknown
  Bacterial polypetide isolated from the Sargasso Sea
KENLLPSSSNKFLFIFAPMLTLILSLIAWAVIPISSTYVIANINIGILYLFAVSSFGVYGVIIAGWASNSKYPFLGALRSAAQMISYEVSIGFVIITVLICVGSLNLIDIVESQKNMWFAIPLLPMFVIFIISALAETNRLPFDLPEDEATLVAGFFTEYSSISFGLFFLAEYANMILMSSLTVILFLGGWYPPIDIFPLNAIPGIFWFVNKVFLILFVFLWVRATFR

SEQ ID NO: 99826 - protein, 239 aa, Unknown
  Bacterial polypetide isolated from the Sargasso Sea
LLWLAFFSSFAVKTPMWPFHTWLPDAHVEAPTAGSVLLAAILLKMAGYGFIRFSVGLFPIASEFFVPLIFVLSLIAIIYTSLIALMQEDMKKLIAYSSVAHMGFVTMGIFTMTPEGIEGSIFQMISHGIISAALFLCVGVVYDRMHTREINKYGGLVIIMPKYAVVFMVFTLGALGLPGTTGFIGEFLILLATFKVNFIVATIASFGVILGAAYMLWLYRKVIFGEIKNPDLNKLTDLK

SEQ ID NO: 99827 - protein, 233 aa, Unknown
  Bacterial polypetide isolated from the Sargasso Sea
RSNEKNNNTVKYVALFTSFVNFFLSIYLWILFDQTTSEFQFVEDRVWIENFINYKVGIDGISILFILLTTFITPLCILSINNSIKNRLSEFLIAVLIMESFMIGVFCSLDLVIFYLFFEAGLIPMFLIIGIWGGARRVYSAFKFFLYTLLGSVLMLVAIISIYWITGTTDVVELYKIGIDVKYQNLLWLAFFSSFAVKTPMWPVHTWLPDAHVEAPTAGSVLLAAILLKMAGY

SEQ ID NO: 99828 - protein, 212 aa, Unknown
  Bacterial polypetide isolated from the Sargasso Sea
MDIFHEIIIPGSIIVAQILAVVVPVLISVAFLVYAERKVLALIQLRRGPNIVGPFGILQSFADALKLITKENIIPSGSNKIVFILAPIITMVLSLAGWAVIPFAPGWVISDINVGIMYLFAVSSLGVYGIIMAGWASNSQYPFLGALRSAAQMVSYEVSIGFVIITVLLCVGSLNLSKIVLAQQTVWFAIPLLPMFIIFFISALAETNRLPF

SEQ ID NO: 99829 - protein, 265 aa, Unknown
  Bacterial polypetide isolated from the Sargasso Sea
MFILFSIPNINSLSIPFLTINGNNINLIFDYIDKNLLMSKVVLIISTLVLIYSSKFIEGEERRSHSRYFLFLSIFISSMFMFTISSDLFSNFIFWELLGLSSYFLIGFWNKDSEAIKSSTIAFWITRFGDLFFLAGIILIFTTAGTLDINNLNQIASNSDLDIKFPLLFIVIGIFSKSAQFPFNIWLPKAMKGPTPVSSLIHSATMVVAGVLLLFKIYPLISNSIGLLNLLTTIGIISSFIGAIAAFYEEDLKKILAYSTISHIG

SEQ ID NO: 99830 - protein, 138 aa, Unknown
  Bacterial polypetide isolated from the Sargasso Sea
MELSIIFLPLIASIISGFFGRYIGDRNSEIVTSALVSISALLSIHVLYQVIVNQYEENIIIATWISSGSLDVNWSMLIDPLSAVMLVVVTSVSALVHIYSIGYMSHDPHKPRFMAYLSLFTFAMLMNVTSDNFIQLFF

SEQ ID NO: 99831 - protein, 234 aa, Unknown
  Bacterial polypetide isolated from the Sargasso Sea
HTWLPDAHVEAPTVGSVLLAAILLKMAGYGFIRFSLGLFPIASENFTMLVYILSLIAIIYTSLVALMQEDMKKLIAYSSVAHMGFVTLGIFTMTQQGIEGSIFQMISHGLVSAALFLSVGVVYERHHTRLINKYGGLVSIMPRYAIVFMVFTLGALGLPGTTGFIGEFLILMGAFEKNILVAMIASLGVILGAAYMLWLFKRVVFGEMNNQELKSMKDLKTFEIITLSALVIPI

SEQ ID NO: 99832 - protein, 287 aa, Unknown
  Bacterial polypetide isolated from the Sargasso Sea
YQNLLWLAFFSSFAVKTPMWPVHTWLPDAHVEAPTVGSVLLAAILLKMAGYGFIRFSIGLFPIASENFTMFVYILSLIAIIYTSLVALMQEDMKKLIAYSSVAHMGFVTLGIFTMTQQGIEGSIFQMISHGLVSAALFLSVGVVYERYHTRLINKYGGLVSIMPRYAIVFMVFTLGALGLPGTTGFIGEFLILMGAFEKNILVAMIASLGVILGAAYMLWLFKRVVFGKMNNQELKSMRDLKTFEIITLSALVIPILFFGFYPEPLMNSIEASVENTLNMYNFDLIN

SEQ ID NO: 99833 - protein, 294 aa, Unknown
  Bacterial polypetide isolated from the Sargasso Sea
GIEAKYQNLLWLAFFSSFAVKTPMWPVHTWLPDAHVEAPTAGSVLLAAILLKMAGYGFIRFSIGLFPLASEYFVPLIYTLSLIAIIYTSFVALMQEDMKKLIAYSSVAHMGFVTLGIFTMTQQGLEGSIIQMISHGLVSAALFLCVGVVYERMHSRLIKTYGGIVSLMPKYAVLFMIFTLAAIGLPGTSGFIGEFLILMGAFKKSFLVAFIASFGVILGAAYMLWLYKRVIFGKLINKDLLKMIDLNNSEIFILISLAIPTLFFGFYPEPLLNTISVSISNLIETYNYQILLNK

SEQ ID NO: 99834 - protein, 336 aa, Unknown
  Bacterial polypetide isolated from the Sargasso Sea
YSLGIDGISLFMVLLTTFSTSIAILGSFNYIKTKETAFYALMLLLEAAVIGVFVTTDVFLFYVFFELTLVPMYFIVGIWGGERRIYAAIKFFLYTAFGSLLMLVGILFLFWKAKNFMGMPTFAYEDFLLVPLSGTEQLWLFTAFALAFSVKVPVFPLHTWLPDAHVEAPTPGSVILAAVLLKMGTYGFLRFLLPFFPLASQHPTVVTTMLVLAVIGILYTAWVAAVQPDAKKLVAYTSVAHMGFVVLGVFALNVNGLQGGLVVMISHGISTGALFLLLGMLYERRHTRRIADFGGIARVAPWFATAFMITALASIGLPGTSGFVGEFLALMGAFES

SEQ ID NO: 99835 - protein, 347 aa, Unknown
  Bacterial polypetide isolated from the Sargasso Sea
MIGVFCSLDLVVFYLFFEAGLIPMFLIIGIWGGERRVYSAFKFFLYTLLGSVLMLIAIISIYWITGTTDVEILYALGIQSEYQNLLWLAFFSSFAVKTPMWPVHTWLPDAHVEAPTVGSVLLAAILLKMAGYGFIRFSIGLFPIASENFTILVYVLSLIAIIYTSLVALMQEDMKKLIAYSSVAHMGFVTLGIFTMTQQGVEGSIFQMISHGLVSAALFLSVGVVYERHHTRLINKYGGLVTVMPRYAIVFMVFTLGALGLPGTTGFIGEFLILMGAFEKNILVALIASLGVILGAAYMLWLFKRVVFGEINNQELKSMKDLKTFEIITLSALVIPILFFGFYHRAL

SEQ ID NO: 99836 - protein, 322 aa, Unknown
  Bacterial polypetide isolated from the Sargasso Sea
MAVSIAGIPLFVLMALNATVAVYVERKVSAFMMDRIGPMGQGPGLHAGPWGVLQTIADAVKLLIKEDTIPSSADKLLFKVAPFIIFIGAFLGIAVLPFSSVIQVVDINIGVFYIIAVGSVGVHGIVMAGWASNNKWSLYGAMRSAAQIISYEIPAGLSIIVPIMMTSTMNLQSMIEFQSGSIWGILPNWIIFNNPFSFLAFFIFFISAVAETNRTPFDIPEAESELVAGWMTEYSGFRWAVFFLSEYANMFVVSGLAAAGFLGGWLSPIPGLFNSPMWGLFWFFSKIIFLIFVMMWFRWTFPRLRVDQLMHVAGKCLYLSQC

SEQ ID NO: 99837 - protein, 371 aa, Unknown
  Bacterial polypetide isolated from the Sargasso Sea
MSGDLLSLFIFFEALLIPMYFLMGIWGGENRRYATIKFIIYTVFGSVFIFIGTVYAGVISYGVTGRLALDFATLSSLTFTTEQSRVLFLMFTFGFLIKVPIFPLHTWLPDAHVEAPTAGSILLAGVLLKVGAYGILRVSIPFFTEGFLEYKFLIAVLSVIGIIYGAIVAIAQIDIKRLIAYSSVSHMGFVMLGISAGNYLSLEGAIIQMVNHGLTTGALFMLVGFLYERRHTRRISDFGGIKATMPKYAAIFLFCSFASIGLPGLNGFVGEFMILMGSFATYKVLSGIGAFGVVLAAIYMLWAYQRMFTGEISIQENKELVDLDSKEMISVVPLLVLMLFIGIYPSFIEGYVTQDALLISEIIDIFSGRLN

SEQ ID NO: 99838 - protein, 365 aa, Unknown
  Bacterial polypetide isolated from the Sargasso Sea
MSIDIIISLVKAFLILGLLLTNTLLLIWLERKVVAGMQARVGPDRAGPFGILQTLADAIKLLLKEQIMPLKADRAMYILAPILALVPSFLIFMIIPLGPDIDIEINGQNIRVPLVGADLNVGVLFFLALSSLAVYSVVLAGWSSGSKYPLLGGVRASAQMISYEAAMGLSLVPVILYSGSMSMTEIVKSQEGHLSSPIPFLDAIVSFIPKWNVFPQFVAFAIFFVASIAEVNRAPFDLVEAEQELVGGFHTEYSGFRFAMFFLAEYINMFNMCAITATFFLGGWLGPTFSNFLPPLISGLMPAFWLGIKTFGLLFIYVWIRATLPRLRYDQLMELGWKRMIPISLIWLLLTSVVLGIREFGLPWS

SEQ ID NO: 99839 - protein, 270 aa, Unknown
  Bacterial polypetide isolated from the Sargasso Sea
MWPVHTWLPDAHVEAPTAGSVLLAAILLKMAGYGFIRFSLGLFPVASEVFTPLIYTLSVIAIIFTSLIALMQEDMKKLIAYSSVAHMGFVTLGIFTLQQQGIEGSIIQMISHGLVSAALFLTVGVVYDRMHSRLISTYGGLVSVIPKYSILFMLFALASLGLPGTSGFIGEFLILMGAFKDNFLVAVLASIGVILGAAYMLWLYKRVVFGKLINEDLKKMLDLNRSEYFILSCLAVPILFFGFYPDPLINTIEVSVTDLINTHNTNIASK

SEQ ID NO: 99840 - protein, 389 aa, Unknown
  Bacterial polypetide isolated from the Sargasso Sea
MITYLISFFNFKKLELETLNYIIPTIIYSSLLFILFFISNINSLSIPFLTINGNDINLIFDYIDKNLLMSKVVLIISALVLIYSSKFIEGEERRSHSRYFLFLSIFISSMFMFTISSDLFSNFIFWELLGLSSYFLIGFWNKDSEAIKSSTIAFWITRFGDLFFLAGIILIFTTAGTLDINILNQIASNSDLDIKFPLLFIVIGIFSKSAQFPFNIWLPKAMKGPTPVSSLIHSATMVVAGVLLLFKIYPLISNSIGLLNLLTTIGIISSFIGAIAAFYEEDLKKILAYSTISHIGLMFLAIGISKPDLAYFHMFSHSFFKSLLFLFAGVVIMLNGTSKLKNLDSSIKLKSPMGAILVIACCSLSSIYFFTGSFSKEYIIFSMINDALY

SEQ ID NO: 99841 - protein, 481 aa, Unknown
  Bacterial polypetide isolated from the Sargasso Sea
MIGKNATSLSYWLSLTTSLLVFGMSMYALSMFKTDQVGIQFELIAPWIERFNINYHLGIDGISFPLILLTTFITPIVILTARTSNKINLHQYLASFLILEGLMIGVFSSLDAFLFYVFWEAMLIPMFIIIGIWGGENRVYATIKFFLYTFLGSVFMLIAIIYLYISTGSYSIFDFYNLDLSRMEQILIFLAFLFAFAVKIPMWPVHTWLPDAHVEAPTGGSVILAAILLKMGGYGLLRFSLPITPAASNELSMLMVVLSLIAIIYIGMVALSQTDMKKLIAYSSVAHMGFVTLGTFVVFLNHENASIENMNIAISGAMIQMISHGLISGALFLCIGVMYDRIHSREINDYGGVALAMPRFAGLMVFFALANAALPGTSGFVGEVLIILASLKVNFWIALLSGTTLVIGAAYTLWMIKRVIFGSITNEKISNVKDTTAVEFISLTILALMVLALGVYPEPLMKLMYITLNDLSELVFAGVGL

SEQ ID NO: 99842 - protein, 473 aa, Unknown
  Bacterial polypetide isolated from the Sargasso Sea
MIEINNILSTMIWLPILGGLSLLLIGDAEEKRKDLMHMVAVAVSIITFLLSINLYSGFDNLLPAMQFVERNAWIESLNIEYYLGIDGISAPLIILTAFITPFVVVSSWDVIKNKPAQYYAAFLILEGLMIGVFSALDAILFYVFWEAMLVPMFLIIGIWGGKRRIYATIKFFLYTFLGSVLMLVSFIYLYNQMDVFSLPDFMQAPLTMLEQQLIFVAFLLAFAVKVPMWPVHTWLPDAHVEAPTGGSVILAAIMLKMGGYGFIRLSMPITPDASEYFSFMMIVLSLIAVTYIGFVALMQKDMKKLIAYSSISHMGFVTLGFFIVWSYSHMSDASLGVVGGMVQMISHGLISGAMFLCVGVLYDRMHSREISDYGGVANSMPLFAGFMVFFAMSNAGLPGTSGFVGEFMVILASFEASFWYAFLAASTLILGAAYTLWMVKRVLYGEIANDNVAKLEDINNREFYVLMVLAISV

SEQ ID NO: 99843 - protein, 358 aa, Unknown
  Bacterial polypetide isolated from the Sargasso Sea
MTVDFLIDWFSTIGDFPVIAFILAVIISGIPLFLLMALNAMVAVYVERKVSAFMMDRIGPMGQGPGLHAGKWGLLQTLADAIKLLVKEDTIPETSDRLLFKMAPFIIFIGAFLGLAAVPFNSSLQVADFNVGVFYIIAVGSIGVIGIVMAGWSSNNKWSLYGAMRSAAQIISYEIPAGLSIIVPIMMAGTMNLQEMIQSQSGSVWGILPNWIIFNNPFTFLAFFIFFISAVAETNRTPFDIPEAESELVAGWMTEYSGFRWAVFFLSEYANMFVVSGLAVAGFLGGWLSPIPGMFNSAGWGLFWFMGKVIFLIFLMMWFRWTFPRLRVDQLMHVCWKVFIPIAMFNIFGVGIWKLIFG

SEQ ID NO: 99844 - protein, 499 aa, Unknown
  Bacterial polypetide isolated from the Sargasso Sea
MTFPLLSSLILLPLLGSLFIFFIREKTTKNYQSIKYVALFVSFSNFIISLYLWYLFDNSISDFQFVEEKVWIKDFINYKVGVDGISILFIILTTFIVPLCVVSINSNIKNRLKEFLIAVLIMESFMIGVFCSLDLIIFYLFFEGGLIPMFLIIGIWGGSRRVYSAFKFFLFTLLGSILMLVAIITIYWISDTTDITILYYLGIDPSYQKLLWLAFFSSFAVKTPMWPVHTWLPDAHVEAPTVGSVLLAAILLKLAGYGFIRFSIGLFPIASDFFTPLIFSLSLIAIVFISLVALMQEDMKKLIAYSSVAHMGFVTLGIFTFTQQGLEGSIIQMISHGIVSAALFFSVGVLYDRTQSRIINNYGGLVSLMPKYSVMLMVFCLAALGLPGTFGFIGEFLILLGTFKKSFVVATIASLGVIFAAAYMLWLYKRLIFGDIKNKELLSIKDINIHESFILVSLLIPIILFGVYPETLLNTIEVSINSLIEIIIIILMINNNKNA

SEQ ID NO: 99845 - protein, 293 aa, Unknown
  Bacterial polypetide isolated from the Sargasso Sea
FKALLFLGAGSVIHSLNNEQNLDKMGGLWKKMPYTWILMIVGTLALTGFPLLSGYYSKDAIIEFAYLRGSFLAYLSAGIGILTAILTSIYSWRLIFKTFHGSYNNENCVFEKIHESPKSMMVPLILLALGSIFAGLFFKDLFIGYDSDLIFWKNSIFFISEISKDHPPFWFLILTPVFVTMMIPISYYLFIINKNIPKYLAEENKGVYDFLINKWYFDEIYDYIFIQPAKKIGIFLWKVVDLKTIDRFGPDGISNFIKFLSNKAVKFQSGYIYHYAFVMLIGVSILLTYLMVY

SEQ ID NO: 99846 - protein, 365 aa, Unknown
  Bacterial polypetide isolated from the Sargasso Sea
MSIDIIISLVKAFLILGLLLTNTILLIWLERKVVAGMQSRVGPDRAGPFGILQTLADAIKLLLKEQIMPLKADRAMYILAPILALVPSFLIFMIIPLGPDIDLEINGQNITIPLVGADLNVGVLFFLALSSIAVYSVVLAGWSSGSKYPLLGGVRASAQMISYEAAMGLSLVPVILYSGSMSMTEIVKSQEGHLSSPIPFLDAIVSFIPKWNVFPQFVAFAIFFVASIAEVNRAPFDLVEAEQELVGGFHTEYSGFRFAMFFLAEYINMFNMCAITATFFLGGWLGPTFSNFLPPLISGLMPAFWLGIKTFGLLFIYVWIRATLPRLRYDQLMELGWKRMIPISLIWLLLTSVVLGIREFGLPWS

SEQ ID NO: 99847 - protein, 350 aa, Unknown
  Bacterial polypetide isolated from the Sargasso Sea
LETFMIGVFCSLDLVIFYLFFEAGLIPMFLIIGIWGGPRKVYSAFKFFLYTLLGSVLMLIAIISIYWITGTTDVTQIYEIKIPGELQYLLWLAFFSSFAVKLPMWPVHTWLPDAHVEAPTTGSVVLAAILLKMAGYGFLRFSVGMFPIASEYFTPLIFALSVIAVIYTSLVALMQDDMKKLIAYSSVAHMGFVTIGIFTFNKQGIEGSIIQMFSHGLISAALFLSVGVLYDRTHSRLIKSYGGIVNILPKYSFLFMIFALGALGLPGTSGFIGEFLILVGVFKVNVLVAIVASIGVILAAAYILWLYKRVIFGKLENTQLKKMKDVNFSEGSILFTLCLMILFFGFYPEP

SEQ ID NO: 99848 - protein, 298 aa, Unknown
  Bacterial polypetide isolated from the Sargasso Sea
GIQVEYQNLLWLAFFSSFAVKTPMWPVHTWLPDAHVEAPTVGSVLLAAILLKMAGYGFIRFSLGLFPIASENFTMLVYILSLIAIIYTSLIALMQEDMKKLIAYSSVAHMGFVTLGIFTMTQQGIEGSIFQMISHGLVSAALFLSVGVVYERHHTRLINKYGGLVSIMPRYAIVFMIFTLGALGLPGTTGFIGEFLILMGAFEKNILVAMIASLGVILGAAYMLWLFKRVVFGKINNQELKSMKDLKTFEIITLSALVIPILFFGFYPEPLMNSIEASVENTLNMYNFDLINNLASKD

SEQ ID NO: 99849 - protein, 108 aa, Unknown
  Bacterial polypetide isolated from the Sargasso Sea
MIDYSGMAFALFFLAEYINMIVISALAATLFLGGWSAPFGFLSFIPGIVWLVAKVFFLLSVFIWARATFPRYRYDQIMRLGWKVFIPVCVVWLIVVGFWIMSPLNIWK

SEQ ID NO: 99850 - protein, 436 aa, Unknown
  Bacterial polypetide isolated from the Sargasso Sea
MNFPILSSLILLPTIGALFILFTKSSSEKYQSSKYVALFISLANFLLSLYLWYVFDKNSVNFQFVENREWLSGFINYKVGIDGISILFVILTTFITPICIISVNATITTRLKDFLIAILIMETFMIGVFCSLDLVVFYLFFEAGLIPMFLIIGIWGGERRVYSAFKFFLYTLLGSVLMLVAIISIYWITGTTDVEKLYELGIKTEYQNLLWLAFFSSFAVKTPMWPVHTWLPDAHVEAPTVGSVLLAAILLKMAGYGFIRFSLGLFPIASENFTMLVYILSLIAIIYTSLVALMQEDMKKLIAYSSVAHMGFVTLGIFTMTQQGIEGSIFQMISHGLVSAALFLSVGVVYERHHTRLINRYGGLVSIMPRYAIVFMVFTLGALGLPGTTGFIGEFLILMGAFEKNILVAMIASLGVILGAAYMLWLFKRVVFWRNE

SEQ ID NO: 99851 - protein, 365 aa, Unknown
  Bacterial polypetide isolated from the Sargasso Sea
MSIELIISLVKANIVLAVLLTNTILLIWFERKVVAGMQSRVGPDRAGPFGILQTLADAIKLLLKEQILPSKADRAMYLLAPLIALVPSFLIFMIIPLGPDITVEWQNALYTIPLVGADLNVGVLYFLAFSSIAVYSVVLAGWSSGSKYPLLGGVRASAQMISYEAAMGLALVPVILYSGSLSLVDIVNSQSGNLSSSIPILNTIVSFIPKWNIFPQFVAFGIFFIAAVAEVNRAPFDLVEAEQELVGGFHTEYSGFRFAMFFLAEYINMFNMCAITATFFLGGWLGPTFEGILPPIFSVIMPIIWLGVKTFLLLFVFVWIRATLPRLRYDQLMELGWKRMIPLSLVWLILSAIVLGLREFGLPWS

SEQ ID NO: 99852 - protein, 131 aa, Unknown
  Bacterial polypetide isolated from the Sargasso Sea
MEISILALPLIASIISGFFGKFIGDRNSEIVTSLLVSISAILSAIVFYEVIFNQYEENIIIATWINSGSLEVNWSMKIDALSSVMLVVVTFVSALVHIYSIGYMSHDPHKPRFMAYLSLFTFAMLMLVTAE

SEQ ID NO: 99853 - protein, 305 aa, Unknown
  Bacterial polypetide isolated from the Sargasso Sea
MLDYPILSILIWLPILVGLILVASNDIGKSLSTTITLLTTLIILIISINLIQSYDYSLGNLQFIERFVWISGLDIHYYLAVDGISVSLVLLTSFINFLIAIYASSEDYDNKSSYLGYFLILEGLLMGTFSAFDSILFYIFFESLLIPLFLIIGIWGGENRKYATIKFFLYTFFGSVLMLISIIYLANLANSFAIEDFYYLTLSFEEEVLLLLAFLIGFGIKIPMWPVHTWLPDAHVEAPTSGSVILASVLLKVGGYGMIRFLLPITTEAGIYLSDYMIYLSLIAIIYISFVAFAQEDMKKLIAYS

SEQ ID NO: 99854 - protein, 443 aa, Unknown
  Bacterial polypetide isolated from the Sargasso Sea
LFSALLVFMIPNSRKEIFRPIGIIFSFITLTQCFYLLFSDYGKTKFVIISNYKWIQSYGLEISIGISGMSTLLLLLTSLLVCVSLLSIGNEHAESKGFIGSLLALHFAINGVFISGDLISLFIFFEALLIPMYFLMGIWGGENRRYATIKFILYTVFGSVFIFIGTVYTAVISYGANGSLAVDFDSLANLALTSSQSKTLFLLFTFGFLIKVPIFPLHTWLPDAHVEAPTAGSILLAGVLLKVGAYGILRVSIPFFTEGFLAYKNFVAVLSVIGIIYGAIVAIAQIDIKKLIAYSSVSHMGYVMLGISAGGYLSIEGAIIQMINHGITAGALFMLVGFLYERRHTRNISSFGGIKITMPRYAAIFLFTSFASIGLPGLNGFVGEFMILMGSFNSYKVLTSIAAFGVVLAAIYMLWAYQRIFTGPISNEKNESLKDLDTRETLS

SEQ ID NO: 99855 - protein, 39 aa, Unknown
  Bacterial polypetide isolated from the Sargasso Sea
MGNILGKIGIFGFTSMMIFLFILTIGFIYEWKKGALDWE

SEQ ID NO: 99856 - protein, 359 aa, Unknown
  Bacterial polypetide isolated from the Sargasso Sea
MTIDFIINQFTEIIGNFPVAAFLVACASVGGLLFVLMALNAMVAVYVERKVSAFMMDRLGPMGQGPGLHAGKWGILQTFADAIKLLIKEDTIPKSADQILFKVAPFIIFIGAIIGLSALPFSSSIQAVDLNVGVFYIIAVGSIGVIGIVMAGWASNNKWSLYGAMRSAAQIISYEIPAGLSIIVPIMMSGTMNLQNLIEYQSGSIFGIFPNWIMFQNPFAFLAFFIFFISAVAETNRTPFDIPEAESELVAGWMTEYSGFRWAVFFLSEYANMFVVSGLAVAGFMGGWLSPIPGFLNSPVLGLFWFFGKVSFLIFVMMWFRWTFPRLRVDQLMYVCWKVFIPIAMLNIFGVGIWKLIFG

SEQ ID NO: 99857 - protein, 431 aa, Unknown
  Bacterial polypetide isolated from the Sargasso Sea
MNFPILSSLILLPTIGALFILFTKSTSGKYQSSKYVALFISLANFLLSLYLWYVFDKNSVDFQFVENREWLSGFINYKVGIDGISILFVILTTFITPICIISVNATIKNRLKDFLIAILIMETFMIGVFCSLDLVVFYLFFEAGLIPMFLIIGIWGGERRVYSAFKFFLYTLLGSVLMLVAIISIYWITGTTDVETLYELGIKAEYQNLLWLAFLSSFAVKTPMWPVHTWLPDAHVEAPTVGSVLLAAILLKMAGYGFIRFSLGLFPIASENFTMLVYALSLIAIIYTSLVALMQEDMKKLIAYSSVAHMGFVTLGIFTMTQQGIEGSIFQMISHGLVSAALFLSVGVVYERHHTRLINKYGGLVSIMPRYAIVFMVFTLGALGLPGTTGFIGEFLILMGAFEKNILVAMIASLGVILGAAYMLWLLKELF

SEQ ID NO: 99858 - protein, 183 aa, Unknown
  Bacterial polypetide isolated from the Sargasso Sea
APFDLAEAESELVAGFHTEYSGLRWSFFFMAEYGSMFLVSALAAILFLGGWNGPVPVSKLLGLSDGMAVNAPYALRLLGCVNLFLKAALGVFVMMWIRWTLPRLRIDQVMTTCLKYCTPIAAAMFVGVMLWQLFLPGGLVPGSFQNAAGVREGWLEQSGSEESVNKDSLSGITPSRRIAEVSR

SEQ ID NO: 99859 - protein, 355 aa, Unknown
  Bacterial polypetide isolated from the Sargasso Sea
MNFPILSSLILLPTIGALFILFTKSSSGKYQSSKYVALFISLANFLLSLYLWHVFDNNSVDFQFVENREWLSGFINYKVGIDGISILFIILTTFITPICIISVNATITNRLKDFLIAILIMETFMIGVFCSLDLVVFYLFFEAGLIPMFLIIGIWGGERRVYSAFKFFLYTLLGSVLMLVAIISIYWITGTTDVEKLYELGIQVEYQNLLWLAFFSSFAVKTPMWPVHTWLPDAHVEAPTVGSVLLAAILLKMAGYGFIRFSLGLFPIASENFTMLVYVLSLIAIIYTSLVALMQEDMKKLIAYSSVAHMGFVTLGIFTMTQQGIEGSIFQMISHGLVSAALFLSVGVVYERHHT

SEQ ID NO: 99860 - protein, 307 aa, Unknown
  Bacterial polypetide isolated from the Sargasso Sea
MLSFGWWTGIVWPVLWILIKIVCILAPLMGAVAYLTLWERKLLGFMQVRHGPNRVGPMGLLQPIADALKLLTKEIIQPTAASKGLFVLGPVMAIMPALAAWVAIPFGPDVALANVNAGLLLVMAITSIEVYGVIIAGWASNSKYAFLGALRASAQMVSYEIAMGFCFLVVIMVSGSMNLTEIVLGQGRGMAADKGLTFLSWNWLPLLPIFLVYLISGVAETNRHPFDVVEGEAEIVAGHMVEYSGMGFAIFFLAEYASMWLVSILAALMFLGGWLPPIDSALFNWVPGWIWLGLKTFLVVSMFIGSG

SEQ ID NO: 99861 - protein, 329 aa, Unknown
  Bacterial polypetide isolated from the Sargasso Sea
YTLLGSVLMLVAIISIYWIAGTTDVQELYKIGIDQKYQNLLWLAFFSSFAVKTPMWPVHTWLPDAHVEAPTAGSVLLAAILLKMAGYGFIRFSIGLFPVASEYFVPLVYVLSIIAIIYTSLVALMQDDMKKLIAYSSVAHMGFVTLGIFTMTQQGIEGSIIQMISHGLISAALFLCVGVIYDRRHTRQIKDYGGLVSVMPKYAILFMIFTLGAVGLPGTTGFVGEFLILLGAFKKSFIVAIFASIGVILSAAYMLWLYRRVVFGKIVNADLKNIVDLNKSEKIILWTLAIPSIFYGFYPEPIFNTIDVSINSLIQTYNANLDIYFAGKN

SEQ ID NO: 99862 - protein, 394 aa, Unknown
  Bacterial polypetide isolated from the Sargasso Sea
QNNKFISLFLILEGLLIGVFSAFDSILFYIFFESMLIPLFLIIGIWGGNNRIYATLKFFIYTFVGSVLMLISLIYLSNQADSFNIVDFYNLNLPLETQIYIFLAFLIAFGIKIPMWPVHTWLPDAHVEAPSSGSVILAAVLLKVGGYGLIRFLLPITSDAGFYLNSILITLSLIAIIYISFVALAQKDMKKLIAYSSVAHMGFVTLGIFLAFNIAKPGIDKDILLLGLQGSVMQMVSHGLISAGLFFCIGIIYARTKNRAIDDQSGIGQVMPLFSAMMMFFLLSNAGLPGTSGFVGEFMVMIAGLEVSYLYAFLASMTLVLAASYSLWLGKRVLFGLPSNDKITNMSSMKSEEFWPLIILILFIILLGVKPGIILDISLVSSEYMIDVISGDIK

SEQ ID NO: 99863 - protein, 366 aa, Unknown
  Bacterial polypetide isolated from the Sargasso Sea
FILISSFSYLKSLKIFKIEYPILIASSLLGILVMISSMNLIVFYIGLELQSLALYVLASFNRDQIKSSEAGLKYFVLSALSSGLLLYGCSLIYGFTGSTDFITISQFLSNDSFGIKFAIVFILVGLSFKISAVPFHMWAPDVYEGSPTTVTLFFALIPKVAIIAVLIKILYIPFFNLIDQWQVIIIFLSISSMTFGAIAAIGQKNLKRLMAFSSIGHMGYALAGIATGTNQGIESSITYIIIYITMTLGFFVCLLMIKKNDLYYENIEDLSGLSKSHPILSICFLIMLFSLAGIPPLAGFFGKFYIFLAVIEQKMYFLAIVGLIATVISAFYYLRIIKVIYFDEEKKKYDTEQHFGLKVSLAITTF

SEQ ID NO: 99864 - protein, 380 aa, Unknown
  Bacterial polypetide isolated from the Sargasso Sea
MNSSFGNKSKHVAVDRVHNRGYHGIWFLFPGFFQALADFLKFATKEHMVPTKADRLVFETAPVIIIATTIMVYAFIPFGPHIWAANPELSLVFMMAVFGVAPLGVFFAGWSSNNKYTLIGGMRSAAQLTAYEIPLLISVLAIAVISGSFNILEIVDFQIETSNTWNLFIMPLGAALFLITMIAEVERIPFDMPEAEAELVEGWWTEYGGIRWGLMFAVEMMRAYAACILFALFFLGGWQLPFEDTLVSLPYVGVIFDFLANATPGLVVLLLKAYLMFAFFVWVRASLHRVRTDQILEFGWRWLLPASMVNLAVAIWLRLEVWDSTAAGGWPIWAVPVLFGSFILAFIVLAIDEDEDALELNRRMYHTQTLEKASPGTHRD

SEQ ID NO: 99865 - protein, 496 aa, Unknown
  Bacterial polypetide isolated from the Sargasso Sea
MTSLIYSFILLPVINSILVFLIPDIRKELFRPLTVYLSLIPLGLCLYMFVNQNLKTSFLEVDSIPWITAYGIDLIIGFSGMSFLLITLNCLLVLLSILSVNQEYAESKGFLGSIMLLQAAVNGVFLAGDLVSLFIFFEALLIPMYFLMGIWGGSNRRYATIKFILYTVFGSIFILAGTIYTGVLSYISSGKFALDFESIASMSITTSQSEILFLLFTFGFLVKVPLFPLHTWLPDAHVEAPTAGSILLAGVLLKVGAYGILRVSIPFFTEGFLRYQYIIAFLSVVGIIYGAIVAIVQIDIKKLIAYSSISHMGFVMLGISAGRYLSLEGAVIQMINHGITSGALFMLVGFLYDRRHTRRISDFGGLKKSMPIYASIFLFTSFASIGLPGLNGFVGEFMILMGSYPTFKVLTSVAAFGVVLAAIYMLWAYQRMFNGQLDNDENAVLSDLNSKELVAVGPLLALMLFIGIYPSFIESYVVQDVSVIYESISNLIGVSQ

SEQ ID NO: 99866 - protein, 126 aa, Unknown
  Bacterial polypetide isolated from the Sargasso Sea
MELTLLFLPLIGSIISGLFGKRIGDRNSEILTSTLVSISSILSILIFYKVIFENYNNNVIISSWINSGFLSVNWSIKIDSLSSVMLVVVTLVSSLVHIYSIGYMSHDPHKTRFMSYLSLFTFAMLT

SEQ ID NO: 99867 - protein, 297 aa, Unknown
  Bacterial polypetide isolated from the Sargasso Sea
MNFPILSSLILLPTIGALFLFFIKEKEGNNTTIKYVALFTTVVNFLISIYLWIAFDQSTSSFQFIEDRTWIKGFINYKVGVDGISILFIILTTFITPLCIISVNNSIKNRLRDFLISILIMESFMIGVFSALDLVVFYLFFEAGLIPMFLIIGIWGGARRVYSAFKFFLYTLLGSVLMLVAIISIYWITGTTDVVQLYELGIDVKYQNLLWLAFFSSFAVKTPMWPVHTWLPDAHVEAPTAGSVLLAAILLKMAGYGFIRFSLGLFPVASEVFTPLIYTLSVIAIIFTSLNSFNAGR

SEQ ID NO: 99868 - protein, 375 aa, Unknown
  Bacterial polypetide isolated from the Sargasso Sea
FMIGVFCSLDLVVFYLFFEAGLIPMFLIIGIWGGERRVYSAFKFFLYTLLGSVLMLVAIIAIYWITGTTDVEKLYELGIQVEYQNLLWLAFFSSFAVKTPMWPVHTWLPDAHVEAPTVGSVLLAAILLKMAGYGFIRFSLGLFPIASENFTMLVYILSLIAIIYTSLVALMQDDMKKLIAYSSVAHMGFVTLGIFTMTQQGIEGSIFQMISHGLVSAALFLSVGVVYERHHTRLINKYGGLVSIMPRYAIVFMVFTLGALGLPGTTGFIGEFLILMGAFEKNILVAMIASLGVILGAAYMLWLFKRVVFGEMKNQELKSMKDLKSFEIITLSALVVPILFFGFYPEPLINSIEVSVENTLNMYNFDLVNNIASRD

SEQ ID NO: 99869 - protein, 365 aa, Unknown
  Bacterial polypetide isolated from the Sargasso Sea
MSTELIIALIKSNIVLAVLLTNTILLIWLERKLVAGMQSRVGPDRAGPFGILQTVADAIKLLLKEQIMPLKADRAMYLLAPIIALVPSFLIFMIIPLGPDLNIEIGGKNYMVDFVGADLNVGVLYFLALSSIAVYSVVLAGWSSGSKYPLLGGVRASAQMISYEAAMGLSLVPVILYSGSLSLVDIVSSQSGNLSTTIPILSSIVSFIPKWNIFPQFIAFGIFFIAAVAEVNRAPFDLVEAEQELVGGFHTEYSGFRFAMFFLAEYINMFNMCAITATFFLGGWLGPTFEGFFPPILSAIMPIIWLGVKTFALLFIFVWIRATLPRLRYDQLMELGWKRLIPASLVWLILSAIVLGLREFGLPWS

SEQ ID NO: 99870 - protein, 250 aa, Unknown
  Bacterial polypetide isolated from the Sargasso Sea
MFDNINIFSYVENFLLSLNEIVLVFISIIVLITILLVFVAYYTYAERKVIAAMQIRKGPNVVGPYGLLQPLADGVKLFLKEIIIPTNSNTFLFLLAPIITFITAFSAWAVIPFSSTLVISDINAGLLYILALTSMGVYGIIIAGWASNSKYALLGAMRSAAQIVAYEIAMGFALVGVVMITGSLNLGEIIDAQKGSVFNWLWLPLLPLFIVYVVAGVAETNRAPFDVAEGESELVAGFHVEYSGMAFAIF

SEQ ID NO: 99871 - protein, 183 aa, Unknown
  Bacterial polypetide isolated from the Sargasso Sea
MLKKINLKNKIALVTGAGKGIGKACAVALAEAGAKVIILSRTKSDLIKVNKIIKKTKGSSQSFVCDVTNLEELQKVLKKISRLDILVNNAGNNRPQHFTKVSQVNMEYLTNLNMKAAFNVAQLCSQKMVKAKNRKKIGGSIIHMSSQLGKVGCEGRNVYNMNKFGVEGLARGMAYELARYNIR

SEQ ID NO: 99872 - protein, 504 aa, Unknown
  Bacterial polypetide isolated from the Sargasso Sea
MLDSLPILSILIWMPIMGGLILLFLNNISEKYIRVFGHSVSVATLLLSIIILNEFDTDKYYLQFTEKFLWISNFDIFYHLAIDGFSIVFIMLTTITTSLILIFSFSENRAQNNKFISLFLILEGLLIGVFSAFDSILFYIFFESMLIPLFLIIGIWGGSNRIYATLKFFIYTFVGSVLMLISLIYLSNQADSFNIVDFYNLNLPLETQIYIFLAFLIAFGIKIPMWPVHTWLPDAHVEAPSSGSVILAAVLLKVGGYGLIRFLLPITSDAGFYLNSILITLSLIAIIYISFVALAQKDMKKLIAYSSVAHMGFVTLGIFLAFNIAKPGIDKDILLLGLQGSVMQMVSHGLISAGLFFCIGIIYARTKNRAIDGQSGIGQVMPLFSAMMMFFLLSNAGLPGTSGFVGEFMVMIAGLEVSYLYAFLASMTLILAASYSLWLGKRVLFGMPSNDSINNMSSIKSEEFWPLIILILFVILLGVKPGIILDISLVSSEYMIDIVRGDIK

SEQ ID NO: 99873 - protein, 499 aa, Unknown
  Bacterial polypetide isolated from the Sargasso Sea
MILDLMIWAPIISGLIILMIGKNYGSLSYSLSIFSSSLVFVISLYALSMYDSSQTGIQFELITSWIERFDINYHLGVDGISFPLILLTTFITPIVLLTSRTSEKPNLHQYLASFLILEGLMIGVFSALDAFLFYVFWEAMLIPMFIIIGIWGGKNRVYATIKFFLYTFLGSVFMLIAIIYLYIQTGSYSIFDFYNIDLSRTEQILIFLAFLFAFAVKIPMWPVHTWLPDAHVEAPTGGSVILAAILLKMGGYGLLRFSLPITPDASSELSMIMVVLSLIAIIYIGMVALSQTDMKKLIAYSSVAHMGFVTLGTFVVFLDHEIASLENMNLAISGAMIQMISHGLISGALFLCIGVMYDRVHSREIDDYGGVALMMPRFAGLMVFFALANAALPGTSGFVGEVLVILASLKVNFWIALLSGTTLVIGAAYTLWMIKRVIFGDVTNEKINDIQDISAIELIPLMILAIMVLAMGVYPEPLMNLMYVSINDLSKLVFLGAGI

SEQ ID NO: 99874 - protein, 442 aa, Unknown
  Bacterial polypetide isolated from the Sargasso Sea
MHAYPILSIAIWLPILVGLLVLAIGSDRNPAPARWIALIGSVVSFLVTIPLITGFDSSSADLQFVEKANWIERFNITYHLGVDGISMWFVVLTALITVIVVIAAWEVITKNVAQYLAAFLILSGIMVGVFSSADGMLFYVFFEATLIPMYIIIGVWGGANRVYAAFKFFLYTLMGSLLMLVALLYLYIQTGTFDLATWQNAQIGMTPQILLFIAFFMAFAVKVPMWPVHTWLPDAHVEAPTGGSVVLAAIMLKLGAYGFLRFSLPITPDASHFLAPVVITLSLIAVIYIGLVAMVQADMKKLVAYSSIAHMGFVTLGFFIFNQLGVEGAIVQMISHGFVSGAMFLSIGVLYDRMHSRQIADYGGVVNVMPKFAAFVMLFSMANCGLPGTSGFVGEFMVILAAVQYNFWIAGGAAVTLILGAAYTLWMYKRVYFGAIANDHVK

SEQ ID NO: 99875 - protein, 323 aa, Unknown
  Bacterial polypetide isolated from the Sargasso Sea
MELSVITLPLIASIISGFFGKYIGDRNSELITSFLVSVSAIISLVIFYNVIIYDYEENIIIATWINSGSLNVNWSMNIDPLSSVMLVVVTLISSLVHIYSIGYMSHDPHKPRFMAYLSLFTFAMLMLVTSDNFIQLFFGWEGVGLCSYFLIGFWFKKESANAAAIKAFLVNRVGDFGLALGIFLIFYLFGTVNFDEVFNQIPSESAAGITPFLNKELIFLGLNFKAVDLICLLLFLGAMGKSAQIFLHTWLPDAMEGPTPVSALIHAATMVTAGVFLVVRCSPLYEYSELALNVITIVGMTTAIFAATVALVKQILKKLLLYS

SEQ ID NO: 99876 - protein, 122 aa, Unknown
  Bacterial polypetide isolated from the Sargasso Sea
MLSDFLKDYLPIIIFLIIALGLSCAFVVINFILSPKNPDPEKLSAYECGFEPFEDSRLEFDVRFYLVAILFIIFDLEIAFLFPWAISLGNIGLLGFSSMMIFLFILTIGFIYEWKKGALDWE

SEQ ID NO: 99877 - protein, 286 aa, Unknown
  Bacterial polypetide isolated from the Sargasso Sea
MQWEGPTPVSALIHAATMVTAGVFLVVRCSTLFEYSQTALNLVTIVGMITAIFAASVALVQNDIKKIIAYSTCSQLGYMFFAAGVGAYHVAMFHLFTHAFFKALLFLGSGSVIHAFKDEQDIRNMGGVRKKLPYTYIFMLIGTLALTGFPFLSGFYSKDAIIEFAYLTNSSLGNYAATIGIFTAFLTSIYSWRLFFKTFHGPYNNSKVPINETHESPFVMLVPLLFLAIGAIFAGYFFKTTFIGHHSNEFWQSSIFFLNEIKHDPIPLWFLILTPVLVVISIPISY

SEQ ID NO: 99878 - protein, 324 aa, Unknown
  Bacterial polypetide isolated from the Sargasso Sea
ISVISTIEHRLKDFLIAILIMETLMIGVFCSLDLIIFYLFFEGGLIPMFLIIGIWGGERRVYSAFKFFLYTLLGSVLMLIAIISIYWISGTTDVEKLYEIGIGEQYQKLLWLAFFSSFAVKTPMWPVHTWLPDAHVEAPTAGSVLLAAILLKMAGYGFIRFSVGLFPIASEYFVPLVFALSLIAIIYTSLVALMQEDMKKLIAYSSVAHMGFVTLGIFTMTQQGIEGSIFQMISHGLVSAALFLSVGVVYDRNHTRLIKKYGGLVTVMPKYGIVFMIFALGSLGLPGTSGFIGEFLILMGTFKKSFLVATIASLGVILGAALYT

SEQ ID NO: 99879 - protein, 299 aa, Unknown
  Bacterial polypetide isolated from the Sargasso Sea
LFFGWEGVGLCSYLLIGFWFKKQSANAAAIKAFLVNRVGDLGLILGICVIYKLTGSLDFNIVFANVSSFINTSILFFNINIPYIELACFLLFIGAMGKSAQIGLHTWLADAMEGPTPVSALIHAATMVTAGVFLVARCSPLFEYAPISLNFVILVGAATSIFAACIAITQNDIKKIIAYSTCSQLGYMFFACGVSAYSAGMFHLMTHAFFKALLFLGAGSVIHALSDEQDIRKMGGLAKTLPYTCIAMWIGSLALAGLPPFAGFFSKDIILEAAWAHNSGFGYIAFYLGPDCGFLTAFI

SEQ ID NO: 99880 - protein, 323 aa, Unknown
  Bacterial polypetide isolated from the Sargasso Sea
FITFAFILLKIIALVVPLLIIVAFLTYAERKVIASVQLRKGPNVVGPFGLLQPLADGLKLFSKETIFPTVSNKIVFLLAPMVAFSLSIAAWAVIPIADGWVISNINVGILYLFAISSLSVYGIIMAGWASNSKYAFMGALRSAAQMVSYEVSIGLVIVTVLVCVGSLNLSDIVYAQKSVWYVFPLFPMFVVFFISALAETNRAPFDLPEDESSLVGGYFTEYSSMLFAMFFLGEYAAMIMMSGMATILFLGGWLPPFNIALLNEIPGFIWFAAKTSLMLFTFLWVRATFPRFRYDQLMRIGWKVFLPFSLLWVVLTSRFFNYF

SEQ ID NO: 99881 - protein, 378 aa, Unknown
  Bacterial polypetide isolated from the Sargasso Sea
TCTFIVLAAFFSFYIFIVNIGSPSVVSLKLFTWIESGSFSADWSIYLDSVTSVMLVVITSVSALVHVYSIGYMSHDDSKPRFMGYLSLFTFAMIMLVTADNFLQLFFGWEGVGLASYLLIGFWYKKPTANAAAIKAFIVNRVGDFGLALGIFTIFIVFGSIEYENVFNSVAKFSDTQFAFIGYEIHALTLICIFLFIGAMGKSAQLFLHTWLPDAMEGPTPVSALIHAATMVTAGVFLVVRCSPLFDLAPIAMDFVVVIGASTAFFAATIGLVQNDIKRVIAYSTCSQLGYMFVAAGLGAYGVAMFHLFTHAFFKALLFLGAGSVIHAVNEEQDIRKMGGISNFIPITQVMMIIGTISLMGFPFTSGYYSKDAIIETA

SEQ ID NO: 99882 - protein, 211 aa, Unknown
  Bacterial polypetide isolated from the Sargasso Sea
MELSIIFLPLIASIISGFFGKYIGDRNSEIVTSVLVSISALLSIFVLYQVIVNQYEENIVIATWISSGSLDVNWSMLIDPLSAVMLVVVTSVSALVHIYSIGYMSHDPHKPRFMAYLSLFTFAMLMLVTSDNFIQLFFGWEGVGLCSYFLIGFWFKKESANAAAIKAFVVNRVGDFGFALGIFLIFYLFGTVNYSEVFQQIPTVVDKNLSF

SEQ ID NO: 99883 - protein, 277 aa, Unknown
  Bacterial polypetide isolated from the Sargasso Sea
MEYSIIFLPLISSIIAAFSGKFIGEKIILIISSTLVSLSAILSILLFFDVLQNSYQNNLIIFSWIDSGLLSVNWSIKVDALSSVMFVIVTFVSALVHIYSIGYMSHDPNKPRFIAYLSLFTFAMLSLVSADNFLQLFFGWEGVGLCSYLLIGFWFKKESANAAAIKAFLVNRVGDFGLALGIFLIFYLFGSLNFIDVFQEIPNNLQNETLFLGLKFNSIDLICLLLFIGAMGKSAQIFLHTWLPDAMEGPTPVSALIHAATMVTAGVFLVVRCSPIF

SEQ ID NO: 99884 - protein, 330 aa, Unknown
  Bacterial polypetide isolated from the Sargasso Sea
QNDIKKIVAYSTCSQLGYMFFAAGVGAYHVAMFHLFTHAFFKALLFLGAGSVIHAFKDEQDIRKMGGVRKKLPFTYIFMLIGTLALTGFPFLSGFYSKDAIIEFAYLKNSSLGNYAASVGILTAFLTSIYSWRLFFKTFHGPYNNEKISINDTHESPFVMLVPLMFLSIGAVFSGYFFKETFIGHHSNDFWQTSVFFLNEIKHDVIPLWFLLTTPLIVLISIPISFYLYIINPKVLEDFKNTNMPLYDFLLNKWYIDELYIKIFVNPTKKIGSFFWKKGDIGVIDKFGPDGISKLVKIISNKTGRLQTGFIYDYAFVMLLGLSILLTYLI

SEQ ID NO: 99885 - protein, 287 aa, Unknown
  Bacterial polypetide isolated from the Sargasso Sea
MEYAILFLPLMGALLGYFGRSFTKYFAEISTSLFVSASAVLSLLVFWNGIQNDIYGNYIIFEWISSGNFKANWSINIDPLSSVMLVVVTFVSALVHIYSIGYMSHDPHKPRFMSYLSLFTFSMLALVVSDNFLQLFFGWEGVGLCSYLLIGFWYKKETANNAAIKAFIVNRIGDFGLAIGIFLIFFYFGTINFEEAFQATSQFAEKKIDFLGFELNLVTLICVFLFIGAMGKSAQFLLHTWLPDAMEGPTPVSALIHAATMVTAGVFLVVRCSPIFEYSQVALNLVT

SEQ ID NO: 99886 - protein, 241 aa, Unknown
  Bacterial polypetide isolated from the Sargasso Sea
SVNSTIKYRLKDFLVAILVMESLMIGVFCSLDLVIFYLFFEGGLIPMFLIIGIWGGERRVYSAFKFFLYTLLGSVLMLVAIISIYWFTGSTDITYLYNFGIDEKYQYLLWLAFFSSFAVKTPMWPVHTWLPDAHVEAPTAGSVLLAAILLKMAGYGFIRFSVGLFPLASEYFIPLIYILSLIAIIYTSLVALMQEDMKKLIAYSSVAHMGFVTLGIFTFTQQGLEGSIFQMISHGLVSAAL

SEQ ID NO: 99887 - protein, 122 aa, Unknown
  Bacterial polypetide isolated from the Sargasso Sea
MIYNFLTDYLSIIIFLFLALILSIGFILINFISSPKNPDPEKLSAYECGFDAFDDSRMEFDVRFYLVAILFIIFDLEIAFLFPWAITLGTIGIFGFWSMMLFLAILTIGFIYEWKKGALEWE

SEQ ID NO: 99888 - protein, 316 aa, Unknown
  Bacterial polypetide isolated from the Sargasso Sea
SNFQFVEDRNWIDGFINYKIGVDGISILFIILTTFITPLCVISVNNSVKKRLRDFLIAILIMESFMIGVFCALDLVVFYLFFEAGLIPMFIIIGIWGGPKRVYSAFKFFLYTLLGSVLMLVAIISIYWISGTTDVIKLYELGIDVKYQNLLWLAFFSSFAVKTPMWPVHTWLPDAHVEAPTAGSVLLAAILLKMAGYGFIRFSLGLFPVASETFTPLIYCLSVIAIIFTSFIALMQEDMKKLIAYSSVAHMGFVTLGIFTIQQQGLEGSIIQMISHGLVSAALFLSVGVIYDRFHSRLISTYGGLVTVVPKYSILL

SEQ ID NO: 99889 - protein, 314 aa, Unknown
  Bacterial polypetide isolated from the Sargasso Sea
LPSIGALFILFAKSTSGKYQASKYLSLFIALANFILSIYLWYAFDRESVNFQFVEDREWLLGFVNYKVGIDGISILFIVLTTFVTSICIILVNSTIKKRLKDFLIAILIMESFMIGVFCSLDLVVFYLFFEAGLIPMFLIIGIWGGERRVYSAFKFFLYTLLGSVLMLVAIISIYWITGTTDVEKLYEIGIDSKYQNLLWLAFFSSFAVKTPMWPVHTWLPDAHVEAPTAGSVLLAAILLKMAGYGFIRFSLGLFPIASEYFVPLVYFLSLVAIIYTSLVALMQEDMKKLIAYSSVAHMGFVTLGIFTMTQPRY

SEQ ID NO: 99890 - protein, 122 aa, Unknown
  Bacterial polypetide isolated from the Sargasso Sea
MLFDFLNEYLSIIIFLGIALLLSIGFIFVNFVFSPKNPDPEKLSTYECGFEAFNDSRMEFDVRFYLVAILFIIFDLEIAFLFPWAISLGKIGLFGFISMMIFLFILTIGFIYEWKKGALDWE

SEQ ID NO: 99891 - protein, 247 aa, Unknown
  Bacterial polypetide isolated from the Sargasso Sea
TVGALFLFFTKNKDGNNLTAKYVSLFTTIVNFFISIYLWIYFDQSTSNFQFIEERQWIDGFVNYKVGIDGISILFVILTTFITPLCIISVNNSVKTRLRDFLIAILIMESFMIGVFCALDLVVFYLFFEAGLIPMFLIIGIWGGPKRVYSAFKFFLYTLLGSVLMLVAIISIYWITGTTDVIQLYEQGIDTRYQNLLWLAFFSSFAVKTPMWPVHTWLPDAHVEAPTAGSVLLAAILLKMAGYGFIR

SEQ ID NO: 99892 - protein, 139 aa, Unknown
  Bacterial polypetide isolated from the Sargasso Sea
FFFFTLAETNRAPFDLPEGESELVAGYMVEYSSMSFALFFLGEYANMILMSAMTSVLFLGGWLPLFDIAPFNYIPGPVWLILKISLCLFVFLWVRATTPRYRYDQLMRLGWKVFLPFSLLWLVLTAGFLVYTGSAPVLY

SEQ ID NO: 99893 - protein, 122 aa, Unknown
  Bacterial polypetide isolated from the Sargasso Sea
MLAEFLKDYLPIIVFLLVALVLSVAFVAVNYLASPKNPDPEKLSAYECGFEPFNDSRMEFDVRFYLVAILFIIFDLEIAFLFPWAISLGKIGIFGFTSMMIFLFILTIGFIYEWKKGALDWE

SEQ ID NO: 99894 - protein, 280 aa, Unknown
  Bacterial polypetide isolated from the Sargasso Sea
IFILLSKDKTTNNSSIYISLFSSFATFLLSLFLWYSLDFNTSEFQFVEEKSWINNFIKFKLGIDGISILFIVLTTFITPICIISCVNSIKVRVKEFLIAILILETFMIGVFCSLDLVIFYLFFEAGLIPMFLIIGVWGGPKRVYSAFKFFLFTLLGSVLMLVAIIVIYWLTGTTDITQIYEIKIPKEYQNLLWLAFFSSFAVKMPMWPVHTWLPDAHVEAPTAGSVILAAILLKMAGYGFLRFSIPMFPIASEYFTPLVYTLSIIAIIYTSLVALMQDDM

SEQ ID NO: 99895 - protein, 122 aa, Unknown
  Bacterial polypetide isolated from the Sargasso Sea
MLVEFLKDYLPIIVFLLVALVLSVAFVAVNYLASPKNPDPEKLSAYECGFEPFNDSRMEFDVRFYLVAILFIIFDLEIAFLFPWAISLGKIGIFGFTSMMIFLFILTIGFIYEWKKGALDWE

SEQ ID NO: 99896 - protein, 304 aa, Unknown
  Bacterial polypetide isolated from the Sargasso Sea
FGKILGLRLSHFISCSLILVSSILSAYLFYMTLNGYQTSNQFLFDWINSGAIDASWSLKFDTLTSVMLVVVTSVSALVHIYSIGYMSHDPYQYRFFSYLSFFTFAMLMLVTSDNLLQLFFGWEGVGLASYLLIGFWYEKPSANAAAMKAFVVNRVGDFGFLLGIAVIYIATGSISFDVIFQKINNVNQFTINIACLLLFMGAMGKSAQLFLHTWLPDAMEGPTPVSALIHAATMVTAGIFLVARCSPIFENSDLALSFIIITGASTAFFAATVGLVQNDIKRIIAYSTCSQLGYMFVALGVGAY

SEQ ID NO: 99897 - protein, 286 aa, Unknown
  Bacterial polypetide isolated from the Sargasso Sea
SSKYVALFISLANFILSLYLWFIFDSTVSEFQFVENREWIPGFVSYKVGVDGISILFIILTTFITPLCIISVNNTINNRLKDFLVAILLMETLMIGVFCSLDLLVFYLFFEGGLIPMFLIIGIWGGERRVYSAFKFFLYTLLGSVLMLVAIITIYWLTGTTDVEKLYQIGIDPKYQNLLWLAFFSSFAVKTPMWPVHTWLPDAHVEAPTAGSVLLAAILLKMAGYGFIRFSIGLFPIASEYFVPLIYFLSLIAIIYTSLVALMQEDMKKLIAYSSVAHMGFVTLGI

SEQ ID NO: 99898 - protein, 281 aa, Unknown
  Bacterial polypetide isolated from the Sargasso Sea
YPWLTSGNLVVNWNLKFDTLSCVMMMVVTTVSTMVHIYSIGYMFHDHSKSRFMAYLSFFTFAMLLLVSSSNLLQLFVGWEGVGVASYLLIGFWYKKKSANLAAIKAFVVNRVGDLGFAIGLIFIYLNFQTLDFDKIFQLAPSFVDVNTTIFNLEFNVLEFSCFMLFIGAMGKSAQLFLHTWLPDAMEGPTPVSALIHAATMVTAGVFMVCRLSPVFEYAPFVLNFITIIGALTALFASTIALTQFDIKRVIAYSTCSQLGYMFFAVGLSAYPAAMFHLTTH

SEQ ID NO: 99899 - protein, 275 aa, Unknown
  Bacterial polypetide isolated from the Sargasso Sea
CFDLVTVVGMITAIFAASVAFVQNDIKKIVAYSTCSQLGYMFFAAGVGAYHVAMFHLFTHAFFKALLFLGAGSIIHAFKDEQDIRNMGGVRKKLPYTYVFMLLGTLALTGFPFLSGFYSKDAIIEFAYLKNSYLGNYAATIGIITAFLTSIYSWRLFFKAFHGPYNNKKISLNQAHESPLVMLFPLVLLSIGAIFSGYIFKETFIGHHSKEFWQGSIFYLNEIKHEAIPLWFLLITPILVLISIPISFYLFISNPKVLGDFKNTNMPLYNFLLNK

SEQ ID NO: 99900 - protein, 122 aa, Unknown
  Bacterial polypetide isolated from the Sargasso Sea
MLSDFLQNYLPIIIFLILALGLSCAFVVINFILSPKRPDPEKLSAYECGFEPFEDSRMEFDVRFYLVAILFIIFDLEIAFLFPWAISLGNIGLLGFSSMMIFLFILTIGFIYEWKKGALDWE

SEQ ID NO: 99901 - protein, 251 aa, Unknown
  Bacterial polypetide isolated from the Sargasso Sea
MNFPILSSIIFLPLLGALFIFLSQSKTSSIKSAIYVSLFTSIANFLLSIFLWYSFDRNFTGFQFVEDKNWISGLIKFKLGIDGISILFIVLTTFIAPICILSCINSVKTRIKEFLIAILVLETFMLGVFCSLDLVIFYLFFEAGLIPMFLIIGIWGGPRRVYSAYKFFLYTLLGSVLMLIAIIAIYWISGTTDFVQILEFKIPKEYQYILWLAFFSSFAVKLPMWPVHTWLPDAHVEAPTAGSVILASILL

SEQ ID NO: 99902 - protein, 293 aa, Unknown
  Bacterial polypetide isolated from the Sargasso Sea
YTEIFELKIPREYQYLLWLAFFSSFAVKTPMWPVHTWLPDAHVEAPTAGSVILAAILLKMAGYGFLRFSLGMFPIASEFFTPLVFALSIIAIIYTSLVALMQDDMKKLIAYSSVAHMGFVTLGIFTFNKQGIEGSIFQMISHGIISAALFLCVGVLYDRTGSRMIKSFGGVVNYLPNFSLIFIIFVLGALGLPGTTGFIGEFLVLLGAFKINYLVAILASTGVVLCAAYMLWMAKRVVFGITNNTIVTKLKDINYLEATILIVLCLASIIFGFYHEPLLNTMDISVNEIIKIT

SEQ ID NO: 99903 - protein, 122 aa, Unknown
  Bacterial polypetide isolated from the Sargasso Sea
MLADFLYDYLSIIIFLALALLLSVGFIFVNFVFSPKNPDPEKLSSYECGFEPFNDSRMEFDVRFYLVAILFIIFDLEIAFLFPWAISLGKIGLFGFISMMIFLFILTIGFIYEWKKGALDWE

SEQ ID NO: 99904 - protein, 150 aa, Unknown
  Bacterial polypetide isolated from the Sargasso Sea
MTWWYIIPHFPMFIIFFISTLAETNRAPFDLPEAESELVAGYNVEYSSMSFGLFFLGEYGNMILMASMSTILFLGGWLPPFNWHFFDYIPGYIWFLSKVMILLFIFLWVRATLPRYRYDQLMSLGWKLFLPLSLLWIILTSSLLFFWKYV

SEQ ID NO: 99905 - protein, 279 aa, Unknown
  Bacterial polypetide isolated from the Sargasso Sea
FVENREWLGIINYKVGIDGISILFVILTTFITPLCILSVNSTIKYRLKEFLISILVMESLMIGVFCSLDLVIFYLFFEGGLIPMFLIIGIWGGERRVYSAFKFFLYTLLGSVLMLVAIITIYWVTGTTDVVELYSIGIPKELQNILWLAFFSSFAVKTPMWPVHTWLPDAHVEAPTAGSVLLAAILLKMAGYGFIRFSLGLFPIASEYFIPFVYTLSIVAIIYTSLVALMQEDMKKLIAYSSVAHMGFVTLGIFTMTQQGIEGSIFQIDKSWFSFGGAF

SEQ ID NO: 99906 - protein, 261 aa, Unknown
  Bacterial polypetide isolated from the Sargasso Sea
AFFSSFAIKIPMWPFHTWLPDAHVEAPTEGSVILAGILLKLGGYGFIRFNLSILPDASIFFTPFVYFLSVTAIVYTSIIALVQEDMKKLIAYSSVAHMGFVTIGIFSANIQGLHGAIIQMISHGIISAALFFSIGSIYNRFKTKQIGFFGGLNSVMPKFAVFFLIFVLGSIGFPGTSGFVGEYLTLLSVFGKNTTIAFIASTGVILAASYMLLLYKNVFLGPVNENYQSKKITDINVFENSVYIILVILIIVIGNKPKFYS

SEQ ID NO: 99907 - protein, 187 aa, Unknown
  Bacterial polypetide isolated from the Sargasso Sea
MEISILALPLIASVISGFFGKLIGDRNSEIVTSLLVSISAVFSAIIFYEVIFNQYEENIKIATWINSGSLQVNWSMKIDALSSVMLVVVTFVSALVHIYSIGYMSHDPHKPRFMAYLSLFTFAMLMLVTADNFIQLFFGWEGVGLCSYFLIGFWFKKETANAAAIKAFVVNRVGDFGFALGIFLIFY

SEQ ID NO: 99908 - protein, 260 aa, Unknown
  Bacterial polypetide isolated from the Sargasso Sea
SHDPHKPRFMAYLSLFTFAMLTLVTSDNFLQLFFGWEGVGLCSYFLIGFWFKKESANAAAIKAFLVNRVGDFGFALGIFLIFHLCGTVNYEEVFKQIPSVAAAGVIPFLDRELIYLGLNFKAVDLICILLFIGAMGKSAQIFLHTWLPDAMEGPTPVSALIHAATMVTAGVFLVVRCSPIFEYSTLTLNIITIIGLSTAFFAATVALVQNDIKKIIAYSTCSQLGYMFFAAGVGAYNVAMFHLFTHAFFKALLFLGAGSV

SEQ ID NO: 99909 - protein, 294 aa, Unknown
  Bacterial polypetide isolated from the Sargasso Sea
LETVMIGMFASIDILLFYIFFEVVLIPMYLIIGIWGGEKRIYASFKFFLYTLLGSVLMLIAIIVIYRLTNSMSIEYLQGNFFAKNVQIYIWLAFFASFAVKIPMWPFHTWLPDAHVEAPTAGSVILAGVLLKMGGYGFIRFSLGMLPEASEYFSPLIMTLSIVAVVYTSLVALAQTDIKKLIAYSSVAHMGLVTIGIFIVNSQGLEGAMIQMISHGVVSGALFLCVGVIYDRMHTREINFYVGLVNKMPIYATVFMIFMLGSVGLPGTSGFIGEFLVIVGAFKYSSIVVIGAAT

SEQ ID NO: 99910 - protein, 298 aa, Unknown
  Bacterial polypetide isolated from the Sargasso Sea
FFFGSINFDEVFQASSQFAENKIEFFGFESNLITLISIFLFIGAMGKSAQFLLHTWLPDAMEGPTPVSALIHAATMVTAGVFLVVRCSPIFEYSQVALNLVTIVGMTTAIFAASVALVQNDIKKIVAYSTCSQLGYMFFAAGVGAYNVAMFHLFTHAFFKALLFLGAGSVIHAFKDEQDIRNMGGVRKRLPFTYFFMLIGTLALTGFPFLSGFYSKDAIIEFAYLKNSALGNYAATVGIFTAFLTSIYSWRLFFKAFHGPYNNRKISINETHESPYVMLIPLVFLGLGAIFSGYIFKS

SEQ ID NO: 99911 - protein, 296 aa, Unknown
  Bacterial polypetide isolated from the Sargasso Sea
NLNNKLTFFGLQLNSIDLICMLLFIGAMGKSAQILLHTWLPDAMEGPTPVSALIHAATMVTAGVFLVVRCSPIFEYSQFTLNIITFVGMITAFFAATVALVQNDIKKIIAYSTCSQLGYMFFAAGVGAYNVAMFHLFTHAFFKALLFLGSGSVIHSFKDEQDINQMGGVWKKLPYTWVLMIIGTLALTGFPLLSGFYSKDAIIEYAYLRGNTAGYYAVVVGIFTALLTSIYSWRLIFKTFHGDYNNNKLKIDTMHESPLVMLIPLIVLAIGAVFAGYFFKELFIGHTSSNYFWSDS

SEQ ID NO: 99912 - protein, 85 aa, Unknown
  Bacterial polypetide isolated from the Sargasso Sea
PDNEKLSAYECGFEAFDDARGRFDVRFYLVAILFIIFDLEVAFLFPWAVSLGSIGIFGFWSMMIFLLILTIGFIYEWKKGALEWE

SEQ ID NO: 99913 - protein, 113 aa, Unknown
  Bacterial polypetide isolated from the Sargasso Sea
MPIILFLIIAFGLSCAFIIVNFILSPKNPDPEKLSAYECGFEPFEDSRMEFDVRFYLVAILFIIFDLEIAFLFPWAISLGNIGIFGFTSMMIFLFILTIGFIYEWKKGALDWE

SEQ ID NO: 99914 - protein, 72 aa, Unknown
  Bacterial polypetide isolated from the Sargasso Sea
EPFQDSRMEFDVRFYLVAILFIIFDLEIAFLFPWAISLGNIGLLGFSSMMIFLFILTIGFIYEWKKGALDWE

SEQ ID NO: 99915 - protein, 215 aa, Unknown
  Bacterial polypetide isolated from the Sargasso Sea
MEYAILFLPLIGSILGYLGRSINKFFAEITTSLLVSVSAILSIIVFWNGFQSDIYGNYKIFEWISSGGFTANWSINIDPLSSVMLVVVTFVSALVHIYSIGYMSHDPHKPRFMSYLSLFTFSMLALVVSDNFLQLFFGWEGVGLCSYLLIGFWYKKETANNAAIKAFIVNRIGDFGLAIAIFLIFFFFGSINFEEVFQATSQFTEKKIEFLGFES

SEQ ID NO: 99916 - protein, 196 aa, Unknown
  Bacterial polypetide isolated from the Sargasso Sea
LGALRSAAQMVSYEVSIGLVIINVLLCAGSLNLLDIVEAQRDIWFALPLLPMFVVFFISTLAETNRAPFDLPEGESELVAGYFVEYSSMSFALFFLGEYANMILMSSMTVILFLGGWLSPIDIWPLNVIPGPLWFIIKIMLVLFVFLWVRATTPRYRYDQLMRLGWKIFLPFSLIYVVLTAGFLLMTDRLPAVVLG

SEQ ID NO: 99917 - protein, 99 aa, Unknown
  Bacterial polypetide isolated from the Sargasso Sea
MSICLANFLVAVNNPDPEKNSAYECGFEQFGDSRMKFDVRFYLVTLLFIIFDLEVAFLFPWAVTFGTLGLFGFVSMMVFLAILTIGFIYEWKKGALEWQ

SEQ ID NO: 99918 - protein, 256 aa, Unknown
  Bacterial polypetide isolated from the Sargasso Sea
CMVALVVSDNLIQLFFGWEGVGLASYLLIGFWHHKKSANLAAMKAFLVNRVADFGFLIGIATLYIFLDTLSINEIIEGKEELLNYDINFLGFNINALVFSCFFLFVGAMGKSAQFGFHTWLPDAMEGPTPVSALIHAATMVTAGVFLTVRFSELMVMSDFIMTFVLIIGLLTAFFAASVGFFQKDIKKVIAYSTCSQLGFMFVACGLGAFNIAIFHLITHGYFKALLFLSSGSVIHGVHDEQDMDKMGNLFPKMKI

SEQ ID NO: 99919 - protein, 268 aa, Unknown
  Bacterial polypetide isolated from the Sargasso Sea
MLIDPLSAVMLVVVTSVSALVHIYSIGYMSHDPHKPRFMAYLSLFTFAMLMLVTSDNFIQLFFGWEGVGLCSYFLIGFWFKKESANAAAIKAFVVNRVGDFGFALGIFLIFYLFGTVNYSEVFQQIPTVVDKNLPFLGFEVKAIDLVCLLLFIGAMGKSAQILLHTWLPDAMEGPTPVSALIHAATMVTAGVFLVVRCSPVYEYSPLILNFITIVGMTTAFFAATVALVQTDIKKIIAYSTCSQLGYMFFAAGVGAYNVAMFHLFTHA

SEQ ID NO: 99920 - protein, 179 aa, Unknown
  Bacterial polypetide isolated from the Sargasso Sea
MEYLILFLPLIGAVISGFFGKKIGDRNSQILTSSFVSISAILSLLVLYKVISSDYSNNLVIATWINFGTLNVNWSIKIDALSAVMFVVVNFVSALVHIYSIGYMSHDPHKTRFMAYLSLFTFAMLTLVSSDNFIQLFFGWEGVGLCSYFLIGFWFKKESANKAAIKAFVVNRVGDFGLA

SEQ ID NO: 99921 - protein, 122 aa, Unknown
  Bacterial polypetide isolated from the Sargasso Sea
MAEEFLMDYFSIILFLIIALVLSCGFILLNFVFSPKNPDPEKLSPYECGFEPFDDSRMEFDVRFYLVAILFIIFDLEIAFLFPWAISLGKIGLFGFISMMIFLFILTIGFIYEWKKGALDWE

SEQ ID NO: 99922 - protein, 290 aa, Unknown
  Bacterial polypetide isolated from the Sargasso Sea
FDINLITLICVFLFIGAMGKSAQFLLHTWLPDAMEGPTPVSALIHAATMVTAGVFLVVRCSPMFEYSQVALNLVTIIGMITAIFAASVALVQNDIKKIVAYSTCSQLGYMFFAAGVGAYHVAMFHLFTHAFFKALLFLGAGSIIHAFKDEQDIRNMGGIRKKLPYTYAFMLVGTLALTGFPFLSGFYSKDSIIEFAYLRNSTLGNYAATIGILTAFITSIYSWRLFFKAFHGSYNNKKISIDKTHESPLIMLIPLIFLGLGAIFSGYLFKSTFIGHHSNEFWQGFIFFLN

SEQ ID NO: 99923 - protein, 290 aa, Unknown
  Bacterial polypetide isolated from the Sargasso Sea
MHAATMVTAGVYLLARMFPFYQGIANDALDIVMLFGVVTLLTAGLIAIVQDDLKKVLAYSTVSQLGYMVAAIGSGAYTAALFHLWTHAFFKALLFLGAGSVIHSVHSNSMLEMGGLRKVMPKTFSTFIIGTVALAGLPPFAGFFSKDEILASFNHEGETTFFFIAVLGAFITAFYMTRAVCLTFLGEYRGHGHPHESDSMMTTPLVVLAVFAAASGWVNIPGVYTGFTKWVTTRKTPIIEYHPESFDLFALGLGLTAGLLGIVLGYYLYQLPGSAETGDDKIKLNHFGEF

SEQ ID NO: 99924 - protein, 274 aa, Unknown
  Bacterial polypetide isolated from the Sargasso Sea
KIFQLVPNFTDQKINFLGFNANLITLICLFLFIGAMGKSAQFFLHTWLPDAMEGPTPVSALIHAATMVTAGVFLVVRCSPIFEYSQFASNIVAIIGMITAFFAATVAIVQNDIKKIIAYSTCSQLGYMFFAAGVGAYHVAMFHLFTHAFFKALLFLGSGSVIHAMDDEQDIRNMGDLWKKMPFTWLGMLIGTLALTGFPFFSGFYSKDAIIEFAYLSQSSIGYIATAIGIITAFLTAIYSWRLMFKTFHGKYNNKNYSKSKIHESGLSITIPLG

SEQ ID NO: 99925 - protein, 176 aa, Unknown
  Bacterial polypetide isolated from the Sargasso Sea
RYLFGLIIISVLITSGSLNLSEIVMKQENMWYVIPHFPMFVIFFISTLAETNRAPFDLPEAESELVAGYNVEYSSMSFGLFFLGEYGNMILMSSMSTILFLGGWLPPFDIQFFQNIPGFIWFLLKVTFLLFLFLWVRATLPRYRYDQLMRLGWKVFLPLSLAWIIITSSVVIYLQN

SEQ ID NO: 99926 - protein, 121 aa, Unknown
  Bacterial polypetide isolated from the Sargasso Sea
MQALLVEYLPILIFLGIAIIVAGSAVVASVVIAPQRPDVEKNSAYECGFEAFSDSRHKFDVRFYLVAILFIIFDLEVAFLFPWAISLGKIGIFGFWSMMIFLGILTIGFIYEWRKGALEWE

SEQ ID NO: 99927 - protein, 291 aa, Unknown
  Bacterial polypetide isolated from the Sargasso Sea
FFGWEGVGLCSYFLIGFWFKKESANKAAIKAFVVNRVGDFGFALGIFLIFYLFGTVNYSEVFAKIPSIIDKDLVFLGITFNAVDLICLLLFIGAMGKSAQILLHTWLPDAMEGPTPVSALIHAATMVTAGVFLVVRCSPIYEYSDLALNIITIVGMSTAFFAATVALVQNDIKKIIAYSTCSQLGYMFFATGVGAYNVAMFHLFTHAFFKALLFLGSGSVIHAFKDEQNINNMGGVWKKLPYTYSLMIIGTLALTGFPFLSGFYSKDAIIEFAYLRGNTTGYYAAGIGIFT

SEQ ID NO: 99928 - protein, 253 aa, Unknown
  Bacterial polypetide isolated from the Sargasso Sea
KFIFILSPILTFTLALIGWAVIPIDYKLVLADINVGVMYIFAISSLGVYGIIMAGWASNSRYAFLGALRSAAQMISYEVSIGLIIISVLITSGSLNLTEIVMKQQNMWYLIPHFPMFVIFFISTLAETNRAPFDLPEAESELVAGYNVEYSSMSFGLFFLGEYGNMILMSSMSTILFLGGWLPPADINFFQNIPGFIWFLLKVTFLLFLFLWVRATLPRYRYDQLMRLGWKVFLPLSLAWIIITSSVVIYLQN

SEQ ID NO: 99929 - protein, 264 aa, Unknown
  Bacterial polypetide isolated from the Sargasso Sea
ANWSINVDPLSSVMLVVVTFVSALVHIYSIGYMSHDPHKPRFMSYLSLFTFSMLVLVVSDNFLQLFFGWEGVGLCSYLLIGFWYKKETANNAAIKAFIVNRIGDFGLAIGIFLIFFFFGSINFEEVFQSAPELTEKKLLFFGVELSLITLICLFLFVGAMGKSAQFLLHTWLPDAMEGPTPVSALIHAATMVTAGVFLVVRCSPLFEFSQLALNVVTVVGMVTAIFAASVALVQNDIKKIVAYSTCSQLGYMFFAAGVGAYHVA

SEQ ID NO: 99930 - protein, 122 aa, Unknown
  Bacterial polypetide isolated from the Sargasso Sea
MIAEFLKDYLSIIIFLIVALGLSCAFVLMNFILAPNNPDPEKLSSYECGFEPFTDSRMEFDVKFYLVAILFIIFDLEIAFLFPWAISLGNIGLVGFISMMIFLSILTIGFIYEWKKGALDWE

SEQ ID NO: 99931 - protein, 240 aa, Unknown
  Bacterial polypetide isolated from the Sargasso Sea
IAILVLETFMIGVFCSLDLVIFYLFFEAGLIPMFLIIGIWGGTRKVYSAFKFFLFTLLGSILMLIAIIAIYWITGTTDVTQIYEIKIPQEFFYLLWLAFFSSFAVKLPMWPVHTWLPDAHVEAPTAGSVILAAILLKMGGYGFLRFSVGMFPIASEYFTPLIFALSIIAVIYTSLVALMQDDMKKLIAYSSVAHMGFVTIGIFTFNKQGIEGSLIQMLSHGLISAALFLCVGVLYDRTHS

SEQ ID NO: 99932 - protein, 283 aa, Unknown
  Bacterial polypetide isolated from the Sargasso Sea
MLTLVTSDNFLQLFFGWEGVGLCSYFLIGFWYKKESANAAAIKAFIVNRVGDFGFALGIFLIFYLFGTVNYNEVFESIPQIIDKRLNFLGIDVNAINLICILLFIGAMGKSAQFLLHTWLPDAMEGPTPVSALIHAATMVTAGVFLVVRCSPIYEYSILAQNLITIVGATTAFFAASVALVQNDIKKIIAYSTCSQLGYMFFAAGAGAYNVAMFHLFTHAFFKALLFLGSGSVIHSFNNEQDITKMGGVWKKLPYTWILMLIGTLALTGFPFFSGFYSKDAII

SEQ ID NO: 99933 - protein, 301 aa, Unknown
  Bacterial polypetide isolated from the Sargasso Sea
YDFQFIEEFFWISGFIKFKFGIDGISILFILLTAFVTPLAIISCINSVKVRLKEFLIAILVLETFMIGVFCSLDLVIFYLFFEAGLIPMFLIIGIWGGPRKVYSAFKFFLFTLLGSVLMLVAIIAIYWITGTTDVTEIYKIKIPKEYQYLLWLAFFSSFAVKLPMWPVHTWLPDAHVEAPTAGSVILAAILLKMGGYGFLRFSVGMFPIASDYFVPLVFVLSVIAIIYTSLVALMQDDMKKLIAYSSVAHMGFVTLGIFTFNKQGIEGSIIQMLSHGLISAALFLSVGFLYDRVNSRIIKS

SEQ ID NO: 99934 - protein, 269 aa, Unknown
  Bacterial polypetide isolated from the Sargasso Sea
FFLFFTRSSEKNNNTVKYVALFTSFVNFFLSIYLWVLFDQTTSEFQFVEDRVWIENFINYKVGIDGISILFILLTTFITPLCILSINNSIKNRLSEFLIAVLIMESFMIGVFCSLDLVVFYLFFEAGLIPMFLIIGIWGGARRVYSAFKFFLYTLLGSVLMLIAIISIYWITGTTDVVELYKIGIDVKYQNLLWLAFFSSFAVKTPMWPVHTWLPDAHVEAPTAGSVLLAAILLKMAGYGFIRFSLGLFPAASEVFTPLIYALSVIAII

SEQ ID NO: 99935 - protein, 268 aa, Unknown
  Bacterial polypetide isolated from the Sargasso Sea
MFHLFTHAFFKALLFLGSGSVIHSFKEEQDIRKMGGVWRKLPFTWILMIIGTLALTGFPFLSGFYSKDAIIEYAYLKDTNLGYSAATLGIFTALLTAIYSWRLMFKTFHGGFNNEKIELNSIHESPSSMLIPLIILAIGSLFSGLFFKDLFIGNIEPSIFWQDSIKFLVPLSTNHPPSWFILITPVLVCIAIPISYYLFVKNKNITKWLVDENKPLYDFLLNKWYFDELYDYLFVKNSKKIGSYFWKNIDLNIIDKYGPDGISKLIKN

SEQ ID NO: 99936 - protein, 288 aa, Unknown
  Bacterial polypetide isolated from the Sargasso Sea
LILLPSIGALFLFFTKSNNKNNFTVKYVALFTSLVNFALSIYLWILFDPTTSEFQFVEDRIWIENFINYKVGIDGISILFIILTTFITPLCIISINNSIKSRLSEFLIAVLIMESFMIGVFCSLDLVIFYLFFEAGLIPMFLIIGIWGGSRRVYSAFKFFLYTLLGSVLMLVAIISIYWITGTTDVVQLYNLGIDTKYQNLLWLAFFSSFAVKTPMWPVHTWLPDAHVEAPTAGSVLLAAILLKMAGYGFIRFSLGLFPVASEVFTPLIYTLSVIAIIFTSLIALMQE

SEQ ID NO: 99937 - protein, 289 aa, Unknown
  Bacterial polypetide isolated from the Sargasso Sea
FEYSQFALNLTTIVGMITAIFAASVALVQNDIKKIVAYSTCSQLGYMFFAAGVGAYHVAMFHLFTHAFFKALLFLGAGSVIHAFKDEQDIRNMGGVRKKLPYTYIFMLLGTLALTGFPFLSGFYSKDAIIEFAYLRNSTLGNYAATIGILTAFLTSIYSWRLFFRAFHGPYNNKKIPITETHESPLVMLIPLIFLSIGAVCSGYLFKDTFIGHHSNEFWQSSIFFLNEIKHDAIPLWFLLITPTLVLISIPISFYFYIKNPKILEDFKNTNLPLYKFLLNKWYIDELTK

SEQ ID NO: 99938 - protein, 147 aa, Unknown
  Bacterial polypetide isolated from the Sargasso Sea
MEYAVIFLPLLGSVITYFGKKLGTLFSQIFSCSMVSIAAIMSFIIFYNGLIYDNYGNYLIFEWIQSGNLKVNWSIKIDPLSSIMVMVVTSVSALVHIYSIGYMSHDPHKPRFMSYLSLFTFSMLCLVVSDNFLQLFFGWEGVGLCSY

SEQ ID NO: 99939 - protein, 164 aa, Unknown
  Bacterial polypetide isolated from the Sargasso Sea
MIILIVFLPLLGFLYCAFLGNRFPDRYAQIITCLFLFFSTFLSWVIFFKYLSGANLELYFIINWITSGLFVADWILRVDALTSTMLIVVNSVSLCVHIYSIGYMQTDKSIPRFMGYLSLFTFFMLVLVTSNNLLQMFFGWEGVGLASYLLIGFWFNKKSANQAA

SEQ ID NO: 99940 - protein, 287 aa, Unknown
  Bacterial polypetide isolated from the Sargasso Sea
MISSWPILSITTFLPLCGAFFIILISKESENNNSSFNVKTVALWTSIMTFLASIIILINFDFNSKGFQFEEISEWVPKLGIVYHFGIDGISLSFILLTTFLIPICILLSWNSINHRLREYMISFLVLETFIIGMFCSLDLIVFYIFFEGVLIPMFLIIGIWGGVNRVYAAFKFFLYTLLGSVLMLIAIIYILNVVGSSDLVDVQNFDFNFYTQIYLFLAFMISFAVKVPMWPFHTWLPDAHVEAPTAGSVILAGVLLKMGGYGFLRFSLPLFPEASQFFQPYYFFSF

SEQ ID NO: 99941 - protein, 315 aa, Unknown
  Bacterial polypetide isolated from the Sargasso Sea
CWFMFISTNCFWYKKETANNAAIKAFIVNRIGDFGLAIAIFLIFFFFGSINFEEIFQATSQFAEKNIAFFGFEANLITLICVFLFIGAMGKSAQFLLHTWLPDAMEGPTPVSALIHAATMVTAGVFLVVRCSPIFEYSQVALNLVTIVGMITAIFAASVALVQNDIKKIVAYSTCSQLGYMFFAAGIGAYHVAMFHLFTHAFFKALLFLGAGSIIHAFKDEQDIRNMGGVRKKLPYTYVFMLLGTLALTGFPFLSGFYSKDAIIEFAYLRNSSLGNYAATIGIITALLTSIYSWRLFFRVFHGSYNNKKIKIDET

SEQ ID NO: 99942 - protein, 307 aa, Unknown
  Bacterial polypetide isolated from the Sargasso Sea
ISILFVILTTFITPLCIVSVNNTIKNKLKEFLIAILLMETLMIGVFCSLDLVIFYLFFEGGLIPMFLIIGIWGGERRVYSAFKFFLYTLLGSVLMLIAIISIYWINGTTDVTELYKLGIDSKYQNLLWLAFFSSFAVKTPMWPVHTWLPDAHVEAPTAGSVLLAAILLKMAGYGFIRFSLGLFPIASDFFVPLIYSLSLIAIIYTSLVALMQEDMKKLIAYSSVAHMGFVTLGIFTFTKQGIEGSIFQMLSHGLISAALFLCVGVIYDRMHTRLINDYGGLVSVMPKYAVLFMIFTLGAIGLPGTSG

SEQ ID NO: 99943 - protein, 266 aa, Unknown
  Bacterial polypetide isolated from the Sargasso Sea
MSEIPILSILIFIPVVGIFFMLLIRNNDDQSSQNLKHTALWITFLNFFISLSLLFSFDLNNPDFQFVENYAWIESGISYHLGIDGVSILFVILTTMLVPICILASYESIKFSVKEYLISFLALETFMIGVFCSLDLVLFYLFFEGGLIPMFLIIGIWGGERRVYSTFKFFLYTLAGSVFMLLAIIYIFISTGTTDVETLLVYNFTSNEQLILWIAFFTSFMVKIPMWPFHTWLPDAHVEAPTAGSVILAGVLLKMAGYGFIRFSIG

SEQ ID NO: 99944 - protein, 122 aa, Unknown
  Bacterial polypetide isolated from the Sargasso Sea
MIYNFLSDYLSIIIFLFVALFLSIGFILINFLSSPSNPDPEKLSAYECGFEAFDDSRMEFDVRFYLVAILFIIFDLEIAFLFPWAISLGNLGALGYWSMMFFLGILTIGFIYEWKKGALEWE

SEQ ID NO: 99945 - protein, 101 aa, Unknown
  Bacterial polypetide isolated from the Sargasso Sea
MSCGFIVLNYFLSPKMPDPEKLSSYECGFEPFNDSRMEFDVRFYLVAILFIIFDLEIAFLFPWAISLGKIGIFGFFSMMIFLFILTIGFIYEWKKGALDWE

SEQ ID NO: 99946 - protein, 281 aa, Unknown
  Bacterial polypetide isolated from the Sargasso Sea
IWGGNNRIYASFKFFLYTLLGSILMLIALIAMWKISGTSNIAYLTDFKFSHQTFPVLGIDILGGTQMLLWWAFFASFAVKLPMWPFHTWLPDAHVEAPTAGSVVLAAILLKLGGYGFLRFSVPMFPNASNLMQDFVFFLSVVAIIYTSLVALRQTDMKKLIAYSSVAHMGFVTIGIFSFNRQGIDGAIFQMLSHGFISAALFLIVGVIYDRIHTRDIEAYGGLVLRMPFYALIFMFFTMANIGLPGTSGFVGEVLALVGVFQVSKLTALGAAIGVILSAAY

SEQ ID NO: 99947 - protein, 287 aa, Unknown
  Bacterial polypetide isolated from the Sargasso Sea
SCTALFAASVALVQTDIKRIIAYSTCSQLGYMFVAAGAGFYHAAIFHLFTHAFFKALLFLGAGSIIHSMHHEQDVRKFGGLMSKLPWTFVMMLIGTLAITGAGIPLSYYLFGFNFGLSGFVSKDIIIEGVFASTNSVTAFAFYVLVFSAFLTSFYSWRLVFLTFFGQYRGNKDVLLHCHEPSWNMLVPLILLSLGSIFFGSLFEYSFTNEKYQIFSDAIFLSLNNTILRDFHYVPTGVKIAPFCAMLLGFSLAFYFYFFNTKAPKLLAKELNILYQFLLNKWYFDEI

SEQ ID NO: 99948 - protein, 258 aa, Unknown
  Bacterial polypetide isolated from the Sargasso Sea
MIGVFCSLDLVVFYLFFEAGLIPMFLIIGIWGGERRVYSAFKFFLYTLLGSVLMLIAIIAIYWITGTTDVEKLYELGIDAKYQNLLWLAFFSSFAVKTPMWPVHTWLPDAHVEAPTAGSVLLAAILLKMAGYGFIRFSLGLFPIASEYFVPLIYTLSLIAIVYTSLVALMQDDMKKLIAYSSVAHMGFVTLGIFTMTQQGIEGSIFQMISHGLVSAALFLCVGVVYERQHTRLISKYGGLVNIMPKYAIVLMVFTLGA

SEQ ID NO: 99949 - protein, 298 aa, Unknown
  Bacterial polypetide isolated from the Sargasso Sea
LIISMLLPIALLLGFITIYGFGVIYSEIKVSSFIQDKTGPMGQGPGLHAGKWGLLQPVADGLKLFIKEDIIPASADRPLFILAPFLIFIGALTSFIAVPFGEKIIITDMNIGIFYIVGMGSLAVIALILAGWSSNNKWALYGGMRSAAQIISYEIPAGISLVAVIMIASSLSMQEIIAYQSGGITNWIIFDNPFMPIVFIIFFISTLAETNRTPFDLPESESELVAGFVTEYSGTRYAIFFLSEYANMFVVSAVSATAFFGGWQSPVDGFLDSPAWSVFWMISKTFFLIFVMIWIRWT

SEQ ID NO: 99950 - protein, 122 aa, Unknown
  Bacterial polypetide isolated from the Sargasso Sea
MITNFLTEYLSIIIFLFISLLLSIGFIVINYVASPKNPDPEKLSAYECGFEAFSNARIEFDVRFYLVAILFIIFDLEIAFLFPWAVSLGSIGLLGFYSMMLFLFILTIGFIYEWKKGALEWE

SEQ ID NO: 99951 - protein, 269 aa, Unknown
  Bacterial polypetide isolated from the Sargasso Sea
VIFYLFFEGGLIPMFLIIGIWGGERRVYSAFKFFLYTLLGSVLMLVAIISIYWITGTTDITYLYTLGINEKYQYLLWLAFFSSFAVKTPMWPVHTWLPDAHVEAPTAGSVLLAAILLKMAGYGFIRFSVGLFPVASEYFIPLIYTLSLIAIIYTSLVALMQEDMKKLIAYSSVAHMGFVTLGIFTFTQQGLEGSIFQMISHGLVSAALFLSVGVIYERMHTRLIANYGGLVSVMPKYAIVLMVFTLGAVGLPGTSGFIGEFLILIGALK

SEQ ID NO: 99952 - protein, 315 aa, Unknown
  Bacterial polypetide isolated from the Sargasso Sea
FIGAMRKSAQIFLHTWLPDAMEGPTPVSALIHAATMVTAGVFLVVRCSPIYEYSELALTIIILVGSFTAFFAATIALVQNDIKKIIAYSTCSQLGYMFFAAGVGAYNVAMFHLFTHAFFKALLFLGSGSVIHAFKDEQDINKMGGVWRKLPYTYALMIIGTLALTGFPFLSGFYSKDAIIEFAYLKGSGLGFFASYIGIFTAFLTAIYSWRLIFKTFHGSYNNEKINFSETHESPLIMLVPLVFLGIGAIGAGFVFKDLFIGHHLMYDFWGDSIFFINKLSEDHPPTWFVLFTPVMVNITIPISYFLFIKNKIIL

SEQ ID NO: 99953 - protein, 280 aa, Unknown
  Bacterial polypetide isolated from the Sargasso Sea
MNFPILSTLIFLPLVSSIFIFLSKEQKNNYGAIYISLFSSLATLILSLFLWYSLDLNSSDFQFVEEQSWINDFIKFKLGVDGISIVFIVLTTFVTPLCILSCINSIKKRIKEFLIAILVLETLMIGVFCSLDLVIFYLFFEAGLIPMFIIIGVWGGAKRIYSAFKFFLFTLLGSVLMLVAIIAIYWLTGTTDITQIYEIKIPQEYQNILWLAFFSSFAVKTPMWPVHTWLPDAHVEAPTAGSVILAAILLKMAGYGFLRFSIPMFPIASEFFTPLVYFLS

SEQ ID NO: 99954 - protein, 242 aa, Unknown
  Bacterial polypetide isolated from the Sargasso Sea
ISILFILLTTFITPICIISCINSVKTRLKEFLIALLILETFMIGVFCSLDLVVFYLFFEAGLIPMFLIIGIWGGPRKVYSAFKFFLFTLLGSVLMLVAIITIYWITGTTDVTQIYEIKIPLEYQYLLWLAFFSSFAVKLPMWPVHTWLPDAHVEAPTPGSVILAAILLKMGGYGFLRFSIGMFPFASEYFTPLIFTLSVIAVIYTSLVALMQDDMKKLIAYSSVAHMGFVTMGIFTFNKQGI

SEQ ID NO: 99955 - protein, 275 aa, Unknown
  Bacterial polypetide isolated from the Sargasso Sea
GFALGIFLIFFFYGTVNYNEVFQQTPLFTKEQIVFLGIEFNLITLICLLLFIGAMGKSAQILLHTWLPDAMEGPTPVSALIHAATMVTAGVFLVVRCSPIFEYSQTSLNVVAMVGMLTAFFAATVALVQNDIKKIIAYSTCSQLGYMFFAAGIGAYHVAIFHLFTHAFFKALLFLGSGCVIHSFNEEQDIRSMGGVWRKIPYTYFLMIIGTLALTGFPFLSGYYSKDAIIEFAYIKGGIIGYSAAAVGIFTAVLTALYSWRLIFKTFHGKYNNKK

SEQ ID NO: 99956 - protein, 264 aa, Unknown
  Bacterial polypetide isolated from the Sargasso Sea
MAEFWTIYAFPTIKIVGYILAIVIPLLTAVAYLTLAERKVIAAMQLRKGPNVVGPFGLLQPLADGLKLLFKETIIPSGANKIVFILAPMITFILSLLAWAVIPFSETWVLADINVGILYLFAISSLGVYGIIMAGWAANSIYPFLGALRSAAQMVSYEVSIGFVIITVLLCVGSLNLNDIIEAQRGLWFCIPLLPMFVIFFVSGLAETNRAPFDLPEAEAELVSGYNVEYSSMTFALFFLGEYANMILMSGMTVILFLGGWLPP

SEQ ID NO: 99957 - protein, 312 aa, Unknown
  Bacterial polypetide isolated from the Sargasso Sea
LFTFSMLALVTSDNFLQLFFGWEGVGLCSYFLIGFWFKKDSANTAAIKAFVVNRVGDFGFALGIFLIFYIFGTVNYNEVFEQIPEFHKNEINFFGIRINSINLICILLFIGAMGKSAQIFLHTWLPDAMEGPTPVSALIHAATMVTAGVFLVVRCSPIFEYSELALNIITIVGMSTAFFAATVALVQNDIKKIIAYSTCSQLGYMFFAAGVGAYNIAMFHLFTHAFFKALLFLGSGSVIHSFKDEQDINQMGGIWKKLPYTWILMIIGTLALTGFPFLSGFYSKDAIIEFAYLRGNTTGYYATIIGIFTALL

SEQ ID NO: 99958 - protein, 282 aa, Unknown
  Bacterial polypetide isolated from the Sargasso Sea
FFAATVALVQNDIKKIIAYSTCSQLGYMFFAAGVGAYNVAMFHLFTHAFFKALLFLGAGAVIHSFNEEQDINKMGGVIKKLPYTYVLMLIGTLALTGFPFLSGFYSKDAIIEFAYLKGNGIGILAAFVGIVTALLTSIYSWRLIFKTFHGNFNNKKISADKIHESPFVMIFPLIILAIGAIFAGMTFKDMFIGHETAYEFWGQSIKFLKPLSTDHPPTWFLLLTPILVVIAIPFSYFLFLKNTKIVNGLREMNEPIYQFLVKKWYFDEMYDYLFVNPSKKIW

SEQ ID NO: 99959 - protein, 122 aa, Unknown
  Bacterial polypetide isolated from the Sargasso Sea
MIYNFLSEYLSIIIFLFIALILSVGFIIANYLASPSNPDPDKLSAYECGFEAFDDSRMEFDVRFYLVAILFIIFDLEIAFLFPWAISLGNIGLLGFWSMMLFLAILTIGFIYEWKKGALDWE

SEQ ID NO: 99960 - protein, 195 aa, Unknown
  Bacterial polypetide isolated from the Sargasso Sea
FLGALRSAAQMVSYEVSIGLIIISVLLCVGSLNLTDIVLAQKNIWFAIPLMPMFIMFFISTLAETNRAPFDLPEGESELVAGYFVEYSSMSFALFFLGEYANMILMSALTVILFLGGWLPPFDIFPFNLIPGFLWFVLKVIFILFIFLWVRASTPRYRYDQLMRLGWKIFLPFSLGWVVLTSGVLVFFDMVPKNI

SEQ ID NO: 99961 - protein, 279 aa, Unknown
  Bacterial polypetide isolated from the Sargasso Sea
SEFLIAVLIMESFMIGVFCSLDLVIFYLFFEAGLIPMFLIIGIWGGARRVYSAFKFFLYTLLGSVLMLVAIITIYWLNGTTDVVELYNSGIDIKYQNLLWLAFFSSFAVKTPMWPVHTWLPDAHVEAPTAGSVLLAAILLKMAGYGFIRFSLGLFPAASEIFTPLIYTLSVIAIIFTSFIALMQEDMKKLIAYSSVAHMGYVTLGIFTIQQQGIEGSIIQMISHGLVSAALFLCVGVVYDRMHSRLINTYGGIVSIIPKIFNYIHVIYFSSSRPTWNKW

SEQ ID NO: 99962 - protein, 204 aa, Unknown
  Bacterial polypetide isolated from the Sargasso Sea
ASNSKYAFLGALRSAAQMVSYEVSMGLVIINVLLCAGSLNLSAIVEAQRDMWFALPLLPMFVVFFISTLAETNRAPFDLPEGESELVAGYFVEYSSMSFALFFLGEYANMILMSSMTVILFLGGWLPPLDIWPLNMIPGPLWFILKIMLLLFVFLWVRATTPRYRYDQLMRLGWKIFLPFSLIYVVLTAGYLLVSGNLPDVSLG

SEQ ID NO: 99963 - protein, 79 aa, Unknown
  Bacterial polypetide isolated from the Sargasso Sea
SAYECGFEAFDDARGRFDVRFYLVAILFIIFDLEVAFLFPWAISLGSIGLFGFWSMMIFLLILTIGFIYEWKKGALEWE

SEQ ID NO: 99964 - protein, 297 aa, Unknown
  Bacterial polypetide isolated from the Sargasso Sea
HAFFKALLFLGAGSVIHAMSDEQDMRKMGGLYKMIPVTYIVMWIGSLALAGIWPFAGFFSKDIVLEAAWAAESGVGQYAFWLGIAAAFLTAFYSWRLLIMTFHGTPRADEVTMAHVHESPKVMLIPLAVLALGAIFVGFATFEYFVGGKTIEFWGNSIFVLETHKALENAHHAPLWVKFLPLAVGIVGIVFAYVLYMWRPGIPVEIAARFHRVYQFLLHKWYFDELYNMMFVRPAFRVGRNFWRTGDGALIDGFGPNGVASMTLDLARRIASLQSGYLYHYAFAMLVGIAALITWFL

SEQ ID NO: 99965 - protein, 317 aa, Unknown
  Bacterial polypetide isolated from the Sargasso Sea
FKKESANAAAIKAFIVNRVGDFGFALGIFLIFYLFGTVNYVEVFELIPQSLNINLTFLGLSFNAINLICILLFIGAMGKSAQIFLHTWLPDAMEGPTPVSALIHAATMVTAGVFLIVRCSPIYEYSPLALNIITLVGMSTAFFAATIALAQNDIKKIIAYSTCSQLGYMFFAAGVGAYNVAMFHLFTHAFFKALLFLGSGSVIHSFKDEQNINLMGGVWKRLPYTWILMIIGTLALTGFPFLSGFYSKDAIIEFAYLRGNTAGYFAAGIGVFTALLTSIYSWRLVFKTFHGDYNNKKLNISSMHESPMVMIIPINNS

SEQ ID NO: 99966 - protein, 190 aa, Unknown
  Bacterial polypetide isolated from the Sargasso Sea
MEYLILFLPLIGAVISGFFGKKIGDRNSQILTSSFVSISAILSLVVLYKVISSDYSNNLVIATWINSGTLNVNWSIKIDALSAVMFVVVNFVSALVHIYSIGYMSHDPHKTRFMAYLSLFTFAMLTLVSSDNFIQLFFGWEGVGLCSYFLIGFWFKKESANKAAIKAFVVNRVGDFGLALGIFLIFYIFG

SEQ ID NO: 99967 - protein, 275 aa, Unknown
  Bacterial polypetide isolated from the Sargasso Sea
IGVFCSLDLIIFYLFFEGGLIPMFLIIGIWGGSRRVYSAFKFFLFTLLGSILMLVAIITIYWISDTTDITILYYLGIDPSYQKLLWLAFFSSFAVKTPMWPVHTWLPDAHVEAPTAGSVLLAAILLKLAGYGFIRFSIGLFPIASDFFTPLIFSLSLVAIVFISLVALMQEDMKKLIAYSSVAHMGFVTLGIFTLTQQGLEGSIIQMISHGIVSAALFFSVGVLYDRTQSRIINNYGGLVSLMPKYSVMLMVFCLAALGLPGTFGFIGEFLILLG

SEQ ID NO: 99968 - protein, 214 aa, Unknown
  Bacterial polypetide isolated from the Sargasso Sea
MEYLILLLPLFGSIVSGFFGKFIGDKNCQILTSFFVSVSAILSLVIFFKVINDGYSDNLIVATWINSGSLNVNWSINIDALSSVMLVVVTLVSALVHIYSIGYMSQDPHKPRFMSYLSLFTFAMLTLVTSDNFIQLFFGWEGVGLCSYFLIGFWYKKKSANAAAIKAFLVNRVGDFGFALGIFLIFYIFGTVNYDEVFDKIPEILENKLFFLGI

SEQ ID NO: 99969 - protein, 268 aa, Unknown
  Bacterial polypetide isolated from the Sargasso Sea
MEISIIALPLIASIISGFFGKFIGDRNSEIVTSSLVTISAILSVLVFYEVMVNQYQDNIIIATWINSGSLDVNWSMKIDALSSVMLVVVTSVSALVHIYSIGYMSHDPHKPRFMAYLSLFTFAMLMLVTSDNFIQLFFGWEGVGLCSYFLIGFWFKKETANAAAIKAFVVNRVGDFGFALGIFLIFYLFGTVNYSEVFEQIPLITDKELVFLGIKVNAINLICILLFIGAMGKSAQILLHTWLPDAMEGPTPVSALIHAATMVTAGVF

SEQ ID NO: 99970 - protein, 254 aa, Unknown
  Bacterial polypetide isolated from the Sargasso Sea
CFLIAPIITMVLSLAGWAVIPFAPGWVISDINVGVMYIFAVSSLSVYGVIMAGWSSNSQYPFLGALRSAAQMVSYEVSIGFVIITVLLCVGSLNLSKIVEAQQTVWFAIPLLPMFIIFFISALAETNRLPFDLPEDESTLVAGFFTEYSSASFVLFFLAEYASMILMSSLTVILFLGGWLPPFDIYPLNALPGIFWFTLKIIFILFLFIWVRGTFPRYRYDQLMRLGWKVFLPLSLLWVVLTSGFLVIFNKLPI

SEQ ID NO: 99971 - protein, 216 aa, Unknown
  Bacterial polypetide isolated from the Sargasso Sea
MELSIIFLPLIASIISGFFGRYIGDRNSEIITSTLVSISALLSIHVLYQVIVNQYEENIIIATWISSGSLDVNWSMLIDPLSAVMLVVVTSVSALVHIYSIGYMSHDPHKPRFMAYLSLFTFAMLMLVTSDNFIQLFFGWEGVGLCSYFLIGFWFKKESANAAAIKAFVVNRVGDFGFALGIFLIFYLFGTVNYLEVFQQIPTVIDKNLSFLGLEV

SEQ ID NO: 99972 - protein, 70 aa, Unknown
  Bacterial polypetide isolated from the Sargasso Sea
FHDSRMEFDVRFYLVAILFLIFDLEIAFLFPWAISLGQIGLFGFCSMMLFLFILTVGFIYEWKKGALDWE

SEQ ID NO: 99973 - protein, 65 aa, Unknown
  Bacterial polypetide isolated from the Sargasso Sea
MEFDVRFYLVAILFIIFDLEIAFLFPWAISLGNIGLLGFSSMMIFLFILTIGFIYEWKKGALDWE

SEQ ID NO: 99974 - protein, 281 aa, Unknown
  Bacterial polypetide isolated from the Sargasso Sea
FFSKYIGQRNSEFVTSFLVSVSALLALIIFKDVIINGYENNLIIAKWITSGELNVNWSIKIDPVSSVMLVVVCVISSVVHIYSIGYMSHDPHKSRFTSYLSLFTFAMLILVTSDNFLQLFFGWEGVGLCSYFLIGFWFKKSSANSAAIKAFVVNRVGDFGFALGIFLIFYLFGTVNYDEVFSQVPMYLYKEISFLGINFVALDLVCILLFIGAMGKSAQFLLHTWLPDAMEGPTPVSALIHAATMVTAGVFLVVRCSPIFEYSTLALNIICIVGMTTAIFA

SEQ ID NO: 99975 - protein, 279 aa, Unknown
  Bacterial polypetide isolated from the Sargasso Sea
TVVMLIVVTSVSSCVHIYSIGYMHNDNARARFMAYLSLFTFAMLMLVTADNLLQLFFGWEGVGVASYLLIGFWYHKPTAHKAAMKAFIVNRVGDFGFALGIFVIFFIFGSIQFDDVFDNASKYADVSILFLGIELPALEVAGILLFIGAMGKSAQLGLHTWLPDAMEGPTPVSALIHAATMVTAGVFLVCRMSPVIEYAPIALDVITLVGALTAIFAATIGMTQFDIKRVIAYSTCSQLGYMFFAAGMSAYPAAMFHLTTHAFFKALLFLGARFCDSCA

SEQ ID NO: 99976 - protein, 304 aa, Unknown
  Bacterial polypetide isolated from the Sargasso Sea
VLYQVVVNQYEENIIIATWINSGSLEVNWSMLIDPLSAVMLVVVTSVSALVHIYSIGYMSHDPHKPRFMAYLSLFTFAMLMLVTSDNFIQLFFGWEGVGLCSYFLIGFWFKKESANAAAIKAFVVNRVGDFGFALGIFLIFYLFGTVNYSEVFQQIPTVVDKNLSFLGFEVKAIDLVCLLLFIGAMGKSAQILLHTWLPDAMEGPTPVSALIHAATMVTAGVFLVVRCSPIYEYSPLILNFITIVGMTTAFFAATVALVQTDIKKIIAYSTCSQLGYMFFAAGVGAYNVAMFHLFTHAFFQALL

SEQ ID NO: 99977 - protein, 292 aa, Unknown
  Bacterial polypetide isolated from the Sargasso Sea
MKEFLIAILILETFMIGVFCSLDLVIFYLFFEAGLIPMFLIIGIWGGPKRVYSAFKFFLFTLLGSVLMLVAIISIYWITGTTDIVEIIYEIKIPKEYQYLLWLAFFSSFAVKMPMWPVHTWLPDAHVEAPTAGSVILAAILLKMAGYGFLRFSIPMFPIASHYFTPFIFVLSIVAIIYTSLVALMQDDMKKLIAYSSVAHMGYVTLGIFTFTKYGVEGGMFQMISHGLISAALFLCVGVLYDRTHSRMISDYGGVVDYLPKFSFIFIIFTLGALGLPGTSGFIGEFLVLVGA

SEQ ID NO: 99978 - protein, 122 aa, Unknown
  Bacterial polypetide isolated from the Sargasso Sea
MLADFLKDYFPIILFLIIAIGLSIVFIAINYLASPKNPDPEKLSAYECGFEPFNDFRMEFDVRFYLVAILFIIFDLEIAFLFPWAISLGKIGLFGFISMMIFLFILTIGFIYEWKKGALDWE

SEQ ID NO: 99979 - protein, 224 aa, Unknown
  Bacterial polypetide isolated from the Sargasso Sea
MLYLLQIGTFILSLILWLQFDYTNPSYQYVEKFRWFDDFNFFYHIGVDGISLFMILLSTFLTPLCILSSWNNIKKRVKEYVLSFLFLETVMIGMFASIDILLFYIFFEAVLIPMYLIIGIWGGTRRIYASFKFFLYTLLGSVLMLIAIIVMYRNTNSMSIEFLQGNYFSFNTQLFLWLAFFASFAVKIPMWPFHTWLPDAHVEAPTAGSVILAGVLLKMGGYGF

SEQ ID NO: 99980 - protein, 235 aa, Unknown
  Bacterial polypetide isolated from the Sargasso Sea
MEYIVIFLPLLGAVISGFFGNLIGNKFSQILTSAFVSISAIFSILIFYNVLTNDYESNLIVAKWINSGTLNVNWSIKIDALSSVMLVVVTFVSSLVHIYSIGYMSHDPHKPRFMSYLSLFTFSMLTLVTSDNFLQLFFGWEGVGLCSYFLIGFWFKRETANAAAIKAFLVNRVGDFGLALGIFLIFYMCGTINYEEVFQQISLLSQSELNFVGINLNPINLICVLLFIGAMGKSA

SEQ ID NO: 99981 - protein, 259 aa, Unknown
  Bacterial polypetide isolated from the Sargasso Sea
MIGVFCALDLVVFYLFFEAGLIPMFLIIGIWGGARRVYSAFKFFLYTLLGSVLMLVAIISIYWINGTTDVVQLYEIGIDVKYQNLLWLAFFSSFAVKTPMWPVHTWLPDAHVEAPTAGSVLLAAILLKMAGYGFIRFSLGLFPVASEIFTPLIYVLSVIAIIFTSLIALMQEDMKKLIAYSSVAHMGFVTLGIFTLQQQGIEGSIIQMISHGLVSAALFLTVGVVYDRMHSRLISTYGGLVSVVPKYSILFMVFALASL

SEQ ID NO: 99982 - protein, 121 aa, Unknown
  Bacterial polypetide isolated from the Sargasso Sea
MDGLLREYLPILIFLGLAIVLGVFLMLSAMIIAVRNPDSEKTSAYECGFNAFDDARMKFDVRFYLVAILFIIFDLEVAFLFPWAAGFQHLGILGFWSMMVFLIILTIGFVYEWKKGALEWD

SEQ ID NO: 99983 - protein, 183 aa, Unknown
  Bacterial polypetide isolated from the Sargasso Sea
MEYLILFLPLIASLISGFFGKLIGDKFSQIITCLFISISAILSFVVFYNVINHGYSNNLIIATWIQSGNLNVNWSINVDTLSSVMFVVVTLVSSLVHIYSIGYMSQDPHKPRFMSYLSLFTFAMLTLVSSDNFIQLFFGWEGVGLCSYFLIGFWYKKESANSAAIKAFIVNRVGDFGFALGIF

SEQ ID NO: 99984 - protein, 276 aa, Unknown
  Bacterial polypetide isolated from the Sargasso Sea
LETFMIGVFCSLDLVIFYLFFEAGLIPMFLIIGVWGGPRRVYSAFKFFLFTLLGSVLMLVAIIVIYWLTGTTDITQIYEIKIPKEYQNILWLAFLSSFAVKMPMWPVHTWLPDAHVEAPTAGSVILAAILLKMAGYGFLRFSIPMFPLASEYFTPLIFTLSIIAIIYTSLVALMQDDMKKLIAYSSVAHMGYVTLGIFTLTKQGIEGSIYQMISHGLISAALFLCVGVVYDRLHSRMISTYGGLVNYIPKYSFLFLIFALAALGLPGTSGFLGEFL

SEQ ID NO: 99985 - protein, 122 aa, Unknown
  Bacterial polypetide isolated from the Sargasso Sea
MTAEFLKDYLPIILFLIIALGLSCAFIVINFILSPKHPDPEKLSAYECGFEPFQDSRMEFDVRFYLVAILFIIFDLEIAFLFPWAISLGNIGILGFTSMMIFLFILTIGFIYEWKKGALDWE

SEQ ID NO: 99986 - protein, 114 aa, Unknown
  Bacterial polypetide isolated from the Sargasso Sea
YLPILIFIFIGFGIAVGMTLLSFIVGDSKPDSEKLSAYECGFEAFDDARGRFDVRFYLVAILFIIFDLEVAFLFPWAISLGKIGLFGFWSMMIFLLILTIGFIYEWKKGALEWE

SEQ ID NO: 99987 - protein, 308 aa, Unknown
  Bacterial polypetide isolated from the Sargasso Sea
PVSALIHAATMVTAGVFLIVRCSPMYEYSPLALTVITIIGMTTAFFAATVALVQNDIKKIIAYSTCSQLGYMFFAAGVGAYNVAMFHLFTHAFFKALLFLGAGAVIHSFHEEQDINKMGGVIKKLPYTYVLMLIGTLALTGFPFLSGFYSKDAIIEFAYLSGNGVGMLAAFVGIVTALLTSIYSWRLIFKTFHGNFNNKEFSIDKVNESPFVMIYPLIILAIGSIFAGMAFKGLFIGHEIAYEFWGKSIKFLEPLSTDHPPTWFLFLTPILVTAAIPFSYYLYLKNKNIVIGLKEMNEPIYQFLVKKW

SEQ ID NO: 99988 - protein, 121 aa, Unknown
  Bacterial polypetide isolated from the Sargasso Sea
MQDLLLSYLPIFIFLGVAIVIAGIAVAASLIIVPQKPNVEKTSAYECGFEAFTDARHKFDVRFYLVAILFIIFDLEVAFLFPWAISLSETGAYGFWSMMIFLGILTIGFIYEWRKGALEWE

SEQ ID NO: 99989 - protein, 108 aa, Unknown
  Bacterial polypetide isolated from the Sargasso Sea
MPILLFIIIGFSLAVGMTLLSFIFGESKPDSEKLSAYECGFEAFDDARGRFDVRFYLVAILFIIFDLEVAFLFPWAITLGKIGIFGFWSMMIFLLILTIGFIYEWKKG

SEQ ID NO: 99990 - protein, 286 aa, Unknown
  Bacterial polypetide isolated from the Sargasso Sea
YLFIQMILEYDPGFSHGASFSWIDLDAFKIDLGILVDNLTIIMLLIVTLVSSCTHIFSLEYMKGDIRYHRYYAYLGLFTFSMNGIVLADNLISMYMSWELVGVSSYLLIGHWFEKDSAADASKKAFLTNRVGDIGFFIGIMLIYSAIGSFAFTPIFDSISTGNTIAGMTLTLAGLGIFMGAVGKSSQFPLHIWLPDAMEGPTPVSALMHAATMVAAGVYMSVRLFPIFTPDALLVIAYIGGITAMLAALIAITQNDIKKVLAYSTVSQLGYMILAVGTGVYTAAFF

SEQ ID NO: 99991 - protein, 241 aa, Unknown
  Bacterial polypetide isolated from the Sargasso Sea
MLSYKLLFFLPLISTIFTYPFGVLLGEKTAQYFSSTLISIAAVLSWFLFISFSSSSSSEIIIPVLEWFFVSGQFFNWGISVNSLTLLMLTLVLTVSALVHIYSIEYMSHDNSKVRFMTYLSLFTFCMVALVVSDNLIQLFFGWEGVGLASYLLIGFWHHKKSANLAAMKAFLVNRVADFGFLIGIATLYIFLDTLSINEIIAGKEKLLSYQINFLGFEINALVFSCFFLFIGAMGKSAQFG

SEQ ID NO: 99992 - protein, 315 aa, Unknown
  Bacterial polypetide isolated from the Sargasso Sea
IFYLFGTVNYSEVFQQIPTIVDNNLLFLGIEIKAIDLICLLLFIGAMGKSAQIFLHTWLPDAMEGPTPVSALIHAATMVTAGVFLVVRCSPIYEYSPLILNLITIVGMTTAFFAATVALVQNDIKKIIAYSTCSQLGYMFFAAGVGAYNVAMFHLFTHAFFKALLFLGSGSVIHAFKDEQNINNMGGVWKKLPYTYVLMIIGTLALTGFPFLSGFYSKDAIIEFAYLKGNTVGYYAAAIGIFTALLTSIYSWRLIFKTFHGEYNNKEISIDETHESPLVMLIPLIILAFGSIFAGFLFKDLFINHDGINYFWNES

SEQ ID NO: 99993 - protein, 264 aa, Unknown
  Bacterial polypetide isolated from the Sargasso Sea
MTDIPILSLTIFLPLLGALVILLIKDDENSINNIKKVALLTSVGVFLLSLFIWLQFDSSNPGYQFQEKFRWFNDFNFYYHIGIDGISLFMVILSTFLTPLCILASWESIKKRVKEYMIAFLFLETVMIGMFSSVDILLFYIFFEVVLIPMYLIIGIWGGERRIYASFKFFLYTLLGSVLMLIAIIAIYKLTNSMSIENLQGNYFEKNVQIYLWLAFFASFAVKIPMWPFHTWLPDAHVEAPTAGSVILAGVLLKMGGYGFIRFS

SEQ ID NO: 99994 - protein, 174 aa, Unknown
  Bacterial polypetide isolated from the Sargasso Sea
MGLIIISILLTAGSLNLTEIVMSQEDQWYLLPHFPMFVIFFISTLAETNRAPFDLPEAEAELVAGYNVEYSSMSFGLFFLGEYGNMILMSSMTTILFLGGWLPPFNNDFLTLIPGYIWFLLKISFLLFVFLWVRATLPRYRYDQLMSLGWKLFLPLSLLWIIITSVYLYYNNVY

SEQ ID NO: 99995 - protein, 196 aa, Unknown
  Bacterial polypetide isolated from the Sargasso Sea
INIDPLSSVMLFVVTFVSSLVHIYSIGYMSHDPHKPRFMSYLSLFTFSMLALVVSDNFLQLFFGWEGVGLCSYLLIGFWFKKETANNAAIKAFIVNRIGDFGLAIAIFLIFFFYGTINFEEVFQTTSQLAEKKISFFGVESNLITLICVFLFIGAMGKSAQFLLHTWLPDAMEGPTPVSALIHAATMVTAGVFLVV

SEQ ID NO: 99996 - protein, 137 aa, Unknown
  Bacterial polypetide isolated from the Sargasso Sea
FFISALAETNRLPFDLPEDESTLVAGFFTEYSSASFVLFFLAEYASMILMSAMTVILFLGGWLPLFDIYPLNIIPGVIWFTVKIMFVLFLFIWVRGTFPRYRYDQLMRLGWKVFLPLSLFWVVITAGFLVTFDIVPN

SEQ ID NO: 99997 - protein, 279 aa, Unknown
  Bacterial polypetide isolated from the Sargasso Sea
GDLTSQLTTSFFVCISAILSIILFYNGIIHGEYGNFLIYEWISSGNFIVNWSIKIDPLSSIMLVIVTSVSALVHIYSIGYMQHDPDKPRFMSYLSLFTFAMLTLVVSDNFLQLYFGWEGVGLCSYLLIGFWHRKESANKAAIKAFIVNRVGDFGFAIGIFLIFMYFGTMNYNEVFNLVPEFSQKEINFLGFNSNLITVICLFLFIGAMGKSAQFFLHTWLPDAMEGPTPVSALIHAATMVTAGVFLVVRCSPIFEYSQFALSFVAIIGMLTAFFACTVA

SEQ ID NO: 99998 - protein, 117 aa, Unknown
  Bacterial polypetide isolated from the Sargasso Sea
MTEYLPILIFLILAFAISIGALFTSLVVGKKNPYADKISTYECGFDPFDDSRSKFEVKFYLVAILFIIFDLEIIFLFPWAIAFNDIGMFGFLSMMFFLLVLTIGFVYEWMKGALDWN

SEQ ID NO: 99999 - protein, 270 aa, Unknown
  Bacterial polypetide isolated from the Sargasso Sea
MEISIIALPLIASIISGFFGKLIGDRNSEIVTSFLVTISAILSAIVLYEVIINQYQDNIVIAKWISSGSLDVNWSMQIDPLSAVMLVVVTSVSSLVHIYSIGYMSHDPHKPRFMAYLSLFTFAMLILVTSDNFIQLFFGWEGVGLCSYFLIGFWFKKDTANSAAIKAFLVNRVGDFGFALGIFLIFYLFDTVNYSEVFELIPTITDKNLLFLGFNINAIDLICLLLFVGAMGKSAQILLHTWLPDAMEGPTPVSALIHAATMVTAGVFLV

SEQ ID NO: 100000 - protein, 285 aa, Unknown
  Bacterial polypetide isolated from the Sargasso Sea
GKWGLLQPVADGLKLFMKEDIIPATADRPLFILAPFLIFIGALTGFIAVPFGETIIITDMNIGIFYIVGVGSLAVIALILAGWSSNNKWALYGGMRSAAQIISYEIPAGISLVTVIMLASSLSMQEIISYQSGGLFNWIIFDNPFMPIVFIIFFISTLAETNRTPFDLPESESELVAGFVTEYSGTRYALFFLSEYANMFVVCAVSATAFFGGWQSPFPNFLNSPAWSVFWMLSKTLALVFVMIWVRWTVPRLRVDQLMHMCWKVFIPIGLFNDFGVAIWTVLRG

SEQ ID NO: 100001 - protein, 185 aa, Unknown
  Bacterial polypetide isolated from the Sargasso Sea
ILRSFIGFVIITVLLSVGSLNLSTVVEAQGNGFWNWHFCGLLFPMFIIFFISALAETNRAPFDLPEAEAELVSGYNVEYSSMTFALFFLGEYANMILMSAMTVILFLGGWMSPFNIEPFTWIPGPIWFAVKISLVLFCFLWVRATFPRYRYDQLMRLGWKVFLPFSLLWVIITAAVLIWMEWLPK

SEQ ID NO: 100002 - protein, 223 aa, Unknown
  Bacterial polypetide isolated from the Sargasso Sea
YVLALTSMGVYGVVIAGWASNSKYAFLGAMRSAAQIVAYEIAMGFALVGVLMAAGSLNLREIVVAQSGGIHEWFFLPLLPLFLVYLISGVAETNRSPFDVAEGESEIVAGFHVDYSGMGFAVFFLAEYANMILISALTVIMFLGGWHAPLEIAPLTWIPGIFWFFGKLAAVAFLFLWFRATFPRYRYDQIMRLGWKVFIPVTLVWITVIGVAKFFTPIGHWFG

SEQ ID NO: 100003 - protein, 191 aa, Unknown
  Bacterial polypetide isolated from the Sargasso Sea
MEYAIIFLPLAGSILGFLGKSLIKYFSEITTSLFVSISAVFSIILFWNGIQNNTYGNFKIFEWISSGNFTANWSINIDPLSSVMLVVVTFVSALVHIYSIGYMSHDPHKPRFMSYLSLFTFSMLVLVVSDNFLQLFFGWEGVGLCSYLLIGFWYKKESANNAAIKAFIVNRVGDFGLAIGIFLIFFYFGSI

SEQ ID NO: 100004 - protein, 248 aa, Unknown
  Bacterial polypetide isolated from the Sargasso Sea
FLFFTKDKEGNNLTAKYVALFTTVVNFLISIYLWISFDQSTSSFQFVEDRTWIEGFINYKVGVDGISILFIILTTFITPLCIISVNNSVKNRLRDFLIAILIMESFMIGVFCALDLVVFYLFFEAGLIPMFLIIGIWGGARRVYSAFKFFLYTLLGSVLMLVAIISIYWITGTTDVVQLYDIGIDVKYQNLLWLAFFSSFAVKTPMWPVHTWLPDAHVEAPTAGSVLLAAILLKMAGYGFIRFSLGLF

SEQ ID NO: 100005 - protein, 115 aa, Unknown
  Bacterial polypetide isolated from the Sargasso Sea
MTAVFLKDYLPIILFLIIALGLSCAFIVINYILSPKNPDPEKLSAYECGFEPFQDSRMEFDVRFYLVAILFIIFDLEIAFLFPWAISLGNIGILGFTSMMIFLFILTIGFIYEWK

SEQ ID NO: 100006 - protein, 268 aa, Unknown
  Bacterial polypetide isolated from the Sargasso Sea
FSNFMNTRPIILNFITVIGMSTALFAATVALVQNDIKKIIAYSTCSQLGYMFFATGVGAYNVAMFHLFTHAFFKALLFLGAGSVIHSFHDEQDINKMGGVYKHLPYTYILMIIGTLALTGFPFLSGFYSKDLIIEFAYLKDDTVGYYACAIGIFTALLTSIYSWRLVFKTFHGEYNNKSQPISSMHESPLIMLAPLVILAIGSILAGFVFKDLFMGYGSFSNFWEGSIFFLEPLTTEHPPGYILFLTPILVTVSIPFSYYIFLKNKAF

SEQ ID NO: 100007 - protein, 263 aa, Unknown
  Bacterial polypetide isolated from the Sargasso Sea
SHFISCSLILASSILSAYLFYMTLNGYQTSNQFLFDWINSGAIDASWSLKFDTLTSVMLVVVTSVSALVHIYSIGYMSHDPYQYRFFSYLSFFTFAMLILVTSDNLLQLFFGWEGVGLASYLLIGFWYEKPSANAAAMKAFVVNRVGDFGFLLGIAVIYIATGSISFDVIFQKINNVDQFTLNIACLLLFMGAMGKSAQLFLHTWLPDAMEGPTPVSALIHAATMVTAGIFLVARCSPIFENSNLALSFIIIIGASTAFLQQP

SEQ ID NO: 100008 - protein, 218 aa, Unknown
  Bacterial polypetide isolated from the Sargasso Sea
ATDAMLFYVFFEAMLIPMFLIIGVWGGPRRIYAAMKFFLYTFLGSVLMLVALIYLYLKGGSFQLADLYQLQLSAAEQTWIFFAFLIAFAVKVPMFPVHTWLPDAHVEAPTAGSVILAAIALKIGGYGFLRFNLPIVPDASQEWAWLVIALSLIAVIYVGLVALVQDDMKKLIAYSSIAHMGFVTLGTFIALWLVRDACNPDAARLGLHGAMVQMVSHG

SEQ ID NO: 100009 - protein, 183 aa, Unknown
  Bacterial polypetide isolated from the Sargasso Sea
MVSYEVSIGFVIITVLLCVGSLNLSKIVEAQKTLWFAIPLLPMFIIFFISALAETNRLPFDLPEDESTLVAGFFTEYSSASFVLFFLAEYASMILMSAMTVILFLGGWLPPFDIFPLNVLPGVVWFTLKIIFILFLFIWVRGTFPRYRYDQLMRLGWKVFLPLSLFWVVVTAGFLVIFDKVPS

SEQ ID NO: 100010 - protein, 320 aa, Unknown
  Bacterial polypetide isolated from the Sargasso Sea
STMTVSALTAACILLFGGAMGKSAQMPLHVWLPDSMEGPTPISALIHAATMVTAGVFLLARMSPLFELSTTALSFVLIIGATTALFTGILGLIQNDIKRVVAYSTLSQLGYMVAAAGVSAYSASLFHLMTHAFFKALLFLAAGSVIVALHHEQDIRKMGGLKNKLPITYVTSLIGSLALIGFPGFSGFFSKDALIEAIGHADIIGSGFAYASVLIGVFITALYTFRLFFTVFHGALDEHHHDVKESPLSITLPLVLLAIPSVLIAWPTVGPMVFGSYFTTAISQPDAYQIFGYEFTSAYGFLIHAFSSPVNIHCIIWSRY

SEQ ID NO: 100011 - protein, 122 aa, Unknown
  Bacterial polypetide isolated from the Sargasso Sea
MAIDFLKDYLPIIIFLIIALGLSVAFVFLNFIFSPKKPDPEKLSAYECGFEPFNDSRMEFDVRFYLVAILFIIFDLEIAFLFPWAISLGKIGFFGFVSMMIFLFILTIGFIYEWKKGALDWE

SEQ ID NO: 100012 - protein, 234 aa, Unknown
  Bacterial polypetide isolated from the Sargasso Sea
MEISIIALPLIASIISGFFGKYIGDRNSEILTSLLVSISAILSGIVFYEVIVNQYEENIVIASWINSGSLEVNWSMKIDSLSAVMLVVVTLVSALVHIYSVGYMSHDPHKPRFMAFLSLFTFAMLMLVTADNFIQLFFGWEGVGLCSYFLIGFWFKKESANAAAIKAFVVNRVGDFGFALGIFLIFYLFGTVNYSEVFEQIPSIVDQRLIFLGIGVNAIDLISLLLFIGAMGKS

SEQ ID NO: 100013 - protein, 283 aa, Unknown
  Bacterial polypetide isolated from the Sargasso Sea
GVDGISILFIVLTTFITPICIISCVNSVKTRVKEFLIAILILETFMLGVFCSLDLVVFYLFFEAGLIPMFLIIGVWGGPKRVYSAFKFFLFTLLGSVLMLAAIIFIYWLTGTTDITQIYEIKIPKEYQNILWLAFFSSFAVKMPMWPVHTWLPDAHVEAPTAGSVILAAILLKMAGYGFLRFSLPMFPLASEYFTPLIFTLSIIAIIYTSLVALMQEDMKKLIAYSSVAHMGYVTLGIFTFTKQGIEGSIFQMISHGLISAALFLCVGVVYDRLNSRMISTYG

SEQ ID NO: 100014 - protein, 227 aa, Unknown
  Bacterial polypetide isolated from the Sargasso Sea
PICIISVNATITNRLKDFLIAILIMETFMIGVFCSLDLVVFYLFFEAGLIPMFLIIGIWGGERRVYSAFKFFLYTLSGSVLMLVAIISIYWITGTTDVEKLYELGIKAEYQNLLWLAFFSSFAVKTPMWPVHTWLPDAHVEAPTAGSVLLAAILLKMAGYGFIRFSIGLFPIASENFTMLVYILSLIAIIYTSLVALIQEDMKKLIAYSSVAHMGFVTLGIFTMTQQ

SEQ ID NO: 100015 - protein, 315 aa, Unknown
  Bacterial polypetide isolated from the Sargasso Sea
LVLTVSALVHIYSMKYMAHDNSKVRFMTYLSLFTFCMVALVVSDNLIQLFFGWEGVGLASYLLIGFWHHKKSANLAAMKAFLVNRVADFGFLIGIATLYIFLDTLSINEIIAGKEELLNYDINFLGFNINALVFSCFFLFIGAMGKSAQFGFHTWLPDAMEGPTPVSALIHAATMVTAGVFLTVRFSELMVMSNFIMTFVLIIGLLTAFFAASVGFFQKDIKKVIAYSTCSQLGFMFVACGLGAFNIAIFHLITHGYFKALLFLSSGSVIHGVHDEQDMDKMGNLFPKMKITAVMMWIGTLAIIGFPIFILVIFQ

SEQ ID NO: 100016 - protein, 122 aa, Unknown
  Bacterial polypetide isolated from the Sargasso Sea
MSTDFLNNYLTIIIFLAIALILSLGFLILNFAFSPKNPDPEKLSAYECGFEPFNDSRMEFDIRFYLVAILFIIFDLEIAFLFPWAITLGNLGLFGFFSMMLFLFILTIGFIYEWKKGALDWE

SEQ ID NO: 100017 - protein, 237 aa, Unknown
  Bacterial polypetide isolated from the Sargasso Sea
EYFIISNINAGLLFILALTSLSVYGVILAGWASNSKYAFLGSMRSAAQIIAYEIAMGFALVGVLMLSGSLNLQNIIYAQSGGLFNWYWLPLFPLFLIYFIAGVAETNRAPFDVSEGESEIVAGFHVEYSGMAFAMFFLAEYMNLILISILCSIMFFGGWLSPFQGTLIDSYLSFIPGFIWLSLKTLIFIFIFLWLRATLPRYRYDQIMRLGWKVFLPITFFWLTIIGILIYLEYLPL

SEQ ID NO: 100018 - protein, 275 aa, Unknown
  Bacterial polypetide isolated from the Sargasso Sea
PILSTLIFLPLISSLFIFLSRGQNNNSAIYISLFSSLATFILSLFIWYSLDYASADFQFVEEQSWINDFIKFKLGIDGISILFIVLTTLITPICIISCINSVKNRVKEFLIAIMILETFMIGVFCSLDLVVFYLFFEAGLIPMFLIIGVWGGPKRVYSAFKFFLFTLLGSVLMLVAIIAIYWITGTTDVTQIYEIKIPKEYQNLLWLAFFSSFAVKTPMWPVHTWLPDAHVEAPTAGSVILAAILLKMAGYGFLRFSLPMFPLASEFFTPLIFTL

SEQ ID NO: 100019 - protein, 303 aa, Unknown
  Bacterial polypetide isolated from the Sargasso Sea
MQSRLGTYQSWPKRYFFPIADVIKLATKEIIIPSNSNKGLFLTAPIIMLVPSLMVWSVIPLSEYFVIANINAGLLFVLALTSLSVYGVIIAGWASNSKYAFLGSMRSAAQIIAYEIAMGFALVGVLMVAGSLNLQEIVLSQKGGILHWYWLPLFPLFLIYFISGVAETNRAPFDVSEGESEIVAGFHVEYSGMAFAMFFLAEYMNLILISILASIMFFGGWLSPLEGTFLDSYFDWIPGFIWLSIKTIFFIFVFLWLRATLPRYRYDQIMRLGWKVFLPITLIWIFFEGIMIYYSVEPWFVKS

SEQ ID NO: 100020 - protein, 306 aa, Unknown
  Bacterial polypetide isolated from the Sargasso Sea
SVITLPLIASIISGFFGKYVGDRNSELVTSALVSVSAIISFIIFYNVIAHNYEENIIIATWINSGNLNVNWSMNIDPLSAVMLVVVTSVSSLVHIYSIGYMSNDPHKPRFMAYLSLFTFAMLMLVTSDNFIQLFFGWEGVGLCSYFLIGFWYKKETANAAAIKAFLVNRVGDFGLALGIFLIFYLFGTVNFDEVFKQIPSVSAAGVTPFLDKELIFLGLNFMAVDLICILLFLGAMGKSAQIFLHTWLPDAMEGPTPVSALIHAATMVTAGVFLVVRCSPLYEYSELALNIITLVGMTTAIFAATV

SEQ ID NO: 100021 - protein, 121 aa, Unknown
  Bacterial polypetide isolated from the Sargasso Sea
MTLYFSQYAGLFIYFIICCILAFIFFGLSYVVAAQNGDTEKLSAYECGFDPFDDARSTFDVRFYLVAILFIIFDLEVSFLFPWCVVISNLPLFAFWSMFVFLFILTIGFVYEWKKGALEWE

SEQ ID NO: 100022 - protein, 294 aa, Unknown
  Bacterial polypetide isolated from the Sargasso Sea
LVQNDIKKIIAYSTCSQLGYMFFAAGVGAYNVAMFHLFTHAFFKALLFLGAGAVIHSFHDEQDINKMGGVIKKLPYTYVLMLIGTLALTGFPFLSGFYSKDAIIEFAYLRGNGVGMLAAFVGIVTALLTSIYSWRLIFKTFHGNFNNKELSIDKVHESPFVMIAPLIILAIGAIFAGMAFKGLFIGHEIAYEFWAQSIKFLEPLSTDHPPTWFLFLTPILVTSAIPFSYYLYLKNTNIVNGLKEMNEPFYQFLVKKWYFDEIYDYLFVNPSKKIGKFLWKKVDGSIIDKFGPDG

SEQ ID NO: 100023 - protein, 270 aa, Unknown
  Bacterial polypetide isolated from the Sargasso Sea
YLISFLALETFMIGVFCSLDLVLFYLFFEGGLIPMFLIIGIWGGERRVYSTFKFFLYTLAGSVFMLLAIIYIFISTGTTDVETLLMYNFTTNEQLILWIAFFTSFMVKIPMWPFHTWLPDAHVEAPTAGSVILAGVLLKMAGYGFIRFSIGFFPDASEFFAPFIFSLSVIAIIVTSLIALVQEDMKKLIAYSSVAHMGFVTLGIFTFTVQGIEGGIIQMISHGIVSAALFLCVGVVYDRLHTREIARYGGLVSKMPFYSFSFMIFVLASL

SEQ ID NO: 100024 - protein, 304 aa, Unknown
  Bacterial polypetide isolated from the Sargasso Sea
MLWEGPTPVSALIHAATMVTAGVFLIVRCSPIYEYSPLALTAITIVGMTTAFFAATVALVQNDIKKIIAYSTCSQLGYMFFAAGVGAYNVAMFHLFTHAFFKALLFLGAGAVIHSFHEEQDINKMGGVIKKLPYTYVLMLIGTLALTGFPFLSGFYSKDAIIEFAYLRGNGVGILAAFVGIVTALLTSIYSWRLIFKTFHGNFNNKEFSVDKIHESPLVMIAPLVILAIGAIFAGMAFNGLFIGHEIAYEFWGKSIKFLEPLSTNHPPTWFLFLTPILVTSAIPFSYYLYLKNTNIVNGIERNE

SEQ ID NO: 100025 - protein, 282 aa, Unknown
  Bacterial polypetide isolated from the Sargasso Sea
FSVNWSINIDPLTSVMLVVVTLISSIIHFYSIGYMSHDPHKPRFMSYLSLFTFAMLVLVTSDNFLQLFFGWEGVGLCSYLLIGFWYKKPTANAAAIKAFIVNRVGDFGFMIGIFLIFLFYGTVNYNEVFQLTPLLIEKKVIFFGFEFNLITLICVLLFVGAMGKSAQILLHTWLPDAMEGPTPVSALIHAATMVTAGVFLVVRCSPIFEYSQIALNIVASVGMITAFFAATVALVQNDIKKIIAYSTCSQLGYMFFAAGVGAYHVAIFHLFTHAFFKALLFL

SEQ ID NO: 100026 - protein, 309 aa, Unknown
  Bacterial polypetide isolated from the Sargasso Sea
FNYKDPNFQFIEQHEWIINFVNYKVGIDGISLSFILLTTFITPICILATINSIKDRLREFLIALLLMETMMIGVFCSLDLFIFYLFFEAGLIPMFLIIGIWGGERRVYSAFKFFLYTLFGSIFMLISIIYIYFDTGTLDVEKLLNIQINRDYQKYLWLGFFASFAVKTPMWPLHTWLPDAHVEAPTSGSVILAAILLKMAGYGFIRFSLGLFPEASIYFAPFVFVLSIIAIIYTSLVALVQNDMKKLIAYSSVAHMGFVTIGIFVFNKQGIEGSIFQMISHGIISSALFLCVGVIYDRMHTRQISQYGG

SEQ ID NO: 100027 - protein, 304 aa, Unknown
  Bacterial polypetide isolated from the Sargasso Sea
VYSIGYMAKDPHRPRFMSYLSLFTFAMLTLVTSDNFLQLFFGWEGVGLCSYFLIGFWYKKNTANSAAIKAFIVNRIGDFGFALGIFLIFYLCGTVNYSEVFDLIPKIDNKNLIILGINFNAVDLICILLFIGAMGKSAQFFLHTWLPDAMEGPTPVSALIHAATMVTAGVFLIVRCSHIYEYSELSLSIITIIGMTTALFAATVALVQNDIKKIIAYSTCSQLGYMFFATGVGAYNVAMFHLFTHAFFKALLFLGAGSVIHSFQDEQNINKMGGISKNLPYTYFLMLIGTLALTGFPLLSGYYS

SEQ ID NO: 100028 - protein, 305 aa, Unknown
  Bacterial polypetide isolated from the Sargasso Sea
GVSFLVHVYQIAYMAHDNAFARFFAWLPLFVFSMVMLVMANNFLTLFVFWELVGVCSYLLIGFWHDRDSANNAAMKAFLVNRVGDFGFAIGVFMIFWNFRTLDYGEVFSSLDSVESTTVLAIALLLFVGAMGKSAQFPLHIWLPDAMEGPTPVSALIHAATMVTAGVYMVARTVPLFEVHEAALIIVGLVGTFTALFAATIALTQTDIKRVLAYSTVSQLGLMFLGLASGAYAAAIFHLATHAFFKALLFLGSGSVIHAMQDEQEMTKYGGLRSKMKWTYITFMIGSLALAAIFPLAGFGVRMRF

SEQ ID NO: 100029 - protein, 280 aa, Unknown
  Bacterial polypetide isolated from the Sargasso Sea
MEYIILFLPLLASFVAGFFGKLIGERNSEILTTLSVSIAAILSIIIFYNVVTQDYNNNIVIASWIKSGSLEINWAINIDALSSVMLVVVTLISSIVHIYSIGYMSHDSHKPRFMAYLSLFTFAMLTLVTSDNFLQLFFGWEGVGLCSYLLIGFWFKRESANAAAIKAFLVNRVGDFGLALAIFLIFYIFGTINYDEVFKLIPTILDEKINFLSFDFNSIDLICILLFIGAMGKSAQIILHTWLPDAMEGPTPVSALIHAATMVTAGVFLVVRCSPIYEFS

SEQ ID NO: 100030 - protein, 203 aa, Unknown
  Bacterial polypetide isolated from the Sargasso Sea
WASNSKYAFLGALRSAAQMVSYEVSIGFVMVSVLLCVGSLNLGDIINAQKNLWFVVPLFPMFVVFFISTLAETNRAPFDLPEGESELVAGYMVEYSSMSFALFFLGEYANMILMSAMTSVLFLGGWLPLFDIAPFNYIPGPIWLILKISLCLFVFLWVRATTPRYRYDQLMRLGWKVFLPFSLLWLVLTAGFLVYTGSAPVLY

SEQ ID NO: 100031 - protein, 251 aa, Unknown
  Bacterial polypetide isolated from the Sargasso Sea
PLLTIATFLPILAGLALMALPDRSTKTAHTVSIAATGAVFLVTLAIWARGTTAGEFAQVEEIAWIPAIGAAYRLGVDGLSLPLVLLTSLLFFLSAIYSARIGERAASYVVLMLMLETASLGTFMALDGLLFYVFFEVSLVGMYFMIAGWGYEERQRAALMFFLYTLLGSLPLLLAIIGLYLGSGTFDMRVWVEGTSLGGLSAMLALIAMLVTFAVKIPAFPVHTWLPAAHVQAPTAGSVILAGVMLKFGTY

SEQ ID NO: 100032 - protein, 280 aa, Unknown
  Bacterial polypetide isolated from the Sargasso Sea
TPVSALIHAATMVTAGIFLVVRCSPLFENSVIILNFITIIGASTALYAATVALVQNDIKRVIAYSTCSQLGYMFVATGLGAYHIAIFHLFTHAFFKALLFLGAGSVIHSLSDEQDMRKMGGLWKKIPFTYIFMIIGTLAITGFPFLSGYYSKDAIIEATYYSQNKYAGYAVFTCVFTAILTSIYSWRLIIKTFHGNFQNSDLNFIKIKDSGLCIFIPLFILAIGALFSGMMFRDVLVGENYINYWKNSIFFSKTYILEQPPIWFIFLTPVLTILTIPLSI

SEQ ID NO: 100033 - protein, 268 aa, Unknown
  Bacterial polypetide isolated from the Sargasso Sea
SILFIVLTAFITPICIISCIISVKKRLNEFLIAILILETFMIGVFCSLDLIIFYLFFEAGLIPMFLIIGIWGGPKKIYSAYKFFLFTLLGSVLMLAAIIFIYWAVGTTDYTEIYKLKIAKEYQYLLWLAFFSSFAVKTPMWPVHTWLPDAHVEAPTAGSVILAAILLKMAGYGFLRFSLGMFPIASEFFTPLVFALSIIAIIYTSLVALMQDDMKKLIAYSSVAHMGFVTLGIFTFNKQGIEGSMFQMISHGIISAALFLCVGVLYDR

SEQ ID NO: 100034 - protein, 251 aa, Unknown
  Bacterial polypetide isolated from the Sargasso Sea
VSSVMLLVVCIISSLVHIYSIGYMSHDPHKTRFMAYLSLFTFSMLVLVTSDNFLQLFFGWEGVGLCSYFLIGFWFKKDSANSAAIKAFVVNRVGDFGFAIGIFLIFYLFGTVNYEEVFNKIPQNVDKEISFIGLNVGAIDLICILLFIGAMGKSAQFLLHTWLPDAMEGPTPVSALIHAATMVTAGVFLVVRCSPIFEYSQLALNTICTVGMTTAFFAATVALVQKDIKKIIAYSTGSQLGYMFFAAGVEL

SEQ ID NO: 100035 - protein, 282 aa, Unknown
  Bacterial polypetide isolated from the Sargasso Sea
SCINSVKIRLKEFLIAILVLETFMIGVFCSLDLVIFYLFFEAGLIPMFLIIGIWGGPRKVYSAFKFFLFTLLGSVLMLVAIIAIYWITGTTDVSEIYKIKIPEDYQYLLWLAFFSSFAVKLPMWPVHTWLPDAHVEAPTAGSVLLAAILLKMGGYGFLRFSVGMFPIASDYFVPLIFTLSIVAIIYTSLVALMQDDMKKLIAYSSIAHMGFVTLGIFTFNKQGIEGSMLQMISHGLISAALFLSVGVLYDRIHSRLIKSYGGLANIIPEVFINIYGFCSCSL

SEQ ID NO: 100036 - protein, 266 aa, Unknown
  Bacterial polypetide isolated from the Sargasso Sea
DLVVFYLFFEAGLIPMFLIIGIWGGARRVYSAFKFFLYTLLGSVLMLVAIISIYWITGTTDVVQLYEIGIDAKYQNLLWLAFFSSFAVKTPMWPVHTWLPDAHVEAPTAGSVLLAAILLKMAGYGFIRFSLGLFPVASEIFTPLIYILSVIAIIFTSLIALMQEDMKKLIAYSSVAHMGFVTLGIFTLQQQGIEGSIIQMISHGLVSAALFLTVGVVYDRMHSRLISTYGGLVSVIPKYSILFMIFALASLGLPGTSGFIGEFLIL

SEQ ID NO: 100037 - protein, 293 aa, Unknown
  Bacterial polypetide isolated from the Sargasso Sea
GEFLMQFLIMESFMIGVFCSLDLIVFYLFFEAGLIPMFLIIGIWGGARRVYSAFKFFLFTLLGSVLMLVAIISIYWLTGTTDVIELYRLGIDPKYQNLLWLAFFSSFAVKTPMWPVHTWLPDAHVEAPTAGSVLLAAILLKMAGYGFIRFSLGLFPVASEVFTPLIYILSVIAIIFTSFIALMQEDMKKLIAYSSVAHMGFVTLGIFTIKQQGIEGSIVQMISHGLVAAALFLCVGVVYDRMHSRLINTYGGIVTIVPKYSVLFMLFTLAALGLPGTSGFVGEFLILMGAFKD

SEQ ID NO: 100038 - protein, 234 aa, Unknown
  Bacterial polypetide isolated from the Sargasso Sea
MEYAVIFLPLLGTIIGYLSKYFGDLASQLLTTLTVCIAAILSIVIFYNGLVHDNYGNYIIFEWIRSGNFQINWAINIDPLSSIMLVVVTFVSALVHIYSIGYMSHDPFKPRFMSYLSLFTFAMLVLVVSDNFIQLFFGWEGVGLSSYLLIGFWYKKDSANKAAIKAFLVNRIGDFGLAIGVFLIFLYFGTLNYEEVFQQVSNFSSKEINFLGLEANLITLISLFLFIGAMGKSA

SEQ ID NO: 100039 - protein, 278 aa, Unknown
  Bacterial polypetide isolated from the Sargasso Sea
FFTYLNLFVFSMLVLILANNYLLMFVGWEGVGVCSYLLIGFWFERKSASDAGKKAFIVNRIGDFGFLIGIFTMFGYLGTVQFSEVFAAAPGALSGGVATAIALLLFLGACGKSAQFPLYVWLPDAMEGPTPVSALIHAATMVTAGVYVVARSNVLFTLAPTAGAVVAWVGVFTALFAASIALVNTDIKRVLAYSTVSQLGYMFIGVGVGAYTAGIFHLFTHAFFKGLMFLAAGSVMHAMQDELDMRKYGGLLGKMKVTGYTFILRTIAIAGIPPLSGF

SEQ ID NO: 100040 - protein, 122 aa, Unknown
  Bacterial polypetide isolated from the Sargasso Sea
MLSDFLKDYLPIIIFLIIALGLSCAFVVINFILSPKKPDPEKLSAYECGFEPFEDSRLEFDVRFYLVAILFIIFDLEIAFLFPWAISLGNIGLLGFSSMMIFLFILTIGFIYEWKKGALDWE

SEQ ID NO: 100041 - protein, 122 aa, Unknown
  Bacterial polypetide isolated from the Sargasso Sea
MLSDFLKDYLPIIIFLVLALGLSCAFVVVNFILSPKKPDPEKLSAYECGFEPFEDSRMEFDVRFYLVAILFIIFDLEIAFLFPWAISLGNIGLLGFSSMMIFLFILTIGFIYEWKKGALDWE

SEQ ID NO: 100042 - protein, 264 aa, Unknown
  Bacterial polypetide isolated from the Sargasso Sea
RCSPIFEYSQVALNVVTAVGMITAFFAATVALVQNDIKKIIAYSTCSQLGYMFFAAGVGAYHVAIFHLFTHAFFKALLFLGSGCVIHSFHEEQDIRSMGGVWKKIPYTYVLMIIGTLALTGFPFLSGYYSKDAIIEFAYLKGSSIGYFAATIGIITALLTSIYSWRLIFKTFHGKYNNKDNNFSAIKESPLIMLLPSLLLAIGAIFSGMLFKEIFIGSDSSEFWSSSILFLQNIEHHHPPFWLLILTPILVSIMIPVSYYLFIK

SEQ ID NO: 100043 - protein, 205 aa, Unknown
  Bacterial polypetide isolated from the Sargasso Sea
FTWINSGSLNVNWSIYIDSLTSVMLVVVTLVSALVHVYSLGYMSHDPDKPRFMAYLSLFTFAMLVLVTSDNFLQLFFGWEGVGLCSYFLIGFWYKKDKANLAAIKAFLVNRVGDFGLALGIFLIFYIFGTINFDEIFNKLYLYKDIKINFLNLNLNSIDLICFLLFVGAMGKSAQIFLHTWLPDAMEGPTPVSALIHAATMVTAG

SEQ ID NO: 100044 - protein, 300 aa, Unknown
  Bacterial polypetide isolated from the Sargasso Sea
AILSLVVLYKVFSSDYSNNLVIATWINSGTLNVNWSIKIDSLSAVMFVVVNFISALVHIYSIGYMSHDPHKTRFMAYLSLFTFAMLTLVSSDNFIQLFFGWEGVGLCSYFLIGFWFKKESANKAAIKAFVVNRVGDFGLALGIFLIFYIFGTVNYDEVFEQIPNILDNKINFIGIDIEIIDLICLLLLIGAMGKSAQFLLHTWLPDAMEGPTPVSALIHAATMVTAGVFLIVRCSPIYEYSPLALTVITIIGMTTAFFAATVALVQNDIKKIIAYSTCSQLGYMFFAAGVGAYNVAMFHL

SEQ ID NO: 100045 - protein, 223 aa, Unknown
  Bacterial polypetide isolated from the Sargasso Sea
MEYTLVFSPLLGAIMSGFFGRYIGDRNSEIITSLLVSISALLSLIIFKEVVLYNYENNLVIFNWISSGTLNVNWSIKVDAVSSVMLVVVCLISSLVHIYSIGYMSHDPHKTRFMAFLSLFTFAMLILVTSDNFLQLFFGWEGVGLCSYFLIGFWFKKESANAAAIKAFLVNRVGDLAFALGIFLIFYLFGTVNYDEVFKQIPSVANADVTPFLNRKLVYLGVN

SEQ ID NO: 100046 - protein, 239 aa, Unknown
  Bacterial polypetide isolated from the Sargasso Sea
MIGVFCSLDLFVFYLFFEGGLIPMFLIIGIWGGERRVYSAFKFFLYTLLGSVLMLVAIISIYWFTGSTDITYLYNLGIDEKYQYLLWLAFFSSFAVKTPMWPVHTWLPDAHVEAPTAGSVLLAAILLKMAGYGFIRFSVGLFPLASEYFIPLIYILSLIAIIYTSLVALMQEDMKKLIAYSSVAHMGFVTLGIFTFTQQGLEGSIFQMISHGLVSAALFLSVGVIYERMHTRLISNYGG

SEQ ID NO: 100047 - protein, 266 aa, Unknown
  Bacterial polypetide isolated from the Sargasso Sea
IATWISSGSLDVNWSMLIDPLSAVMLVVVTSVSALVHIYSIGYMSHDPHKPRFMAYLSLFTFAMLMLVTSDNFIQLFFGWEGVGLCSYFLIGFWFKKESANAAAIKAFVVNRVGDFGFALGIFLIFYLFGTVNYSEVFQQIPSVVDKNLPFLGFEVKAIDLVCLLLFIGAMGKSAQILLHTWLPDAMEGPTPVSALIHAATMVTAGVFLVVRCSPIYEYSPLILNIITIVGMTTAFFAATVALVQTDIKKVIAYSTCSQLGYMFFA

SEQ ID NO: 100048 - protein, 262 aa, Unknown
  Bacterial polypetide isolated from the Sargasso Sea
WFKKPTANAAAIKAFIVNRVGDFGFALGIFLVFYVFGTVNYEEVFRQVSIYTDIKLNFLGIELHAINLICFLLFIGAMGKSAQIFLHTWLPDAMEGPTPVSALIHAATMVTAGVFLVVRCSPIYEYSPIILNFITIIGMTTALFAASIALVQNDIKKIIAYSTCSQLGYMFFATGVGAYNVAMFHLFTHAFFKALLFLGSGSVIHSFQNEQDINRMGGVYKHLPYTYALMIIGTLALTGFPFLSGFYSKDLIIEFAYLKGNT

SEQ ID NO: 100049 - protein, 272 aa, Unknown
  Bacterial polypetide isolated from the Sargasso Sea
RKWILGFFNYKVGVDGISILFIILTTFITPICIISVNSTINNRLKDFLIAILIMEALMIGVFCSLDLIIFYLFFEGGLIPMFLIIGIWGGERRVYSAFKFFLYTLLGSVLMLIAIITIYWTTGTTDVEKLYEIGIELNYQKLLWLAFFSSFAVKTPMWPFHTWLPDAHVEAPTAGSVLLAAILLKMAGYGFIRFSLGLFPLASEYFIPLIFILSLIAIIYTSLVALMQEDMKKLIAYSSVAHMGFVTLGIFTISQQGIEGSIFQMISHGLVS

SEQ ID NO: 100050 - protein, 270 aa, Unknown
  Bacterial polypetide isolated from the Sargasso Sea
LHTWLPDAMEGPTPVSALIHAATMVTAGVFLIVRCSPIYEYSPLVLTVITIIGMTTAFFAATVALVQNDIKKIIAYSTCSQLGYMFFAAGVGAYNVAMFHLFTHAFFKALLFLGAGAVIHSFHEEQDINKMGGVIKKLPYTYVLMLIGTLALTGFPFLSGFYSKDAIIEFAYLRGNGVGMLAAFVGIVTALLTSIYSWRLIFKTFHGNFNNKELSVDKIHESPFVMIAPLIILAIGAIFAGMAFKSLFIGHEIAYEFWGKSIKFLEPLST

SEQ ID NO: 100051 - protein, 307 aa, Unknown
  Bacterial polypetide isolated from the Sargasso Sea
SNFQFLEERAWIPSLGISYFLGIDGISIIFIVLTSFLSFICILASWEAVTDRVREYMVGFLVLETMILGAFCALDTVLFYMFFEGLLIPMFIIIGIWGGPGRIRATLKFFLYTLAGSVLFLVAILLLYLGAGSSSIPMLMRNEFPFNFQIWLWLLVFASFAVKIPMWPFHTWLPEAHVEAPTAGSVILAGVLLKLGAYGFLRFSLPMFPDATAYFTPFVFILSVIAIIYTSLVALVQEDMKKLIAYSSVAHMGFVTIGLFSLTIQGVEGAVVIMLSHGLVSASLFLSVGALYDRTHSRLIKDYGGFG

SEQ ID NO: 100052 - protein, 280 aa, Unknown
  Bacterial polypetide isolated from the Sargasso Sea
FLQLFFGWEGVGLCSYLLIGFWYKRETANNAAIKAFIVNRVGDFGLAIGIFLIFLSFGTVEFQAVFEKVPEFTESKINIFGGEFNLVTLICVFLFIGAMGKSAQFLLHTWLPDAMEGPTPVSALIHAATMVTAGVFLVVKCSPIFEYSAFALNLIAIVGMITALFAASVALVQNDIKKIIAYSTCSQLGYMFFAAGVGAYHLAMFHLFTHAFFKALLFLGAGSVIHAFKDEQDITKMGGVWKKLPYTMVLMLIGTLALTGFPFLSGFYSKDAIIEFAYLK

SEQ ID NO: 100053 - protein, 122 aa, Unknown
  Bacterial polypetide isolated from the Sargasso Sea
MTAVFLKDYLPIILFLIIALGLSCAFIVINYILSPKNPDPEKLSAYECGFEPFQDSRMEFDVRFYLVAILFIIFDLEIAFLFPWAISLGNIGILGFTSMMIFLFILTIGFIYEWKKGALDWE

SEQ ID NO: 100054 - protein, 299 aa, Unknown
  Bacterial polypetide isolated from the Sargasso Sea
DGISILFILLTTFITPICIISCINSVKTRLKEFLIALLVLETFMIGVFCSLDLVVFYLFFEAGLIPMFLIIGIWGGPRKVYSAFKFFLFTLLGSVLMLVAIIAIYWITGTTDVTQIYEIKIPQEFQYLLWLAFFSSFAVKLPMWPVHTWLPDAHVEAPTPGSVILAAILLKMGGYGFLRFSIGMFPFASEYFTPLIFALSVIAVIYTSLVALMQDDMKKLIAYSSVAHMGFVTMGIFTFNKQGIEGSIIQMFSHGLISAALFLCVGVLYDRTHSRLIKSYGGVVHILPKYSFLFMVFAF

SEQ ID NO: 100055 - protein, 296 aa, Unknown
  Bacterial polypetide isolated from the Sargasso Sea
MTVALGASAYAAAIFHLFTHAFFKALLFLGAGSVIIGMHHVQDMRQMGGLKKFMPLTYWTCFVGTLALIGFPGLSGFYSKDMIIEVVHAIGTPFSGVVYWALLAGVFVTSLYSFRLLFLVFHGETRLSEKAQSHISESPYVVTIPLLALAIPSVLIGGIFIESALFGDFFDGSIYVRPDRDSLGLLRENFQGPLAMMTHGFVTLPFWAAISGIIVAWYLYLKAPNLPPKIASNCSIIHKLFIEKYGFDRFNSWFFSGGGRGLGGLLWKRFDVFLIDGILVNGSAKITEAAAFMVRK

SEQ ID NO: 100056 - protein, 228 aa, Unknown
  Bacterial polypetide isolated from the Sargasso Sea
FSHSASFSWIDLDAFKIDLGILVDNLTIIMLLIVTLVSSCTHIFSLEYMKGDIRYHRYFAYLGLFTFSMNGIVLADNLISMYMSWELVGVSSYLLIGHWFEKDSAADASKKAFLTNRVGDIGFFIGIMLLYSAIGSFAFGPIFESIAAGNTIAGMTLTLAGLGIFMGAVGKSSQFPLHIWLPDAMEGPTPVSALMHAATMVAAGVYMSVRLFPIFTPDALIVIAYIGG

SEQ ID NO: 100057 - protein, 275 aa, Unknown
  Bacterial polypetide isolated from the Sargasso Sea
MEYAILFLPLAGSLIGYLGKSITKYFAEISTSLFVSISAVLSIIVFLNGIQNDNYGNYIIFEWISSGGFKANWSINIDPLSSIMLVVVTFVSALVHIYSIGYMSHDPHKPRFMSYLSLFTFSMLALVVSDNFLQLFFGWEGVGLCSYLLIGFWYKKETANNAAIKAFIVNRIGDFGLAIAIFLIFLFFGTINFEEVFQATSQFAEKKITFFGKESNLITLICVFLFIGAMGKSAQFLLHTWLPDAMEGPTPVSALIHAATMVTAGVFLVVKCSPI

SEQ ID NO: 100058 - protein, 155 aa, Unknown
  Bacterial polypetide isolated from the Sargasso Sea
VEILIIILPLIASIISGFFGKFIGDRNSEIVTSFLVTISAILSALVLYEVIVNQYQENITIATWINSGTLNVNWSMKIDSLSAVMLVVVTLVSSLVHIYSIGYMSHDPHKPRFMAYLSLFTFAMLMLVTSDNFIQLFFGWEGVGLCSYFLIGFLV

SEQ ID NO: 100059 - protein, 276 aa, Unknown
  Bacterial polypetide isolated from the Sargasso Sea
YASYKFFLYTLAGSVLILLAIISMIIHSGTSDITKLLLYDFPVSMQPWLWLAFFASFAVKVPMWPVHTWLPDAHVEAPTAGSVILAGVLLKFGGYGFLRFSIPMLPIATADFVPFVFGLSVVAIIYTSLVALAQEDMKKLIAYSSVAHMGFVTMGCFSLNQQAVEGAVIQMLSHGVVSAALFLIVGVVYDRIHSRLIDDYGGLIKRMPLYSFVFMIFMMASIGMPGTSGFVGEFLILIGTFKVNSWVALLGATGVILGAAYMLYLYRRVIFGKLIK

SEQ ID NO: 100060 - protein, 118 aa, Unknown
  Bacterial polypetide isolated from the Sargasso Sea
FLKDYFSIIIFLIIALGLSFVFIILNYLLSPKNPDPEKLSAYECGFEPFNDSRMEFDVRFYLVAILFIIFDLEIAFLFPWAISLGSIGLLGFVSMMVFLFILTIGFIYEWKKGALDWE

SEQ ID NO: 100061 - protein, 272 aa, Unknown
  Bacterial polypetide isolated from the Sargasso Sea
MEYLVIFLPLIGSIITYFGKSFGNLFSQIFSCSMVFISAVISCFIFYDGLINDNYGNYLIFEWINSGNLNVNWSIKIDPLSSVMIMVVTSVSALVHIYSIGYMSHDPHKPRFMSYLSLFTFSMLCLVVSDNFLQLFFGWEGVGLCSYLLIGFWFKRETANNAAIKAFIVNRVGDFGLAIGIFIIFFIFGTLNFEEVFLLVPEFTKTNLGIFGGEYNVITLICVFLFIGAMGKSAQFLLHTWLPDAMEGPTPVSALIHAATMVTAGVFLVVRC

SEQ ID NO: 100062 - protein, 280 aa, Unknown
  Bacterial polypetide isolated from the Sargasso Sea
ILWIYFHAGTTDYQILLTTEFDEDVQKFLWLAFFASFASKVPMVPVHIWLPEAHVEAPTAGSVILAGILLKLGTYGFLRFSMPLFPYATNYFTPLVYTFACIAIVYTSLTAIRQTDLKRIIAYSSVAHMNLVMVGLFTLNSQGIEGAILQQLSHGLVSGALFLCIGVIYDRHHTRLIKYYGGLAHTMPLYIMIFLFFTMANIALPGTSSFVGEFLILAGSFQANTTVCFLAATGMVLGGCYSLWLFNRVAYGNIKIQYINQFGDMNRREFATFLPLVILT

SEQ ID NO: 100063 - protein, 304 aa, Unknown
  Bacterial polypetide isolated from the Sargasso Sea
MYEVIQNQYEENIIIATWINSGSLDVNWSMKIDSLSAVMLVVVTSISALVHIYSIGYMSHDPHKPRFMAYLSLFTFAMLMLVTSDNFIQLFFGWEGVGLCSYFLIGFWFKKDTANNAAIKAFIVNRIGDFGFALGIFLIFYLFGTVNYSEVFEQIPNITSKNLNFLGVEINAIDLICILLFVGAMGKSAQIFLHTWLPDAMEGPTPVSALIHAATMVTAGVFLVVRCSPIYEFSDLALNIITIVGMSTAFFAATVALVQTDIKKIIAYSTCSQLGYMFFATGVGAYNVAMFHLFTHAFFKLYYF

SEQ ID NO: 100064 - protein, 297 aa, Unknown
  Bacterial polypetide isolated from the Sargasso Sea
METLMLGVFCSLDLVIFYLFFEGGLIPMFLIIGIWGGPKRVYSAFKFFLFTLLGSVLMLIAIISIYWITGTTDVIKLLDIRINQDYQYLLWLAFFSSFAVKLPMWPVHTWLPDAHVEAPTAGSVILAAILLKMAGYGFIRFSLGLFPVASDYFSSLIFSLSVIAIIYTSLVALMQEDMKKLIAYSSVAHMGFVTIGIFSITKQGLEGSIIQMISHGLISAALFLCVGVVYDRYHSRMISSYGGLVNFMPKYALVFMVFTLAALGLPGTSGFVGEFLVLVGIFKKNILVAVLASLGVI

SEQ ID NO: 100065 - protein, 270 aa, Unknown
  Bacterial polypetide isolated from the Sargasso Sea
NFWINNYIKFKLGIDGISILFIVLTTFITPICIISCINSVKERVKEFLIAILILETFMIGVFCSLDLVIFYLFFEAGLIPMFLIIGVWGGPKRVYSAFKFFLFTLLGSVLMLVAIIVIYWLTGTTDITQIYEIKIPEEYQNLLWLAFFSSFAVKTPMWPVHTWLPDAHVEAPTAGSVILAAILLKMAGYGFLRFSIPLFPIATEFFTPLIYFLSIIAIIYTSLVALMQDDMKKLIAYSSVAHMGYVTLGIFTLTKQGIEGSIFQMISHGL

SEQ ID NO: 100066 - protein, 271 aa, Unknown
  Bacterial polypetide isolated from the Sargasso Sea
MIEWPIISATIFLPLIGALIIFLIKDDDLSSNNIKWAALWTSVGTFVLSCLIWLQFDSSNPNYQLTEKYKWFSDFNFFYHVGVDGISLFMILLSTFLTPFCILASWVSVKKRIKEYMIAFLFLETVMIGMFSSIDILLFYIFFESVLIPMFLIIGIWGGARRIYASFKFFLYTLLGSVLMLLAIIFIYRTTNSMNIADLQGNIFTANIQVYLWIAFFASFAVKIPMWPFHTWLPDAHVEAPTAGSVILAGVLLKMGGYGFIRFSIGMLPEA

SEQ ID NO: 100067 - protein, 308 aa, Unknown
  Bacterial polypetide isolated from the Sargasso Sea
FYLFFEAGLIPMFLIIGIWGGTRRVYSAFKFFLYTLLGSVLMLVAIISIYWITGTTDVVELYELGIDAKYQNLLWLAFFSSFAVKTPMWPVHTWLPDAHVEAPTAGSVLLAAILLKMAGYGFIRFSLGLFPVASEIFTPLIYTLSVIAIIFTSFIALMQEDMKKLIAYSSVAHMGFVTLGIFTIEQQGIEGSIIQMISHGLVSAALFLCVGVVYDRMHSRLINTYGGIVSIVPKYAVLFMIFTLAALGLPGTSGFVGEFLILMAAFKDNFLVAVIASFGVIIGAAYMLWLYKRVVFGRLINTDLKQND

SEQ ID NO: 100068 - protein, 157 aa, Unknown
  Bacterial polypetide isolated from the Sargasso Sea
MAELWAAYLWPFIWIVIKIVLIIVPLLIGVAYLTYAERKVIGAMHLRRGPNVVGPYGLLQPIADGMKLFFKETIIPSGANRGVFILAPLLTFTLALVAWAVIPVGAGLVISNINVGILYLFAISSLGVYGVLMAGWASNSKYAFLGALRSAAQMVSY

SEQ ID NO: 100069 - protein, 272 aa, Unknown
  Bacterial polypetide isolated from the Sargasso Sea
FESVLIPMFLIIGVWGSRERKIRAAYQFFLYTLIGSLFMLLAILLIYFQVGTTDLQVLSTVEFSERRQFFLWAAFFLSFAVKVPMIPFHIWLPEAHVEAPTAGSVILAGILLKLGTYGFLRFSIPLFPEATVYFTPLIYTLSVLGIIYASFTTLRQIDLKKIIAYSSVAHMGFVTLGLFSLNAQGIEGAILLMLSHGFVASALFLCIGILYDRTHTRLVRYYGGLVQTMPLFSFFFFVFTLGNLSLPGTSSFVGEFLILLGVFQTNTFIATL

SEQ ID NO: 100070 - protein, 190 aa, Unknown
  Bacterial polypetide isolated from the Sargasso Sea
MELEYFILFLPLLAAFISGFLGKFVGHRSSEIITSLFTSVSAILSILIFYKVVDQNYENNIIISTWLNSGSLNVNWSIKIDALSSVMLVVVTLISALVHIYSIGYMSHDPHRSRFMAYLSLFTFSMLTLVTSDNFLQLFFGWEGVGLCSYFLIGFWFKKESANAAAIKAFIVNRVGDFGFALGIFLIFYL

SEQ ID NO: 100071 - protein, 284 aa, Unknown
  Bacterial polypetide isolated from the Sargasso Sea
VFDTVNYSEVFFSVTLHLDNNINFLGLSINSIDLICILLFVGAMGKSAQIFLHTWLPDAMEGPTPVSALIHAATMVTAGVFLVVRCSPIYEYSELSLNLITIIGMSTAFFAATVALVQNDIKKIIAYSTCSQLGYMFFAAGVGAYNVAMFHLFTHAFFKALLFLGAGSVIHSFKNEQNINLMGGVWKKIPYTWILMVIGTLALTGFPFLSGFYSKDAIIEFAYLKGSIIGYTAAGIGILTAFLTAIYSWRLIFKTFHGDFKNHKLKIESYMNHPWLWYCHYCFS

SEQ ID NO: 100072 - protein, 114 aa, Unknown
  Bacterial polypetide isolated from the Sargasso Sea
MLSEFLKDYLSIIIFLFIALGLSISFIVLNFIFSPKNPDPEKLSAYECGFEPFDDSRMEFDVRFYLVAILFIIFDLEIAFLFPWAISLGNIGLLGFCSMMIFLFILTIGFVYEW

SEQ ID NO: 100073 - protein, 61 aa, Unknown
  Bacterial polypetide isolated from the Sargasso Sea
VRFYLVAILFIIFDLEVAFLFPWAISLGSIGLFGFWSMMIFLLILTIGFIYEWKKGALEWE

SEQ ID NO: 100074 - protein, 81 aa, Unknown
  Bacterial polypetide isolated from the Sargasso Sea
KLSAYECGFEAFDDARGRFDVRFYLVAILFIIFDLEVAFLFPWAITLGKIGLFGFWSMMIFLTILTIGFIYEWKKGALEWE

SEQ ID NO: 100075 - protein, 246 aa, Unknown
  Bacterial polypetide isolated from the Sargasso Sea
IQNDIKRVVAYSTLSQLGYMVAAAGVSAYSASLFHLMTHAFFKALLFLAAGSVIIALHHEQDIRKMGGLKNKLPITYVTSLIGSLALIGFPGFSGFFSKDALIEAIGHADIIGSGFAYASVLIGVFITALYTFRLFFKVFHGALDEHHHNVKESPLSITLPLLLLAIPSVIIAWPTVGPMVFGSYFTTAISQPDAYQIFGYQFTSAYGFLIHAFSSPVIYIALFGVATAYILYIQKPGILDDETYK

SEQ ID NO: 100076 - protein, 268 aa, Unknown
  Bacterial polypetide isolated from the Sargasso Sea
YEKKLVFFGFELNLITLICIFLFIGAMGKSAQFLLHTWLPDAMEGPTPVSALIHAATMVTAGVFLVVRCSPMFEYSQVALNLVAIVGMITAIFAASVALVQNDIKKIVAYSTCSQLGYMFFAAGIGAYHVAMFHLFTHAFFKALLFLGAGSVIHAFKDEQDIRNMGGVRKKLPYTYIYMLLGTLALTGFPFLSGFYSKDAIIEFAYLRNSSLGNYVASIGILTAFLTSIYSWRLFFKTFHGPYNNKKIPINETHESPLVMLIPLVFLG

SEQ ID NO: 100077 - protein, 333 aa, Unknown
  Bacterial polypetide isolated from the Sargasso Sea
YLQHTLWTRFNRSTADMQFVERSTWIERFNIEYFLGVDGISVPLVLLTTILTIVVVAAGWKVIQSRVAQYFAAFLIMEGLMIGVFCALDGILFYLFWEAMLIPMFLIIGVWGGPNRVYAAIKFFLYTLLGSLLMLVALLYLYQASGGSFDLLGFHHLPLTGGVQTLVFLAFFAAFAVKIPMVPVHTWLPDAHVEAPTGGSVILAAITLKMGAYGFLRIAMPIAPDAAHQIAPVIIGLSLLAVVYIALVALVQQDMKKLIAYSSISHMGFVTLGFFVFETRAMEGAIVQMISHGFVSGALFLCVGVLYDRLHSREIATYGGVIKVMPVFAFFIV

SEQ ID NO: 100078 - protein, 295 aa, Unknown
  Bacterial polypetide isolated from the Sargasso Sea
DSLTAIMLAVVTTISAFVHFYSLGYMSHDPNWEITEKYKPRFFSYLSLFTFAMLMLVTSNNFVQLFFGWEGVGLASYLLIGFYYKKSSANLASIKAFIVNRVGDIGLALAIFSTFFYVGSLNFDELFSKSQELSNKNIEILFFNFNVLEFIVILFFLGAMGKSAQLFLHTWLPDAMEGPTPVSALIHAATMVTAGVFLVCRLSPVIEYTPIASNLIILVGAITAFFAGTVALVQNDVKRIIAYSTCSQLGFMFAAAGIGLYQAAMFHLFTHAFFKALLFLCAGSIIHSMHHQQDI

SEQ ID NO: 100079 - protein, 254 aa, Unknown
  Bacterial polypetide isolated from the Sargasso Sea
TFTANWSINIDPLSSIMLVVVTLVSSLVHIYSIGYMSHDPHKPRFMSYLSLFTFSMLSLVLSDNFLQLFFGWEGVGLCSYLLIGFWYKKNSANNAAIKAFIVNRVGDFGLAVGIFLIFYHLGSINYSEVFQLIPQFVNKEINFLGFEINLITLICIFLFIGAMGKSAQFLLHTWLPDAMEGPTPVSALIHAATMVTAGVFLVVRCSPIFEYSQIALNIVAIVGVITAIFAASVAIVQNDIKRIIAYSTCSQLGY

SEQ ID NO: 100080 - protein, 258 aa, Unknown
  Bacterial polypetide isolated from the Sargasso Sea
ILLFYIFWKAVLIPMYLIIGIWGGQRRIYASFKFFLYTLLGSVLMLIAIIVIFNLTESMNIEKLQGNFFNKKIQIFLWLAFFASFAVKIPMWPFHTWLPDAHVEAPTAGSVILAGVLLKMGGYGFIRFSIGILPEATEYFFPLIMILSIIAIVYTSLVALAQTDIKKLIAYSSVAHMGIVTIGIFLVNQQGLEGAMIQMISHGVVSAALFLCVGVIYDRMHTRQIDFYNGLVNKMPIYATVFMVFMLASVGLPGTSGL

SEQ ID NO: 100081 - protein, 122 aa, Unknown
  Bacterial polypetide isolated from the Sargasso Sea
MLSEFLKDYLSIIIFLFIALGLSISFIVLNFIFSPKNPDPEKLSAYECGFEPFDDSRMEFDVRFYLVAILFIIFDLEIAFLFPWAISLGNIGLLGFCSMMIFLFILTIGFIYEWKKGALDWE

SEQ ID NO: 100082 - protein, 256 aa, Unknown
  Bacterial polypetide isolated from the Sargasso Sea
AAIKAFVVNRVGDFGFALGIFLIFYLFGTVNYTEVFDEIPNITDKNLVFLGITFNAVDLICLLLFIGAMGKSAQILLHTWLPDAMEGPTPVSALIHAATMVTAGVFLVVRCSPIYEYSDLALNIITIVGMSTAFFAATVALVQNDIKKIIAYSTCSQLGYMFFATGVGAYNVAMFHLFTHAFFKALLFLGSGSVIHAFKDEQNINNMGGVWKKLPYTYSLMIIGTLALTGFPFLSGFYSKDAIIEFAYLRGNTTGY

SEQ ID NO: 100083 - protein, 297 aa, Unknown
  Bacterial polypetide isolated from the Sargasso Sea
AMGKSAQFLLHTWLPDAMEGPTPVSALIHAATMVTAGVFLVVRCSPLFEYSQFAMNLVAIVGMITALFAASVALVQNDIKKIIAYSTCSQLGYMFFAAGVGAYHIAMFHLFTHAFFKALLFLGAGSVIHAFHEEQDITRMGGVWKKIPYTMILMLIGTLALTGFPFLSGFYSKDAIIEFAYLKGTSVGYYVSSVGIFTALLTAIYSWRLFFKTFFGDYNNKSISIEKTHESPLVMIIPLIILAIGALSAGYLFKDLLIGNNSSYWGDTILFLNFVKLENIPIWLIIITPSFNHSSYP

SEQ ID NO: 100084 - protein, 292 aa, Unknown
  Bacterial polypetide isolated from the Sargasso Sea
SGFIKFKFGIDGISILFILLTAFITPLCIISCINSIKNRLKEFLIALLVLETFMIGVFCSLDLVVFYLFFEAGLIPMFLIIGIWGGPRKVYSAFKFFLFTLLGSVLMLVAIIAIYSISGTTDIIQIYETKIPEKFQYLLWLAFFSSFAVKLPMWPVHTWLPDAHVEAPTPGSVILAAILLKMGGYGFLRFSVGMFPLASEYFTPLIFALSIIAIIYTSLVALVQDDMKKLIAYSSVAHMGFVTMGIFTFNKQGIEGSIVQMISHGLISAALFLCVGVLYDRTHSRLINSYGG

SEQ ID NO: 100085 - protein, 292 aa, Unknown
  Bacterial polypetide isolated from the Sargasso Sea
PILIVLPLIGLAFIFFSSEEDENAVQSKKSALWTCASNFFLSLYLPINFDKSIPHFQFVNSFSWFNSDNLRFALGVDGLSMPFVLLSTFLILICIVFLLPQSKKNMKMYLASFLLLESFLVGTFSAIDLFSFYIFFESILIPMYLIIGFWGGERRIYSAYKFFLYTLLGSVLMLIAIIFLYQEFGTISIPKLLDYTLPFYIQVWLWLAFFSSFAVKIPMWPFHTWLPDAHVEAPTEGSVILAGILLKLGGYGFIRFNLSILPDASIFFTPFIYFLYGLSNNLHFLYSFSTRG

SEQ ID NO: 100086 - protein, 122 aa, Unknown
  Bacterial polypetide isolated from the Sargasso Sea
MLSDFLKDYLPIIIFLIIALGLSCAFVIINFILSPKKPDPEKLSAYECGFEPFEDSRMEFDVRFYLVAILFIIFDLEIAFLFPWAISLGKIGLLGFSSMMIFLFILTIGFIYEWKKGALDWE

SEQ ID NO: 100087 - protein, 273 aa, Unknown
  Bacterial polypetide isolated from the Sargasso Sea
CFLFMDLVVFYLFFEGGLIPMFLIIGIWGGERRIYSAFKFFLYTLLGSVLMLVAILSIYWLNGTTDIEKLYEIGIESKYQNILWLAFFSSFAVKTPMWPVHTWLPDAHVEAPTAGSVLLAAILLKMAGYGFIRFSVGLFPVASEHFTPLVYTLSIIAIIYTSLVALMQEDMKKLIAYSSVAHMGFVTLGIFTMTEQGIEGSIFQMISHGLVSAALFLSVGVIYERNHSRIIKNYGGLVSVMPKYAIVLMIFTLGAVGLPGTTGFVGEFLILMG

SEQ ID NO: 100088 - protein, 288 aa, Unknown
  Bacterial polypetide isolated from the Sargasso Sea
FFSKLAKKEILIFLSTFFIFLASYISLKTTNEIISTNNSFQFYLFNWLNSGNLISTWSINIDFFTSVMISIVNIISALVQLYSIGYMKNDDFINRFFCYLNLFTFFMLLLVCSENLLQLYIGWEGVGLCSYLLIGFWFYKESASNAAKKAFIVNRVGDMFFILGIILIYITFETINFSNIFQNFDKYETTTFNFLFFNIKSLDAICIFLILGAMAKSAQFGLHTWLPDAMEGPTPVSALIHAATMVTAGVFLICKMSIFFNDSLFASNLIILIGSLTAVFAASVALVQ

SEQ ID NO: 100089 - protein, 276 aa, Unknown
  Bacterial polypetide isolated from the Sargasso Sea
DLVIFYLFFEGGLIPMFLIIGIWGGHKRVYSAFKFFLFTLLGSVLMLIAIISIYWITGTTDVIKLLQIKIPSEYQILLWLAFFSSFAVKLPMWPVHTWLPDAHVEAPTAGSVILAAILLKMAGYGYIRFSIGLFPIGSDFFTPLIFILSLIAIIYTSLVALMQEDMKKLIAYSSVAHMGFVTIGIFSITKQGLEGSIIQMISHGFISAGLFLSVGVLYDRFHSRMISSYSGLVNIMPKYALIFMIFTLAALGLPGTSGFVGEFLVLVGVFQKNMIV

SEQ ID NO: 100090 - protein, 252 aa, Unknown
  Bacterial polypetide isolated from the Sargasso Sea
MELSIIFLPLIASIISGFFGKFIGDRNSEIVTSTLVSISAILSIFVLYKVTVNQYEENILIATWINSGSLNVNWSMLIDPLSAVMLVVVTSISSLVHIYSIGYMSHDPHKPRFMAYLSLFTFAMLMLVTSDNFVQLFFGWEGVGLCSYFLIGFWFKKESANTAAIKAFVVNRVGDFGFALGIFLIFYLFGTVNYSEVFQQIPTVVDKNLLFLGLEIKAIDLICLLLFIGAMGKSAQILLHTWLPDAMEGPTP

SEQ ID NO: 100091 - protein, 97 aa, Unknown
  Bacterial polypetide isolated from the Sargasso Sea
MTTLSFVVGERKPDNEKLSAYECGFEAFDDARGRFDVRFYLVAILFIIFDLEVAFLFPWAISLGAIGLFGFWSMMIFLLILTIGFIYEWKKGALEWE

SEQ ID NO: 100092 - protein, 305 aa, Unknown
  Bacterial polypetide isolated from the Sargasso Sea
FYLLFGALLSWLVGDRWSSKGAFISTITCMLLSMIISWTAFFDIAINDNTFQGISFPWILSGNLNINWGFSFDSLTCVMLIVVTTVSSMVHIYSIGYMSHDKSKSRFMSYLSFFTFAMLMLVTSDNLFQLFFGWEGVGLASYLLIGFWYNKKSANLAAIKAFVVNRVGDLGFAIGIIFIFVTFDAIDFKVIFELAPSMVDENVNLIGYEVSVIEFSCLMLFIGAMGKSAQLFLHTWLPDAMEGPTPVSALIHAATMVTAGVFMVCKLSPLFEYAPITLSFITIIGAITALFASTIALTQFDIKRV

SEQ ID NO: 100093 - protein, 122 aa, Unknown
  Bacterial polypetide isolated from the Sargasso Sea
MIFDFLSGYLSIIIFVFIALALSCGFIIINLAFSPNNPDPEKLSAYECGFEAFSDSRIKFDVRFYLVAILFIIFDLEIAFLFPWAISLGSIGLLGFYSMMIFLFILTIGFIYEWKKGALEWE

SEQ ID NO: 100094 - protein, 203 aa, Unknown
  Bacterial polypetide isolated from the Sargasso Sea
MELALLFLPLASFIISGFFGKYIGDRLSEIITSLLVSTSAILALFIFYEVITEGYTNNIVIASWIKSGSLNVNWSIKVDAVSAVMLVVVTLISSLVHIYSIGYMSHDKHKPRFMAYLSLFTFAMLTLVTSDNFLQLFFGWEGVGLCSYFLIGFWFKKDSANSAAIKAFVVNRVGDFGFALGIFLIFYLFGTVNYNEVFQQIPQ

SEQ ID NO: 100095 - protein, 217 aa, Unknown
  Bacterial polypetide isolated from the Sargasso Sea
MEYLILFLPLIGSVISGFFGNKIGDRNSQILTSSFVSISAILSLFVLYKVIISDYSNNLVIATWINSGTLNVNWSIKIDSLSAVMFVVVNFVSALVHIYSIGYMSHDPHKTRFMAYLSLFTFAMLTLVSSDNFIQLFFGWEGVGLCSYFLIGFWFKKESANKAAIKAFVVNRVGDFGLALGIFLIFYIFGTVNYDEVFEKIPDVLDKKINFIGINIE

SEQ ID NO: 100096 - protein, 122 aa, Unknown; identical to SEQ ID NO: 99900
  Bacterial polypetide isolated from the Sargasso Sea

SEQ ID NO: 100097 - protein, 197 aa, Unknown
  Bacterial polypetide isolated from the Sargasso Sea
MEYLILFLPLIGAVISGFFGKKIGDRNSQILTSSFVSISAILSLLVLYKVISSDYSNNLVIATWINSGTLNVNWSIKIDALSAVMFVVVNFVSALVHIYSIGYMSHDPHKTRFMAYLSLFTFAMLTLVSSDNFIQLFFGWEGVGLCSYFLIGFWFKKESANKAAIKAFVVNRVGDFGLALGIFLIFYIFCTVNYDEV

SEQ ID NO: 100098 - protein, 304 aa, Unknown
  Bacterial polypetide isolated from the Sargasso Sea
MFSSFGASTALFTGILGLVQNDIKRVIAYSTLSQLGYMVAAAGVSAYSVSLFHLMTHAFFKALLFLAAGSVIVALHHEQDIRKMGGLRSKLPITYLASLIGSLALIGFPGFSGFFSKDALIEAIGHADILGSGYAYASVLIGVFITALYTFRLFFKVFHGAQDGHHQDVKESPLSITLPLILLAIPSAIVAWPTVGPMVFGSYFANSISQPDAYQIFGYEFTTALGFLVHAFSSPVIYIAIFGVATAYVLYIYKPSILENKSLESSFIFRLLDNKYYFDELYENVFAKKARNIGHLLWTIGDVK

SEQ ID NO: 100099 - protein, 309 aa, Unknown
  Bacterial polypetide isolated from the Sargasso Sea
LFIILTTFITPLCIISVNSTIKNRLKDFLIAILVMETMMIGVFCSLDLVIFYLFFEAGLIPMFLIIGIWGGQRRVYSAFKFFLYTLLGSVLMLVAIISIYWITGTTDVIKLYELGIDAKYQHLLWLAFFSSFAVKTPMWPVHTWLPDAHVEAPTAGSVLLAAILLKMAGYGFIRFSVGLFPIASEYFVSFIFVLSLIAIIYTSLVALMQEDMKKLIAYSSVAHMGFVTMGIFTMTPEGIEGSIFQMISHGIISAALFLCVGVVYERTHTREISKYGGIVSVMPRYAVVFMVFTLGALGLPGTTGFIGEF

SEQ ID NO: 100100 - protein, 292 aa, Unknown
  Bacterial polypetide isolated from the Sargasso Sea
MNFPILSSLILLPIVGALFLFFTKDKEGNNLTAKYVALFTTIVNFLISIYLWISFDQSTSSFQFVEDRTWIEGFINYKVGVDGISILFIILTTFITPLCIISVNNSVKNRLRDFLIAILIMESFMIGVFCALDLVVFYLFFEAGLIPMFLIIGIWGGARRVYSAFKFFLYTLLGSVLMLVAIISIYWITGTTDVVQLYEIGIDVKYQNLLWLAFFSSFAVKTPMWPVHTWLPDAHVEAPTAGSVLLAAILLKMAGYGFIRFSLGLFPVASEVFTPLIYTLSVIAIIFTSLIA

SEQ ID NO: 100101 - protein, 236 aa, Unknown
  Bacterial polypetide isolated from the Sargasso Sea
VTVVSALVHIYSIGYMSHDPHKPRFMSYLSLFTFSMLVLVVSDNFLQLFFGWEGVGLCSYLLIGFWYKKETANNAAIKAFIVNRIGDFGLAVGIFIIFFFFGSINFEEIFQAVPEISEKKLFFVGLKVNLITLICLFLFIGAMGKSAQFLLHTWLPDAMEGPTPVSALIHAATMVTAGVFLVVRCSPLFEYSQVALNMVAIVGMVTAIFAASVALVQNDIKKIVAYSTCSQLGYMF

SEQ ID NO: 100102 - protein, 232 aa, Unknown
  Bacterial polypetide isolated from the Sargasso Sea
SALIHAATMVTAGVFLVIRCSPIYEYSELALNIITIIGMSTAFFAASVALVQNDIKKIIAYSTCSQLGYMFFAAGVGAYNVAMFHLFTHAFFKALLFLGSGSVIHAFKDEQNINNMGGVWKKLPYTYALMIIGTLALTGFPFLSGFYSKDAIIEFAYLRGNTTGFYAAGIGVVTAFLTSIYSWRLMFKTFHGEYNNKNIKIEDTHESPLVMLLPLILLSIGAVFAGFAFKEL

SEQ ID NO: 100103 - protein, 91 aa, Unknown
  Bacterial polypetide isolated from the Sargasso Sea
ILSPKKPDPEKLSAYECGFEPFEDSRLEFDVRFYLVAILFIIFDLEIAFLFPWAISLGNIGLLGFSSMMIFLFILTIGFVYEWKKGALDWE

SEQ ID NO: 100104 - protein, 224 aa, Unknown
  Bacterial polypetide isolated from the Sargasso Sea
MEYLILFLPLLASIICGFFGKLIGDKISQIITSLFVSLSALLSLVVFYKVVTGGYENNLIITTWINSGSLNVNWSINIDALSSVMLVVVTVISSLVHIYSIGYMSHDPHKARFMSYLSLFTFAMLTLVTSDNFIQLFFGWEGVGLCSYFLIGFWFKKPSANAAAIKAFLVNRVGDFGFALGIFLIFYIFGTVNYNEVFQKVPEIVDRELVFIGININAVDLICL

SEQ ID NO: 100105 - protein, 235 aa, Unknown
  Bacterial polypetide isolated from the Sargasso Sea
MEYIVIFLPLLGAFFSGFFGNLIGNKFSQILTSAFVSISAIFSILIFYNVLTNNYESNLIVAKWINSGALNVNWSIKIDALSSVMLVVVTFVSSLVHIYSIGYMSHDPHKPRFMSYLSLFTFSMLTLVTSDNFLQLFFGWEGVGLCSYFLIGFWFKRETANAAAIKAFLVNRVGDFGLALGIFLIFYMCGTINYDEVFQQISTLSQSKLNFVGINLNPINLICVLLFIGAMGKSA

SEQ ID NO: 100106 - protein, 277 aa, Unknown
  Bacterial polypetide isolated from the Sargasso Sea
GFELNLITIICVFLFIGAMGKSAQFLLHTWLPDAMEGPTPVSALIHAATMVTAGVFLVVRCSPIFEFSQFALNLVAVVGMITALFAASVALVQNDIKKIVAYSTCSQLGYMFFAAGVGAYHVAMFHLFTHAFFKALLFLGAGSVIHAFNDEQDIRNMGGVRKKLPYTYIFMLLGTLALTGFPFLSGFYSKDAIIEFAYLKKSSLGNYAATVGILTAFLTSIYSWRLFFKTFHGSYNNKKIPINETHESPLVMLTPLVFLSVGAVFSGYFFKKYFYRS

SEQ ID NO: 100107 - protein, 149 aa, Unknown
  Bacterial polypetide isolated from the Sargasso Sea
MEYLILFLPLLGSIISGFFGKKIGNRNSQIFTSSFVSISAILSLIVLYKVIGLNYSNNLVIATWIKSGTLDVNWSIKIDALSAVMFVVVNFVSALVHIYSIGYMSHDPHKTRFMAYLSLFTFAMLTLVSSDNFIQLFFGWEGVGLCSYF

SEQ ID NO: 100108 - protein, 122 aa, Unknown
  Bacterial polypetide isolated from the Sargasso Sea
MIYNFLTEYLSILIFLFLALFLSIGFIVANFLAAPSNPDPEKLSAYECGFEAFDDSRMEFDIRFYLVAILFIIFDLEIAFLFPWAISLGNLGALGFWSMMIFLAILTIGFIYEWKKGALEWE

SEQ ID NO: 100109 - protein, 254 aa, Unknown
  Bacterial polypetide isolated from the Sargasso Sea
MESLMIGVFCSLDLVVFYLFFEGGLIPMFLIIGIWGGERRVYSAFKFFLYTLLGSVLMLVAIISIYWITGTTDITYLYTLGINEKYQYLLWLAFFSSFAVKTPMWPVHTWLPDAHVEAPTAGSVLLAAILLKMAGYGFIRFSVGLFPTASEYFIPLIYTLSLIAIIYTSLVALMQDDMKKLIAYSSVAHMGFVTLGIFTFTQQGLEGSIFQMISHGLVSAALFLSVGVIYERMHTRLIANYGGLVSVMPKYAIV

SEQ ID NO: 100110 - protein, 233 aa, Unknown
  Bacterial polypetide isolated from the Sargasso Sea
AVVLYEVIFNNYQDNIIIATWINSGTLDVNWSMKIDPLSAIMLVVVTFVSSLVHIYSIGYMSHDPHKPRFMAYLSLFTFAMLMLVTSDNFIQLFFGWEGVGLCSYFLIGFWFKKDSANTAAIKAFVVNRVGDFGFALGIFLIFYLFGTVNYSEVFELIPTVVEKNLIFLGIEINAIDLICLLLFVGAMGKSAQILLHTWLPDAMEGPTPVSALIHAATMVTAGVFLVVRCSPI

SEQ ID NO: 100111 - protein, 62 aa, Unknown
  Bacterial polypetide isolated from the Sargasso Sea
DVRFYLVAILFIIFDLEIAFLFPWAISLGNIGLLGFSSMMIFLFILTIGFIYEWKKGALDWE

SEQ ID NO: 100112 - protein, 269 aa, Unknown
  Bacterial polypetide isolated from the Sargasso Sea
FPIFEYSQLTLNIITFVGMITAFFAATVALVQNDIKKIIAYSTCSQLGYMFFAAGVGAYNVAMFHLFTHAFFKALLFLGSGSVIHSFKDEQDINQMGGVWKKLPYTWVLMIIGTLALTGFPLLSGFYSKDAIIEYAYLRGNTAGYYAATVGILTALLTSIYSWRLIFKTFHGDYNNNKLKIDTMHESPLVMLIPLIVLAIGALFAGYFFKELFIGHSSSNNFWTDSIKFLSPLSLDHPPLWIIYFTPVIVVLSIPFSYYLFLKNKNITH

SEQ ID NO: 100113 - protein, 276 aa, Unknown
  Bacterial polypetide isolated from the Sargasso Sea
FSIRGDDETVALNARSVALWTTGINFFLSLYIWFNFDPSTADFQFVEKVEWMPVLGLQYHMGIDGISMLFVLLTTLLSPICILASWRATQTRVKEYMISFLILETLMVGMFCALDLMVFYIYFEGVLIPMFLIIGIWGGPRRVYAAFKLFLYTLLGSVLMLLAMFAMYVDAGTTDIVRLMNHNFPAELQTWLFLAFFASFAVKVPMWPVHTWLPDAHVEAPTAGSVILAGVLLKFGGYGFLRFSLPMFPLATVDFTPMVYALSIIAVVYTSFVALV

SEQ ID NO: 100114 - protein, 253 aa, Unknown
  Bacterial polypetide isolated from the Sargasso Sea
MIGNWPLLTIITFLPMIGVAFLMMIRGEEELVAQNARNVALWVSSFTLVISLALVLNFDPQAAGYQFEERAEWLPGAGISYHLGADGISMPFIILSTLLTPLAILASWKAITHRVREYMIAFLVLETMMIGMFASLDMLMFYLFFEGVLIPMFIIIGVWGGAGRVYAAFKFFLYTLLGSVLMLVCMLTMYIDAGSTDIPALSAHSFAAGMQTWLFLGFLASFAVKVPMWPVHTWLPDAHVEAPTAGSMILAGV

SEQ ID NO: 100115 - protein, 122 aa, Unknown
  Bacterial polypetide isolated from the Sargasso Sea
MITDILKDYLPIILFLIIALGLSCAFIVVNFILSPKHPDPEKLSAYECGFEPFQDSRMEFDVRFYLVAILFIIFDLEIAFLFPWAISLGNIGILGFTSMMIFLFILTIGFIYEWKKGALDWE

SEQ ID NO: 100116 - protein, 122 aa, Unknown; identical to SEQ ID NO: 100040
  Bacterial polypetide isolated from the Sargasso Sea

SEQ ID NO: 100117 - protein, 287 aa, Unknown
  Bacterial polypetide isolated from the Sargasso Sea
VQNDIKKIIAYSTCSQLGYMFFAAGVGAYNVAMFHLFTHAFFKALLFLGAGAVIHSFHEEQDINKMGGVIKKLPYTYVLMLIGTLALTGFPFLSGFYSKDAIIEFAYLKGNGVGMLAAFVGIVTALLTSIYSWRLIFKTFHGNYNNKELSIDKVHESPFVMIAPLIILAIGAIFAGMAFKGLFIGHEVAYEFWAQSIKFLEPLSTDHPPTWFLLLTPILVTAAIPFSYYLYLKNTNIVKGLKEMNAPIYQFLVKKWYFDEMYDYIFVNPSKKIGKFLWKKVGRINNR

SEQ ID NO: 100118 - protein, 287 aa, Unknown
  Bacterial polypetide isolated from the Sargasso Sea
GTVNYEGVFSEVNNFTNNDISFVGIKFNTINLICILLFIGAMGKSAQIFLHTWLPDAMEGPTPVSALIHAATMVTAGVFLVVRCSPIYEFSEFALNIITIVGMSTAFFAASVALVQNDIKKIIAYSTCSQLGYMFFAIGVGAYNVAMFHLFTHAFFKALLFLGAGSVIHSFQNQQNIDEMGGVWKKMPYTWILMIIGTLALTGFPFLSGFYSKDAILEFAYLKGTTIGYLAAGVGVLTALMTSIYSWRLLFKTFHGAYKNTKIKFESIHESPMERIIPLIILSMGAV

SEQ ID NO: 100119 - protein, 262 aa, Unknown
  Bacterial polypetide isolated from the Sargasso Sea
SSLVHIYSIGYMSHDPHKPRFMAYLSLFTFAMLTLVTADNFLQLFFGWEGVGLCSYFLIGFWYKKETANAAAIKAFLVNRVGDFGFALGIFLIFYFFGTVNYTEVFNQIPQLIDKNIIFLGVSCNSIDLICLLLFIGAMGKSAQIFLHTWLPDAMEGPTPVSALIHAATMVTAGVFLVVRCSPIFEYSILALNIITVVGMSTAFFAATIALVQTDIKKIIAYSTCSQLGYMFFAAGVGAYNVAMFHLFTHAFFKALLFLGSG

SEQ ID NO: 100120 - protein, 122 aa, Unknown
  Bacterial polypetide isolated from the Sargasso Sea
MIYNFLSDYLSIIIFLFIALALSIGFIAINFALSPKNPDPEKLSAYECGFEAFNDSRVKFDIRFYLVAILFIIFDLEIAFLFPWAISLGNIGLLGFFSMMFFLGILTIGFIYEWKKGALEWE

SEQ ID NO: 100121 - protein, 234 aa, Unknown
  Bacterial polypetide isolated from the Sargasso Sea
MEYAILFLPLIGSLIGYLGKSTTKYFAEISTSLFVSISAVLSIVVFWNGIQNDSYGNYKIFEWISSGGFIANWSIKIDPLSSIMLVVVTFVSALVHIYSIGYMSHDPHKPRFMSYLSLFTFSMLALVVSDNFLQLFFGWEGVGLCSYLLIGFWYKKETANNAAIKAFIVNRIGDFGLAIAIFLIFFFFGTINFEETFQVTSQFTEKKIIFLGFEANLITLICIFLFIGAMGKSA

SEQ ID NO: 100122 - protein, 144 aa, Unknown
  Bacterial polypetide isolated from the Sargasso Sea
PMFVVFFISTLAETNRAPFDLPEGESELVAGYMVEYSSMSFALFFLGEYANMILMSAMTSVLFLGGWLPLFDIAPFNYIPGPIWLILKISLCLFVFLWVRATTPRYRYDQLMRLGWKVFLPFSLLWLVLTAGFLVYTGNAPVLY

SEQ ID NO: 100123 - protein, 122 aa, Unknown
  Bacterial polypetide isolated from the Sargasso Sea
MLSDFLKDYLPIIIFLVIALGLSCAFVVINFILSPKKPDPEKLSAYECGFEPFEDSRLEFDVRFYLVAILFIIFDLEIAFLFPWAISLGNIGLLGFSSMMIFLFILTIGFIYEWKKGALDWE

SEQ ID NO: 100124 - protein, 265 aa, Unknown
  Bacterial polypetide isolated from the Sargasso Sea
MIHSIVLLPLAGFIISCLLSFFKSDQTLDRISQVITSIFISVSAFLSFYLFVNNLSDPQVYKFTLFTWITSGELSVNWSLYIDAVTRVMLVVITSVSALVHIYSIGYMSHDDSKPRFMGYLSLFTFAMIMLVTADNFLQLFFGWEGVGLASYLLIGFWYKKPSANAAAIKAFIVNRVGDFGLALGIFTIYMVFGSIDYQVVFENAERFNETNFSFIGYEINAITLICFLLFIGAMGKSAQLFLHTWLPDAMEGPTPVSALIHAAT

SEQ ID NO: 100125 - protein, 232 aa, Unknown
  Bacterial polypetide isolated from the Sargasso Sea
MEISIIALPLIASILSGFFGKFIGDRNSEIITSLLVSISAVFSAIVFYEVIFNQYEENITIATWINSGSLEVNWSMKIDALSAVMLVVVTFISALVHIYSIGYMSHDPHKPRFMAYLSLFTFAMLMLVTADNFIQLFFGWEGVGLCSYFLIGFWFKKETANAAAIKAFVVNRVGDFGFALGIFLIFYLFGTVNYTEVFSQIPTIVDEKLNFLGIQIKAIDLICILLFIGAHG

SEQ ID NO: 100126 - protein, 323 aa, Unknown
  Bacterial polypetide isolated from the Sargasso Sea
YLWYIFDPNTAEFQFVENRLWLKGFINYKVGIDGISILFIILSTLIASLCIVSVNSTVNIKLKEFLVAILLMESLMIGVFCSLDLVIFYLFFEGGLIPMFLIIGIWGGPRRVYSAFKFFLFTLLGSVLMLVAIISIYWINGTTDITELYKLGIDAKYQNLLWLAFFSSFAVKTPMWPVHTWLPDAHVEAPTAGSVLLAAILLKMAGYGFIRFSIGLFPVASENFVPLIYALSLIAIIYTSFVALMQEDMKKLIAYSSVAHMGYVTLGIFTITQQGLEGSIIQMISHGLVSAALFLCVGVVYERMHSRLIKTYGGIVSIMPKYA

SEQ ID NO: 100127 - protein, 122 aa, Unknown
  Bacterial polypetide isolated from the Sargasso Sea
MLSDFLQNYLSIIIFLILALGLSCAFIVVNFILSPKRPDPEKLSAYECGFEPFEDSRMEFDVRFYLVAILFIIFDLEIAFLFPWAISLGNIGLLGFSSMMIFLFILTIGFIYEWKKGALDWE

SEQ ID NO: 100128 - protein, 265 aa, Unknown
  Bacterial polypetide isolated from the Sargasso Sea
LTSFIIPICVISCINSIKNRLKEFLIAILVLETFMIGVFCSLDLVIFYLFFEAGLIPMFLIIGIWGGPRRVYSAFKFFLFTLLGSVLMLIAIISIYWITGTTDVTEIYKIKIPAEFQNLLWLAFFSSFAVKMPMWPVHTWLPDAHVEAPTAGSVILAAILLKMAGYGFLRFSVGMFPIASEYFTPLVFTLSVIAIIYTSLVALMQDDMKKLIAYSSVAHMGYVTLGIFTFNKQGIEGGIIQMFSHGLISAALFLCVGVLYDRAHS

SEQ ID NO: 100129 - protein, 168 aa, Unknown
  Bacterial polypetide isolated from the Sargasso Sea
VVVTSVSALVHVYSIGYMSHDPHKPRFMAYLSLFTFAMLMLVTSDNFIQLFFGWEGVGLCSYFLIGFWFKKETANAAAIKAFVVNRVGDFGFALGIFLIFYLFGTVNYSEVFEQIPTITDRELVFLGIEVNAINLICILLFVGAMGKSAQILLHTWLPDAMEGPTPVS

SEQ ID NO: 100130 - protein, 300 aa, Unknown
  Bacterial polypetide isolated from the Sargasso Sea
SDVNSLFCSTIALVQNDIKKIIAYSTCSQLGYMFFAAGLGAYHVAIFHLFTHAFFKALLFLGAGCVIHSFHEEQDIRSMGGVWKKIPYTYALMIVGTLALTGFPFLSGYYSKDAIIEFAFLKGSSLGYLAATVGIFTAFLTAIYSWRLIFKTFHGRYNNKKNNLSTIHESSLTMLIPSCFLALGAIITGILLKNLFIGHDTQFWSGSILFLQSFHHDHLPNWLILLTPITVILAIPIGYYLFIQNEKILKNLILKYQFLYNFLLNKWYFDELYSFIFVRPVKKIGLFLWKKGDVNIIDRY

SEQ ID NO: 100131 - protein, 297 aa, Unknown
  Bacterial polypetide isolated from the Sargasso Sea
FTLVSALVHIYSIGYMSHDPHKPRFMSYLSLFTFAMLVLVTSDNFLQLFFGWEGVGLCSYFLIGFWFKKKAANAAAIKAFVVNRVGDFGFALGIFLIFYYFGTVSYDEVFNQIQTLNAKNINFLGFEFKSIDLICILLFIGAMGKSAQIFLHTWLPDAMEGPTPVSALIHAATMVTAGVFLVVRCSPIYEYSELALNIITVIGMSTAFFAATIALVQTDIKKIIAYSTCSQLGYMFFATGVGAYNVAMFHLFTHAFFKALLFLGAGSVIHSFKDEQNIEKMGGVYKKIPYTYALMLV

SEQ ID NO: 100132 - protein, 297 aa, Unknown
  Bacterial polypetide isolated from the Sargasso Sea
DRKWLVGFINYKVGIDGISILFVVLTTFITPLCIISVNNTIKSRLRDFLIAILIMESFMIGVFCALDLFVFYLFFEAGLIPMFLIIGIWGGPKRVYSAFKFFLYTLLGSVLMLVAIISIYWITGTTDVVELYELGIDTKYQNLLWLAFFSSFAVKTPMWPVHTWLPDAHVEAPTAGSVLLAAILLKMAGYGFIRFSLGLFPIASDFFTPLIYFLSVIAIIFTSLIALMQEDMKKLIAYSSVAHMGFVTLGVFTINQQGIEGSIIQMISHGLVSAALFLCVGVVYDRMHSRLINSYGG

SEQ ID NO: 100133 - protein, 123 aa, Unknown
  Bacterial polypetide isolated from the Sargasso Sea
MSPEIFLEDYFSIVLFLLIALILSCGFIFLNFMLSPSKPDPEKLSPYECGFEPFNDSRMEFDVRFYLVAILFIIFDLEIAFLFPWAISLGKIGIFGFVSMMIFLAILTIGFIYEWKKGALDWE

SEQ ID NO: 100134 - protein, 287 aa, Unknown
  Bacterial polypetide isolated from the Sargasso Sea
VAIIGMITAIFAASVALVQNDIKKIIAYSTCSQLGYMFFAAGVGAYHVAIFHLFTHAFFKALLFLGSGCVIHSFNEEQDIRFMGGVWKKIPYTYALMIVGTLALTGFPFLSGYYSKDAIIEFAYLKGSNVGYFAATVGIFTALLTAIYSWRLIFKTFHGKYNNKKNNLSSIHESPLIMLLPSCLLALGSIIIGISFKEMFIGSETQFWNNSILFLKAIQYIHPPLWLLIITPLLVVFTIPVSYYLFVINSKILTNFILKNNFLYNFLLNKWYFDELYNLIFVEPIKK

SEQ ID NO: 100135 - protein, 272 aa, Unknown
  Bacterial polypetide isolated from the Sargasso Sea
SFDQSTSSFQFVEDRTWIEGFIDYKVGVDGISILFIILTTFITPLCIISVNNSVKNRLRDFLIAILIMESFMIGVFCALDLVVFYLFFEAGLIPMFLIIGIWGGARRVYSAFKFFLYTLLGSVLMLVAIISIYWITGTTDVIQLYEIGIDVQHQNLLWLAFFSSFAVKTPMWPVHTWLPDAHVEAPTAGSVLLAAILLKMAGYGFIRFSLGLFPVASEVFTPLIYTLSVIAIIFTSLIALMQEDMKKLIAYSSVAHMGFVTLGIFTLQQQRN

SEQ ID NO: 100136 - protein, 269 aa, Unknown
  Bacterial polypetide isolated from the Sargasso Sea
MLSNIPILSSITFLPLFGALIILLTCSDDEQGRKNSKFVALWTSLITFILSLFILFNFDNDLNNFQFIEKASWIPLSNISYHMGVDGISLPFVILSTFLIPVCILASFQSIKKQVPLFMSLFLILEVLMVGTFCAMDILVFYIFFEAVLIPMFLIIGIWGGVRRVYSAFKFFLYTLLGSVLMLIAIFYIFSKTDTTEINEIAKFSFPYEVQILLFLAFFASFSVKLPMWPVHTWLPDAHVEAPTAGSVILAGVLLKMGGYGFLRFSIPV

SEQ ID NO: 100137 - protein, 232 aa, Unknown
  Bacterial polypetide isolated from the Sargasso Sea
ELALSIITIIGMSTAFFAASVALVQNDIKKIIAYSTCSQLGYMFFAAGVGAYNVAMFHLFTHAFFKALLFLGSGSVIHSFKDEQDINKMGGIWKKLPYTYTLMIIGTLALTGFPFLSGFYSKDAIIEFAFLRGNNLGYYASSIGIFTALLTSIYSWRLIFKTFHGTYNNSKIKIEVMHESPMIMLLPLIILAVGAIFAGFLFKDLFIGHEASYEFWSNSIKFLTPLSTEHPS

SEQ ID NO: 100138 - protein, 269 aa, Unknown
  Bacterial polypetide isolated from the Sargasso Sea
ADNFIQLFFGWEGVGLCSYLLIGFWFKKDSANKAAIKAFLVNRVGDFGFALGIFLIFYLFGTVNYSEVFNQITSITDKNLVFLGVTINAIDLICLLLFVGAMGKSAQIFLHTWLPDAMEGPTPVSALIHAATMVTAGVFLVVRCSPIYEYSELALNIVTIVGMSTAFFAASVALVQNDIKKIIAYSTCSQLGYMFFATGVGAYNVAMFHLFTHAFFKALLFLGSGSVIHAFKDEQNINNMGGVWKKLPYTYCLMIIGTLALTGFPFLSG

SEQ ID NO: 100139 - protein, 286 aa, Unknown
  Bacterial polypetide isolated from the Sargasso Sea
MSNDPHQPRFMSYLSLFTFAMIVLVTSDNFLQLFFGWEGVGLCSYFLIGFWFKKPPANAAAIKAFVVNRVGDFGFALGIFLVFYVFGTLNYEEVFNQVSLFTDKNLNFLGIELNAINLICFLLFIGAMGKSAQIFLHTWLPDAMEGPTPVSALIHAATMVTAGVFLIVRCSPIYEYSPIILNFITIIGMTTALFAATVALVQNDIKKIIAYSTCSQLGYMFFATGVGAYNIAMFHLFTHAFFKALLFLGSGSVIHAFNDEQDINKMGGIYKHLPYTYTLMIIGTLA

SEQ ID NO: 100140 - protein, 246 aa, Unknown
  Bacterial polypetide isolated from the Sargasso Sea
NGIVLADSITMIYIFWELVGLSSYLIIGFWFEKNSAAMASKKAFLVNRVGDIGMFIGIMMIYYVGDSHSFNLSDIIEKVKNTEIDSTYLTIAGILIFMGAVGKSAQLPLHIWLPDAMEGPTPASAMIHAATMVAAGVYMTLRVFPILTFEALTIIAFIGACTALFAAIIAITQNDIKKVLAYSTVSQLGYMVLAIGVGSYLAAFFHLVTHAMFKACLFLASGSVIHSMHHSLHELHDHDTDAQDMR

SEQ ID NO: 100141 - protein, 122 aa, Unknown
  Bacterial polypetide isolated from the Sargasso Sea
MTADFLKDYLPIILFLIIALGLSCAFVVINYILAPKNPDPEKLSAYECGFEPFQDSRMEFDVRFYLVAILFIIFDLEIAFLFPWAISLGNIGILGFTSMMIFLFILTIGFIYEWKKGALDWE

SEQ ID NO: 100142 - protein, 207 aa, Unknown
  Bacterial polypetide isolated from the Sargasso Sea
MEYTLVFLPLIGAILSGFFGRFIGERNSEIITSLLVSISAFLSFIIFKETILNNYENNLVIINWINSGFLDVNWSIKIDAVSSVMLVVVCLVSSLVHIYSIGYMSHDPHKTRFMAYLSLFTFSMLILVTSDNFLQLFFGWEGVGLCSYFLIGFWFKKDSANRAAIKAFLVNRVGDFGFALGIFLIFYLFGTVNYNEVFSRVPEFCKS

SEQ ID NO: 100143 - protein, 287 aa, Unknown
  Bacterial polypetide isolated from the Sargasso Sea
TPLCILSVNNTIKNRLRDFLIAILLMESFMIGVFCSLDLFVFYLFFEAGLIPMFLIIGIWGGPRRVYSAFKFFLYTLLGSVLMLVAIISIYWIAGTTDVTKLYDVGIDTKYQNLLWLAFFSSFAVKTPMWPVHTWLPDAHVEAPTAGSVLLAAILLKMAGYGFIRFSLGLFPSASEYFTPLIYILSIIAIIFTSLIALMQEDMKKLIAYSSVAHMGYVTLGIFTINQQGIEGSIIQMISHGLVSAALFLCVGVVYDRMHSRLINTYGGIVEIMPKYSILFMIFTLGA

SEQ ID NO: 100144 - protein, 266 aa, Unknown
  Bacterial polypetide isolated from the Sargasso Sea
MTLFVWYSFDRNISEFQFVEEKNWISGLIKFKVGIDGISILFVILTAFIAPICIISCINSIKERIKEFLIAILVLETFMLGVFCSLDLVIFYLFFEAGLIPMFIIIGVWGGSRKVYSAFKFFLYTLLGSVLMLVAIITIYWLTGTTDIVEIFKIKISEEYQYLLWLAFFSSFAVKMPMWPVHTWLPDAHVEAPTAGSVILAAILLKMGGYGFLRFSIGMFPVASEYFTPLIYFLSIIAIIYTSLVALMQEDMKKLIAYSSVAHMGF

SEQ ID NO: 100145 - protein, 261 aa, Unknown
  Bacterial polypetide isolated from the Sargasso Sea
MPDAHVEAPTAGSVILAGVLLKMAGYGFIRFSIGFFPEASEFFAPLIFTLSIVAIIVTSLIALVQEDMKKLIAYSSVAHMGFVTLGIFTFTVQGIEGSIIQMISHGIVSAALFLCVGVVYDRLHTREISRYGGLVNKMPLYAFTFMIFILASLGLPGTSGFVGEFLVLLSIFSINTYFAVFATTGVVLAATYSLWLYRRMIFGALIKDDLSDMLDLTRREIIIFVPLITLTIFIGIYPKPVIDIIEPSAKKIVNQVNGKLN

SEQ ID NO: 100146 - protein, 261 aa, Unknown
  Bacterial polypetide isolated from the Sargasso Sea
MIDWPIISATIFLPLIGSLIIFLIKEDETTSNNIKWAALWTSIGTFVLSCLIWFQFDHSTSQYQLVEKYKWFNDFNFYYHVGVDGISLFMILLSTFLTPFCILASWENIKKRIKEYMIAFLFLETVMIGMFCSIDILLFYVFFEAVLIPMFLIIGIWGGERRIYASFKFFLYTLLGSVLMLIAIIFIYQKTNSMNINFLQGNYFFSKKVQIYLWLAFFASFAVKIPMWPFHTWLPDAHVEAPTAGSVILAGVLLKMGGYGF

SEQ ID NO: 100147 - protein, 122 aa, Unknown
  Bacterial polypetide isolated from the Sargasso Sea
MLSDFLIDYLPIIIFLFIALGLSCAFVVINFILSPKKPDPEKLSAYECGFEPFEDSRLEFDVRFYLVAILFIIFDLEIAFLFPWAISLGNIGLLGFSSMMIFLFILTIGFIYEWKKGALDWE

SEQ ID NO: 100148 - protein, 253 aa, Unknown
  Bacterial polypetide isolated from the Sargasso Sea
MYLLLVFLPFFGFLLVTLFGRFFGYRGAPLLSTSTVLASAVLSFCALYEVGVCGSPCYIQFLPWFQTEMFVASWGFLFDSLTVIMCVVVTFVSSLVHIYSISYMGEDPHLPRFMSYLSVFTFFMLMLVTSDNFIQMFFGWEGVGVASYLLINFWFTRLQANKSAIKAMLVNRVGDFGLALGIMTIFYTFKSVDFETVFACASEFANHSIIFFHLEVHTLTCISLLLFIGAIGKSAQLGLHTWLPDAMEGPTPV

SEQ ID NO: 100149 - protein, 69 aa, Unknown
  Bacterial polypetide isolated from the Sargasso Sea
DDARGRFDVRFYLVAILFIIFDLEVAFLFPWAISLGSIGLFGFWSMIIFLLILTIGFIYEWKKGALEWE

SEQ ID NO: 100150 - protein, 256 aa, Unknown
  Bacterial polypetide isolated from the Sargasso Sea
AATMVTAGVFLIVRCSPIYEYSPLVLTVITIIGMTTAFFAATVALVQNDIKKIIAYSTCSQLGYMFFAAGVGAYNVAMFHLFTHAFFKALLFLGAGAVIHSFHEEQNINKMGGVIKKLPYTYVLMLIGTLALTGFPFLSGFYSKDAIIEFAYLRGNGVGIVAAFVGIVTALLTSIYSWRLIFKTFHGNFNNKELSVDKIHESPLVMIAPLVILAVGAIFAGMAFKGLFIGHEIAYEFWGKSIKFLEPLSTDHPPTM

SEQ ID NO: 100151 - protein, 200 aa, Unknown
  Bacterial polypetide isolated from the Sargasso Sea
MEISIIALPLIASIISGFFGKFIGDRNSEIVTSLLVSISAIFSCIVFYEVVQNQYEDNIIIATWINSGSLDVNWSMKIDPLSAVMLVVVTSVSALVHIYSIGYMSHDPHKPRFMAYLSLFTFAMLMLVTSDNFIQLFFGWEGVGLCSYFLIGFWFKKDTANAAAIKAFVVNRVGDFGFALGIFLIFYLFGTVNYSEVFEQ

SEQ ID NO: 100152 - protein, 142 aa, Unknown
  Bacterial polypetide isolated from the Sargasso Sea
IFPMFVIFFISTLAETNRAPFDLPEAESELVAGYNVEYSSMSFGLFFLGEYGNMILMSSMSTILFLGGWLPPFDWYLFEYIPGFIWFISKVVLLLFVFLWVRATLPRYRYDQLMTLGWKLFLPLSLLWIIITSSFLIIKDYV

SEQ ID NO: 100153 - protein, 158 aa, Unknown
  Bacterial polypetide isolated from the Sargasso Sea
MEYLILFLPLIGAVISGFFGKKIGDRNSQLLTSLFVSLSTILSFVVLYKVISSDYTNNLVIATWINSGTLNVNWSIKIDALSAVMFVVVNFVSALVHIYSIGYMSHDPHKTRFMAYLSLFTFAMLTLVSSDNFIQLFFGWEGVGLCSYFLIGFWFKKE

SEQ ID NO: 100154 - protein, 122 aa, Unknown
  Bacterial polypetide isolated from the Sargasso Sea
MIYNFLSDYLSIIIFLFIALFLSIGFIVINFLSSPSNPDPEKLSAYECGFDPFDDSRMEFDVRFYLVAILFIIFDLEIAFLFPWAISLGAIGYLGFWSMMIFLGVLTIGFIYEWKKGALEWE

SEQ ID NO: 100155 - protein, 278 aa, Unknown
  Bacterial polypetide isolated from the Sargasso Sea
KNVAIFSSLANFLLSFFLWYSFDTNISDFQFVEEKNWINNFINFKLGVDGISILFILLTTFIAPICIFSGIHSIKFKIKEFLISILLMETLMLGVFCSLDLVIFYLFFEGGLIPMFLIIGIWGGPKRVYSAFKFFLFTLLGSVLMLVAIISIFWITGTTDVTKLLDIRIPVEYQYILWLAFFSSFAVKMPMWPFHTWLPDAHVEAPTAGSVILAAILLKMAGYGFIRFSIGLFPVASDYFTPLIYSLSVIAIIYTSLVALMQENMKKLIAYSSVAHMG

SEQ ID NO: 100156 - protein, 211 aa, Unknown
  Bacterial polypetide isolated from the Sargasso Sea
MEISIIALPLIASIISGFFGKFIGDRNSEIVTSLLVSISAIFSAIVLYNVIQNQYEDNIVIATWINSGSLDVNWSMKIDSLSAVMLVVVTSISALVHIYSIGYMSHDPHKPRFMAYLSLFTFAMLMLVTSDNFIQLFFGWEGVGLCSYFLIGFWFKKDTANKAAIKAFVVNRVGDFGFALGIFLIFYLFGTVNYSEVFQEIPTIIDKNLIF

SEQ ID NO: 100157 - protein, 248 aa, Unknown
  Bacterial polypetide isolated from the Sargasso Sea
FFNWGIAVNSLTLIMLTLVLTVSALVHIYSIEYMAHDKSKTRFMTYLSLFTFCMVALVVSDNLIQLFFGWEGVGLASYLLIGFWHHKKSANLAAMKAFLVNRVADFGFLIGIATLYIFLDTLSINEIVQNREYLPLFQINFFGFSIDTLTFACFFLFIGAMGKSAQFGFHTWLPDAMEGPTPVSALIHAATMVTAGVFLTVRFSELMVMSDFVMTFILIIGLLTAFFAASVGFFQKDIKKVIAYSTCS

SEQ ID NO: 100158 - protein, 298 aa, Unknown
  Bacterial polypetide isolated from the Sargasso Sea
MGEIKGNLLTLAGLGLFMGAVGKSSQFPLHIWLPDAMEGPTPVSALMHAATMVAAGVYLTVRLFPIFTPDALVTIAYVGGFTAIFAATIAITQNDIKKVLAYSTVSQLGYMILAVGVGNYTAAFFHLLTHAMFKACLFYGSGSVIHAMHHSLHDLHDHDTDPQDMRNMGGFHKKMPITSTTMTLATLAIAGVPFFSGFLSKDAILAGTLYFVDQNPQHTILAFFGFGAAAITAFYMFRLIFLTFHGEPKMPKVYDGIHESPPLMTAPLVILAALSTYIFYTLPINLIPWKDYGWFTKL

SEQ ID NO: 100159 - protein, 122 aa, Unknown
  Bacterial polypetide isolated from the Sargasso Sea
MIYNFLSEYLSIILFLFIALILSIGFILANFLASPSNPDPEKLSAYECGFEAFGDSRMEFDVRFYLVAILFIIFDLEIAFLFPWAVSLGNIGALGFWSMMIFLAILTIGFIYEWKKGALEWE

SEQ ID NO: 100160 - protein, 298 aa, Unknown
  Bacterial polypetide isolated from the Sargasso Sea
INIQKRVKEYMLSFLFLETVMIGMFASIDILLFYIFFEAVLIPMYLIIGIWGGDRRIYASFKFFLYTLLGSVLMLIAIIVMYINTNSMSIEFLQGNFFSFNTQIFLWLAFFASFAVKIPMWPFHTWLPDAHVEAPTAGSVILAGVLLKMGGYGFIRFSVGMLPEATEFFVPLIMTLSIVGIIYTSLVALAQTDIKKLIAYSSIAHMGIVTIGIFLVNQQGLEGAMMQMISHGIVSAALFLCVGVIYDRMHTREIKFYGGLVQRMPLYATVFMIFMLGSVGLPGTSGFVGEFLVIVGAF

SEQ ID NO: 100161 - protein, 263 aa, Unknown
  Bacterial polypetide isolated from the Sargasso Sea
LIAILILETFMIGVFCSLDLVIFYLFFEAGLIPMFLIIGIWGGSRRIYSAFKFFLFTLLGSVLMLVAIISIYWITGTTDVIQIYQIKIPTEYQYLLWLAFFSSFAVKLPMWPVHTWLPDAHVEAPTAGSVILAAILLKMGGYGFLRFSVGMFPVASEFFVPLIFTLSIVAIIYTSLIALMQEDMKKLVAYSSVAHMGFVTLGIFTFNKQGIEGSILQMFSHGLISAALFLSVGVLYDRFNSRLISSYGGIVNILPKYSFILMV

SEQ ID NO: 100162 - protein, 303 aa, Unknown
  Bacterial polypetide isolated from the Sargasso Sea
LLFYVFFEAVLIPMFLIIGIWGGERRIYASFKFFLYTLLGSVLMLIAIIFIYQKTNSMNINFLQGNYFFSKKVQIYLWLAFFASFAVKIPMWPFHTWLPDAHVEAPTAGSVILAGVLLKMGGYGFIRFSLGILPEASAFFVPLIIILSSIAIIYTSLVALAQEDIKKLIAYSSVAHMGLVTIGIFIVNQQGLEGAMIQMISHGIVSAALFLCVGIIYDRMHTRNINFYGGLVNKMPKYSVVFMLFVLASIGLPGTSGFIGEFLVILGAFQKNSFIALFAALGIILGAIYMLYLYKKIIFGTLE

SEQ ID NO: 100163 - protein, 289 aa, Unknown
  Bacterial polypetide isolated from the Sargasso Sea
PPADAIVHVEHHGDGHGDGHGDGHGDGHGDGHGDGHGDGHGDGHGDDHGDKHEAAGGHYDDGHGGGHSSPLIRPVISTFSQWWSNSGMDFAVGTLVDGQTVLLLMVVATISLLVHIYSTEYVKGDRRYVHYYAFLSLFTAAMLFFVMAQNIIQLIVGWELVGVCSFALIGHWWEEKPNTDAALKAFLTNRVGDVGLLVGMIVLWGTFKTFDIDAINTLISADPGAHHFALLIAACCLMAAVASKSGQFPLHTWLPDAMAGPTPVSALIHAATMVVAGVYMIARLYPVFY

SEQ ID NO: 100164 - protein, 273 aa, Unknown
  Bacterial polypetide isolated from the Sargasso Sea
SNFLLSLYLPINFDKSIPHFQFVNTFSWFNSDSLRFSLGVDGLSMPFVILSTFLILACIIFILPQSKKNMKMYLSSFLLLESFLIGTFSAIDLFSFYIFFESILIPMYLIIGFWGGERRIYSAYKFFLYTLLGSVLMLIAIIFLYQEFGTISIPKLLDFTLPFYIQVWLWIAFFTSFAVKIPMWPFHTWLPDAHVEAPTEGSVILAGVLLKLGGYGFIRFNLSILPDASIFFTPFIYFLSVVAIIYTSYIALVQEDMKKLIAYSSVAHMGFVT

SEQ ID NO: 100165 - protein, 268 aa, Unknown
  Bacterial polypetide isolated from the Sargasso Sea
PSAANKGIFLLAPILTFTVALAAWAVVPFSATAVLADINIGLLYLLAISSLSVYGVVMSGWASNSKYPFFSAMRAAAQMISYEVSIGFILVCVVLFAGTFNLNDIVRSQQGFGLGIVNAYVIHPLLFPMWVMFFISSLAETQRVPFDLTEAESELVAGYQTEYSSMSFALFWLGEYANILLMCILNALLFWGGWLPPIDWAPLYYVPGIVWLLLKTFFFFFMFSWVMATVPRYRYDQLMRLGWKVFLPISLGFVVVISGYLMATGHFG

SEQ ID NO: 100166 - protein, 298 aa, Unknown
  Bacterial polypetide isolated from the Sargasso Sea
LIHAATMVTAGVFLVVRCSPMFEYSQTALNVVALVGMMTAFFAATVALVQNDIKKIVAYSTCSQLGYMFFAAGIGAYHVAIFHLFTHAFFKALLFLGSGCVIHSFNEEQDIRSMGGVWKKIPYTYALMVVGTLALTGFPFLSGYYSKDAIIEFAYLRGTNIGYLAAVVGIFTALLTAIYSWRLVFKTFHGKFNNKDSNLSSIHESPLTMLIPSCLLAIGAILTGIVFKEMFIGHDSTQFWNTSILFLESIKYHHPPIWLLVLTPTLVVIIIPVVYYLFIENDKILKKLCFQKINFYII

SEQ ID NO: 100167 - protein, 246 aa, Unknown
  Bacterial polypetide isolated from the Sargasso Sea
MDFPIISSLIILPTIGAVFILFGRSSSNYIAAKNISLFVSLANFILSLYLWYIFDKNINQFQFVEDRIWLEGFINYKVGIDGISILFIILTTFITPLCIVSVNSTIKNRLKDFLVAILFMETMMIGVFCSLDLVIFYLFFEAGLIPMFLIIGIWGGERRVYSAFKFFLYTLLGSVLMLVAIITIYWITGTTDVIELYKIGIDTKYQNLLWLAFFSSFAVKTPMWPVHTWLPDAHVEAPTAGSVLLA

SEQ ID NO: 100168 - protein, 265 aa, Unknown
  Bacterial polypetide isolated from the Sargasso Sea
MEYAILFLPLVGSILTGFFSKYLDEKISLFLSCALVLTSAILSIFIFYQVISFNYENNLLIFNWIDSGALNVNWSIKIDALSSVMLVVVCVVSSLVHIYSIGYMSHDPHKPRFMSYLSLFTFSMLVLVTSDNFIQLFFGWEGVGLCSYFLIGFWYEKKSANAAAMKAFLVNRVGDFGLALGIFLIFYLFGTVNYNDVFLNIPNFQNSEISLVGLQLNSITLISILLFVGAMGKSAQFLLHTWLPDAMERPTPVSALIHAATMGTA

SEQ ID NO: 100169 - protein, 122 aa, Unknown
  Bacterial polypetide isolated from the Sargasso Sea
MLSDFLKDYLPIVIFLIIALGLSCAFVVINFILSPKKPDPEKLSAYECGFEPFEDSRLEFDVRFYLVAILFIIFDLEIAFLFPWAISLGNIGLLGFSSMMIFLFILTIGFIYEWKKGALDWE

SEQ ID NO: 100170 - protein, 153 aa, Unknown
  Bacterial polypetide isolated from the Sargasso Sea
AQKDLWYFIPLAPMFIIYFISALAETNRTPFDLPEAEGELVAGYQVEYSSLAFTLFMLGEYANIVLMSGLCVILFFGGWLTPFDVEPFTWIPGVVWFLLKTALIIFLFTWTKATFPRYRYDQLMRLGWKVFLPISLAWVVITAGALHLFGWMP

SEQ ID NO: 100171 - protein, 285 aa, Unknown
  Bacterial polypetide isolated from the Sargasso Sea
YFSSIINICFWNGITNNIYGNYIIFEWISSGNFKANWSINIDPLSSVMLVVVTFVSALVHIYSVGYMSHDPHKPRFMSYLSLFTFSMLTLVVSDNFLQLFFGWEGVGLCSYLLIGFWYKKESANNAAIKAFIVNRIGDFGLAIAIFLIFFFFGTINFEEAFQASSQFTEKKIVFFGFESSLITLICVFLFIGAMGKSAQFLLHTWLPDAMEGPTPVSALIHAATMVTAGVFLVVRCSPIFEYSQFGLNLVTIVGMVTAIFAASVALVQNDIKKIVAYSTCSQLGY

SEQ ID NO: 100172 - protein, 246 aa, Unknown
  Bacterial polypetide isolated from the Sargasso Sea
TFILSLILWLQFDYLNPSYQFQEKFRWFDDFNFFYHIGIDGVSLFMILLSTFLTPLCILASWSNIQKRVKEYMLSFLFLETVMIGMFASIDILLFYIFFEAVLIPMYLIIGIWGGARRIYASFKFFLYTLLGSVLMLIAIIVMYINTNSMSIESLQGNFFSFNTQIFLWLAFFASFAVKIPMWPFHTWLPDAHVEAPTAGSVILAGVLLKMGGYGFIRFSVGMLPEATEFFVPLIMMLSIIAIIYT

SEQ ID NO: 100173 - protein, 122 aa, Unknown
  Bacterial polypetide isolated from the Sargasso Sea
MIYNFLSDYLSIIIFLFIALFLSIGFIVANFLASPSNPDPEKLSAYECGFEAFDDSRMEFDVRFYLVAILFIIFDLEIAFLFPWAISLGSLGALGFWSMMIFLAILTIGFIYEWKKGALEWE

SEQ ID NO: 100174 - protein, 122 aa, Unknown
  Bacterial polypetide isolated from the Sargasso Sea
MLADLLKDYLPIILFLIIAIILSCAFIVLNYLASPKNPDPEKLSAYECGFEPFNDSRMEFDVRFYLVAILFIIFDLEIAFLFPWAISLGQIGFFGFISMMIFLFILTIGFIYEWKKGALDWE

SEQ ID NO: 100175 - protein, 299 aa, Unknown
  Bacterial polypetide isolated from the Sargasso Sea
VIFYLFFEAGLIPMFLIIGIWGGERRVYSAFKFFLYTLLGSVLMLVAIISIYWIAGTTDVIELYQLGIDAKYQNLLWLAFFSSFAVKTPMWPVHTWLPDAHVEAPTAGSVLLAAILLKMAGYGFIRFSIGLFPIASEYFVPLIFVLSLIAIIYTSFVALVQEDMKKLIAYSSVAHMGFVTMGIFTMTPQGIEGSIFQMISHGIISAALFLCVGVVYERMHTREISKYGGVVSVMPRYAVVFMIFTLGALGLPGTTGFIGEFLILLGTFKVNFIVATIASLGVILGAAYMLWLYKRIVFW

SEQ ID NO: 100176 - protein, 290 aa, Unknown
  Bacterial polypetide isolated from the Sargasso Sea
ALSSVMLVVVTLVSSIVHIYSIGYMSHDPHKQRFMAYLSLFTFSMLMLVTSDNFLQLFFGWEGVGLCSYFLIGFWFKKESANAAAIKAFVVNRVGDFGFALGIFLIFYLFGTVNYSEVFELIPKSLDINLTFLGLSFNAINLVCILLFIGAMGKSAQIFLHTWLPDAMEGPTPVSALIHAATMVTAGVFLVVRCSPIYEYSPLALNIITIVGMSTAFFAATVALAQDDIKKIIAYSTCSQLGYMFFAAGVGAYNVAMFHLFTHAFFKALLFLGSGSVIHSFKDEQNINLM

SEQ ID NO: 100177 - protein, 58 aa, Unknown
  Bacterial polypetide isolated from the Sargasso Sea
YLVAILFIIFDLEIAFLFLWAISLGKIGMFGFVSMMIFLSILTIGFIYEWKKGALDWE

SEQ ID NO: 100178 - protein, 295 aa, Unknown
  Bacterial polypetide isolated from the Sargasso Sea
MEIILLFLPLLASIISGFFGRYIGDRVSEIVTSLFVSISAILSIIIFYKVISVNYVNNIIIAEWINSGSLSVNWSIQIDTLSSVMLVVVTLISALVHIYSIGYMSHDSHKPRFMSYLSLFTFSMLVLVTSDNFLQLFFGWEGVGLCSYFLIGFWFKKEAANAAAIKAFLVNRVGDFGLALGIFLIFYLFGTVNYIDVFQQTPQLLNHEILFLGIRINSIDLICILLFIGAMGKSAQIFLHTWLPDAMEGPTPVSALIHAATMVTAGVFLVVRCSPIFEYSQLTLNLIIIVGTSTA

SEQ ID NO: 100179 - protein, 256 aa, Unknown
  Bacterial polypetide isolated from the Sargasso Sea
GLCNKAAIKAFIVNRVCDFGFAIGIFLIFMFFGTVNYYEVFQLVPQFAEKEINFLGLNINLITIICLFLFIGAMGKSAQFLLHTWLPDAMEGPTPVSALIHAATMVTAGVFLIVRCSPIFEFSQTALGFVAIIGMLTAFFAASVAIVQNDIKRIIAYSTCSQLGYMFFAAGVGAYHVAIFHLFTHAFFKALLFLGSGSVIHSLNEEQDIRKMGGIWKQMPFTWIAMIVGTLALTGFPLLSGYYSKDAIIEFAYLRG

SEQ ID NO: 100180 - protein, 229 aa, Unknown
  Bacterial polypetide isolated from the Sargasso Sea
GAYHVAMFHLFTHAFFKALLFLGSGSVIHAFNDEQDIRYMGGVRKKLPYTYTLMLIGTLALTGFPFLSGFYSKDAIIEFAYLSKSIFGNYVVIVGVFTAFLTSLYSWRLFFKTFHGSYNNNKVLIEDTHESPLIMLLPLIFLGIGAVITGFIFKETFIGHHSNEFWRSSIFFLDQIKHEPVPLWLLFLTPTLVVIAIPVSFYYFISNPKILDNFKNSNSTLYNFLVNKW

SEQ ID NO: 100181 - protein, 266 aa, Unknown
  Bacterial polypetide isolated from the Sargasso Sea
LIAVLIMESFMIGVFCSLDLVVFYLFFEAGLIPMFLIIGIWGGSRRVYSAFKFFLFTLLGSVLMLVAIISIYWITGTTDVIKLYELGIDSKYQNLLWLAFFSSFAVKTPMWPVHTWLPDAHVEAPTAGSVLLAAILLKMAGYGFIRFSLGLFPLASEIFTPLIYFLSVIAIIFTSLIALMQEDMKKLIAYSSVAHMGFVTLGIFTIQQQGLEGSIIQMISHGLVSAALFLCVGVVYDRMHSRLIDTYGGIVTIVPKYSILFMIFTL

SEQ ID NO: 100182 - protein, 122 aa, Unknown
  Bacterial polypetide isolated from the Sargasso Sea
MLTNFLQDYLSIIIFLVIALGLSCAFVVVNFILSPKKPDPEKLSAYECGFEPFEDSRMEFDVRFYLVAILFIIFDLEIAFLFPWAISLGNIGLLGFSSMMSFLFILTIGFIYEWKKGALDWE

SEQ ID NO: 100183 - protein, 245 aa, Unknown
  Bacterial polypetide isolated from the Sargasso Sea
YHAAMFHLFTHAFFKALLFLCAGSIIHAMHHEQDLRNYGGLRKKLPLTFLTMLVGTLAITGVGIPLSYDFFHFSIGFSGFISKDAVIEGTYASQSSSGLFAFWALVLSALFTSFYSWRLIFLTFFGNFRGKADYFDNAHEPEKTMLVPLLLLSIGSIFAGMVFYSSFIGSGTKEFFNSALFTNSTNNVLYDYHYVPTWVKLLPFIAMLMGFWLAFNFYIAKLNLGTKLSNQHFGLYKFLYNTMVL

SEQ ID NO: 100184 - protein, 122 aa, Unknown
  Bacterial polypetide isolated from the Sargasso Sea
MIYNYLSDYLSIIIFLFIALFLSIGFIIANFLASPSNPDPEKLSAYECGFEAFDDSRMEFDVRFYLVAILFIIFDLEIAFLFPWAISLGNLGALGFWSMMIFLGILTIGFIYEWKKGALEWE

SEQ ID NO: 100185 - protein, 191 aa, Unknown
  Bacterial polypetide isolated from the Sargasso Sea
MEGPTPVSALIHAATLVIAGVVLMIRCSIFFDNSESVLTIVSIVGACTAFFAASVGLFQNDLKRVIAYSTCSQLGYMVFIVGLSHYSVSLFHVANHAVFKALLFMSAGCVIHGLSDEQDLRKMGGLLHIFPVSSVMIFIGSSALIGIPFLTGFYSKDCILELAIAKYNYVGNFCYFLGCSAAFCTAFYSFR

SEQ ID NO: 100186 - protein, 122 aa, Unknown
  Bacterial polypetide isolated from the Sargasso Sea
MIYNFLTDYLSIVIFLFIALFLSIGFIVANYLASPSNPDPEKLSAYECGFEAFDDSRMEFDVRFYLVAILFIIFDLEIAFLFPWAISLGSLGALGFWSMMIFLAILTIGFIYEWKKGALEWE

SEQ ID NO: 100187 - protein, 254 aa, Unknown
  Bacterial polypetide isolated from the Sargasso Sea
PKTVEKNSCYVAIFATIANFFLSLLLWYLFDSSTSDFQFVEEKNWINGFINFKIGIDGISILFILLTTFIAPICIFSGIGSIKFKIKEFLIAILIMETLMIGVFCSLDLVIFYLFFEGGLIPMFLIIGIWGGSRRVYSAFKFFLFTLLGSVLMLIAIIAIYWITGTTDVVVLLDEIKIAKEYQYLLWLAFFSSFAVKLPMWPVHTWLPDAHVEAPTAGSVILAAILLKMAGYGFIRFSLGLFPLASDYFTPLVF

SEQ ID NO: 100188 - protein, 300 aa, Unknown
  Bacterial polypetide isolated from the Sargasso Sea
MEYLILFLPLLASIISGFFGKLIGDRMSQIITSLFVSISALLSLVVFYKVATVGYENNLIITTWINSGSLNVNWSINIDALSSVMLVVVTVISSLVHIYSVGYMSRDPHKARFMSYLSLFTFAMLTLVTSDNFIQLFFGWEGVGLCSYFLIGFWYKKPSANAAAIKAFLVNRVGDFGFALGIFLIFYIFGTVNYNEVFQKIPEIIDRELVFLGININAVDLICLLLFIGAMGKSAQIFLHTWLPDAMEGPTPVSALIHAATMVTAGVFLVVRCSPIYEYSELVLSIITIVGIITAFFAAS

SEQ ID NO: 100189 - protein, 304 aa, Unknown
  Bacterial polypetide isolated from the Sargasso Sea
FLLFIGAMGKSAQIFLHTWLPDAMEGPTPVSALIHAATMVTAGVFLVVRCSPIFEYSTTALNFIAIVGMLTAFFAATVALTQNDIKKIIAYSTCSQLGYMFFAVGIGAYHVAIFHLFTHAFFKALLFLGSGSVIHSFHDEQDIRLMGGVWKKLPYTWILMLIGTLALTGVPFLSGYFSKDAIIEFAYLKHNKIGYFACFVGIFTAILTSIYSWRLIFKTFHGKYNNPNLKISSMHECSNVMLIPLIILGLGSIFVGYAFKDLLIGNDSINFWNTSIFFLNLTVHDHPPIWLLVLTPALVIITIP

SEQ ID NO: 100190 - protein, 227 aa, Unknown
  Bacterial polypetide isolated from the Sargasso Sea
VQNDIKKIIAYSTCSQLGYMFFAAGVGAYNVAMFHLFTHAFFKALLFLGSGSVIHSFKDEQDISYMGGVWKKLPYTWVLMIIGTLALTGFPFLSGFYSKDAIIEFAYLRGNSFGYSAAAVGIFTALLTSIYSWRLLFKTFHGTFNNQKIKIESIHESPMVMIIPLIILAIGAIFSGFLFKDLFIGTDSSSIFWKGSILFLEPLSQDHPPLWFLLLTPLLVTSSIPIV

SEQ ID NO: 100191 - protein, 56 aa, Unknown
  Bacterial polypetide isolated from the Sargasso Sea
VAILFIIFDLEVAFLFPWAASLGKIGIYGFWSMMFFLLILTIGFIYEWKKGALEWE

SEQ ID NO: 100192 - protein, 297 aa, Unknown
  Bacterial polypetide isolated from the Sargasso Sea
ANAAAIKAFIINRIGDFGFALGIFLIFYIFGTVNYEGVFNQVSLYKDNNLNFLGLQLNVINLICFLLFVGAMGKSAQIFLHTWLPDAMEGPTPVSALIHAATMVTAGVFLVVRCSPIYEYSPIILNFITVIGMTTALFAATVALVQNDIKKIIAYSTCSQLGYMFFATGVGAYNVAMFHLFTHAFFKALLFLGAGSVIHSFNDEQNINKMGGIYKHLPYTYVLMMIGTLALTGFPFLSGFYSKDLIIEFSYLKGNTVGYFACTIGIFTALLTSIYSWRLIFKTFHGEYNNKNQSIAE

SEQ ID NO: 100193 - protein, 255 aa, Unknown
  Bacterial polypetide isolated from the Sargasso Sea
MLSGVLLFIGAMGKSAQFPLHVWLPDAMAGPTPVSALMHAATMVTAGVYLLARMFPFYQGIANGALDIVMLFGVITLLTAGLIAIVQDDLKKVLAYSTVSQLGYMVAAIGSGAYTAALFHLWTHAFFKALLFLGAGSVIHAVHSNSMLEMGGLRKVMPKTFSTFIIGTVALAGLPPFAGFFSKDEILASFNHEGETTFFYIAVLGAFITAFYMTRAVCLTFLGEYRGHGHPHESDSMMTTPLVVLAVFAAASGWV

SEQ ID NO: 100194 - protein, 288 aa, Unknown
  Bacterial polypetide isolated from the Sargasso Sea
SAQFGLHTWLPDAMEGPTPVSALIHAATMVTAGVFLLILMSPLIEVSEFASKLILIVGSLTCIFAASVAIFQNDIKKIIAYSTCSQLGYMFMAVGASAYSLAYFHLISHAFFKALLFLGAGSVIHSMSDEQNIKNMGGLYNKIPLTYLTMIIGSLSLIGIPFFSGYFSKDLILETLFLRDSELSSYAFFAGLLAVLFTTLYSLRLIIYVFHRKSVADEKVIAHIHESPFIMTFPLIVLSIFAIFFGMFSNSYFIGSDYLSVWSEIIFVDKSFNENFIYENMPIFYKKL

SEQ ID NO: 100195 - protein, 122 aa, Unknown
  Bacterial polypetide isolated from the Sargasso Sea
MLSDLLKDYLPIIIFLVIALGLSFAFVVINFILSPKKPNPEKLSAYECGFEPFQDSRMEFDVRFYLVAILFIIFDLEIAFLFPWAISLGNIGLLGFSSMMIFLFILTIGFIYEWKKGALDWE

SEQ ID NO: 100196 - protein, 102 aa, Unknown
  Bacterial polypetide isolated from the Sargasso Sea
AISCLLFLANFLVAVNNPDPEKNSAYECGFEQFGDSRMKFDVRFYLVTLLFIIFDLEVAFLFPWAVTFGTLGLFGFVSMMVFLAILTIGFIYEWKKGALEWQ

SEQ ID NO: 100197 - protein, 122 aa, Unknown
  Bacterial polypetide isolated from the Sargasso Sea
MSAELLKDYFPIILFLIIALGLSCAFVVINFILSPKHPDPEKLSAYECGFEPFEDSRMEFDVRFYLVAILFIIFDLEIAFLFPWAISLGNIGILGFTSMMIFLFILTIGFIYEWKKGALDWE

SEQ ID NO: 100198 - protein, 297 aa, Unknown
  Bacterial polypetide isolated from the Sargasso Sea
IFILIGYMKDDPDKSRFMSYLSLFTFAMIVLVVSDNFLQLYFGWEGVGLCSYLLIGFWYKKDSANKAAIKAFVVNRVGDFGFAIGIFLIFMFFGTLNYSEVFQLVPVLSNKEINFLGINSNIITLICLFLFVGAMGKSAQFFLHTWLPDAMEGPTPVSALIHAATMVTAGVFLVVRCSPIFEYSQFALNLVAIIGMLTAFFAASVAIVQNDIKKIIAYSTCSQLGYMFFAAGVGAYHVAIFHLFTHSFFKALLFLGSGSVIHSLKDEQDIRKMGGIWRKMPFTWIAMIIGTLALTGF

SEQ ID NO: 100199 - protein, 308 aa, Unknown
  Bacterial polypetide isolated from the Sargasso Sea
HNGTAGVFLVVRCSPIFEYSQLALNIVTIVGITTAFYAATVALVQNDIKKIIAYSTCSQLGYMFFAAGVGAYNVAMFHLFTHAFFKALLFLGSGSVIHSFSSEQNINNMGGVWKKLPYTWALMIIGTLALTGFPLLSGFYSKDAIIEFAYLKGTNLGYLAATFGILTAFLTAVYSWRLIFKTFHGKFNNSKLKIDSVHESPLVMLLPLIVLSFGAIFSGILFKNLFINQEINFWKESIMFLIPLSTNHPPQWIILITPIIVTISIPISYYLFIKNNNICNWLANENKPIYKFLVNKWYFDEFYDYIFV

SEQ ID NO: 100200 - protein, 300 aa, Unknown
  Bacterial polypetide isolated from the Sargasso Sea
LSLYLWYVFDKNSVDFQFVENREWLSGFINYKVGIDGISILFIILTTFITPICIISVNATITNRLKDFLIAILIMETFMIGVFCSLDLVVFYLFFEAGLIPMFLIIGIWGGERRVYSAFKFFLYTLLGSVLMLVAIIAIYWITGTTDVEKLYELGIQVEYQNLLWLAFFSSFAVKTPMWPVHTWLPDAHVEAPTAGSVLLAAILLKMAGYGFIRFSLGLFPIASENFTMLVYILSLIAIIYTSLVALMQEDMKKLIAYSSVAHMGFVTLGIFTMTQQGIEGSIFQMISHGLVSAALFLSV

SEQ ID NO: 100201 - protein, 264 aa, Unknown
  Bacterial polypetide isolated from the Sargasso Sea
MAGIGLFMGAMGKSSQFPLHIWLPDAMEGPTPVSALMHAATMVAAGVYLSIRIFPLLTVDALLVVAYIGGFTAFFAATIAVTQNDIKKVLAYSTVSQLGYMILAVGTGVYTAAFFHLLTHAMFKANLFYGSGSVIHSMHHGLHEINDHGTDAQDMRNMGALKDKMPITYWSMLISTFSIAGVPFFSGFLSKDAILAGTLSFATSNPKHLMLAVFGFGAAAITAFYMFRMIFMTFHGKEKISGLKKHIHESPKEMTGPNCITGPT

SEQ ID NO: 100202 - protein, 323 aa, Unknown
  Bacterial polypetide isolated from the Sargasso Sea
KERNKGAIYVSIFTSFVNFFLVLFLWYSFDKSIYEFQFIEEFFWISGFIKFKFGIDGISILFILLTAFITPVAIISCINSVKARLKEFLIAILVLETFMIGVFCSLDLVIFYLFFEAGLIPMFLIIGIWGGPKKVYSAFKFFLFTLLGSVLMLIAVIAIYWITGTTDVNEIYQTKIPVEYQNLLWLAFFSSFAVKLPMWPVHTWLPDAHVEAPTAGSVILAAILLKMGGYGFLRFSVGMFPVASEYFTPLIFALSVVAIIYTSLVALMQEDMKKLIAYSSIAHMGFVTLGIFTFNKQGVEGSILQMISHGLISAALFLSVGVL

SEQ ID NO: 100203 - protein, 160 aa, Unknown
  Bacterial polypetide isolated from the Sargasso Sea
MELSIIFLPLIASIISGFFGKYIGDRNSEIVTSALVSISALLSIFVLYQVIVNQYEENIVIATWINSGSLDVNWSMLIDPLSAVMLVVVTSVSSLVHIYSIGYMSHDPHKPRFMAYLSLFTFAMLMLVTSDNFVQLFFGWEGVGLCSYFLIGFWFKKESA

SEQ ID NO: 100204 - protein, 318 aa, Unknown
  Bacterial polypetide isolated from the Sargasso Sea
MIDWPIISATIFLPLIGSLIIFLIKEDETTSNNIKWAALWTSIGTFVLSCLIWFQFDHSTSQYQLVEKYKWFNDFNFYYHVGVDGISLFMILLSTFLTPFCILASWENIKKRIKEYMIAFLFLETVMIGMFCSIDILLFYVFFEAVLIPMFLIIGIWGGERRIYASFKFFLYTLLGSVLMLIAIIFIYQKTNSMNINFLQGNYFFSKKVQIYLWLAFFASFAVKIPMWPFHTWLPDAHVEAPTAGSVILAGVLLKMGGYGFIRFSLGILPEASDFFMPLIIILSSIAIVYTSLVALAQEDIKKLIAYSSVAHMGIVTI

SEQ ID NO: 100205 - protein, 258 aa, Unknown
  Bacterial polypetide isolated from the Sargasso Sea
LNLFLSLFLWYSFDNTTSDFQFVEERNWISGFVNFKLGIDGISILFILLTTFITPICIFSGISSIKFKIKEFLISVLVMETLMLGVFCSLDLIIFYLFFEGGLIPMFLIIGIWGGPKRVYSAFKFFLFTLLGSVLMLVAIISIYWITGTTDVTKLLAFRIPQEYQYLLWLAFFSSFAVKMPMWPVHTWLPDAHVEAPTAGSVILAAILLKMAGYGFIRFSLGLFPVASDYFTYLIFFLSVIAIIYTSLVALMQDDMKK

SEQ ID NO: 100206 - protein, 270 aa, Unknown
  Bacterial polypetide isolated from the Sargasso Sea
FLVNRVGDFGFAIGIFLIFFFYGTVNYFEVFQLTPQLTEQQIIFFGNEFNLITVICLMLFVGSMGKSAQIFLHTWLPDAMEGPTPVSALIHAATMVTAGVFLVVRCSPLFEYSAFALNVVAIIGMMTAFFAATVALVQNDIKKIVAYSTCSQLGYMFFAAGVGAYHVAIFHLFTHAFFKALLFLGSGCVIHSFNDEQDIRYMGGVRKRIPYTYGLMVVGTLALTGFPFLSGFYSKDAIIEFAFLKGTNIGYSAAVLGIFTALLTAIYSWR

SEQ ID NO: 100207 - protein, 269 aa, Unknown
  Bacterial polypetide isolated from the Sargasso Sea
LTPICILASWKSITKRVKEYMLAFLFLETVMIGMFSSIDILLFYVFFEAVLIPMYLIIGIWGGQNRIYASFKFFLYTLLGSVLMLLAIIVIYRITGVMNIEQLQGNHFNKSIQIFLWIAFFASFAVKIPMWPFHTWLPDAHVEAPTAGSVILAGVLLKMGGYGFIRFNLGMLPEATVFFTPLVMILSVIAIVYTSLVALAQSDMKKLIAYSSVAHMGIVTIGIFLVNQQGLEGAMLQMISHGIVSAALFLSVGVIYDRMHTREISFYGG

SEQ ID NO: 100208 - protein, 122 aa, Unknown
  Bacterial polypetide isolated from the Sargasso Sea
MLADFLKDYFSIIIFLIIALGLSFLFIIINFALSPKNPDPEKLSSYECGFEPFNDSRMEFDVRFYLVAILFIIFDLEIAFLFPWAISLGNIGFLGFISMMIFLFILTIGFVYEWKKGALDWE

SEQ ID NO: 100209 - protein, 122 aa, Unknown
  Bacterial polypetide isolated from the Sargasso Sea
MIYNFLTDYLSIILFLFIALLISIGFLLANYLASPSNPDPEKLSAYECGFEAFEDSRLEFDVRFYLVAILFIIFDLEIAFLFPWAISLGNIGTLGFWSMMTFLGILTIGFIYEWKKGALEWE

SEQ ID NO: 100210 - protein, 292 aa, Unknown
  Bacterial polypetide isolated from the Sargasso Sea
FFLIVRCSPIYEYSPIILNFITIIGMLTAIFAASVALVQNDIKKIIAYSTCSQLGYMFFAAGVGAYNVAMFHLFTHAFFKALLFLGSGSVIHAFKDEQDINKMGDSWKKLPYTYSLMIIGTLALTGFPFLSGFYSKDAIIEFAYLKGDTIGYTAAFIGILTAFLTSIYSWRLIFKTFHGNYNNKQVKKENLHESPIVMLLPLVLLAIGAIASGYIFKNIFIGYESSILFWKSSILFLEPLSTDHPPLWFLLSTPTLVIVSIPLAYYLFLKNKNFTNQVVEGNKPLYIFLKNK

SEQ ID NO: 100211 - protein, 122 aa, Unknown
  Bacterial polypetide isolated from the Sargasso Sea
MLADFLKDYLPIILFLIIAIGLSVIFIAINYLAAPKKPDPEKLSAYECGFEPFNDSRMEFDVRFYLVAILFIIFDLEIAFLFPWAISLGQIGLFGFISMMIFLFILTIGFIYEWKKGALDWE

SEQ ID NO: 100212 - protein, 236 aa, Unknown
  Bacterial polypetide isolated from the Sargasso Sea
DAMEGPTPVSALIHAATMVTAGVFLVVRCSPIFEYSQVALNVVAIIGMVTAIFAASVALVQNDIKKIVAYSTCSQLGYMFFAAGIGAYHVAIFHLFTHAFFKALLFLASGCVIHSFNEEQDIRLMGGVWKKIPYTYALMIIGTLALTGFPFFSGYYSKDAIIEFAYLKGNTIGYFSASVGILTALLTAIYSWRLIFKTFHGKYNNKKINFSFINESSFLMLIPSCLLAVGAITAGF

SEQ ID NO: 100213 - protein, 352 aa, Unknown
  Bacterial polypetide isolated from the Sargasso Sea
KLHYGTSVGVFLLSILIWLQFDSSKSGYQFEEKFRWFSDFNFHYHIGIDGISLFMVILSTFLTPLCILASWESVKKRVKEYMIAFLFLETVMIGMFASIDILLFYIFFEAVLIPMYLIIGIWGGERRIYASFKFFLYTLLGSVLMLIAIIVIYKLEDSMSIAGLQGNHFAKNVQIYLWLAFFASFAVKIPMWPFHTWLPDAHVEAPTAGSVILAGVLLKMGGYGFIRFSLGMLPEASDYFSPLIMTLSIVAVIYTSLVALAQTDIKKLIAYSSVAHMGLVTIGIFVVNSQGLEGAMIQMISHGVVSGALFLCVGVIYDRMHTRDINFYGGLVNRMPIYATCFMIFMFGGCRT

SEQ ID NO: 100214 - protein, 197 aa, Unknown
  Bacterial polypetide isolated from the Sargasso Sea
SNILFLGALRSAAQMVSYDVSIGFVIITVLLCVGSLNLTKIVEAQQTVWFAIPLLPMFIIFFISALAETNRLPFDLPEDESTLVAGFFTEYSSASFVLFFLAEYASMILMSAMTVILFLGGWLPLFDIYPLNIIPGVIWFTLKIMFVLFLFIWVRGTFPRYRYDQLMRLGWKVFLPLSLFWVVITAGFLVIFDIVPN

SEQ ID NO: 100215 - protein, 204 aa, Unknown
  Bacterial polypetide isolated from the Sargasso Sea
MEYILVFLPLLGAVISGLFGRYVGDRNSEIITCLLVSISAILSLIIFNEVIINNYENNLVIFNWLNSGSLDVNWSIKIDTVSSVMLVVVCFISSLVHIYSIGYMSDDPHKTRFMSFLSLFTFAMLILVTSDNFLQLFFGWEGVGLCSYFLIGFWFKKESANAAAMKAFLVNRVGDFGFALGIFLILNTFGTLNYDEIFNQIPSV

SEQ ID NO: 100216 - protein, 309 aa, Unknown
  Bacterial polypetide isolated from the Sargasso Sea
MEYLIVFLPLFASIISGFFGKIIGDKISCVFTSLLISISAILSILIFYDVLIYGYENNLLIFTWINSGTLEVNWSIKIDTLSSVMLVVVTFVSSLVHIYSIGYMAHDPHKPRFMSYLSLFTFAMLMLVTSDNFLQLFFGWEGVGLCSYLLIGFWFKKESANAAAIKAFVVNRVGDFGFALGIFLIFYLFGTVNYNEVFQLIPSIEEKKLNLLGFDFNAINLICFLLFIGAMGKSAQILLHTWLPDAMEGPTPVSALIHAATMVTAGVFLVVRCSPIYEYSETILNFITIIGMTTAFFAASVALVQDDIK

SEQ ID NO: 100217 - protein, 289 aa, Unknown
  Bacterial polypetide isolated from the Sargasso Sea
DITQIQEIKIPEQYQKLLWLAFFSSFAVKTPMWPVHTWLPDAHVEAPTAGSVILAAILLKMAGYGFLRFSIPLFPYASEFFTPLVYSLSIIAIIYTSLVALMQDDMKKLIAYSSVAHMGYVTLGIFTLTKQGIEGSIFQMISHGLISAALFLCVGVVYDRLHSRLINTYGGLVNYLPKYSFLFIVFALAALGLPGTTGFLGEFLVLTGSFQKNYLVAMLATIGVILGAAYMLWLTKRVIFGKIKNEDIKKLKDTNKLETFVLTTLAFLVIFFGFYPEPLFETVNVSIDN

SEQ ID NO: 100218 - protein, 384 aa, Unknown
  Bacterial polypetide isolated from the Sargasso Sea
ATWINSGSLDVNWSMLIDPLSAIMLVVVTLVSSLVHIYSIGYMSHDPHKPRFMAYLSLFTFAMLMLVTSDNFLQLFFGWEGVGLCSYFLIGFWFKKESANAAAIKAFVVNRVGDFGFALGIFLIFYLFGTVNYSEVFQQIPSVVDKNLFFLGLEVKAIDLICLLLFIGAMGKSAQILLHTWLPDAMEGPTPVSALIHAATMVTAGVFLVVRCSPIYEYSPLILNLITIVGMTTAFFAATVALVQTDIKKIIAYSTCSQLGYMFFAAGVGAYNVAMFHLFTHAFFKALLFLGSGSVIHAFKDEQNINNMGGVWKKLPYTYSLMIIGTLALTGFPFLSGFYSKDAIIEFAYLKGNTTGYLAAGIGIFTAFLTSIYSWRLIFKTFHG

SEQ ID NO: 100219 - protein, 121 aa, Unknown
  Bacterial polypetide isolated from the Sargasso Sea
MTSYLVEYLPILFFVFIGLSMAIGMTAIPFVIGDSKPDPEKISAYECGFEAFDDARGRFDVRFYLVALLFIIFDLEVAFLFPWAITLGKIGLFGFFSMMIFLLILTIGFIYEWKKGALEWE

SEQ ID NO: 100220 - protein, 414 aa, Unknown
  Bacterial polypetide isolated from the Sargasso Sea
KDNSSAAMKAFITNKIADVGLMIGIIILALNTGTLRISEILYQATHEYEKLSSVAFIAAILLFIGAMGKSAQFPLHVWLPDAMAGPTPVSALMHAATMVTAGVYLLARMFPFYKSMAPDALDIVMLFGVITLLAAGLIAVVQDDLKKVLAYSTVSQLGYMVAAIGSGAYTAALFHLWTHAFFKALLFLGAGSVIHAVHSNSMLEMGGLRKVMPKTFATFIIGTVALAGLPPFAGFFSKDEILASFNHEGEITFFFIAVLGAFITAFYMTRAVSLTFLGEYRGHGHPHESHNLMTTPLLALSVFAIASGWVNIPGVYTGFTDWVTTRKNKIVEYHPESFDLFALSSGLLAGLLGIALGYYLYQLQGSAETGDDKIKIQPIWSVLENKYYLDDFYFKYVIDPVKINISRAVDKFNT

SEQ ID NO: 100221 - protein, 174 aa, Unknown
  Bacterial polypetide isolated from the Sargasso Sea
MEISIIALPLIASIISGFFGKLIGDRNSEIITSLLVTISAIFSALILYQVIFNEYQDNIIIATWISSGTLDVNWSMKIDPLSAIMLVVVTSVSSLVHIYSIGYMSHDPHKPRFMAYLSLFTFAMLMLVTSDNFIQLFFGWEGVGLCSYFLIGFWFKKETANAAAIKAFVVNRVE

SEQ ID NO: 100222 - protein, 122 aa, Unknown
  Bacterial polypetide isolated from the Sargasso Sea
MLIDFLKDYLSIIIFIFIALSLSVGFIVLNYLFSPKNPDPEKLSAYECGFEAFSDSRMEFDVRFYLVAILFIIFDLEIAFLFPWAVTLGKIGTLGFWSMMIFLFILTIGFIYEWKKGALDWD

SEQ ID NO: 100223 - protein, 392 aa, Unknown
  Bacterial polypetide isolated from the Sargasso Sea
DFPILSLTTFLPLVGALAILLIRGDADTVARNARATALWTSLATFIVSIFLWIGFDNSTADFQFVEKVAWIPSFGLNYHMGVDGISVFFVLLSTFLTPLCILSSWEAIKHRVKEYMIAFLVLETLMVGMFCALDFVLFYVFFEAVLIPMFLIIGVWGGGRRVYAAFKFFLYTLTGSVLMLIAILVIYFEAETTDIPTLLKAALDPRMQLWLWLAFFASFAVKVPMWPVHTWLPDAHVEAPTAGSVILAGVLLKMGAYGFLRFSVPMLPFATEYFTPLIYTLSIIAIIYTSLVALAQEDMKKLIAYSSVAHMGFVTIGIFTLTHQGVQGAVVQMISHGFVSGALFLCVGVIYDRIHTRDIDRYGGLVERMPKYALVFMVFMLASVGLPGTSGL

SEQ ID NO: 100224 - protein, 425 aa, Unknown
  Bacterial polypetide isolated from the Sargasso Sea
LLIIKVGMMGISILFIILTTFITSICIILVNSTIKKRLKDFLIAILIMETFMIGVFCSLDLVVFYLFFEAGLIPMFLIIGIWGGERRVYSAFKFFLYTLLGSVLMLVAIISIYWISGTTDVEKLYEIGIDARYQNLLWLAFFSSFAVKTPMWPVHTWLPDAHVEAPTAGSVLLAAILLKMAGYGFIRFSLGLFPLASEYFVPLVYFLSLVAIIYTSLVALMQEDMKKLIAYSSVAHMGFVTLGIFTMTQQGIEGSIFQMISHGLVSAALFLSVGVVYERHHTRLINRYGGLVQVMPKYSIVFMVFALGSLGLPGTSGFIGEFLILMGAFKKSFLVATIASLGVILGAAYMLWLYKRIIFGEIVDNQLKSMTDLKRFEILILFSLVIPIIFFGFYPEPLINSMETSVNNLLNAYNTSIETNLAYKK

SEQ ID NO: 100225 - protein, 265 aa, Unknown
  Bacterial polypetide isolated from the Sargasso Sea
MIEYAVIFLPLAGAILSYFGKNLGNSFSQIISSLFVLISAFLSLLIFYNGIVHSVYNKHILFKWISSGNFLVNWAIDINPLSSVMLVVVTVVSALVHIYSIGYMSKDPHKPRFMSYLSLFTFSMLMLVASDNFLQLFFGWEGVGLCSYLLIGFWYKKNSANNAAIKAFIVNRVGDFGLAVGIFLIFYHLGTVNYDEVFSLIESSKNKNINFLSFDVNLITTICIFLFIGAMGKSAQFVLHTWLPDAMEGPTPVSALIHAATMVTA

SEQ ID NO: 100226 - protein, 388 aa, Unknown
  Bacterial polypetide isolated from the Sargasso Sea
IGVDGISLFLILLSTFLTPFCILASWNNIKKRIKEYMIAFLFLETVMLGMFSSVDILLFYIFFEAVLIPMFLIIGIWGGERRIYASFKFFLYTFLGSVLMLIAIIFIYQLTNSMNIFELQGNFFSKKIQIYLWLAFFASFAVKIPMWPFHTWLPDAHVEAPTAGSVILAGVLLKMGGYGFIRFSIGMLPEASKFFIPLIMILSIVAIIYTSLVALAQKDMKKLIAYSSVAHMGMVTIGIFLVNHQGLEGAMIQMISHGIVSAALFLCVGVIYDRMHTRDINFYGGLVNIMPKYSVALMIFVLASVGLPGTSGFIGEILVIIGSFKYSTTLAFFATTGIILSAVYMLYLYKNLIFGLLKNEKLKEILDLDVREKIILYPLIFVIIIIGI

SEQ ID NO: 100227 - protein, 341 aa, Unknown
  Bacterial polypetide isolated from the Sargasso Sea
MIFLQTTIKVIAIIVPVLITVAYFTYAERKVIGFIQGRIGPNRVGLFGFRLWGLGQPIADAVKLIVKEIVIPLNANRQLFVIAPILSLAPALAAWAVIPFDDTKVLADINAGLLYVLALTSLAVYGVIIAGWASNSKYAFLGAMRSAAQIVAYEIAMGFALVGVLIAAGSLNLGEIVSAQSGSLIHWFWLPLLPLFVIYFISGVAETNRAPFDVAEGESEIVAGFHVEYSGMAFSVFFMAEYANMILIAVLSALLFFGGWLSPFQGIIFLEDLFSWVPGMFWLLAKTSIFMFLFLWFRATFPRYRYDQIMRLGWKVFIPITIVWLVVISVLVIMNTPPWFN

SEQ ID NO: 100228 - protein, 353 aa, Unknown
  Bacterial polypetide isolated from the Sargasso Sea
LGLIPMFLIIGIWGGPRRVYSAFKFFLYTLFGSVLMLVAIIAIYWIVGTTDFTDIYEIGIPAEYQKILWLAFFSSFAVKMPMWPVHTWLPDAHVEAPTAGSVILAAILLKMAGYGFLRFSIGMFPLASEFFTPLVFSLSIIAIIYTSLVALMQEDMKKLIAYSSVGHMGFVTLGIFTFTQQGVEGSIFQMISHGLISAALFLCVGVLYDRMKSRMINTYGGVVNYLPKFSLLFIIFALGALGLPGTTGFIGEFLILVGTFKKNFLVAILASIGVILAAAYMLWLSKRVIFGATNNETIKKIKDINYLESMILVTLVLVTIIFGFYPDPLISTTSVSVENLINNYNLKVAGSLE

SEQ ID NO: 100229 - protein, 294 aa, Unknown
  Bacterial polypetide isolated from the Sargasso Sea
MDFEYLIIFLPLVGSIISGFFGKFLGSRNSEILTSLLVSISSIFSFLIFYKVFNDGYSNNLEIFTWINSGSFNVNWSIKIDALSSVMLVVVTLVSSIVHIYSVGYMSHDPHKQRFMSYLSLFTFSMLMLVTSDNFLQLFFGWEGVGLCSYFLIGFWFKKESANAAAIKAFVVNRVGDFGFALGIFLIFYLFGTVNYAEVFELVPQSLNKNLNFLGLNFNAINLICILLFIGAMGKSAQIFLHTWLPDAMEGPTPVSALIHAATMVTAGVFLVVRCSPIYEYSPLALNIITIVGM

SEQ ID NO: 100230 - protein, 249 aa, Unknown
  Bacterial polypetide isolated from the Sargasso Sea
MENIEYLILFLPLFASFISGFFGKYIGNRSSEILTSLFVSISAILSIIIFYNVLILDYENNIILAKWINIGSFNVNWSIKIDALSSVMLVVVNLISALVHIYSIGYMATDPHKPRFMAYLSLFTFAMITLVTSDNFLQLFFGWEGVGLCSYFLIGFWFKKESANAAAIKAFVVNRVGDFGFALGIFLIFYLFGTVNYNEVFQQIPNFVNNKILFIGIQLNSIDLICILLFIGAMGKSAQIFLHTWLPDA

SEQ ID NO: 100231 - protein, 354 aa, Unknown
  Bacterial polypetide isolated from the Sargasso Sea
MEISIIALPLIASIISGFFGKYIGDRNSEILTSFLVSISAVLSLIVFYEVIVNQYEENIVIASWINSGSLDVNWSMKIDSLSAVMLVVVTLVSALVHIYSIGYMSHDPHKPRFMAFLSLFTFAMLMLVTADNFIQLFFGWEGVGLCSYFLIGFWFKKESANAAAIKAFVVNRVGDFGFALGIFLIFYLFGTVNYSEVFDQIPTIVDQKLIFLGIGVNSIDLISLLLFIGAMGKSAQILLHTWLPDAMEGPTPVSALIHAATMVTAGVFLVVRCSPIYEYSELALNIITIVGMSTAFFAASIALVQTDIKKIIAYSTCSQLGYMFFATGVGAYNVAMFHLFTHAFFKALLFLGSG

SEQ ID NO: 100232 - protein, 313 aa, Unknown
  Bacterial polypetide isolated from the Sargasso Sea
MEYLILFLPLIGSVISGFFGKKIGDRNSQILTSSFVSISAILSLLVLYKVISSDYSNNLVIATWINSGTLNVNWSIKIDSLSAVMFVVVNFISALVHIYSIGYMSHDPHKTRFMAYLSLFTFAMLTLVSSDNFIQLFFGWEGVGLCSYFLIGFWFKKESANKAAIKAFVVNRVGDFGLALGIFLIFYIFGTVNYDEVFEQIPNVLDKKINFIGINLEIIDLICLLLLIGAMGKSAQFLLHTWLPDAMEGPTPVSALIHAATMVTAGVFLIVRCSPIYEYSPLVLTVITIIGMTTAFFAATVALVQNDIKKIIA

SEQ ID NO: 100233 - protein, 322 aa, Unknown
  Bacterial polypetide isolated from the Sargasso Sea
MEYLILFLPLIASIISGFFGKFIGDRFSVILTSLFVSISAILSFFVFYKVVNYGYSNNLIISSWINSGTLNVNWSIKIDALSAVMLVVVNLISALVHIYSIGYMAHDPHKPRFMAYLSLFTFAMLTLVTSDNFIQLFFGWEGVGLCSYFLIGFWYKKESANAAAIKAFLVNRVGDFGFALGIFLIFYIFGTVNYDEVFFQIPQILDKKLIFLGIQFNSVDLICLLLFVGAMGKSAQFLLHTWLPDAMEGPTPVSALIHAATMVTAGVFLVVRCSPIYEYSELALSIITIVGMITAFFAASVALVQTDIKKIIAYSTCSQLGY

SEQ ID NO: 100234 - protein, 494 aa, Unknown
  Bacterial polypetide isolated from the Sargasso Sea
MTDIPILSLTIFLPLLGAIVILLIKDDENSINNIKKVALLTSVGVFLLSLFIWLQFDNSNPGYQFQEKFRWFNDFNFYYHIGIDGISLFMVILSTFLTPLCILASWESIKKRVKEYMIAFLFLETVMIGMFSSVDILLFYIFFEAVLIPMYLIIGIWGGDRRIYASFKFFLYTLLGSVLMLIAIIAIYRLTNSMSIEDLQGNYFAKNVQMYLWLAFFASFAVKIPMWPFHTWLPDAHVEAPTAGSVILAGVLLKMGGYGFIRFSLGMLPEASEYFSPLVMTLSIVAVVYTSLVALAQTDIKKLIAYSSVAHMGLVTIGIFIVNAQGLEGAMIQMISHGVVSGALFLCVGVIYDRMHTRDINFYGGLVNRMPIYATVFMIFMLGSVGLPGTSGFIGEFLVIVGAFKYSSIVVIGSATGIVLSAVYMLYLYKRIIFGEMSNEKLIEILDLNNREKIILIPLAIAVIFIGIFPNIFIEPMRLPLESIIFNYEFANAK

SEQ ID NO: 100235 - protein, 433 aa, Unknown
  Bacterial polypetide isolated from the Sargasso Sea
EEKVWIENFFKYKLGIDGISVLFIVLTSFITQICVISCINSIKLRIKEFLIALLVLETFMLGVFCSLDLLLFYLFFEAGLIPMFLIIGVWGGARRVYSAFKFFLYTLLGSVLMLVAIITIFWLTGSTDVTEIYQIKIPEQYQTILWLAFFSSFAVKLPMWPVHTWLPDAHVEAPTAGSVILAAILLKMAGYGFLRFSIGMFPLASEFFVPLVYVLSLIAIIYTSLIALMQDDMKKLIAYSSVGHMGFVTLGVFTFTTQGIEGGIYQMISHGLISAALFLCVGVLYDRMNSRMINDYGGVVSILPKFSLLFIIFVLGGLGLPGTSGFIGEFLVLLGAFKKNFLVAVIASIGVVLAAAYMLWLAKKVIFGEVKNDKVKILKDVNYSEGFVLSILVILTLFFGFYPEPIFNTISPSVNNLIDVYQFEINSKISNIN

SEQ ID NO: 100236 - protein, 636 aa, Unknown
  Bacterial polypetide isolated from the Sargasso Sea
MELSIIFLPLIASIISGFFGKYIGDRNSEIVTSLLVSISALLSIFVLYQVIVNQYEENIVIATWISSGSLDVNWSMLIDPLSAVMLVVVTSVSALVHIYSIGYMSHDPHKPRFMAYLSLFTFAMLMLVTSDNFIQLFFGWEGVGLCSYFLIGFWFKKESANAAAIKAFVVNRVGDFGFALGIFLIFYLFGTVNYSEVFQQIPTIVDKNLSFLSFEVKAIDLICLLLFIGAMGKSAQILLHTWLPDAMEGPTPVSALIHAATMVTAGVFLVVRCSPIYEYSPLILNFITIVGMTTAFFAATVALVQTDIKKIIAYSTCSQLGYMFFAAGVGAYNVAMFHLFTHAFFKALLFLGSGSVIHAFKDEQNINNMGGVWKKLPYTYALMIIGTLALTGFPFLSGFYSKDAIIEFAYLKGNTTGYYAAGIGIVTAFLTSIYSWRLIFKTFHGDYNNKEVKIEETHESPLVMLVPLFILSIGAIFAGFLFKGLFIGHGDNLFWAESIKFLEPLSTEHPPLWFLLLTPCLVLVSIPIAYYLFVKNKELPNSIVSINKPLYNFLVNKWYFDELYDVLFIKSSKKIGLFLWKFCDGTIIDGFGPDGISSFIKKCSIKATKFQSGFIYQYAFVMLLGFSALLTFLIVK

SEQ ID NO: 100237 - protein, 389 aa, Unknown
  Bacterial polypetide isolated from the Sargasso Sea
MDIPILSLLICLPTIGALFILFTSSNSKKYNSYKYISIFISIVNFILSVYLWYQFDKSNPTFQFVENRDWIYGFINYKVGVDGISILFIILTTFITPLCILSVNSTIKNRLKDFLVAILIMESLMIGVFCSLDLVIFYLFFEGGLIPMFLIIGIWGGDRRVYSAFKFFLYTLLGSVLMLVAIIYIYWITGTTDVEKLYQIGIEAKYQKILWLAFFSSFAVKTPMWPVHTWLPDAHVEAPTAGSVLLAAILLKMAGYGFIRFSIGLFPIGSEYFVTLVYILSLIAIIYTSLVALMQEDMKKLIAYSSVAHMGFVTLGIFTMTQQGVEGSIFQMISHGIISAALFLCVGVIYERMHTRRIKNYGGIVSVMPRYSILLMIFTLGALGLPGTT

SEQ ID NO: 100238 - protein, 496 aa, Unknown
  Bacterial polypetide isolated from the Sargasso Sea
MNFPILTSLILLPAIGSFFIFFVKFNKNYQSSKYVALFISLANFVLALYLWSIFDNSSSEFQFIEEKKWIQGYFNYKVGIDGISILFIILTTFITPLCIISVNSTVTKRLKDFLIAILLMETLMIGVFCSLDLILFYLFFEGGLIPMFLIIGIWGGERRVYSAFKFFLYTLLGSVLMLVAIITIYWMTGTTDVEKLYQIGIDHNYQKLLWLAFFSSFAVKTPMWPFHTWLPDAHVEAPTAGSVLLAAILLKMAGYGFIRFSLGLFPLASEYFTPLVFALSLIAIVYTSLVALMQEDMKKLIAYSSVAHMGFVTLGIFTLTQHGLVGSIFQMISHGLISAALFLCVGVVYERMHTRLINKYGGVVSVMPKYAIVFMIFTLGAIGLPGTTGFVGEFLILLAAFKKSFLVAIIASLGVIFGAAYMLWLYRRIIFGEIKNADVKKLFDLKRHEIVILWLIAVPSIFFGFYPQPLIVTVDVSVINLLEMYNNNLKTFLVNK

SEQ ID NO: 100239 - protein, 122 aa, Unknown
  Bacterial polypetide isolated from the Sargasso Sea
MLSDFLKDYLPIIIFLVLALGLSCAFVVVNFILSPKKPDPEKLSAYECGFEPFQDSRMEFDVRFYLVAILFIIFDLEIAFLFPWAISLGNIGLLGFSSMMIFLFILTIGFIYEWKKGALDWE

SEQ ID NO: 100240 - protein, 305 aa, Unknown
  Bacterial polypetide isolated from the Sargasso Sea
MEYAVIFLPLLGTIIGYLSKYFGDLASQLLTTLTVCIAAILSIVIFYNGLVHDNYGNYIIFEWIRSGNFQINWAINIDPLSSIMLVVVTFVSALVHIYSIGYMSHDPFKPRFMSYLSLFTFAMLVLVVSDNFIQLFFGWEGVGLSSYLLIGFWYKKDSANKAAIKAFLVNRIGDFGLAIGIFLIFLYFGTLNYNEVFQQASNFSQNKINFLGLEVNLITLISLFLFIGAMGKSAQFFLHTWLPDAMEGPTPVSALIHAATMVTAGVFLVVRCSPIFEYSQFAFEHCHNYWNDHSILCSNCCNCTK

SEQ ID NO: 100241 - protein, 637 aa, Unknown
  Bacterial polypetide isolated from the Sargasso Sea
MEYLILFLPLIGSVISGFFGKKIGDRNSQVLTSSFVSISAILSLVVLYKVISLDYSNNLVVATWINSGTLNVNWSIKIDSLSAVMFVVVNFVSALVHIYSIGYMSHDPHKTRFMAYLSLFTFAMLTLVSSDNFIQLFFGWEGVGLCSYFLIGFWFKKESANKAAIKAFVVNRVGDFGLALGIFLIFYVFGTVNYDEVFEQIPNVLDKEINFIGINIEIIDLICLLLLIGAMGKSAQFLLHTWLPDAMEGPTPVSALIHAATMVTAGVFLIVRCSPIYEYSPLALTVITIIGMTTAFFAATVALVQNDIKKIIAYSTCSQLGYMFFAAGVGAYNVAMFHLFTHAFFKALLFLGAGAVIHSFHEEQDINKMGGVIKKLPYTYVLMLIGTLALTGFPFLSGFYSKDAIIEFAYLRGNGIGILAAFVGIVTALLTSIYSWRLIFKTFHGNFNNKELSVDKIQESSMVMIAPLVILAIGAIFAGMAFKGLFIGHEIAYEFWGQSIKFLEPLSTDHPPTWFLFLTPILVTAAIPFSYYLYLKNKKIVSGLKEMNEPIYQFLVKKWYFDEIYDYLFVNPSKRIGKFLWKKIDGSIIDKFGPDGISSVIKNLSIKAVKFQSGFIYQYAFIMLIGFSILLTILILN

SEQ ID NO: 100242 - protein, 494 aa, Unknown
  Bacterial polypetide isolated from the Sargasso Sea
MNFPILSSLILLPSIGALFLFFTKSKSENKITAKYVALFTSLVNFFLSIYLWFLFDQATSTFQFVEDRIWIKGLINYKVGVDGISILFIILTTFITPLCIISVNNSVTKRLNEFLIAILVMETFMIGVFCSLDLVVFYLFFEAGLIPMFLIIGIWGGARRVYSAFKFFLFTLLGSVLMLVAIISIYWITGTTDVVQLYELGIDTKYQNLLWLAFFSSFAVKTPMWPVHTWLPDAHVEAPTAGSVLLAAILLKMAGYGFIRFSLGLFPSASEVFTPLIYTLSVIAIIFTSLIALMQEDMKKLIAYSSVAHMGFVTLGIFTIQQQGIEGSIIQMISHGLVSAALFLCVGVVYDRMHSRLIATYGGIVTIIPKYAILFMVFTLAALGLPGTSGFVGEFLILMAAFKDNFLVAVLASLGVIIGAAYMLWLYKRVIFGKLINSELKKMIDLNKSEAFTLTCLAIPTLYFGFYPEPLINTIEVSIRDLIDTYNFSVASKQ

SEQ ID NO: 100243 - protein, 636 aa, Unknown
  Bacterial polypetide isolated from the Sargasso Sea
MELSIIFLPLIASIVSGFFGRYIGDRNSEIVTSALVSISALLSIYVLYQVIVNQYEENIVIATWISSGSLDVNWSMLIDPLSAVMLVVVTSVSALVHIYSIGYMSHDPHKPRFMAYLSLFTFAMLMLVTSDNFIQLFFGWEGVGLCSYFLIGFWFKKESANAAAIKAFVVNRVGDFGFALGIFLIFYLFGTVNYSEVFQQIPTVVDKNLSFLGFEVKAIDLICLLLFIGAMGKSAQILLHTWLPDAMEGPTPVSALIHAATMVTAGVFLVVRCSPIYEYSPLILNFITIVGMTTAFFAATVALVQTDIKKIIAYSTCSQLGYMFFAAGVGAYNVAMFHLFTHAFFKALLFLGSGSVIHAFKDEQNINNMGGVWKKLPYTYTLMIIGTLALTGFPFLSGFYSKDAIIEFAYLKGNTTGYYAAGIGIITAFLTSIYSWRLIFKTFHGEYNNKDIKIEETHESPLVMLVPLFILSIGAVFAGFLFKGLFIGHGENLFWAESIKFLEPLSAEHPPLWFLLLTPCLVLVSIPIAYYLFVKNKELPNSIVSINKPLYNFLVNKWYFDELYDVLFIKSSKKLGLFLWKFCDGTIIDGFGPDGISSFIKKCSIKATKFQSGFIYQYAFVMLLGFSALLTFLIVK

SEQ ID NO: 100244 - protein, 305 aa, Unknown
  Bacterial polypetide isolated from the Sargasso Sea
MPIVGSLFLFFTKDKEGNNLTAKYVALFTTVVNFLISIYLWISFDQSTSSFQFVEDRVWIEGFINYKVGVDGISILFIILTTFITPICIISVNNSVKNRLRDFLIAILIMESFMIGVFCALDLVVFYLFFEAGLIPMFLIIGIWGGARRVYSAFKFFLYTLLGSVLMLVAIISIYWITGTTDVVQLYEIGIDVKYQNLLWLAFFSSFAVKTPMWPVHTWLPDAHVEAPTAGSVLLAAILLKMAGYGFIRFSLGLFPIASEVFTPLIYTLSVIAIIFTSLIALMQEDMKKVICLFISCAYGFCNFG

SEQ ID NO: 100245 - protein, 631 aa, Unknown
  Bacterial polypetide isolated from the Sargasso Sea
MELFLIVFLPLIGSIISGFFGKILGLKLSHFISCVFILTSSFLSAYLFYLTLNGHQAENLYLLDWINSGSIEASWTLRFDALTSVMLVVVTSVSALVHIYSIGYMSHDPYQFRFFSYLSFFTFAMLMLVTSDNLLQLFFGWEGVGLASYLLIGFWYEKPSANAAAMKAFIVNRVGDFGFLLGIAVLYIATGSINFDTIFLKINDINQFTLNIACLLLFMGAMGKSAQLFLHTWLPDAMEGPTPVSALIHAATMVTAGIFLVARCSPIFENSDLALSFIIIIGASTAFFAATVGLVQNDIKRIIAYSTCSQLGYMFVALGVGAYQVAIFHLFTHAFFKALLFLGSGSVIHAMSDEQNIQKMGGLYKIIPFTWIMMLVGTLALTGAPLLSGYYSKDAIIESAYASHAFGHEYAFYLLVFSALLTSFYSWRLIFLTFHGKTRSSQDVLAKAHESPLSMTLPLLLLSFGAIFSGFLFSDFFLSHEIKNLWGNSIYVRPDNHILEEIHHSPFWVKKIPLVMMIIGFSIAVLFYLIFKNLPSFLSSKMSFIYNFLYNKWYFDEFYDLIFVNPLKRIGKFLWLIFDKKIIDGFGPDGISSLVINVSRNVSKIQTGFVYHYAFAMLIGLGLLLIRFVVY

SEQ ID NO: 100246 - protein, 250 aa, Unknown
  Bacterial polypetide isolated from the Sargasso Sea
MFIQNLLLILMGLPVIGGFSLLLFPKRAVRQMKLFALNVSLLNFLVSLNLWIFFDNSTPKFQFVQQMDWVSLLNMNFYIGVDGISLFFILLTTFMVPVCFLISWQSVNHLVKEFLVAFLFLESFMIAVFCMLDLLLFYVFFESVLIPMFLIIGVWGSRERKIRAAYQFFLYTLIGSLFMLLAILLIYFQVGTTDLQVLNTIEFSERRQLFLWAAFFLSFAVKVPMVPFHIWLPEAHVEAPTSGSVILAGI

SEQ ID NO: 100247 - protein, 121 aa, Unknown
  Bacterial polypetide isolated from the Sargasso Sea
MDIAIADYLPILIFMFVALAISCLFVLANFLVAVNNPDPEKNSAYECGFEQFGDSRMKFDVRFYLVTLLFIIFDLEVAFLFPWAVTFGTLGLFGFVSMMVFLAILTIGFIYEWKKGALEWQ

SEQ ID NO: 100248 - protein, 261 aa, Unknown
  Bacterial polypetide isolated from the Sargasso Sea
MTIILYCLLIFVPLLLGVVMALYADRKIWAAVQKRRGPNVVGPYGLFQVPADGLKFIFKEIILPDGSDKTVFLIAPIITLALSITAWAVVPVQAGVVLANINVGILYIFAISSLGVYGILMAGWSSNSKYPFFGALRSAAQMVSYEVSIGFVIITVLLCVGSLNLTEIVMAQKTMWFFIPLFPMFIVFFISALAETNRPPFDLPEAESELVAGYQTEYSGMPFVLFMFGEYINILLMCAMTTILFLGGWLPPIDIYPLNAV

SEQ ID NO: 100249 - protein, 640 aa, Unknown
  Bacterial polypetide isolated from the Sargasso Sea
MAHSIILLPLIGFLISCSLSFFKSNKFIDRAAEIITSLFITITAIFSFYIFIDNIGDPSVVSIKLFNWISSGSFNADWSIYLDTATRVMLVVITSVSALVHIYSIGYMSHDDSKPRFMGYLSLFTFAMLMLVTADNFLQLFFGWEGVGLASYLLIGFWYKKPTANAAAIKAFIVNRIGDFGLALGIFTIFIVFGSIEYQTVFSNVSSFKNVNFNFLGIELHALTLICIFLFIGAMGKSAQLFLHTWLPDAMEGPTPVSALIHAATMVTAGVFLVVRCSPLFDLAPVALDFVVLIGASTAFFAATVGLVQNDIKRVIAYSTCSQLGYMFVAAGLGAYGAAMFHLFTHAFFKALLFLGAGSVIHAVHEEQDIRKMGGISNFVPITQLMMIIGTISLMGFPFTSGYYSKDAIIETAYLSNSNFANYAYILLTVGVVMTSFYSWRLMFLVFNGKTRMAEEDLSKVHESSSVMLIPLIILAIGALFFGFLFKSYFIGYYSDVFWNGSIIVHHEDHHSIPLLIYYLPAILGIVGFIIAWFMYIRKSDMAKNIAELNKPLYNFLLNKWYFDELYNSIFVKPVMAIGQIFWKFIDGLIIDGYGPNGIAALVSRISIKAKQVQSGFIYHYAFAILIGLSFIITFIIFRF

SEQ ID NO: 100250 - protein, 583 aa, Unknown
  Bacterial polypetide isolated from the Sargasso Sea
MELSIIFLPLIASIISGFFGKYIGDRNSEIVTSALVSISALLSIYVLYQVIVNQYEENIVIATWISSGSLDVNWSMLIDPLSAVMLVVVTSVSALVHIYSIGYMSHDPHKPRFMAYLSLFTFAMLMLVTSDNFIQLFFGWEGVGLCSYFLIGFWFKKESANAAAIKAFVVNRVGDFGFALGIFLIFYLFGTVNYSEVFQQIPTVVDKNLSFLGFEVKAIDLICLLLFIGAMGKSAQILLHTWLPDAMEGPTPVSALIHAATMVTAGVFLVVRCSPIYEYSPLILNFITIVGMTTAFFAATVALVQTDIKKIVAYSTCSQLGYMFFAAGVGAYNVAMFHLFTHAFFKALLFLGSGSVIHAFKDEQNINNMGGVLRKLPYTYALMVIGTLALTGFPFLSGFYSKDAIIEFAYLKGNTTGYYAAGIGIITAFLTSIYSWRLIFKTFHGEYNNKEIKIEETHESPLVMLVPLFILSIGAVFAGFLFKGLFIGHGDNLFWAESIKFLQPLSTEHPPLWFLLLTPCLVLLSIPIAYYLFVKNKDLPNSIVSMNKPLYNFLVNKWYFDELYDVLFIRSSKKLGIFLWKFL

SEQ ID NO: 100251 - protein, 122 aa, Unknown
  Bacterial polypetide isolated from the Sargasso Sea
MIYNFLSDYLSIILFLAIALFLSIGFIFVNYLAAPKNPDPEKLSAYECGFEAFDDSRMEFDVRFYLVAILFIIFDLEIAFLFPWAISLGNIGIFGFWSMMFFLGILTIGFIYEWKKGALEWD

SEQ ID NO: 100252 - protein, 639 aa, Unknown
  Bacterial polypetide isolated from the Sargasso Sea
MDIEYLIIFLPLLGSIISGLFGKYIGSRNSEIITSLFVSVSAFLSFIIFYKVLNQDYTNNLNIFTWINSGTLNVSWSIDIDALSSVMLVVVTLVSSLVHIYSIGYMSDDPHKQRFMSYLSLFTFSMLMLVTSDNFLQLFFGWEGVGLCSYFLIGFWFRKESANAAAIKAFVVNRVGDFGFALGIFLIFYLFGTVNYDEVFELVPSILNKDLSFLGINVNAINLICVLLFIGAMGKSAQIFLHTWLPDAMEGPTPVSALIHAATMVTAGVFLVVRCSPIFEYSPLALNLVTIIGMSTAFFAATIALVQDDIKKIIAYSTCSQLGYMFFAAGVGAYNVAMFHLFTHAFFKALLFLGSGSVIHSFKNEQNINAMGGVWKKLPYTWALMVIGTLALTGFPFFSGFYSKDAIIEFAYLSGSATGYFAAGIGIFTAFLTSIYSWRLMFKTFHGNYNNKNIDSSSMHESPLIMIIPLIILAIGAIFSGFLFKDLFIGVESSGNFWKDSIFFLEPLSTDHPPLWFIVFTPILVILSIPTAYYFFIINKKFTNEIVKGNLPLYNFLKNKWYFDEIYEYLFVKPSKKIGLYFWKKIDLRFIDRFGPDGVSSLIKIISSIAVKFQNGFIYHYAFVMLLGFSALLTFLILK

SEQ ID NO: 100253 - protein, 122 aa, Unknown
  Bacterial polypetide isolated from the Sargasso Sea
MLADFLKDYLPIILFLIIAIGLSVIFIAINYLASPKKPDPEKLSAYECGFEPFNDSRMEFDVRFYLVAILFIIFDLEIAFLFPWAISLGQIGLFGFTSMMIFLFILTIGFIYEWKKGALDWE

SEQ ID NO: 100254 - protein, 341 aa, Unknown
  Bacterial polypetide isolated from the Sargasso Sea
MNYFFILLNIVIEIIIVVLPLFLIVAYTTYSERKIIGFMQSRLGPTRVGPFGFLQPIADVIKLLTKEIIIPSNANQGLFLAAPVIMLVPSLLVWSVIPLSEYFVIADINAGLLFILALTSLSVYGVILAGWASNSKYAFLGSMRSAAQIIAYEIAMGFALVGVLMAAGSLNLQEIIISQRGGILSWYWLPLFPLFLIYLIAGIAETNRAPFDVSEGESEIVAGFHVEYSGVAFAMFFLAEYMNLILISILVSIMFFGGWLSPFEGIFLNSYFGWVPGFIWLSIKTLFFIFLFLWLRATLPRYRYDQIMRLGWKVFLPITIIWIFFEGIMIYYKVEPWFIAK

SEQ ID NO: 100255 - protein, 491 aa, Unknown
  Bacterial polypetide isolated from the Sargasso Sea
MNFPILSTLIFLPLLSSLFIFLSRDKKNHNSIYISLFSSIATFLLSLFLWYSLDINSAEFQFVEEKSWINNYIKFKLGVDGISILFIVLTTFITPICIISCINSIKTRVKEFLIAILILETFMIGVFCSLDLVIFYLFFEAGLIPMFLIIGVWGGPRRVYSAFKFFLFTLLGSVLMLVAIIVIYWLTGTTDITEIYKIKIPKDYQNILWLAFLSSFAVKMPMWPVHTWLPDAHVEAPTAGSVILAAILLKMAGYGFLRFSIPMFPIASEYFTPLIYSLSIIAIIYTSLVALMQDDMKKLIAYSSVAHMGYVTLGIFTLTKQGIEGSIYQMISHGLISAALFLCVGVVYDRLHSRMISSYGGLVSYLPKYSFLFIVFALAALGLPGTSGFLGEFLVLTGAFQKSYLAAMLATFGVVLGAAYMLWLTKRVIFGTINNVEIKNLSDVNKSEIIMLATLAFFVIFFGFYPLPLMETFSVSVNSLIDNYQIALISN

SEQ ID NO: 100256 - protein, 359 aa, Unknown
  Bacterial polypetide isolated from the Sargasso Sea
MEYAILFLPLLGSIIGYLGKSVTKYFSEIITSFLVSISAVLSIIVFWNGFHNDIYGNYKIFEWISSGDFTANWSINIDPLSSVMLVVVTFISALVHIYSIGYMSHDPHKPRFMSYLSLFTFSMLALVVSDNFLQLFFGWEGVGLCSYLLIGFWYKKETANDAAIKAFIVNRIGDFGLAIAIFLIFFFFGTINFDEVFKITEQFAEKKLIFFGFELNLITLICVFLFIGAMGKSAQFLLHTWLPDAMEGPTPVSALIHAATMVTAGVFLVVRCSPMFEYSQVALNLVTIVGMITAIFAASVALVQNDIKKIVAYSTCSQLGYMFFAAGVGAYHVAMFHLFTHAFFKALLFLGAGSVIHAF

SEQ ID NO: 100257 - protein, 326 aa, Unknown
  Bacterial polypetide isolated from the Sargasso Sea
MVFQFLFIILSTLIAPLCIVSVNKTVTVRLKEFLIAILLMESLMIGVFCSLDLVIFYLFFEGGLIPMFLIIGIWGGPRRVYSAFKFFLFTLLGSVLMLVAIISIYWIHDTTDIVELYNLGIETKYQNLLWLAFFSSFAVKTPMWPVHTWLPDAHVEAPTAGSVLLAAILLKMAGYGFIRFSIGLFPLASEYFVPLIYVLSLIAIIYTSFVALMQDDMKKLIAYSSVAHMGYVTLGIFTITKQGLEGSIIQMISHGLVSAALFLCVGVVYDRIHSRLISTYGGVVSIMPKYAVFFMIFVLAAIGLPGTSGFVGEFLILMGAFKKKLF

SEQ ID NO: 100258 - protein, 328 aa, Unknown
  Bacterial polypetide isolated from the Sargasso Sea
MLFFLLTSLIKILTIAVPLLVAVAYLTLAERKVMGSMQRRKGPNVVGFFGILQPLADGLKLLVKEPVLPSNSNILLFLGAPFMTFLLALISWAVIPFDEGVVLSDLNLGIPYIFAISSLGVYGVIIAGWSSNSKYAFLGALRSTAQMVSYEVSLGLILITVLLCVGSLNLSSIVLAQKYVWFGLPLFPLLVLFFISCLAETNRAPFDLPEAEAELVAGYNVEYSSMGFALFFLGEYANMIFMSVLCAILFLGGWLPPVNIFLFTWIPGAFWLGLKTIFFLFLYIWTRAAFPRYRYDQLMKLGWKVFLPLSLAWVILVAGTLVSFDLLP

SEQ ID NO: 100259 - protein, 337 aa, Unknown
  Bacterial polypetide isolated from the Sargasso Sea
MIWSLFQIAIVTVCLILTVVFLVYFERKVIGYMHARVGPNRVGPKGTLQSIADTIKLLLKEVIIPDKADRFFFLLSPLLLLIPALAAWAVVPFSPEFIIADINAGLLYLLALTSFGVYGVILAGWASNSKYAFLGSMRAAAQMVAYEIAMGFALVGVLMAGGSLKLGEIVAAQSGGVLSWFWIPLFPLFIVYFISGIAETNRHPFDLAEGEAEIVAGFHVEYSGIGFAIFFLAEYINMALISVLTSILFLGGWESFFAGISLLESSGFSFLTEPSLFWLLIKTVFFLFVFIWLRASFPRYRYDQLMSLGWKVLIPITILWIGVECVMYVMQIGPWSV

SEQ ID NO: 100260 - protein, 334 aa, Unknown
  Bacterial polypetide isolated from the Sargasso Sea
MIITLQIVFISICVILAVAFTTYFERKVIGYMQGRLGPNRVGPKGLGQPFADVIKLLIKEVVVPSKSNRFLFVIAPLLSLVPALATWAVIPLTDGFVIADINAGLLYVLALTSVGVYGVLLAGWSTNSKYAFLGAMRSAAQIVAYEIAMGFALVGVLMAGGSLNLGEIIASQSGGFSNWFIIPLFPLFVVYFVSGVAETNRAPFDVAEGESEIVAGFHVEYSGVAFAVFFLAEYANIILIAALTSIFFLAGWSSPFEGWTILGSESFLREPSFFWLALKICFFIFVFFWIRATFPRYRYDQIMRLGWKIFIPVTIVWIAVEGLMAWMKVGPWAI

SEQ ID NO: 100261 - protein, 432 aa, Unknown
  Bacterial polypetide isolated from the Sargasso Sea
MTMICILLFIGAMGKSAQAPLHVWLPDSMEGPTPISALIHAATMVTAGIFMVARMSPLFELSEMALAFVLIIGSVTAFFMGLLGIIQNDIKRVVAYSTLSQLGYMTVALGVSAYSAAIFHLMTHAFFKALLFLAAGSVIIAMHHEQDIRKMGGLKKYMPITYITSLIGTLALVGFPGSAGFFSKDALIETVKYSHWLGDGMIYWISYLSVLLGVFITSLYSFRMFFMVFHGEERMDKETKSHLHETPTVVTMPLVLLAIPSVFAGWFTIKPLLFGEYFDGAIQVLPQHDVLAQLSEGFHGSWDFLLHSFTASLAFYMAFLGFSVAWLLYIKFPEIPNKIRMKMRAIVVVLEEKYFFDTLWMKVFPSLGKSIGRILWKQGDEKMIDGALVNGTAYGIRSIASVIRNIQTGYLYHYAFAMIVGLVIILSWLLWT

SEQ ID NO: 100262 - protein, 332 aa, Unknown
  Bacterial polypetide isolated from the Sargasso Sea
MEYLILFLPLIGSIISGFFGKTIGDRLSQLITCILVSISALLSLFIFFKVVSSGYEHNAIIATWINSGSLNVNWSIKVDALSAVMLVVVTLVSSLVHIYSVGYMSHDPHKPRFMSYLSLFTFAMLTLVTSDNFLQLFFGWEGVGLCSYFLIGFWYKKETANAAAIKAFIVNRVGDFGFALGIFLIFYIFGTVNYDEVFLKIPEIIDQKINFLSFEFNTIDLICLMLFVGAMGKSAQFLLHTWLPDAMEGPTPVSALIHAATMVTAGVFLVVRCSPIYEYSELALSVITLVGMTTAFFAATVALVQTDIKKIIAYSTCSQLGYMFFAARCRCV

SEQ ID NO: 100263 - protein, 353 aa, Unknown
  Bacterial polypetide isolated from the Sargasso Sea
MFDTINAGGSQLLGFAWPTVWAIVRILVVSVVILLCVAYLILWERKLIGWMHVRLGPNRVGPGGLLQPIADVLKLLLKEVIQPSAASRWLYLIAPVMTVVPAFAVWAVIPFQAEAVLANVNAGLLYAMAISSIGVYAVILAGWASNSKYAFLGAMRAAAQMVSYEISMGFALVLVLMTAGSLNLSEIVGSQQHGFFAGHGVNFLSWNWLPLLPAFVVYFISGIAETNRHPFDVVEGESEIVAGHMIDYSGMAFALFFLAEYINMIVISALTATLFLGGWDAPFEFLSFIPGIFWLVLKIFALLSVFIWVRATFPRFRYDQIMRLGWKVFLPVTVVWVVVVGFWMMSPLNIWVK

SEQ ID NO: 100264 - protein, 493 aa, Unknown
  Bacterial polypetide isolated from the Sargasso Sea
MNFPILSSLILLPIVGALFLFFTKDKEGNNLTAKYVALFTTVVNFLISIYLWISFDQSTSIFQFVEDRTWIEGFINYKVGVDGISILFIILTTFITPLCIISVNNSVKNRLRDFLIAILIMESFMIGVFCALDLVVFYLFFEAGLIPMFLIIGIWGGARRVYSAFKFFLYTLLGSVLMLVAIISIYWITGTTDVVQLYEIGVDVKYQNLLWLAFFSSFAVKTPMWPVHTWLPDAHVEAPTAGSVLLAAILLKMAGYGFIRFSLGLFPVASEVFTPLIYTLSVIAIIFTSLIALMQEDMKKLIAYSSVAHMGFVTLGIFTLQQQGIEGSIIQMISHGLVSAALFLTVGVVYDRMHSRLISTYGGLVSVIPKYSILFMLFALASLGLPGTSGFIGEFLILMGAFKDNFLVAVIASIGVILGAAYMLWLYKRVVFGKLLNEDLKKILDLNRSEYFILSCLAAPILFFGFYPDPLINTIEVSVTDLINMHNTNIASK

SEQ ID NO: 100265 - protein, 419 aa, Unknown
  Bacterial polypetide isolated from the Sargasso Sea
MEFEYLIIFLPLVGAIISGFFGKFLGSRNSEILTSLFVSISSIFSFLIFYKVFNDGYTNNLDIFTWINSGTFNVNWSIKIDALSSVMLVVVTLVSSIVHVYSIGYMSHDPHKQRFMSYLSLFTFSMLMLVTSDNFLQLFFGWEGVGLCSYFLIGFWFKKESANAAAIKAFVVNRVGDFGFALGIFLIFYLFGTVNYTEVFELIPQSLDKKLSFLGININAVNLICILLFIGAMGKSAQLFLHTWLPDAMEGPTPVSALIHAATMVTAGVFLVVRCSPIYEYSPLVLNLITIVGMSTAFFAATVALVQDDIKKIIAYSTCSQLGYMFFAIGVGAYNVAMFHLFTHAFFKALLFLGSGSVIHSFKDEQNINLMGGVWKKLPYTWILMVIGTLALTGFPFLSGFYSKDAIIEFAYLKGNSVG

SEQ ID NO: 100266 - protein, 353 aa, Unknown
  Bacterial polypetide isolated from the Sargasso Sea
MEYLILFLPLIGAVISGFFGKKIGDRNSQILTSSFVSISAILSLLVLYKVISSDYSNNLVIATWINSGTLNVNWSIKIDALSAVMFVVVNFVSALVHIYSIGYMSHDPHKTRFMAYLSLFTFAMLTLVSSDNFIQLFFGWEGVGLCSYFLIGFWFKKESANKAAIKAFVVNRVGDFGLALGIFLIFYIFGTVNYDEVFTQIPNVLDKKINFVGINIEIIDLICLLLLIGAMGKSAQFLLHTWLPDAMEGPTPVSALIHAATMVTAGVFLIVRCSPIYEYSQLALTVITIIGMTTAFFAATVALVQNDIKKIIAYSTCSQLGYMFFAAGVGAYNVAMFHLFTHAFFKALLFLGA

SEQ ID NO: 100267 - protein, 445 aa, Unknown
  Bacterial polypetide isolated from the Sargasso Sea
YLLIGHYWEKKDNSSAAMKAFITNKIADVGLMIGIIILALNTGTLRISEILYQSTHNYEKLSTVAFVAAILLFIGAMGKSAQFPLHVWLPDAMAGPTPVSALMHAATMVTAGVYLLARMFPFYKAMAPDALDVVMLFGVITLLAAGLIAVVQDDLKKVLAYSTVSQLGYMVAAIGSGAYTAALFHLWTHAFFKALLFLGAGSVIHAVHSNSMLEMGGLRKVMPKTFATFIIGTVALAGLPPFAGFFSKDEILASFNHEGETTFFFIAVLGAFITAFYMTRAVSLTFLGEYRGHGHPHESHNLMTTPLLTLSVFAIASGWVNIPGVYTGFTDWVTTRKNKIVEYHPESFDLFALSSGLLAGLLGIGLGYYLYQLQGSAETGDDKIKIQPIWSVLENKYYLDHFYFKFVIDPVKINISKAVDKFNTNVIDRFVNGFGQVASLMGGVV

SEQ ID NO: 100268 - protein, 494 aa, Unknown
  Bacterial polypetide isolated from the Sargasso Sea
MIDWPLVSVIIFLPLIGALIILFIKEDELTSINIKWAALLATLGTFILSLILWLQFDYSNPSYQYEEKFRWFDDFNFFYHVGVDGISLFMILLSTFLTPLCILASWNNIKKRVKEYMLSFLFLETVMIGMFASIDILLFYIFFEAVLIPMYLIIGIWGGNRRIYASFKFFLYTLLGSVLMLIAIIVMYRNTSSMSIEFLQGNYFSYNTQLFLWLAFFASFAVKIPMWPFHTWLPDAHVEAPTAGSVILAGVLLKMGGYGFIRFSLGMLPEATEFFIPLIMTLSIVAIVYTSLVALAQTDIKKLIAYSSVAHMGIVTIGIFLVNQQGLEGAMMQMISHGLVSAALFLCVGVIYDRMHTREIEFYGGLVQRMPLYATVFMIFMLGSVGLPGTSGFIGEFLVIVGAFKFSSYVVIGAAFGIILSAVYMLYLYKRIIFGTITNNKLADILDINTREKIILIPLAISVILLGIFPNLFLDPMRLSLELIITNYEIANAK

SEQ ID NO: 100269 - protein, 280 aa, Unknown
  Bacterial polypetide isolated from the Sargasso Sea
MELSIIFLPLIASIISGFFGRYIGDRNSEIVTSALVSISALLSIYVLYQVIVNQYEENIVIATWISSGSLDVNWSMLIDPLSAVMLVVVTSVSSLVHIYSIGYMSHDPHKQRFMAYLSLFTFAMLMLVTSDNFIQLFFGWEGVGLCSYFLIGFWFKKESANAAAIKAFVVNRVGDFGFALGIFLIFYLFGTVNYSEVFQQIPTVIDKNLSFLGFEVKAIDLVCLLLFIGAMGKSAQILLHTWLPDAMEGPTPVSALIHAATMVTAGVFLVVRCSPIYEYS

SEQ ID NO: 100270 - protein, 450 aa, Unknown
  Bacterial polypetide isolated from the Sargasso Sea
FLLSIYLWILFDHTTSEFQFVEQRTWIEDFINYKVGVDGISILFILLTTFITPLCILSVNNSIKERLSEFLIAVLIMESFMIGVFCSLDLVIFYLFFEAGLIPMFLIIGIWGGARRVYSAFKFFLYTLLGSVLMLVAIITIYWLTGTTDVIELYSLGIEAKYQNLLWLAFFSSFAVKTPMWPVHTWLPDAHVEAPTAGSVLLAAILLKMAGYGFIRFSLGLFPVASEVFTPLIYTLSVIAIIFTSFIALMQEDMKKLIAYSSVAHMGYVTLGIFTIQQQGIEGSIIQMISHGLVSAALFLCVGVVYDRMHSRLIDTYGGIVSIIPKYSVLFMLFTLAALGLPGTSGFVGEFLILMGAFKDNFLVAVIASIGVIIGAAYMLWLYKRVIFGKLINNDLKKMIDLNRSESIILTSLAIPTLFFGFYPDPLINTIEVSISDLIETYNFRLASKI

SEQ ID NO: 100271 - protein, 562 aa, Unknown
  Bacterial polypetide isolated from the Sargasso Sea
NIVIATWISSGSLDVNWSMLIDPLSAVMLVVVTSVSALVHIYSIGYMSHDPHKPRFMAYLSLFTFAMLMLVTSDNFIQLFFGWEGVGLCSYFLIGFWFKKESANAAAIKAFVVNRVGDFGFALGIFLIFYLFGTVNYSDVFQQIPTVVDKNLSFLGFEVNAIDLICLLLFIGAMGKSAQILLHTWLPDAMEGPTPVSALIHAATMVTAGVFLVVRCSPIYEYSPLILNFITIVGMTTAFFAATVALVQTDIKKIIAYSTCSQLGYMFFAAGVGAYNVAMFHLFTHAFFKALLFLGSGSVIHAFKDEQNINKMGGVWKKLPYTYALMIIGTLALTGFPFLSGFYSKDAIIEFAYLKGNTTGYYAAGIGIITAFLTSIYSWRLIFKTFHGEYNNKVIKIEETHESPLVMLVPLFILSIGAVFAGFLFKGLFIGYGENLFWAESIKFLEPLSTEHPPLWFLLLTPCLVLLSIPIAYYLFVKNKELPNSIASMNKPLYNFLVNKWYFDELYDVLFIKSSKKLGLFLWKFCDGTIIDGFGPDGISSFIKKCSIKATKFQSGFIYQYA

SEQ ID NO: 100272 - protein, 318 aa, Unknown
  Bacterial polypetide isolated from the Sargasso Sea
IAIISIYWITGTTDVTEIYKIKIPAEFQNLLWLAFFSSFAVKMPMWPVHTWLPDAHVEAPTAGSVILAAILLKMAGYGFLRFSVGMFPLASEYFTPLIFTLSVIAIIYTSLVALMQDDMKKLIAYSSVAHMGYVTLGIFTFNKQGIEGGIIQMFSHGLISAALFLCVGVLYDRAHSRLINSYGGVVNILPKYSFILMIFVLGTLGLPGTSGFVGEFLVLVGAFKVNFLVAILASIGVILAAAYILWLYKRVIFGKLENNQIKEMKDLNKSEMGVLVSIGILVIFFGFYPEPLFNTVNVSVDNLINNYNMEINKFSVLK

SEQ ID NO: 100273 - protein, 352 aa, Unknown
  Bacterial polypetide isolated from the Sargasso Sea
MISFLSFLDPQWINLIWSLLQIAIVTICLILTVVFLVYFERKVIGYMHARVGPNRVGPKGTFQSIADTIKLLLKEVIIPDKADRFFFLLSPLLLLIPALAAWAVIPFSPEFIIADINAGLLYLLALTSFGVYGVILAGWASNSKYAFLGSMRAAAQMVAYEIAMGFALVGVLMAGGSLKLGEIVAAQSGGVLSWFWIPLFPLFIVYFISGIAETNRHPFDLAEGEAEIVAGFHVEYSGIGFAIFFLAEYINMALISVLTSIMFLGGWESFFAGIPFLESSVFSFLTEPSIFWLLLKTLFFLFVFIWLRASFPRYRYDQLMSLGWKVLIPITILWIGVECIMYVMQIGPWSVT

SEQ ID NO: 100274 - protein, 85 aa, Unknown
  Bacterial polypetide isolated from the Sargasso Sea
MLAEFLKDYFPIIIFLIIALGLSCIFIILNFLLSPKNPVPEKLSAYECGFDPFNDSRMEFDVRFYLVAILFIIFDLEIAFLFPWA

SEQ ID NO: 100275 - protein, 92 aa, Unknown
  Bacterial polypetide isolated from the Sargasso Sea
FFVATQKPDPEKTSAYECGFDPFEDARAKFDIRFYLVAILFIIFDLEVTFLFPWAVSLRNIDLFGFWTMMIFLIILTIGFVYEWRKGALEWE

SEQ ID NO: 100276 - protein, 603 aa, Unknown
  Bacterial polypetide isolated from the Sargasso Sea
MEYFILFLPLIASIISGFFGKLFGVRNCEILNSLFVSISAILSLIIFYKVITVGYENNIVITTWINSGSLNVNWSINIDALSSVMLVVVTLVSSLVHIYSIGYMAHDPHRTRFMSYLSLFTFAMLTLVTSDNFIQLFFGWEGVGLCSYFLIGFWFKKPSANAAAIKAFLVNRVGDFGFALGIFLIFYIFGTVNYDEVFQRIPEILDKKLSFLGINIHAVDLICILLFIGAMGKSAQIFLHTWLPDAMEGPTPVSALIHAATMVTAGVFLVVRCSPIYEYSELALSIITIIGMSTAFFAASVALVQNDIKKIIAYSTCSQLGYMFFAAGVGAYNVAMFHLFTHAFFKALLFLGSGSVIHSFKDEQDINKMGGIWKKLPYTYTLMIIGTLALTGFPFLSGFYSKDAIIEFAFLRGNNLGYYASSIGIFTALLTSIYSWRLIFKTFHGTYNNSKIKIEVMHESPIIMLLPLIILAVGAIFAGFLFKDLFIGHETSYEFWSNSIKFLTPLSTEHPPSWFLFLTPTLVVLSIPLSFYLFVKNLKINESIVNSNKSIYLFLKNKWYFDEIYDYIFVKHSKQIGFFFWKKIDLSFIDKFGPDGLSQLIKY

SEQ ID NO: 100277 - protein, 361 aa, Unknown
  Bacterial polypetide isolated from the Sargasso Sea
YEYSPLALTVITIIGMTTAFFAATVALVQNDIKKIIAYSTCSQLGYMFFAAGVGAYNVAMFHLFTHAFFKALLFLGAGAVIHSFHDEQDINKMGGVIKKLPYTYVLMLIGTLALTGFPFLSGFYSKDAIIEFAYLRGNGVGMLAAFVGILTALLTSIYSWRLIFKTFHGNFNNKELSVDKIHESPLVMIAPLVILAIGAIFVGMAFKGLFIGHEIAYEFWGKSIKFLEPLSTDHPPTWFLFLTPILVTAAIPFSYYLYLKNTNIVNGLKEMNEPIYQFLVKKWYFDETYDYLFVNPSKRIGKFLWKNVDGSIIDKFGPDGISSIIKNLSIRAVKFQSGFIYQYAFVMLIGFSILLTILILN

SEQ ID NO: 100278 - protein, 254 aa, Unknown
  Bacterial polypetide isolated from the Sargasso Sea
VFLLAPIITMVLSLAGWAVIPFAPGLVVSDINVGIMYLFAVSSLGVYGVIMAGWASNSKYPFLGALRSAAQMVSYEVSIGFVIITVLLCVGSLNLSKIVEAQETVWFAIPLLPMFIIFFISALAETNRLPFDLPEDESTLVAGFFTEYSSSSFVLFFLAEYASMILMSSMTVILFMGGWLPPFDIYPLNVVPGIVWFTMKVIFILFLFIWVRATFPRYRYDQLMRLGWKVFLPFSLLWVVVTSGFLVIFDKLPS

SEQ ID NO: 100279 - protein, 342 aa, Unknown
  Bacterial polypetide isolated from the Sargasso Sea
MIQNDIKRVVAYSTLSQLGYMVAAAGVSAYSASLFHLMTHAFFKALLFLAAGSVIVALHHEQDIRKMGGLKNKLPITYVTSLIGSLALIGFPGFSGFFSKDALIEAIGHADIIGSGFAYASVLIGVFITALYTFRLFFKVFHGALDEHHHDVKESPLSITLPLVLLAIPSVIIAWPTFGPMVFGSYFTTAISQPDAYQIFAYEFTSAYGFLIHAFSSPVIYIALFGVATAYILYIQKPGILHDETYKSSFIYRLLDNKYYFDDLYENVFAKQARNIGDLLWKVGDIKTIDNFIVNGTAYRIGNIANRIKGIQTGYIYHYALMMILGLAIFLAWTILDLGGTS

SEQ ID NO: 100280 - protein, 355 aa, Unknown
  Bacterial polypetide isolated from the Sargasso Sea
MNFPILSTLIFLPLISSIFILLSKDKVSNNSPIYISLFSSIATFLLSIFLWYSLDINTSDFQFVEEKSWINNFIKFKLGVDGISILFIVLTTFITPICIISCVNSIQVRVKEFLIAILILETFMIGVFCSLDLVIFYLFFEAGLIPMFLIIGVWGGPRRVYSAFKFFLFTLLGSVLMLVAIIVIYWITGTTDITQIYEIKIPKEYQNILWLAFLSSFAVKMPMWPVHTWLPDAHVEAPTAGSVILAAILLKMAGYGFLRFSIPMFPVASEYFTPLIFSLSIIAIIYTSLVALMQDDMKKLIAYSSVAHMGYVTLGIFTLTKQGIEGSIYQMISHGLISAALFLCVGVVYDRMHSK

SEQ ID NO: 100281 - protein, 596 aa, Unknown
  Bacterial polypetide isolated from the Sargasso Sea
MEISIIALPLIASIISGFFGKFIGDRNSEIVTSFLVTISAILSAIVLYEVIINQYQDNIVIAKWISSGSLDVNWSMKIDPLSAVMLVVVTSVSSLVHIYSIGYMSHDPHKPRFMAYLSLFTFAMLMLVTSDNFIQLFFGWEGVGLCSYFLIGFWFKKDTANSAAIKAFLVNRVGDFGFALGIFLIFYLFGTVNYTEVFELIPTIVDKNLLFLGININAIDLICLLLFIGAMGKSAQILLHTWLPDAMEGPTPVSALIHAATMVTAGVFLVVRCSPIYEYSELALNVITIVGMSTAFFAATVALVQTDIKKIIAYSTCSQLGYMFFAAGVGAYNVAMFHLFTHAFFKALLFLGSGSVIHAFKNEQNINKMGGVWKKLPYTYTLMIIGTLALTGFPFLSGFYSKDAIIEFAYLRGNTTGYYAAGIGIITAFLTSIYSWRLIFKTFHGDYNNKDIKIEETHESPLVMLIPLIFLSIGAIFAGYTFKELFLGYGGINNFWQESIFFLEPLSTDHPPFWFLVLTPILVILSIPVAYYLFVKNKNLSNQIANVNKPLYQFLINKWYFDELYDVLFVIPSKKIGLFLWKFFDIKIIDGFGPDG

SEQ ID NO: 100282 - protein, 637 aa, Unknown
  Bacterial polypetide isolated from the Sargasso Sea
MEYFIVFLPLLGAFIAGFFGNKFDQKYSQFMTSLFVSISSILSIIVFLKVLNYGYSNNLLISSWINSGTLNVNWSIKVDALSSLMMVVVTLVSALVHIYSIGYMSHDPHKPRFMSYLSLFTFAMLVLVTSDNFLQLFFGWEGVGLCSYFLIGFWFKKKAANAAAIKAFVVNRVGDFGFALGIFLIFYYFGTVSYDEVFSQIQTLNAKNINFLGFEFKSIDLICILLFIGAMGKSAQIFLHTWLPDAMEGPTPVSALIHAATMVTAGVFLVVRCSPIYEYSELALNIITVIGMSTAFFAATIALVQTDIKKIIAYSTCSQLGYMFFATGVGAYNVAMFHLFTHAFFKALLFLGAGSVIHSFKDEQDIEKMGGVYKKIPYTYALMLVGTLALTGFPFLSGFYSKDAIIEFAYLRGNVTGIYAAGIGIVTAMLTAIYSWRLFFKTFHGNYNNQEVKYEKVHESPAVMVLPLIILGLGSIFAGFFFKELLIGNQSSVNFWGESIKFLEPLSEDHPPLWFILLTPTIVTLSIPISYYLFLKDKSVLENFTKTNYPLINFLKKKWYFDELYSYIFVEPCKKLGLFFWKKIDGLTIDRFGPDGISNLIKGLSIKAVKFQNGFIYQYAFIMLIGFSLILTYLIIK

SEQ ID NO: 100283 - protein, 496 aa, Unknown
  Bacterial polypetide isolated from the Sargasso Sea
MNFPIISSLILLPSIGALFLFFINSKNITGIKYVSLFVSIINFLISIYLWLIFDQSSYEFQFVESRVWIKDFINYKVGVDGISILFIILTTFITPLCILSVNSSIKNRLKEFLIAILLMETLMIGVFCSLDLVIFYLFFEGGLIPMFLIIGIWGGERRVYSAFKFFLFTLLGSVLMLIAVISIYWIAGTTDVEELYKLGIDPKYQNLLWLAFFSSFAVKTPMWPVHTWLPDAHVEAPTAGSVLLAAILLKMAGYGFIRFSIGLFPVASEYFVPFIFVISLIAIIYTSLVALMQDDMKKLIAYSSVAHMGFVTLGLFTFTQQGVEGGIFQMISHGIVSAALFFSVGVVYDRTHSRRINDYGGLVSVMPKYSILLMVFVLGSLGLPGTTGFIGEFLILMGTFKKSFLVAAIASLGVILGAAYMLWLYKRVVFGELTNQKLLKIIDLNKVELSILTLLALSIIFFGFYPDPFSNTYSVSVENFLNEYNDKLNSYNLQNQ

SEQ ID NO: 100284 - protein, 123 aa, Unknown
  Bacterial polypetide isolated from the Sargasso Sea
MSPEIFLEDYFSIVLFLLIALVLSCGFIFLNFMLSPSRPDPEKLSPYECGFEPFNDSRMEFDVRFYLVAILFIIFDLEIAFLFPWAISLGKIGIFGFVSMMIFLAILTIGFIYEWKKGALDWE

SEQ ID NO: 100285 - protein, 341 aa, Unknown
  Bacterial polypetide isolated from the Sargasso Sea
MIILNTIINIFIEIIIVVIPLFLIVAYTTYSERKIIGYMQSRLGPTRVGPSGIFQPIADVIKLATKEIIIPSNSNKGLFLTAPIIMLVPSLMVWSVIPLSEYFVIANINAGLLFVLALTSLSVYGVIIAGWASNSKYAFLGSMRSAAQIIAYEIAMGFALVGVLMVAGSLNLQEIVLSQKGGILHWYWLPLFPLFLIYFISGVAETNRAPFDVSEGESEIVAGFHVEYSGMAFAMFFLAEYMNLILISILASIMFFGGWLSPLEGTFLDSYFDWIPGFIWLSIKTIFFIFIFLWLRATLPRYRYDQIMRLGWKIFLPITLIWIFFEGIMIYYSVEPWFVKS

SEQ ID NO: 100286 - protein, 486 aa, Unknown
  Bacterial polypetide isolated from the Sargasso Sea
IGFWYKKPSANSAAIKAFIVNRIGDFGLALAIFTIFIIFGSVNYEIVFENIEKYKDTTFNFIGYDLNSINLICYLLFIGAMGKSAQLFLHTWLPDAMEGPTPVSALIHAATMVTAGVFLVVRCSPLFDVSPSAMAFVTFIGASTAFFAATVGLVQNDIKRIIAYSTCSQLGYMFVAAGLGAYGVAMFHLFTHAFFKALLFLGAGSVIHAVHEEQDIRKMGGIASFIPITHLMMLIGTISIMGFPFTSGFYSKDAIIETAYLSNSSFSTYAYLLTTLGVVMTSFYSWRLIFLVFNGKTRMEEEKFSKVHESSEVMTVPLMILALGALSFGFLFKGYFIGDYSESFWDLSIVLHHDEHHHIPFYIYYLPVLLGFLGLFVAWYMYIRNTSLASNIANTNKPLYDFLLNKWYFDEIYNYLLVKPAISFGRVLWKFLDEYIIDGFGPNGIASSVLNLSIRAKKIQSGYIYHYAFAILIGLSLLVTYFIFKF

SEQ ID NO: 100287 - protein, 122 aa, Unknown
  Bacterial polypetide isolated from the Sargasso Sea
MLADFLKDYLPIIVFLLVALVLSVAFVAVNYLASPKNPDPEKLSAYECGFEPFNDSRMEFDVRFYLVAILFIIFDLEIAFLFPWAISLGKIGIFGFISMMIFLFILTIGFIYEWKKGALDWE

SEQ ID NO: 100288 - protein, 493 aa, Unknown
  Bacterial polypetide isolated from the Sargasso Sea
MNELPILSILILLPIVGIFFMTLIRNNNDQSSNNLKHTALWISFLNFLISLYLLFSFNQQDADFQFEERYFWIEYGISYHLGVDGISILFIVLTTMLVPICILASYDSIKFSVKEYLIAFLALETFMIGVFCSLDLVLFYLFFEGGLIPMFLIIGIWGGERRVYSTFKFFLYTLAGSVFMLLAIIYIFITAGTTDVSYLLDYNFTRNEQIVLWLAFFASFMVKIPMWPFHTWLPDAHVEAPTAGSVILAGVLLKMAGYGFIRFSIGFFPEASELFAPLIFTLSIVAIIVTSLIALVQEDMKKLIAYSSVAHMGFVTLGIFTFTVQGIEGSIIQMISHGIVSAALFLCVGVVYDRLHTREISRYGGLVSKMPIYAFTFMIFILASLGLPGTSGFVGEFLVLLSIFSINTYFAVFATTGVVLAATYSLWLYRRIIFGALIKDDLSEMLDLTRREIIIFVPLITLTIFIGIYPKPVIDIIEPSAKKIVSQVNGKLN

SEQ ID NO: 100289 - protein, 401 aa, Unknown
  Bacterial polypetide isolated from the Sargasso Sea
MYAAIVFLPLLGAVVAGLFGRIIGDRVAHLVTCGLMAASMLLGAICFYDVALQQNAQTIQLFTWIESGTLKAVWALKIDTLTAVMILVVTSVSTMVHVYSIGYMHHDPHNPRFFAYLSLFTFAMLMLVTADNLVQMFFGWEGVGLASYLLIGFWYHKPEANAAAIKAFLVNRVGDFGFALGIFGTYLLFDTIVLDEIFRSVSRFEGSELTFLWFSADALTVLTMLLFIGAMGKSAQLGLHTWLPDAMEGPTPVSALIHAATMVTAGVFMLARLSPMMEYAPDTLALVTFIGASTAIFAASVGLCQNDIKRVIAYSTCSQLGYMFFACGVSAYSAGIYHLLTHAFFKALLFLGAGSVIHAMSDEQDMRKMGGLRKRIPLTYWLMIVGTLALTGFPFLSGFYS

SEQ ID NO: 100290 - protein, 664 aa, Unknown
  Bacterial polypetide isolated from the Sargasso Sea
MLAEGKISYTDGGIFAEFAWVIVVLPFIAALLITFFGKNLPLKGAEIALGSVFFIFLYSCILFYLNVTQGVASEFFINVGSIGSFQLEFGWVVDGLSIMMYFVVGTVSLLVFIYATNYMEGEIRYTFFFTSLTLFAGSMLVLVSSPTLLQLLIGWELVGVCSYLLIGHYWEEKENSSAAMKAFITNKVADVGLMIGIIILALTTGTLRISEILYQATHDYEAIKSVAYIAGILIFIGAMGKSAQFPLHVWLPDAMAGPTPVSALMHAATMVTAGVYLLGRLFPFYQGIAHEALDIVLVFGVITLFGAGLIAIVQDDLKKVLAYSTVSQLGYMVTAMGSGAYTAGLFHLWTHAFFKALLFLGAGSVIHAVHTNNMSEMGGLRKEMPRTFMTFIIGTVALAGLPPLAGFFSKDEILASLNHEGHTFFFFVAVAGAFITAFYMTRAVLLTFYGEYRGHGHPHESDSMMTTPLLVLAFLAVVGGWVNIPGIYTGFTTWVTTRKNGIIEYHPESFDYFALFSGLSAGLIGIGLAYYIYQVISEPQNGDNRIKIQPVWRILENKYYLDDFYFKFIIDPIKITFAKAVDKFNTEILDRFINSFGNAASYLGGVVYNRLDQGGIDKALNLTSTGTDTLGSKVKLIQTGKTQQYIMYFLTGVIVISALVLLVL

SEQ ID NO: 100291 - protein, 354 aa, Unknown
  Bacterial polypetide isolated from the Sargasso Sea
MEYLILFLPLIASFISGFFGKLITDKYCQIITSLFVSVSALLSLVVFYKVITSGYENNLIIATWINSGSLNVNWSINIDALSSVMLVVVTVISSLVHIYSIGYMSQDPHKARFMSYLSLFTFAMLTLVTSDNFIQLFFGWEGVGLCSYFLIGFWFKKPSANAAAIKAFLVNRVGDFGFALGIFLIFYIFGTVNYNEVFQEIPEIINRELVFLGINVNAVDLICLLLFVGAMGKSAQIFLHTWLPDAMEGPTPVSALIHAATMVTAGVFLVVRCSPIYEYSELALSIITIVGMATAFFAASVALVQTDIKKIIAYSTCSQLGYMFFAAGVGAYSVAMFHLFTHAFFKAIVIFRIR

SEQ ID NO: 100292 - protein, 355 aa, Unknown
  Bacterial polypetide isolated from the Sargasso Sea
MDFPILSSLILLPSVGAIFIFFSKSRDNKNISSKYIALFVSVVNFILSIYLWYSFDINTFDFQFIEERRWLTGFVNYKVGVDGISILFIILTTFVTSLCIISVNNTVKYRLKDFLIAILLMETFMIGVFCSLDLLVFYLFFEGGLIPMFLIIGIWGGDRRVYSAFKFFLYTLLGSVLMLVAIIFIYWQTGTTDIIQLYAIGIDPKYQNLLWLAFFSSFAVKTPMWPVHTWLPDAHVEAPTAGSVLLAAILLKMAGYGFIRFSIGLFPLASDYFTPFIFSLSLIAIIYTSLVALMQEDMKKLIAYSSVAHMGYVTLGIFTLTQQGVQGSLYQMISHGMVSAALFLSVGVIYERMHT

SEQ ID NO: 100293 - protein, 330 aa, Unknown
  Bacterial polypetide isolated from the Sargasso Sea
MLLPVAALLGFITIYGFGVIYSEIKVSSFIQDKTGPMGQGPGLHAGKWGLLQPVADGIKLFIKEDIIPASADKPLFILAPFLIFIGALTAFIAVPFGEKIIIVDMNIGIFYIIGVGSLAVIALILAGWSSNNKWALFGGMRSAAQIISYEIPAGISLVVVIMLASSLNMQEIIAYQEGGLFNWIIFDNPFMPIVFVIFFISALAETNRTPFDLPESESELVAGFVTEYSGTRYAIFFLSEYANMFVISAVAATAFLGGWQSPFENFLNTPAWSVFWMISKTFFLIFVMIWVRWTVPRLRVDQLMHLCWKVFIPIGLFNVFAVAIWIVVIG

SEQ ID NO: 100294 - protein, 122 aa, Unknown
  Bacterial polypetide isolated from the Sargasso Sea
MITNFLSEYLSIIIFLFISLLLSIGFIVINYIASPSNPDPEKLSAYECGFEAFDNARIEFDVRFYLVAILFIIFDLEIAFLFPWAISLGNIGLLGFYSMMAFLFILTIGFIYEWKKGALEWE

SEQ ID NO: 100295 - protein, 493 aa, Unknown
  Bacterial polypetide isolated from the Sargasso Sea
MNFPILSSLILLPIVGALFLFFTKDKDGNNLTAKYVALFTTIVNFLISIYLWLLFDPTTSAFQFVEERIWIKDFINYKVGVDGISILFILLTTFITPLCIVSVNNTVKNRLRDFLIAILIMESFMIGVFCALDLIVFYLFFEAGLIPMFLIIGIWGGPKRVYSAFKFFLYTLLGSVLMLVAIISIYWISGTTDVIKLYELGIDAKYQNLLWLAFFSSFAVKTPMWPVHTWLPDAHVEAPTAGSVLLAAILLKMAGYGFIRFSLGLFPVASEVFTPLIYTLSVIAIIFTSFIALMQEDMKKLIAYSSVAHMGFVTLGIFTLQQQGIEGSIIQMISHGLVSAALFLCVGVVYDRMHSRLIKSYGGIVTIIPKYSILFMLFTLAALGLPGTSGFIGEFLILMGAFKDNFLVAVIASFGVILGAAYMLWLYKRVVFGKLVNEDLKQMVDLNRSEYLILTCLAVPTLFFGFYPEPLFNTIEVSVSDLINMHNLNIASK

SEQ ID NO: 100296 - protein, 637 aa, Unknown
  Bacterial polypetide isolated from the Sargasso Sea
MELSIIFLPLIASIISGFFGKYIGDRNSEIVTSALVSISALLSIFVLYQVIVNQYEENIVIATWINSGSLNVNWSMLIDPLSAVMLVVVTSVSSLVHIYSIGYMSHDPHKPRFMAYLSLFTFAMLMLVTSDNFVQLFFGWEGVGLCSYFLIGFWFKKESANAAAIKAFVVNRVGDFGFALGIFLIFYLFGTVNYSEVFQQIPTVVDKNLLFLGFEIKAIDLICLLLFIGAMGKSAQILLHTWLPDAMEGPTPVSALIHAATMVTAGVFLVVRCSPIYEYSPLILNLITIVGMTTAFFAATVALVQTDIKKIIAYSTCSQLGYMFFAAGVGAYNVAMFHLFTHAFFKALLFLGSGSVIHAFKDEQDINKMGGVWKKLPYTYALMIIGTLALTGFPFLSGFYSKDAIIEFAYLKGNTTGYYAAGIGILTAFLTSIYSWRLIFKTFHGEYNNKEIKIEETHESPLVMLIPLFILSIGAIFAGVLFKGLFIGYGGENYFWAESIKFLEPLSTDHPPTWFLLLTPCLVLISIPIAYYLFVKNKAIPDDIVSMNKPLYKFLVNKWYFDELYEVLFIKSSKRLGLFLWKFFDGTVIDGFGPDGISSFIKKCSIKANKFQSGFIYQYAFVMLVGFSAFLTFLIVR

SEQ ID NO: 100297 - protein, 257 aa, Unknown
  Bacterial polypetide isolated from the Sargasso Sea
MLSNIPILSSITFLPLFGALIILLTCSDDEQGGKNSKFVALWTSLITFILSLFVLFNFDNNLNNFQFIEKASWIPLSNVSYHMGVDGISLPFVILSTFLIPICILASFQSIKKQVPLFMSLFLILEVLMVGTFCAMDILVFYIFFEAVLIPMFLIIGIWGGVRRVYSAFKFFLYTLLGSVLMLIAIFYIFSKTGTTEINEIAKFSFPYEVQILLFLAFFASFSVKLPMWPVHTWLPDAHVEAPTAGSVILAGVLLKM

SEQ ID NO: 100298 - protein, 371 aa, Unknown
  Bacterial polypetide isolated from the Sargasso Sea
FMIGVFCSLDLVIFYLFFEGGLIPMFLIIGIWGGPKRVYAAFKFFLFTLLGSVLMLVAIISIYWISGTTDVVDLYDLGIDPKYQNLLWLAFFSSFAVKTPMWPFHTWLPDAHVEAPTAGSVLLAAILLKMAGYGFIRFSIGLFPLASDNFVPLVYTLSLIAIIYTSFVALMQEDMKKLIAYSSVAHMGYVTLGIFTMTKQGVEGSIIQMISHGIVSAALFLCVGVLYDRVHSRMINTYGGVVNIMPKYAVMLMIFTLSSIGLPGTSGFIGEFLILLGAFKKSFLIATIASVGVILGAVYMLWLYKRVVFGKIVNNELMKISDLNRPEIFILSCLALLTIFFGFYPEPLLKTIDPSISNLIETYNYNINLYK

SEQ ID NO: 100299 - protein, 333 aa, Unknown
  Bacterial polypetide isolated from the Sargasso Sea
MNYDILITGLIIIAQILAVVVPVLISVAFLVYAERKVLALIQLRRGPNIVGPFGILQSFADALKLITKENIIPSGSNKIVFILAPIITMVLSLAGWAVIPFAPGWVVSDINVGIMYLFAVSSLGVYGIIMAGWASNSQYPFLGALRSAAQMVSYEVSIGFVIITVLLCVGSLNLSKIVLAQQTVWFAIPLLPMFIIFFISALAETNRLPFDLPEDESTLVAGFFTEYSSASFVLFFLGEYASMILMSSMTVILFLGGWLPPFDVYPLNVVPGVIWFTVKVIFILFLFIWVRGTFPRYRYDQLMRLGWKVFLPFSLFWVVATSGFLVYFDMLPN

SEQ ID NO: 100300 - protein, 636 aa, Unknown
  Bacterial polypetide isolated from the Sargasso Sea
MELSIIFLPLIASIISGFFGRYIGDRNSEIVTSVLVSISALLSIYVLYQVIVNQYEENIVIATWISSGSLDVNWSMLIDPLSAVMLVVVTSVSALVHIYSIGYMSHDPHKPRFMAYLSLFTFAMLMLVTSDNFIQLFFGWEGVGLCSYFLIGFWFKKESANAAAIKAFVVNRVGDFGFALGIFLIFYLFGTVNYSEVFQQIPTVVDKSLSFLGFEVNAIDLVCLLLFIGAMGKSAQILLHTWLPDAMEGPTPVSALIHAATMVTAGVFLVVRCSPIYEYSPLILNFITIVGMTTAFFAATVALVQTDIKKIIAYSTCSQLGYMFFAAGVGAYNVAMFHLFTHAFFKALLFLGSGSVIHAFKDEQNINNMGGVWKKLPYTYALMIIGTLALTGFPFLSGFYSKDAIIEFAYLKGNTTGYYAAGIGIITAFLTSIYSWRLIFKTFHGEYNNKEIKIEETHESPLVMLVPLFILSIGAVFAGFLFKGLFIGHGENLFWAESIMFLKPLSTEHPPLWFLLLTPCLVLLSIPIAYYLFVKNKELPNSIASINKPLYNFLVNKWYFDELYDVLFIKSSKKLGLFLWKFCDGTIIDGFGPDGISSFIKKCSIKATKFQSGFIYQYAFVMLLGFSALLTFLIVK

SEQ ID NO: 100301 - protein, 635 aa, Unknown
  Bacterial polypetide isolated from the Sargasso Sea
MEYAILFLPLIGSLIGYLGRSTTKYFAEISTSLFVSISAVLSILVFWNGIQNDSYGNYKIFEWISSGGFTANWSIKIDPLSSIMLVVVTFVSALVHIYSIGYMSHDPHKPRFMSYLSLFTFSMLALVVSDNFLQLFFGWEGVGLCSYLLIGFWYKKETANNAAIKAFIVNRIGDFGLAIAIFLIFFFFGTINFEETFQATSQFAEKKIIFFGFEANLITLICVFLFIGAMGKSAQFLLHTWLPDAMEGPTPVSALIHAATMVTAGVFLVVRCSPIFEYSQYALNLVTVVGMITAIFAASVALVQNDIKKIVAYSTCSQLGYMFFAAGVGAYHVAMFHLFTHAFFKALLFLGAGSVIHAFKDEQDIRNMGGVRKKLPYTYTFMLLGTLALTGFPFLSGFYSKDAIIEFAYLKNSTLGNYAATIGIFTAFLTSIYSWRLFFKAFHGPYNNKKILIDETHESPLVMLIPLVFLGIGAIFSGYLFKTTFIGHHSNEFWQESIFFLNEIKHESIPLWFLLITPILVLISIPISFYLYISKPKILEDFKNTNMPLYNFLLNKWYVDEFYEKVFVNPAKKIGSFFWKKGDVGIIDRFGPDGISKLVKIISNKTARLQTGFIYDYAFVMLLGLSILLTYLILK

SEQ ID NO: 100302 - protein, 122 aa, Unknown
  Bacterial polypetide isolated from the Sargasso Sea
MVADFLKDYFTIILFLILAFGLSCGFIVINYLFSPKNPDPEKLSAYECGFEPFNNSRMEFDVRFYLVAILFIIFDLEIAFLFPWAISLGQIGFFGYISMMIFLFILTIGFIYEWKKGALDWE

SEQ ID NO: 100303 - protein, 262 aa, Unknown
  Bacterial polypetide isolated from the Sargasso Sea
MLLPVAGLLGFITVYGFGVIYSEIKVSSFIQDKTGPMGQGPGLHAGKWGLLQPVADGIKLFIKEDIIPASADKPLFILAPFLIFIGALTSFIAVPFGEKIIITDMNIGIFYIIGVGSLAVIALILAGWSSNNKWALFGGMRSAAQIISYEIPAGISLVVVIMIASSLNMQEIIAYQAGGLFNWIIFDNPFMPIVFIIFFISVLAETNRTPFDLPESESELVAGFVTEYSGTRYAIFFLSEYANMFVVSAVAATAFLGGWQSP

SEQ ID NO: 100304 - protein, 455 aa, Unknown
  Bacterial polypetide isolated from the Sargasso Sea
GFLVGLMVILNTFNTFDFYTVLKSASDVPESTVTIISLFLLLGAFGKSAQFPLFSWLPDAMEGPTPASALIHAATMVTAGVFMLVRISPILQYSKIAGMVIVLVGLLTALLAAFSAINQYDIKKVLAYSTISQLGFMFIAIGAGAYVAAIFHLVTHAFFKALLFLGAGAVIHSMHHEQDIRKMGKLRKKMPVTASMMGIGTLAISGIPPLAGFWSKDEILASVFANGGMYYIFWALGLSAALLTAFYMGRHWLLIFEKDNGFDHSDVIEAPKTMTRPLIVLGLFSIFIGFINTPFFHGVEKVLHYSLEGVNVTHLPEGPTLIILAILSIGAGFTGLLIAYLIFSFEIFKKINFKRINLEYPINLVKDLSLNVLYLNNFGNSIFVSGMKTFTRKVAVIVDGLIIDGSVNFVSNAFGKTSSVASATQTGLVRSYVVYFGLFLLLLIGLFIVTPMVQQ

SEQ ID NO: 100305 - protein, 369 aa, Unknown
  Bacterial polypetide isolated from the Sargasso Sea
MIGVFCSLDLVVFYLFFEAGLIPMFLIIGIWGGTRRVYSAFKFFLFTLLGSVLMLIAIISIYWISGTTDVVQLYELGIDAKYQNLLWLAFFSSFAVKTPMWPVHTWLPDAHVEAPTAGSVLLAAILLKMAGYGFIRFSLGLFPIASEIFTPLIYTLSVIAIIFTSLIALMQEDMKKLIAYSSVAHMGFVTLGIFTIQQQGLEGSILQMISHGLVAAALFLCVGVVYDRMHSRLINTYGGIVSIIPKYSVLFMLFTLAALGLPGTSGFVGEFLILMGAFKDNFLVAVIASLGVIIGAAYMLWLYKRVVFGKLVNSDLKQMVDLNKSELFILSCLAVPTLFFGFYPEPLINTIEVSISNLIKVYNFNLISN

SEQ ID NO: 100306 - protein, 280 aa, Unknown
  Bacterial polypetide isolated from the Sargasso Sea
SHFLLHSWSRYLCGLFTLRLPDAHVEAPTAGSVILAGVLLKMAGYGFIRFSIGFFPDASEFFAPFIFSLSVIAIIVTSLIALVQEDMKKLIAYSSVAHMGFVTLGIFTFTVQGIEGGIIQMISHGIVSAALFLCVGVVYDRLHTREIARYGGLVSKMPFYSFSFMIFILASLGLPGTSGFVGEFLVLLSIFTVNTYFAIFATTGVVLAATYSLWLYRRIIFGALIKDDLSEMFDLTRREIIIFLPLIILTIFIGLYPKPIINIIEPSTEKIVNQIKMKLD

SEQ ID NO: 100307 - protein, 239 aa, Unknown
  Bacterial polypetide isolated from the Sargasso Sea
MEYLILFLPLLASIISGFFGKLIGDKMSQIITSLFVSVSALLSLVVFYKVITSAYENNLIIATWINSGSLNVNWSINIDALSSVMLVVVTVISSLVHIYSIGYMSHDAHKARFMSYLSLFTFAMLTLVTSDNFIQLFFGWEGVGLCSYFLIGFWFKKPSANAAAIKAFLVNRVGDFGFALGIFLIFYIFGTVNYNEVFQKIPEIVDKELVFIGISINAVDLICLLLFVGAMGKSAQIFL

SEQ ID NO: 100308 - protein, 122 aa, Unknown
  Bacterial polypetide isolated from the Sargasso Sea
MIYNYLTDYLSIIIFLFIALFLSIGFIVANFLASPSNPDPEKLSAYECGFEAFDDSRMEFDVRFYLVAILFIIFDLEIAFLFPWAISLGSLGALGFWSMMVFLGILTIGFIYEWKKGALEWE

SEQ ID NO: 100309 - protein, 294 aa, Unknown
  Bacterial polypetide isolated from the Sargasso Sea
MIALTLILLLSPLIGTLLLLFCQNSSKDLTVLISNISILIAFLLSLFLLYLFYSSNPGPISANFLTFADTKLFSLHFGIYIDSLALIMSTVVTSVSLLVHYYSISYMKDDTSFNRFFIYTNFFTFSMLLIVFANNFLQLFIGWELVGLSSYLLIGFWIKKESAIKANYKAFLVNRVGDIGLLLGLCLILLSYNTTDYNQIFQIKNSINMDSVSIFGFTFNALSAICLLLFIGAMAKSAQVPLQFWLPDSMEGPTPISALIHAATMVTAGIYMVARLSPYMSLLMEFSFSYFMLG

SEQ ID NO: 100310 - protein, 122 aa, Unknown; identical to SEQ ID NO: 100081
  Bacterial polypetide isolated from the Sargasso Sea

SEQ ID NO: 100311 - protein, 353 aa, Unknown
  Bacterial polypetide isolated from the Sargasso Sea
MEYAIIFLPLLGSLIGFFGKKLTKYFSEITTSIFVIFSAILSVIVFWQGLQNDDYGNYKIFEWVSSGNFVANWSINIDPLSSIMLVVVTFVSALVHIYSIGYMSHDPHKPRFMSYLSLFTFSMLALVVSDNFLQLFFGWEGVGLCSYLLIGFWYKRETANNAAIKAFIVNRVGDFGLAIGIFLIFFYFGTINFKEVFELVPQYLEDKFLFFGFETSLVTLICVFLFIGAMGKSAQFLLHTWLPDAMEGPTPVSALIHAATMVTAGVFLVVRCSPLFEYSQTSLNLVAIVGMITAIFAASVALVQNDIKKIVAYSTCSQLGYMFFAAGIGAYHVAMFHLFTHAFFKALLFLGAG

SEQ ID NO: 100312 - protein, 386 aa, Unknown
  Bacterial polypetide isolated from the Sargasso Sea
LLIWVKFDPSTANFQMTESLEWIEGTNIGYRMGVDGISIFFVLLSTLLTPICILASWEAIENRVREYMIAFLILETMMVGMFCALDILVFYIFFEGVLIPMFIIIGVWGGARRVYASFKFFLYTLLGSVLMLVAILVMYFMAGTTDVVVLSKFTFPSNFQTWLWLAFFASFAVKVPMWPVHTWLPDAHVEAPTAGSVILAGVLLKMGGYGFLRFSIPMFPEASEFFSPLVFLLSVIAIIYTSLVALAQDDLKKLIAYSSVAHMGFVTIGIFTLNSQGLEGAIFQMLSHGIVSGALFLCVGVIYDRMHTREIAAYGGLVNRMPKYALVFMVFTMASVGLPATSGFVGEFLVLLGAFYYNTWLAVFATTRCCIRRSIYALCLSKNNIG

SEQ ID NO: 100313 - protein, 178 aa, Unknown
  Bacterial polypetide isolated from the Sargasso Sea
MEYAVIFLPLVGSLLGFLGKSLIKYFSEIITSLFVSISAVFSIVLFWNGIQNNTYGNFKIFEWISSGNFVANWSINIDPLSSVMLVVVTFVSALVHIYSIGYMSHDPHKPRFMSYLSLFTFSMLVLVVSDNFLQLFFGWEGVGLCSYLLIGFWYKKESANNAAIKAFIVNRVGDFGLA

SEQ ID NO: 100314 - protein, 455 aa, Unknown
  Bacterial polypetide isolated from the Sargasso Sea
MEKIILFLPLASAFISGFFGKIIGNKLSQLVTCLFVCLSTVLSIMVFYEVLYNDYTNNIIIAKWINSGELNVNWSIYIDPISSVMLVVVTLISSLVHIYSIGYMAEDPHKPRFMAYLSLFTFAMLTLVTSDNFLQLFFGWEGVGLCSYFLIGFWYKKNSANNAAIKAFIVNRVGDFGFALGIFLIFYLCGTVNYSEVFKLIPNIDDKKLLFLGINFNAVDLICILLFIGAMGKSAQFFLHTWLPDAMEGPTPVSALIHAATMVTAGVFLVVRCSYIYEYSEFALSLITLIGMITALFAATVALVQNDIKKIIAYSTCSQLGYMFFAAGVGAYNVAMFHLFTHAFFKALLFLGAGSVIHSFKEEQDINKMGGVWKNLPYTYILMIIGTLALTGFPFLSGYYSKDAIIEFAYLKNTSLGYNAASVGIFTAILTSIYSWRLIFKTFHGDYNNKIISKS

SEQ ID NO: 100315 - protein, 637 aa, Unknown
  Bacterial polypetide isolated from the Sargasso Sea
MEYLILFLPLIGAVISGFFGKKIGDRNSQILTSSFVSISAILSLYVLYKVISSDYSNNLIIATWINSGSLNVNWSIKIDALSAVMFVVVNFVSALVHIYSIGYMSHDPHKTRFMAYLSLFTFAMLTLVSSDNFIQLFFGWEGVGLCSYFLIGFWFKKESANKAAIKAFVVNRVGDFGLALGIFLIFYIFGTVNYDEVFEQIPNVLDKKINFIGINIEIIDLICLLLLIGAMGKSAQFLLHTWLPDAMEGPTPVSALIHAATMVTAGVFLIVRCSPIYEYSPLALTVITIIGMTTAFFAATVALVQNDIKKIIAYSTCSQLGYMFFAAGVGAYNVAMFHLFTHAFFKALLFLGAGAVIHSFHEEQDINKMGGVIKKLPYTYVLMLIGTLALTGFPFLSGFYSKDAIIEFAYLRGNGVGILAAFVGIVTALLTSIYSWRLIFKTFHGNFNNKEISVDKIHESPFVMIAPLIILAIGAIFAGMAFKGLFIGHEIAYEFWGKSIKFLEPLSTDHPPTWFLFLTPILVTSAIPFSYYLYLKNTNIVNGLKEMNEPIYQFLVNKWYFDEIYDYLFVNPSKKIGKFLWKKVDGSIIDKFGPDGISSVIKNLSIKAVKFQSGFIYQYAFVMLIGFSVLLTILILN

SEQ ID NO: 100316 - protein, 423 aa, Unknown
  Bacterial polypetide isolated from the Sargasso Sea
ALGIFLIFYIFGTVNYNEVFEQIPNVLDKKINFVGINIVIIDLICLLLLIGAMGKSAQFLLHTWLPDAMEGPTPVSALIHAATMVTAGVFLIVRCSPIYEYSPLALTVITIIGMTTAFFAASVALVQNDIKKIIAYSTCSQLGYMFFAAGVGAYNVAMFHLFTHAFFKALLFLGAGAVIHSFHEEQDINKMGGVIKKLPYTYVLMLIGTLALTGFPFLSGFYSKDAIIEFAYLRGNGVGILAAFVGIVTALLTSIYSWRLIFKTFHGNFNNRELSVDKIHESPLVMIVPLVILAIGAVFAGMAFKGLFIGHEITYEFWGKSIKFLEPLSTDHPPTWFLFLTPILVTVAIPFSYYLYLKNENVVIGLKEMNEPIYKFLVKKWYFDEIYDYLFVNPSKRAGKFLWKKVDGSIIEKFGPDGISSVI

SEQ ID NO: 100317 - protein, 636 aa, Unknown
  Bacterial polypetide isolated from the Sargasso Sea
MELSIIFLPLIASIISGFFGRYIGDRNSEIVTSVLVSISAFLSIYVLYQVIVNQYEENIVIATWISSGSLDVNWSMLIDPLSAVMLVVVTSVSALVHIYSIGYMSHDPHKPRFMAYLSLFTFAMLMLVTSDNFIQLFFGWEGVGLCSYFLIGFWFKKESANAAAIKAFVVNRVGDFGFALGIFLIFYLFGTVNYSEVFQQIPTVVDKNLSFLGFEVNAIDLVCLLLFIGAMGKSAQILLHTWLPDAMEGPTPVSALIHAATMVTAGVFLVVRCSPIYEYSPLILNFITIVGMTTAFFAATVALVQTDIKKIIAYSTCSQLGYMFFAAGVGAYNVAMFHLFTHAFFKALLFLGSGSVIHAFKDEQNINNMGGVWKKLPYTYALMIIGTLALTGFPFLSGFYSKDAIIEFAYLKGNTTGYYAAGIGIITAFLTSIYSWRLIFKTFHGEYNNKEIKIEETHESPLVMLVPLFILSIGAVFAGFLFKGLFIGHGDNLFWAESIKFLEPLSTKHPPLWFLLLTPCLVLVSIPIAYYLFVKNKELPNSIVSMNKPLYNFLVNKWYFDELYDVLFIKSSKKLGLFLWKFCDGTIIDGFGPDGISSFIKKCSIKATKFQSGFIYQYAFVMLLGFSALLTFLIVK

SEQ ID NO: 100318 - protein, 244 aa, Unknown
  Bacterial polypetide isolated from the Sargasso Sea
MNFPILSFLILLPIVGALFLFFTKDKEGNNLTAKYVALFTTVVNFLISIYLWISFDQSTSTFQFVEDRTWIKGFINYKVGVDGISILFIILTTFITPLCIISVNNSVKNRLRDFLIAILIMESFMIGVFCALDLVVFYLFFEAGLIPMFLIIGIWGGARRVYSAFKFFLYTLLGSVLMLVAIISIYWITGTTDVVQLYEIGIDVKYQNLLWLAFFSSFAVKTPMWPIHTWLPDAHVEAPTAGSV

SEQ ID NO: 100319 - protein, 163 aa, Unknown
  Bacterial polypetide isolated from the Sargasso Sea
MNIVTIIGMTTAFFAATVAIVQNDIKKIIAYSTCSQLGYMFFAAGVGAYNVAMFHLFTHAFFKALLFLGSGSVIHSMNNEQDIRNMGDLWKKMPFTWIAMIVGTLALTGFPFLSGFYSKDAIIEYAYLSQSNIGYIATVVGIITALLTAIYSWRLIFKTFHGR

SEQ ID NO: 100320 - protein, 244 aa, Unknown
  Bacterial polypetide isolated from the Sargasso Sea
MNFPILSSLILLPSIGALFLFFTKGNKKNNFTIKYVALFTSAVNFFLSIYLWISFDSSTSDFQFVEERIWIKDFINYKVGVDGISILFILLTTFITPLCIISVNNSIKERLSEFLIAVLIMESFMIGVFCSLDLVIFYLFFEAGLIPMFLIIGIWGGARRVYSAFKFFLYTLLGSVLMLVAIITIYWLNGTTDVVELYNSGIDIKYQNLLWLAFFSSFAVKTPMWPVHTWLPDAHVEAPTAGSV

SEQ ID NO: 100321 - protein, 87 aa, Unknown
  Bacterial polypetide isolated from the Sargasso Sea
NNPDPEKLSAYECGFEAFDNARIEFDVRFYLVAILFIIFDLEIAFLFPWAISLGNIGLLGFYSMMAFLFILTIGFIYEWKKGALEWE

SEQ ID NO: 100322 - protein, 440 aa, Unknown
  Bacterial polypetide isolated from the Sargasso Sea
MEYIIVFLPIVGAILSGFFGKFIGHRTSEILTSLFVSISAILSIIVFYNVITFDYSNNIEIFTWINSGQLNVNWSIQVDALSAVMLVVVNLISSIVHVYSIGYMSNDPHKTRFMAYLSLFTFAMLTLVTSDNFLQLFFGWEGVGLCSYFLIGFWYKKESANAAAIKAFLVNRVGDFGFALGIFLIFYMYGTLNYQEVFNLVPNTLDREINFLGININSINLICILLFIGAMGKSAQFILHTWLPDAMEGPTPVSALIHAATMVTAGVFLVVRCSPIYEYSILAQNLIVIIGMTTAFFAASIALVQNDIKKIIAYSTCSQLGYMFFAAGVGAYNVAMFHLFTHAFFKALLFLGSGSVIHAFNEEQDITKMGGVWKKLPYTWILMLIGTLALTGFPFLSGFYSKDAIIEFAYLRGDSLGYIAASIGVFTAFLTSIYSWRLMF

SEQ ID NO: 100323 - protein, 527 aa, Unknown
  Bacterial polypetide isolated from the Sargasso Sea
MLKLLVFLPLLGSVLSGLFPSILGRKGSIWIPTLFCFVSLIFSIILLIQAIGGESYIVHLGYWIKSESLSVSWALKLDMLSAIMLFVVMLVSSLVHLYSIGYMEHDEHKPRFFSYLSLFTFAMLMLVTSNNFLQLFFGWEGVGLCSYLLIGFWFKKQSANAAAIKAFLVNRVGDLGLILGICVIYKLTGSLDFNIVFADVYSLINTSIIFFNINIPYIELACFLLFIGAMGKSAQIGLHTWLADAMEGPTPVSALIHAATMVTAGVFLLARCSPLFEYAPISLNLVILVGAATSIFAACIAITQNDIKKIIAYSTCSQLGYMFFACGVSAYSAGMFHLMTHAFFKALLFLGAGSVIHALSDEQDIRKMGGLAKTLPYTCIAMWIGSLALAGLPPFAGFFSKDIILEAAWAHNSGFGYIAFYLGLIAAFLTAFYSWKILFMVFHGKARSDISKAHESPLYILIPLFILSVGAIISGWIGYTMVDTHHDFWLGSILILDNHKALANAHYVPLLVKLSPIIVALLGIYFA

SEQ ID NO: 100324 - protein, 492 aa, Unknown
  Bacterial polypetide isolated from the Sargasso Sea
MELSIIFLPLIASIISGFFGKYIGDRNSEIVTSALVSISALLSIFVLYQVIVNQYEENIVIATWINSGSLNVNWSMLIDPLSAVMLVVVTSVSSLVHIYSIGYMSHDPHKPRFMAYLSLFTFAMLMLVTSDNFVQLFFGWEGVGLCSYFLIGFWFKKESANAAAIKAFVVNRVGDFGFALGIFLIFYLFGTVNYSEVFQQIPTVVDKNLLFLGFEIKAIDLICLLLFIGAMGKSAQILLHTWLPDAMEGPTPVSALIHAATMVTAGVFLVVRCSPIYEYSPLILNLITIVGMTTAFFAATVALVQTDIKKIIAYSTCSQLGYMFFAAGVGAYNVAMFHLFTHAFFKALLFLGSGSVIHAFKDEQDINKMGGVWKKLPYTYALMIIGTLALTGFPFLSGFYSKDAIIEFAYLKGNTTGYYAAGIGILTAFLTSIYSWRLIFKTFHGEYNNKEIKIEETHESPLVMLIPLFILSIGAIFAGVLFKGLFIGYGGE

SEQ ID NO: 100325 - protein, 306 aa, Unknown
  Bacterial polypetide isolated from the Sargasso Sea
MEYILIFLPLLGSLLSGFFGKYIGDRNSEIITCLFISISAILSLIIFKEVTFNGYENNLIIFKWINSGSLEVNWSIKIDTVSSVMLVVVCLISSLVHIYSIGYMSHDPHKTRFMAYLSLFTFSMLMLVTSDNFLQLFFGWEGVGLCSYFLIGFWFKKESANAAAIKAFVVNRVGDFGFAIGIFLIFYLFGTVNYDEVFTKIPQLIGNEISFIGLNVKSIDLICILLFIGAMGKSAQFLLHTWLPDAMEGPTPVSALIHAATMVTAGVFLVVRCSPIFEYSEFALNIICIVGMTTAFFARYCCFSSK

SEQ ID NO: 100326 - protein, 497 aa, Unknown
  Bacterial polypetide isolated from the Sargasso Sea
MTNLPLLSILTFLPLIGLPFIIIGKLINSENYEIISKYIALFVSLIAFIISLIILYNFDISTSNFQFNEHIPIMNGLMTYRMGIDGISILFILLSTFLTPICIIASWNIINDRVDYYMCSFLILETLMIGTFCALDIVLFYLFFESVLIPMFVIIGVWGGERRVYSAFKFFLYTLLGSVLMLVAIIYIVLISGTTELPVIYEVFNIDHGVIQNLLWLAFFASFAIKMPMWPFHTWLPDAHVEAPTAGSVILAAILLKMGGYGFLRFSLPLLPDASFYFSDFIFVLSVIAIIYTSIVAYVQEDIKKLIAYSSVAHMGFVTMGIFTFNINGVQGGIFQMFSHGLISGALFLSVGVIYNRMHTRQIVDYGGVVSVMPKFALFLMVFTLANIGLPGTSGFVGEFLTIMAIFSFNKIFAFFAASGVILSAVYGLWLYRKVIFEKITNESVKSLKDLTLGEKATLIPLLILIILFGIYPAPVLDLISASSIALVESVNLSGGN

SEQ ID NO: 100327 - protein, 340 aa, Unknown
  Bacterial polypetide isolated from the Sargasso Sea
FCCTVAVVQNDIKKIIAYSTCSQLGYMFFAAGVGAYNVAMFHLFTHAFFKALLFLGSGSVIHSLNDEQDIRNMGDLWKKMPFTWIAMIVGTLALTGFPLLSGFYSKDAIIEYAYLSQSNIGYMATTVGIITALLTAIYSWRLIFKTFHGKFNNKNISKSKIKESGLSITIPLGFLILGSIFSGFIFKDLLIGKTNQEFWGSSILILKDFDHSLIPLWILYITPFLVISAIPLSYYLFLKNPKHLDQVILKNKKVYKFLLNKWYFDEFYDAVFVKPIKKLGSFFWKSGDQKTIDRYGPDGISQLIKTISYKASKFQTGYLFDYAFVMLIGFSLLLTFLIIK

SEQ ID NO: 100328 - protein, 346 aa, Unknown
  Bacterial polypetide isolated from the Sargasso Sea
MFPILSSLIILPLIGSLFLIFIRSSEKNTSLKYVALFITFANFFLSLYLWKIFDPSISSFQFVENRIWIEGFINYKVGIDGISILFIILTTFITPLCIISVNSTITYRLKEFLIAILIMETLMIGVFCSLDLVIFYLFFEGGLIPMFLIIGIWGGNRRVYSAFKFFLFTLVGSVLMLVAIIAIYWISGTTDVEKLYELGIQEEYQKLLWLAFFSSFAVKTPMWPVHTWLPDAHVEAPTAGSVLLAAILLKMAGYGFIRFSVGLFPLASIYFVPLVYTLSLIAIIYTSLVALMQEDMKKLIAYSSVAHMGFVTLGIFTFTQQGIEGSIFQMISHGLISAALFLSVGV

SEQ ID NO: 100329 - protein, 325 aa, Unknown
  Bacterial polypetide isolated from the Sargasso Sea
MENSFILHSLLILFLPLLAFVIQIFFGKRLPREGDWVSIGAISITLILAITMFVKMLLVGDPEFKHEASFVWLDMGAFTISLGFLVDNITIIMLLIVALISTCTHIFSTEYLKGDIRYSRYFGYLGLFTFSMNGIVLANNLMSMYMFWELVGVSSYLLIGHWFEKDSAADASKKAFLTNRVGDIGFFIGIMLIYSAVGSFAFTDVFDGVASGMIAGTTLTFAGVGLFMGAMGKSSQFPLHIWLPDAMEGPTPVSALMHAATMVAAGVYLTVRIFPILTPDALLVVAYVGGFTALFAASIAITQTDIKKVLAYSTVSQLGYMILAV

SEQ ID NO: 100330 - protein, 364 aa, Unknown
  Bacterial polypetide isolated from the Sargasso Sea
MDFPILSSLILLPVLGAIFIFFSKSNNNLTIKYLALFVSFANFILSLYLWYLFDTTTSEFQFLEERSWIKGFINYKVGVDGISILFIILTTFITPLCVVSVNDTIKNRLKDFLVAILIMESLMIGVFCSLDLVVFYLFFEGGLIPMFLIIGIWGGEKRVYSAFKFFLYTLLGSVLMLVAIISIYWMTGTTDVTYLYNIGIDAKYQNLLWLAFFSSFAVKTPMWPVHTWLPDAHVEAPTAGSVLLAAILLKMAGYGFIRFSLGLFPIASEYFVPLVYFLSLVAIIYTSLVALMQEDMKKLIAYSSVAHMGFVTLGIFTITQQGLEGSIYQMISHGLVSAALFLSVGVLYERLHTRLINNYGGLVS

SEQ ID NO: 100331 - protein, 122 aa, Unknown
  Bacterial polypetide isolated from the Sargasso Sea
MIYNFLTDYLSIIIFLFIALFLSIGFIFANFLASPSNPDPEKLSAYECGFDAFDDSRMEFDVRFYLVAILFIIFDLEIAFLFPWAISLGSLGALGFWSMMIFLAILTIGFIYEWKKGALEWE

SEQ ID NO: 100332 - protein, 347 aa, Unknown
  Bacterial polypetide isolated from the Sargasso Sea
MEYLILFLPLIGAVISGFFGKKLGDKNSQILTSSFVSISAILSLLVLYKVISSDYSNNLVIATWINSGTLNVNWSIKIDALSAVMFVVVNFVSALVHIYSIGYMSHDPHKTRFMAYLSLFTFAMLTLVSSDNFIQLFFGWEGVGLCSYFLIGFWFKKESANRAAIKAFVVNRVGDFGLALGIFLIFYIFGTVNYDEVFEQIPNVLDKKINFIGINIEIIDLICLLLLIGAMGKSAQFLLHTWLPDAMEGPTPVSALIHAATMVTAGVFLIVRCSPIYEYSPLALTVITIIGMTTAFFAATVALVQNDIKKIIAYSTCSQLGYMFFAAGVGAYNVAMFHLFTHAFFKA

SEQ ID NO: 100333 - protein, 349 aa, Unknown
  Bacterial polypetide isolated from the Sargasso Sea
MFLIIGIWGGQKRVYSAFKFFLYTLLGSVLMLIAIISIYWITGTTDFVEIYNQGINPKYQKLLWLAFFSSFAVKTPMWPVHTWLPDAHVEAPTAGSVILAAILLKMAGYGFIRFSLGLFPNASEYFVPLVFFLSLVAIIYTSLVALMQEDMKKLIAYSSVAHMGFVTLGIFTFTQQGIEGSIYQMISHGLISAALFFCVGVLYDRMHTRLIKQYGGIVSIMPKYAIVFMIFTLGAVGLPGTTGFVGEFLILIGVFKKNFLVAVIASLGIILAAAYMLWLYKRVVFGEIQNEDLKKMIDLNYSEIAILWALAIPTIFFGFYPDPLINTVEVSVNNLIDVYNFNVLQMDNK

SEQ ID NO: 100334 - protein, 636 aa, Unknown
  Bacterial polypetide isolated from the Sargasso Sea
MELSIIFLPLIASIISGFFGKYIGDRNSEIVTSVLVSISALLSIFVLYQVIVNQYEENIVIATWISSGSLDVNWSMLIDPLSAVMLVVVTSISALVHIYSIGYMSHDPHKPRFMAYLSLFTFAMLMLVTSDNFIQLFFGWEGVGLCSYFLIGFWFKKESANTAAIKAFVVNRVGDFGFALGIFLIFYLFGTVNYSEVFQQIPTVVDKNLSFLGFEVKAVDLICLLLFIGAMGKSAQILLHTWLPDAMEGPTPVSALIHAATMVTAGVFLVVRCSPIYEYSPLILNFITIVGMSTAFFAATVALVQTDIKKIIAYSTCSQLGYMFFAAGVGAYNVAMFHLFTHAFFKALLFLGSGSVIHAFKDEQNINNMGGVWKKLPYTYALMIIGTLALTGFPFLSGFYSKDAIIEFAYLKGNTTGYYAAGIGIITAFLTSIYSWRLIFKTFHGGYNNKEIKIEETHESPLVMLVPLFILSVGAVFSGFLFKGLFIGYGDNLFWAESIKFLEPLSTEHPPLWFLLLTPCLVLLSIPIAYYLFVKNKKLPNSIVSMNKPLYNFLVNKWYFDELYDVLFIKSSKKLGLFLWKFCDGTIIDGFGPDGISSFIKKCSIKATKFQSGFIYQYAFVMLLGFSALLTFLIIK

SEQ ID NO: 100335 - protein, 122 aa, Unknown
  Bacterial polypetide isolated from the Sargasso Sea
MLSDFLQDYLSIIIFLVLALGLSCAFVVVNFILSPNKPDPEKLSAYECGFEPFEDSRMEFDVRFYLVAILFIIFDLEIAFLFPWAISLGNIGLLGFSSMMIFLFILTIGFIYEWKKGALDWE

SEQ ID NO: 100336 - protein, 355 aa, Unknown
  Bacterial polypetide isolated from the Sargasso Sea
MKELLTSFLSFLDPQWINLIWSLFQIAIVTVCLILTVVFLVYFERKVIGYMHARVGPNRVGPKGTLQSIADTIKLLLKEVIIPDKADRFFFLLSPLLLLIPALAAWAVVPFSPEFIIADINAGLLYLLALTSFGVYGVILAGWASNSKYAFLGSMRAAAQMVAYEIAMGFALVGVLMAGGSLKLGEIVAAQSGGVLSWFWIPLFPLFIVYFISGIAETNRHPFDLAEGEAEIVAGFHVEYSGIGFAIFFLAEYINMALISVLTSILFLGGWESFFAGISFLETSGFSFLTEPSLFWLLIKTLFFLFIFIWLRASFPRYRYDQLMSLGWKVLIPITILWIGVECVMYVMQIGPWSV

SEQ ID NO: 100337 - protein, 236 aa, Unknown
  Bacterial polypetide isolated from the Sargasso Sea
MEYAIVFLPLIASIFGYLGRSINKFFSEIFTSLLVSISAILSVIVFWNGIQINNYNNYKIFEWISSGDFVANWSINLDPLSSVMLVVVTFVSALVHIYSIGYMSHDPHKPRFMSYLSLFTFSMLVLVVSDNFLQLFFGWEGVGLCSYLLIGFWYKKESANDAAIKAFIVNRIGDFGLAIGIFLIFFFFGSISFEEVFQAVPEFVGTKLLFFGFELNLITLICLFLFIGAYGEICSI

SEQ ID NO: 100338 - protein, 299 aa, Unknown
  Bacterial polypetide isolated from the Sargasso Sea
MTEIPILSITIFLPLLGALVILLIKDDENSLNNIKKVALWTSVGVFLLSLFIWLQFDSSNSSYQFQEKFRWFNDFNFYYHIGIDGISLFMVILSTFLTPLCILASWESIKKRVKEYMIAFLFLETVMIGMFASIDILLFYIFFEVVLIPMYLIIGIWGGEKRIYASFKFFLYTLLGSVLMLIAIIAIYKLTNSMSIEDLQGNYFAKNIQIYLWLAFFASFAVKIPMWPFHTWLPDAHVEAPTAGSVILAGVLLKMGGYGFIRFSLGMLPEASEYFSPLIMTLSIVAVVYTSLVALAQTD

SEQ ID NO: 100339 - protein, 122 aa, Unknown; identical to SEQ ID NO: 100294
  Bacterial polypetide isolated from the Sargasso Sea

SEQ ID NO: 100340 - protein, 410 aa, Unknown
  Bacterial polypetide isolated from the Sargasso Sea
MEYLILFLPLLGAIISGFFGKLLGDRSCEIITSLFVSISTLLSLVIFYRVITVGYEDNILITTWINSGSLNVNWSINIDALSSVMLVVVTLVSSLVHIYSIGYMSHDPHKARFMSYLSLFTFAMLTLVTSDNFIQLFFGWEGVGLSSYFLIGFWFKKPSANAAAIKAFLVNRVGDFGFALGIFLIFYIFGTVNYNEVFQKIPEILEIKLSFLGINIDAVDLICILLFIGAMGKSAQIFLHTWLPDAMEGPTPVSALIHAATMVTAGVFLVVRCSPIYEYSELALSIITIVGMSTAFFAASVALVQTDIKKIIAYSTCSQLGYMFFAAGVGAYSVAMFHLFTHAFFKALLFLGSGSVIHSFKDEQDINKMGGVWKRLPYTYVLMIIGTLALTGFPLFSGYYSKDAIIEFAF

SEQ ID NO: 100341 - protein, 237 aa, Unknown
  Bacterial polypetide isolated from the Sargasso Sea
MEYLILFLPLIGSIISGFFGKTIGDKLSQLITCILVSISALLSLFIFFKVVSSGYEHNAIIATWINSGSLNVNWSIKVDALSAVMLVVVTLVSSLVHIYSVGYMSHDPHKPRFMSYLSLFTFAMLTLVTSDNFLQLFFGWEGVGLCSYFLIGFWYKKETANAAAIKAFIVNRVGDFGFALGIFLIFYIFGTVNYDEVFPKIPEIIDQKINFLSFEFNTIDLICLLLFIGAMGKICTI

SEQ ID NO: 100342 - protein, 122 aa, Unknown
  Bacterial polypetide isolated from the Sargasso Sea
MSLEFLNNYLTIVIFLAIALILSLGFVVLNFAFSPKNPDPEKLSAYECGFEPFNDSRMEFDIRFYLVAILFIIFDLEIAFLFPWAITLGNIGYFGFFSMMLFLFILTIGFIYEWKKGALDWE

SEQ ID NO: 100343 - protein, 322 aa, Unknown
  Bacterial polypetide isolated from the Sargasso Sea
MTEIPILSITIFLPFLGALVILLIKDDENSVNNIKKVALCTSVGVFLLSLFIWLQFDSSNSGYQFQEKFRWFNEFNFYYHIGIDGISLFMVILSTFLTPLCILASWESIKKRVKEYMITFLFLETVMIGMFASIDILLFYIFFEVVLIPMYLIIGIWGGEKRIYASFKFFLYTLLGSVLMLIAIIVIYRLTNSMSIEYLQGNFFAKNVQIYIWLAFFASFAVKIPMWPFHTWLPDAHVEAPTAGSVILAGVLLKMGGYGFIRFSLGMLPEASEYFSPLIMTLSIVAVVYTSLVALAQTDIKKLIAYSSVAHMGLVTIGIFIV

SEQ ID NO: 100344 - protein, 636 aa, Unknown
  Bacterial polypetide isolated from the Sargasso Sea
MEYTILFLPLIGALLGYAIKVFGDIYSEIVTTLFVSAAAIFSIILFYNGIVYEDYGNYKIYQWIASGKFVVNASINIDPLSSIMLVVVSLVSALVHIYSIGYMSHDPDKPRFMCYLSLFTFAMFTLVVSDNFLQLFFGWEGVGLCSYLLIGFWHKKNSANNAAIKAFIVNRIGDFGFAIGIFLIFIFFGTLNYEEVFTLAPNFADTEINFLGLEVNLITVTCLFLFIGAMGKSAQFFLHTWLPDAMEGPTPVSALIHAATMVTAGVFLVVRCSPIFEYSQVALNFVAIVGMITALFAASVAIVQNDIKKIIAYSTCSQLGYMFFAAGVGAYHVAIFHLFTHAFFKALLFLGSGSVIHSLNDEQDVRNMGDLWKKMPVTWFAMVVGTLALTGFPFLSGFYSKDAIIEFAFLKGTNVGYFAAGIGIMTAVLTALYSWRLIFKTFHGKYNNKNLSKSEIHESGMTITIPLLLLVVGSIFSGFLFKEFLIGHDYNNFWRDSILILEKFDHSGIPLWLLVITPLFVTILIPVSFYLYIKKTNILDGIVLKYKSLYNFLLNKWYFDELYNQIIIKPTKFIGSFFWEKGDIKIIDRLGPDGISKIIKIISNKSSKFQSGYIYDYAFIMLIGLSLLLTFFIFYK

SEQ ID NO: 100345 - protein, 499 aa, Unknown
  Bacterial polypetide isolated from the Sargasso Sea
MNFPILSAITFIPLIGALFVFLTRSERDEKNSGAIYISIFTSIVNFFIILFVWYSIDKTTSDFQFIEEYNWISGFIKFKFGIDGISILFILLTAFIIPICIFSCINSVKTRLKEFLIALLVLETFIIGVFCSLDLVIFYLFFEAGLIPMFLIIGIWGGPRKVYSAFKFFLFTLLGSVLMLVAIIAIYWISGTTDITEIYQTGIPSEYQYLLWLAFFSSFAVKLPMWPVHTWLPDAHVEAPTAGSVVLAAILLKMGGYGFIRFSVGMFPVASEYFTPLIFSLSTIAVIYTSLIALMQKDMKKLIAYSSVAHMGYVTIGIFTFNKQGIEGSIVQMFSHGLISAALFLSVGVLYDRTHSRLIKTYGGIVNLMPKYSFLFMIFVLGTLGLPGTSGFVGEFLVLVGVFKVNYLVAILASIGVILAAAYILWLYKRVVFGKMENIQLKKIKDVNLSEAVILGVLSAAVLFFGFYPDPLFQTVNVSVDNLINNYNTDIQQNITLKK

SEQ ID NO: 100346 - protein, 122 aa, Unknown
  Bacterial polypetide isolated from the Sargasso Sea
MLAEFLKDYLPIIVFLLVALVLSVAFVAVNYLASPKNPDPEKLSAYECGFEPFDDSRMEFDVRFYLVAILFIIFDLEIAFLFPWAISLGKIGIFGFTSMMIFLFILTIGFIYEWKKGALDWE

SEQ ID NO: 100347 - protein, 122 aa, Unknown
  Bacterial polypetide isolated from the Sargasso Sea
MLSDFLKDYLPIIIFLVLALGVSCAFVVVNFILSPKKPDPEKLSAYECGFEPFQDSRMEFDVRFYLVAILFIIFDLEIAFLFPWAISLGNIGLLGFSSMMIFLFILTIGFIYEWKKGALDWE

SEQ ID NO: 100348 - protein, 473 aa, Unknown
  Bacterial polypetide isolated from the Sargasso Sea
MNFPILSSLILLPLVGSLFILFVKSDSSNNYQSSKYVALFTSFVNFFISIYLWYLFDNTISEFQFVEDKEWLRGFVNYKVGIDGISILFILLTTFIAPLSIISINNSISHRLKEFLIAILVMESLMIGVFCSLDLIIFYLFFEGGLIPMFLIIGIWGGTRRIYSAFKFFLFTLLGSVLMLVAIITIYWITGTTDVVQLYELGIDWKYQNLLWLAFFSSFAVKTPMWPVHTWLPDAHVEAPTAGSVFLAAILLKLAGYGFIRFSLGLFPIASDFFTPLIYSLSLIAIVFISLVALVQDDMKKLIAYSSVAHMGFVTLGIFTLTQQGIEGSIIQMISHGLVSAALFLCVGVLYDRTHSRLISSYGGIVSIMPKYAVVLMIFTLAAIGLPGTSGFIGEFLILLGAFQKSFITAAIASLGVIFAAAYMLWLYKRVVFGNLINKELFKIPDLNKSEIFILWSLAIPTLFFGFYPRAHL

SEQ ID NO: 100349 - protein, 340 aa, Unknown
  Bacterial polypetide isolated from the Sargasso Sea
MNIFITLINILLDIILVAVPLFLIVAYTTYSERKIIGFMQSRMGPNRVGPSGFLQPIADVIKLLTKEIIIPSNANRGLFLTAPIIMLVPSFLVWSVIPLSEYFVIANINAGLLFILALTSLSVYGVILAGWSSNSKYAFLGSMRSAAQIIAYEIAMGFALVGVLMAAGSLNLQSIIESQRGGLFNWYWLPLFPLFLIYLISGIAETNRAPFDVSEGESEIVAGFHVEYSGVAFAMFFLAEYMNLILISILTSIMFFGGWLSPFEGTFINSFFEWIPGFVWLAIKTLFFIFIFLWLRATLPRYRYDQIMRLGWKIFLPITIIWIFLEGIMIYYKVGPWFIV

SEQ ID NO: 100350 - protein, 312 aa, Unknown
  Bacterial polypetide isolated from the Sargasso Sea
MVVNYTLDFLAEGKTSYTDGGIFAEFAWLIVVLPFIAALLITFFGKNLPLKGAEIALGSVFFIFLYSCILFYMNVTQGVASEFFINVGSIGSFQLEFGWVVDGLSIMMYFVVGTVSLLVFIYATNYMEGEVRYTFFFTSLTLFAGSMLVLVSSPTLLQLLIGWELVGVCSYLLIGHYWEEKENSSAAMKAFITNKVADVGLMIGIIVLALTTGTLRISEILYQATHDYEAIKSVAYIAGILIFIGAMGKSAQFPLHVWLPDAMAGPTPVSALMHAATMVTAGVYLLGRLFPFYQGIAHEALDIVLIFGVITL

SEQ ID NO: 100351 - protein, 330 aa, Unknown
  Bacterial polypetide isolated from the Sargasso Sea
MDYILSILFIFLQSFLVIFAVLMMAYLGIYGERKLWAAVQLRRGPNIVGPFGLLQPVADFLKLLLKEPIIPEKANKAIFVMAPLVTCFVALSAWAVVPFAENWVVADINVGILYIFAISSLGVYGIILGGWASNSKYPFMGAMRSAAQMVSYEVSIGFVIITVLLCVGSLNLTDIVLAQKKVWFFIPLFPMFIIFFVSALAETNRPPFDLPEAEAELVAGYQVEYSSSFFLLYFLGELAATFLMCAMITILFLGGWLPPFDIYPLNVIPGIVWFMLKVAFIFFMFGMVKALVPRYRYDQLMRLGWKVFLPISLFWVVLTASFLFVFDLAP

SEQ ID NO: 100352 - protein, 122 aa, Unknown
  Bacterial polypetide isolated from the Sargasso Sea
MLSDFLKDYLSIIIFLFIALGLSCAFVVVNYILSPKKPDPEKLSAYECGFEPFQDSRMEFDVRFYLVAILFIIFDLEIAFLFPWAISLGKIGLLGFLSMMIFLFILTIGFIYEWKKGALDWE

SEQ ID NO: 100353 - protein, 638 aa, Unknown
  Bacterial polypetide isolated from the Sargasso Sea
MLSYKLLFFLPLISTIFTYPFGVLLGEKTAQYFSSTLISIAAILSWFLFISFSSSSSSEIIIPVLEWFFVSGQFFNWGISVNSLTLLMLTLVLTVSALVHIYSIEYMSHDNSKVRFMTYLSLFTFCMVALVVSDNLIQLFFGWEGVGLASYLLIGFWHHKKSANFAAMKAFLVNRVADFGFLIGIATLYIFLDTLSINEIIEGKEKLFSYQINFLGFEINALIFSCFFLFIGAMGKSAQFGFHTWLPDAMEGPTPVSALIHAATMVTAGVFLTVRFSELMVMSDFIMTFVLIIGLLTAFFAASVGFFQKDIKKVIAYSTCSQLGFMFVACGLGAFNIAIFHLITHGYFKALLFLSSGSVIHGVHDEQDMDKMGNLFSKMKITAVMMWIGTLAIIGFPYSSGYFSKDLILSSSFNLISLGPLVYVILAIVSAMTAFYSFRLLFKVFHGNYNGSYDYEKIHESGPFMLVPLLFLSVGAILAGFFLNDLLAGYNSKNFWNGIIFFSQDKQYYSSFYPILSKSLVAFGVGLAVYYYGYNLNKLADLKKRFHSIYNFILNKWYFDEIYNKIFVLPLYNLGKFLWTKIDQGIIDKYLPNGSASIVSTISKAFKRIQTGYIFDYTFIIISGFTLFITIIFYVSIT

SEQ ID NO: 100354 - protein, 357 aa, Unknown
  Bacterial polypetide isolated from the Sargasso Sea
FYLFFEAGLIPMFLIIGIWGGARRVYSAFKFFLYTLLGSVLMLVAIISIYWITGTTDVVQLYEIGIDVKYQNLLWLAFFSSFAVKTPMWPVHTWLPDAHVEAPTAGSVLLAAILLKMAGYGFIRFSLGLFPVASEVFTPLIYTLSVIAIIFTSLIALMQEDMKKLIAYSSVAHMGFVTLGIFTLQQQGIEGSIIQMISHGLVSAALFLTVGVVYDRMHSRLISTYGGLVSVIPKYSILFMLFALASLGLPGTSGFIGEFLILMGAFKDNFLVAVIASIGVILGAAYILWLYKRVVFGKLINEDLKKMLDLNRSEYFILSCLAVPILFFGFYPDPLINTIEVSVTDLINTHNTNIASK

SEQ ID NO: 100355 - protein, 111 aa, Unknown
  Bacterial polypetide isolated from the Sargasso Sea
MTAEFLKDYLPIILFLIIALGLSCAFIVINFILSPKNPDPEKLSAYECGFEPFQDSRMEFDVRFYLVAILFIIFDLEIAFLFPWAISLGNIGILGFTSMMIFLFILTIGFI

SEQ ID NO: 100356 - protein, 497 aa, Unknown
  Bacterial polypetide isolated from the Sargasso Sea
MIDLPLLSILTFLPLIGLPFIIVGKIINAENYQNISKYIALFVSLITFLISLLILYNFNINTSDFQYNERIPIMNGLMTYRMGIDGISILFILLSTFLTPICIIASWNIISDRVDYYMCSFLVLETLMIGTFCALDIVLFYLFFESVLIPMFVIIGVWGGERRVYSAFKFFLYTLLGSVLMLVAIIYIVLASGTTELPIIYDVFNINHGIIQNLLWLAFFASFAVKMPMWPFHTWLPDAHVEAPTAGSVILAAILLKMGGYGFLRFSLPLLPDSSFYFSDFIFILSVIAIIYTSIVAYVQEDIKKLIAYSSVAHMGFVTMGIFTFNINGIQGGIFQMFSHGLISGALFLSVGVIYNRMHTRKIADYGGVVSVMPKFALFLMVFTLANIGLPGTSGFVGEFLTIMAIFSFNKIFAFFAASGVILSAVYGLWLYRKVIFEKITNDAVKSLKDLTLGEKVTLIPLLILIILFGIYPAPILDLISVSSIGLVESINLSGGN

SEQ ID NO: 100357 - protein, 631 aa, Unknown
  Bacterial polypetide isolated from the Sargasso Sea
MELFLIVFLPLIGSIITGFFGKILGLRLSHFISCSLILASSILSAYLFYMTLNGYQTSNQFLFDWINSGAIDASWSLKFDTLTSVMLVVVTSVSALVHIYSIGYMSHDPYQYRFFSYLSFFTFAMLMLVTSDNLLQLFFGWEGVGLASYLLIGFWYEKPSANAAAMKAFVVNRVGDFGFLLGIAVIYIATGSISFDVIFQKINNVNQSTINIACLLLFMGAMGKSAQLFLHTWLPDAMEGPTPVSALIHAATMVTAGIFLVARCSPIFENSDLALSFIIITGASTAFFAATVGLVQNDIKRIIAYSTCSQLGYMFVALGVGAYQVAIFHLFTHAFFKALLFLGSGSVIHAMSDEQDIQKMGGLYKIIPFTWIMMLIGTLALTGAPLLSGYYSKDAIIESAFASHAFGHEYAFYLLVFSALLTSFYSWRLIFLTFHGKTRASQDVLSKAHESPLSMTIPLLLLSFGALFSGYLFSDFFLSYELKELWGNSIYTHPDNHILEEIHHSPFWVKKIPLVMMIIGFIVATVFYLLLKNLPSFLSSKLPFIYNFLYNKWYFDELYNFIFVNPLKRIGNFLWLFFDKKIIDGFGPDGISSLVISISRNVSKIQTGYVYHYAFAMLIGLGFLLIRFVVY

SEQ ID NO: 100358 - protein, 330 aa, Unknown
  Bacterial polypetide isolated from the Sargasso Sea
MEYILSILFIFLQSFLVIFAVLMMAYLGIYGERKLWAAVQLRRGPNIVGPFGLLQPVADFLKLLLKEPIIPDKANKIIFIMAPLVTCFVALSAWAVVPFAENWVVADINVGILYIFAISSLGVYGIILGGWASNSKYPFMGAMRSAAQMVSYEVSIGFVIITVLLCVGSLNLTDIVLAQKKIWFFIPLFPMFIIFFVSALAETNRPPFDLPEAEAELVAGYQVEYSSSFFLLYFLGELAATFLMCAMITILFLGGWLPPFDIYPLNVIPGVVWFMLKVAFIFFMFGMVKALVPRYRYDQLMRLGWKVFLPISLFWVVLTASVLFIFDLAP

SEQ ID NO: 100359 - protein, 540 aa, Unknown
  Bacterial polypetide isolated from the Sargasso Sea
YIFIGYMSHDPHKSRFMSYLSLFTFAMLTLVTSDNFIQLFFGWEGVGLCSYFLIGFWFKKESANKAAIKAFIVNRVGDFGFALGIFLIFYLFGTVNYDEVFQQIPNILDKKLNFLSFNINSVDLICLLLFVGAMGKSAQFLLHTWLPDAMEGPTPVSALIHAATMVTAGVFLVVRCSPIYEYSELALSVVAIIGMVTAIFAASVALVQTDIKKIIAYSTCSQLGYMFFAAGVGAYNVAMFHLFTHAFFKALLFLGSGSVIHSFKDEQNINLMGGVWKKLPYTYSLMIIGTLALTGFPFLSGFYSKDAIIEFAYLSGNNVGTYAAYIGIFTAFLTSIYSWRLIFKTFHGTYNNSEINIDSMHESPPTMLIPLIVLAIGAIFAGMLFKDLFIGKELSYAFWNSSIKFLEPLSTDHPPNWFLFLTPSLVVISIPLSFYLFVKNLSVVDEIVKINKPLYIFLQKKWYFDELYDFIFINPSKRIGKFLWKQIDGSVIDRFGPDGISKLIKNFSARAVKLQSGYIYQYAFIMLLGFSVLLTLLILV

SEQ ID NO: 100360 - protein, 683 aa, Unknown
  Bacterial polypetide isolated from the Sargasso Sea
MTGSYITNACLLILFLPLIAFIINIFFGKRLPRQGDWVSVGAILITLLLSLSLFIGMLSNWDYKFSHEVYFSWIDLGAFKIDLGFWIDNITIVMLLVVSLISSMTHIFSLEYMKGDIRYNRYYAYLGLFTFSMNGIVLANNLMSLYIFWELVGVSSYLLIGHWFEKHSAADASKKAFLTNRVGDIGFFIGIMIMFTAIGSFNFQQLFTGVSNELISGSLLTFAGLGLFMGAVGKSSQFPLHIWLPDAMEGPTPVSALMHAATMVAAGVYLTVRLFPLFTVEALTIIAYVGGFTAIFAATIAITQNDIKKVLAYSTVSQLGYMILAVGVGNYVAAFFHLLTHAMFKACLFYGSGSVIHAMHHSLHELHDHDTDPQDMRNMGGFRSKMPITSLTMSIATLAIAGVPLFSGFLSKDAILAGTLSYVQHHPEHWVLAFFGFGAAAITAFYMFRLIFLTFYGEPKMPKVFEGIHESPKVMTYPLIVLAALSLFIFYTLPYINPFSDYGWFTKLIKATNSAVPGNPTAKEIYDGVHHAHYTAMALSLLVAAVGIGLSFTMYYKQKLSAENWAKRFGPLYKLSLNKYYFDENYNRFLYQPFLKLCNAVAYIDWDLYDKYFINGFGYVTKILSRITGRLDFDGLDQTLVDGIGRTAHGAGKNLKTLQTGRLQNYMLFALIGVIIILVIQTT

SEQ ID NO: 100361 - protein, 122 aa, Unknown; identical to SEQ ID NO: 100041
  Bacterial polypetide isolated from the Sargasso Sea

SEQ ID NO: 100362 - protein, 393 aa, Unknown
  Bacterial polypetide isolated from the Sargasso Sea
PDAMEGPTPVSALIHAATMVTAGVFLVVRCSPLFEYSQVALNTVAVVGMITALFAASVALVQNDIKKIVAYSTCSQLGYMFFAAGVGAYHVAIFHLFTHAFFKALLFLGSGSVIHAFKDEQDIRNMGGVWKKLPYTYFFMLIGTLALTGFPFLSGFYSKDAIIEFSYLKDSSIGYCAMVVGIFTAFLTSIYSWRLFFKTFHGSYNNKTININDAQESPLSMLIPLVFLGLGSIFAGLFFKEMFIGYNSDNFWKQSIFFLSEVRHNHIPLWLLFITPILVVIAIPISFYYFVTNKEILENYKLKTLPLYNFLLNKWYIDELYEHVFINPIKKIGLFFWKSGDQGFIDRFGPDGISKIIKNLSNKASRFQTGYIYDYAFVMLIGLSILLTYLILK

SEQ ID NO: 100363 - protein, 70 aa, Unknown
  Bacterial polypetide isolated from the Sargasso Sea
FSDSRIKFDVRFYLVAILFIIFDLEIAFLFPWAISLGSIGLLGFYSMMIFLFILTIGFIYEWKKGALEWE

SEQ ID NO: 100364 - protein, 672 aa, Unknown
  Bacterial polypetide isolated from the Sargasso Sea
MVNQNFINLLAEGKPEYTNGGVLAEFTWLIVVLPFLAAILITFFGKYLPLQGAELALGTVLFIFSYSAALLYEHATKGIANEFFINVGSIGSYDLEFGWVVDGLSIMMYFVVGTVSSLVFIYATNYMQGEIRYTFFFTSLTLFAGSMLVLVSSPTLLQLLIGWELVGVCSYLLIGHYWEKKENSSAAMKAFITNKIADVGLMIGIIVLALSTKTLRISEILYQSTHDYADIKTVAYLGGVLLFIGAMGKSAQFPLHVWLPDAMAGPTPVSALMHAATMVTAGVYLLGRMFPFYQGMASQALDIVLLFGVITLLGAGLVAVVQDDLKKVLAYSTVSQLGYMVTAMGSGAYTAGLFHLWTHAFFKALLFLGAGSVIHAVHTNNMSEMGGLRKEMPRTFSTFIIGTVALAGLPPLAGFFSKDEILASLNHEGHNLYFIISVLGAFITAFYMTRAVLLTFFGDYRGDGHPHESDKMMTIPLIILSGFAIVAGWANIPGVYTGFTKWVTTRKNYIVEYHPESFDLVAMFSGLTSGLLGIGLAYYVYHMSGNATDGDEKIKIKPIWNLLENKYYLDFFYFKFIIDPVKITFAKFVDSFNSNVLDRFVNGVGTTASKAGGIVYTNLDQGGIDKVLNLSSTGTDTIGSKVKLIQTGKTQQYLMYFLIGVIVISLIILLVL

SEQ ID NO: 100365 - protein, 426 aa, Unknown
  Bacterial polypetide isolated from the Sargasso Sea
FGININSINLICILLFIGAMGKSAQIFLHTWLPDAMEGPTPVSALIHAATMVTAGVFLVVRCSPIFEYSELALNIVTIVGMSTAFFAATVALVQNDIKKIIAYSTCSQLGYMFFAAGVGAYNVAMFHLFTHAFFKALLFLGSGSVIHSFKDEQNVTEMGGIWKKLPYTWILMIIGTLALTGFPLLSGFYSKDAIIEFAYLRGNTTGYYAAIIGIFTALLTAIYSWRLIFKTFHGSYNNKKLNIDEMHESPLVMIIPLIILSVGAVFSGFFFKELFIGYNSAENFWLNSIKFLEPLSKDHPPLWIIYSTPVLVVLAIPFSYYLFIYNKNITDWLVNENKPLYNFLLNKWYFDEFYNYLFVKKFKKIGIFFWKNVDVRIIDKYGPDGISNLIKVLSNKAVKFQSGYIYQYALIMLLGFSVILTYLILT

SEQ ID NO: 100366 - protein, 410 aa, Unknown
  Bacterial polypetide isolated from the Sargasso Sea
KENSSAAMKAFITNKIADIGLMIGIIVLALSTKTLRISEILYQSTHDYEDIKTVAYLGGVLLFIGAMGKSAQFPLHVWLPDAMAGPTPVSALMHAATMVTAGVYLLGRMFPFYQGMASEALDVVLLFGVITLLGAGLVAVVQDDLKKVLAYSTVSQLGYMVTAMGSGAYTAGLFHLWTHAFFKALLFLGAGSVIHAVHTNNMSEMGGLRKEMPRTFSTFIIGTIALAGLPPLAGFFSKDEILASLNHEGHNIYFIISILGAFITAFYMTRAVLLTFFGEYRGDGHPHESDKMMTIPLIVLSGFAIVSGWVNIPGVYTGFTTWVTTRKNAIVEYHPESFDLVAMFSGFSAGIFGIGLAYYVYQLSGKAVDGDQKIKIKPIWKLLENKYYLDFFYFKFIIDPVKINLAKFID

SEQ ID NO: 100367 - protein, 361 aa, Unknown
  Bacterial polypetide isolated from the Sargasso Sea
NFFLSIYLWILFDPTTSEFQFVEERIWIKDLINYKVGVDGISILFILLTTFITPLCIVSVNNSIKERLSEFLIAVLIMESFMIGVFCSLDLVIFYLFFEAGLIPMFLIIGIWGGARRVYSAFKFFLYTLLGSVLMLVAIITIYWLNGTTDVVELYNSGIDIKYQNLLWLAFFSSFAVKTPMWPVHTWLPDAHVEAPTAGSVLLAAILLKMAGYGFIRFSLGLFPAASEIFTPLIYTLSVIAIIFTSFIALMQEDMKKLIAYSSVAHMGYVTLGIFTIQQQGIEGSIIQMISHGLVSAALFLCVGVVYDRMHSRLINTYGGIVSIIPKYSILFMLFTLAALGLPGTSGFVGEFLILMGAFKD

SEQ ID NO: 100368 - protein, 508 aa, Unknown
  Bacterial polypetide isolated from the Sargasso Sea
SDNFIQLFFGWEGVGLCSYFLIGFWFKKESANKAAIKAFVVNRVGDFGLALGIFLIFYIFGTVNYDEVFEQIPNVLDKKINFIGINIEIIDLICLLLLIGAMGKSAQFLLHTWLPDAMEGPTPVSALIHAATMVTAGVFLIVRCSPIYEYSPLALTVITIVGMTTAFFAATVALVQNDIKKIIAYSTCSQLGYMFFAAGVGAYNVAMFHLFTHAFFKALLFLGAGAVIHSFHEEQDINKMGGVIKKLPYTYVLMLIGTLALTGFPFLSGFYSKDAIIEFAYLRGNGVGILAAFVGIVTALLTSIYSWRLIFKTFHGNFNNKELSVDKIHESPLVMIAPLVILAIGAIFAGMAFKGLFIGHEIAYEFWGKSIKFLEPLSTDHPPTWFLFLTPILVTSAIPFSYYLYLKNKNIVIGLKEMNEPIYQFLVKKWYFDEIYDYIFVNPSKRVGKFLWKKVDGSIIDKFGPDGISSVIKNLSTKAVKFQSGFIYQYAFVMLIGFSVLLTILILN

SEQ ID NO: 100369 - protein, 372 aa, Unknown
  Bacterial polypetide isolated from the Sargasso Sea
VFCALDLVVFYFFFEACLIPMFLIIGVWGGARRVYATFKFFLYTLSGSVLMLIAIIYIYIVTGTTDVTILSGYDFNYSIQNWLWLAFFISFAVKMPMFPVHTWLPDAHVEAPTAGSVILAGVLLKMGGYGILRFSIPLFPIGSFVFTDLVFVLSVIAIIYTSFIAIAQEDIKKLIAYSSVAHMGFVTMGIFTFTDQGIQGGVFQMISHGLISAALFLSVGVIYDRLHTREIAVYGGVVKKMPIYAAFFLVFTMANIGLPGTSGFVGEFLTLLGAFKVNLYVAFFATTGVILSAAYALWLYKRVIFGVITNDEVEKLLDLNLREYIILLPFVLLIILFGVYPNMVIDLTAASTTNLIDNYNYAIEQYQSHLVS

SEQ ID NO: 100370 - protein, 484 aa, Unknown
  Bacterial polypetide isolated from the Sargasso Sea
IGALFIFFVRSSNSQYQSSKYVALFITLANFFLSLYLWIVFDKSIVDFQFVEEREWISGFVNYKVGVDGISILFILLTTFITPICVITVNATIKNRLKDFLIAILILETFMIGVFCSLDLVVFYLFFEAGLIPMFLIIGIWGGERRVYSAFKFFLYTLLGSVLMLVAIISIYWITGTTDVIKLYELGIDAKYQNLLWLAFFSSFAVKTPMWPVHTWLPDAHVEAPTAGSVLLAAILLKMAGYGFIRFSLGLFPDASLYFVPLVYTLSLIAIIYTSLVALMQEDMKKLIAYSSVAHMGFVTLGIFTMTQQGIEGSIFQMISHGLVSAALFLCVGVVYDRLHTRLINRYGGLVSIMPKYAIVFMVFTLGALGLPGTSGFIGEFLVLMGAFKKNILVATIASLGVILGAAYMLWLYKRIIFGKLINEDVKKMVDLKRFEIVTLWLLVLPIIFFGFYPEPLINSIEVSVANMIDMNDLDKINKLALGE

SEQ ID NO: 100371 - protein, 256 aa, Unknown
  Bacterial polypetide isolated from the Sargasso Sea
MINLAQTYFIEVMTIILYCLLIFVPLLLGVVMALYADRKIWAAVQKRRGPNVVGPYGLFQVPADGLKFIFKEIILPDGSDKTVFLIAPIITLALSIAAWAVVPVQAGVVLANINVGILYIFAISSLGVYGILMAGWSSNSKYPFFGALRSAAQMVSYEVSIGFVIITVLLCVGSLNLTEIVMAQKTMWFFIPLFPMFIVFFISALAETNRPPFDLPEAESELVAGYQTEYSGMPFVLFMFGEYINILLMCAMTTIL

SEQ ID NO: 100372 - protein, 146 aa, Unknown
  Bacterial polypetide isolated from the Sargasso Sea
MFFFIKKCDVSALHEQLKNDIQTSMLSDFLQDYLSIIIFLVLALGLSCAFVVVNFVLSPKKPDPEKLSAYECGFEPFEDSRMEFDVRFYLVAILFIIFDLEIAFLFPWAISLGNIGLLGFSSMMIFLFILTIGFIYEWKKGALDWE

SEQ ID NO: 100373 - protein, 237 aa, Unknown
  Bacterial polypetide isolated from the Sargasso Sea
MDRKLFTPISIRNLTLSNRIVVAPMCQYSAVNGSATDWHLMHLGQLSISGSSLIFVEATAVEEKGRITPGCLGLYSDENQKALSKIIEFVKRYGNTKIGIQLAHAGRKASTQVPWKGGTPLNQDNSDSWQTVAPSSESYNSNWPLPIELNEEGLEYIKKCFVKSAKRAVEIGFDIIELHMAHGYLIHQFLSPISNKRKDKYGSCFENRIRYPLEIFKAIREEISTDYPLGVRFSATD

SEQ ID NO: 100374 - protein, 302 aa, Unknown
  Bacterial polypetide isolated from the Sargasso Sea
RGRITPGCVGLHNDEQEASQKRVLEFCRKYGQAKMGIQLAHAGRKASTVPPWEGGKPLPPENGAWETVGPSPVPFAEGWHVPVEMTLQDLETVKNAFVDSTRRAERLGYDVIEIHGAHGYLLSAFLSPLANQREDEYGGSLENRMRYPLEIFEAVRCVWPSEKPLGMRISASDWDDAGWTIDDSVIFARKLKQLGCDFVDCSSGGNSPNRPPVGPGFPGYQLPFSEQVRNGSDIPTVAVGMLRDYNLVEEAVSNGKADLIALGRGMLYEPRWAWHAAHELGGKASYPNQYARSEPEKWPKAF

SEQ ID NO: 100375 - protein, 120 aa, Unknown
  Bacterial polypetide isolated from the Sargasso Sea
NSSIEFSKKLIDSGVDMIDCSSGGNYSDQKIELKPGYQVPLSKSIKENVEILTGAVGLITEKDQAEEVLDNHEADVIFLGRELLRNPYWTLYASGEIDEWPLQYQRSFEGSKKINYIRED

SEQ ID NO: 100376 - protein, 240 aa, Unknown
  Bacterial polypetide isolated from the Sargasso Sea
GWQSVAPSSVSFGEGFAVPSELSLEDISGIIMDFASAAKRSVEAGFKVIELHFAHGYLASTFMSPLSNTRKDKYGGSLENRCRFAIDIASAVRNVIPESMPLFARISASEYMPGGWDIDDAIELSGWLKDQGVDLIDCSSGGISQGQQIDTFPGYQVPFASKIRSEVDVLTGAVGLIRDAAQAEQTLRNGDADAILLGRELLRNPYWALYAREELDRTNDLWPAQYFKSYTDTYSGVPPR

SEQ ID NO: 100377 - protein, 261 aa, Unknown
  Bacterial polypetide isolated from the Sargasso Sea
TNFIKEMNAIPAIQIAHSGRKGSTHKPWEEGYSVPDNKGGWQPVGPSSIPFDNKSVTPKELSIQEIKDLENKFANSAVRAEKAGFKCIELHMAHGYLVHEFLSPISNKREDDYGGNFENRMKFALNIVKKVRGAISENTILLARISATDYADNGWDEYQSVELSKKFKGLGVDLIDCSSGGNYSKQEIIAEPNYQVKFSKKIKKEAGIMTGAVGLITEPDQAEKILKDNEADVIFMGRELLRNPYWPLSSMKKLDGNNFPL

SEQ ID NO: 100378 - protein, 303 aa, Unknown
  Bacterial polypetide isolated from the Sargasso Sea
FVEATGVESRGRITPGCVGLHNDEQEASQKRVLEFCRKHGQAKMGIQLAHAGRKASTMPPWEGGKPLPPEIGAWETVGPSPVPFAEGWHVPVEMTLQDLEIVKNAFVDSTRRAERLGYDVIEIHGAHGYLLSAFLSPLANQREDEYGGSLENRMRYPLEIFEAVRRAWPSENPLGMRISASDWDDAGWTIDDSVIFARELKQRGCDFVDCSSGGNSPNRPPVGPGFPGYQLPFSEQVRNESDIPTIAVGMLKDYNLAEEAISNGKADLIALGRGMLYDSRWAWHAAHELGGKASYPNQYARSE

SEQ ID NO: 100379 - protein, 231 aa, Unknown
  Bacterial polypetide isolated from the Sargasso Sea
EGGWDIVAPSSIPFDDTCGIPVGLEVTDINEIIAKFVYSAELSVESGIKVIELHFAHGYLINSFMSKTSNTREDSYGGSFENRIRLPLEIISKVRTVIPESMPLFVRISCSEHLRDGWDIDDSIQFAHFAKQEGVDLIDCSSGGNSYNQEMKVFPGYQVQYAEAIKKNVDILTGAVGLITQPEQAEEILANGRADVVLLGRELLRNPYWPIHAQKTLDGEAAIADQYLRAL

SEQ ID NO: 100380 - protein, 370 aa, Unknown
  Bacterial polypetide isolated from the Sargasso Sea
MTALFSPFTLRGVTLPNRIVISPMCQYSAERGEATDWHMIHLGHLALSGAGLLCIEATAVEPDGRITHGDLGLWDDATEAALKPVLAAIRKHSPVRVAMQLSHAGRKASSNVPWQGGQLVSVADGGWLPHAPSAVPHKDGETPPLALDAAGLKRIRDAFAAAAKRAARLGIDAIEVHAAHGYLLHQFLSPLANQRTDEYGGSLENRMRFPLEIFEIVRAAFPEDRPVGVRVSATDWVEGGWELDDTIAFAHELKRRGCDWIDVSSGGVSPLQKIPLSPGYQVPFAQAVKRAVGMPTIAVGLINEPAHANRLIEAGDADFVAMARAMLYDPRWPWHAAAELGAQVTAPPQYWRSQPREHKALFGDIAFGQR

SEQ ID NO: 100381 - protein, 188 aa, Unknown
  Bacterial polypetide isolated from the Sargasso Sea
MLKLKVNEIEVEVEEGLTVLQACEKAGVEIPRFCYHEKLSIAGNCRMCLVEMEKSPKPIASCAMPAAEGMNIKTNTALVEKARKGVMEFLLANHPLDCPVCDQGGECDLQDQSMYYGVDKSRFKENKRAVPEKNMGPLIKTQMTRCIHCTRCVRFATEVAGVPELGAIGRGEDMQITTYLEQSMQSEL

SEQ ID NO: 100382 - protein, 98 aa, Unknown
  Bacterial polypetide isolated from the Sargasso Sea
MWSCTPCREGSGWMWRMLERMAKGDATKDEVDMLGDVTSQIAGHTICAFGEGSSWPVQGLLRHFKKEIEKRNNLDPIVQKKNNIPYLVDQHLLDKKNA

SEQ ID NO: 100383 - protein, 112 aa, Unknown
  Bacterial polypetide isolated from the Sargasso Sea
MEKIMLKPENKIFKNLYNEHGWEIENAITRDDWKDTKNIISKGREWIINEIKTSELRGRGGAGFSTGLKWSFAPKEVGSRPHYLVINADESEPGTCKDRDILRFEPQKLIEG

SEQ ID NO: 100384 - protein, 133 aa, Unknown
  Bacterial polypetide isolated from the Sargasso Sea
MLKKEDKIFKNLYNELGWDIESSLKRDDWKNTKDLISKGREWIINEVKTSELRGRGGAGFSTGLKWSFAPKEVGSRPHYLVINADESEPGTCKDRDILRFEPQKLIEGCLIAGFAVNAHVCYIYIRGEYLNEG

SEQ ID NO: 100385 - protein, 106 aa, Unknown
  Bacterial polypetide isolated from the Sargasso Sea
MLKDEDRIFKNLYNDLGWDISSAMNRGDWSNTGEIISKGKEWIINEVKKSELRGRGGAGFPTGMKLSFAPKQVGSRPHYLVINADESEPGTCKDRDILRFEPQKIN

SEQ ID NO: 100386 - protein, 146 aa, Unknown
  Bacterial polypetide isolated from the Sargasso Sea
MLKDEDRIFKNLYNDLGADLNSSKKRGDWTNTKDLCEKGRDWIIDEIKKSELRGRGGAGFPTGLKWSFAPKEVGSRPHYLVINADESEPGTCKDRDILRFEPHKLLEGCLIAAYAVNSHKCYIYLRGEYYNEGIELQKAIDEAYKD

SEQ ID NO: 100387 - protein, 104 aa, Unknown
  Bacterial polypetide isolated from the Sargasso Sea
MLKEEDKIFKNLYNNLGSSIEDSIKRDDWLNTKDIISKGSEWIINEIKISELRGRGGAGFPTGVKWSFAPKKIGSRPHYLVINADESEPGTCKDRDIMRFEHKS

SEQ ID NO: 100388 - protein, 166 aa, Unknown
  Bacterial polypetide isolated from the Sargasso Sea
MLKDEDRIFQNLYNDGGADINSALSRGDWSNTKEICERGRDWIINEIKSSELRGRGGAGFPTGLKWSFAPKEVGSRPHYLVINADESEPGTCKDRDLLRFEPHKLIEGCLIASYAVNAHKCYIYIRGEYFNEGQKLQKAIDEAYEQKLIGKDSSGTGWDLDIYIHY

SEQ ID NO: 100389 - protein, 180 aa, Unknown
  Bacterial polypetide isolated from the Sargasso Sea
MPKITINGKEIEFEKGMTVLQACELANVEIPRFCYHEKLSIAGNCRMCLVEMEKSPKPIASCAMPAAEGMNIKTNTSLVEKARKGVMEFLLANHPLDCPVCDQGGECDLQDQSLYYGVDKSRFVENKRDVKEKYMGPLIKTQMTRCIHCTRCVRFATEVAGVPEIGAIGRGENMQITTYL

SEQ ID NO: 100390 - protein, 160 aa, Unknown
  Bacterial polypetide isolated from the Sargasso Sea
MLKPEDKIFKNLYNQLGWEIDNAIKRDDWKDTKNLISKGREWIINEVKNSELRGRGGAGFPTGLKWSFTPKEVGSRPHYLVINADESEPGTCKDRDILRFEPQKLIEGCLIAGYAVNAHVCYIYIRGEYFNEGKRLQEAIDQAYQKKYLGKNACDSGWDL

SEQ ID NO: 100391 - protein, 260 aa, Unknown
  Bacterial polypetide isolated from the Sargasso Sea
EKSPKPIASCAMPAADGMVIKTNTPNIEKSRKGVMEFLLANHPLDCPVCDQGGECDLQDQSMFYGIDKSRFKENKRAVPDKNMGPLIKTQMTRCIHCTRCIRFATEIAGVPELGAIGRGEDMQITTYLEKSIQSELSGNVIDLCPVGALTSKPYVFEARPWELKKTETIDVMDAVGSNIRVDTYDWEVKRVLPVINEEINEEWISDKTRYACDGLLNQRLDTPYIKYNNKFEKATWDEVYKIIKSKIQNTKKENICGFVG

SEQ ID NO: 100392 - protein, 166 aa, Unknown
  Bacterial polypetide isolated from the Sargasso Sea
MPKMIIDNQEINFENGMTVMQACEIANVEIPRFCYHDKLSIAGNCRMCLVEMEKSPKPIASCAMPAGEGMVIKTNTDLVKKARKGVMEFLLINHPLDCPICDQGGECDLQDQALYYGFDKSRYIENKRAVKNKHMGPLVSTIMTRCIHCTRCVRFSTEVAGVDDLG

SEQ ID NO: 100393 - protein, 142 aa, Unknown
  Bacterial polypetide isolated from the Sargasso Sea
MLREEDRIFKNLYGFDDWHLEGALKRSIWSNTKELISKGSDYIIDQIKKSDLRGRGGAGFPAGLKWSFMPKNSGKSHYLVVNADESEPGTCKDREILRNDPHLLLEGCLLASFAMHAHTCYIYIRGEYYSEYSNLQKAIDEA

SEQ ID NO: 100394 - protein, 159 aa, Unknown
  Bacterial polypetide isolated from the Sargasso Sea
MLKIKVNNIDLEVEEGLTVLQACEQAGVEIPRFCYHEKLSIAGNCRMCLVEIEKSPKPVASCAMPASEGMNIKTNTPFIEKSRKGVMEFLLANHPLDCPVCDQGGECDLQDQSMFYGIDKSRYKENKRFVPEKNMGPLIKTQMTRCIHCTRCIRFATEV

SEQ ID NO: 100395 - protein, 128 aa, Unknown
  Bacterial polypetide isolated from the Sargasso Sea
MLKDQDRIFVNLYNDLGPDINSAIKRGDWTKTKEIISKGKEWIINEIKTSELRGRGGAGFPTGLKWSFAPKEVGSRPHYLIINADESEPGTCKDRDILRFEPHKLIEGCLISAYAVSAHICYIYVRGE

SEQ ID NO: 100396 - protein, 113 aa, Unknown
  Bacterial polypetide isolated from the Sargasso Sea
MLQNKDKIFNNIFGFQSNKLSHALKRGDWDKTKKILSLDHDVIIEKIKNSGLRGRGGAGFSTGLKWSFMPKTLGERPHYLVVNADESEPGTCKDRDIIRHEPHKLIEGCLIAS

SEQ ID NO: 100397 - protein, 248 aa, Unknown
  Bacterial polypetide isolated from the Sargasso Sea
LKKALQRTPEEVHSEVRDATLLGRGGAGFPAGVKWGFCPPEVWPRYLVVNGDESEPGTYKDRLLMELDPHQLIEGCLIACYAVGLSQCFLYIRGEMAVAQERVAQALNDAYAAGYVGKNILGTEFSVDIVLHWGAGAYVVGEETALIESLEGNRGMPRLKPPYFPASIGLYGQPTIVNNVETLSNLPWILEHGAQAFTAIGTETSPGTRMVAVSGHVKRPGVYEIVNGTTTFRDLLYGIDMCGGIRDD

SEQ ID NO: 100398 - protein, 219 aa, Unknown
  Bacterial polypetide isolated from the Sargasso Sea
MPAVVGIAAAAVIALSLLVFTARSRGHAETPRPIDMVTTLWQWATVEDAYAPAHDSHAAVPGTAVGEDAYSARPFSISIAMRLDPLTATMLVIITSVGLLVAIYSIGYMHDDPGYPRFFALVAMFVFSMSMLVAASNFLLVYVFWEAVGACSYLLIGFWFQKPEAAKAAKKAFLVNRIGDFGLAVGVFLLWLTYGTLDFHDTFSPDGTILPGILGQTRL

SEQ ID NO: 100399 - protein, 270 aa, Unknown
  Bacterial polypetide isolated from the Sargasso Sea
MVKKARQGVMEFLLANHPLDCPVCDQGGECDLQDQSMFYGVDKSRYKENKREVPEKYMGPLIKTQMTRCIHCTRCIRFATEVAGIPELGAIGRGENMQITTYLEKSLESELSANVIDLCPVGALTSKPYVYEARPWELKKTETIDVMDAVGSNIRVDTYGWEVKRILPRVNEDINEEWISDKTRYACDGIKNQRLDTPYMKKGEKHEKTSWNTALNYIVKNINNTQSEKIAGLTGDLVNMETLFIIKEFFQKTIKSKNLESRADEYYVNV

SEQ ID NO: 100400 - protein, 133 aa, Unknown
  Bacterial polypetide isolated from the Sargasso Sea
MLKEKDKIFKNLYGFEDWKLEGAKKRGIWSNTKELIKIGSEKIVEEIKNSQLRGRGGAGFPAGLKWSFMPKDSGKDHYLVVNADESEPGTCKDREIMRNDPHLLLEGCLVAGFAMHAHTCYIYIRGEYYSESS

SEQ ID NO: 100401 - protein, 112 aa, Unknown
  Bacterial polypetide isolated from the Sargasso Sea
MLKDQDRIFKNLYNDMGADVKSAQTRGDWVNTSELIAKGRDWIINEVKESQLRGRGGAGFPTGLKWSFAPKEVGSRPHYLVINADESEPGTCKDRDILRFEPQKLIEGCLIA

SEQ ID NO: 100402 - protein, 177 aa, Unknown
  Bacterial polypetide isolated from the Sargasso Sea
MSDQININVNGSEIVTDSDQLIIEACEDSGIHIPRFCWHKRMDPVGMCRMCLVEIETPRGKALVPSCTTKVSEDLVVDTESEVVKKAQEGVLEFLLINHPLDCPVCDKAGECPLQDQTMAYGPGESRFVEDKRHFEKPIPISEIILLDRERCILCARCTRFSDEISGDPLIEFIQKR

SEQ ID NO: 100403 - protein, 103 aa, Unknown
  Bacterial polypetide isolated from the Sargasso Sea
MLKDEDRIFQNLYNDGGADINSALARGDWSNTKEICERGRDWIINEIKSSELRGRGGAGFPTGLKWSFAPKEVGSRPHYLVINADESEPGTCKDRDLLRFEPH

SEQ ID NO: 100404 - protein, 179 aa, Unknown
  Bacterial polypetide isolated from the Sargasso Sea
MPKIIINDKEIEFEEGMTVLQACELSGAEIPRFCYHERLSIAGNCRMCLVEMEKSPKPIASCAMPATEGMNIKTNTPLVDKARKGVMEFLLANHPLDCPVCDQGGECDLQDQSLFYGFDHSRYLENKRQVKEKYMGPLIKTQMTRCIHCTRCIRFATEVAGISELGAIGRGEDMEITTY

SEQ ID NO: 100405 - protein, 172 aa, Unknown
  Bacterial polypetide isolated from the Sargasso Sea
MPKITINGKEIEFEKGMTVLQACELADVEIPRFCYHEKLSIAGNCRMCLVEMEKSAKPIASCAMPAAEGMNIKTNTPFVEKARKGVMEFLLANHPLDCPVCDQGGECDLQDQSMYYGVDKSRFLENKRQVKEKYMGPLIKTQMTRCIHCTRCVRFATEVAGVPEIGAIGRGE

SEQ ID NO: 100406 - protein, 50 aa, Unknown
  Bacterial polypetide isolated from the Sargasso Sea
MAKEKKTLNLNFGPQHPAAHGVLRLILQLDGEVVEKADPHIGLLHRGTEK

SEQ ID NO: 100407 - protein, 264 aa, Unknown
  Bacterial polypetide isolated from the Sargasso Sea
PGCVTTVMDGQVVHTQSDQALKNRRGVLEFYLVNHPLDCPICDMSGECNLQDYVHAEGREQGRGIEPKRVFGRDDFGGDVLFYGDRCVMCTRCVRFMSEVEQDHRLTVVERGNRSVIDTFFEEGLDGTDWHGNIVDICPVGALVSKDFLHKARAWDLSHTESICTSCSQGCNIDLHTRDNLVQRIKPRENLDVNAWWMCDYGRHNYEWMNRGDRIEVPLDRSNGGSKVLGWKDALQSILKAAEVSEGSVKAVASPSASNEDLAS

SEQ ID NO: 100408 - protein, 290 aa, Unknown
  Bacterial polypetide isolated from the Sargasso Sea
MEFLLANHPLDCPVCDQGGECDLQDQSMYYGIDKSRFKENKRYVPEKYMGPLIKTQMTRCIHCTRCIRFATEVAGVPELGAIGRGENMQITTYLEKAMESELSANVIDLCPVGALTSKPYVFEARPWELKKTETIDVMDAVGSNIRVDTYGWEVKRVLPRINEEINEEWISDKTRYACDGLKNQRLDTPYVKINNKLKSSSWDEAFKAVSERVAKTKSEKIAGFIGDMTNMETTYAAKDFFEKTIKSENLESRYEKLYINTNVRSNYLFNSTIEGIEKSDLIILIGTNPR

SEQ ID NO: 100409 - protein, 154 aa, Unknown
  Bacterial polypetide isolated from the Sargasso Sea
MLNEKDKVFQNLHGFQEPFLEGALKRGSWSNTKEILSKDQNDIIELVKSSQLRGRGGAGFSTGLKWSFMPKNTGKQHYLVVNADESEPGTCKDREIIRNDPHTLVEGCLIASYAIQATKCYIYIRGEYHYEYVQLEKAIEEAYERGFYRKKCLW

SEQ ID NO: 100410 - protein, 167 aa, Unknown
  Bacterial polypetide isolated from the Sargasso Sea
MLKVKVNEKEIEIEEGLTVLQACEIAGYEIPRFCYHEKLSIAGNCRMCLVEIEKSPKPVASCAMPVAQGMNIKTNTSMVEKARKGVMEFLLVNHPLDCPVCDQGGECDLQDQSMFYGIDKSRFKENKRYVPEKYMGPLIKTQMTRCIHCTRCIRFANEVAGVPELGA

SEQ ID NO: 100411 - protein, 135 aa, Unknown
  Bacterial polypetide isolated from the Sargasso Sea
MLKDEDRIFKNLYNDLGWDIEAAITRGDWSKTKELISKGKDSIIKEVKESELRGRGGAGFPTGLKLSFAPKEIGSRPHYLVINADESEPGTCKDRDILRFEPQKLIEGCLITGYSISAHICYIYIRGEYFREGQR

SEQ ID NO: 100412 - protein, 115 aa, Unknown
  Bacterial polypetide isolated from the Sargasso Sea
MLKDEDRIFQNLYNDFGAELDSAKKRGDWLETKEIFNKGRSWIIEEIKTSQLRGRGGAGFPTGLKWSFAPKEVGSKPHYLVINADESEPGTCKDRDILRFEPHKLIEGCLIASYA

SEQ ID NO: 100413 - protein, 164 aa, Unknown
  Bacterial polypetide isolated from the Sargasso Sea
MLKLKINGSEIEVEEGLTVLQACEQAGVEIPRFCYHEKLSIAGNCRMCLVEMEKSPKPIASCAMPVFEGMNIKTNTTMVEKARKGVMEFLLTNHPLDCPVCDQGGECDLQDQSMFYGVDKSRFKENKRNVPEKYMGPLIKTQMTRCIHCTRCIRFATEVAGVTE

SEQ ID NO: 100414 - protein, 281 aa, Unknown
  Bacterial polypetide isolated from the Sargasso Sea
MCLVEMEKSAKPIASCAMPAAEGMNIKTNTPFVEKARKGVMEFLLANHPLDCPVCDQGGECDLQDQSMYYGVDKSRFVENKRQVKEKYMGPLIKTQMTRCIHCTRCVRFATEVAGVPEIGAIGRGENMEITTYLEKAMESELSANVIDLCPVGALTSKPYAFEARPWELKKTESVDVMDAVGSNIRVDTYNWEVKRILPRLNNDINEEWISDKTRYSCDGLLKQRLDVPYIKKNNKFHKSTWDEAISLLVEKIKTLNPDEIGGHIGDMVNLENALSFKNFS

SEQ ID NO: 100415 - protein, 238 aa, Unknown
  Bacterial polypetide isolated from the Sargasso Sea
MSAVLLPIMPPLIAAMALLVLRRGSTALVLGGATLSLGGSLWLLTRVAGGQAETLLLPGLPDMPLRMVAGPLEALLTVAVATVGTFVLIYAVGYMKRESGLCRFYAVMSLFLAAMQALVLSGDWVLLLAAWELIGLCSYLLIGFWFQRPEAADAAGRAFLYTRSADLGLYVAVFMLIGSAGTGEIAASLEAGGSASTAAGLFVLLAAMGKSAQVPLQDWLMRGMGGARHRVSALLHSA

SEQ ID NO: 100416 - protein, 123 aa, Unknown
  Bacterial polypetide isolated from the Sargasso Sea
MLKVKVNDIEVEVEEGLTVLQACEKAGAEIPRFCYHEKLSIAGNCRMCLVEMEKSPKPIASCAMPAADGMNIKTNTALVKKARTGVMEFLLANHPLDCPVCDQGGECDLQDQSMYYGIDKSRF

SEQ ID NO: 100417 - protein, 147 aa, Unknown
  Bacterial polypetide isolated from the Sargasso Sea
MLKLKVNDTEVEVEEGLTVLQACEKAGVEIPRFCYHEKLSIAGNCRMCLVEMEKSPKPIASCAMPAADGMIIKTNTPNIEKSRKGVMEFLLANHPLDCPVCDQGGECDLQDQSMFYGIDKSRFKENKRAVPDKNMGPLIKTQMTRCI

SEQ ID NO: 100418 - protein, 138 aa, Unknown
  Bacterial polypetide isolated from the Sargasso Sea
MPKLKVNEIDIEVEDGLTVLQACEQAGVEIPRFCYHEKLSIAGNCRMCLVEMDKSPKPIASCAMPAAEGMIIKTNTEKVEKARKGVMEFLLANHPLDCPVCDQGGECDLQDQSMFYGIDKSRFKENKRFVQKSIWPIN

SEQ ID NO: 100419 - protein, 215 aa, Unknown
  Bacterial polypetide isolated from the Sargasso Sea
MPKKVYFGKPTLNHNIETLFWIPDILSKGADWFANLGFNKNHKGLRSYSVSGRVSNPGVKVAPSGIPVKKLIDEYCGGMLPGHKLKAFFPGGASGGIFPAKMCDMGLDFGVFEPFGGFVGSHAVVILSDQDSILDAVINTIKFFKHESCGQCTPCRNGTEKLISLLSKSNKEVELYEDLMIVMRDSSICGLGQAATNCLNHLLKYFPEELNGTRR

SEQ ID NO: 100420 - protein, 186 aa, Unknown
  Bacterial polypetide isolated from the Sargasso Sea
MLKDQDRIFKNLYNDMGSDVIASQKRGDWVNTKEITDKGRDWIINEIKESQLRGRGGAGFPTGLKWSFAPKEIGSRPHYLVINGDESEPGTCKDRDILRFEPHKLIEGCLIASFAVQAHVCYIYIRGEYFVDGQKLQAAIDEAYEKKLIGKNAAGTGWDLDIYIHYGAGAYICGEETALLESIEGK

SEQ ID NO: 100421 - protein, 240 aa, Unknown
  Bacterial polypetide isolated from the Sargasso Sea
MFGVESVDAAFLIVLAPFIAFPIILVTGQIYNGNKTWKNTLKEGGVIGLSALLVSLSTAVWVLVDYLRGAREISKEAGGRQASTWIDWISFDVLQSDYTMTTERIIGVGVWIDSITLMLLFVATFLCFLICWFSLGYMNTDPINEDRNHRFYAEFVLFAMGMFGMVLADNFLWLFIFWEIMGLCSYLLIGFYFWKESAAYAAKKAFLTTRVGDVFLMVGLLILYDIYGSLEFSVIFSRPS

SEQ ID NO: 100422 - protein, 292 aa, Unknown
  Bacterial polypetide isolated from the Sargasso Sea
ELEKAPKPIASCAMPAAEGMKIKTNTAFVEKARKGVMEFLLANHPLDCPVCDQGGECDLQDQSMYYGVDKSRFVENKRQVKEKYMGPLIKTQMTRCIHCTRCVRFATEVAGVPEIGAIGRGENMEITTYLEKAMESELSANVIDLCPVGALTSKPYAFEARPWELKKTESIDVMDAVGSNIRVDTYNWEVKRILPRLNNDINEEWISDKTRYSCDGLLKQRLDVPYIKKNNKLQKSSWDEAISTLIEKLKTTPPNEIGGHIGDMVNLENALGFKKLFSLFKSDNLEFREKKF

SEQ ID NO: 100423 - protein, 171 aa, Unknown
  Bacterial polypetide isolated from the Sargasso Sea
MLKVKVNDIDIEVEEGLTVLQACEIAGAEIPRFCYHEKLSIAGNCRMCLVEIEKSKKPVASCAMPVTEGMNIKTNTKLVEKARKGVMEFLLANHPLDCPVCDQGGECDLQDQSMFYGIDKSRFKENKRFVPEKYMGPLIKTQMTRCIHCTRCVRFGTEVGGVQRLVLLVEV

SEQ ID NO: 100424 - protein, 155 aa, Unknown
  Bacterial polypetide isolated from the Sargasso Sea
MLKDQDRIFKNLYNDLGTDIASVQKRGDWLNTKDLTDKGRDWIINEIKDSQLRGRGGAGFPTGLKWSFAPKEIGSRPHYLVINADESEPGTCKDRDILRFEPHKLIEGCLIASYAVQAHVCYIYIRGEYFIEGQKLQAAIDEAYEKKLIGKNAAG

SEQ ID NO: 100425 - protein, 147 aa, Unknown
  Bacterial polypetide isolated from the Sargasso Sea
MPKLKVNDIDIEVEDGLTVLQACEQAGEEIPRFCYHEKLSIAGNCRMCLVEMEKSPKPIASCAMPAAEGMIIKTNTEKVEKARKGVMEFLLANHPLDCPVCDQGGECDLQDQSMFYGIDKSRFKENKRYVPEKYMGPLIKTQMTRCI

SEQ ID NO: 100426 - protein, 304 aa, Unknown
  Bacterial polypetide isolated from the Sargasso Sea
KIKTNTKMVEKARKGVMEFLLVNHPLDCPVCDQGGECDLQDQSLYYGFDGSRFKENKRLVKDKYMGPLIKTQMTRCIHCTRCIRFATEVAGVPELGAIGRGEDMEITTYLEKSMESELSGNVIDLCPVGALTSKPYAFEARPWELKKTESIDVMDAVGSNIRVDSYGWEVKRILPRLNNMINEEWISDKTRYVCDGLLKQRLDKPYIRRDGQLAESNWDDVIELICSKINSTDPKRIAGHVGGMCSMETINSFKKFLISLGTTNFEFREKPFYINPDQKINYLFNSSIQGIENSDLLLLIGANP

SEQ ID NO: 100427 - protein, 108 aa, Unknown
  Bacterial polypetide isolated from the Sargasso Sea
MDIYINNNKYQALDDETIIQVADRHDIHIPRFCYHKRLSVVASCRMCLVEVEGAKYPQPACSTIVRDGMKVNTVGSVTEDAQKSTMEFLLINHPLDCPVCDQSGECEL

SEQ ID NO: 100428 - protein, 251 aa, Unknown
  Bacterial polypetide isolated from the Sargasso Sea
GAGFPTGLKCCFMAKNTGKPSYLICNADESEPGTCKDRELMLKDPHQFLEGMMIGCYAINCKHGYIYVRGEYFPSIKSLNEAIDELYAAGLLGENALGKGKRLDLTVHTGAGAYICGEESALLDSLEGKRGHPRVKPPFPAVSGFNACPTTVNNVETLTCLPFIVNEGADAFKDFGPENNAGTHLVSLSGHVEKPGVYEVRMDVSLKQIIYDLGGGIRGGKALKGVIPGGASSPVLTAKEIDVEYSFDALG

SEQ ID NO: 100429 - protein, 117 aa, Unknown
  Bacterial polypetide isolated from the Sargasso Sea
DQDIIKCMQRIARFYKHESCGQCTPCRKGSGWMWRMLERMAAGEATSDEVDMLFDVTKQIEGHTICAFGEGSSWPVQGLIRHFKDEILERNKFDPIVKKQKNIPYLVDQHLLEKDNA

SEQ ID NO: 100430 - protein, 146 aa, Unknown
  Bacterial polypetide isolated from the Sargasso Sea
MLEDKDRIFKNLYNDLGADIGSAKNRGDWSNTKEICSKGRDWIIEEVKKSELRGRGGAGFPTGLKWSFAPKKVGTKPHYLVINADESEPGTCKDRDILRFEPHKLIEGCLIASYAVNAHKCYIYLRGEYYNEGLKLQNAIDEAYKA

SEQ ID NO: 100431 - protein, 125 aa, Unknown
  Bacterial polypetide isolated from the Sargasso Sea
MLKDEDRIFKNLYNDNQIDIDTSIKNGDWQDVKSIFSKGREWIINEVKSSELRGRGGAGFPTGLKWSFAPKEVGSRPHYLVINADESEPGTCKDRDILRFEPQKLIEGCLYASYAVNAKRVLYIY

SEQ ID NO: 100432 - protein, 171 aa, Unknown
  Bacterial polypetide isolated from the Sargasso Sea
MLKLKVNDIDVEVEEGTTVLQACEQAGAEIPRFCYHEKLSIAGNCRMCLVEMEKSPKPIASCAMPAAEGMVLKTNTEKVKKARKGVMEFLLANHPLDCPVCDQGGECDLQDQSMYYGIDKSRFKENKRYVPEKYMGPLIKTQMTRCIHCTRCIRFATEVAGVPELGAIGRG

SEQ ID NO: 100433 - protein, 200 aa, Unknown
  Bacterial polypetide isolated from the Sargasso Sea
CYQKHGGYKTMKKAFKLKAKKTKDGVKTPQEIIRNEVLVSGLRGRGGAGFSAGMKWSFVDRKSGKPIYLICNADESEPGTFKDRQIIYKDPHQLIEGMVISCYANDVNLAYIYIRGEFPEGAKILNRAIAEARKAGYLGKGICGTNFNLDIHVHRGAGAYICGEETGLIESLEGKRPYPRIKPPYFPAVLGLYMCPTIVN

SEQ ID NO: 100434 - protein, 112 aa, Unknown
  Bacterial polypetide isolated from the Sargasso Sea
MPKITINGKEIEFEKGMTVLQACELADVEIPRFCYHEKLSIAGNCRMCLVELEKSAKPIASCAMPAAEGMNIKTNTAFVEKARKGVMEFLLANHPLDCPVCDQGGECDLQDQ

SEQ ID NO: 100435 - protein, 174 aa, Unknown
  Bacterial polypetide isolated from the Sargasso Sea
MLKLKINEKEIEVEEGLTVLQACEQAGVEIPRFCYHERLSIAGNCRMCLVEMEKSPKPIASCAMPAANGMNIKTNTSLVEKARKGVMEFLLVNHPLDCPVCDQGGECDLQDQSMYYGVDKSRFKENKRYVPEKYMGPLIKTQMTRCIHCTRCVRFATEVAGVPELGAIEEGRHA

SEQ ID NO: 100436 - protein, 188 aa, Unknown
  Bacterial polypetide isolated from the Sargasso Sea
MTFCKFKINVLNNEISIFVQDKDILKTLMFFKDNPSFNMHTLIDLTAVDYPSEEKRFLIIYNLLSVSKNFRIKVKTWVSTDNPISSVTEIFPCANWYEREAWDLFGIRFVGHPDLRRILTDYDFVGHPLRKDFPLTGFTQVKFDDELGKVISEPVKLEQEYRNFDNLSPWEGMSKYLPGDEKSEKLDD

SEQ ID NO: 100437 - protein, 118 aa, Unknown
  Bacterial polypetide isolated from the Sargasso Sea
MLKDEDRIFINLYNDLGPDLSSAQKRGDWKETKELITKGREWIINEVKLSELRGRGGAGFPTGLKWSFAPKEVGSRPHYLVINADESEPGTCKDRDILRNEPQKLIEGCLLTSYAVNA

SEQ ID NO: 100438 - protein, 276 aa, Unknown
  Bacterial polypetide isolated from the Sargasso Sea
KPVASCAMPVVDGMNIKTNTEFVEKARKGVMEFLLANHPLDCPVCDQGGECDLQDQSMFYGIDKSRFKENKRFVPEKYMGPLIKTQMTRCIHCTRCIRFATEIAGVSEIGAIGRGEDTQITTYLEKSMESELSGNVIDLCPVGALTSKPYVFEARPWELKKTETIDVMDAVGSNIRVDTYGWEVKRILPKINENINEEWISDKTRYACDGLKYQRLDTPFIRSNDGFKKISWEDAYGSLTDKIKNTNPDKIGCITGDLTNMETLFSVKEFFNKVLN

SEQ ID NO: 100439 - protein, 107 aa, Unknown
  Bacterial polypetide isolated from the Sargasso Sea
HQVIEGMALAGYAIGATVGFNYIRGEYYEPWQRFEAALVEARRAGLLGEDLKGSGIAFELHSQRGAGAYICGEETALLESLEGKKGLPRFKPPFPAQVGTFGKPTTI

SEQ ID NO: 100440 - protein, 111 aa, Unknown
  Bacterial polypetide isolated from the Sargasso Sea
MLKKEDKIFKNLYNEFGWEIDSALKRDDWKNTKNIISKGRDWIINEIKISELRGRGGAGFSTGLKWSFAPKEVGSRPHYLVINADESEPGTCKDRDILRFEPQKLIEGCLI

SEQ ID NO: 100441 - protein, 139 aa, Unknown
  Bacterial polypetide isolated from the Sargasso Sea
MPKITINGKEIEFEKGMTVLQACELADVEIPRFCYHEKLSIAGNCRMCLVEMEKSAKPIASCAMPAAEGMKIKTNTPFVEKARKGVMEFLLANHPLDCPVCDQGGECDLQDQSMYYGVDKSRFVENKRQVKEKYMGPLI

SEQ ID NO: 100442 - protein, 166 aa, Unknown
  Bacterial polypetide isolated from the Sargasso Sea
MLKDEDRIFKNLYNDLGWEIDFAIERGDWSQTKDIISKGKDYIINEIKESQLRGRGGAGFPSGLKLSFAPKEVGSRPHYLVINADESEPGTCKDRDILRFEPQKLLEGCLLASYAISAHTCYIYIRGEYFREGQRLQNAINQAYKKNFIGKNACDTGWDLDIYVHY

SEQ ID NO: 100443 - protein, 247 aa, Unknown
  Bacterial polypetide isolated from the Sargasso Sea
RRGAGAYICGEESAMIESIEGKRGMPRLRPPFVAQVGLFGRPTLAHNMETLYWVRDILQKGADWFTSHGRNGRKGLRSFSVSGRVKNPGVYLAPAGITVSELIDEYAGGMLEGHEFYGYFPGGASGGILPASLSKIPLDFDTLHDYGCFIGSAAIIILSDKDTAVSAASNTMKFFLHESCGKCTPCRVGTSKAVSLMSEKKWNVPLLHDLSQVMSDASICGLGQAASNPLKCVLKYFPEEVNDDCKT

SEQ ID NO: 100444 - protein, 112 aa, Unknown
  Bacterial polypetide isolated from the Sargasso Sea
MLKDEDRIFTNLYNDLGPDILSAQKRGDWVNTNEIIKKGKEWIINEIKSSELRGRGGAGFPTGLKWSFAPKEVGSRPHYLVINADESEPGTCKDRDILRFEPHKLIERLFTS

SEQ ID NO: 100445 - protein, 135 aa, Unknown
  Bacterial polypetide isolated from the Sargasso Sea
MLKLKVNEIEVEVEEGLTVLQACEKAGVEIPRFCYHEKLSIAGNCRMCLVEMEKSPKPIASCAMPAAEGMNIKTNTALVEKARKGVMEFLLANHPLDCPVCDQGGECDLQDQSMYYGVDKSRFKENKRAVPEKIW

SEQ ID NO: 100446 - protein, 133 aa, Unknown
  Bacterial polypetide isolated from the Sargasso Sea
MLKDEDRIFTNLYNDLGPDILSAQKRGDWQKTNEIIKKGKEWIINEIKSSELRGRGGAGFPTGLKWSFTPKEVGSRPHYLVINADESEPGTCKDRDILRFEPHKLIEGCLLAAYAVNANKCYIYIRGEYFNER

SEQ ID NO: 100447 - protein, 158 aa, Unknown
  Bacterial polypetide isolated from the Sargasso Sea
MPKIKINNKEIEFENGMTVLQACEIAGAEIPRFCYHERLSIAGNCRMCLVEMEKSPKPIASCAMPAAEGMNIKTNSKMVEKARKGVMEFLLANHPLDCPVCDQGGECDLQDQSLYYGFDKSRFTENKRNVEDKYMGPLIKTQMTRCIHCTRCIRFATE

SEQ ID NO: 100448 - protein, 167 aa, Unknown
  Bacterial polypetide isolated from the Sargasso Sea
MLKLRVNDIDVEVEEGLTVLQACEKAGFEIPRFCYHEKLSIAGNCRMCLVEMEKSPKPIASCAMPASDGMVIKTNTPKIEKSRKGVMEFLLANHPLDCPVCDQGGECDLQDQSMFYGIDKSRFKENKRAVPDKNMGPLIKTQMTRCIHCTRCIRFATEIAGVPELGA

SEQ ID NO: 100449 - protein, 100 aa, Unknown
  Bacterial polypetide isolated from the Sargasso Sea
MLKLKVNDIDIEVEEGLTVLQACEKAGVEIPRFCYHEKLSIAGNCRMCLVEMEKSPKPIASCAMPAAEGMNIKTNTPFVEKARKGVMEFLLANHPLDCPV

SEQ ID NO: 100450 - protein, 272 aa, Unknown
  Bacterial polypetide isolated from the Sargasso Sea
TNTEFVEKARKGVMEFLLANHPLDCPVCDQGGECDLQDQSMYYGIDKSRFKENKRMVAEKNMGPLIKTQMTRCIHCTRCVRFATEIAGVPELGAIGRGEDMQITTYLEQSMQSELSANVVDLCPVGALTSKPYVFEARPWELKKTETIDVMDAVGSNIRVDTYDWEVKRVLPIINENINEEWISDKTRYACDGLLQQRLDTPFIKYNKKFEKASWNEVYKIIKSKFEHTQKEKICGFVGDLTNMETSFIFKEFFDRILDINNYESRSDNRFL

SEQ ID NO: 100451 - protein, 195 aa, Unknown
  Bacterial polypetide isolated from the Sargasso Sea
MPKITINNKEIEFENGMTVLQACELAGVEIPRFCYHERLSIAGNCRMCLVQLEKSAKPIASCAMPASEGMNIKTNTEMVEKARKGVMEFLLANHPLDCPVCDQGGECDLQDQSLYYGFDKSRFKENKRGVKDKYMGPLIKTIMTRCIHCTRCVRFATEVGGVTEIGAIGRGENMEITTYLEKAMQSELSANVIDL

SEQ ID NO: 100452 - protein, 219 aa, Unknown
  Bacterial polypetide isolated from the Sargasso Sea
MAGTPIPHAPGFIANTTPRIVTSRFDYEDSYTLARYEATGGYQGLKKALQQTPEEVHNEVRDATLLGRGGAGFPAGVKWGFCPPEVWPRYLVVNGDESEPGTYKDRLLMELDPHQLIEGCLIACYAVGLSQCFLYIRGEMAVAQERVAQALNDAYAAGYVGKNIQDSQFSVDIVLHWGAGAYVVGEETALIESLEGNRGMPRLKPPYFPASIGLYGQPT

SEQ ID NO: 100453 - protein, 107 aa, Unknown
  Bacterial polypetide isolated from the Sargasso Sea
RFSASPRQADLMIVAGTVTWKMAPAIRTMYDQMSDPKWVISMGVCATSGGPYYDSYSVVPGVNKIVPVDVYVPGCPPRPDALLYGLMQLHEKIKRYSLKGKSAGNND

SEQ ID NO: 100454 - protein, 163 aa, Unknown
  Bacterial polypetide isolated from the Sargasso Sea
MPKIIINNKEIDFENGMTVLQACELAGAEIPRFCYHERLSIAGNCRMCLVEMEKSSKPIASCAMPAAEGMKINTNTEFVEKARKGVMEFLLANHPLDCPVCDQGGECDLQDQSLYYGFDKSRFKENKREVKDKYMGPLIKTQMTRCIHCTRCIRFATEVAGVT

SEQ ID NO: 100455 - protein, 100 aa, Unknown
  Bacterial polypetide isolated from the Sargasso Sea
MLKVKVNDLDLEVEEGLTVLQACEQAGAEIPRFCYHEKLSIAGNCRMCLVEIEKSPKPVASCAMPVTNGMNIKTNTKFVEKARKGVMEFLLANHPLDCPV

SEQ ID NO: 100456 - protein, 104 aa, Unknown
  Bacterial polypetide isolated from the Sargasso Sea
MLKLKVNDIDVEVEEGLTVLQACEKAGFEIPRFCYHEKLSIAGNCRMCLVEMEKSPKPIASCAMPAADGMVIKTNTQKIEKSRKGVMEFLLANHPLDCPVCDQG

SEQ ID NO: 100457 - protein, 113 aa, Unknown
  Bacterial polypetide isolated from the Sargasso Sea
MLKDQDRIFKNLYNDLGSDIASSQKRGDWVNTKDLTNKGRDWIINEIKDSQLRGRGGAGFPTGLKWSFAPKEVGSRPHYLVINADESEPGTCKDRDLLRFEPHKLIEGCLIAS

SEQ ID NO: 100458 - protein, 178 aa, Unknown
  Bacterial polypetide isolated from the Sargasso Sea
MNNEISIFIQDKDILKTLMFFKDNPSFSMHTLIDFTAVDYPNEEKRFLLIYNLLSISKNFRIKIKTWVSADKPVSSVTEIFPCANWYEREAWDLFGIRFVGHPDLRRILTDYDFIGHPLRKDFPLTGFTQVKFDDELGKVISEPVKLEQEYRTFDNLSPWEGMSKILPGDEKSGKLDD

SEQ ID NO: 100459 - protein, 144 aa, Unknown
  Bacterial polypetide isolated from the Sargasso Sea
MLQEKDKIFTNLFGDESYSLKSALKRGDWDKTKNLIANGREWIIDEMKKSEIRGRGGAGFPTGLKWSFMPKDPDLTNYLVVNADESEPGTCKDRDMIRNEPHKLIEGCLLASFAMNAHTCYIYIRGEYFNESVVLQKAIDEAYE

SEQ ID NO: 100460 - protein, 169 aa, Unknown
  Bacterial polypetide isolated from the Sargasso Sea
GTTIREILEVHAGGMLPGYNFRGLLPGGGSTDFLVEEHLDLAMDYATISKAGSRMGTGTMIILDDKTCPVGMVKNLIDFFAHESCGFCTPCRDGLPQTAHILQAMASGQGEAGDIEALERLVKFIGAIGNTHCALAPGAMEPLQSAMKYFPEDFERYAKRNQMESCDAD

SEQ ID NO: 100461 - protein, 270 aa, Unknown
  Bacterial polypetide isolated from the Sargasso Sea
MCLVEMEKSPKPIASCAMPAAEGMVIKTNTKKVEKARKGVMEFLLANHPLDCPVCDQGGECDLQDQSMFYGIDKSRFKENKRYVPEKYMGPLIKTQMTRCIHCTRCIRFATEVAGVPELGAIGRGENMEITTYLEKSMESEMSANVIDLCPVGALTSKPYVFEARPWELKKTETIDVMDAVGSNIRVDTYDWEVKRVLPRINEEINEEWISDKTRYACDGLKNQRLDTPFIKNNGNFEEISWQDAYKKIKEKISTTSPDKIVGLTGDMTN

SEQ ID NO: 100462 - protein, 321 aa, Unknown
  Bacterial polypetide isolated from the Sargasso Sea
MCLWEMEKSPKPIASCAMPATEGMNIKTNTDSVKKARKGVMEFLWLNHPLDCPVCDQGGECDLQDQSMYYGVDKSRFVENKRQVKEKYMGPLIKTQMTRCIHCTRCVRFATEVAGVPEIGAIGRGENMEITTYLEKAMESELSANVIDLCPVGALTSKPYAFEARPWELKKTESVDVMDAVGSNIRVDTYNWEVKRILPRLNNDINEEWISDKTRYSCDGLLKQRLDVPYIKINNKLQKSTWDEAISLLVDKINSTNPDEIGGHIGDMVNLENALSFKKLFSVFKSENLEFREKSFYINSSEKSNYIFNSSIKGIEESDFI

SEQ ID NO: 100463 - protein, 232 aa, Unknown
  Bacterial polypetide isolated from the Sargasso Sea
MTGTPIAHAPGFIANETPRIVTARFDHADSHTLERYEATDGYQALRKALQLTPEEVHSEVTAATLLGRGGAGFPAGVKWGFCPPGVWPRYLVVNGDESEPGTYKDRLLMELDPHQLIEGCLIACYAVGLSQCFLYIRGEMAVAQERVAMALNDAYDAGYIGKSILGTEFSVDIVLHWGAGAYVVGEETALIESLEGNRGMPRLKPPYFPASIGLYGQPTIVNNVETLANLPW

SEQ ID NO: 100464 - protein, 102 aa, Unknown
  Bacterial polypetide isolated from the Sargasso Sea
MLQDKDRIFTNLYNDFGSDIDSSILRGDWSNTKDICLKGKEWIINEIKTSELRGRGGAGFPTGLKWSFAPKEIGSRPHYLVINADESEPGTCKDRDILRFEP

SEQ ID NO: 100465 - protein, 153 aa, Unknown
  Bacterial polypetide isolated from the Sargasso Sea
MLKAEDKIFKNLYNNFGWEIDSAIKRDDWKETKNLILKGREWIINEVKTSELRGRGGAGFSTGLKWSFAPKEVGSRPHYLVINADESEPGTCKDRDILRFEPQKLIEGCLIAGFAVNAHICYIYIRGEYLNEGKRLQEAIDQAYKKKFLGKNA

SEQ ID NO: 100466 - protein, 214 aa, Unknown
  Bacterial polypetide isolated from the Sargasso Sea
AEVGLFGLPTLNHNVETLSWIPDILDHGAPWFAKKGKNGHCGLRSFSVSGRVKIPGVKVVPAGTTIDELISEHCGGMIDGHVLKGFLPGGASGGIFPAEMSKLPLDFGTFEEHGGFIGSHAIIILSQKDSVKDVATNLIKFFRHESCGQCTPCRSGTEKLVGLLEKKKLDTVLIGELAEVMQDSSICGLGQAAANPVKLMIKHFPADFLRLKNE

SEQ ID NO: 100467 - protein, 173 aa, Unknown
  Bacterial polypetide isolated from the Sargasso Sea
MNKIYQNEYKKRHIEIQKILSSRIGGRGIQTKFDNEELTVIVSKSLLLKVLNFLKDDKLFQFKQLIDICAVDYPNRIDRFEIVYHLLSISLNQRIRVKLSVNDGDTVPSIVSIFDAANWYEREVWDLFGVIFTDHPDLRRILTDYGFEGHPLRKDFPLSGFVQVKYDDSEKKV

SEQ ID NO: 100468 - protein, 297 aa, Unknown
  Bacterial polypetide isolated from the Sargasso Sea
KVEKARKGVMEFLLANHPLDCPVCDQGGECDLQDQSMFYGIDKSRFKENKREVPEKYMGPLIKTQMTRCIHCTRCVRFATEVAGIPELGAIGRGEDMQITTYLEKSMESELSANVIDLCPVGALTSKPYVFEARPWELKKTETVDVMDAVGSNIRVDTYGWEVKRILPRINEDINEEWISDKTRYACDGIKNQRLDTPYLKTKKGYEKISWEEANKIIVKKINETASDKIAGFTGDLSNMETLYIAKEFFSKTIKSKYLESRINNSYVNISNKENYIFNSTINGIEESDLVILMEQT

SEQ ID NO: 100469 - protein, 155 aa, Unknown
  Bacterial polypetide isolated from the Sargasso Sea
MPKININGKEVEFESGMTILQACELAGAEIPRFCYHERLSIAGNCRMCLVEMDKSRKPIASCAMPAAEGMNIKTNTEMVEKARKGVMEFLLANHPLDCPVCDQGGECDLQDQSLYYGVDKSRFSENKRYVSEKYMGPLIKTQMTRCIHCTRCVRL

SEQ ID NO: 100470 - protein, 99 aa, Unknown
  Bacterial polypetide isolated from the Sargasso Sea
MLKPENKIFKNLYNNFGWEIDSAIKRDDWKDTKNIISKGREWIINEVKTSELRGRGGAGFSTGLKWSFAPKEVGSRPHYLVNNADESEPGTCKDRDILR

SEQ ID NO: 100471 - protein, 302 aa, Unknown
  Bacterial polypetide isolated from the Sargasso Sea
PIASCAMPAAEGMNIKTNTEFVEKARKGVMEFLLANHPLDCPVCDQGGECDLQDQSMYYGVDKSRFKENKRLVPEKNMGPLIKTQMTRCIHCTRCVRFATEVAGVPELGAIGRGEDMQITTYLEQSMQSELSANVVDLCPVGALTSKPYVFEARPWELKKTETIDVMDAVGSNIRVDTYDWEVKRVLPIINEDINEEWISDKTRYACDGLLHQRLDSPFIKYNKKFEKASWEEVYKIIKSKFENTTKEKICGFVGDLTNMETSYILKEFFDRTLDSNNYESRVDNRYINTSKRENYIFNASI

SEQ ID NO: 100472 - protein, 128 aa, Unknown
  Bacterial polypetide isolated from the Sargasso Sea
MLKDEDRIFKNLYNDLGADLISSKKRGDWNNTKEICERGREWIINEVKTSELRGRGGAGFPTGLKWSFAPKEVGSRPHYLVINADESEPGTCKDRDILRFEPQKLIEGCLITSFAVNAHACYIYIRGE

SEQ ID NO: 100473 - protein, 253 aa, Unknown
  Bacterial polypetide isolated from the Sargasso Sea
IPPLVEKARKGVMEFLLANHPLDCPVCDQGGECDLQDQSMFYGIDKSRFKENKRYVPEKYMGPLIKTQMTRCIHCTRCIRFATEIAGVPELGAIGRGEDMQITTYLEKSMDSELSANVIDLCPVGALTSKPYVFEARPWELKKTETIDVMDAIGSNIRVDSYGWEVKRVLPRINEDINEEWISDKTRYSCDGLKNQRLDTPYFKKGDRFSKIEWNLAYKILSEKIKETAPNKIAGITGDLSNMETLYIVKEFF

SEQ ID NO: 100474 - protein, 142 aa, Unknown
  Bacterial polypetide isolated from the Sargasso Sea
MLEDKDRIFQNLYNDFGADLTSAKKRGDWKDTKEICGKGREWIINEIKTSELRGRGGAGFPTGLKWSFAPKEVGSRPHYLVINADESEPGTCKDRDILRFEPHKLIEGCLIASYAVNAHKCYIYIRGEYFNEGQKLQTAIDE

SEQ ID NO: 100475 - protein, 317 aa, Unknown
  Bacterial polypetide isolated from the Sargasso Sea
TESDVVIKAQEGILEFLLINHPLDCPVCDKAGECPLQDQTMAYGPGESRFVEEKRHFEKPIPISEIILLDRERCILCARCTRFSDEISGDPLIEFIQRGNKTEVNTFPDEPFRSYFSGNTVQICPVGALTSTSYRFKARPWDLKKVSSTCNCCSVGCSIELNTSQNKMLRILGEDNEFTNQGWLSDKGRYNFDYLHSENRVLNILSKDGDSFSEISISEATRMIKNKIAELGNPNVKFILGSNSTNEEYFVINEIANYLNKDKFLSKDSSNIYFGDDLLFEGYFGDQYSQAKLEDLDSSETIVVWAEDIKDNLPILY

SEQ ID NO: 100476 - protein, 152 aa, Unknown
  Bacterial polypetide isolated from the Sargasso Sea
MLKQEDKIFKNLYNNLGWSLNDSLKRDDWLDTKEIISKGREWIINEIKSSELRGRGGAGFPTGLKWSFSPKKVGSRPHYLVINADESEPGTCKDRDILRFEPQKLIEGCLISSFAVNAHVCYIYIRGEYYNEGLRLQESINQAYEKGLIGKN

SEQ ID NO: 100477 - protein, 116 aa, Unknown
  Bacterial polypetide isolated from the Sargasso Sea
MRLGVIPLPASPRQADLMIVAGTVTDKMAPAVKRLYDQMPEPKYVISMGSCSNSGGPYWDSYSVTKGVDQLIPVDVYVPGCPPRPEALQEGIILLQQKIKGEDIKAKWNEEQIEPV

SEQ ID NO: 100478 - protein, 105 aa, Unknown
  Bacterial polypetide isolated from the Sargasso Sea
MKRENVEQIPVDDLSSNDELKKSAFVTSVDFLLNWARKSSIFPAQFGLACCAFEMIASAASRFDLARFGAERFSASPRQADLMIVAGTVTWKMAPAIRTMYDQNV

SEQ ID NO: 100479 - protein, 203 aa, Unknown
  Bacterial polypetide isolated from the Sargasso Sea
MILEYSLIALLSPLFGGIMAAFLGKSFGKNFVNLVTIIGVSISFVLSCIIALEILETSAVINQNIYTWLNIGDQSFHIGLLIDNLTASMMVVVTFVSLMVHVYTIGYMHDDPGYHRFFSYISLFTFSMLSLVMSNNFLQLFFGWEAVGVMSYLLIGFWYTKESAIKANLKAFIVNRVGDLSLILGIGIIFSITGSLDYYAVFL

SEQ ID NO: 100480 - protein, 228 aa, Unknown
  Bacterial polypetide isolated from the Sargasso Sea
VNNVETLCNVPAIIADGVDWYKSLAREGSEDMGTKLMGFSGKVKNPGLWELPFGVTARELFEDYAGGMRDGYTLKAWQPGGAGTGFLLPEHLDAQMYAGGIGKVGTRMGTGLAMAVDNTVNMVSLLRNMEQFFARESCGFCTPCRDGLPWSVKLLMALENGEGREGDIETLLGLVGFLGPGKTFCAHAPGAVEPLGSAIKYFRSEFEAGIAPTSAAVPPLAKPIVVGA

SEQ ID NO: 100481 - protein, 264 aa, Unknown
  Bacterial polypetide isolated from the Sargasso Sea
IKTNTPKVEKARKGVMEFLLANHPLDCPVCDQGGECDLQDQSMFYGLDKSRYNENKRAVPEKYMGPLIKTQMTRCIHCTRCIRFATEVAGVPELGAIGRGEDMQITTYLEQSMQSELSANVIDLCPVGALTSKPYVFEARPWELKKTESIDVMDAVGSNIRVDTYGWEVKRVLPRINENINEEWISDKTRYSCDGLKNQRIDSPYLKIENKFLKTSWEEAYKKITDKIKNTSSDKIAGLTGDLTNMETAFIVKEFFNKIIKSNY

SEQ ID NO: 100482 - protein, 104 aa, Unknown
  Bacterial polypetide isolated from the Sargasso Sea
MLKKENKIFKNLYNEFGWEIEKAIERDDWKNTKDLISKGRDWIINEVKTSQLRGRGGAGFSTGLKWSFAPKELGSRPHYLVINADESEPGTCKDRDILRLNLKN

SEQ ID NO: 100483 - protein, 295 aa, Unknown
  Bacterial polypetide isolated from the Sargasso Sea
MEFLLANHPLDCPVCDQGGECDLQDQSMYYGVDKSRFKENKRMVPEKNMGPLIKTQMTRCIHCTRCVRFATEIAGVPELGAIGRGEDMQITTYLEQSMQSELSANVVDLCPVGALTSKPYVFEARPWELKKTETIDVMDGVGSNIRVDTYDWEVKRVLPIINENINEEWISDKTRYACDGLLQQRLDTPFIKYNRKFEKASWNEVYKIIKSKFEHTQKEKICGFVGDLTNMETGFIFKEFFDRTLDINNYESRSDNRFLDDNKRENYLFNSTINGIEESDLIFLVGTNPRYEATI

SEQ ID NO: 100484 - protein, 118 aa, Unknown
  Bacterial polypetide isolated from the Sargasso Sea
MPKITINGKEIEFEKGMTVLQACELADVEIPRFCYHEKLSIAGNCRMCLVEMEKSAKPIASCAMPAAEGMNIKTNTPFVEKARKGVMEFLLANHPLDCPVCDQGGECDLQDQSMYYGV

SEQ ID NO: 100485 - protein, 248 aa, Unknown
  Bacterial polypetide isolated from the Sargasso Sea
EFLLANHPLDCPVCDQGGECDLQDQSMFYGVDKSRYKENKRSVPEKYMGPLIKTQMTRCIHCTRCIRFATEVAGVPELGAIGRGEDMQITTYLEKSMESELSANVIDLCPVGALTSKPYVFEARPWELKKTESIDVMDAVGSNIRVDTYGWEVKRVLPRVNEDINGEWISDKTRYSCDGLKNQRLDTPYIKEDNKFKKSSWDEAYDKIVEKIKNTSPDKIAGFIGDLTNMETSYTAKEFFNQIIKSNN

SEQ ID NO: 100486 - protein, 187 aa, Unknown
  Bacterial polypetide isolated from the Sargasso Sea
MLKLKVNDIEVEVEDGFTVLQACEKAGAEIPRFCYHEKLSIAGNCRMCLVEMEKSPKPVASCAMPAADGMVIRTNTPKIEKSRKGVMEFLLANHPLDCPVCDQGGECDLQDQSMFYGIDKSRFKENKRAVPDKNMGPLIKTQMTRCIHCTRCVRFATEIAGVPELGAIGRGEDMQITTYWNSLSIRV

SEQ ID NO: 100487 - protein, 127 aa, Unknown
  Bacterial polypetide isolated from the Sargasso Sea
MGLESSLGDNVLTTTLDKMINWARKSSLWPMPFGTACCAIEMMATLSGRFDMARFGAEAVRFSPRQSDLLIVSGRISIKMMPVLKKIYDQMPDPKWVISMGACASSGGVFNTYTLVPGVDQFIPVDV

SEQ ID NO: 100488 - protein, 256 aa, Unknown
  Bacterial polypetide isolated from the Sargasso Sea
MIPLLPMLAFPVILFLGRIFNATPGWVKNAKEGGMIALVTMGASLLLTLLLIKDHLHHVGTANIFTWFESSWWNPETGAITTKVFGVGIHIDHLTVMLLFVAAFLCFLINIFSIGYMNTDPINDNRNHRFYAEFVLFCSGMLGMVLADSFLWLFIFWELMGLCSYLLIGFYYERPSAAYAAKKAFLTTRIGDVFLIIGLAMLWNLFDGHLDYAYVFNEANIQAVDAGELQLALGMMFIGAVGKSAQFPLHVWLPDA

SEQ ID NO: 100489 - protein, 182 aa, Unknown
  Bacterial polypetide isolated from the Sargasso Sea
MIKLKVNDIDVEVEDGLTILQACEIAGAEIPRFCYHEKLSIAGNCRMCLVEMDKSPKPVASCAMPVAEGMVIKTNTDKVEKARKGVMEFLLANHPLDCPVCDQGGECDLQDQSMFYGIDKSRYKENKRHVPEKYMGPLIKTQMTRCIHCTRCIRFATEVAGVPELGAIGRGEDMQITTYLEK

SEQ ID NO: 100490 - protein, 203 aa, Unknown
  Bacterial polypetide isolated from the Sargasso Sea
MLKVKVNDTEIEVEDGLTVLQACEQAGAEIPRFCYHEKLSIAGNCRMCLVEMEKSPKPIASCAMPVTNGMNIKTNTPLVEKARKGVMEFLLANHPLDCPVCDQGGECDLQDQSMFYGIDKSRYKENKRYVPEKYMGPLIKTQMTRCIHCTRCIRFAEEIAGIEELGAIGRGEDMQITTYLEKSMQSELSANVIDLCLSRGTHI

SEQ ID NO: 100491 - protein, 288 aa, Unknown
  Bacterial polypetide isolated from the Sargasso Sea
MLINHPLDCPVCDQGGECDLQDQTIAFGPENSRFEENKRAVEEKHMGPLIKTYMTRCIHCTRCIRFADEVAGVNQLGAVNRGENMEITTYLEKSLDSELSANIVDLCPVGALTSKPYQFEARPWELKKTETIDVMDAVGSNIRVDTYGWKVKRVLPVLNEDINEEWISDKTRYACDGLLNQRLDTPYIKKNNKLEQVSWEETFSHLNKLIKDLGPDEIAFLVGDFIDLETSYLIKKLSEDLNIKAVDGRQEGCKVPFNHRSQFLFNSKIKGIDETDCILMIGTNTREE

SEQ ID NO: 100492 - protein, 270 aa, Unknown
  Bacterial polypetide isolated from the Sargasso Sea
IKTNTPKIEKSRKGVMEFLLANHPLDCPVCDQGGECDLQDQSMFYGIDKSRYKENKRAVPDKNMGPLIKTQMTRCIHCTRCIRFATEVAGVPELGAIGRGEDMQITTYLEQSIQSELSGNVIDLCPVGALTSKPYVFEARPWELKKTETIDVMDAVGSNIRVDTYDWEVKRVLPIVNEDINEEWLSDKSRYACDGLLNQRLDTPYIKYNNKFEKASWNEVYKIIKSKIDNTSKDKICGLVGDLTNMETSYIFKEFFDRTLDSKRYDFRSS

SEQ ID NO: 100493 - protein, 287 aa, Unknown
  Bacterial polypetide isolated from the Sargasso Sea
EGVMEFLLINHPLDCPICDQGGECDLQDQAVEYGVDFSRYHESKRSVENINIGPLIKTHMTRCISCTRCVRFMTEVAGASELGQTGRGEDSEIVSYLGQSLLSELQGNLIDLCPVGALTSKPYAFTARPWELDKTESIDVMDAIGSNIRVDSKGNKIMRILPVNNDEINEEWISDKTRFIWDGLGRQRLDVPYMRINGKLQKATWDDVFEFVKQNIDGKKIGAICGELQPIESIYSLRKLIQSLGGETECRVDGADFLVENRVDYIGNGVISDIDTSDNIIIIGCDP

SEQ ID NO: 100494 - protein, 300 aa, Unknown
  Bacterial polypetide isolated from the Sargasso Sea
MCLVEIEKSPKPVASCAMQILEGMNIKTNTEKVEKARKGVMEFLLANHPLDCPVCDQGGECDLQDQSMFYGIDKSRYKENKREVPEKYMGPLIKTQMTRCIHCTRCIRFATEVAGISELGAIGRGEDMQITTYLEKSMESELSANVIDLCPVGALTSKPYVFEARPWELKKTETIDVMDAIGSNIRVDSYGWEVKRVLPRINEDINEEWISDKTRYACDGLKNQRLDTPYKKVNKSFEKISWDTANNIIVEKIKETSPDEIAGFTGDLTNMETSFVLKEFFNKTIKSKYLESRSENFYVN

SEQ ID NO: 100495 - protein, 103 aa, Unknown
  Bacterial polypetide isolated from the Sargasso Sea
MIKEEDKIFKNLHNNYGWNLQDSLKRDDWSNTKEIISKGRDWIINEIKTSELRGRGGAGFPTGVKWSFSPKKVGSRPHYLIINADESEPGTCKDRDIMRFEPQ

SEQ ID NO: 100496 - protein, 137 aa, Unknown
  Bacterial polypetide isolated from the Sargasso Sea
MPKIKINNKEIEFENGMTVLQACEIAGAEIPRFCYHERLSIAGNCRMCLVEMEKSSKPIASCAMPATEGMNIKTNTKMVEKARKGVMEFLLANHPLDCPVCDQGGECDLQDQSLYYGFDKSRFKENKREVEDKYMGP

SEQ ID NO: 100497 - protein, 133 aa, Unknown
  Bacterial polypetide isolated from the Sargasso Sea
MLKLKVNDIDVEVEEGTTVLQACEQAGAEIPRFCYHEKLSIAGNCRMCLVEMEKSPKPIASCAMPAAEGMVLRTNTEKVKKARKGVMEFLLANHPLDCPVCDQGGECDLQDQSMYYGIDKSRFKENKRYYLKN

SEQ ID NO: 100498 - protein, 132 aa, Unknown
  Bacterial polypetide isolated from the Sargasso Sea
MGLLENKFNDSVIVEKLDKLLSWSRSTSPWFFQFGTACCAIEMMAAAASRHDLMRIGIIPRSSPRQADVMIVAGTVTMKMALRVKKLYEQMADPKYVVAMGSCATSGGPYWQHGYHVLKGVDIVIPVDVYVP

SEQ ID NO: 100499 - protein, 270 aa, Unknown
  Bacterial polypetide isolated from the Sargasso Sea
MCLVEMEKAPKPIASCAMPAADGMVIKTNTQIVQKARKGVMEFLLINHPLDCPICDQGGECDLQDQAMYYGFDKTRYEENKRAVQNKNMGPLVKTIMTRCIHCTRCVRFSTEVAGVDDIGLLGRGENAEITTYLEKTIESELSGNVIDLCPVGALTSKPYAFKSRPWELTKTETYDVFDGVGSSIRIDTRGKKVLRVLPRINEETNEEWISDKTRFAIDGLSSQRLDNVYSKIDGKLKKSSWNDAFTIVKDQIINRGSENTVFLSGKFTD

SEQ ID NO: 100500 - protein, 226 aa, Unknown
  Bacterial polypetide isolated from the Sargasso Sea
MISFLSLFIVFSPLLGALFLLFYPNKSDFISSIIANISVGISFLFSLFLLIKYFFDNDNQTLVHLFTWLNLNNFIFEFAFMIDSLTVIMSFIVTFISFFVHIFSIGYMKGDSSFNRFLIYTNFFTFSMLLIVFADNFLQLFIGWELVGLSSYLLIGFWYKKESAIKANLKAFIVNRIGDIGLLLGVIMIFVFSNTLNYNEFFLTLPNLSNIDISIFGFSLDLLPLI

SEQ ID NO: 100501 - protein, 126 aa, Unknown
  Bacterial polypetide isolated from the Sargasso Sea
MIEETLVLFKNIRNPDYNKTLEGYKKVGGYKTLKKVFGMKPEEVIQTVKDSGIRGRGGAGFPTGLKWSFMQKGSAKPSYLIANADESEPGTCKDRELMLKDPHLFLEGMMIGCFAVGCHHGYIYIR

SEQ ID NO: 100502 - protein, 179 aa, Unknown
  Bacterial polypetide isolated from the Sargasso Sea
MIKLKVNDLDLEVEEGLTVLQACERAGVEIPRFCYHEKLSIAGNCRMCLVEIEKSPKPVASCAMPISEGMNIKTNTEKVEKARKGVMEFLLANHPLDCPVCDQGGECDLQDQSMFYGIDKSRYKENKRAVKDKYMGPLIKTHMTRCIHCTRCIRFASEVAGVSELGAIGRGEDMQITTY

SEQ ID NO: 100503 - protein, 270 aa, Unknown
  Bacterial polypetide isolated from the Sargasso Sea
EVTDEMVVDTESEVVKKAQEGVLEFLLINHPLDCPICDKAGECPLQDQTMAYGPGESRFVEEKRHFEKPISISEIILLDRERCILCARCTRFSDEISGDPLIEFIQRGNKTEVNTFPNEPFKSYFSGNTVQICPVGALTSTSYRFKARPWDLKSVRSTCNGCPVGCSTELNSSQNKMLRILGVDNDSVNQGWLCDKGRYNFEYLNSEFRLKTPLKKIENEFKETSVKEIYTELSELISDRNTNINFLIGTNSTNEDYVAFNEFAKNFLQQ

SEQ ID NO: 100504 - protein, 166 aa, Unknown
  Bacterial polypetide isolated from the Sargasso Sea
MLKLKVNEIDIEVEEGLTVLQACEQAGAEIPRFCYHEKLSIAGNCRMCLVEMEKSPKPIASCAMPAAEGMVIKTNTEKVEKSRKGVMEFLLANHPLDCPVCDQGGECDLQDQSMFYGIDKSRFKENKRYVPEKYMGPLIKTQMTRCIHCTRCIRFATEVAGVPELG

SEQ ID NO: 100505 - protein, 162 aa, Unknown
  Bacterial polypetide isolated from the Sargasso Sea
MLKDQDRIFKNLYNDYGEDLLSAKKRDDWSNTKELCLKGKEWIINEIKSSELRGRGGAGFPTGLKWSFAPKEVGSRPHYLVINADESEPGTCKDRDILRFEPHKLIEGCLITSYAVNAHKCYIYIRGEYFNEGQKLQKAINEAYEENLIGKNSCGTGWSLDI

SEQ ID NO: 100506 - protein, 131 aa, Unknown
  Bacterial polypetide isolated from the Sargasso Sea
MQDGHKLMAFFPGGASGGIFPAKMAKNPMDFGVWEKDGGFIGSHAVVILSDKDNILNAVKNTIDFFEHESCGQCTPCRVGLNKISNLLKQNSFDEKLYEDLNYVMRDSSICGLGQSAGNCINHFFKFFNKN

SEQ ID NO: 100507 - protein, 178 aa, Unknown
  Bacterial polypetide isolated from the Sargasso Sea
MLKLKVNDIDVEVEEGLTVLQACEQAGVEIPRFCYHEKLSIAGNCRMCLVEMEKSPKPIASCAMPAAEGMVIKTNTDKVEKSRKGVMEFLLANHPLDCPVCDQGGECDLQDQSMFYGIDKSRFKENKRYVPEKYMGPLIKTQMTRCIHCTRCIRFATEVAGVPELGAIGRGEDMQITT

SEQ ID NO: 100508 - protein, 124 aa, Unknown
  Bacterial polypetide isolated from the Sargasso Sea
MGLLENRFNDSVVVEKLDKLLSWSRSTSPWFFQFGTACCAIEMMAAAASRHDLMRIGIIPRSSPRQADVMIVAGTVTMKMALRVKKLYEQMADPKYVVAMGSCATSGGPYWQHGYHVLKGVDIV

SEQ ID NO: 100509 - protein, 289 aa, Unknown
  Bacterial polypetide isolated from the Sargasso Sea
RMCLVEIEKSRKPVASCAMPVTEGMNIKTNTELVEKARKGVMEFLLANHPLDCPVCDQGGECDLQDQSMFYGIDKSRFKENKRFVPEKYMGPLIKTQMTRCIHCTRCVRFATEVAGVPEIGAIGRGEDMQITTYLEKAMESELSANVIDLCPVGALTSKPYVFEARPWELKKTETVDVMDAVGSNIRVDTYGWEVKRILPKINEEINEEWISDKTRYACDGLKYQRLDIPYVKKENSFKKISWPEAFQILKNKINSTNPEKIAGLTGDLTNMETLFACKELFKKFKIKR

SEQ ID NO: 100510 - protein, 185 aa, Unknown
  Bacterial polypetide isolated from the Sargasso Sea
GTKIFSVSGHVNNPGNFEIPLGTPFSELLELAGGVAGGRRLKAVIPGGSSVPVIKGEAMMSVDMDYDSISKAGSMLGSGAVIVMDETADMVKVLQRISRFYYAESCGQCTPCREGTGWLYRMLTRIVEGNGHIDDLRRLDDVASKIGGTTICALGDAAVMPVQSFLQHFRDEFVAYIEKKQEKVA

SEQ ID NO: 100511 - protein, 113 aa, Unknown
  Bacterial polypetide isolated from the Sargasso Sea
MNKESEVAIEVDGEELMAPAGSMIIQATDIADIYIPRFCYHKELSIAANCRMCLVEVEGAPKPLPACATPVSEGMKVFTKSEKAINAQQGTMEFLLINHPLDCPICDQGGECE

SEQ ID NO: 100512 - protein, 108 aa, Unknown
  Bacterial polypetide isolated from the Sargasso Sea
MLKLKVNEIEVEVEDGLTVLQACEKAGVEIPRFCYHEKLSIAGNCRMCLVEIEKSPKPIASCAMPAAEGMNIKTNTALVEKARKGVMEFLLANHPLDCPVCDQGGECD

SEQ ID NO: 100513 - protein, 143 aa, Unknown
  Bacterial polypetide isolated from the Sargasso Sea
MLKLKVNDIDVEVEDGLTVLQACEKAGVEIPRFCYHEKLSIAGNCRMCLVEMEKSPKPIASCAMPAAEGMVIKTNTAFVEKARKGVMEFLLANHPLDCPVCDQGGECDLQDQSMYYGIDKSRFKENKRMVPEKNMGPLIKTQR

SEQ ID NO: 100514 - protein, 201 aa, Unknown
  Bacterial polypetide isolated from the Sargasso Sea
MSDELFKLNIDGQEIEVPRHYTLMQACEEAGAEIPRFCYHERLSVAGNCRMCLVQWHGAPKPIASCAQTVGDMRMNPDGTPPNISTSGDYVEKARSGVMEFLLINHPLDCPICDQGGECDLQDQAVAYGRSGSRYELNKRAVEDKNMGPLVKTIMTRCIQCTRCVRFAAEVAGVEELGMISRGESAEITTYWKKAFIRALR

SEQ ID NO: 100515 - protein, 144 aa, Unknown
  Bacterial polypetide isolated from the Sargasso Sea
MLKLKINDIDIEVEDGLTVLQACEKAGFEIPRFCYHEKLSIAGNCRMCLVEIEKSPKPIASCAMPAAEGMNIKTNTAFVEKSRKGVMEFLLANHPLDCPVCDQGGECDLQDQSMFYGIDKSRYKENKRYVPDKYMGPLIKTQMT

SEQ ID NO: 100516 - protein, 252 aa, Unknown
  Bacterial polypetide isolated from the Sargasso Sea
MTPSFLLILVPLLPLLAALATVIGGRRLGPRSHLPAVVGIAAAAVVALSLLVVTARSRGSAVRPRPVDMVTTLWEWATVDDAYAPAHDSHAAVPGTAVGEDAYIARPFSISIAMRLDPLTATMLVIITSVGLLVAIYSIGYMHDDPGYPRFFALVAMFVFSMSMLVAASNFLLVYVFWEAVGACSYLLIGFWFQKPEAAKAAKKAFLVNRIGDFGLAVSVFLLWLTYGTLDFHDTLSPDGTILPGILGQTRL

SEQ ID NO: 100517 - protein, 324 aa, Unknown
  Bacterial polypetide isolated from the Sargasso Sea
DPQDQAMYYGFDKPRYEENKRAVQNKNMGPLVKTIMTRCIHCTRCVRFSTEVAGVDDIGLLGRGENAEITTYLEKTIESELSGNVIDLCPVGALTSKPYAFKSRPWELTKTETFDVFDGLGSSIRIDTRGKKVLRALPRINEETNEEWISDKSRFAIDGLSSQRLDNVYSKSNKKLQKSSWDNAFKLIKKEITKRGKENTVFLSGKFTDIETLYSAQKFSNSLKSKNYDCRFDNTQIIDNSSSSYKFNSTIQEIEKADAILLIGSNPRWEAAVLNARIRKAYIENNCKIGLIGPKLNLTYDYHHLYDSLDYLNKLSNNKSEFNK

SEQ ID NO: 100518 - protein, 139 aa, Unknown
  Bacterial polypetide isolated from the Sargasso Sea
MLEDKDRIFQNLYNDFGADLISAKQRGDWKDTKEICGKGREWIINEIKASELRGRGGAGFPTGLKWSFAPKEVGSRPHYLVINADESEPGTCKDRDILRFEPHKLIEGCLISSYAVNAHKCYIYIRGEYFNEGQKLQTA

SEQ ID NO: 100519 - protein, 301 aa, Unknown
  Bacterial polypetide isolated from the Sargasso Sea
MSEEVKKFKITIDGQTTEVLPGTSILEAARQIGGKSVPPAMCYYSKLETSGGRCRTCLVEVSKGSEADPRPMPKLVASCRTNVMDGMEVKNLTSEKAQEGRKAVTEFLLVNHPLDCPICDQAGECHLQDLGYEHGNLETRTEFERNTYDADDLGPHIKLNMNRCILCARCVLAANQLTGEREHGILFRGDHAEISTYLNKALDNDFIGNVIDVCPVGALTDRTARFSSRVWFTKPMNATCKCDKCSGKAVVWMKGDEIVRVTARKDQWGEVEEFICDTCRFDRKELSDWNIEGPRHIDRHS

SEQ ID NO: 100520 - protein, 135 aa, Unknown
  Bacterial polypetide isolated from the Sargasso Sea
MLKLKVNDIDVEVEEGTTVLQACEQAGAEIPRFCYHEKLSIAGNCRMCLVEMEKSPKPIASCAMPAAEGMVLRTNTEKVKKARKGVMEFLLANHPLDCPVCDQGGECDLQDQSMYYGIDKSRFKENKRYVPEKYM

SEQ ID NO: 100521 - protein, 110 aa, Unknown
  Bacterial polypetide isolated from the Sargasso Sea
MLKLKVNDIDVEVEEGLTVLQACEKAGVEIPRFCYHEKLSIAGNCRMCLVEMEKSPKPIASCAMPAAEGMKIKTNTPFVEKARKGVMEFLLANHPLDCPVCDQGGECDLQ

SEQ ID NO: 100522 - protein, 265 aa, Unknown
  Bacterial polypetide isolated from the Sargasso Sea
TGKPSYLICNADESEPGTCKDRELMLKDPHQFLEGMMIGCYAINCKHGYIYVRGEYFPSIKSLNEAIDELYAAGLLGENALGKGKRLDLTVHTGAGAYICGEESALLDSLEGKRGHPRVKPPFPAVSGFNACPTTVNNVETLTCLPFIVNEGAEAFKDFGPDNNAGTHLVSLSGHVEKPGVYEVRMDVSLKQIIYDLGGGIRGGKALKGVIPGGASSPVLTAKEIDVEYSFDALGKAGTMMGSAAVMVFDEDTDVVKLLHRITRF

SEQ ID NO: 100523 - protein, 201 aa, Unknown
  Bacterial polypetide isolated from the Sargasso Sea
MTNNEIVWLILILPFVAFLINGFITLFTNYKNSKFSGYLNLTSIGISFILSLYLAIIGLDKNFDYQSASFQWISFGIFEITMAIMLDELTLIMISVVTAISFLIQIYSLSYMEHDDGYSRYFSYMGLFTTSMLGLVTARNLIQLFIFWELVGATSYLLIGFWYKKQSAIKAAKKAFLMTRVGDFGLIAGILLIAKQGSQYL

SEQ ID NO: 100524 - protein, 325 aa, Unknown
  Bacterial polypetide isolated from the Sargasso Sea
DIDCYIKHGGYEDLKKAFKMKPEDICEEVLQSGVRGRGGAGFPAGMKWKFLDRKSGKPIYLICNADESEPGTFKDRQIIHKDPHQLIEGILCSAYAIQAKLAFIYIRGEFFEGYKILERAIEEARAKNFLGDNILGSDYSCDIIVHRGAGAYICGEETGLIESLEGKRANPRIKPPYFPAALGLYQCPTIVNNVETLCDVKHVINMGGKEFGKIGTPGNTGTRIWCVSGHVQKPGYYEFPCAGVTLGELIYDVCGGLLPGRKLKAVIPGGSSSKILRADERFTGKKKDGTEFDWGIEDIPMDFDSLSLVGSMSGSGGVIIMDDST

SEQ ID NO: 100525 - protein, 111 aa, Unknown
  Bacterial polypetide isolated from the Sargasso Sea
MLKEKDKIFPNIHGFLDRSVKGVMSRGGWVDTKAIILRGPDDIIKTIQDSGLRGRGGAGFPTGLKWSFMPKSTEKPKYLVINADESEPGTCKDREILRHEPHSLLEGCLLA

SEQ ID NO: 100526 - protein, 169 aa, Unknown
  Bacterial polypetide isolated from the Sargasso Sea
MTELKKIIIDDQEIEVDAAMTLIQACELVGIEVPRFCYHERLSIAGNCRMCLVEVVGGPPKPTASCAMQVRDLRPGPDGQPPVVRTNSKMVKKAREGVMEFLLINHPLDCPICDQGGECDLQDQAMAFGVDFSRFKEAKRAVDDLDLGPLVSTNMTRCISCTRCVRFTS

SEQ ID NO: 100527 - protein, 127 aa, Unknown
  Bacterial polypetide isolated from the Sargasso Sea
MLTDQDRIFTNIYGMADRSLKGAQSRGAWDGTADIIGKGRDWIINEVKASGLRGRGGAGFPTGLKWSFMPKESDGRPSYLVVNADESEPGTCKDREIMRHDPHLFIEGCLIASFAMNANTCYIYIRG

SEQ ID NO: 100528 - protein, 164 aa, Unknown
  Bacterial polypetide isolated from the Sargasso Sea
MSDQININVNGSEIVTDSDQLIIEACEDSGIHIPRFCWHKRMDPVGMCRMCLVEIETPRGKALVPSCTTKVSEDLVVDTESEVVKKAQEGVLEFLLINHPLDCPVCDKAGECPLQDQTMAYGPGESRFVEDKRHFEKPIPISEIILLDRERCILCARCTRFSDE

SEQ ID NO: 100529 - protein, 157 aa, Unknown
  Bacterial polypetide isolated from the Sargasso Sea
MLKLKVNDIEVEVEEGLTVLQACEKAGAEIPRFCYHEKLSIAGNCRMCLVEMEKSPKPIASCAMPAADGMVIKTNTPKIEKSRKGVMEFLLANHPLDCPVCDQGGECDLQDQSMFYGIDKSRFKENKRAVPEKNMGPLIKTQMTRCIHCTRCVRFAT

SEQ ID NO: 100530 - protein, 206 aa, Unknown
  Bacterial polypetide isolated from the Sargasso Sea
MLKDQDRIFQNLYNDLGPDLTSSQKRGDWVNTKEITDKGRDWIINEIKDSQLRGRGGAGFPTGLKWSFAPKEVGSRPHYLVINGDESEPGTCKDRDILRFEPHKLIEGCLIASYAIQAHVCYIYIRGEYFVDGQKLQAAIDEAYEKKLLGKNAADTGWDLDIYIHYGAGAYICGEETALLESIEGKKGQPRIKAPFSSANWTLWLP

SEQ ID NO: 100531 - protein, 118 aa, Unknown
  Bacterial polypetide isolated from the Sargasso Sea
MLKEEDKIFKNLYGFDDWSLSGAKRREVWSNTKDLLDQGSEKIIEEIKNSQLRGRGGAGFPAGLKWSFMPKDSGKDHYLVVNADESEPGTCKDREILRNDPHLLLEGCLIAGFAMHAH

SEQ ID NO: 100532 - protein, 109 aa, Unknown
  Bacterial polypetide isolated from the Sargasso Sea
MIKEENKIFKNLYNDLGWEIDNSLKRDDWKNTKEIISKGRDWIINEVKSSELRGRGGAGFPTGLKWSFAPKEIGSRPHYLVSNADESEPGTCKDRDILRFEPQKLIEGC

SEQ ID NO: 100533 - protein, 189 aa, Unknown
  Bacterial polypetide isolated from the Sargasso Sea
MIKLTVDDKEIEVEEGCTVLQACEIAGVEIPRFCYHDRLSIAGNCRMCLVEVKPGPPKPQASCALPATNGQIISTNSKMVHDARKGVMEFLLINHPLDCPICDQGGECDLQDQAMSFGSDKTRFFENKRAVEEKSMGPLIKTNMTRCIHCTRCVRFSTEVAGVNDLGALGRGESMEITTYLEKSIDSEL

SEQ ID NO: 100534 - protein, 109 aa, Unknown
  Bacterial polypetide isolated from the Sargasso Sea
MISEKNIIFSDIHGFNGSDISISEKRGDWDNTKALINKGADWIINEVKNSELRGRGGAGFPTGLKWSFMPKKKNKPHYIVINADESEPGTCKDREIMRNEPHKLIEGIF

SEQ ID NO: 100535 - protein, 105 aa, Unknown
  Bacterial polypetide isolated from the Sargasso Sea
MLKIKVNEIDLEVEEGLTVLQACEQAGAEIPRFCYHEKLSIAGNCRMCLVEVEKSPKPVASCAMPVSAGMNIKTNTPLVEKARKGVMEFLLANHPLDCPVCDQGG

SEQ ID NO: 100536 - protein, 283 aa, Unknown
  Bacterial polypetide isolated from the Sargasso Sea
FLLVNHPLDCPVCDQGGECDLQDQSMFYGVDKSRFKENKRQVPEKYMGPLIKTQMTRCIHCTRCIRFATEIAGVPELGAIGRGENMQITTYLEKAMASELSANVIDLCPVGALTSKPYVFEARPWELKKTESIDVMDAAGSNIRIDTYGWEVKRILPRINEDINEEWISDKTRYACDGLKNQRLDTPYIREGDKFNKISWNEAYEVLKLKLENTSPEKIGCITGDLTNMETAYAAKELFNKVFKSNLIESRSENYYVNFSEKQNYRFNSNISGIEDTDLILLV

SEQ ID NO: 100537 - protein, 160 aa, Unknown
  Bacterial polypetide isolated from the Sargasso Sea
MLKDADRIFTNIYGWGDAGLKGARKRGDWSNTAKLLKLGHDEIVERMKASGLRGRGGAGFPTGVKWSFMPKEVKDRPHYLVVNADESEPGTCKDRDIIRHEPHKLLEGCVVAGFAMRAHAAYIYIRGEFVNEARRLQAAIDEAYDAGLLGKNAAKSGLGF

SEQ ID NO: 100538 - protein, 174 aa, Unknown
  Bacterial polypetide isolated from the Sargasso Sea
MLKPENKIFKNLYNQFGWEIDSAIKRDDWKNTKNIISKGRDWIINEVKSSELRGRGGAGFSTGLKWSFAPKEVGSRPHYLVINADESEPGTCKDRDILRFEPQKLIEGCLIAGYAVNAHICYIYIRGEYFNEGQRLQDAINQAYEKNFLGKNACGSGWDFDIHIHYGAGAYICG

SEQ ID NO: 100539 - protein, 134 aa, Unknown
  Bacterial polypetide isolated from the Sargasso Sea
MLQDKDRIFQNLYNDRDLNIDSSISFGDWSNTKDLISKGKEWIIDEIKSSELRGRGGAGFPTGLKWSFAPKEVGSRPHYLVINADESEPGTCKDRDILRFEPHKLLEGCLITSYAVSAHICYIYIRGEYYREGE

SEQ ID NO: 100540 - protein, 131 aa, Unknown
  Bacterial polypetide isolated from the Sargasso Sea
MLKLKVNDNEVEVEEGLTVLQACEKAGVEIPRFCYHEKLSIAGNCRMCLVEMEKSPKPIASCAMPAAEGMVIKTNTPKIEQSRKGVMEFLLANHPLDCPVCDQGGECDLQDQSMFYGIDKSRFKENKRAVP

SEQ ID NO: 100541 - protein, 146 aa, Unknown
  Bacterial polypetide isolated from the Sargasso Sea
MLKEEDKIFKNLYNQYGWSIEDSLKIGDWSKTDEIISKGKEWIINEIKLSELRGRGGAGFPTGVKWSFAPKKAGSRPHYLVINADESEPGTCKDRDILRFEPQKLIEGCLISAFAVSAHVCYIYIRGEYFNEGQRLQKAIDEAYQK

SEQ ID NO: 100542 - protein, 258 aa, Unknown
  Bacterial polypetide isolated from the Sargasso Sea
LESDPHRFLEGMLIASSVVEIDKIYIYLRDEYPAVRYILEKELSRLKDKFNNTIPDVELRRGAGAYICGEESAMIESIEGKRGMPRLRPPFVAQVGLFGRPTLAHNMETLYWVRDILQKGADWFTSHGRNGRKGLRSFSVSGRVKNPGVYLAPAGITVSELIDEYAGGMLEGHEFYGYFPGGASGGILPASLSEIPLDFDTLHDYGCFIGSAAIIILSDKDTAVSAASNTMKFFLHESCGKCTPCRVGTSKAVSLRVR

SEQ ID NO: 100543 - protein, 182 aa, Unknown
  Bacterial polypetide isolated from the Sargasso Sea
MLKLKINDKEIEVDEGLTVLQACEQAGFEIPRFCYHEKLSIAGNCRMCLVEIEKSPKPVASCAMPAAEGMNIKTNTSFVEKARKGVMEFLLVNHPLDCPVCDQGGECDLQDQSMFYGVDKSRFKENKRHVTEKYMGPLIKTQMTRCIHCTRCIRFATEVAGVPELGAIGRGEDMQITTYLEK

SEQ ID NO: 100544 - protein, 92 aa, Unknown
  Bacterial polypetide isolated from the Sargasso Sea
MLKEENKIFKNLYNEQGWELENALKRDDWLDTKKIIEKGRDWIINEIKASELRGRGGAGFSTGLKWSFAPKKVGSRPHYLVINADESEPGTC

SEQ ID NO: 100545 - protein, 128 aa, Unknown
  Bacterial polypetide isolated from the Sargasso Sea
MPKIKINNKEIEFENGMTVLQACEIAGAEIPRFCYHERLSIAGNCRMCLVEMDKSAKPIASCALPAAEGMNIKTNTKMVEKARKGVMEFLLANHPLDCPVCDQGGECDLQDQSLFYGFDKSRFKENKR

SEQ ID NO: 100546 - protein, 192 aa, Unknown
  Bacterial polypetide isolated from the Sargasso Sea
MPKLKVNDIDIEVEDGLTVLQACEQAGAEIPRFCYHEKLSIAGNCRMCLVEMEKSSKPIASCAMPAAEGMVIKTNTEKVEKARKGVMEFLLANHPLDCPVCDQGGECDLQDQSMFYGIDKSRFKENKRYVPEKYMGPLIKTQMTRCIHCTRCIRFATEVAGVPELGAIGRGENMEITTYLEKSMESEMSANV

SEQ ID NO: 100547 - protein, 100 aa, Unknown
  Bacterial polypetide isolated from the Sargasso Sea
ESCGQCTPCREGSGWMWRMLERMAAGEATPDEVDMLLDVTKQIEGHTICAFGEGSSWPVQGLIRHFKDEILERNKFDPVVKKQKNIPYLVDQHLLEKENA

SEQ ID NO: 100548 - protein, 86 aa, Unknown
  Bacterial polypetide isolated from the Sargasso Sea
TNSMRFFEHESCGQCTPCRVGTSKAIQLMENEEWNKDLLEELSIAMCDASICGLGQAAPNPVKCAIRYFPEEFKKWPPTQNKQTKK

SEQ ID NO: 100549 - protein, 175 aa, Unknown
  Bacterial polypetide isolated from the Sargasso Sea
MLKDEDRIFKNLYNDLGADLLSAKKRGDWNNTKEICERGREWIINEVKTSELRGRGGAGFPTGLKWSFAPKEVGSRPHYLVINADESEPGTCKDRDILRFEPQKLIEGCLITSFAVNAHVCYIYIRGEYFNEGQKLQKAIDEAYKEGLIGKNSSGTNWDLDIYIHYGAGAYICGE

SEQ ID NO: 100550 - protein, 100 aa, Unknown
  Bacterial polypetide isolated from the Sargasso Sea
MIKLKVNNTDIEIEEGLTVLQACEQAGFEIPRFCYHEKLSIAGNCRMCLVEIEKSPKPVASCAMPVSEGMNIKTNTPLVEKARKGVMEFLLANHPLDCPV

SEQ ID NO: 100551 - protein, 107 aa, Unknown
  Bacterial polypetide isolated from the Sargasso Sea
MPTITIDNKKVEFENGMTVMQACELAGAEIPRFCYHEKLSIAGNCRMCLVEMEKAPKPIASCAMPAGDGMVIKTNTDTVQKARKGVMEFLFINHPLDCPICDQGGEC

SEQ ID NO: 100552 - protein, 177 aa, Unknown
  Bacterial polypetide isolated from the Sargasso Sea
NGRKGLRSFSVSGRVKNPGVYLAPAGITVSELIDEYAGGMLEGHEFYGYFPGGASGGILPASLSEIPLDFDTLHDYGCFIGSAAIIILSDKDTAVSAASNTMKFFLHESCGKCTPCRVGTSKAVSLMSEKKWNVPLLHDLSQVMSDASICGLGQAASNPLKCVLKYFPEEVNDDCKT

SEQ ID NO: 100553 - protein, 135 aa, Unknown
  Bacterial polypetide isolated from the Sargasso Sea
MLKVYVDDKEIEVEDGSTVMQACEKNGIEIPRFCFHERLSIAGNCRMCLVALEGSPKPVASCAMPAAEGMKIITSSESVRAAREGIMEFLLINHPLDCPICDQGGECDLQDQALYYGRGNTRYEEDKRSVENKPF

SEQ ID NO: 100554 - protein, 112 aa, Unknown
  Bacterial polypetide isolated from the Sargasso Sea
MLKDEDRIFTNLYNDFSPDLDSSKKRGDWSNTKDLILKGKDWIINEIKSSELRGRGGAGFPTGLKWSFAPKEVGSRPHYLIINADESEPGTCKDRDILRFEPHKLIERCLLA

SEQ ID NO: 100555 - protein, 109 aa, Unknown
  Bacterial polypetide isolated from the Sargasso Sea
MLKLKVNDIEVEVEEGLTVLQACEKAGAEIPRFCYHEKLSIAGNCRMCLVEMEKSPKPIASCAMPAADGMVIKTNTPKIEKSRKGVMEFLLANHPLDCPVCDQGGECDL

SEQ ID NO: 100556 - protein, 174 aa, Unknown
  Bacterial polypetide isolated from the Sargasso Sea
MLEYSLIALLSPLFGGIMAAFLGKSFGKNFVNLVTIIGVSISFVLSCIISLEILETSAVINQNIYTWLNIGDQSFHIGLLIDNLTASMMVVVTFVSLMVHVYTIGYMHDDPGYHRFFSYISLFTFSMLSLVMSNNFLQLFFGWEAVGVMSYLLIGFWYTKESAIKANLKAFIGE

SEQ ID NO: 100557 - protein, 253 aa, Unknown
  Bacterial polypetide isolated from the Sargasso Sea
RDEYPEIRIFINREIKKVKLFLKLDINIHVRRGAGAYICGEESAMIESIEGKRGLPRHRPPYVAQKGIFNKPTLVNNIETLYWIREIIEKGGKKFSSKGTKNHPGARSYSVSGRVKNPGVVFAPAGSTVNELILKCGGMLDGHKFKAYLPGGASGGILPSTKGDIPLDFGGELAKYGCFVGSHAIVILSDKDSLADVALNLMAFFKHESCGQCTPCRNGTEKIINIIKNKSKWDKELLCDISEVMANASICGL

SEQ ID NO: 100558 - protein, 235 aa, Unknown
  Bacterial polypetide isolated from the Sargasso Sea
MPVFHIDDQPVEFQPGEKILSAALRNGNKIPHYCYHPGMSIVATCRMCLVDVIDLGNGRPAPKLQTACSVDAAEGMKIETMNQKVEEGRKLVNEFLLINHPLDCPICDQSGECTLQDYSYEYGTGKSEMDYSKRVYGWRDIGTFVSLERNRCIQCSRCDRFTREITGTNEFGMFNRGHELTVDTYTDRPMTNKFQGNMADICPVGAITEKEFRFKRRVWKLKKDRSICTGCSTGW

SEQ ID NO: 100559 - protein, 128 aa, Unknown
  Bacterial polypetide isolated from the Sargasso Sea
MLKDEDRIFQNLYNDSGADIESAKLRNDWNGTKEILEKGREWIINEVKSSELRGRGGAGFPTGLKWSFAPKEVGSRPHYLVINADESEPGTCKDRDILRFEPHKLIEGCLIASKAVNAHKCYIYIRGE

SEQ ID NO: 100560 - protein, 192 aa, Unknown
  Bacterial polypetide isolated from the Sargasso Sea
MPKIIVNNKEVEFENGMTVLQACEIAGVEIPRFCYHERLSIAGNCRMCLVEMEKSPKPIASCAMPAADGMKIKTNTTFVEKARKGVMEFLLANHPLDCPVCDQGGECDLQDQSLFYGFDNSRYSENKRQVKEKHMGPLIKTQMTRCIHCTRCVRFAQEVAGIPELRAIGRGEDTEITTYLEKSMESELSANV

SEQ ID NO: 100561 - protein, 110 aa, Unknown
  Bacterial polypetide isolated from the Sargasso Sea
MPKITINGKEIDFEKGMTVLQACELADVEIPRFCYHEKLSIAGNCRMCLVEMEKSTKPIASCAMPATEGMNIKTNTTLVEKARKGVMEFLLANHPLDCPVCDQGESVITG

SEQ ID NO: 100562 - protein, 158 aa, Unknown
  Bacterial polypetide isolated from the Sargasso Sea
MPKIKINNKEVEFENGMTVLQACEIAGAEIPRFCYHERLSIAGNCRMCLVEMEKSSKPIASCAMPAAEGMNIKTNTKMVEKARKGVMEFLLANHPLDCPVCDQGGECDLQDQSLYYGFDKSRFKENKRFVEDKYMGPLIKTQMTRCIHCTRCIRFATE

SEQ ID NO: 100563 - protein, 155 aa, Unknown
  Bacterial polypetide isolated from the Sargasso Sea
MLKKEDKIFKNLYGEDDWSLPGALKRGIWNNTKDLISMGSDNIIEEIKKSDLRGRGGAGFPAGLKWSFMPKDSGKPHYLIVNADESEPGTCKDREILRNDPHLLLEGCLIAGFAMHAHTCYIYIRGEYYNESSNLQKAIDEAYKSNLIGKNACGT

SEQ ID NO: 100564 - protein, 209 aa, Unknown
  Bacterial polypetide isolated from the Sargasso Sea
MTNIFWRRIVPKVIVNNKEIEFEEGMTVLQACELAGEEIPRFCYHERLSIAGNCRMCLVEMEKSPKPIASCAMPAVDGMKIKTNTPFVDKARKGVMEFLLANHPLDCPVCDQGGECDLQDQSLFYGLDNSRYTENKREVSEKYMGPLIKTQMTRCIHCTRCIRFATEVAGIPELGAIGRGEDMEITTYLEKSMESELSANVIDLCPVGA

SEQ ID NO: 100565 - protein, 269 aa, Unknown
  Bacterial polypetide isolated from the Sargasso Sea
SRFKENKRLVPEKNMGPLIKTQMTRCIHCTRCVRFATEVAGVPELGAIGRGEDMQITTYLEQSMQSELSANVVDLCPVGALTSKPYVFEARPWELKKTETIDVMDAVGSNIRVDTYDWEVKRVLPIINEDINEEWISDKTRYACDGLLHQRLDSPFIKYNKKFEKASWSEVYKILKSKFENTTKEKICGFVGDLTNMETSYIFKEFFERTLDTKNYESRPDNRFVDVSKRENYIFNASINGIEKADLIFLIGTNPRYEATILNARIRKS

SEQ ID NO: 100566 - protein, 183 aa, Unknown
  Bacterial polypetide isolated from the Sargasso Sea
MTVAEQEVKQCTVHIDGKSHQAKHGQTIIQVADSVGAYIPRFCYHEKLSVVANCRMCLVEVGNVPKALPACATPISDGMEVMTQSPKALAAQRSVMEFLLINHPLDCPVCDQGGACELQDLSMGFGRGKSEFTMRKRSVVDLDIGPLIKTHMTRCIHCTRCVRFGEEVAGMRELGATGRGEDM

SEQ ID NO: 100567 - protein, 258 aa, Unknown
  Bacterial polypetide isolated from the Sargasso Sea
AANFYSGVEQSEWECLQKMLQILQHGGVRTPSLRDMEEADAVLVLGEDVTQTAARIALALRQAVKGKGREIARKLKVDLWQVAAVQTLAQNERYPLLITSLDSTRLDDVASGTLHAPHADQARLGFAIAHLLDGSAPALTDLAPEQQALAASWADLLGNAKKPLIIAGTGARSQALLEAASNIAHALKGRGQAVELALVAQETNSLGLAMLAGNAAPLEAAFDRIEREEKLALVMLENDLYRRAPRSRVDAAIDRLQH

SEQ ID NO: 100568 - protein, 167 aa, Unknown
  Bacterial polypetide isolated from the Sargasso Sea
MGLISKKEEVNDLINFLKNNDGLLFNQLIEITAIDFPQKEFRFDIIYILLSLKLNQRLIVKTSIKEDESIESITSIYKSANWYERECYDLFGIKFLNHSDLRRIMTDYNFEGHPLRKDFPLTGHNEVRYDDLEKKVIYEPVKLSQEYRNFDYSSPWEGFENELIGDE

SEQ ID NO: 100569 - protein, 261 aa, Unknown
  Bacterial polypetide isolated from the Sargasso Sea
DKARKGVMEFLLANHPLDCPVCDQGGECDLQDQSLFYGFDNSRYTENKRNVKEKNMGPLIKTQMTRCIHCTRCVRFATEVAGIPELGAIGRGEDMEITTYLEKAMESELSANVIDLCPVGALTSKPYAFEARPWDLKKTETIDVMDAVGSNIRVDTYGWEVKRILPRINEDINEEWISDKTRYACDGLLKQRLDTPYIRKDGRLVKSSWNETLKLLINKFKSFTPNEIAGMVGDLADLEMIYSFKSFFETCIGSKNLECRQ

SEQ ID NO: 100570 - protein, 214 aa, Unknown
  Bacterial polypetide isolated from the Sargasso Sea
MCLVEVVGGPPKPTASCAMQVKDLRPGPEGQPPVVRTNSKMVKKAREGVMEFLLINHPLDCPICDQGGECDLQDQAMAFGVDFSRFKEPKRAVDDLDLGPLVSTNMTRCISCTRCVRFTSEVAGISQMGQTGRGEDAEITSYLNQTLDSNLQGNIIDLCPVGALTSKPYAFTARPWELSNTETIDVMDALGSNIRVDTKGREVMRILPRNHDGI

SEQ ID NO: 100571 - protein, 100 aa, Unknown
  Bacterial polypetide isolated from the Sargasso Sea
IHKSANWYERECYDLFGIKFLNHPDLRRIMTDYNFEGHPLRKDFPLTGHTEVRYDNLEKKVVYEPVKLTQEYRNFDYMSPWEGFDNELIGDEKFEEERKK

SEQ ID NO: 100572 - protein, 232 aa, Unknown
  Bacterial polypetide isolated from the Sargasso Sea
EESAMIESIEGKRGLPRHRPPYIAEVGLFGRPTLNHNVETLNWLPEIIENGVDWFKRKGWNERHSGVRSFSVSGRVKNPGVKIAPAGIPLQRLIVDYCGGMQDGHTLKAFFPGGASGGILPANLASLPLDFGVFEEYGGFIGSHAIVILSDHDNIKEAALNTMRFFKHESCGQCTPCRSGTDKMISLLEDNNKELDLYNALIKVMSDSSICGLGQAASNCVSHLIKYFPEEF

SEQ ID NO: 100573 - protein, 121 aa, Unknown
  Bacterial polypetide isolated from the Sargasso Sea
MLKLKVNDAEVEVEDGLTVLQACEKAGVEIPRFCYHEKLSIAGNCRMCLVEMEKSPKPIASCAMPAADGMVIKTNTPNVEKSRKGVMEFLLANHPLDCPVCDQGGECDLQDQSMFYGIDKS

SEQ ID NO: 100574 - protein, 206 aa, Unknown
  Bacterial polypetide isolated from the Sargasso Sea
MLKLKVNDIDIEIEEGLTVLQACEQAGAEIPRFCYHEKLSIAGNCRMCLVEMEKSPKPIASCAMPATDGMVIKTNTKKVEKARKGVMEFLLVNHPLDCPVCDQGGECDLQDQSMFYGIDKSRFRENKRHVPEKYMGPLIKTQMTRCIHCTRCIRFATEVAGIPELGAIGRGENMEITTYLEKSMESGMSANVIDLCPSRSSYLKTL

SEQ ID NO: 100575 - protein, 98 aa, Unknown
  Bacterial polypetide isolated from the Sargasso Sea
CGQCTPCREGSGWMWRMLERMAAGEATSEEVDMLMDVTQQIEGHTICAFGEGSAWPVQGLLRHFKDEILERNKFDPIVKKQKDIPYLVDQHLLEKENA

SEQ ID NO: 100576 - protein, 330 aa, Unknown
  Bacterial polypetide isolated from the Sargasso Sea
NIKTNTEKVEKARKGVMEFLLANHPLDCPVCDQGGECDLQDQSMFYGIDKSRYKENKREVSDKYMGPLIKTQMTRCIHCTRCIRFATEIAGVPELGAIGRGENMEITTYLEKSMESELSANVIDLCPVGALTSKPYVFEARPWELKKTETIDVMDAVGSSIRVDTYGWEVKRILPRINEDINEEWISDKTRYACDGIKNQRIDIPYLKNKKGFEKISWEEANQIIVKKINETSSDKIAGFTGDLSNMETLYIAKEFFNKTIKSKYLDSRIDNTYVNTSKKENYIFNSTINGIEDSDLIVLIGTNPRYESTIFNLRIRKSILKIYKNLFNW

SEQ ID NO: 100577 - protein, 91 aa, Unknown
  Bacterial polypetide isolated from the Sargasso Sea
MLKDEDRIFKNLYNDLGWEIDSAIKRGDWSQTKDIISKGKDFIIKEIKDSELRGRGGAGFPTGLKLSFAPKEVGSRPHYLVINADESEPGT

SEQ ID NO: 100578 - protein, 272 aa, Unknown
  Bacterial polypetide isolated from the Sargasso Sea
MQKPRKTKEKTRNTELRTPSGWPRGTQESSKATPRAPRSTPGGVRGCSGTGGSRESPRALPELPGSSQERSESAPSVRRALREPETASRALWSSGNARKLRLFVTFLRRFLPARNISSSSAASAELHSLRYVSHAMFATTRWLRDATVATPRWLRYVRYATFVMLCAPRYARYAALASLCWLHYVHHATFATLRLLRYTLAALHSPRCVRYATFATLHWPRCVRYAAFATLRLLRYAGQAAFATLLSLRYICYATHWLRCVRHAAFATLCGI

SEQ ID NO: 100579 - protein, 225 aa, Unknown
  Bacterial polypetide isolated from the Sargasso Sea
MQYKLTRVDPNAPNEAYPIGQREVVSDPLLEDQVHKNIYMGKLSDVLNGAVNWGRKNSLWPYNFGLSCCYVEMTTAFTAPHDVARFGAEVIRASPRQADFMVIAGTCFIKMAPVIQRLYEQMLEPKWVISMGSCANSGGMYDIYSVVQGVDKFLPVDVYIPGCPPRPEAFLQGLMLLQESIGQERRPLSWVVGDQGIYRAEMPSQKEQRREQRIAVTNLRSPDEV

SEQ ID NO: 100580 - protein, 163 aa, Unknown
  Bacterial polypetide isolated from the Sargasso Sea
MIKLKVNDIDLEVEEGLTVLQACEKAGAEIPRFCYHEKLSIAGNCRMCLVEIEKSPKPVASCAMPITEGMNIKTNTEKVEKARKGVMEFLLANHPLDCPVCDQGGECDLQDQSMFYGIDKTRYKENKREVPDKYMGPLIKTQMTRCIHCTRCIRFATESCWSY

SEQ ID NO: 100581 - protein, 173 aa, Unknown
  Bacterial polypetide isolated from the Sargasso Sea
MLKEQDKIFNNLYGDQSYSLADATRRGDWDQTSNLIKKGSEWIIEEMKKSELRGRGGAGFPTGLKWSFMPKDPGSNNYLVVNADESEPGTCKDRDMIRNEPHKLIEGCLLSSFAMNAHNCYIYIRGEYFNEAVVLQKAIDEAYEAGLVGKNACGSGWDFDIYLHRGAGAYICG

SEQ ID NO: 100582 - protein, 394 aa, Unknown
  Bacterial polypetide isolated from the Sargasso Sea
AFYPELPEYINLDEYIKSNGYKIYQSICNGEISAENAVSILEDSELKGLGGAGFPAGRKWRILRDQQAPRLLAINIDEGEPGTFKDRHYLESDPHRFFEGMLIASKVVGIDKIYIYLRDEYPAVKIIMEQEIQKIKKHFDDIPEIEMRRGAGAYICGEESAMIESIEGKRGMPRLRPPFVAQVGLFGRPTLEHNMETLYWIRDILDKGSKWFADKGVNGRKGLRSFSVSGRVKNPGVHLAPAGTTVQELIDDYAGGMLDGHEFYGYFPGGASGGILPASMNNIPLDFGTLEEYGCFIGSAAVVILSDKDKARDAAKTTIDFFKHESCGKCTPCRAGTSKASELMKEIHWDTDLLKDLSQAMADASICGLGQAASNPLKSVLKYFPNEVKDGSKT

SEQ ID NO: 100583 - protein, 531 aa, Unknown
  Bacterial polypetide isolated from the Sargasso Sea
MGDNTEFKRDMLIEYLHLIQDANGYISSDIMEALSNEMKLPLVEVWEVASFYDHFDLIKDNETPPPKKTIRVCNSLSCFLNGSSNLIKELKEDSYINDDVRVIEAPCLGACDMAPAAAQKHYLIPKANKNKIVKILSGSKVKDPLENTIDFDQYIKSGGYSSLVKIIDGKITHSKILNEIKVSGLRGLGGAGFPTFKKWEIVNSEKGIKYVAVNGDEGEPGTFKDRFYLEKDPHRVLEGMLIAAYFIGAKDCYFYIRDEYPEIRIFINKEIKKVKLYLNLNINIHIRRGAGAYICGEESAMIESIEGKRGLPRHRPPYVAQKGIFNKPTLVNNIETLYWIREIIEKGGKNFASKGSKDHPGARSYSVSGRVKYPGVVFAPAGSTVNELIQKCGGILDGHKFKAYLPGGASGGILPSAKGDVPLDFGGELTKYGCFVGSHAIVILSDKDNLADVALNLISFFKHESCGQCTPCRNGTEKIINIIKNNSKWDKDLLSDISEVMANASICGLGQAASNPILSVLKFFPKDVGIK

SEQ ID NO: 100584 - protein, 412 aa, Unknown
  Bacterial polypetide isolated from the Sargasso Sea
MKTAVNTSANSEFAPNLLVGLREEFEQLILAWQTTSDNMPTIWVDRKDLTSILIYLRDKAEPRFEMLFDITAIDERVRVHRLGQPESEFSVVYHLMSFSGNRDFRIKVPLMDADLNIPSIVSLWPSANWYERETWDMFGINFEGHPNLYRIVLPPTWEGHALRKEHPARATEMEPFSLEDEKAEEEQNALLFNPEEWGMKRKSENSEFMFLNLGPNHPSVHGAFRIAVQLDGEILVDAVPDIGYHHRGAEKMGERQSWHTYIPYTDRIDYLGGVMNNLPYVMAVEKMAGIEVPERVKTIRIMLAEMFRICSHLLFYGTFAQDVGQLSPIFYMFVERERIFNIIESICGARMHPGWFRIGGVAQDLPEGWESRVRELLEFMPPRIDEYDKMVLNNGILKRRTQGVGAYSTQQA

SEQ ID NO: 100585 - protein, 109 aa, Unknown
  Bacterial polypetide isolated from the Sargasso Sea
MPKPISAVFNWARSYSLWYFQFGLACCAIEVMAVSGPRHDFMRLGVIPLPASPRQADLMIVAGTVTDKMAPAVKRLYDQMPEPKYVISMGSCSNSGGPYWDSYSVTKGC

SEQ ID NO: 100586 - protein, 153 aa, Unknown
  Bacterial polypetide isolated from the Sargasso Sea
MLKDEDRIFQNLYNDSGSDYESAKKRNDWNGTKEILDKGRDWIINEVKTSELRGRGGAGFPTGLKWSFAPKEVGSRPHYLVINADESEPGTCKDRDILRFEPHKLIEGCLIASYAVNAHKCYIYIRGEYFNEGQKLQNAIDEAYQNNLIGENA

SEQ ID NO: 100587 - protein, 218 aa, Unknown
  Bacterial polypetide isolated from the Sargasso Sea
MADERRVIIDEVELEVDGSMTLIQACEEAGIEIPRFCYHERLSIAGNCRMCLIEIVGGPPKPAASCAMQVRDLRPGPDGQPPVVRTNSPMVKKAREGVMEFLLINHPLDCPICDQGGECDLQDQAMAYGVDFSRFREAKRASDDLDLGPLVETHMTRCISCTRCVRFTTEVAGTSQMGQTGRGEDSEITSYLGETLESNLQGNIIDLCPVGALTSKPY

SEQ ID NO: 100588 - protein, 448 aa, Unknown
  Bacterial polypetide isolated from the Sargasso Sea
DILPPILMSSGENETPPPSLTVRVCDSMSCRMAGAENLIQELDQKFDESIRVQRVPCVGRCQHAPVAVVGQNPVDLANPVKVQQKSELNDTIPSLPDYVDYNSYRTAGGYQVFQSCIKGERQPKEVIEVLKNSNLRGLGGAGFPAGMKWEIVGKFEGPRLLAVNIDEGEPGTFKDRYFLESDPHRFLEGCLIACWAVGIEEIYLYLRDEYAACMTLLLKELEALKNDLPEKLPKIHLRRGAGAYVCGEESAMIESIEGKRGMPRLRPPYVAEVGLFGRPTLEHNLETLHWVRDILNNGADWFNSQGRHGRKGLRSFSVSGRVKKPGVHLAPAGITVKELIEEYCGGMLEGHEFYGYFPGGASGGILPASLGDVPLDFDTLQEHGCFIGSAAVIIFSNQDSAKDLAINAMRFFEHESCGQCTPCRVGTGKATILMEQPKWDKDLLEELS

SEQ ID NO: 100589 - protein, 188 aa, Unknown
  Bacterial polypetide isolated from the Sargasso Sea
MLRDEDRIFTNLYNDFGSDVDSSQKRGDWKDTKEIISKGKEWIINEIKLSELRGRGGAGFPTGLKWSFAPKEIGSKQHYLVINADESEPGTCKDRDILRFEPQKLIEGCLISSYAVNAHICYIYIRGEYYNEGKKVQEAIDEAYKKELIGKNACGSGWDLDIYIHYGAGAYIYGEETALLESMKEKKG

SEQ ID NO: 100590 - protein, 280 aa, Unknown
  Bacterial polypetide isolated from the Sargasso Sea
MVESSLQTGYVKHAPGFVENEGPKLITSRFKHADSFTLDKYLSTGGYEGLKSSLNRSPGQVHDEVREASLLGRGGAGFPAGIKWGFPPEGVWPRYLVVNGDESEIGTYKDRLLMERDPHQLIEGVLIACYALGLSQAFLYVRGEMALAQERIALALDEAYEAGYIGKNILDTKFSVDVVMHWGAGAYIVGEETALIESLEGKRGMPRLKPPYFPAAIGLYGKPTIVNNVETLSNLPWILNNGASAYKGFGSESSPGTRMFAISGHVKRPGVYEVEHGVLP

SEQ ID NO: 100591 - protein, 179 aa, Unknown
  Bacterial polypetide isolated from the Sargasso Sea
MPKIIINGKEIEFEKGMTVLQACELADVEIPRFCYHEKLSIAGNCRMCLVELEKSPKPIASCAMPAAEGMNIKTNTHLVEKARKGVMEFLLANHPLDCPVCDQGGECDLQDQSMYYGVDKSRFIENKRQVKEKYMGPLIKTQMTRCIHCTRCVRFATEVAGVPEIGAIGRGEIWKFTLI

SEQ ID NO: 100592 - protein, 193 aa, Unknown
  Bacterial polypetide isolated from the Sargasso Sea
MPKLKVNDIDIEVEDGLTVLQACEQAGAEIPRFCYHEKLSIAGNCRMCLVEMEKSPKPIASCAMPAAEGMVIKTNTEKVEKARKGVMEFLLANHPLDCPVCDQGGECDLQDQSMFYGIDKSRFKENKRYVPEKYMGPLIKTQMTRCIHCTRCIRFATEIAGVPELGAIGRGENMEITTYLEKSMESEMSAKCN

SEQ ID NO: 100593 - protein, 111 aa, Unknown
  Bacterial polypetide isolated from the Sargasso Sea
MLKLKVNDIDVELEEGLTVLQACEQAGVEIPRFCYHERLSIAGNCRMCLVEMEKSPKPIASCAMPAAEGMVIKTNTEKVDKARKGVMEFLLANHPLDCPVCDQGGELITRS

SEQ ID NO: 100594 - protein, 169 aa, Unknown
  Bacterial polypetide isolated from the Sargasso Sea
RKGLRCFSVSGRINKPGVHLAPAGISIHELIDEYCDGMMPGHKFYGYFPGGASGGMLPASLGDVPLDFDTLQEYGCFIGSAAVIVFSEQDAARDLALNAMRFFEHESCGQCTPCRSGTSKAIPLMKKEKWDKTLLEELSSTMEDASICGLGQAAPNPLRSVIKYFPQEV

SEQ ID NO: 100595 - protein, 78 aa, Unknown
  Bacterial polypetide isolated from the Sargasso Sea
MSLASLGTANRITRAAETHPLTWRLRDDGQPVWLDEYQSKQGYDAARKALGQMSPDEIVGTVKDAGLKGRGGAGFSTG

SEQ ID NO: 100596 - protein, 72 aa, Unknown
  Bacterial polypetide isolated from the Sargasso Sea
YDQMPEPRYVISMGSCANCGGYYHYSYSVVRGCDRVVPVDVYVPGCPPSAEALLYGILQLQKKIRNKGSLER

SEQ ID NO: 100597 - protein, 121 aa, Unknown
  Bacterial polypetide isolated from the Sargasso Sea
MGLLTNKFQEDNVIVEKLEKLLNWSRSTSPWFFQFGTACCAIEMMAAAAPRHDIKRIGFIPRSSPRQADVMIVAGTVTMKMAIRVKKLYEQMADPKYVVAMGSCATSGGPYWQHGYHVLKG

SEQ ID NO: 100598 - protein, 171 aa, Unknown
  Bacterial polypetide isolated from the Sargasso Sea
MHKLKVNDIEVEVEEGLTVLQACEKAGVEIPRFCYHEKLSIAGNCRMCLVEMEKSPKPIASCAMPAADGMVIKTNTAKIEKSRKGVMEFLLANHPLDCPVCDQGGECDLQDQSMFYGIDKSRFKENKRAVPDKNMGPLIKTQMTRCIHCTRCIRFATEIAGVPELGAMAEG

SEQ ID NO: 100599 - protein, 201 aa, Unknown
  Bacterial polypetide isolated from the Sargasso Sea
MLIPFSVFIFNSIVLRNLISGKNEIPGIVNSISIGISFIFALIVLFNVGDFSSSISFTWINLNDVDITFSFLVDPLTAIMLVVVSGVSFLVQIYSIGYMHGDKSFCRYFSYMALFTGSMLGLVMSRNILQLFIFWELVGVSSYLLIGFWHERKSAAAAAKKAFIMTRLGDFGFLFSIIYLFNVNSDLLEIPALYNAILNNE

SEQ ID NO: 100600 - protein, 184 aa, Unknown
  Bacterial polypetide isolated from the Sargasso Sea
MLKDQDRIFKNLYNDMGSDVVSSQKRGDWVNTKEITDKGRDWIINEIKDSQLRGRGGAGFPTGLKWSFAPKEVGSRPHYLVINGDESEPGTCKDRDILRFEPHKLIEGCLIASYAVQAHICYIYIRGEYFIDGQKLQAAIDEAYEKKLLGKNAAGTGWDLDIYIHYGAGAYICGEETALLESIE

SEQ ID NO: 100601 - protein, 237 aa, Unknown
  Bacterial polypetide isolated from the Sargasso Sea
MIKLKVNDIDLEVEEGLTVLQACEKAGAEIPRFCYHEKLSIAGNCRMCLVEIEKSPKPVASCAMPITEGMNIKTNTEKVEKARKGVMEFLLANHPLDCPVCDQGGECDLQDQSMFYGIDKSRYKENKREVPDKYMGPLIKTQMTRCIHCTRCIRFATEVAGVPELGAIGRGEDMQITTYLEKSMESELSANVIDLCPVGAFTSKPYVFEARPWELKKTETIDVMDAVGSSIRVDTYG

SEQ ID NO: 100602 - protein, 322 aa, Unknown
  Bacterial polypetide isolated from the Sargasso Sea
MSDSLIDLLLEIGKALIVLVGIVGAGAFMSFIERRLLALWQDRYGPNRVGPFGLLQLAADMIKMFFKEDWIPPFADRRIFVLAPIIAFTAFILAFAVVPITPTWGVADLNVGLLYILAIAGLAVYAVLFAGWSSNNKYSLLGSLRASAQTLSYEVFLGLSLMGIVIQTGSFNLRDIVEAQAGLWNVIPQILGFITFLFAGVAVTHRHPFDQPEAEQELADGYHIEYAGMKWGLFFVGEYIGIVLISSLIVTLFFGGWHGPWLPPFIWFALKTACFMVFFILLRASLPRPRFDQVMSFGWKVCLPLTLLNMLVTGAVVLMNAQ

SEQ ID NO: 100603 - protein, 91 aa, Unknown
  Bacterial polypetide isolated from the Sargasso Sea
CTPCREGTGWMYKIIDKILKGNGTLEDLKTLESIPNMISGSTICALGDAAAMPVESFIKNYKEEFLKYIKTQEEVVDNNYTNNKEFVIQQK

SEQ ID NO: 100604 - protein, 356 aa, Unknown
  Bacterial polypetide isolated from the Sargasso Sea
FLVSTFCRLSNAVGVGGAVIGTRMIYLISKSNSQLHALAFTFLIGAFGGAVMFFSLILDSFLLLLLGAFILGIGQSATLQTRYAASFVAGAKFKATALSLAVWFSVFGSVFGPRMVGSYSNFFENIFNSDLIVGYVIAFVGMLFAAASLFTFTSKKSILRSPSDLESESSDQSSERKNGNLLSLLLVLNHFTMVVIMSATPLHIQDIGETVQLVGIIISYHTLGMFLFSPILGNYVDKYGYKKFTYVGTVILFISCLITLINSGPTALKIGLYLLGLGWNFNYVAISAAISKFSIKYRTPLNIKSDSFVFLGSFVAHTSLGLSYLLIGFKGLSFVGIAVSVFLFYNLKNLNKLNIE

SEQ ID NO: 100605 - protein, 599 aa, Unknown
  Bacterial polypetide isolated from the Sargasso Sea
TSLVQKARKGVMEFLLANHPLDCPVCDQGGECDLQDQSMFYGIDKSRYKENKRQVPEKHMGPLIKTQMTRCIHCTRCIRFATEVAGVTELGAIGRGEDMQITTYLEKSMESEMSANVIDLCPVGALTSKPYVFEARPWELKKTESIDVMDAVGSNIRVDTYGWEVKRILPRINEDINEEWISDKTRYACDGLKNQRLDIPYIKINGKLKPTTWNDAFNHIVDKIKKSPPEKIAGLTGDLTNMETMFIAKEFFQKTIKSKNLESRTNNYYVNTDDRKNYIFNSTLNGIEESDLIILIGTNPRYEATILNARIRKSYLKNKTNIYSLGDVGELTYPYIVLDNKTEVVKDILENKNELTEKLKKAKKPMVVIGQSALKLNSAKYIFEEFKKFLINNKKINDDWNSLNIISNHASTVGGYDLDILDLQEKKDSTLEKIKNNYFEILFLFAQDNFNFKKKNEFIIYVGSHGDLGAELADVILPGAAYTEQDGYFTNLEGKIQKAYKASYPPGESKEDWEIINELSELLKRKKLYNNKDELIDSMMNYIKLKESDNNLSDNQFISEKIIIEPVDYYYSNVIARSSQTMSECRNEKLKIKPTGTDG

SEQ ID NO: 100606 - protein, 229 aa, Unknown
  Bacterial polypetide isolated from the Sargasso Sea
PFPAVQGLYGKPTIIINTETIASVPYIIKNGIDWYKNLGAGDAHGVKMFCMSGHLNRPKVIEAPLGTPFSKLLDECNGVLNDKKLKAVIPGGSSVPVVKGEVIMDTPMDYEPLMKIGTMLGSGGVIVMDETTCMVSVLERISRFYYAESCGQCTPCREGTGWLYKTLVKIRAGQGDQSDLDLLNRVANQIEGHCICALGDAAAMPVKSFLSNFWNEFEYYVEKKQSMII

SEQ ID NO: 100607 - protein, 139 aa, Unknown
  Bacterial polypetide isolated from the Sargasso Sea
MIKLKINDKNIEIEDGLTVLQACEKAGVEIPRFCYHEKLSIAGNCRMCLVEMEKSPKPVASCAMPASEGMIIRTNTEKVEKARKGVMEFLLANHPLDCPVCDQGGECDLQDQSMFYGIDKSRFKENKRHVPEKYMGPLI

SEQ ID NO: 100608 - protein, 164 aa, Unknown
  Bacterial polypetide isolated from the Sargasso Sea
MLKVKINDIDLEVEEGLTVLQACEQAGAEIPRFCYHEKLSIAGNCRMCLVEIEKSPKPVASCAMPVTNGMNIKTNTEFVEKARKGVMEFLLANHPLDCPVCDQGGECDLQDQSMFYGVDKSRYKENKRSVPEKYMGPLIKTQMTRCIHCTRCIRFATEVAGVPE

SEQ ID NO: 100609 - protein, 103 aa, Unknown
  Bacterial polypetide isolated from the Sargasso Sea
MLNAKDKVFQNLHGFQEPFIEGALQRGSWSNTKEILSKNQNDIIELVKSSQLRGRGGAGFSTGLKWSFMPKDTGKQHYLVVNADESEPGTCKDREIIRNDPHT

SEQ ID NO: 100610 - protein, 573 aa, Unknown
  Bacterial polypetide isolated from the Sargasso Sea
KARKGVMEFLLANHPLDCPVCDQGGECDLQDQSMYYGVDKSRFVENKRQVKEKYMGPLIKTQMTRCIHCTRCVRFATEVAGVPEIGATGRGENMEITTYLEKAMESELSANVIDLCPVGALTSKPYAFEARPWELKKTESVDVMDAVGSNIRIDTYNWEVKRILPRLNNDINEEWISDKTRYSCDGLLKQRLDVPYIKKNNKLQKSNWDEAISILVEKIKTLNPDEIGGHIGDMVNLENALSFKKFFSVLKSNNLEFREKNFFIDPSEKSNYIFNSSIKGIEKSDLILLIGTNPRHEATMLNARIRKVFAQKKVPIYSIGNPGDLTYDYTIIGNKTDDIKKILSNESDFSKILSSSKKPVIIIGESALELKSGKYLIEGFKNFLKNNNFINKDWNAFNFLPQNASTVGLIDLKILSKEENKRNLFFEKLKNNQFKLLYLLGSDNLDIKKNNEFIVYQGSHGDKGAEIADLILPSAAFTEQNGLYENLEGRVQECKKASYPIGEALEDWKILNLILKALGKNENLLNFDSLREEVLKSIPNFSKLNELPHFKNCELIDTSPYFGSEESHIKEFR

SEQ ID NO: 100611 - protein, 224 aa, Unknown
  Bacterial polypetide isolated from the Sargasso Sea
MKYTLTRIDPDAPVERYPQEQRQTVEDPLAQEASRGIMIGRLEEVLQDTVNWGRKNSLWPYNFGISCCYVEMCTAFTSPHDVARFGAEVIRASPRQADFMVIAGTPFIKMAPVIQRLYEQLLEPKWVISMGACANSGGMYDIYSVVQGVDKFLPVDVYIPGCPPRPEAFLQALMLLQDSIGKERRPLSWVVGDQGIYRPQMPAEKDRKRGERINVTNLRTPDEI

SEQ ID NO: 100612 - protein, 106 aa, Unknown
  Bacterial polypetide isolated from the Sargasso Sea
MLKTEDRIFKNLYNELGWEIDSAIKRDDWKDTKNIISKGRDWIINEVKISELRGRGGAGFSTGLKWSFAPKQVGSRPHYLIINADESEPGTCKDRDILRFEPQKIN

SEQ ID NO: 100613 - protein, 209 aa, Unknown
  Bacterial polypetide isolated from the Sargasso Sea
AEVGLFGRPTLEHNLETLHWVRDILENGADWFTSQGRHGRKGLRSFSVSGRVKKPGVHLAPAGITVKELIEEYCGGMLEGHEFYGYFPGGASGGILPASLGDVPLDFDTLQEHGCFIGSAAVIIFSDQDSAKDLAINAMRFFEHESCGQCTPCRVGTGKAAILMEQPKWDKDLLEELSKAMEDASICGLGQAAPNPIRSVVNYFPQELD

SEQ ID NO: 100614 - protein, 103 aa, Unknown
  Bacterial polypetide isolated from the Sargasso Sea
MLKEENKIFKNLYNEQGWELENALKRDDWLDTKKIIEKGRDWIINEIKASELRGRGGAGFSTGLKWSFAPKKVGSRPHYLVINADESEPGTCKDRDILRFEPQ

SEQ ID NO: 100615 - protein, 534 aa, Unknown
  Bacterial polypetide isolated from the Sargasso Sea
MNIKTTTDLVKKAREGVMEFLLINHPLDCPICDQGGECELQDQSYIFGSDRSRFTEYKRAVEDKELGPLVKTVMSRCIHCTRCVRFSTEIAGVQDMGITGRGNQAEVGTYVSKLLASELSGNVIDLCPVGALTSKPFAFSARSWELESTPSIDVTDGLGSNIRVDTRGAEVMRIVPRANEEVNEEWISDKARFSYDALKRQRLDRPMVRDGSGKLQETSWEFALEYVAEKLQSVEPNAMRAVAGKLCDAESMISLKDMMNKLGASHLTPEGMANTSADVRSSYLFNSNLVGVEDADYVLLIGTNPRTEAPVLNVRLRRAVIAGGATVASVGPNADLSYPSEHLGDTTATVDEIASGKHAACEAIKAAQNPMVIVGSELLRRPDAKVLLKKIHAMCDDLGVVKGDWNGFNVLHDAGGTVGALDIGFVPGTSASDDVPAQLVYSLGAEEFDAPEGAFVVYQGHHGDKGAARADVILPGAAYTEKTGTYVNTEGRAQMAIASMGPVGQAKEDWRILRALSEFAGVPLSYNTHQQVHE

SEQ ID NO: 100616 - protein, 89 aa, Unknown
  Bacterial polypetide isolated from the Sargasso Sea
MLKEKDKIFTNLFGDESFHLKNAQARGDWDNTKELIKKGREWIIDEMKKSELRGRGGAGFPTGLKWSFMPKDSKLTNYLVVNADESEPG

SEQ ID NO: 100617 - protein, 140 aa, Unknown
  Bacterial polypetide isolated from the Sargasso Sea
MLKDQDRIFKNLYNDLGSDINSSQKRGDWVNTKELTNKGRDWIINEIKDSQLRGRGGAGFPTGLKWSFAPKEVGSRPHYLVINADESEPGTCKDRDLLRFEPHKLIEGCLIASFAVQAHACYIYIRGEYFIEGQKLQSCN

SEQ ID NO: 100618 - protein, 119 aa, Unknown
  Bacterial polypetide isolated from the Sargasso Sea
MPKIIINGKEIEFEKGMTVLQACELADVEIPRFCYHEKLSIAGNCRMCLVELEKSPKPIASCAMPAAEGMNIKTNTHLVEKARKGVMEFLLANHPLDCPVCDQGGECDLQDQSMYYGVD

SEQ ID NO: 100619 - protein, 199 aa, Unknown
  Bacterial polypetide isolated from the Sargasso Sea
MLKLKVNDIDVEVEEGLTVLQACEKAGVEIPRFCYHEKLSIAGNCRMCLVEMEKSPKPIASCAMPAAEGMNIKTNTEFVEKARKGVMEFLLANHPLDCPVCDQGGECDLQDQSMYYGVDKSRFKENKRLVPEKNMGPLIKTQMTRCIHCTRCVRFATEVAGVPELGAIGRGEDMQITTYLEQSMQSELSANVVDLCPVG

SEQ ID NO: 100620 - protein, 137 aa, Unknown
  Bacterial polypetide isolated from the Sargasso Sea
MLKLKVNEIEVEVEDGLTVLQACEKAGVEIPRFCYHEKLSIAGNCRMCLVEMEKSPKPIASCAMPATEGMNIKTNTALVEKARKGVMEFLLANHPLDCPVCDQGGECDLQDQSMYYGVDKSRFKENKRAVPEKNMGP

SEQ ID NO: 100621 - protein, 103 aa, Unknown
  Bacterial polypetide isolated from the Sargasso Sea
MLKNEDKIFTNIYGANSSEISAAIRRGNWDSTKTLLSKGKDWIIEELKASGLRGRGGAGFPTGLKWSFMPKEVKDRPHYLVVNADESEPGTCKDREILRNEPH

SEQ ID NO: 100622 - protein, 430 aa, Unknown
  Bacterial polypetide isolated from the Sargasso Sea
VTCEMSGSKELLDELNKESMVIPDSGEVVRIQSVPCVGRCQHAPVAVVGKNPVDYASTGRVKQKVEEKAVIPEIPKYTGLEEYMASGGYQLFQNCITEKKTPEEVINELKSSGLRGLGGAGFPAGAKWEIVKKFSSPRFLAVNIDEGEPGTFKDRYFLETDPHRFLEGSLIASWAVGIDEIYLYLRDEYAAGHEILRREIKKMEGFFKDKLCKIHLRRGAGAYICGEESAMIESIEGKRGIPRLRPPYVAEVGLFGRPTLEHNLETLHWVRDIVEKGAESFSKHGRRGRKGLRCFSVSGRINKPGVHLAPAGISIHELIDEYCDGMKPGHKFYGYFPGGASGGMLPASLGDVPLDFDTLQEYGCFIGSAAVIVFSEQDAARDLALNAMRFFEHESCGQCTPCRSGTSKAIPLMKKEKWDKTLWKNFKYNE

SEQ ID NO: 100623 - protein, 397 aa, Unknown
  Bacterial polypetide isolated from the Sargasso Sea
MPAAEGMVIKTNTEKVEKSRKGVMEFLLANHPLDCPVCDQGGECDLQDQSMFYGIDKSRFKENKRYVPEKYMGPLIKTQMTRCIHCTRCIRFATEVAGVPELGAIGRGEDMQITTYLEKSMESEMSANVIDLCPVGALTSKPYVFEARPWELKKTETIDVMDAVGSNIRVDTYGWEVKRVLPRINEEINEEWISDKTRYACDGLKNQRLDTPYIKSRNKFEKISWNEAYSKIFDKISITASDKIAGITGDMTNMETLYIIKDFFDKTIKSNNLDSRNENYYVNSSSKNNYIFNSKITGIEDADLIFLIGTNPRYEATILNSRIRKTYINKNINIYSLGPVGDITYPYITLENSTKTIKDIINNNHELSKVIDTAKKPMFIIGQSVLKQSSSIYLVEE

SEQ ID NO: 100624 - protein, 243 aa, Unknown
  Bacterial polypetide isolated from the Sargasso Sea
AERIKTLYDQMAGPKWVIAAGSCAISGDHYRHIYSVVPGVDWIIPVDVYVPGCPPTPEAFIDGILELQNIIGEGKTSPTFNSSPVPEEKTLSPLEVTKPPKKSKNVIESEFIDKTNIINHSMDLKNQGFTYLKFITATDFDTNIVLTYFLGNNVSNKEVEFNIKLDDDMKVSSLSNIYSGADWQEREIFDLFGIIFEGHPNLKRIMMPDEWIGHPLRKEYVMDSHYYPYRPTRKEYEKWKTEL

SEQ ID NO: 100625 - protein, 126 aa, Unknown
  Bacterial polypetide isolated from the Sargasso Sea
MLGSGAIVVMDETTDIVKACHNVVRFFSRESCGKCTPCREGTNWLEKILDRILNGYGRPEDIDLLLDVCDNISPGISWPPKQTTICPLGPSAVSPIASALKRYRSEFDAYIGSNTVTPVSVDGGSS

SEQ ID NO: 100626 - protein, 161 aa, Unknown
  Bacterial polypetide isolated from the Sargasso Sea
MLKLKVNEIEVEVEEGLTVLQACEKAGVEIPRFCYHEKLSIAGNCRMCLVEMEKSPKPIASCAMPAAEGMNIKTNTALVEKARKGVMEFLLANHPLDCPVCDQGGECDLQDQSMYYGVDKSRFKENKRAVPEKNMGPLIKTQMTRCIHCTRCVRFATEVAG

SEQ ID NO: 100627 - protein, 118 aa, Unknown
  Bacterial polypetide isolated from the Sargasso Sea
MPKIKVNNNELEVEDGLTVLQACEQAGAEIPRFCYHEKLSIAGNCRMCLVEIEKSPKPVASCAMPVADGMNIKTNTEFVEKARKGVMEFLLANHPLDCPVCDQGGECDLQDQSMFYGI

SEQ ID NO: 100628 - protein, 528 aa, Unknown
  Bacterial polypetide isolated from the Sargasso Sea
VEKARKGVMEFLLANHPLDCPVCDQGGECDLQDQSMFYGVDKSRYKENKRSVPEKHMGPLIKTQMTRCIHCTRCVRFATEVAGVSELGAIGRGEDMQITTYLEQSMQSELSANVIDLCPVGALTSKPYVFEARPWELKKTETVDVMDAVGSNVRVDTYDWEVKRVLPLINEDINEEWISDKTRYACDGLLNQRLDTPYIKYNGKFEKASWDEVFKIMKSKFENASNDKICGFVGDLTNMETGYIFKEFFDRTLNNKNYESRSDNRFVDNSARENYIFNSTINGIEESDLIFLIGANPRYEATILNARIRKAYVNNKTKVISLNDVGDLTYPYENLNGQTQSIKNIFEGSNEISKEIISANKPMIMIGESLLKLNSAKYLFNLIKDFLKKNNKFTESWNPLNILSCDAATVGNFDLGILNNGINLLEQLKSNKFEIVYLVGQDNLEFNKKNEFVIYQGSHGDKGAEIADIILPGSAYTEQDGYFTNLEGKIQKAYKASYPPGEAKEDWQIFNELAEVMNNRNYLMIKMN

SEQ ID NO: 100629 - protein, 154 aa, Unknown
  Bacterial polypetide isolated from the Sargasso Sea
MSDDQINIEVDGKSVKAKKGQMIIEATDEHGSYVPRFCYHSKLSIAANCRMCLVEVEKAPKPLPACATPVADGMKISTKSPFAIAAQKATMEFLLINHPLDCPICDQGGECELQDLAMGYGRGVSRYNDNKRVVKDKDIGPLVSTDMTRCIHCT

SEQ ID NO: 100630 - protein, 344 aa, Unknown
  Bacterial polypetide isolated from the Sargasso Sea
CYAVALSQCFLYVRGEMAVAQERIACALNDAYEAGYIGRNILGSHFSVDIVLHWGAGAYVVGEETALIESLEGNRGMPRLKPPYFPASIGLYGQPTIVNNVETLSNLPWIIDNGADAFTNIGTETSPGTRMVAVSGHVKRPGVYEIVNGTTTFRDLLYGQDMCGGIRDDNQLKAFVPGGGSAPWFTPDQLDLPFEASQVGPQGSMLGSGAIMVMDETTDIPAAALTLTKFYAHESCGKCVPCREGGTWLEQILRRVVDGRGSRRDLDLLIEVGETICPGDFPHAAVPSKGIEAKPFPYKMTTICFVGPSAFAPIHSALTLFREEFEAKVAGNDDRVLIEVPVNV

SEQ ID NO: 100631 - protein, 130 aa, Unknown
  Bacterial polypetide isolated from the Sargasso Sea
MLKDEDRIFKNLYNDLGADLISSKNRGDWNNTKEICERGREWIINEVKTSELRGRGGAGFPTGLKWSFAPKEVGSRPHYLVINADESEPGTCKDRDILRFEPQKLIEGCLITSFAVKAHVCYIYIRGENI

SEQ ID NO: 100632 - protein, 530 aa, Unknown
  Bacterial polypetide isolated from the Sargasso Sea
MQRIRRDKEPAPEAWNRCRSRGGTCSGPGRCAAACDAMRCLRLAVAAGVDRAETGAMLGHAHPRREAADATVSRRDPRTIAGVPRAPPAAADDRGGGARACPRRCQRRRAKRRSAPRRDRGRNGHRQDGRLSAARTGAGALARPQAGRVLVHRHAAGATAAQGRAGPAALSAVPGLLRRGQGPAALPVPGAARAASGPAGRGRAARRARAARRRGGGRCRRAAAALVLAPGRGLRCRPLVRRPRRLAAGDPGVRLGQRHDGPPGLPGQPLSELCALPLLPGPPACQGGRPHHRQPRPRAGGSGHGARQHAARSARGAGSLRRGAQPALQGGGPLRLAPLRVQCGLLGVPCGPRCPRRRHGAAARPVRPGSPGSCPPCRAAVRGAGAPAGGRGAALRVRWPATHQPLRRRRAACGGAESGRCRAGRSARDGPGPSDAPHGARGPRRRSCRGRAAAPGHARGVLPETGGAGRDLGLDAVRRDAASAARGALGGAPCGFGRWRRLPGLRGADQRRAAAAGTAVEQGRRCGVDV

SEQ ID NO: 100633 - protein, 494 aa, Unknown
  Bacterial polypetide isolated from the Sargasso Sea
PQNRVASCHFSLSDLRPGPNGELPEVLTNTDQVHNARKGAMEFLLVNHPLDCPICDQGGECDLQDQALHYGINKSRYKENKRAVDNKNIGPLVKTTMTRCIHCTRCVRFTSEVAGTEELGAIHRGENMEITTYLEKGMSSELQGNIIDLCPVGALTSKPYEYHARPWELRKTESIDVMDGIGSNIRIDSKGSEVMRIMPRYNEDINEEWISDKTRFVWDGLKTQRIDTPYIRENGKLIAVSWDRALTLLTKLIKKTDPGRIGAIAGDMVSAEEMFLMKKLMEKIGSNKYDCRQDGSILGNQYGRSSYIFNPTIAGIENADAIVIIGSNPRMESPVLNARIRKRWLTGNLNIYVVGQEHDLTYDYTFIGDSPKSIDLKNIPLNGSKNIIWLLGDDVFLRDDGMDILSQVIDCAEKTGAIRDDWNGVAVLHKYASRVAGLDLDFLPQDEKHTAQKMASSSEIELLFLLDADEIDAKNKRTVYIGSHGDRGATNADI

SEQ ID NO: 100634 - protein, 564 aa, Unknown
  Bacterial polypetide isolated from the Sargasso Sea
KAPKPIASCAMPAANGMVINTNTETVKKARKGVMEFLLINHPLDCPICDQGGECDLQDQAMYYGFDKTRYEENKRAVQNKNMGPLVKTIMTRCIHCTRCVRFSTEVAGVDDIGLLGRGENAEITTYLEKTIESELSGNVIDLCPVGALTSKPYAFKSRPWELTKTETFDVFDGVGSSIRIDTRGKKVLRALPRINEETNEEWISDKSRFAIDGLSSQRLDNVYSKINGKLEKSSWDNAFALVKDQIINRGTENTVFLSGKFTDVETLYSAKKFSESLNSKFYDCRFDNAQFVENSPESYKFNSSIQEIENADAILLVGSNPRWEASVLNARIRKAFINNNCKIGIVGPDLDLNYSYLKISNSLSGLNDILDNTSEFSKELFNAKNPIIIVGTSAINTSQGSSIIKTCAEIAKKLPNFSSSFNPLNILNQDISRVGSLELGFVNKVFDCNFEEKLKEEINKNKPVVFLLGLDEVDPKLLEESFIVYCGHHGDINAQHADIILPTPAYTEKSSTFMNIEGRAIQTSRCHNPLGESKEEWKIFRVLSDLLSCDLDFNTLNDVKKKIS

SEQ ID NO: 100635 - protein, 210 aa, Unknown
  Bacterial polypetide isolated from the Sargasso Sea
RAKNTGTKIYCISGNVNNPCNVEEEMGVTLKDLIEKHAGGVIGGWDNLKAVIPGGSSMPLLPKKICDTIKMDFDACVENKTGLGTAGIVVINNDQDIIKCMARIAKFYKHESCGQCTPCREGSGWMWRMLERMAKGDATRDEVDMLMDVTKQIEGHTICAFGEGSAWPVQGLIRHFKNEIVERNKFDPVVKQKKDIPYLVDQHLLEKENA

SEQ ID NO: 100636 - protein, 216 aa, Unknown
  Bacterial polypetide isolated from the Sargasso Sea
MLKLKVNDTEVEVEDGLTVLQACEKAGVEIPRFCYHEKLSIAGNCRMCLVELEKSPKPIASCAMPAADGMVIKTNTPTVEKSRKGVMEFLLANHPLDCPVCDQGGECDLQDQSMFYGIDKSRFKENKRFVPDKNMGPLIKTQMTRCIHCTRCIRFATEIAGVPELGAIGRGEDMQITTYLEKSVQSELSGNVIDLCPVGALTSKPYVFEARPWNKE

SEQ ID NO: 100637 - protein, 109 aa, Unknown
  Bacterial polypetide isolated from the Sargasso Sea
MARIARFYKHESCGQCTPCREGSGWMWRMLERMAKGEATKDEVDMLGDVTNQIAGHTICAFGEGSSWPVQGLLRHFKKEIKERNKFDPIVKENKNIPYLVDQHLLDENA

SEQ ID NO: 100638 - protein, 166 aa, Unknown
  Bacterial polypetide isolated from the Sargasso Sea
WDNLQAVIPGGSSMPLLPKKICETIKMDFDSLIENKSGLGTAGIVVINKDQDIVSCMARIARFYKHESCGQCTPCREGSGWMWRILNRATKGETTLSDIDLLEDVTKQIEGHTICAFGEGSAWPVQGLLRHFRKEVDKKCSNDPLIKKKKDVPYLIDQHLLEKKNA

SEQ ID NO: 100639 - protein, 145 aa, Unknown
  Bacterial polypetide isolated from the Sargasso Sea
MAKETKTLNLNFGPQHPAAHGVLRLILQLDGEIVEKADPHIGLLHRGTEKLIENKTYTQAVPYFDRLDYVAPMNQEHAFALAIEKILKIEVPIRAQYIRVMFCEIGRILSHILNVTTQAMDVGALTPTLWGFEEREILMGFYEKV

SEQ ID NO: 100640 - protein, 348 aa, Unknown
  Bacterial polypetide isolated from the Sargasso Sea
GKEIEFKKGMTVLQACELADVEIPRFCYHEKLSIAGNCRMCLVEMEKSTKPIASCAMPAAEGMNIKTNTAFVEKARKGVMEFLLANHPLDCPVCDQGGECDLQDQSMYYGIDKSRFVENKRQVKEKYMGPLIKTQMTRCIHCTRCVRFATEVAGVPEIGAIGRGENMEITTYLEKAMESELSANVIDLCPVGALTSKPYAFEARPWELKKTESIDVMDAVGSNVRVDTYNWEVKRILPRLNNEINEEWISDKTRYSCDGLLKQRLDIPYIKKDNKLKKSSWDEAIELILNKIKSVQPNEIGGHIGDMVNLENALAFKKLFKVLKSNNLEFREKKLYINSDNKKNYVFN

SEQ ID NO: 100641 - protein, 270 aa, Unknown
  Bacterial polypetide isolated from the Sargasso Sea
SELSIKIRNSLIENNELLIEVDQKDLVQVIQFLKSDDKCKFRQLVDIAGVDYPSEENRFKLVYLFLSHENNNRIKLSIKFKVNEIINSITKIFPSANWMEREVFDMYGIKFKNHPDLRRILTDYGFKGHPLRKDFPLTGFNEVRYSEKEKKVIYEPVKLEQNYRNFDFESPWEGTSYLKGNQQKKKQMVKKTKSLNLNFGPQHPAAHGVLRLILELDGEVVEKADPHIGLLHRGTEKLIEQKTYTQALPYFDRLDYVAPMNQEHAFALAA

SEQ ID NO: 100642 - protein, 227 aa, Unknown
  Bacterial polypetide isolated from the Sargasso Sea
TIAVVPTILKKGSKWFSSIGRPKNTGTKIFCISGNVNNPCNVEEEMGVSLKELIEKHAGGVIGGWDNLKAVIPGGSSMPLLPKKICETLKMDFDSLIEQKSGLGTAGVVVINKDQDIIKCMARIARFYKHESCGQCTPCREGSGWMWRMLERMAIGEASREEVEMLMDVTKQIEGHTICAFGEGSAWPVQGLLRHFKKEIIKKNNFNPLIKTNKKIPYLIDQHLLEK

SEQ ID NO: 100643 - protein, 264 aa, Unknown
  Bacterial polypetide isolated from the Sargasso Sea
MPKLKVNDIDIEVEDGLTVLQACEQAGAEIPRFCYHEKLSIAGNCRMCLVETEKSPKPIASCAMPAAEGMVIKTNTEKVEKARKGVMEFLLANHPLDCPVCDQGGECDLQDQSMFYGIDKSRFKENKRYVPEKYMGPLIKTQMTRCIHCTRCIRFATEVAGVPELGAIGRGENMEITTYLEKSMESEMSANVIDLCPVGALTSKPYVFEARPWELKKTETIDVMDAVGSNIRVDTYDWEVKRVLPRINEEINEEWISDKTKICM

SEQ ID NO: 100644 - protein, 279 aa, Unknown
  Bacterial polypetide isolated from the Sargasso Sea
MAKEKKTLNLNFGPQHPAAHGVLRLILQLDGEVVEKADPHIGLLHRGTEKLIENKTYIQAVPYFDRLDYVAPMNQEHAFALAIEKILKIEVPSRAKYIRVIFCEIGRILSHILNVTTQAMDVGALTPTLWGFEEREKLMGFYERVSGSRLHANYFRAGGVHKDLPSGLDNDIGEFCEKFPKIIDDLETLLTDNRIFKQRNVDIGIVSKQDALDYSFSGVMLRGSGVAWDLRRSQPYDCYDDLEFKIPIGKNGDCYDRYLCRIEEMRESVKIIKQCLTNI

SEQ ID NO: 100645 - protein, 243 aa, Unknown
  Bacterial polypetide isolated from the Sargasso Sea
MSENLINIKINQKEIQVDKNLTVMQACEIAGEEIPRFCYHDKLSIAGNCRMCLVEIEKAPKLVSSCTMPLMEGMSIITNSEKVNAGRKGVMEFLLINHPLDCPICDQGGECDLQDQAMYYGFDKSRYKENKRAVDNKNMGPLVNTIMTRCIHCTRCVRFATEVAGVPELGMLGRGENAEITTYLEQSITSELSGNVIDLCPVGALTSKPYQFKARPWELKRTDSIDIFDSVGSNIKGLIAEQR

SEQ ID NO: 100646 - protein, 88 aa, Unknown
  Bacterial polypetide isolated from the Sargasso Sea
FAHFYKHESCGQCTPCREGTGWMHRMMQRLVRGEISPEQIELLENVTKQVEGHTICALGDAAAWPIQGLIKNFKSELISKYNKKLKAS

SEQ ID NO: 100647 - protein, 304 aa, Unknown
  Bacterial polypetide isolated from the Sargasso Sea
MLKLKVNDIDVEVEEGLTVLQACEKAGVEIPRFCYHEKLSIAGNCRMCLVEMEKSPKPIASCAMPAAEGMNIKTNTEFVEKARKGVMEFLLANHPLDCPVCDQGGECDLQDQSMYYGVDKSRFKENKRLVPEKNMGPLIKTQMTRCIHCTRCVRFATEVAGVPELGAIGRGEDMQITTYLEQSMQSELSANVVDLCPVGALTSKPYVFEARPWELKKTETIDVMDAVGSNIRVDTYDWEVKRVLPIINEDINEEWISDKTRYACDGLLHQRLDTPFIKYNKKFEKATWSEVYKIFKSKFENTTK

SEQ ID NO: 100648 - protein, 199 aa, Unknown
  Bacterial polypetide isolated from the Sargasso Sea
MAKEKKTLNLNFGPQHPAAHGVLRLILQLDGEVVEKADPHIGLLHRGTEKLIENKTYIQAVPYFDRLDYVAPMNQEHAFALAIEKILKIEVPSRAKYIRVIFCEIGRILSHILNVTTQAMDVGALTPTLWGFEEREKLMGFYERVSGSRLHANYFRAGGVHKDMPVGLDSDIEEFCNKFPKIIDDLETLLTDNRIFKQR

SEQ ID NO: 100649 - protein, 274 aa, Unknown
  Bacterial polypetide isolated from the Sargasso Sea
KVNDIHIEVEEGLTVLQACEQAGAEIPRFCYHEKLSIAGNCRMCLVEMEKSPKPIASCAMPAADGMVIKTNTEKVEKSRKGVMEFLLANHPLDCPVCDQGGECDLQDQSMFYGIDKSRFKENKRYVPEKYMGPLIKTQMTRCIHCTRCIRFATEVAGVPELGAIGRGENMEITTYLEKSMESEISANVIDLCPVGALTSKPYVFEARPWELKKTETIDVMDAVGSNIRADTYGWEVKRILPRINEEINEEWISDKTRYACDGLKNQRLDYPFMK

SEQ ID NO: 100650 - protein, 260 aa, Unknown
  Bacterial polypetide isolated from the Sargasso Sea
MAKVKINGSEIEVSDGMTILQACEEAGIEIPRFCYHDRLSIAGNCRMCLVDVEGSPKPVASCAMPINEGMSIHTNTQSVKKAREGVMEFLLINHPLDCPVCDQGGECDLQDQTIAFGPENSRFEENKRAVEEKHMGPLIKTYMTRCIHCTRCIRFADEVAGVNQLGAVNRGENMEITTYLEKTLDSELSANIVDLCPVGALTSKPYQFEARPWELKKTETIDVLDAVGSNIRVDTYGWKVKRVLPVLNEDINEEWISDKT

SEQ ID NO: 100651 - protein, 206 aa, Unknown
  Bacterial polypetide isolated from the Sargasso Sea
SKLGTEKSGGTKIFCVSGHVQQPGTFEVPLGTPFKDLLALAGGMREGRTCKAVIPGGSSMKIIPGDVMLSLNMDYESIAAQGSALGSGGVIVMDDTTCMVQALASVLHFYEHESCGQCTPCREGTPWVSKIVKNILRGQGRLDDVARLVSIARGIEGHTICAFGEAVAWPVLSFMDHFSDEFEYVIRHGRSQVTGEPLTRFGLTAA

SEQ ID NO: 100652 - protein, 282 aa, Unknown
  Bacterial polypetide isolated from the Sargasso Sea
RLLMEQLPHLLIEGMIISAKALKAYRGYIFLRGEYVDAAANLRRAVEEAKAAGLLGKNILGSGFDFELFVHTGAGRYICGEETALINSLEGRRANPRAKPPFPAVSGVWGKPTCVNNVETLCNVPAIIGNGVAWYQGLALPGSEDHGTKLMGFSGKVNNPGLWELPFGITARELFEHYAGGMKPGYRLKAWQPGGAGTGFLLPEHLDAQMYAGGIGKVGTRMGTGLAMAVDDSINMVSLLRNMEEFFARESCGWCTPCRDGLPWSVKLLRALERGEGQPGDL

SEQ ID NO: 100653 - protein, 192 aa, Unknown
  Bacterial polypetide isolated from the Sargasso Sea
MLKDEDRIFQNLYNDSGADIESAKLRNDWNGTKEILEKGREWIINEIKSSELRGRGGAGFPTGLKWSFAPKEVGSRPHYLVINADESEPGTCKDRDILRFEPHKLIEGCLIASYAVNAQKCYIYIRGEYFNEGQKLQTAIDEAYKNNLIGKNALNSGWDLDIYIHYGAGAYICGEETALLESLEGKKGQPRL

SEQ ID NO: 100654 - protein, 170 aa, Unknown
  Bacterial polypetide isolated from the Sargasso Sea
VVGGWENLKAVIPGGSSMPLLPKKICDTITMDFDSLIENKSGLGTAGIVVINKDQDIVECMARIARFYKHESCGQCTPCREGSGWMWRILDRVVKRKATYGDVELLSDVTKQIEGHTICAFGEGSAWPVQGLLRHFRKEVESRCREEPLIKKKLNNPYLVDQHLLENKNA

SEQ ID NO: 100655 - protein, 85 aa, Unknown
  Bacterial polypetide isolated from the Sargasso Sea
TLTNKMAAPLRKVYDQMPEPRYVISMGSCANGGGYYHYSYSVVRGCDKIVPVDIYVPGCPPSAEALLYGILQLQKKIRREGSQKR

SEQ ID NO: 100656 - protein, 308 aa, Unknown
  Bacterial polypetide isolated from the Sargasso Sea
MTVLQACELAGVEIPRFCYHERLSIAGNCRMCLVEMEKSAKPIASCAMPATEGMKIKTNSKMVEKARKGVMEFLLVNHPLDCPVCDQGGECDLQDQSLYYGFDGSRFKENKRLVKDKYMGPLIKTQMTRCIHCTRCIRFATEVAGVSELGAVGRGEDMEITTYLEKSMTSELSGNVIDLCPVGALTSKPYAFEARPWELKKTESIDVMDAVGSNIRVDSYGWEVKRILPRLNNSINEEWISDKTRYACDGLLKQRLDKVYIRKNNQLVEASWDDAINLISSKIKSTSSDKIAGHVGGLSSFETINSFK

SEQ ID NO: 100657 - protein, 192 aa, Unknown
  Bacterial polypetide isolated from the Sargasso Sea
MAKEKKTLNLNFGPQHPAAHGVLRLILQLDGEVVEKADPHIGLLHRGTEKLIENKTYIQAVPYFDRLDYVAPMNQEHAFALAIEKILKIEVPSRAKYIRVIFCEIGRILSHILNVTTQAMDVGALTPTLWGFEEREKLMGFYERVSGSRLHANYFRAGGVHKDLPVGLESDIDEFCERFPKIIDDLETLLTD

SEQ ID NO: 100658 - protein, 80 aa, Unknown
  Bacterial polypetide isolated from the Sargasso Sea
MAPALRKVYDQMPEPRYVISMGSCANGGGYYHYSYSVVRGCDKIVPVDVYVPGCPPSAEALLYGVLQLQKKIRREGNLNR

SEQ ID NO: 100659 - protein, 65 aa, Unknown
  Bacterial polypetide isolated from the Sargasso Sea
MAAAIEKIHEPGIVTTSVDNLVNWARTGSMWPMTFGLACCAIEMMHAGASRYDLDRFGVIFRPKP

SEQ ID NO: 100660 - protein, 129 aa, Unknown
  Bacterial polypetide isolated from the Sargasso Sea
HYLVVNADESEPGTCKDREIMRNDPHLLLEGCLVAGFAMHAHTCYIYIRGEYYSESSNLQKAIDEAYANNLIGKNACGTGWDFDIYLHRGAGAYICGEETALLESLEGKKGQPRLKPPFPAGAGLYGCP

SEQ ID NO: 100661 - protein, 334 aa, Unknown
  Bacterial polypetide isolated from the Sargasso Sea
RHCRMCLVDMERAPKPIAPCAMPAGDGMVIRTDTDRVKKAREGVMEFLLINHPLDCPICDQGGECDLQDQAMGYGLDGSRFSENKRAVDNKHMGPLISTVMTRCIHCTRCVRFATEVAGVPELGAIGRGETMEITTYLEKSLASELSANVIDLCPVGALTSRPYAFTARPWELNKTESIDVMDAVGSNVRVDARGAQVMRVLPRLNEDVNEEWISDKTRYAIDGLRRQRLDRPYARGRDGKLQPISWDEALQTVAGKLRKAKANQVAAIAGNQCDAESMFALKSLMARLGSPHLDCRQDGAKIGGVRSGYLFNSTIAGIDDADALLIGGQHPRL

SEQ ID NO: 100662 - protein, 262 aa, Unknown
  Bacterial polypetide isolated from the Sargasso Sea
NSNIRGRGGAGFPTGVKWGFLAENEDRYLVINGDESEPGTFKDRILLERDPHQLIEGVIITCFASNIKKAFIYIRGEYAKPARRVQDAVKQAYEKGYLGNNILGTNFSLDVVVHLGAGAYICGEETALLNSLEGKRGEPRLKPPYFPAVMGLYNKPTLVNNVETISSVPWIVQNSGKEYSKLGVEGSTGTRIFSLSGHVNNPGNFEIEMGKSFGEFIDTFGNGIKNNKSVKAYIPGGASAPWFTGDQLDIKMTIDDVANAGS

SEQ ID NO: 100663 - protein, 90 aa, Unknown
  Bacterial polypetide isolated from the Sargasso Sea
LSHFYKHESCGQCTPCREGTGWMYRIMKKMINGNVNIEDIDHLLDVTKQIEGHTICALGDAAAWPIQGLIRHFRKEVESRILNNKTKEVA

SEQ ID NO: 100664 - protein, 274 aa, Unknown
  Bacterial polypetide isolated from the Sargasso Sea
YHEKLSIAGNCRMCLVELDKSAKPIASCAMPAAEGMNIRTNTEMVEKARKGIMEFLLANHPLDCPVCDQGGECDLQDQSLYYGVDKSRFSENKRVVKDKYMGPLIKTQMTRCIHCTRCVRFATEVAGVPEIGAIGRGENMEITTYLEKSMTSELSANVIDLCPVGALTSKPYAFEARPWELKKTESIDVMDAVGSNIRVDTYGWEVKRVLPRINEDINEEWLSDKSRYSCDGLAKQRLDVPYIKKQNKLVKSSWDEAIDIIAKKIIDTPKDQIA

SEQ ID NO: 100665 - protein, 231 aa, Unknown
  Bacterial polypetide isolated from the Sargasso Sea
ETIAVVPTILRRGGKWFSSLGREKNTGTKIFCISGNVNNPCNVEEEMGVPLKDLIEKHAGGVVGGWDNLKAVIPGGSSMPLLPKEICDTIKMDFDACVENKTGLGTAGIVVINKDQDIIKCMARIARFYKHESCGQCTPCREGSGWMWRMLERMAKGEATRDEVDMLMDVTKQIEGHTICAFGEGSSWPVQGLIRNFKDEILERNKYDPLIQRKKEVPYLVDQHLLEKENA

SEQ ID NO: 100666 - protein, 174 aa, Unknown
  Bacterial polypetide isolated from the Sargasso Sea
MGCFIWNLGLIWLCFNDGFPSYTNNWFHIRVEKRSIGVAINTNIEETSPELERLKKLYADKGFVVTSINNLINWARTGSLHWMTFGLACCAVEMMHVGTPRYDVERFGAAPRASPRHADVLIVAGTLTNKMAAALRKAYDQMPEPRYVISMGSCANGGGYYHYSYSVVRGCDRK

SEQ ID NO: 100667 - protein, 185 aa, Unknown
  Bacterial polypetide isolated from the Sargasso Sea
MLKADNKIFKNLYNNLGWEIEAALNRDDWKDTKNIISKGREWIINEVKTSELRGRGGAGFSTGLKWSFAPKEVGSRPHYLVINADESEPGTCKDRDILRFEPQKLIEGCLIAGYAVNAHVCYIYIRGEYFKEGQRLQNSINQAYEKKYLGKNACGSGWDFDIHIHYGAGAYICGEETALLESIEG

SEQ ID NO: 100668 - protein, 295 aa, Unknown
  Bacterial polypetide isolated from the Sargasso Sea
GNCRMCLVEIEKSPKPVASCAMPASEGMNIKTNTSLVEKARKGVMEFLLVNHPLDCPVCDQGGECDLQDQSMFYGVDKSRFKENKRQVPEKYMGPLIKTQMTRCIHCTRCIRFATEVAGVPELGAIGRGENMEITTYLEKAMESELSANVIDLCPVGALTSKPYVFEARPWELKKTESIDVMDAVGSNIRVDTYGWEVKRVLPRINEDINEEWISDKTRYACDGLKNQRLDTPFEKDGNKFNKISWKKAYEILKSKIEHTDVNKIGCFTGDLTNMETGYAVKELFNKVFKSNLLD

SEQ ID NO: 100669 - protein, 201 aa, Unknown
  Bacterial polypetide isolated from the Sargasso Sea
AKWFTSFGNPNNTGTKIFSISGHVNNPCNVEEEMGIPLKELIENHAGGVIGGWDNLLAVIPGGASVPLIPKSICDYVKMDFDNLKNVQSGLGTAAVIVMNKSTDIVEAISRLSHFYKHESCGQCTPCREGTGWMYRMMEKMIIGNANFEDIDKLIDVTKQVEGHTICALGDAAAWPIQGLFRHFREEVEKRIKLHQSDRVA

SEQ ID NO: 100670 - protein, 183 aa, Unknown
  Bacterial polypetide isolated from the Sargasso Sea
MLKDQDRIFQNLYNDLGFDVTSSQKRGDWINTKEIINKGRDWIINEIKNSQLRGRGGAGFPTGLKWSFAPKEVGSRPHYLVINADESEPGTCKDRDILRFEPHKLIEGCLIASYAVQAHVCYIYIRGEYFIDGQKLQKAIDEAYKKNLIGKNAAGTGWDLDIHIHYGAGAYICGEETALLESI

SEQ ID NO: 100671 - protein, 197 aa, Unknown
  Bacterial polypetide isolated from the Sargasso Sea
KKINHGTKIFAISGHVNSPCVVEEEMSISLRDLIDKHCGGVTGGWNNLKAVIPGGASVPLIPKSVCDNALMDFDWLKEQGSGLGTAAVIVMDQSTDVIKAIWRLSKFYKHESCGQCTPCREGTGWMMRIMERLVTGHASVDEIDMLIEITKQVEGHTICALGDAAAWPIQGLIRHFRSEVEDRIMNRSRRNTVQAAE

SEQ ID NO: 100672 - protein, 248 aa, Unknown
  Bacterial polypetide isolated from the Sargasso Sea
MTKETKKLNLNFGPQHPAAHGVLRLILQLDGEVVEKADPHIGLLHRGTEKLIENKTYMQAVPYFDRLDYVAPMNQEHAFAIAIEKILKINVPARAQYIRVIFCEIGRILSHILNVTTQAMDVGALTPTLWGFEERETLMGFYEKVSGSRLHANYFRAGGVHQDLPKGLDDEILKFCEKFPKIIDDLETLLTDNRIFKQRNVDIGIVSKQDALDYSFSGVMLRGSGVPWDLRKSQPYDCYNQIDFKIPV

SEQ ID NO: 100673 - protein, 288 aa, Unknown
  Bacterial polypetide isolated from the Sargasso Sea
MPSIIINGRDIEVEEGLTVLQACEEAGVEIPRFCYHERLSIAGNCRMCLVEMEPSPKPIASCAMPINDGMVIHTDTDLVKKAREGVMEFLLINHPLDCPICDQGGECDLQDQAMGYGLDKSRFLESKRAVKNKYLGPLVSTIMTRCIHCTRCIRFAQEIAGVPELGATGRGENMEVGTYVEKALSSELSGNLVDLCPVGALTSKPYEFKARSWELVKTQSIDVFDAMGSNIRIDSRGSEVMRVLPRINNSINEEWISDKTRHACDGLSRQRLDRPYVRRNGKLEEESW

SEQ ID NO: 100674 - protein, 280 aa, Unknown
  Bacterial polypetide isolated from the Sargasso Sea
FCYHEKLSIAGNCRMCLVEMEKSPKPIASCAMPAAEGMNIKTNTAFVEKARKGIMEFLLANHPLDCPVCDQGGECDLQDQSMYYGIDKSRFVENKRQVKEKYMGPLIKTQMTRCIHCTRCVRFATEVAGVPEIGAIGRGENMEITTYLEKAMESELSANVIDLCPVGALTSQPYAFEARPWELKKTESIDVMDAVGSNIRIDTYNWEVKRILPRLNNEINEEWISDKTRYSCDGLLKQRLDVPYIKKDNKLKKSSWDEAIDLIWNKIKSIQPDEIGGHIG

SEQ ID NO: 100675 - protein, 253 aa, Unknown
  Bacterial polypetide isolated from the Sargasso Sea
MPYITIDNKKIEFKDGITVMQACEIAGVEIPRFCYHDKLSIAGNCRMCLVEMEKSPKPIASCAMPATEGMVIKTNTESVKNARKGVMEFLLINHPLDCPICDQGGECDLQDQALYYGFDKSRYEENKRAVQNKNMGPLVSTIMTRCIHCTRCVRFSTEVAGVDDIGMLGRGENAEITTYLEKTIESELSGNVIDLCPVGALTSKPYAFQARPWELKKTETTDIFDAMGSSIRIDSLGKKALRVLPLLNEQINE

SEQ ID NO: 100676 - protein, 298 aa, Unknown
  Bacterial polypetide isolated from the Sargasso Sea
DIHIPRFCYHKRLSVVASCRMCLVEVEGAKYPQPACSTIVRDGMKVNTVGSVTEDAQKSTMEFLLINHPLDCPVCDQAGECELQDVSLDHGDYKSNYKEIKRTVVDKDIGNLVTTEMTRCIHCSRCVRFGEEVAGIKELGMTGRGEKTKIETFVNQSLTSELSGNVIDLCPVGALNNNLYKYSARTWDLKQISSVSSNDCLGSNINYHTYKDQIKRTIPKENDQINLSWLADSDRFGYEGIESEERILSALIRKDDVLIKSDLDTLNQVVSEEIHKHRSNTTAVMSAQSSCEEMYLFQ

SEQ ID NO: 100677 - protein, 144 aa, Unknown
  Bacterial polypetide isolated from the Sargasso Sea
ASAPWFTGDQLDIKMTIDDVANAGSMLGSGAVVVMDEDTNLVYAAKSIVSFFAHESCGQCTPCREGTTWLEMILERIASGRGRLSDISLLVDVCDNISPGLSWPPKMTTICPLGPSAVSPITSLLDNFSDELMKMLPTKIPIAQ

SEQ ID NO: 100678 - protein, 191 aa, Unknown
  Bacterial polypetide isolated from the Sargasso Sea
CNVEEEMNIPLKELIEVHAGGVIGGWDNLQAVIPGGSSMPLIPKKKCETLTMDFDSLMAEKSGLGTAGIVVINKDQDIIKCMARIARFYKHESCGQCTPCREGSGWMWRMLERMAKGEATKDEIEMLGDVTNQIAGHTICAFGEGSSWPVQGLLRHFKKEIEERNNLDLIVEKKNTIPYLVDQHLLDKKNA

SEQ ID NO: 100679 - protein, 243 aa, Unknown
  Bacterial polypetide isolated from the Sargasso Sea
MPKITINGKEIEFQKGMTVLQACELADVEIPRFCYHEKLSIAGNCRMCLVEMEKSAKPIASCAMPAAEGMNIKTNTPFVEKARKGVMEFLLANHPLDCPVCDQGGECDLQDQSMYYGIDKSRFIENKRQVKEKYMGPLIKTQMTRCIHCTRCVRFATEVAGVPEIGAIGRGENTEITTYLEKAMESELSANVIDLCPVGALTSKPYAFEARPWELKKTESVDVMDAVGSNIRIDTYNWEVKRI

SEQ ID NO: 100680 - protein, 204 aa, Unknown
  Bacterial polypetide isolated from the Sargasso Sea
MVKLKVNDIDLEVEEGLTVLQACEKAGAEIPRFCYHEKLSIAGNCRMCLVEIEKSPKPVASCAMPISEGMNIKTNTEKVEKARKGVMEFLLANHPLDCPVCDQGGECDLQDQSMFYGIDKSRYKENKREVADKYMGPLIKTQMTRCIHCTRCIRFATEVAGVPELGAIGRGEDMEITTYLEKSMESELSANVIDLCPVGALTSK

SEQ ID NO: 100681 - protein, 287 aa, Unknown
  Bacterial polypetide isolated from the Sargasso Sea
PHLSRIMMPPTWEGHPLRKDYPARATEFDPFSLTLAKQQLEEEAARFRPEDWGMKRGGDHEDYMFLNLGPNHPSAHGAFRIILQLDGEEIVDCVPEIGYHHRGAEKMAERQSWHSFIPYTDRIDYLGGVMNNLPYVLSVEKLAGIKVPARVDFIRVMLAEFFRITSHLLFLGTYIQDVGAMTPVFFTFTDRQRAYKVIEAITGFRLHPAWYRIGGVAHDLPRGWDKLVKEFVDWLPKRLDEYEKAALKNSILKARTIGVAQYNTKEALEWGTTGAGLRATGCDFDLR

SEQ ID NO: 100682 - protein, 238 aa, Unknown
  Bacterial polypetide isolated from the Sargasso Sea
PTIINNVETIAVVPTILRRGAKWFASLGRPKNTGTKIYCISGNVNNPCNVEEEMGIPLKELIEKHAGGVIGGWENLKAVIPGGSSMPLLNKEICNNIKMDFDSCVENKTGLGTAGIVVINNDQDIIKCMARIARFYKHESCGQCTPCREGSGWMWRMLERMAKGEATRDEVDMLMDVTKQIEGHTICAFGEGSAWPVQGLIRNFKDEIIERNKFDPIVKKQKNIPYLVDQHLLEKENA

SEQ ID NO: 100683 - protein, 75 aa, Unknown
  Bacterial polypetide isolated from the Sargasso Sea
RKVYDQMPEPRYVVSMGSCANGGGYYHYSYSVVRGCDRIVPVDIYIPGCPPSAEALLYGILQLQKKIRREGSLKR

SEQ ID NO: 100684 - protein, 106 aa, Unknown
  Bacterial polypetide isolated from the Sargasso Sea
MAKEKKTLNLNFGPQHPAAHGVLRLILQLDGEVVEKADPHIGLLHRGTEKLIENKTYIQAVPYFDRLDYVAPMNQEHAFALAIEKILKIEVPSRAKYIRVIFCEIG

SEQ ID NO: 100685 - protein, 114 aa, Unknown
  Bacterial polypetide isolated from the Sargasso Sea
MKGLLDQQFQSGGVVITKVDDLVNWARLSSLWPMGFGLACCAIEMMATYASGYDLDRFGVIPRASPRQSDVMIIAGTVTFKMADRVRRLYEQMAEPRYVISMGSCSNCGGPYWE

SEQ ID NO: 100686 - protein, 295 aa, Unknown
  Bacterial polypetide isolated from the Sargasso Sea
MIEETLVLFQNIRNPSYDKSLKGYKKVGGFKALKKALKMKPEELVEVVKASGLRGRGGAGFPTGLKWSFMAKNTGKPSYLICNADESEPGTCKDRELMLKDPHQFLEGMMIGCYAINCKHGYIYVRGEYFPSIKSLNEAIDELYAAGLLGENALGKGKRLDLTVHNGAGAYICGEESALLDSLEGKRGHPRVKPPFPAVSGFNACPTTVNNVETLTCLPFIVNEGADAFKDFGPENNAGTHLVSLSGHVEKPGVYEVRMDVTLKQIIYDLGGGIRGGKAPQGVIPGGASSPVLTA

SEQ ID NO: 100687 - protein, 179 aa, Unknown
  Bacterial polypetide isolated from the Sargasso Sea
MLEDKDRIFKNLYNDFGSDLKSAKERGDWVNTKEICQKGRDWIINEIKDSQLRGRGGAGFPTGLKWSFAPKEVGNRPHYLVINADESEPGTCKDRDILRFEPHKLIEGCLISSYAVNAHICYIYIRGEYINEGAKLQQAIDEAYKEGLIGKNSSGTGWDLDIYLHYGAGAYICGEETAL

SEQ ID NO: 100688 - protein, 72 aa, Unknown
  Bacterial polypetide isolated from the Sargasso Sea
YDQMPEPRYVISMGSCANGGGYYHYSYSVVRGCDRIVPVDVYVPGCPPSAEALLYGILQLQKKIRNRGSLQR

SEQ ID NO: 100689 - protein, 140 aa, Unknown
  Bacterial polypetide isolated from the Sargasso Sea
MDFDALLENKSGLGTAGIVVINKDQDIISCMARIARFYKHESCGQCTPCREGAGWMWRILDRVEKRKATFSDIELLSDVTKQIEGHTICAFGEGSSWPVQGLLRHFRKEIESRCREEPLIKKKSNNPYLVDQHLLENKNA

SEQ ID NO: 100690 - protein, 277 aa, Unknown
  Bacterial polypetide isolated from the Sargasso Sea
KKVLKEDNPENVINEIKDSNIKGRGGAGFPTGVKWGFLAEDEDRYLVINGDESEPGTFKDRILLERDPHQLIEGVIITCFASNIKKAFIYIRGEYAKPARRVQEAVEQAYEKGYLGDNILGTNLSLDIVVHLGAGAYICGEETALLNSLEGKRGEPRLKPPYFPAVMGLYNKPTLVNNVETISSVPWIINNSGKEYAKLGVEGSTGTRIFSLSGHVRTPGNFEIEMGKSFGEFVDTFGNGIKDDKQVKAYIPGGASAPWFTGDQLDIKMTIDDVANA

SEQ ID NO: 100691 - protein, 163 aa, Unknown
  Bacterial polypetide isolated from the Sargasso Sea
MGLLENKFQDNVVVASLDKILGWARSTSPWYFQFGLACCAIEMMASAASRHDLERIGMMPRSSPRQADVMIVAGTVTLKMALRVKKLYEQMADPKYVISMGSCATSGGPYWQHGYHVLKGVDLVVPVDVYVPGCPPRPEALIEGLLKLQETIQTERPLTRKLA

SEQ ID NO: 100692 - protein, 238 aa, Unknown
  Bacterial polypetide isolated from the Sargasso Sea
MYKLKVNDVEVEVEEGLTVLQACEKAGVEIPRFCYHEKLSIAGNCRMCLVEMEKSPKPIASCAMPAADGMVIKTNTPKIEKSRKGVMEFLLANHPLDCPVCDQGGECDLQDQSMYYGIDKSRFKENKRSVPDKNMGPLIKTQMTRCIHCTRCVRFATEIAGVPELGAIGRGEDMQITTYLEQSVQSELSGNVIDLCPVGALTSKPYVFEARPWELKKTETVDVMDAVGSNIRVDTYDW

SEQ ID NO: 100693 - protein, 132 aa, Unknown
  Bacterial polypetide isolated from the Sargasso Sea
NKTGLGTAGIVVINNDQDIIKCMARIARFYKHESCGQCTPCREGSGWMWRMLERMAKGEASREEVDMLMDVTKQIEGHTICAFGEGSSWPVQGLLRHFKKEIEERNNFNPLVNRGQKNPYLVDQHLLEKENA

SEQ ID NO: 100694 - protein, 236 aa, Unknown
  Bacterial polypetide isolated from the Sargasso Sea
GLYGCPTIVNNVETIAVVPTILRRGGKWFASIGKSKNTGTKIFCISGNVNSPCNVEEEMGIPLKDLIEKHAGGVVGGWDNLQAVIPGGSSMPLLSKEICDTITMDFDSLIENKSGLGTAGIVVINKDQDIVACMARIARFYKHESCGQCTPCREGAGWMWRILDRVVKRKATFSDINLLSDVTKQIEGHTICAFGEGSAWPVQGLLRHFRKEVESRCRDEPLIKKKINNPYLVDQH

SEQ ID NO: 100695 - protein, 215 aa, Unknown
  Bacterial polypetide isolated from the Sargasso Sea
ASLWERKKIQAQKYFVYLRNVNTPCNVEEEMNIPLKELIEVHAGGVVGGWDNLQAVIPGGSSMPLIPKEKCETLTMDFDSLMAEKSGLGTAGIVVINKDQDIIKCMARIARFYKHESCGQCTPCREGSGWMWRMLERMAKGDATKDEVDMLGDVTNQIAGHTICAFGEGSSWPVQGLLRHFKKEIEKRNNLDPIVQKKNNIPYLVDQHLLDKKNA

SEQ ID NO: 100696 - protein, 194 aa, Unknown
  Bacterial polypetide isolated from the Sargasso Sea
LGSANNTGTKIFSISGHVNNPCNVEEEMGIPLRDLIEKHAGGVIGGWENLLAVIPGGASVPLLPKSVCDTVKMDFDSLKEVQSGLGTAAVIVMNKSTDIVEAIARLSHFYKHESCGQCTPCREGTGWMYRMMEKMIHGNVEHQDIDKLLDVTKQIEGHTICALGDAAAWPIQGLFRHFRPEIEKRIKERNRRVA

SEQ ID NO: 100697 - protein, 238 aa, Unknown
  Bacterial polypetide isolated from the Sargasso Sea
YGCPTIVNNVETIAVVPTILRRGGKWFSSLGRSKNTGTKIYCISGNVNNPCNVEEEMGIPLKDLIEKHAGGVIGGWDNLKAVIPGGSSMPLLPKQICETIKMDFDECVENKTGLGTAGIVVINKDQDIIKCMARIARFYKHESCGQCTPCREGSGWMWRMLERMAKGEASRDEVDMLMDVTKQIEGHTICAFGEGSAWPVQGLLRHFKKEVAKRNNFNPLVDKNRNIPYLVDQHLLDK

SEQ ID NO: 100698 - protein, 228 aa, Unknown
  Bacterial polypetide isolated from the Sargasso Sea
AVVPTILRRGGKWFASLGRPKNTGTKIFCISGNVNSPCNIEEEMGIPLKELINTYAGGVVGGWDNLQAVIPGGSSMPLLPKKICETIKMDFDSLIENQSGLGTAGIVVINKDQDIVSCMARIARFYKHESCGQCTPCREGSGWMWRILNRATKGETTLSDIDLLEDVTKQIEGHTICAFGEGSAWPVQGLLRHFRKEVDKKCSNDPLIKKKKDVPYLIDQHLLEKKNA

SEQ ID NO: 100699 - protein, 174 aa, Unknown
  Bacterial polypetide isolated from the Sargasso Sea
HAGGVVGGWENLLAVIPGGSSMPLIPKERCENLKMDFDACVEEKSGLGTAGIVVINKDQDIIKCMARIARFYKHESCGQCTPCREGSGWMWRMLERMAKGDATRDEVDMLSDVTNQIAGHTICAFGEGSSWPVQGLLRHFKKEILKRNSLDPIIQKKNNIPYLVDQHLLEKKNA

SEQ ID NO: 100700 - protein, 142 aa, Unknown
  Bacterial polypetide isolated from the Sargasso Sea
NLTMDFDSLMSEKSGLGTAGVVVINKDQDIIKCMARIARFYKHESCGQCTPCREGTGWMWRMLERMSKGEATRDEVDMLGDVTNQIAGHTICAFGEGSSWPVQGLLRHFKKEIKERNKFDPIVKENKNIPYLVDQHLLDKNA

SEQ ID NO: 100701 - protein, 147 aa, Unknown
  Bacterial polypetide isolated from the Sargasso Sea
EICDNMKMDFDACVENKTGLGTAGIVVINNDQDIIKCMARIARFYKHESCGQCTPCREGSGWMWRMLERMAAGEATPDEVDMLFDVTKQIEGHTICAFGEGSSWPVQGLIRHFKDEILERNKFDPVVKKQKNIPYLVDQHLLEKENA

SEQ ID NO: 100702 - protein, 117 aa, Unknown
  Bacterial polypetide isolated from the Sargasso Sea
INKDQDIIKCMARIARFYKHESCGQCTPCREGSGWMWRMLERMAKGEASRDEVDMLMDVTKQIEGHTICAFGEGSAWPVQGLLRHFKKEVAKRNNFNPLVNTSKKIPYLVDQHLLEK

SEQ ID NO: 100703 - protein, 190 aa, Unknown
  Bacterial polypetide isolated from the Sargasso Sea
MLKDQDRIFQNLYNDLGSDITSSQKRGDWVNTKELTEKGRDWIISEIKDSQLRGRGGAGFPTGLKWSFAPKEIGSRPHYLVINADESEPGTCKDRDILRFEPHKLIEGCLIASYAVQAHVCYIYIRGEYFIDGQKLQVAIDEAYKKNLIGKNSAGTGWDLDIYIHYGAGAYICGEETALLESLEGKKGQP

SEQ ID NO: 100704 - protein, 329 aa, Unknown
  Bacterial polypetide isolated from the Sargasso Sea
KNIIDGMKVSVPQGSTVYKAVKAAGAEIPRFCYHEKLSVAGNCRMCLVEMERSPKPIASCAMPASDGMIIKTSSEMVEKARKGVMEFLLINHPLDCPICDQGGECDLQDQALYFGKGETRFENSKRAVSDKNMGPLIKTTMTRCIHCTRCVRFANEVAGVEDLGATGRGENVEISTYLEKAVTSELSGNLVDLCPVGALTSKPYQFVARPWELTKTESVDVMDAIGSNIRIDSRDGKVLRILPKNNESINEEWISDKSRYAIDGLSKQRLDTPFVKINNKLQRVSWDEAFEVINSKISKISNENCVGIIGNQVDNEAIFALKELLKNLI

SEQ ID NO: 100705 - protein, 205 aa, Unknown
  Bacterial polypetide isolated from the Sargasso Sea
MPKLKVNDIDIEVEDGLTVLQACEQAGAEIPRFCYHEKLSIAGNCRMCLVEMEKSPKPIASCAMPAAEGMVIKTNTEKVEKARKGVMEFLLANHPLDCPVCDQGGECDLQDQSMFYGIDKSRFKENKRYVPEKYMGPLIKTQMTRCIHCTRCIRFATEVAGVPELGAIGRGENMEITTYLEKSMDSEMSANVIDLCPVGALTSKP

SEQ ID NO: 100706 - protein, 120 aa, Unknown
  Bacterial polypetide isolated from the Sargasso Sea
IVVINKDQDIIKCMARIARFYKHESCGQCTPCREGSGWMWRMLERMAKGEASRDEVDMLMDVTKQIEGHTICAFGEGSAWPVQGLLRHFKKEVAKRNNFNPLINKNKKIPYLVDQHLLEK

SEQ ID NO: 100707 - protein, 143 aa, Unknown
  Bacterial polypetide isolated from the Sargasso Sea
DFDSLVENKSGLGTAGVIVINKDQDIIKCMARIARFYKHESCGQCTPCREGSGWMWRILERMAKGEASKDEVNMLSDVSKQIEGHTICAFGEGSAWPVQGLLRHFKKEIIERNNFDPLVKNNKNIPYLIDQHILEEDTKNVKS

SEQ ID NO: 100708 - protein, 137 aa, Unknown
  Bacterial polypetide isolated from the Sargasso Sea
DACVENKTGLGTAGIVVINNDQDIIKCMARIARFYKHESCGQCTPCREGSGWMWRMLERMAAGEATPDEVDMLFDVTKQIEGHTICAFGEGSSWPVQGLIRHFKKEILERNKFDPVIKKQKNIPYLIDQHLLEKENA

SEQ ID NO: 100709 - protein, 229 aa, Unknown
  Bacterial polypetide isolated from the Sargasso Sea
IAVVPTILRRGGKWFASLGKPKNTGTKIFCISGNVNSPCNVEEEMGIPLKELIEKHAGGVVGGWENLQAVIPGGSSMPLLPKKICDTITMDFDSLIENKSGLGTAGIVVINKDQDIVACMARIARFYKHESCGQCTPCREGAGWMWRILDRVVKRKATFNDIELLSDVTKQIEGHTICAFGEGSAWPVQGLLRHFREEIESRCREEPLIKKKSNNPYLVDQHLLEKRNA

SEQ ID NO: 100710 - protein, 211 aa, Unknown
  Bacterial polypetide isolated from the Sargasso Sea
MPKLKVNDIDIEVEDGLTVLQACEQAGAEIPRFCYHEKLSIAGNCRMCLVEMEKSPKPIASCAMPAAEGMIIKTNTEKVEKARKGVMEFLLANHPLDCPVCDQGGECDLQDQSMFYGIDKSRFKENKRYVPEKYMGPLIKTQMTRCIHCTRCIRFATEVSGVPELGAIGRGENMEITTYLEKSMESEMSANVIDLCPVGALTSKPYVFEAR

SEQ ID NO: 100711 - protein, 245 aa, Unknown
  Bacterial polypetide isolated from the Sargasso Sea
MPKITINGKEVEFDKGMTVLQACELANVEIPRFCYHEKLSIAGNCRMCLVEMEKSTKPIASCAMPAAEGMNIKTNTEFVEKARKGVMEFLLANHPLDCPVCDQGGECDLQDQSLYYGVDKSRFLENKRFVNEKYMGPLIKTQMTRCIHCTRCIRFATEVAGVPELGAIGRGEDMEITTYLEKSMESELSANVIDLCPVGALTSKPYAFEARPWELKKTESIDVMDAVGSNIRVDTYGWEVKRILP

SEQ ID NO: 100712 - protein, 310 aa, Unknown
  Bacterial polypetide isolated from the Sargasso Sea
MPKININGKEIEFEPGMTILQACEIAGAEIPRFCYHERLSIAGNCRMCLVEMDKSRKPIASCAMPAAEGMNIKTNTEMVEKARKGVMEFLLANHPLDCPVCDQGGECDLQDQSLYYGVDKSRFSENKRHVSEKYMGPLIKTQMTRCIHCTRCVRFATEVAGVPEIGAIGRGENMEITTYLEKSMESELSGNVIDLCPVGALTSKPYAFSARPWELKKTESIDVLDAVGSNIRVDTYGWEVKRILPRLNEDINEEWISDKTRYSCDGLLKQRLDTPYVKKNNKLVKCSWDEALDVIIKKFNETENSNIAGH

SEQ ID NO: 100713 - protein, 256 aa, Unknown
  Bacterial polypetide isolated from the Sargasso Sea
MPKLKVNDIEVEVEDGLTVLQACEKAGAEIPRFCYHEKLSIAGNCRMCLVEMEKSPKPIASCAMPAAEGMNIKTNTPFVEKARKGVMEFLLANHPLDCPVCDQGGECDLQDQSMFYGVDKSRFKENKRAVPEKYMGPLIKTQMTRCIHCTRCVRFATEVAGVSELGAIGRGEDMQITTYLEQSMQSELSANVIDLCPVGALTSKPYVFEARPWELKKTETVDVMDAVGSNVRVDTYDWEVKRVLPLINEDINEEWI

SEQ ID NO: 100714 - protein, 120 aa, Unknown
  Bacterial polypetide isolated from the Sargasso Sea
INKDQDIVSCMARIARFYKHESCGQCTPCREGAGWMWRILDRVEKRKATFSDIELLSDVTKQIEGHTICAFGEGSAWPVQGLLRHFRKEIESRCREEPLIKKKTNNPYLVDQHLLENKNA

SEQ ID NO: 100715 - protein, 167 aa, Unknown
  Bacterial polypetide isolated from the Sargasso Sea
GWKNLKAVIPGGSSMPMLPKETCETIKMDFDSLAQEKSGLGTAGVVVINKDEDIISCMARIARFYKHESCGQCTPCREGSGWMWRMLERMKRNEASREEIEMLEDVTKQIEGHTICAFGEGSAWPVQGLLRHFKKEIIKRNNFNPLVKTNKNIPYLVDQHLLDKENA

SEQ ID NO: 100716 - protein, 192 aa, Unknown
  Bacterial polypetide isolated from the Sargasso Sea
MEEKTIPGSKIFCISGHVNKPCNVEEELGVPLKFLVQKYAGDVIGGWNNLQAIIPGGSSVPLLPKALCEDVLMDFDSLKEAGTGLGTGGIIVINKQTDIVSAIARLSEFYKHESCGQCTPCREGTGWLMRVMKRLANYDCSIEDLDMLEEVTHQIEGHTICALGDAAAWPIQGLLKHFKKDIISRIQRKNVA

SEQ ID NO: 100717 - protein, 286 aa, Unknown
  Bacterial polypetide isolated from the Sargasso Sea
KEIEVEDGLTVLQACEQAGFEIPRFCYHEKLSIAGNCRMCLVEIEKNPKPIASCAMPATEGMNIKTNTSLVEKARKGVMEFLLVNHPLDCPVCDQGGECDLQDQSMFYGVDKSRFKENKRYVPEKYMGPLIKTQMTRCIHCTRCVRFATEVAGVTELGAIGRGEDMQITTYLEKAMESELSANVIDLCPVGALTSKPYVFEARPWELKKTESIDVMDAVGSNIRIDTYGWEVKRILPRINEDINEEWISDKTRYACDGLKNQRLDTPFIKDGNKFNKISWNEAYDI

SEQ ID NO: 100718 - protein, 251 aa, Unknown
  Bacterial polypetide isolated from the Sargasso Sea
CYHEKLSIAGNCRMCLVEIEKSAKPIASCAMPATEGMNIKTNTSKVEKARKGVMEFLLANHPLDCPVCDQGGECDLQDQSMFYGIDKSRYKENKRYVPEKYMGPLIKTQMTRCIHCTRCIRFATEVAGVPELGAIGRGEDMQITTYLEKSMESELSANVIDLCPVGALTSKPYVFEARPWELKKTETIDVMDAVGSNIRVDTYGWEVKRILPRINEDINEEWISDKSRYACDGLQNQRLDIPYIKKDGVLK

SEQ ID NO: 100719 - protein, 201 aa, Unknown
  Bacterial polypetide isolated from the Sargasso Sea
MTKEKKKLNLNFGPQHPAAHGVLRLILQLDGEIVEKADPHIGLLHRGTEKLIENKTYMQAVPYFDRLDYVAPMNQEHAFALAIEKILKIKVPLRAQYIRVIFCEIGRILSHILNVTTQAMDVGALTPTLWGFEERETLMGFYEKVSGSRLHANYFRAGGVHQDLPKGLDEEISKFCEKFPSIIDDLEKLLTDNRIFKQKKC

SEQ ID NO: 100720 - protein, 84 aa, Unknown
  Bacterial polypetide isolated from the Sargasso Sea
LTNKMAPALRKVYDQMPEPRYVISMGSCANGGGYYHYSYSVVRGCDKIVPVDIYIPGCPPSAEALLYGILQLQKKIRREGSLTR

SEQ ID NO: 100721 - protein, 137 aa, Unknown
  Bacterial polypetide isolated from the Sargasso Sea
DALIENKSGLGTAGIVVINKDQDIISCMARIARFYKHESCGQCTPCREGAGWMWRILDRVEKRKATFSDIELLSDVTKQIEGHTICAFGEGSAWPVQGLLRHFRKEIESRCREEPLIKKKTNNPYLVDQHLLENKNA

SEQ ID NO: 100722 - protein, 248 aa, Unknown
  Bacterial polypetide isolated from the Sargasso Sea
VGLYGCPTIVNNVETVSVVPTILRKGYKWFASLGKPKNTGTKIFCISGNVNKPCNVEEEMGIPLKDLINTHAGGVVGGWENLQAVIPGGSSMPLLNKEISEKINMDFDSLVENKSGLGTAGIVVINKDQDIIKCFARIARFYKHESCGQCTPCREGSGWMWRILERMAKGEASREEVEMLFDVTKQIEGHTICAFGEGSAWPVQGLLKNFKKEIIKRNNFDPLIKTNKNIPYLVDQHLLEKDNAQNKS

SEQ ID NO: 100723 - protein, 222 aa, Unknown
  Bacterial polypetide isolated from the Sargasso Sea
MIKLKINNNEIEVEEGLTVLQACEKAGVEIPRFCYHEKLSIAGNCRMCLVEIEKSPKPIASCAMPASEGMVIKTNTPFVEKSRKGVMEFLLANHPLDCPVCDQGGECDLQDQSMFYGIDKSRFKENKRYVPEKYMGPLIKTQMTRCIHCTRCIRFATEVAGVPELGAIGRGEDMQITTYLEKSMQSELSANVIDLCPVGALTSKPYVFEARPWELKKTETID

SEQ ID NO: 100724 - protein, 153 aa, Unknown
  Bacterial polypetide isolated from the Sargasso Sea
MPKEIKKLNLNFGPQHPAAHGVLRLILQLDGEVVEKADPHIGLLHRGTEKLIENKTYMQAVPYFDRLDYVAPMNQEHAFALAIEKILKIDVPIRAQYLRVIFCEIGRILSHILNVTTQAMDVGALTPTLWGFEERETLMGFYEKVSGSRLHAN

SEQ ID NO: 100725 - protein, 153 aa, Unknown
  Bacterial polypetide isolated from the Sargasso Sea
MPLIPKERCETLKMDFDACVEEKSGLGTAGIVVINKDQDIIKCMARIARFYKHESCGQCTPCREGSGWMWRMLERMAKGDATKDEIDMLGDVTNQIAGHTICAFGEGSSWPVQGLLRHFKKEIEKRNNLDPIVQKKNNIPYLVDQHLLDKKNA

SEQ ID NO: 100726 - protein, 281 aa, Unknown
  Bacterial polypetide isolated from the Sargasso Sea
CKLVKRLGAEIPRFCYHEKLSIAGNCRMCLVEIEKSPKPVASCAMPAAEGMVVKTNTPKIEKSRKGVMEFLLANHPLDCPVCDQGGECDLQDQSMFYGIDKSRFKENKRAVPDKNMGPLIKTQMTRCIHCTRCIRFATEIAGVPELGAIGRGEDMQITTYLEKSIQSELSGNVIDLCPVGALTSKPYVFEARPWELKKTETIDVMDAVGSNIRVDTYDWEVKRVLPIINEDINEEWISDKTRYACDGLLNQRLDTPFIKYNNKFEIASWDEVFKIIKSKIQ

SEQ ID NO: 100727 - protein, 163 aa, Unknown
  Bacterial polypetide isolated from the Sargasso Sea
MGVLENKFNDNIVVGSLDKFLSWSRSTSPWFFQFGLACCAIEMMATAAARHDLERIGMMPRSSPRQADVMIVAGTVTMKMALRVKKLYEQMANPKYVISMGSCATSGGPYWQHGYHVLKGVDLVVPVDVYVPGCPPRPEALIEGLLKLQQLISDERPLTRKLA

SEQ ID NO: 100728 - protein, 82 aa, Unknown
  Bacterial polypetide isolated from the Sargasso Sea
NKMAPALRKVYDQMPEPRYVVSMGSCANGGGYYHYSYSVVRGCDKIVPVDIYVPGCPPSAEALLYGILQLQKKIRRQGTIKR

SEQ ID NO: 100729 - protein, 290 aa, Unknown
  Bacterial polypetide isolated from the Sargasso Sea
MTVMQACELAGVEIPRFCYHDKLSIAGNCRMCLVEMEKSPKPIASCAMPAGEGMVIKTNTDLVKKARRGVMEFLLINHPLDCPICDQGGECDLQDQALYYGFDKSRYEENKRAVKNKNMGPLVSTIMTRCIHCTRCVRFASEVAGVDDLGLLGRGENAEITTYLEKTIDSELSGNVIDLCPVGALTSKPYAFKSRPWELTKTETHDVFDAIGSSIRVDTIGNNVLRVLPRSNEEINEEWISDKTRFAIDGLSKQRLDKVFIKKENKLSVDTWDNALKEIAKQINKRLPEN

SEQ ID NO: 100730 - protein, 140 aa, Unknown
  Bacterial polypetide isolated from the Sargasso Sea
MDFDSLINAKSGLGTAGVVVINKDQDIIKCMTRIAKFYKHESCGQCTPCREGSGWMWRILERISKREATKEDVNLLSEVTKQIEGHTICAFGEGSAWPVQGLLRHFRKEIDKRCFSEPLIKKKRKIPYLVDQHLLETKDA

SEQ ID NO: 100731 - protein, 80 aa, Unknown
  Bacterial polypetide isolated from the Sargasso Sea
MAPALRKVYDQMPEPRYVISMGSCANGGGYYHYSYSVVRGCDRIVPVDIYVPGCPPSAEALLYGILQLQKKIRNRGSIER

SEQ ID NO: 100732 - protein, 249 aa, Unknown
  Bacterial polypetide isolated from the Sargasso Sea
PFPALIGLYGCPTIINNVETIAVVPTILRRGAKWFASLGREKNTGTKIFCISGNVNNPCNVEEEMSIPLKDLIEVHAGGVIGGWDNLQAVIPGGSSMPLIPKERCETLKMDFDACVEEKSGLGTAGIVVINKDQDIIKCMARIARFYKHESCGQCTPCREGSGWMWRMLERMAKGDATKDEVDMLGDVTNQIAGHTICAFGEGSSWPVQGLLRHFKKEIEKRNNLDPIVQKKNNIPYLVDQHLLDKKNA

SEQ ID NO: 100733 - protein, 260 aa, Unknown
  Bacterial polypetide isolated from the Sargasso Sea
IEGNKGQPRLNPPFPALIGLYGCPTIINNVETIAVVPTILRRGGKWFASLGREKNTGTKIFCISGNVNNPCNVEEEMNIPLKELIEIHAGGVVGGWENLQAVIPGGSSMPLIPKEKCETLTMDFDSLTAEKSGLGTAGVVVINKDQDIIKCMARIARFYKHESCGQCTPCREGSGWMWRMLERMAKGEASKEEVDMLGDVTKQIEGHTICAFGEGSSWPVQGLLRHFKDEIKKRNKFDPIVKETKNIPYLVDQHLLDKNA

SEQ ID NO: 100734 - protein, 315 aa, Unknown
  Bacterial polypetide isolated from the Sargasso Sea
RFCYHDKLSIAGNCRMCLVEMEKSPKPIASCAMPASEGMVIKTNTELVKNARKGVMEFLLINHPLDCPICDQGGECDLQDQALYYGLDKSRYEENKRAVKNKNMGPLVSTIMTRCIHCTRCVRFSTEVAGVDDIGMLGRGENAEITTYLEKTIESELSGNVIDLCPVGALTSKPYAFQARPWELKKTETTDIFDAMGSSIRIDSLGKKALRVLPLLNEQINEEWISDKSRFAIDGLARQRIDNPYIKDQGKLKPSDWNTVLELICLQINKLGSANTLAISGKFTDVETIYSAKKFLESLNSNNFDCRYDNSQFIQ

SEQ ID NO: 100735 - protein, 197 aa, Unknown
  Bacterial polypetide isolated from the Sargasso Sea
MENVNNPCNVEEEMSISLKELIEVHAGGVIGGWDNLQAVIPGGSSMPLIPKDKCETLNMDFDSLMDEKSGLGTAGVVVINKDQDIIKCMARIARFYKHESCGQCTPCREGSGWMWRMLERMAKGEASRDEIDMLGDVTNQIAGHTICAFGEGSSWPVQGLLRHFSSEIKRRNKFDPIVKDRKDLPYLVDQHLLDKNA

SEQ ID NO: 100736 - protein, 218 aa, Unknown
  Bacterial polypetide isolated from the Sargasso Sea
WFASIGKPKNTGTKIFCISGNVKNPCNVEEEMGIPLKELIEKHAGGVIGGWDNLQAVIPGGSSMPLLPKDVCETITMDFDSLIQQKSGLGTAGIVVINKDQDIIKCMARIARFYKHESCGQCTPCREGSGWMWRMLERMAEGKASKEEVDMLMDVTKQIEGHTICAFGEGSAWPIQGLLRHFKKEIEKRNNFNPLININKERNIPYLVDQHLLEKENV

SEQ ID NO: 100737 - protein, 144 aa, Unknown
  Bacterial polypetide isolated from the Sargasso Sea
DVCETIKMDFDSLVAAKSGLGTAAIIVINKDEDILKCMARIAKFYKHESCGQCTPCREGVGWMWRILERAAKGEATKNDIDLLSDVTKQIEGHTICAFGEGSAWPVQGLLRHFRKEIDKRCFSDPLIKKKRDIPYLVDQHLLEK

SEQ ID NO: 100738 - protein, 258 aa, Unknown
  Bacterial polypetide isolated from the Sargasso Sea
MLKLKVNDVEVEVEEGLTVLQACEKAGVEIPRFCYHEKLSIAGNCRMCLVEMEKSPKPIASCAMPAAEGMVIKTNTPNIEKSRKGVMEFLLANHPLDCPVCDQGGECDLQDQSMFYGIDKSRFKENKRAVPDKNMGPLIKTQMTRCIHCTRCIRFATEIAGVPELGAIGRGEDMQITTYLEKSIQSELSGNVIDLCPVGALTSKPYVFEARPWELKKTETIDVMDAVGSNIRVDTYDWEVKRVLPIINEDINEEWISD

SEQ ID NO: 100739 - protein, 202 aa, Unknown
  Bacterial polypetide isolated from the Sargasso Sea
MLKIKVNDTDIEVEEGLTVLQACEKAGVEIPRFCYHEKLSIAGNCRMCLVEMEKSPKPIASCAMPATEGMVIKTNTPKVEKARKGVMEFLLANHPLDCPVCDQGGECDLQDQSMYYGVDKSRYSENKRAVPDKNMGPLIKTQMTRCIHCTRCIRFATEIAGVPELGAIGRGEDMQITTYLEQSIQSELSGNVIDLCPVGALT

SEQ ID NO: 100740 - protein, 195 aa, Unknown
  Bacterial polypetide isolated from the Sargasso Sea
VNNPCNVEEEMGIPLKELIEKHAGGVIGGWDNLKAVIPGGSSMPLLPKKICETITMDFDSLVENKSGLGTAGIVVINKDQDIIKCMARIARFYKHESCGQCTPCREGSGWMWRMLERMAKGEASKDEVDMLLDVTKQIEGHTICAFGEGSAWPVQGLLRHFKKEIQKRNNFSPLVDTNKNIPYLIDQHLLEKENA

SEQ ID NO: 100741 - protein, 165 aa, Unknown
  Bacterial polypetide isolated from the Sargasso Sea
MQFKPLNVTYTLRGEYHHEYVQLEKAIEEAYERGFIGKNACGSGFDFDLYVHRGAGAYICGEETALLESLEGKKGQPRLKPPFPAGVGLYGMPTTINNVESIAVVPTILRRGPDWFKSIGAENNTGTKIFCISGNVNKPCTIEEEMGIPLKELVEKHCDGVEGGW

SEQ ID NO: 100742 - protein, 305 aa, Unknown
  Bacterial polypetide isolated from the Sargasso Sea
AEIPSFCYHERLSIAGNCRMCLVELEKSAKPIASCAMPAAEGMNIKTNTKMVEKARKGVMEFLLANHPLDCPVCDQGGECDLQDQSLYYGFDKSRFKENKREVKDKYMGPLIKTQMTRCIHCTRCIRFATEIAGVSELGAIGRGEDMQITTYLEKSMESEMSGNVIDLCPVGALTSKPYAFEARPWELKKTESIDVMDAVGSNIRIDSYGWEVKRVLPRLNNNINEEWISDKTRFACDGLLKQRLDKPYKRVNGNLVETSWDDVIELVSSKITATEPKSIAGHVGDMSSLETIKSFKSFLESLGS

SEQ ID NO: 100743 - protein, 113 aa, Unknown
  Bacterial polypetide isolated from the Sargasso Sea
MTNNQTTKSGLGDIIVAPLNKLVNWARATSPWYFQFGLACCAIEMMATAASRHDLERIGMMPRSSPRQADVMIVAGTVTLKMATRVKKLYEQMADPKYVVSMGSCATSGGPYW

SEQ ID NO: 100744 - protein, 253 aa, Unknown
  Bacterial polypetide isolated from the Sargasso Sea
KTFHFSSFNKDYIGCPTIINNVETIAVVPTILRRGSKWFASLGKPKNTGTKIFCISGNVNNPCNVEEEMGISLKNLIENHAGGVIGGWDNLKAVIPGGSSMPLLPKKICDTITMDFDSLSQEKSGLGTAGIVVINNDQDIIKCMARIARFYKHESCGQCTPCREGTGWMWRMLERMSKGEASKDEVAMLMDVTKQIEGHTICAFGEGSAWPVQGLLRNFKKEIEKKNNFSPIVKQNKNIPYLIDQHLLDKKNA

SEQ ID NO: 100745 - protein, 273 aa, Unknown
  Bacterial polypetide isolated from the Sargasso Sea
MPKIIINNKEIDFEEGMTVLQACELAGVEIPRFCYHERLSIAGNCRMCLVEMEKSSKPIASCAMPATEGMNIKTNTLMVEKARKGVMEFLLANHPLDCPVCDQGGECDLQDQSLYYGFDKSRFKENKREVKDKYMGPLIKTIMTRCIHCTRCIRFATEVGGVTELGAIGRGENMEITTYLEKSMESELSANVIDLCPVGALTSKPYAFEARPWELKKTETIDVMDAVGSNIRVDTYGWEVKRILPRLNNNINEEWISDKTRYACDGLLKQRLD

SEQ ID NO: 100746 - protein, 184 aa, Unknown
  Bacterial polypetide isolated from the Sargasso Sea
MSIPLRELIETHAGGVIGGWENLQAVIPGGSSMPLIPKDKCETLNMDFDSLMAEKSGLGTAGVVVINKDQDIIKCMARIARFYKHESCGQCTPCREGSGWMWRMLERMAKGEASKDEVEMLGDVTKQIEGHTICAFGEGSSWPVQGLLRHFKDEIKKRNRFDPVVKDNKNIPYLVDQHLLDKNA

SEQ ID NO: 100747 - protein, 78 aa, Unknown
  Bacterial polypetide isolated from the Sargasso Sea
PALRKVYDQMPEPRWVISMGSCANGGGYYHYSYSVVRGCDRIVPVDVYVPGCPPTAEALVYGILQLQKKIRRENKFKR

SEQ ID NO: 100748 - protein, 238 aa, Unknown
  Bacterial polypetide isolated from the Sargasso Sea
MPKIIIDNKEINFENGMTVMQVCELAQKEIPRFCYHDKLSIAGNCRMCLVEMDKSPKPIASCAMPAAEGMIIKTNTDLVKEARKGVMEFLLINHPLDCPICDQGGECDLQDQALHYGFDKSRYEENKRAVQNKHMGPLVSTIMTRCIHCTRCVRFSTEVAGVDDLGLLGRGENAEITTYLEKTIKSELSGNVIDLCPVGALTNKPYAFQARPWELKKTETIDTFDGLGASIRIDSRGK

SEQ ID NO: 100749 - protein, 85 aa, Unknown
  Bacterial polypetide isolated from the Sargasso Sea
HESCGQCTPCREGTGWMFRIMEKMIYGNLHLRDIDKLLSVTKQVEGHTICALGDAAAWPIQGLIRHFRDEVEKRIKENNNNREVA

SEQ ID NO: 100750 - protein, 274 aa, Unknown
  Bacterial polypetide isolated from the Sargasso Sea
MISKKQKEAVTINLDGKEVEVPAGVNLIEAAALHGKEIPHYCYHPQLSVAGNCRMCLVEMGTPMRDRGSGEPILEEDGSPKIGWVPKPVIGCATDVIPGMHVKTESETVLDCRESIMEFLLVNHPLDCPICDQAGECRLQEFATDYGRGYSRYEERKNVKPKRTRLGPRVTLDDERCILCSRCIRFCQEVADDDVLGFVDRGSFSTLTCFPGRELSNNYSLNTVDLCPVGALTSSDFRFQMRVWVLKGTPSICPESSAGLHTLVSSREGEIYRI

SEQ ID NO: 100751 - protein, 250 aa, Unknown
  Bacterial polypetide isolated from the Sargasso Sea
MLKLKVNDIDVEVEEGTTVLQACEQAGAEIPRFCYHEKLSIAGNCRMCLVEMEKSPKPIASCAMPAAEGMVLKTNTEKVKKARKGVMEFLLANHPLDCPVCDQGGECDLQDQSMYYGIDKSRFKENKRYVPEKYMGPLIKTQMTRCIHCTRCIRFATEVAGVPELGAIGRGENMQITTYLEKAMESELSANVIDLCPVGALTSKPYVFEARPWELKKTETIDVMDAVGSNIRVDTYGWEVKRVLPRLMRK

SEQ ID NO: 100752 - protein, 182 aa, Unknown
  Bacterial polypetide isolated from the Sargasso Sea
MGISLKELIDKHAGGVVGGWDNLKAVIPGGSSMPLLPKNICETITMDFDTLMKHKSGLGTAGIIVINKDQDIIKCMARIARFYKHESCGQCTPCREGSGWMWRMLERMAKGEASREEVDMLMDVTKQIEGHTICAFGEGSAWPVQGLLRHFKKEVSKRNDFNPLVDRNRNIPYLVDQHLLEK

SEQ ID NO: 100753 - protein, 180 aa, Unknown
  Bacterial polypetide isolated from the Sargasso Sea
MDIYIHYGAGAYICGEETALLESIEGKKGQPRLKPPFPALIGLYGCPTIINNVETISVVPTILRRGAKWFASLGRERNTGTKIYCISGNVNNPCNVEEEMGVPLKDLIEKHAGGVVGGWDNLKAVIPGGSSMPLLPKNICDNIKMDFDACVENKTGLGTAGIVVINNDQDIIKCMARIAR

SEQ ID NO: 100754 - protein, 76 aa, Unknown
  Bacterial polypetide isolated from the Sargasso Sea
MAKEKKTLNLNFGPQHPAAHGVLRLILQLDGEIVEKADPHIGLLHRGTEKLIENKTYIQAVPYFDRLDYVAPMNQE

SEQ ID NO: 100755 - protein, 330 aa, Unknown
  Bacterial polypetide isolated from the Sargasso Sea
ACELAGAEIPRFCYHEKLSIAGNCRMCLVKLEKSPKPVASCAMPAADGMVIKTNTEKVEKSRKGVMEFLLANHPLDCPVCDQGGECDLQDQSMFYGIDKSRFKENKRYVPEKYMGPLIKTQMTRCIHCTRCIRFATEVAGVPELGAIGRGEDMQITTYLEKAMESELSANVIDLCPVGALTSKPYVFEARPWELKKTETIDVMDAVGSNIRVDTYGWEVKRVLPKINEEINEEWISDKTRYACDGLKNQRLDVPYFKTKNKFEKISWKESYLKIFDKISKAPSAKIAGITGDMINMESLFAIKEFFEKTIKSKNLDSRSENFYVNSKNRS

SEQ ID NO: 100756 - protein, 284 aa, Unknown
  Bacterial polypetide isolated from the Sargasso Sea
RFCYHEKLSIAGNCRMCLVEIEKSPKPVASCAMPVTEGMNIKTNTSMVEKARKGVMEFLLVNHPLDCPVCDQGGECDLQDQSMFYGVDKSRFKENKRYVPEKYMGPLIKTQMTRCIHCTRCIRFATEVAGVPELGAIGRGENMEITTYLEKAMESELSANVIDLCPVGALTSKPYVFEARPWEIKKTESIDVMDAVGSNIRVDTYGWEVKRILPRINDDINEEWISDKTRYACDGLKNQRLDSPFVREGDKFKKISWKEAYSILKLKLENISSDKIGCFTGDLT

SEQ ID NO: 100757 - protein, 182 aa, Unknown
  Bacterial polypetide isolated from the Sargasso Sea
MLEDKDRIFLNLYNDLGSDLSSAKKRGDWSNTKDICEKGRDWIIKEIKDSQLRGRGGAGFPTGLKWSFAPKEVGSRPHYFVINADESEPGTCKDRDILRFEPHKLIEGCLIASYAVNAHVCYIYIRGEYLREGNKLQKAIDEAYKDGLIGKNSSGTGWDLDIYIHYGAGAYICGEETALLES

SEQ ID NO: 100758 - protein, 279 aa, Unknown
  Bacterial polypetide isolated from the Sargasso Sea
MDAPTTVTVVINGREVHAEPGSMIIEAADAANIYIPRFCYHPKLSIAANCRMCLVEVEKAPKPLPACATPVADGMVVQTRSATAVEAQQGTMEFLLINHPLDCPVCDQGGECPLQDQAMGYGQDSSRYEEEKRAKPPLDLGPLVATAMTRCIHCTRCVRFGREIAGTMELGATGRGEDMTIETYLDGSVDSEVSGNIIDLCPVGALTSKPYRFSARPWELFSHEGISPHDSLGTNITLQTAHQSVKRVVPRNNEKINECWISDRDRFAYEGAECDDRLT

SEQ ID NO: 100759 - protein, 153 aa, Unknown
  Bacterial polypetide isolated from the Sargasso Sea
MPLLPKKICETIKMDFDSLVENKSGLGTAGIVVINKDQDIVSCMARIARFYKHESCGQCTPCREGSGWMWRILNRATKGETTLSDIDLLEDVTKQIEGHTICAFGEGSAWPVQGLLRHFRKEIDKKCSNDPLVKKKKDVPYLVDQHLLEKKNA

SEQ ID NO: 100760 - protein, 116 aa, Unknown
  Bacterial polypetide isolated from the Sargasso Sea
QDIVSCMARIARFYKHESCGQCTPCREGSGWMWRILDRATKGETTLSDIDLLDDVTKQIEGHTICAFGEGSAWPVQGLLRHFRKEIDKKCSNDPLIKKKKEVPYLVDQHLLEKKNA

SEQ ID NO: 100761 - protein, 274 aa, Unknown
  Bacterial polypetide isolated from the Sargasso Sea
MAKEKKTLNLNFGPQHPAAHGVLRLILQLDGEVVEKADPHIGLLHRGTEKLIENKTYIQAVPYFDRLDYVAPMNQEHAFALAIEKILKIEVPERAKYIRVIFCEIGRILSHILNVTTQAMDVGALTPTLWGFEEREKLMGFYERVSGSRLHANYFRAGGVHKDLPSGLDSDISEFCEKFPKIIDDLETLLTDNRIFKQRNVDIGIVSKQDALDYSFSGVMLRGSGVAWDLRKSQPYDLYDDLEFKIPVGKNGDCYDRYLCRIEEMRESVKIIKQ

SEQ ID NO: 100762 - protein, 76 aa, Unknown
  Bacterial polypetide isolated from the Sargasso Sea
LRKVYDQMPEPRYVISMGSCANGGGYYHYSYSVVRGCDRIVPVDVYVPGCPPSAEALLYGILQLQKKIRKKGSFIR

SEQ ID NO: 100763 - protein, 300 aa, Unknown
  Bacterial polypetide isolated from the Sargasso Sea
MRGEFINEQREAFCNALDEALKHNLIGKNILSSKISIDLHCLLGAGAYIVGEETAMLESIEGKRGMPRTKPPFPAVKGLYGKPTIINNTETLASVPKIMLKDNNWYKNLGEGDSEGIKIFCMSGHINKPGNFEIPLGTEFKTLLNMAGGVKNDRKLKAVIPGGSSVPVIKGDDMLKLKMDYDSISNAGSMLGSGGVIIMDETTCMVSVLHRISRFYYEESCGQCTPCREGTGWLHRILTNILSGKGSIEDLNQLNRIANQIEGHCICALGDAAAMPVRSFLQHFWDEFEFYVDKKKSLVS

SEQ ID NO: 100764 - protein, 233 aa, Unknown
  Bacterial polypetide isolated from the Sargasso Sea
MPKVIVDGIEVEVPEGSTVLQACEAAGKEIPRFCYHDRLSIAGNCRMCLVEVSPGPPKPQASCALPAMDNQEIKTNSEMVVSARKGVMEFLLINHPLDCPICDQGGECDLQDQAMGYGNDATRYLEQKRAVTSKEMGPLIKTIMTRCIHCTRCVRFSTEVAGVTDMGALGRGESMEITTYLEKALESELSGNVIDLCPVGALTSKPYSFVSRPWELKKTETIDVMDAIGSNIR

SEQ ID NO: 100765 - protein, 219 aa, Unknown
  Bacterial polypetide isolated from the Sargasso Sea
MAGLYGCPTTVNNVESIAVVPTILRRGASWFSKFGRANNTGTKLFCLSGHVEKPCVVEEEMSIPLKELIEKYAGGVIGGWKNLKAIIPGGSSVPLLPAKLCNDALMDFDWLRENQSGLGTGAVIVMNSDTDIVKAIWRLSKFYNHESCGQCTPCREGTGWMMRLMNRLVTGDANLEEVENLLEITKQVEGHTICALGDAAAWPIQGLFRHFRHEIEDRN

SEQ ID NO: 100766 - protein, 242 aa, Unknown
  Bacterial polypetide isolated from the Sargasso Sea
GLYGCPTIINNVETIAVVPTILRRGGKWFASLGREKNTGTKIFCISGNVNNPCNVEEEMNIPLKELIEVHAGGVIGGWDNLKAVIPGGSSMPLIPKDKCETLTMDFDSLMEEKSGLGTAGVVVINKDQDIIKCMARIARFYKHESCGQCTPCREGSGWMWRMLERMSRGEASKDEIEMLGDVTKQIEGHTICAFGEGSSWPVQGLLRHFKDEIKKRNKFDPIVKENKNIPYLVDQHLLDKNA

SEQ ID NO: 100767 - protein, 104 aa, Unknown
  Bacterial polypetide isolated from the Sargasso Sea
FYKHESCGQCTPCREGCGWMWRMLERIAEKDATYKEIDLLHDVTKQIEGHTICAFGEGAAWPVQGLLRHFRKEMEKRSHEEPLVKKKTNIPYLIDQHLLEKDSA

SEQ ID NO: 100768 - protein, 178 aa, Unknown
  Bacterial polypetide isolated from the Sargasso Sea
MLKDQDRIFTNIYGWTDPGLKAAKARGDWDGTAKLLKLGHDEIVERMKASGLRGRGGAGFPTGLKWSFMPKEVKERPHYLVVNADESEPGTCKDRDIIRHEPHKLLEGCLVAGFAMRAHAAYIYIRGEFVNEARRLQAAIDEAYDAGLLGKNAAKSGWDFDIHLHRGAGAYICGEETA

SEQ ID NO: 100769 - protein, 327 aa, Unknown
  Bacterial polypetide isolated from the Sargasso Sea
YGSTACEKAGAEIPRFCYHEKLSIAGNCRMCLVEMEKSPKPIASCAMPAADGMNIKTNTPFVEKARKGVMEFLLANHPLDCPVCDQGGECDLQDQSMFYGVDKSRFKENKRTVPEKYMGPLIKTQMTRCIHCTRCVRFATEVAGVSELGAIGRGEDMQITTYLEQSMQSELSANVIDLCPVGALTSKPYVFEARPWELKKTETVDVMDAVGSNVRVDTYDWEVKRVLPIINEDINEEWISDKTRYACDGLSNQRLDTPLIKYNGKFEKASWSEVFKIIKSKFENSSNDKVCGFVGDLTNMETGYIFKEFFDRTFNINTMTQGQITDF

SEQ ID NO: 100770 - protein, 292 aa, Unknown
  Bacterial polypetide isolated from the Sargasso Sea
MIKLKIDNKNIEVEPGTTILQACEIAGKEIPRFCYHEKLSIAGNCRMCLVEVSGSKKPVASCAMPAVDGQEIKTNSEMVKKAREGVMEFLLVNHPLDCPICDQGGECDLQDQAFNYGGGKSRYELNKRSVKEKNMGPLIKTHMNRCIHCTRCIRFAEEIAGVEELGAINRGENMEISTYLEKAVTSEFSANLIDLCPVGALTSKPYAFEARPWELKKTESVDVMDAIGSNIRIDSKGWEVKRILPKINEDINEEWISDKTRFACDGLLNNRIDSPYIKINGKLVATSWDSAL

SEQ ID NO: 100771 - protein, 43 aa, Unknown
  Bacterial polypetide isolated from the Sargasso Sea
MATIHVDGKALEVDGADNLLQACLSLGLDIPYFCWHPALGSVG

SEQ ID NO: 100772 - protein, 90 aa, Unknown
  Bacterial polypetide isolated from the Sargasso Sea
MIVAGTLTNKMAQPLRKVYDQMPEPRYVISMGSCANGGGYYHYSYSVVRGCDRIVPVDIYVPGCPPTAEALLYGILQLQKKIRREGNLKR

SEQ ID NO: 100773 - protein, 190 aa, Unknown
  Bacterial polypetide isolated from the Sargasso Sea
GTKLFNISGHVNTPCTVEEELGIPMKELIEKHAGGVRGGWNNLLAVIPGGASVPVLNKEHCDTVTMDYDALRELRSGLGTAAVMVMDKSTDIVRAITRLSAFYKHESCGQCTPCREGTGWMWRMMERICNGEATLQEIDLLEEVTYHIEGHTICALGDAAAWPIQGLIRTFRPEMERRITQSPVKTDRAA

SEQ ID NO: 100774 - protein, 277 aa, Unknown
  Bacterial polypetide isolated from the Sargasso Sea
CEEAGLEIPRFCYHDRLSIAGNCRMCLVDVEGAPKPVASCAMPINEGMSIHTNTQTVKKAREGVMEFLLINHPLDCPVCDQGGECDLQDQTVAFGPENSRFNENKRSVDEKHMGPLIKTYMTRCIHCTRCIRFGDEVAGVNQLGALNRGENMEITTYLEKTLDSELSANIVDLCPVGALTSKPYQFEARPWELKKTESIDVMDAVGSNIRVDTYGWKVKRILPVLNEDINEEWISDKTRYACDGLLTQRIDTPLIKNNGKFVESDWNESLLKVTELF

SEQ ID NO: 100775 - protein, 171 aa, Unknown
  Bacterial polypetide isolated from the Sargasso Sea
KDLIEKHAGGVVGGWDNLKAVIPGGSSMPLLPKDICDTIKMDFDACVENKTGLGTAGIVVINNDQDIIKCMARIARFYKHESCGQCTPCREGSGWMWRMLERMAKGEASREEVDMLMDVTKQIEGHTICAFGEGSAWPVQGLLRHFKKEIEERNNFNPLINTGQKNPYLVD

SEQ ID NO: 100776 - protein, 103 aa, Unknown
  Bacterial polypetide isolated from the Sargasso Sea
YKHESCGQCTPCREGAGWMWRILDRVVKRKATFSDIDLLADVTKQIEGHTICAFGEGSAWPVQGLLRHFRKDIENRCREEPLIKKKIDNPYLVDQHLLENKNA

SEQ ID NO: 100777 - protein, 215 aa, Unknown
  Bacterial polypetide isolated from the Sargasso Sea
MPKIIINGKEIEFEKGMTVLQACELAEVEIPRFCYHEKLSIAGNCRMCLVELEKSPKPIASCAMPAAEGMNIKTNTSFVQKARKGVMEFLLANHPLDCPVCDQGGECDLQDQSMYYGVDKSRFVENKRQVREKYMGPLIKTQMTRCIHCTRCVRFATEIAGVPELGAIGRGENMEITTYLEKAMESELSANVIDLCPVGALTSKPYAFEARPWEL

SEQ ID NO: 100778 - protein, 215 aa, Unknown
  Bacterial polypetide isolated from the Sargasso Sea
MLKLKVNDIEVEVEEGLTVLQACELAGVEIPRFCYHEKLSIAGNCRMCLVEIEKSPKPIASCAMPAADGMVIKTNTEKIEKSRKGVMEFLLANHPLDCPVCDQGGECDLQDQSMFYGIDKSRFKENKRYVPEKYMGPLIKTQMTRCIHCTRCIRFATEIAGVPELGAIGRGEDMQITTYLEKAMESEMSANVIDLCPVGALTSKPYVFEARPWEL

SEQ ID NO: 100779 - protein, 196 aa, Unknown
  Bacterial polypetide isolated from the Sargasso Sea
LGNPKNTGTKIFSISGHVNNPCNVEEEMGISLRSLIETHAGGVIGGWDNLLAVIPGGASVPLIPKDICDNIKMDFDSLKDVQSGLGTAAVIVMNKSTDIIEAISRLSHFYKHESCGQCTPCREGTGWMFRMMEKMKHGNANKNDIDKLLNVTKQVEGHTICALGDAAAWPIQGLMRHFRDEIERRIKDYNNKIEAA

SEQ ID NO: 100780 - protein, 98 aa, Unknown
  Bacterial polypetide isolated from the Sargasso Sea
MYTPDNIFTTTIDKAVRWSRTQSMWPVTFGLACCAIEMMAAGSAKYDLARYGMEVFRASPRQADLMIVAGRVSQKMAPVLRQVYDQMADPKWVIAMGA

SEQ ID NO: 100781 - protein, 59 aa, Unknown
  Bacterial polypetide isolated from the Sargasso Sea
MAKEKKKLNLNFGPQHPAAHGVLRLILQLDGEVVEKADPHIGLLHRGTEKLIENKTYTQ

SEQ ID NO: 100782 - protein, 174 aa, Unknown
  Bacterial polypetide isolated from the Sargasso Sea
MAGGVIGGWYNLQAVIPGGSSMPLLSKKICDTITMDFDALIANKSGLGTAGIVVINKDQDIISCMARIARFYKHESCGQCTPCREGAGWMWRILDRVEKRKATFNDIELLSDVTKQIEGHTICAFGEGSAWPVQGLLRHFRKEIESRCREEPLIKKKTNNPYLVDQHLLENKNA

SEQ ID NO: 100783 - protein, 280 aa, Unknown
  Bacterial polypetide isolated from the Sargasso Sea
KINIDNKEIEFENGMTVMQACELAGSEIPRFCYHDKLSIAGNCRMCLVEMEKSPKPIASCAMPAGEGMKIKTNSKLVKKARKGVMEFLLINHPLDCPICDQGGECDLQDQALYYGLDKSRYEENKRAVKNKYMGPLVSTIMTRCIHCTRCVRFATEVAGVNDLGLLGRGEKAEITSYLEKTIDSELSGNVIDLCPVGALTSKPYAFKSRPWELKKTESYDVFDAIGSSIRVDSIGKSVLRVLPRINEDINEEWISDKTRYAIDGLSKQRLDKVYIRENNK

SEQ ID NO: 100784 - protein, 245 aa, Unknown
  Bacterial polypetide isolated from the Sargasso Sea
MLKLKVNDIEVEVEEGLTVLQACEKAGVEIPRFCYHEKLSIAGNCRMCLVEMEKSPKPIASCAMPAADGMVIKTNTPKIEKSRKGVMEFLLANHPLDCPVCDQGGECDLQDQSMFYGIDKSRFKENKRAVPDKNMGPLIKTQMTRCIHCTRCVRFATEVAGVPELGAIGRGEDMQITTYLEQSVQSELSGNVIDLCPVGALTSKPYVFEARPWELKKTETIDVMDAVGSNIRVDTYDWEVKRVLP

SEQ ID NO: 100785 - protein, 154 aa, Unknown
  Bacterial polypetide isolated from the Sargasso Sea
HQCFLYQKEKCETLTMDFDSLVSEKSGLGTAGVVVINKDQDIIKCMARIARFYKHESCGQCTPCREGSGWMWRMLERMAKGEASKDEIEMLSDVTKQIEGHTICAFGEGSSWPVQGLLRHFKDEIKKRNKFDPIVKENKNIPYLVDQHLLDKNA

SEQ ID NO: 100786 - protein, 250 aa, Unknown
  Bacterial polypetide isolated from the Sargasso Sea
MTEKIKINVDNKILETEKGKLLIEACEDNGIDIPRFCWHKRMDPVGMCRMCLVQVETPRGMALVPSCTADVTEDMIVDTTSDTVKKAQEGVLEFLLINHPLDCPICDRAGECPLQDQTMTHGPGESRFIEEKRKFEKPIPISDLILLDRERCVLCDRCTRFSEEISGDPLIQFVQRGNNTQVLTFPDEPFNSYFSGNTVQLCPVGALTSTSYRFKARPWDLKSNESTCNQCSIGCSIDINVSQEKVLRYL

SEQ ID NO: 100787 - protein, 164 aa, Unknown
  Bacterial polypetide isolated from the Sargasso Sea
MGLLTNKFQEDNVIVEKLEKLLNWSRSTSPWFFQFGTACCAIEMMAAAAPRHDIKRIGFIPRSSPRQADVMIVAGTVTMKMAIRVKKLYEQMADPKYVVAMGSCATSGGPYWQHGYHVLKGVDIVIPVDVYVPGCPPRPESLIEGLLKLEEQILEDRPLTRKMT

SEQ ID NO: 100788 - protein, 132 aa, Unknown
  Bacterial polypetide isolated from the Sargasso Sea
LVSHKSGLRTAGVVVINKDQDIIKCMARIARFYKHESCGQCTPCREGSGWMWRMLERMAKGEASKDEVDMLMDVTKQIEGHTICAFGEGSSWPVQGLIRHFKDEIIKRNNFDPLIKKDRNIPYLVDQHLLEK

SEQ ID NO: 100789 - protein, 227 aa, Unknown
  Bacterial polypetide isolated from the Sargasso Sea
MPKIIINGKEIEFEKGMTVLQACELANVEIPRFCYHEKLSIAGNCRMCLVEMEKSPKPIASCAMPATEGMNIKTNTKFVEKARKGVMEFLLANHPLDCPVCDQGGECDLQDQSLYYGVDKSRFSENKRAVKDKYMGPLIKTQMTRCIHCTRCIRFATEVAGVPELGAVGRGEDMEITTYLEKSMESELSANVIDLCPVGALTSKPYAFEARPWELKKTESIDVMDAV

SEQ ID NO: 100790 - protein, 243 aa, Unknown
  Bacterial polypetide isolated from the Sargasso Sea
MLKDKDRIFQNLYNDMGSDVTSSQKRGDWVNTKEIIDKGREWIINEIKDSQLRGRGGAGFPTGLKWSFAPKELGARPHYLVINGDESEPGTCKDRDILRFEPHKLIEGCLIASYAVQAHVCYIYIRGEYFIDGQKLQAAIDEAYEKKLLGKNAAGSGWDLDIHIHYGAGAYICGEETALLESIEGKKGQPRLKPPFPALIGLYGCPYIIKHVETIAVVPTILRRGGKWFAFSGREKIQAQKYF

SEQ ID NO: 100791 - protein, 167 aa, Unknown
  Bacterial polypetide isolated from the Sargasso Sea
QGGWDNLKAVIPGGSSMPLLPKDICETITMDFDTLVKQKSGLGTAGIIVINKDQDIIKCMARIARFYKHESCGQCTPCREGSGWMWRMLERMSIGEASREEVDMLFDVTKQIEGHTICAFGEGSSWPVQGLLRHFKKEILKRNNFNPLINKNRNIPYLVDQHLLEKE

SEQ ID NO: 100792 - protein, 102 aa, Unknown
  Bacterial polypetide isolated from the Sargasso Sea
MAKETKKLNLNFGPQHPAAHGVLRLILQLDGEIVEKADPHIGLLHRGTEKLIENKTYIQAVPYFDRLDYVAPMNQEHAFALAIEKILKINVPLRAQYSSSKY

SEQ ID NO: 100793 - protein, 203 aa, Unknown
  Bacterial polypetide isolated from the Sargasso Sea
TGTKIYCIQGNVNNPCNVEEEMGIPLKDLIEKHAGGVIGGWENLKAVIPGGSSMPLLPKNICETIKMDFDTLVENKSGLGTAGIVVINKDQDIIKCMARIARFYKHESCGQCTPCREGSGWMWRMLERMAKGEASREEVDMLMDVTKQIEGHTICAFGEGSAWPVQGLLRHFKKEVAKRNNFSPLVDRNRDIPYLVDQHLLEK

SEQ ID NO: 100794 - protein, 140 aa, Unknown
  Bacterial polypetide isolated from the Sargasso Sea
MDFDSLLAAKSGLGTAGIVVINKDQDIIKFMARIAKFYKHESCGQCTPCREGSGWMWRILERTAKGEATKEDINLLSEVTKQIEGHTICAFGEGSAWPVQGLLRHFRKEIDKRCFSEPLIKKKRKIPYLVDQHLLETKDA

SEQ ID NO: 100795 - protein, 180 aa, Unknown
  Bacterial polypetide isolated from the Sargasso Sea
KELIEKHAGGVVGGWDNLKAVIPGGSSMPLLPKETCETIKMDFDACVENKTGLGTAGIVVINKDQDIIKCMARIARFYKHESCGQCTPCREGSGWMWRMLERMAKGEATRDEVDMLLDVTKQIEGHTICAFGEGSSWPVQGLIRNFKDEIIERNKFDPIVKKQKDIPYLIDQHLLEKENA

SEQ ID NO: 100796 - protein, 196 aa, Unknown
  Bacterial polypetide isolated from the Sargasso Sea
MLKEENKIFKNLYNEQGWQLENAFKRDDWLDTKKIIEKGRDWIINEIKASELRGRGGAGFSTGLKWSFAPKKVGSRPHYLVINADESEPGTCKDRDILRFEPQKLIEGCLIASYAVNAKVCYVYIRGEYLNEGKRLQEAIDEAYSKNLIGKNACNSGWDLDIYIHYGAGAYICGEETALLESLEGNRGQPRLKPPF

SEQ ID NO: 100797 - protein, 164 aa, Unknown
  Bacterial polypetide isolated from the Sargasso Sea
MGLLTNKFSEDNVIVAKLEKLLNWSRSTSPWFFQFGTACCAIEMMAAAAPRHDIKRIGFIPRSSPRQADVMIVAGTVTMKMAIRVKKLYEQMADPKYVVAMGSCATSGGPYWQHGYHVLKGVDIVIPVDVYVPGCPPRPESLIEGLLKLEEQILEDRPLTRKMA

SEQ ID NO: 100798 - protein, 106 aa, Unknown
  Bacterial polypetide isolated from the Sargasso Sea
EGDKGQPRLKPPFPALVGLYGCPTIVNNVETIAVIPTILRRGGKWFSSIGRPKNTGTKIFCISGNVKTPCNVEEAMGVSLKELIEKYAGGVEGGWNNLQAVIPGGS

SEQ ID NO: 100799 - protein, 117 aa, Unknown
  Bacterial polypetide isolated from the Sargasso Sea
MGVEINEDNFGDELNSKGFLVANFDKLLTWARTGSLWPMTFGLACCGVEMIHTYMARYDLDRYGVIPRGSPRQSDVMIVAGTLTNKMAPALRKVYDQMPEPRWVISMGSCANGGGYY

SEQ ID NO: 100800 - protein, 203 aa, Unknown
  Bacterial polypetide isolated from the Sargasso Sea
KIYCISGNVNNPCNVEEEMGIHLKDLIEKHAGGVVGGWDNLKAVIPGGSSMPLLPKKICDKIKMDFDACVENKTGLGTAGIVVINNDQDIIKCMARIARFYKHESCGQCTPCREGSGWMWRMLERMAKGEATRDEVDMLMDVTKQIEGHTICAFGEGSAWPVQGLIRHFKDEIIERNKFDPVIKQKKNIPYLVDQHLLEKENA

SEQ ID NO: 100801 - protein, 271 aa, Unknown
  Bacterial polypetide isolated from the Sargasso Sea
MLKLKVNEKEIEIDEGLTVLQACEQAGYEIPRFCYHEKLSIAGNCRMCLVEIEKSPKPVASCAMPAAEGMNIKTNTSMVEKARKGVMEFLLVNHPLDCPVCDQGGECDLQDQSMFYGVDKSRFKENKRQVPEKYMGPLIKTQMTRCIHCTRCIRFATEVAGVPELGAIGRGENMQITTYLEKAMESELSANVIDLCPVGALTSKPYVFEARPWELKKTESIDVMDAVGSNIRVDTYGWEVKRILPRINEDINEEWISDKTRYACDGLKIQD

SEQ ID NO: 100802 - protein, 198 aa, Unknown
  Bacterial polypetide isolated from the Sargasso Sea
MEEKIIQGSKLFCISGHVNHPCNVEEEMGISLRDLIEKHAGGVRGGWENLLAVIPGGSSTPLLTKKVCDTILMDFDSLKNAGTGLGTAGVIVMDKSTDVINAITKLSHFYKHESCGQCTPCREGTGWMWRMMERLVTGNAEIEEIDVLLEVTKQVEGHTICALGDAAAWPIQGLIKNFRPLIEERINDFHLKNAEAAE

SEQ ID NO: 100803 - protein, 179 aa, Unknown
  Bacterial polypetide isolated from the Sargasso Sea
MIYKIILFAPLIGAIIAGFGWRVIGDKGAQWLTTGLLFLSALLSWVVFLQGAHQDDPVHILTWIQSGTLDTSWSIRVDRLTTTMLIVVTTVSVLVHLYSMGYMAHDENFDDAKESYRPRFFAYLSLFTFAMLMLVTADNLAQMFFGWEGVGLASYLLIGFYFRKPSANAASIKAFVVNR

SEQ ID NO: 100804 - protein, 145 aa, Unknown
  Bacterial polypetide isolated from the Sargasso Sea
KKIVKTINMDFDSLVKEKSGLGTAGIVVINKDQDIIKCMARIARFYKHESCGQCTPCREGSGWMWRMLERMSKGEASRDEVDMLMDVTKQIEGHTICAFGEGSSWPVQGLLRHFKKEVAKRNNFNPLINTNNKIPYLVDQHLLEK

SEQ ID NO: 100805 - protein, 126 aa, Unknown
  Bacterial polypetide isolated from the Sargasso Sea
RAGIIVINNDQDIIKCMARIARFYKHESCGQCTPCREGSGWMWRMLERMAKGDATRDEVDMLMDVTKQIEGHTICAFGEGSAWPVQGLIRHFKDEIIERNKFDPIVKQKKDIPYLVDQHLLEKENA

SEQ ID NO: 100806 - protein, 140 aa, Unknown
  Bacterial polypetide isolated from the Sargasso Sea
MDFDSLIKNNSGLGTAGIVVINKQQDIVACMARIARFYKHESCGQCTPCREGAGWMWRILDRVVKRKATLNDIDLLSDVTKQIEGHTICAFGEGSAWPVQGLLRHFRKEVESRCREEPLIKKKINNPYLVDQHLLDNKNA

SEQ ID NO: 100807 - protein, 174 aa, Unknown
  Bacterial polypetide isolated from the Sargasso Sea
MAKEKKTLNLNFGPQHPAAHGVLRLILQLDGEVVEKADPHIGLLHRGTEKLIENKTYTQAVPYFDRLDYVAPMNQEHAFALAIEKILKIEVPARAKYIRVIFCEIGRILSHILNVTTQAMDVGALTPTLWGFEEREKLMGFYERVSGSRLHANYFRAGGVHKDLPSGLDNDIDE

SEQ ID NO: 100808 - protein, 238 aa, Unknown
  Bacterial polypetide isolated from the Sargasso Sea
PALIGLYGCPTIINNVETIAVVPTILRRGGKWFASLGREKNTGTKIFCISGNVNNPCNVEEEMNIPLKELIEVHAGGVVGGWDNLQAVIPGGSSMPLIPKEKCETLTMDFDSLTAEKSGLGTAGVVVINKDQDIIKCMARIARFYKHESCGQCTPCREGSGWMWRMLERMAKGEASKDEVEMLGDVTKQIEGHTICAFGEGSSWPVQGLLRHFKDEIKRRNKFDPIVKENKNIPYLVD

SEQ ID NO: 100809 - protein, 237 aa, Unknown
  Bacterial polypetide isolated from the Sargasso Sea
PRFKPPFPANFGLYGRPTTINNTESFASAPSIIREGGTWFANQGVPNSGGTKCFSVSGHVNKPGNFEIPLGIPFTKLLEMAGGVRNGNHLKAVIPGGCSMPVLPGDVMLETRMDYDSIAKAGSMLGSGAVIVMDETTCMVKALERLSRFYHMESCGQCTPCREGTGWLHRMLLRILAGEGVKGDLDKLDDVASKIEGRTICAFGDAAAWPVRSFIKHFRDEFQYYIDNKCSLVESQN

SEQ ID NO: 100810 - protein, 302 aa, Unknown
  Bacterial polypetide isolated from the Sargasso Sea
HVKDSDRIFTNLYGLKDWKLAGARSRGDWDGTKEILNKGREWIVEEVKSSGLRGRGGAGFPSGLKWSFMPKEPTGRPHYLVVNADEGEPGTCKDRDMLRNDPHKLIEGCLLAGFGMGANAAYIYIRGEFYREAERLQFAIDEAYEAGLIGRNACGSGYDFDVYVHRGAGAYICGEEMALIESLEGKKGMPRLKPPFPAAMGLYGCPTTVNNVETIAVAPTILRRGAAWFSSLGRENNTGTKVFCISGHVNNPCNVEEEMGIPLKELIEKHAGGVVGGWNNLKAIIPGGASVPMIPKSICDSV

SEQ ID NO: 100811 - protein, 256 aa, Unknown
  Bacterial polypetide isolated from the Sargasso Sea
MPKITINNKVIDFQNGMTVMQACELADVEIPRFCYHDKLSIAGNCRMCLVEMEKSPKPIASCAMPAAEGMNIKTNTELVKKARKGVMEFLLINHPLDCPICDQGGECDLQDQALHYGFDKSRYEENKRAVKNKYMGPLVSTIMTRCIHCTRCVRFSTEIAGVDDIGLLGRGENAEITTYLEKTIESELSGNVIDLCPVGALTNKPYAFQSRPWELKKTESVDVFDGMGASIRIDSKGKNVLRVLPRLNEEINEEWI

SEQ ID NO: 100812 - protein, 153 aa, Unknown
  Bacterial polypetide isolated from the Sargasso Sea
MPLVPKKICETLTMDFDALVAEKSGLGTAGIVVINKDQDIIKCMARIAKFYKHESCGQCTPCREGSGWMWRMLERMSKGEATKDEINMLGDVTNQIAGHTICAFGEGSSWPVQGLLRHFKSEIEERNNLNPIIEKKNNIPYLVDQHLLDKKNA

SEQ ID NO: 100813 - protein, 116 aa, Unknown
  Bacterial polypetide isolated from the Sargasso Sea
AVIVMDKSTDLIQAIARIAYFYKHESCGQCTPCREGTGWMWRVLERMAIGDAEHDDIDMLLDVAGQVEGHTICALGDAAAWPVQGLIRHFRHEIEDRITMYRRPRALVQGATVAAE

SEQ ID NO: 100814 - protein, 202 aa, Unknown
  Bacterial polypetide isolated from the Sargasso Sea
MINLHVTTVLMPLIASIVAGLFGAKIGRERSHQITIAAVGLSFLISLYLLINSLGDDFQIQNYNLYSWAIVGNLHMDIGFLIDRLSLLMMVVVTFVSLMVHIYTIGYMHDDPGYQRFFSYISLFTFAMLMLVMSNNFLQLFFGWEAVGLVSYLLIGFWFKRESAVTANLKAFLVNRVGDFGFLLGIAGIVFFTNSLDYYDVF

SEQ ID NO: 100815 - protein, 166 aa, Unknown
  Bacterial polypetide isolated from the Sargasso Sea
WDNLKAVIPGGSSMPLLPKEVCETIRMDFDSLIKEKSGLGTAGIVVINKDQDIIKCMARIARFYKHESCGQCTPCREGSGWMWRMLERMAKGEASREEVDMLMDVTKQIEGHTICAFGEGSAWPVQGLLRHFKREVSKRNNFNPLIKTNKNIPYLIDQHLLEKENA

SEQ ID NO: 100816 - protein, 291 aa, Unknown
  Bacterial polypetide isolated from the Sargasso Sea
LRKIIIDDQEVGVNPAMFILQACEHINKEIPRFCYHERLSIAGNCRMCLVEVVGGPPKPMASCALQVKDLRPGPNGEPPVIKTNSKMVKKAREGVMEFLLINHPLDCPICDQGGECDLQDQALAFGVDFSRYTEPKRAVLDVDLGPLVETNMTRCISCTRCVRFSTEVAGIPEMGQIGRGENSEITSYLGKTLKSELQGNIIDLCPVGALTSKPYAFTARPWELTKTNCIDVMDALGSNIRIDSKGKKIMRIIPRNHDEINEEWLSDKSRFIWDGLNKQRLDVPYIRNEER

SEQ ID NO: 100817 - protein, 327 aa, Unknown
  Bacterial polypetide isolated from the Sargasso Sea
CRMCLVKWEKSPKPIASCAMPAAEGMSIKTNTAYVEKARKGVMEFLLANHPLDCPVCDQGGECDLQDQSMYYGVDKSRFVENKRTVKEKYMGPLIKTQMTRCIHCTRCVRFATEVAGVPEIGAVGRGENMEITTYLEKAMESELSANVIDLCPVGALTSKPYAFEARPWELKKTESIDVMDAVGSNIRVDTYNWEVKRILPRLNNEINEEWISDKTRYSCDGLLKQRLDTPYIKKDNKLQKSSWDEAIDLIKNHINSTKPEEIAGHIGDMVNLENALAFKKLFKIFKSENLEFREKFFYINSSEKMNYLFNSSISGIDQSDLILLIG

SEQ ID NO: 100818 - protein, 203 aa, Unknown
  Bacterial polypetide isolated from the Sargasso Sea
MLKLKVNDIEVEVEEGLTVLQACEKAGAEIPRFCYHEKLSIAGNCRMCLVEMEKSPKPIASCAMPAADGMIIKTNTPKIEKSRKGVMEFLLANHPLDCPVCDQGGECDLQDQSMFYGIDKSRFKENKRAVPDKNMGPLIKTQMTRCIHCTRCVRFATEVAGVPELGAIGRGEDMQITTYLEQSVQSELSGNVIDLCPVGALTS

SEQ ID NO: 100819 - protein, 194 aa, Unknown
  Bacterial polypetide isolated from the Sargasso Sea
MLEDKNRIFQNLYNDNGADIDSSKKRGDWSNIKEICEKGRDWIINEIKASELRGRGGAGFPTGLKWSFAPKEIGTRPHYLVINADESEPGTCKDRDILRFEPHKLIEGCFIASYAVNAHTCYIYIRGEYFNEGQKLQKAIDEAYEKNLIGKNASGIGWDLDIYIHYGAGAYICGEETALLESLEGKKGQPRLKP

SEQ ID NO: 100820 - protein, 260 aa, Unknown
  Bacterial polypetide isolated from the Sargasso Sea
MPKILINGKEIEFEKGMTVLQACELAEVEIPRFCYHEKLSIAGNCRMCLVEMEKSPKPIASCAMPATEGMNIKTNTALVEKARKGVMEFLLANHPLDCPVCDQGGECDLQDQSMYYGVDKSRFIENKRQVKEKYMGPLIKTQMTRCIHCTRCVRFATEVAGVPEIGAIGRGENMEITTYLEKAMESELSANVIDLCPVGALTSKPYAFEARPWELKKTESVDVMDAVGSNIRVDTYNWEVKRILPRLNNDINEEWIQTKQ

SEQ ID NO: 100821 - protein, 284 aa, Unknown
  Bacterial polypetide isolated from the Sargasso Sea
MEETLVLFKNIKNPKYSKSLEGYKKAGGYQTLKKVLGMTPEEVVQTVKDSGVRGRGGAGFPTGLKWSFMPKGTGKPSYLIANADESEPGTCKDRELMLKDPHLFLEGMMIGCYAVGCHHGYVYIRGEFFPAIKSLNTAVEELYADSMLGPDPLGSGFNLDLTIHSGAGAYICGEESALLDSLEGKRGQPRVKPPFPAISGFNGCPTSVNNVETLACMPFILGDGGVDAFKSFGPENNSGTHLVSLSGHVNKPGVYELRMDVNMKDIIYEIGGGIKNGKKLKGVI

SEQ ID NO: 100822 - protein, 182 aa, Unknown
  Bacterial polypetide isolated from the Sargasso Sea
MAKEKKTLNLNFGPQHPAAHGVLRLILQLDGEVVEKADPHIGLLHRGTEKLIENKTYIQAVPYFDRLDYVAPMNQEHAFALAIEKILKIEVPSRAKYIRVIFCEIGRILSHILNVTTQAMDVGALTPTLWGFEEREKLMGFYERVSGSRLHANYFRAGGVHKDLPSGLESDIDEFCEKFQRL

SEQ ID NO: 100823 - protein, 140 aa, Unknown
  Bacterial polypetide isolated from the Sargasso Sea
MDFDACVENKTGLGTAGIVVINKDQDIIKCMSRIARFYKHESCGQCTPCREGSGWMWRMLERMAKGEATRDEVDMLLDVTKQIEGHTICAFGEGSSWPVQGLIRNFKDEIIERNKFDPIVKKQKDIPYLVDQHLLEKENA

SEQ ID NO: 100824 - protein, 236 aa, Unknown
  Bacterial polypetide isolated from the Sargasso Sea
TIINNVETIAVVPTILRRGGKWFASLGREKNTGTKIFCISGNVNTPCNVEEEMNIPLKELIEVHAGGVIGGWDNLQAVIPGGSSMPLIPKEKCETLTMDFDSLMAEKSGLGTAGVVVINKDQDIIKCMARIARFYKHESCGQCTPCREGSGWMWRMLERMAKGEASKDEVDMLGDVTKQIEGHTICAFGEGSSWPVQGLLRHFKDEIKKRNKFDPIVKENKNIPYLVDQHLLDKNA

SEQ ID NO: 100825 - protein, 182 aa, Unknown
  Bacterial polypetide isolated from the Sargasso Sea
IPLKEIIEIHAGGVIGGWENLQAVIPGGSSMPLIPKHICETLTMDFDALVEQKSGLGTAGVVVINKDQDIIKCMARIARFYKHESCGQCTPCREGSGWMWRMLERMSKGEASRDEIDMLEDVTNQIAGHTICAFGEGSSWPVQGLLRHFSKEVKKRNKFDPIIKKQKNIPYLVDQHLLDKNA

SEQ ID NO: 100826 - protein, 199 aa, Unknown
  Bacterial polypetide isolated from the Sargasso Sea
CISGNVNNPCNVEEEMNIPLKELIEVHAGGVIGGWDNLQAVIPGGSSMPLIPKDKCETLTMDFDSLMAEKSGLGTAGVVVINKDQDIIKCMARIARFYKHESCGQCTPCREGSGWMWRMLERMVKGEASKDEIDMLADVTKQIEGHTICAFGEGSSWPVQGLLRHFKHEIKKRNKFDPIVKENKNIPYLIDQHLLDKNA

SEQ ID NO: 100827 - protein, 240 aa, Unknown
  Bacterial polypetide isolated from the Sargasso Sea
GCPTIINNVETIAVVPTILRRGGKWFSSLGREKNTGTKIFCISGNVNNPCNVEEEMNIPLKELIEVHAGGVVGGWENLQAVIPGGSSMPLIPKEKCETLTMDFDSLTAEKSGLGTAGIVVINKDQDIIKCMARIARFYKHESCGQCTPCREGSGWMWRMLERMAKGEATKDEVDMLGDVTNQIAGHTICAFGEGSSWPVQGLLRHFKKEIEERNNLDPIVQKKNNIPYLVDQHLLDKKNA

SEQ ID NO: 100828 - protein, 215 aa, Unknown
  Bacterial polypetide isolated from the Sargasso Sea
MGNSRQVIIDGNKIEVDPALTIIQACEVLGIEIPRFCYHERLSIAGNCRMCLVEVVGGPPKPTASCAMQIKDLRPGPNGEPPEIKTKSPMVKKAREGVMEFLLINHPLDCPICDQGGECDLQDQAVGYGIDFSRYREPKRAAEDLDLGPLVETHMTRCISCTRCVRFTTEVAGISQMGQVGRGEDSEITSYLNETLSSELQGNIIDLCPVGALTS

SEQ ID NO: 100829 - protein, 87 aa, Unknown
  Bacterial polypetide isolated from the Sargasso Sea
CRNVNNKMAPALRKVYDQMPEPRYVISMGSCANGGGYYHYSYSVVRGCDRIVPVDIYVPGCPPSAEALLYGILQLQKKIRKKGSFIR

SEQ ID NO: 100830 - protein, 210 aa, Unknown
  Bacterial polypetide isolated from the Sargasso Sea
MLKLKVNEIEVEVEEGLTVLQACEKAGVEIPRFCYHEKLSIAGNCRMCLVEMEKSPKPIASCAMPAAEGMNIKTNTALVEKARKGVMEFLLANHPLDCPVCDQGGECDLQDQSMYYGVDKSRFKENKRAVPEKNMGPLIKTQMTRCIHCTRCVRFATEVAGVPELGAIGRGEDMQITTYLEQSMQSELSANVVDLCPVGALTSKPYVFEN

SEQ ID NO: 100831 - protein, 102 aa, Unknown
  Bacterial polypetide isolated from the Sargasso Sea
YAAKSIVSFFAHESCGQCTPCREGTTWLEMILERIASGRGRLSDISLLVDVCDNISPGLSWPPKMTTICPLGPSAVSPITSLLDNFSDELMKMLPTKIPIAQ

SEQ ID NO: 100832 - protein, 202 aa, Unknown
  Bacterial polypetide isolated from the Sargasso Sea
PYFPAVKGLYMKPTLVNNVETISSVPWIIENGGEEYNKLGVEGSTGTRIFSLSGHVNNPGNYEIEMGSSFGEFVETLGGGIRNNKKVKAYIPGGASAPWFRGDQLDIKMTIDDVANNNSMLGSGAVVMMDEDTNLVSAAKSIVSFFAHESCGQCTPCREGTTWLEMILDRIASGRGRTSEKNLLLDVCDNISPGLSWPPKMT

SEQ ID NO: 100833 - protein, 152 aa, Unknown
  Bacterial polypetide isolated from the Sargasso Sea
MPLIPKDKCETLTMDFDSLMAEKSGLGTAGVVVINKDQDIIKCMARIARFYKHESCGQCTPCREGSGWMWRMLERMAKGEASKDEINMLGDVTKQIEGHTICAFGEGSSWPVQGLLRHFKDEIKKRNKFDPIVKENKNIPYLVDQHLLDKNA

SEQ ID NO: 100834 - protein, 257 aa, Unknown
  Bacterial polypetide isolated from the Sargasso Sea
MQACEAAGEEIPRFCYHEKLSIAGNCRMCLVDIEKSPKPVASCAMPATNEMVIKTNTEKVEKARKGVMEFLLINHPLDCPICDQGGECDLQDQSLYFGKSKSRYEDTKRAVEDKNFGPLIKTVMTRCIHCTRCVRFMDEIAGTHELGAVNRGEGMEITSSIEGGLTSELSGNIIDLCPVGALTSKPYAFTARSWELNHFDSIDISDAVGSNTRIDEFNGEIKRILPRENDEINQEWLSDKARFFYDGLENQRLDKPF

SEQ ID NO: 100835 - protein, 250 aa, Unknown
  Bacterial polypetide isolated from the Sargasso Sea
MPKVTVDGTEIEVPQGATVLQACELAGKEIPRFCYHERLSIAGNCRMCLVEVKPGPPKPQASCALPASEGQEIRTDTPMVKAAREGVMEFLLINHPLDCPICDQGGECDLQDQAMAYGKGHSRYDENKRAVTEKYMGPIVKTIMTRCIHCTRCVRFAEEVAGVEEIGAIYRGEDMQITSYLEHAVSSELSGNVVDLCPVGALTSKPYAFEARPWELNKTLAIDVMDAVGTNIRLDSRGRQVLRSLPRVND

SEQ ID NO: 100836 - protein, 127 aa, Unknown
  Bacterial polypetide isolated from the Sargasso Sea
KIFCISGNVNNPCNVEEEMGIPLKNLIENHAGGVIGGWENLKAVIPGGSSMPLLPKKTCDTITMDFDSLIQEKSGLGTAGVVVINNDQDIIKCIARIARFYKHESCGQCTPCREGTGWMWRMLERMS

SEQ ID NO: 100837 - protein, 232 aa, Unknown
  Bacterial polypetide isolated from the Sargasso Sea
MGLYNKPTLVNNVETISSVPWIIQNSGKEYSKLGVEGSTGTRIFSLSGHVNNPGNFEIEMGQSFGEFIDTFGKGIKNNKNVKAYIPGGASAPWFTGDQLDIKMTIDDVANAGSMLGSGAVVVMDEDTNLVYAAKSIVSFFAHESCGQCTPCREGTTWLEMILERIASGRGRLSDISLLIDICDNISPGLDWPPKMTTICPLGPSAVSPITSLLNNFSEEITNMLPTKIPITQ

SEQ ID NO: 100838 - protein, 227 aa, Unknown
  Bacterial polypetide isolated from the Sargasso Sea
MLKLKVNDIEVEVEEGLTVLQACEKAGAEIPRFCYHEKLSIAGNCRMCLVEMEKSPKPIASCAMPAADGMIIKTNTPKIEKSRKGVMEFLLANHPLDCPVCDQGGECDLQDQSMFYGIDKSRFKENKRAVPDKNMGPLIKTQMTRCIHCTRCVRFATEIAGVPELGAIGRGEDMQITTYLEQSVQSELSGNVIDLCPVGALTSKPYVFEARPWELKKTETIDVMDAV

SEQ ID NO: 100839 - protein, 216 aa, Unknown
  Bacterial polypetide isolated from the Sargasso Sea
SSLGRPKNTGSKIYCISGNVNNPCNVEEEMGIPLKELIEKHAGGVIGGWENLKAVIPGGSSMPLLPKETCETIKMDFDACVENKTGLGTAGIVVINKDQDIIKCMARIARFYKHESCGQCTPCREGSGWMWRMLERMAKGEATRDEVDMLLDVTKQIEGHTICAFGEGSSWPVQGLIRNFKDEIIERNKFDPIVKKQKDIPYLVDQHLLEKENAKT

SEQ ID NO: 100840 - protein, 235 aa, Unknown
  Bacterial polypetide isolated from the Sargasso Sea
MPKIIINGNEIEFKKGMTVLQACELANVEIPRFCYHEKLSIAGNCRMCLVELEKSPKPIASCAMPAAEGMNIKTNTAFVEKARKGVMEFLLANHPLDCPVCDQGGECDLQDQSMYYGVDKSRFVENKRQVKEKYMGPLIKTQMTRCIHCTRCVRFATEVAGVPEIGAIGRGENMEITTYLEKAMQSELSANVIDLCPVGALTSKPYAFEARPWELKKTESVDVMDAVGSNIRVDT

SEQ ID NO: 100841 - protein, 208 aa, Unknown
  Bacterial polypetide isolated from the Sargasso Sea
MAVAQSGSTGLELPENVVVSRLDELASWCRKNSLWPMPFATACCGIELMATGAAKHDLARFGAEVFRFSPRQCDLMIVAGRVVMKMLPVLQRIWQQMHEPKWCISMGACASTGGVFDTYAVVQGIDRFIPVDMYVPGCPPRPEQLIQAIIDLQDKIQQEGTLKGREFNTRQRQEQKRALVEYPEILSLDASRNPNLQRELSNPVTNPN

SEQ ID NO: 100842 - protein, 284 aa, Unknown
  Bacterial polypetide isolated from the Sargasso Sea
MPKIIINDKEIEFDSGMTVLQACELADVEIPRFCYHEKLSIAGNCRMCLVEMEKSAKPIASCAMPAAEGMKIKTNTPMVEKARKGVMEFLLANHPLDCPVCDQGGECDLQDQSMYYGLDKSRFVENKRQVKDKYMGPLIKTQMTRCIHCTRCVRFATEVAGVQEIGAIGRGENMEITTYLEKSMMSELSANVIDLCPVGALTSKPYAFEARPWELKKTESIDVMDAVGSNIRVDTYNWEVKRILPRMNNDINEEWISDKTRYSCDGLLKQRLDVPYIKRNNKLE

SEQ ID NO: 100843 - protein, 284 aa, Unknown
  Bacterial polypetide isolated from the Sargasso Sea
KVFETEKGKLLIEACEDNGLEIPRFCWHKRMEPVGMCRMCLVEVETPRGKALVPSCTQEVTEGMVVDTTSEVVQKAQEGVLEFLLINHPLDCPVCDRAGECPLQDQTMAHGPGESRFIEPKRKFEKPIPISDLILLDRERCVLCDRCTRFSEEISGDPLIQFVQRGNNTQILTFPDEPFNSYFSGNTVQLCPVGALTSTSYRFKARPWDLKEFSSVCNGCSTGCSVELNTSQEKMLRILGEDNDHTNQGWICDKSRYGFEYIHSENRIVNPHIKAENEFVETNW

SEQ ID NO: 100844 - protein, 178 aa, Unknown
  Bacterial polypetide isolated from the Sargasso Sea
LIENHAGGVVGGWENLKAVIPGGSSMPLLPKNICETISMDFDSLIANKSGLGTAGIVVINKDQDIIKCMARIARFYKHESCGQCTPCREGSGWMWRMLERMASGEASKEEVDMLFDVTKQIEGHTICAFGEGSAWPVQGLLRHFKDEVVKRNNFNPLIDRDKKIPYLVDQHLLEKDNA

SEQ ID NO: 100845 - protein, 178 aa, Unknown
  Bacterial polypetide isolated from the Sargasso Sea
MLKDQDRIFKNLYNDMGADVAAAQTRGDWVNTSDLTSKGRDWIINEIKDSQLRGRGGAGFPTGLKWSFAPKEVGSRPHYLVINADESEPGTCKDRDILRFEPHKLIEGCLIASYAVQAHVCYIYIRGEYFIEGQKLQTAIDEAYEKKLLGKDAAGTGWDLDIYIHYGAGAYICGEETA

SEQ ID NO: 100846 - protein, 137 aa, Unknown
  Bacterial polypetide isolated from the Sargasso Sea
KIFCISGNVNSPCNVEEEMGIKLKDLIEKHAGGVVGGWDNLQAVIPGGSSMPMLSKEISENITMDFDSLVENNSGLGTAGIIVINKDQDIIKCMARIARFYKHESCGQCTPCREGSGWMWRILERMAKGEASKDEVN

SEQ ID NO: 100847 - protein, 308 aa, Unknown
  Bacterial polypetide isolated from the Sargasso Sea
KKMLKLKVNDIDVEVEEGTTVLQACEQAGAEIPRFCYHEKLSIAGNCRMCLVEMEKSPKPIASCAMPAAEGMVLKTNTEKVKKARKGVMEFLLANHPLDCPVCDQGGECDLQDQSMYYGIDKSRFKENKRYVPEKYMGPLIKTQMTRCIHCTRCIRFATEVAGVPELGAIGRGENMQITTYLEKAMESELSANVIDLCPVGALTSKPYVFEARPWELKKTETIDVMDAVGSNIRVDTYGWEVKRVLPRINEEINEEWISDKTRYACDGLKNQRLDTPYVKINNKLKPSSWDEAFKAVSERISKTKSEK

SEQ ID NO: 100848 - protein, 184 aa, Unknown
  Bacterial polypetide isolated from the Sargasso Sea
MNIPLKELIEVHAGGVVGGWDNLQAVIPGGSSMPLIPKEKCETLTMDFDSLVAEKSGLGTAGIVVINKDQDIIKCMARIARFYKHESCGQCTPCREGSGWMWRMLERMAKGEASRDEIDMLGDVTNQIAGHTICAFGEGSSWPVQGLLRHFSKEIKKRNKFDPIIKEQKDIPYLVDQHLLDKNA

SEQ ID NO: 100849 - protein, 139 aa, Unknown
  Bacterial polypetide isolated from the Sargasso Sea
MDFDSLMAEKSGLGTAGVVVINKDQDIIKCMARIARFYKHESCGQCTPCREGSGWMWRMLERMARGEASKDEVDMLSDVTKQIEGHTICAFGEGSSWPVQGLLRHFKDEIKKRNKFDPIVKENKNIPYLVDQHLLDKNA

SEQ ID NO: 100850 - protein, 220 aa, Unknown
  Bacterial polypetide isolated from the Sargasso Sea
MPKIKINDKEIEFENGMTVLQACEMAGAEIPRFCYHERLSIAGNCRMCLVEMEKSSKPIASCAMPAAEGMSIKTNTQMVEKARKGVMEFLLANHPLDCPVCDQGGECDLQDQSLYYGFDKSRFKENKRAVEDKYMGPLIKTQMTRCIHCTRCIRFATEVAGVSELGAIGRGEDMQIATYLEKSMESELSGNVIDLCPVGALTSKPYAFEARPWELKKTES

SEQ ID NO: 100851 - protein, 244 aa, Unknown
  Bacterial polypetide isolated from the Sargasso Sea
PALIGLYGCPTIVNNVETVAVVPTILKRGSKWFASLGKKKNTGTKIFCISGNVNNPCNVEEEMGISLKELIEKHAGGVIGGWDNLKAVIPGGSSMPLLPKEICEKLTMDFDTLIENKSGLGTAGIIVINNDQDIIKCMARIARFYKHESCGQCTPCREGSGWMWRMLERMARGEASREEVDMLLDVTKQIEGHTICAFGEGSAWPIQGLLRHFKKEVAKRNDFNPLVNKNRNIPYLVDQHLLEK

SEQ ID NO: 100852 - protein, 127 aa, Unknown
  Bacterial polypetide isolated from the Sargasso Sea
GTAGIVVINNDQDIIKCMARIARFYKHESCGQCTPCREGSGWMWRMLERMAKGEASREEVDMLMDVTKQIEGHTICAFGEGSAWPVQGLLRHFKKEIEKRNNFNPLINTGQKNPYLVDQHLLEKENA

SEQ ID NO: 100853 - protein, 247 aa, Unknown
  Bacterial polypetide isolated from the Sargasso Sea
MKETLLLTKHMRDFPENSHNIDVYEKNNGYSALKKVLKEDNPENVINEIKDSNIRGRGGAGFPTGVKWGFLAEDEDRYLVINGDESEPGTFKDRILLERDPHQLIEGVIITCFASNIKKAFIYIRGEYAKPARRVQEAVEQAYEKGYLGDNILGTNLSLDIVVHLGAGAYICGEETALLNSLEGKRGEPRLKPPYFPAVMGLYNKPTLVNNVETISSVPWIINNSGKEYAKLGVEGSTGTRIFIFQD

SEQ ID NO: 100854 - protein, 280 aa, Unknown
  Bacterial polypetide isolated from the Sargasso Sea
QACELADIEIPRFCYHERLSIAGNCRMCLVEMDKSRKPIASCAMPAAEGMNIKTNTQMVEKARKGVMEFLLANHPLDCPVCDQGGECDLQDQSLYYGVDKSRFSENKRFVSEKYMGPLIKTQMTRCIHCTRCVRFATEVAGVPEIGAVGRGENMEITTYLEKSMESELSGNVIDLCPVGALTSKPYAFSARPWELKKTESIDVLDAVGSNIRVDTYGWEVKRILPRLNEDINEEWISDKTRYSCDGLLKQRLDIPYIKKNNKLIKSSWDEAIEIIIKKLK

SEQ ID NO: 100855 - protein, 215 aa, Unknown
  Bacterial polypetide isolated from the Sargasso Sea
CEQAGVEVPRFCYHDKLSIAGNCRMCLVEVTPGPPKPQASCALPATNGQVISTKSKMVVDARKGVMEFLLINHPLDCPICDQGGECDLQDQAMEYGSGKSRFTENKRAVNEKSMGPLIKTHMTRCIHCTRCVRFSTEVAGVNDLGALGRGENMEITTYLEKSISSELSACVIDLCPVGALTSKPYAFNARPWELDKIESVDVMDAIGSNIRIDVR

SEQ ID NO: 100856 - protein, 166 aa, Unknown
  Bacterial polypetide isolated from the Sargasso Sea
MENLQAVIPGGSSMPLIPKDMCETIKMDFDSLVAAKSGLGTAGIVVINKDQDIIKCMARIAKFYKHESCGQCTPCREGVGWMWRILERTARGEATKDDINLLSDVTKQIEGHTICAFGEGSAWPVQGLLRHFRKEIDKRCFSEPTYKKKRKIPYLVDQHLLDRKDA

SEQ ID NO: 100857 - protein, 213 aa, Unknown
  Bacterial polypetide isolated from the Sargasso Sea
MLKLKVNEVEVEVEEGLTVLQACEKAGVEIPRFCYHEKLSIAGNCRMCLVEMEKSPKPIASCAMPAAEGMNIKTNTTLVEKARKGVMEFLLANHPLDCPVCDQGGECDLQDQSMYYGVDKSRFKENKRAVPEKNMGPLIKTQMTRCIHCTRCVRFATEVAGVQELGAIGRGEDMQITTYLEQSMQSELSANVVDLCPVGALTSKPYVFEARPW

SEQ ID NO: 100858 - protein, 274 aa, Unknown
  Bacterial polypetide isolated from the Sargasso Sea
MSTDAVEIPVVEIQVDGETVAAHPGELLIEACERAGTYIPRFCHHSRMKPVGMCRMCLVEVDTGRGSTLQPSCMLECAPGMIVDTESERTRKAQDGVLEFLLVNHPLDCPVCDKGGECPLQDQTMAFGPGESRFVEEKRHFEKPIPVNNNVQLDRERCILCDRCTRFAGEVAGDQLIHFMDRGGQTQVNTFPEQPFSSYFSGNTVQICPVGALTATPYRFKARPWDLDEVESTSTLDSVGSRIAVQSSHDRVLRFQGVDADAVNWGWLSDKERF

SEQ ID NO: 100859 - protein, 242 aa, Unknown
  Bacterial polypetide isolated from the Sargasso Sea
MLKDADRIFTNIYGLDDWRLEGARGRGDWDGTKEIMSKGRDWVVEEVKSSGLRGRGGAGFPSGLKWSFMPKEPTGRPHYLVVNADEGEPGTCKDRDMMRNDPHKLVEGCLLAGFGMGADAAYIYIRGEFYREAEHLQSAIDEAYEAGLIGKDACGSGYNFDVYVHRGAGAYICGEEMALIESLEGKKGMPRLKPPFPAVMGLYGCPTTVNNVETIAVVPTILRRGGDWFSSFGRENNTGTKV

SEQ ID NO: 100860 - protein, 238 aa, Unknown
  Bacterial polypetide isolated from the Sargasso Sea
MLKLKVNDIDVEVEEGTTVLQACEQAGAEIPRFCYHEKLSIAGNCRMCLVEMEKSPKPIASCAMPAAEGMVLKTNTEKVKKARKGVMEFLLANHPLDCPVCDQGGECDLQDQSMYYGIDKSRFKENKRYVPEKYMGPLIKTQMTRCIHCTRCIRFATEVAGVPELGAIGRGENMQITTYLEKAMESELSANVIDLCPVGALTSKPYVFEARPWELKKTETIDVMDAVGSNIRVDTYGW

SEQ ID NO: 100861 - protein, 294 aa, Unknown
  Bacterial polypetide isolated from the Sargasso Sea
LKKVLGMKPEEVVQTVKDSGLRGRGGAGFPTGLKWSFMSKGTGKPSYLIANADESEPGTCKDRELMLKDPHIFLEGMMIGCYAIGCHHGYIYIRGEFFPAIKSLNTAVEELYADGLLGPDPLGSGFDLDLTIHSGAGAYICGEESALLDSLEGKRGQPRVKPPFPAISGFNGCPTSVNNVETLACMPFILSDGGVDAFKSFGPENNSGTHLVSLSGHVRKPGVYELKMDVSMKDIIYSIGGGIRNGKKLKGVIPGGSSSSVMTADEVDVLYNFDELTNIDTMLGSAAMMVFDED

SEQ ID NO: 100862 - protein, 267 aa, Unknown
  Bacterial polypetide isolated from the Sargasso Sea
MINIFWRKTVPKITVNNKEVEFEEGMTVLQACELAGAEIPRFCYHERLSIAGNCRMCLVEMEKSAKPIASCAMPATDGMKIKTNTPFVDKARKGVMEFLLANHPLDCPVCDQGGECDLQDQSLFYGFDNSRYKENKRQVKEKYMGPLIKTQMTRCIHCTRCIRFATEVAGIPELGAIGRGEDTEITTYLEKSMESELSANVIDLCPVGALTSKPYAFEARPWDLKKTETIDVMDAIGSNIRVDTYGWEVKRVLPRVNEDINEEWISD

SEQ ID NO: 100863 - protein, 104 aa, Unknown
  Bacterial polypetide isolated from the Sargasso Sea
DIGRWIVSGDFAAQWSLRFDTMTAVMLIVVTGVSSMVHVYSIGYMSHDNGRARFMAYLSLFTFAMLMLVTADNLVQLFFGWEGVGVASYLLIGFWYKKESAPSA

SEQ ID NO: 100864 - protein, 214 aa, Unknown
  Bacterial polypetide isolated from the Sargasso Sea
MPKINIDNKEIEFENGMTVMQACELAGSEIPRFCYHDKLSIAGNCRMCLVEMEKSPKPIASCAMPAGEGMKIKTNSKLVKKARKGVMEFLLINHPLDCPICDQGGECDLQDQALYYGLDKSRYEENKRAVKNKYMGPLVSTIMTRCIHCTRCVRFATEVAGVNDLGLLGRGEKAEITSYLEKTIDSELSGNVIDLCPVGALTSKPYAFKSRPWE

SEQ ID NO: 100865 - protein, 161 aa, Unknown
  Bacterial polypetide isolated from the Sargasso Sea
MVYLIVFLPLLGSIIAGFFGSKLGDKFSLYLTSSLLIISMVLGWYEFFQLSTNHLDKTYPLMTWINVGDFNVVWSLRYDMLSAVMIIVITTVSAMVHVYSIGYMSHDNSKPRFMSYLSLFTFAMLMLVTADNLIQLFFGWEGVGVASYLLIGFWYHKPTAH

SEQ ID NO: 100866 - protein, 279 aa, Unknown
  Bacterial polypetide isolated from the Sargasso Sea
GVEIPRFCYHEKLSIAGNCRMCLVEMEKSPKPIASCAMPAAEGMNIKTNTAFVEKARKGVMEFLLANHPLDCPVCDQGGECDLQDQSMFYGVDKSRFKENKRSVPEKNMGPLIKTQMTRCIHCTRCVRFATEVAGVPEIGAIGRGEDMQITTYLEQSVQSELSGNVIDLCPVGALTSKPYVFEARPWELKKTESIDVMDAIGSNIRVDTYGWEVKRVLPLINEDINEEWISDKTRYACDGLSYQRLDTPFIKYNGKFEKASWEETFKIIKSKMKDTSND

SEQ ID NO: 100867 - protein, 203 aa, Unknown
  Bacterial polypetide isolated from the Sargasso Sea
MGTKIYCISGNVNYPCNVEEEMGISLKDLIEKHAGGVIGGWDNLKAVIPGGSSMPLLPKNVCETIKMDFDSLVEQKSGLGTAGIVVINKDQDIIKCMARIARFYKHESCGQCTPCREGSGWMWRMLERMAKGEASKDEVDMLMDVTKQIEGHTICAFGEGSAWPVQGLLRHFKKEVAKRNNFDPLVNTNKKIPYLVDQHLLDK

SEQ ID NO: 100868 - protein, 199 aa, Unknown
  Bacterial polypetide isolated from the Sargasso Sea
IFCISGNVNKPCNVEEEMGISLKTLIDTHAGGVVGGWDNLKAVIPGGSSMPLLPKNICETITMDFDSLVKEKSGLGTAGIVVINKDQDIIKCFARIARFYKHESCGQCTPCREGSGWMWRMLERMTKGEASKDEVNMLMDVTKQIEGHTICAFGEGSAWPVQGLLRHFKKEVEKRNNFNPLVNENKNIPYLVDQHLLEK

SEQ ID NO: 100869 - protein, 200 aa, Unknown
  Bacterial polypetide isolated from the Sargasso Sea
FCISGNVNNPCNVEEEMNIPLKELIEVHAGGVIGGWDNLQAVIPGGSSMPLIPKDKCETLTMDFDSLMAEKSGLGTAGVVVINKDQDIIKCMARIARFYKHESCGQCTPCREGSGWMWRMLERMAKGEASKDEIDMLGDVTKQIEGHTICAFGEGSSWPVQGLLRHFKDEIKKRNKFDPIVKENKNIPYLVDQHLLDKNA

SEQ ID NO: 100870 - protein, 176 aa, Unknown
  Bacterial polypetide isolated from the Sargasso Sea
RGAKWFSSIGKPKNTGTKIFCISGNVNSPCNVEEEMGIPLKDLIEKHAGGVVGGWDNLQAVIPGGSSMPLLPKKICDTITMDFDSLIENKSGLGTAGVVVINKDQDIVECMARIARFYKHESCGQCTPCREGSGWMWRILDRVVKRKATFSDVELLSDVTKQIEGHTICAFGEGSA

SEQ ID NO: 100871 - protein, 189 aa, Unknown
  Bacterial polypetide isolated from the Sargasso Sea
MGTKIFSISGHVNNPCNVEEEMGIGLKELIETHAGGVIGGWDNLLAVIPGGASVPLIPKSICDTVKMDFDSLKEVQSGLGTAAVIVMNKSTDIVDAICRLSHFYKHESCGQCTPCREGTGWMFRMMEKMVKGDAEVNDIDKLLDVTKQIEGHTICALGDAAAWPIQGLMRHFRPEVERRIKEYRISEVA

SEQ ID NO: 100872 - protein, 220 aa, Unknown
  Bacterial polypetide isolated from the Sargasso Sea
TTVTNVETIAVAPTIIIRGASWFNSIGRENNTGTKIFSISGHVNNPCNVEEEMGIGLKELIETHAGGVIGGWDNLLAVIPGGASVPLIPKSICDTVKMDFDSLKEVQSGLGTAAVIVMNKSTDIVDAISRLSHFYKHESCGQCTPCREGTGWMFRMMEKMVKGDAEVNDIDKLLDVTKQIEGHTICALGDAAAWPIQGLMRHFRPEVERRIKEYRISEVA

SEQ ID NO: 100873 - protein, 191 aa, Unknown
  Bacterial polypetide isolated from the Sargasso Sea
IQEQSYFVSLGHVNSPCVVEEEMGIPLKDLLELHAGGVIGGWDNLLAVIPGGSSTPLIPNTICEDVIMDFDSLKNVGTGLGTAGVIVMDKSTDIIKAIWRLSKFYKHESCGQCTPCREGTGWVMRSMEKLIHGNADIKDIDILKNVCDQIEGHSICALGDAAAWPVQGLIKHFRHEIENRINNYNILKVAE

SEQ ID NO: 100874 - protein, 208 aa, Unknown
  Bacterial polypetide isolated from the Sargasso Sea
MEKKNKTLSLNFGPQHPAAHGVLRLILQLDGEVVEKADPHIGLLHRGTEKLIEHKTYTQALPYFDRLDYVAPMNQEHAFALATEKLLNIEIPIRAKYIRVMFCEIGRILSHILNITTQALDVGALTPSLWGFEERETLMTFYERASGSRLHANYFRTGGVHQDLPTKLIDDISKFCESFPNIINDLEELLTDNRIFKQRNVEIGIVSK

SEQ ID NO: 100875 - protein, 180 aa, Unknown
  Bacterial polypetide isolated from the Sargasso Sea
MLKDQDRIFKNLYNDMGSDVDSSQKRGDWVNTKDLTEKGRDWIINEIKDSELRGRGGAGFPTGLKWSFAPKEIGSRPHYLVINADESEPGTCKDRDILRFEPHKLIEGCLIASYAVQAHVCYIYIRGEYFIDGQKLQTAIDEAYEKNLLGKNAAGTGWDLDIYIHYGAGAYICGEETALL

SEQ ID NO: 100876 - protein, 84 aa, Unknown
  Bacterial polypetide isolated from the Sargasso Sea
LTNKMAPAIRKVYDQMPEPRYVISMGSCANGGGYYHYSYSVVRGCDRIVPVDVYVPGCPPTAEALLYGILQLQAKIKRPRVIQR

SEQ ID NO: 100877 - protein, 74 aa, Unknown
  Bacterial polypetide isolated from the Sargasso Sea
MYTPDNILTTTIDKAVRWSRTQSMWPVTFGLACCAIEMMAAGSAKYDLARYGMEVFRASPRQADLMIVAGRAHK

SEQ ID NO: 100878 - protein, 95 aa, Unknown
  Bacterial polypetide isolated from the Sargasso Sea
MAKETKTLNLNFGPQHPAAHGVLRLILQLDGEIVEKADPHIGLLHRGTEKLIENKTYTQAVPYFDRLDYVAPMNQEHAFALAIEKILKIEVPIRA

SEQ ID NO: 100879 - protein, 167 aa, Unknown
  Bacterial polypetide isolated from the Sargasso Sea
VAGTTCKQLYLGGSSMPLIPKEKCETLTMDFDSLVAEKSGLGTAGVVVINKDQDIIKCMARIARFYKHESCGQCTPCREGSGWMWRMLERMARGEASKDEVEMLGDVTKQIEGHTICAFGEGSSWPVQGLLRHFKDEIKKRNKFDPIVKENKNIPYLVDQHLMDKNA

SEQ ID NO: 100880 - protein, 231 aa, Unknown
  Bacterial polypetide isolated from the Sargasso Sea
MAKETKTLNLNFGPQHPAAHGVLRLILQLDGEIVQKADPHIGLLHRGTEKLIENKTYTQAVPYFDRLDYVAPMNQEHAFALAIEKILKIEVPIRAQYIRVMFCEIGRILSHILNVTTQAMDVGALTPTLWGFEEREILMGFYEKVSGSRLHANYFRAGGVHQDLPKGLDKEIGKFCERFPKIINDLELLLTDNRIFKQRNVDIGVVSKQDALDYSFSGVMLRGSGVPWDLR

SEQ ID NO: 100881 - protein, 176 aa, Unknown
  Bacterial polypetide isolated from the Sargasso Sea
GGVIGGWENLKAIIPGGSSMPMLPKEICEIIKMDFDSLVEQKSGLGTAGIVVINKDQDIIQCMARIARFYKHESCGQCTPCREGSGWMWRMLERMAKGEASREEVDMLMDVTKQIEGHTICAFGEGSSWPVQGLLRHFKKEIVKRNNFNPLVNKDNKIPYLVDQHLLENDNAEIKS

SEQ ID NO: 100882 - protein, 206 aa, Unknown
  Bacterial polypetide isolated from the Sargasso Sea
MDLKYICISGNVNNPCNVEEEMGIPLKELIEKHAGGVIGGWDNLKAVIPGGSSMPLLPKETCETIKMDFDACVENKTGLGTAGIVVINKDQDIIKCMARIARFYKHESCGQCTPCREGSGWMWRMLERMAKGEATRDEVDMLLDVTKQIEGHTICAFGEGSSWPVQGLIRNFKDEIIERNKFDPIVKKQKDIPYLVDQHLLEKENA

SEQ ID NO: 100883 - protein, 294 aa, Unknown
  Bacterial polypetide isolated from the Sargasso Sea
EFENGMTVMQACELAGTEIPRFCYHEKLSIAGNCRMCLVEMEKAPKPIASCAMPAADGMIIKTNTDIVKKARKGVMEFLLINHPLDCPICDQGGECDLQDQAMYYGFDKTRYEENKRAVQNKNMGPLIKTIMTRCIHCTRCVRFSTEVAGVDDIGLLGRGENAEITTYLEKTIASELSGNVIDLCPVGALTSKPYAFKSRPWELTKTETFDVFDGLGSSIRIDTRGKKVLRALPRINEEINDEWISDKSRFAIDGLSNQRLDSVYLKSNGNLKKSSWDDVFTNIKDQIITRGKK

SEQ ID NO: 100884 - protein, 208 aa, Unknown
  Bacterial polypetide isolated from the Sargasso Sea
MAVAQSGSTSLELPENVVVSRLDELASWCRKNSLWPMPFATACCGIELMATGAAKHDLARFGAEVFRFSPRQCDLMIVAGRVVMKMLPVLQRIWQQMHEPKWCISMGACASTGGVFDTYAVVQGIDRFIPVDMYVPGCPPRPEQLIQAIIDLQDKIQQEGTLKGREFNTRQRQDQKRALVECPEILSLDASRNPNLQRELSNSVTNPH

SEQ ID NO: 100885 - protein, 207 aa, Unknown
  Bacterial polypetide isolated from the Sargasso Sea
NTGTKIFCISGNVNAPCNVEEEMGIPLKDLIEKHAGGVVGGWDNLQAVIPGGSSMPLLPKKVCDTLTMDFDSLIENKSGLGTAGIVVINKDQDIVECMARIARFYKHESCGQCTPCREGSGWMWRILDRVVKRKSTFSDIDLLSDVTKQIEGHTICAFGEGSAWPVQGLLRHFRKEVESRCREEPLIKKKLNNPYLVDQHLLENKNA

SEQ ID NO: 100886 - protein, 71 aa, Unknown
  Bacterial polypetide isolated from the Sargasso Sea
MAKEIKKLNLNFGPQHPAAHGVLRLILQLDGEVVEKADPHIGLLHRGTEKLIENKTYMQAVPYFDRLDYVR

SEQ ID NO: 100887 - protein, 269 aa, Unknown
  Bacterial polypetide isolated from the Sargasso Sea
IAGNCRMCLVELEKSPKPIASCAMPAADGMKIKTNTPFVDKARKGVMEFLLANHPLDCPVCDQGGECDLQDQSLFYGFDKSRFKENKRQVGEKNMGPLIKTQMTRCIHCTRCIRFATEVAGVPELGAIGRGEDMEITTYLERSMESELSGNVIDLCPVGALTSKPYAFEARPWDLKKTETIDVMDAVGSNIRIDTYGWEVKRVLPRINEDINEEWISDKTRYACDGLLKQRLDVPYIRENGKLKKASWDEAFKLLIHKLKFFKPDEIAG

SEQ ID NO: 100888 - protein, 110 aa, Unknown
  Bacterial polypetide isolated from the Sargasso Sea
MARIAKFYKHESCGQCTPCREGSGWMWRILERAAKGDATKEDINLLSEVTKQIEGHTICAFGEGSAWPVQGLLRHFRSEIDKRCFNEPLIKKKRKIPYLVDQHLLEGKDA

SEQ ID NO: 100889 - protein, 162 aa, Unknown
  Bacterial polypetide isolated from the Sargasso Sea
KDLIEKHAGGVIGGWENLLAVIPGGASVPLLPKSICDTVKMDFDSLKEVQSGLGTAAVIVMNKSTDIVEAIARLSHFYKHESCGQCTPCREGTGWMYRMMEKMIHGNVEHQDIDKILDVTKQIEGHTICALGDAAAWPIQGLFRHFRPEIEKRIQERNRRVA

SEQ ID NO: 100890 - protein, 66 aa, Unknown
  Bacterial polypetide isolated from the Sargasso Sea
MVKEKKTLNLNFGPQHPAAHGVLRLILQLDGEVVEKADPHIGLLHRGTEKLIENKTYIQAVPYFDR

SEQ ID NO: 100891 - protein, 275 aa, Unknown
  Bacterial polypetide isolated from the Sargasso Sea
EVEVEEGLTVLQACEKAGVEIPRFCYHEKLSIAGNCRMCLVEMEKSPKPIASCAMPAAEGMNIKTNTALVEKARKGVMEFLLANHPLDCPVCDQGGECDLQDQSMYYGVDKSRFKENKRAVPEKNMGPLIKTQMTRCIHCTRCVRFATEVAGVPELGAIGRGEDMQITTYLEQSMQSELSANVVDLCPVGALTSKPYVFEARPWELKKTETIDVMDAIGSNVRVDTYDWEVKRVLPIINEDINEEWISDKTRYACDGLLHQRLDTPFIKYNGKFE

SEQ ID NO: 100892 - protein, 117 aa, Unknown
  Bacterial polypetide isolated from the Sargasso Sea
DQDIIKCMARIARFYKHESCGQCTPCREGCGWMWRMLERMAKGDSTYKEIDLLQDVTKQIEGHTICAFGEGSAWPVQGLLRHFRKEIEKRSHEEPLVKKKTNIPYLIDQHLLEKDSA

SEQ ID NO: 100893 - protein, 248 aa, Unknown
  Bacterial polypetide isolated from the Sargasso Sea
PFPALIGLYGCPTIINNVETIAVVPTILRRGSKWFANLGKSKNTGTKIFCISGNVNKPCNVEEEMGISLKELIEIHAGGVEGGWDNLQAVIPGGSSMPLLPKEICDTINMDFDSLIAEKSGLGTAGIVVINKDQDIIKCMARIARFYKHESCGQCTPCREGSGWMWRMLERMARGEATRDEVDMLMDVTKQIEGHTICAFGEGSSWPVQGLLRHFKNEIKKRNKFDPIVKEDKNIPYLVDQHLLDKNV

SEQ ID NO: 100894 - protein, 277 aa, Unknown
  Bacterial polypetide isolated from the Sargasso Sea
MAKETKKINLNFGPQHPAAHGVLRLILQLDGEVVEKADPHIGLLHRGTEKLIENKTYIQAVPYFDRLDYVAPMNQEHAFALAIERILKIDVPIRAQYLRVIFCEIGRILSHILNVTTQAMDVGALTPTLWGFEERETLMGFYEKVSGSRLHANYFRAGGVHQDLPKGLDLEISKFCEKFPKIIDDLETLLTDNRIFKQRNVDIGVVSKQDALDYSFSGVMLRGSGVPWDLRKSQPYDCYDQLKFKIPIGKNGDCYDRYLCRIEEMRESVYIIKSCLA

SEQ ID NO: 100895 - protein, 113 aa, Unknown
  Bacterial polypetide isolated from the Sargasso Sea
MGSGGVIIMDETTCLVKALKRLMKFYMHESCGQCTPCREGSGWVYRLVSKIESGQGTPQDIDELGRVAKSIEGRTICVFGEAIAWPVAGMLKHFRHEFEYLAEHGRSMVAQAQ

SEQ ID NO: 100896 - protein, 283 aa, Unknown
  Bacterial polypetide isolated from the Sargasso Sea
MLKLKVNDIDVEVEEGLTVLQACEKAGVEIPRFCYHEKLSIAGNCRMCLVEMEKSPKPIASCAMPAAEGMIIKTNTPKIEKSRKGVMEFLLANHPLDCPVCDQGGECDLQDQSMFYGIDKSRFKENKRAVPDKNMGPLIKTQMTRCIHCTRCIRFATEIAGVPELGAIGRGEDMQITTYLEKSIQSELSGNVIDLCPVGALTSKPYVFEARPWELKKTETIDVMDAVGSNIRVDTYDWEVKRVLPIINEDINEEWISDKTRYACDGLLNQRLDTPFIKYNNKF

SEQ ID NO: 100897 - protein, 169 aa, Unknown
  Bacterial polypetide isolated from the Sargasso Sea
MRDNPEDSHLIDSYEKNNGYSTAKKTILESSPEKILEEIKASNIRGRGGAGFPTGVKWGFLAEDEDRYLVINADESEPGTFKDRILLERDPHQLLEGIIITCFSANIKEAFIYIRGEYAKPARRVQQAVEQAYQKGYLGKNIFGSEINLDVVVHLGAGAYICGEETALL

SEQ ID NO: 100898 - protein, 80 aa, Unknown
  Bacterial polypetide isolated from the Sargasso Sea
MAPALRKVYDQMPEPRYVVSMGSCANGGGYYHYSYSVVRGCDKIVPVDIYIPGCPPSAEALLYGILQLQKKIRREGSLKR

SEQ ID NO: 100899 - protein, 272 aa, Unknown
  Bacterial polypetide isolated from the Sargasso Sea
MPKIIINGKEIEFEPGMTVLQACELADVEIPRFCYHERLSIAGNCRMCLVEMEKSNKPIASCAMPASEGMNIKTNTNLVEKARKGVMEFLLANHPLDCPVCDQGGECDLQDQSLYYGVDKSRFSENKRYVSEKYMGPLIKTQMTRCIHCTRCVRFATEIAGVPEIGAVGRGENMEITTYLEKSMESELSGNVIDLCPVGALTSKPYAFSARPWELKKTESIDVLDAVGSNIRVDTYGWEVKRILPRLNEDINEEWISDKTRYSCDGLLKPKT

SEQ ID NO: 100900 - protein, 297 aa, Unknown
  Bacterial polypetide isolated from the Sargasso Sea
RFCYHERLSIAGNCRMCLVEMEKSPKPIASCAMPAADGMKIKTNTPFVDKARKGVMEFLLANHPLDCPVCDQGGECDLQDQSLFYGFDHSRYTENKRQVKEKYMGPLIKTQMTRCIHCTRCIRFAEEVAGTTELGAIGRGEDMEITTYLEKSMESELSANVIDLCPVGALTSKPYAFEARPWELKKTETIDVMDGVGSNIRVDTYGWEVKRVLPRVNEDINEEWISDKTRYACDGLSKQRLDTPLIRKNGRLQKSTWEEALKFLITKLKSFKSNEVAGIVGDLADLEMIYSFKVFFN

SEQ ID NO: 100901 - protein, 263 aa, Unknown
  Bacterial polypetide isolated from the Sargasso Sea
LTVLQACEKAGAEIPRFCYHEKLSIAGNCRMCLVEMEKSPKPIASCAMPAAEGMNIKTNTPFVEKARKGVMEFLLANHPLDCPVCDQGGECDLQDQSMFYGVDKSRFKENKRSVPEKHMGPLIKTQMTRCIHCTRCVRFATEVAGVSELGAIGRGEDMQITTYLEQSMQSELSANVIDLCPVGALTSKPYVFEARPWELKKTETVDVMDAVGSNVRVDTYDWEVKRVLPIINEDINEEWISDKTRYACDGLLNQRLDTPFIKY

SEQ ID NO: 100902 - protein, 185 aa, Unknown
  Bacterial polypetide isolated from the Sargasso Sea
KKKVDLINTMKSTHVAPFPEPIINNDDLDKNVVVSSVDQLLNWARKSSLFPLQFGLACCAFEMIATAMSRFDISRFGMEVFRATPRQADLMIVAGTVTWKMAVPLRRLYDQMAEPKWVISMGVCATSGGPYYESYSVVPGVNHIVPVDVYVPGCPPRPDALLYGIMQLHEKIKKYSLTGERAGEV

SEQ ID NO: 100903 - protein, 79 aa, Unknown
  Bacterial polypetide isolated from the Sargasso Sea
ATALRKVYDQMPEPRWVISMGSCANGGGYYHYSYSVVRGCDRIVPVDIYVPGCPPTAEALVYGILQLQKKIKRQNSQKK

SEQ ID NO: 100904 - protein, 316 aa, Unknown
  Bacterial polypetide isolated from the Sargasso Sea
MPTITIDNKKVEFENGMTVMQACELAGAEIPRFCYHEKLSIAGNCRMCLVEMEKGPPKPIASCAMPAGDGMVIKTDSEMVKKARKGVMEFLLINHPLDCPICDQGGECDLQDQALHYGFDKSRYEENKRAVKNKHMGPLVSTIMTRCIHCTRCVRFSTEIAGVDDLGLLGRGENAEITTYLEKTIDSELSGNVIDLCPVGALTSKPYSFKSRPWELSKTETHDVLDGIGSSIRVDTRGKQVLRVLPRINEDTNEEWINDKTRFAIDGLSRQRLDKVYIREDNKLNVSDWDNALDKIKNEINKRGKDKTITLSGKFT

SEQ ID NO: 100905 - protein, 223 aa, Unknown
  Bacterial polypetide isolated from the Sargasso Sea
MLRDSDRIFTNIYGYDDPFIEGAKSRGDWDATKKLIEMGREAIIENVKDSGLRGRGGAGFSTGLKWSFMPKESDGRPHYLVVNADEGEPGTCKDREIMRHDPHKLIEGCLIASFAMGANDAYIYVRGEFYREIEALQRAVDEAYDAGFIGKDACGAGFDFNLYIHRGSGAYICGEETALIESLEGKKGQPRLKPPFPANSGLYGCPTTVNNVESIAVVPTILR

SEQ ID NO: 100906 - protein, 287 aa, Unknown
  Bacterial polypetide isolated from the Sargasso Sea
MLKLKVNNLDIEVEEGLTVLQACEKAGVEIPRFCYHEKLSIAGNCRMCLVEIEKSPKPVASCAMPVSEGMNIKTNTSLVEKSRKGVMEFLLANHPLDCPVCDQGGECDLQDQSMFYGIDKSRYNENKRSVPEKNMGPLIKTQMTRCIHCTRCIRFATEIAGVPELGAIGRGENMEITTYLEKSMESELSANVIDLCPVGALTSKPYAFEARPWELKKTETIDVMDAVGSNIRVDTYGWEVKRILPKINEDINEEWISDKTRYACDGLLNQRLDTPFVKYKNGKLKSF

SEQ ID NO: 100907 - protein, 186 aa, Unknown
  Bacterial polypetide isolated from the Sargasso Sea
MLKPENKIFKNLYNDLGWEIEAALNRDDWKDTKNIISKGREWIINEVKTSELRGRGGAGFSTGLKWSFAPKEVGSRPHYLVINADESEPGTCKDRDILRFEPQKLIEGCLIAGYAVNAHVCYIYIRGEYYKEGQRLQSAINQAYEKKYLGKNACGSGWDFDIHIHYGAGAYICGEETALLESIEGK

SEQ ID NO: 100908 - protein, 148 aa, Unknown
  Bacterial polypetide isolated from the Sargasso Sea
KKICDTITMDFDSLIENKSGLGTAGVVVINKDQDIVKCMARIARFYKHESCGQCTPCREGSGWMWRILDRVEKRKATFSDIELLSDVTKQIEGHTICAFGEGSAWPVQGLLRHFKKEVESRCREEPLIKKKLNNPYLVDQHLLENKNA

SEQ ID NO: 100909 - protein, 177 aa, Unknown
  Bacterial polypetide isolated from the Sargasso Sea
MVKQTKKLNLNFGPQHPAAHGVLRLILQLDGEVVEKADPHIGLLHRGTEKLIENKTYTQAVPYFDRLDYVAPMNQEHAFALAIEKILKINVPIRAQYLRVIFCEIGRILSHILNVTTQAMDVGALTPTLWGFEEREILMGFYEKVSGSRLHANYFRAGGVHQDLPKGLDSEISEFCQ

SEQ ID NO: 100910 - protein, 76 aa, Unknown
  Bacterial polypetide isolated from the Sargasso Sea
LRKVYDQMPEPRYVISMGSCANGGGYYHYSYSVVRGCDRIVPVDIYVPGCPPSAEALLYGIMQLQKKIRNNGSLAR

SEQ ID NO: 100911 - protein, 264 aa, Unknown
  Bacterial polypetide isolated from the Sargasso Sea
MLKLKVNEIEIEVEEGLTVLQACEKAGVEIPRFCYHEKLSIAGNCRMCLVEMEKSPKPIASCAMPATEGMNIKTNTALVEKARKGVMEFLLANHPLDCPVCDQGGECDLQDQSMYYGVDKSRFKENKRSVPEKNMGPLIKTQMTRCIHCTRCVRFATEVAGVPELGAIGRGEDMQITTYLEQSMQSELSANVVDLCPVGALTSKPYVFEARPWELKKTETIDVMDAIGSNVRVDTYDWEVKRVLPIINEDINEEWISDKTRYAC

SEQ ID NO: 100912 - protein, 227 aa, Unknown
  Bacterial polypetide isolated from the Sargasso Sea
LIEGCLISSFAVQAHVCYIYIRGEYFNEGQILQKAINEAYEKKLIGKNSCDTGWDFDIFIHYGAGAYICGEETALLESLEGNKGQPRLKPPFPALIGLYGCPTIVNNVETIAVVPTILKKGSKWFSSIGRPKNTGTKIFCISGNVNNPCNVEEQMGVPLKELIDSHAGGVVGGWDNLQAVIPGGSSMPMLPKKTCETIKMDFDSLIENKSGLGTAGVIVINKDQDII

SEQ ID NO: 100913 - protein, 292 aa, Unknown
  Bacterial polypetide isolated from the Sargasso Sea
ENGMTVMQACEQAGTEIPRFCYHEKLSIAGNCRMCLVEMEKAPKPIASCAMPAADGMVIKTNTETVKKARKGVMEFLLINHPLDCPICDQGGECDLQDQAMYYGFDKTRYEENKRAVQNKNMGPLVKTIMTRCIHCTRCVRFSTEVAGVDDIGLLGRGENAEITTYLEKTIESELSGNVIDLCPVGALTSKPYAFKSRPWELTKTETFDVFDGLGSSIRIDTRGKKVLRALPRINEEINEEWISDKSRFAVDGLSSQRLDSVYSKSNKKLQKSSWDEAFELIKKEITKRGKE

SEQ ID NO: 100914 - protein, 188 aa, Unknown
  Bacterial polypetide isolated from the Sargasso Sea
KIFCISGNVNSPCNVEEEMGIPLKELIDKHAGGVVGGWENLQAVIPGGSSMPLLTKKICDTITMDFDSLIENKSGLGTAGIVVINKDQDIIACMARIARFYKHESCGQCTPCREGAGWMYRILDRVVKRKATFSDIDLLSDVTKQIEGHTICAFGEGSAWPVQGLLRHFRKEIDSRCREEPLIKKKNK

SEQ ID NO: 100915 - protein, 222 aa, Unknown
  Bacterial polypetide isolated from the Sargasso Sea
MLKLKVNDIDVEVEEGLTVLQACEKAGVEIPRFCYHEKLSIAGNCRMCLVEMEKSPKPIASCAMPAAEGMNIKTNTSLVEKARKGVMEFLLANHPLDCPVCDQGGECDLQDQSMFYGVDKSRFKENKRSVPEKNMGPLIKTQMTRCIHCTRCVRFATEVAGVPELGAIGRGEDMQITTYLEQSMQSELSANVVDLCPVGALTSKPYVFEARPWELKRQKQLM

SEQ ID NO: 100916 - protein, 101 aa, Unknown
  Bacterial polypetide isolated from the Sargasso Sea
MGLLENKFQDNVVVASLDKILGWARSTSPWYFQFGLACCAIEMMASAASRHDLERIGMMPRSSPRQADVMIVAGTVTMKMALRVKKLYEQMADPKYVISMG

SEQ ID NO: 100917 - protein, 241 aa, Unknown
  Bacterial polypetide isolated from the Sargasso Sea
MKLKVNDIDIEVEEGLTVLQACEQAGAEIPRFCYHEKLSIAGNCRMCLVEMEKSPKPIASCAMPAANGMVIKTNTEKVEKSRKGVMEFLLANHPLDCPVCDQGGECDLQDQSMFYGIDKSRFKENKRYVPEKYMGPLIKTQMTRCIHCTRCIRFATEVAGVPELGAIGRGENMEITTYLERSMESEMSANVIDLCPVGALTSKPYVFEARPWELKKTETIDVMDAVGSNIRVDTYGWEVKR

SEQ ID NO: 100918 - protein, 81 aa, Unknown
  Bacterial polypetide isolated from the Sargasso Sea
KMAPALRKVYDQMPEPRYVISMGSCANGGGYYHYSYSVVRGCDRIVPVDVYVPGCPPSAEALLYGIMQLQKKIRKKGSIER

SEQ ID NO: 100919 - protein, 136 aa, Unknown
  Bacterial polypetide isolated from the Sargasso Sea
DSLVNEKSGLGTAGIVVINKDQDIIKCMARIARFYKHESCGQCTPCREGSGWMWRMLERMAKGEATKDEVDMLGDVTNQIAGHTICAFGEGSSWPVQGLLRHFKKEIKERNKFDPIVKDNKNIPYLVDQHLLDKNA

SEQ ID NO: 100920 - protein, 193 aa, Unknown
  Bacterial polypetide isolated from the Sargasso Sea
LIGLYGCPTIINNVETIAVVPTILRRGAKWFASLGREKNTGTKIFCISGNVNNPCNVEEEMSIPLKELIEVHAGGVIGGWENLQAVIPGGSSMPLIPKERCETLKMDFDACVEEKSGLGTAGIVVINKDQDIIKCMARIARFYKHESCGQCTPCREGSGWMWRMLERMAKGEATKDEVDMLGDVTNQIAGHTI

SEQ ID NO: 100921 - protein, 183 aa, Unknown
  Bacterial polypetide isolated from the Sargasso Sea
MLEDKDRIFKNLYKDFGVDVLSSKKRGDWLNVKEICLKGREWIINEIKSSELRGRGGAGFPTGLKWSFAPKEIGSRPHYLVINADESEPGTCKDRDILRFEPHKLIEGCLITSYAVNAHICYIYIRGEYFNEGEKLQKAINEAYEKKLIGKNASDTGWDLDIYIHYGAGAYICGEETALLESL

SEQ ID NO: 100922 - protein, 324 aa, Unknown
  Bacterial polypetide isolated from the Sargasso Sea
MLYDLFGIDERTRVHRSDQPSADFTVVYQLLSIKRNDDLRIKVALQESDLNLPSIIDVWPNANWYEREAWDMFGVVFKGHPTLFRILLPPTWEGHALRKDHPARATEMGPFEMGDERVEREQEALRFRPEDWGMETKDEDNEYMFLNLGPNHPSVHGVFRIALQLDGEVIKDSVPDIGYHHRGAEKMGERQTWHTYIPYTDRIDYLAGVMNNLAYVQAVELLAGIKVPDRAKVIRIMLAELFRISSHLVFYGTFVQDVGQMSPVFYMFADRERLFGIVEAITGGRMHPAWFRIGGVTADLSNGWEKLIRDFIDSMPARLDHYDK

SEQ ID NO: 100923 - protein, 621 aa, Unknown
  Bacterial polypetide isolated from the Sargasso Sea
MPKLKVNDTEVEVEDGLTVLQACEKAGVEIPRFCYHEKLSIAGNCRMCLVEMEKSPKPIASCAMPAAEGMNIKTNTPFVEKARKGVMEFLLANHPLDCPVCDQGGECDLQDQSMFYGIDKSRYKENKRSVPEKYMGPLIKTQMTRCIHCTRCVRFATEVAGVSELGAIGRGEDMQITTYLEQSMQSELSANVIDLCPVGALTSKPYVFEARPWELKKTETIDVMDAVGSNVRVDTYDWEVKRVLPLINEDINEEWISDKTRYACDGLLNQRLDIPLIKYNGKFENASWDEVFKIIKSKFENSSKEKICGFVGDLINMETGFIFKEFFDRTLSNHNYDSRSDNRYIDFKDRENYIFNSSINGIEEADLIFLIGANPRYEATILNARIRKAFVNNNTKIISLNDVGDLTYPYESLDGQTQSIKNIFEGSDEISKKIINAKNPMIIIGESLLRLNLAENLFNLIKDFLNKNNKFTDNWNPLNILSCDASTVGNFDLGIINNDINLIKDLKSNKFEIVYLVGQDNLEFNKKDEFIIYQGSHGDKGAEIADIILPGSAYTEQDGHFTNLEGKIQKAYKASYPPGNAKEDWQIINELAEIMNNRKLFNDKDELESSMFNFIKLQKEK

SEQ ID NO: 100924 - protein, 777 aa, Unknown
  Bacterial polypetide isolated from the Sargasso Sea
MVELEIDGKKVEVPEGSMVIQAAHKVDTYIPHFCYHKKLSIAANCRMCLVDVEKMPKAVPACATPVSAGMIVRTKSEKAVKGQQAVMEFLLINHPLDCPICDQGGECQLQDLAVGYGKSSSRYSEEKRVVFHKNVGPLISMEEMSRCIHCTRCVRFGQEVAGVMELGMLGRGEHSEITSFVGKTVDSELSGNMIDLCPVGALTSKPFRYSARTWELSRRKSVSPHDSVGANLVVQVKNNRVMRVLPFENESINECWISDKDRFSYEALNSPERLTQPMLKQGAKWVETDWQTALEYVVKGLKGIKGDHGASALAALGSAHSTVEELFLLKQLAQAVGTPNVDFRLRQSDFSAPVNGAPWLGTAIADLSNLDSALVIGSDLRRDHPLFAARLRQAAKSGTKLTLVQATNDDALIPQAQRVVAAPSAWLDALAGIAGAVSEANGAALPEAFAGTQPTDTDKQVAKSLATGEHRVVLLGNAAVRHPDFAAIHAAAQWIADATGATLGFLTEAANTVGAHLVNALPGEGGLNAREVFEQPRKGYVLLNVEPEFDTANPVQALAALKQAEMVVVMSPFQIGAEYADVLLPIAPFTETAGTFVNAEGTVQTFNGVVRPLGDTRPAWKVLRVLGSLLGVPGFEFDTSEEVRTAALGDGEIKSRLSNKTGVTVARGNAAKATEGKFERIADVPIYHADAIVRRAESLHLTAAARAANSVGLPAALFDKLGLKEGDAVRVRQGEQSVQLPAVRDANLAETVVRVSAATPAGAALGSLFGELVVEKA

SEQ ID NO: 100925 - protein, 241 aa, Unknown
  Bacterial polypetide isolated from the Sargasso Sea
MTEIQQDSGLITVTIDGQEVKVKSGEVLIDACEEVGVDIPRFCYHKRMSQVGMCRMCIVEVDTGRGPSLQPSCMMDVSEGMIIDTQSEEIKKVQDGVLEFLLLNHPLDCPVCDKGGECPLQDQTMAYGPGETRFVEEKRHFEKPIPISDNVYLDRERCILCDRCTRFADEVVGDPLIQFIDRGNSTQVNTFPEDPFASYFSGNIVQLCPVGALTAKPYRFKARPWDLEEIESTYPNPLGDR

SEQ ID NO: 100926 - protein, 275 aa, Unknown
  Bacterial polypetide isolated from the Sargasso Sea
MHACEEAGIEIPRFCYHDRLSIAGNCRMCLVDMERAPKPIASCAMPAGDGMIIRTDTDRVKRAREGVMEFLLINHPLDCPICDQGGECDLQDQAMGYGLDGSRFSENKRAVDNKHMGPLISTVMTRCIHCTRCVRFATEIAGVPELGAIGRGETMEITTYLEKTLASELSANVIDLCPVGALTSRPYAFNARPWELNKVESVDVMDALGSNIRVDTRGAQVMRVLPRLNEDINEEWISDKTRYAIDGLRRQRLDTPFERGRDRRLHPVTWDEALK

SEQ ID NO: 100927 - protein, 391 aa, Unknown
  Bacterial polypetide isolated from the Sargasso Sea
MAKEKKTLNLNFGPQHPAAHGVLRLILQLDGEVVEKADPHIGLLHRGTEKLIENKTYIQAVPYFDRLDYVAPMNQEHAFALAIEKILKIEVPVRAKYIRVIFCEIGRILSHILNVTTQAMDVGALTPTLWGFEEREKLMGFYERVSGSRLHANYFRAGGVHKDLPVGLESDIDEFCERFPKIIDDLETLLTDNRIFKQRNVDIGIVSKQDALDYSFSGVMLRGSGVAWDLRRSQPYDCYNDLEFKIPVGKNGDCYDRYLCRIEEMRESLKIIKQCLKNIPKGPIKTEDGKISPPPKKELKQSMEALIHHFKLFTEGYRVEKDEIYTAVEAPKGEFGVYLISDGSSKPYKCKIRAPGFTHLQAMDYLIKGHMLADVPAVLGSMDIVFGEVDR

SEQ ID NO: 100928 - protein, 253 aa, Unknown
  Bacterial polypetide isolated from the Sargasso Sea
IEGVFRKPTVVNNIETMACVAQIARRGVDWFRSIGIPADPNNPRDPGSYGPKLYCLSGHVEKPGCYEAPLGITARELIDRFGGGVWKGRRAKAVIPGGISMGLMTEDELDTPLDFSGPGRVGCLGLGTAAVVVIDETVSIVDFLHNSCRFFAHESCGQCTPCREGTSWSLRMLERIRAGKGRLRDLELLAEIGDTMGMMPGSTICGLADGAAWPIKNSIAKFRDEFEDYIKQTNPTGYMETDPVPALPIVTTH

SEQ ID NO: 100929 - protein, 391 aa, Unknown
  Bacterial polypetide isolated from the Sargasso Sea
MAKEKKTLNLNFGPQHPAAHGVLRLILQLDGEVVEKADPHIGLLHRGTEKLIENKTYIQAVPYFDRLDYVAPMNQEHAFALAIEKILKIEVPSRAKYIRVIFCEIGRILSHILNVTTQAMDVGALTPTLWGFEEREKLMGFYERVSGSRLHANYFRAGGVHKDLPTGLDSDISDFCKKFPKIIDDLETLLTDNRIFKQRNVDIGIVSKQDALDYSFSGVMLRGSGVAWDLRRSQPYDCYDDLEFKIPVGKNGDCYDRYLCRIEEMRESVKIIKQCLKNIPKGPIKTEDGKISPPPKKELKQSMEALIHHFKLFTEGYRVEKDEIYTAVEAPKGEFGVYLISDGSSKPYKCKIRAPGFTHLQAMDYLIKGHMLADVPAVLGSMDIVFGEVDR

SEQ ID NO: 100930 - protein, 178 aa, Unknown
  Bacterial polypetide isolated from the Sargasso Sea
HAEGVIGGWENLKAVIPGGSSMPLLPKKICDTITMDFDSLIKEKSGLGTAGIVVINKDQDIIKCMARIARFYKHESCGQCTPCREGSGWMWRMLERMAKGEASKDEVNMLMDVTKQIEGHTICAFGEGSAWPVQGLLRHFKKEVEKRNNFNPLVNKSREIPYLVDQHLLEKEDAQIKN

SEQ ID NO: 100931 - protein, 304 aa, Unknown
  Bacterial polypetide isolated from the Sargasso Sea
MQACEIAGAEIPRFCYHEKLSIAGNCRMCLVEMEKGPPKPIASCAMPAGDGMVIKTDTEMVKKARKGVMEFLLINHPLDCPICDQGGECDLQDQALHYGFDKSRYEENKRAVKNKNMGPLVSTIMTRCIHCTRCVRFSTEVAGVDDLGLLGRGENAEITTYLEKTIDSELSGNVIDLCPVGALTSKPYAFKSRPWELSKTETYDVLDGIGSSIRVDTRGKQVLRVLPRINEDTNEEWINDKTRFAIDGLSRQRLDKVYIRADNKLNVSDWDYALNKIKNEINKRRKDKTITLSGKFTDAETIIA

SEQ ID NO: 100932 - protein, 346 aa, Unknown
  Bacterial polypetide isolated from the Sargasso Sea
MDELRNINITIDGIEISVPQGSTVLQACEAAGAEIPRFCYHEKLSVAGNCRMCLVEMERSPKPIASCAMPASDGMIIKTSSEMVEKARKGVMEFLLINHPLDCPICDQGGECDLQDQALYFGKGETRFENSKRAVSDKNMGPLIKTTMTRCIHCTRCVRFANEVAGVEDLGATGRGENVEISTYLEKAVSSELSGNLVDLCPVGALTSKPYQFVARPWELTKTESVDVMDAIGSNIRIDSRDGKVLRILPKNNESINEEWISDKSRYAIDGLSKQRLDTPFIKINNKLQRVSWDEAFEFITSKISSVSNENCVGVVGNQVENESIFAFRELFKKLNLAKFYHFKKN

SEQ ID NO: 100933 - protein, 398 aa, Unknown
  Bacterial polypetide isolated from the Sargasso Sea
MLKLKVNELDIEIEEGLTVLQACEQAGFEIPRFCYHEKLSIAGNCRMCLVEIGKSTKPIASCAMPATEGMNIKTNTSMVKKARRGVMEFLLANHPLDCPVCDQGGECDLQDQSMFYGIDKSRYKENKRHVPEKYMGPLIKTQMTRCIHCTRCIRFATEVAGVPELGAIGRGEDMQITTYLEKSMESELSANVIDLCPVGALTSKPYVFEARPWELKKTESIDVMDAVGSNIRVDTYGWEVKRILPRINEDINEEWISDKSRYACDGLQNQRLDIPYIKKDGIFKKSSWEEAYEIISEKIFSTSSDEIAGLTGDLTNMETLFITKDFFSKTIKSSNLDSRSEHIFINNDERSNYLFNSKINGIEESDFILLIGSNPRYEATILNARIRKSYLKNNTEIF

SEQ ID NO: 100934 - protein, 300 aa, Unknown
  Bacterial polypetide isolated from the Sargasso Sea
GYIYVRGEYFPSIKSLNEAIDELYAAGLLGENALGKGKRLDLTVHTGAGAYICGEESALLDSLEGKRGHPRVKPPFPAVSGFNACPTTVNNVETLTCLPFIVNEGAEAFKDFGPENNAGTHLVSLSGHVEKPGVYEVRMDVTLKQIIYDLGGGIRGGKALKGVIPGGASSPVLTAKEIDVEYSFDALGKAGTMMGSAAVMVFDEDTDVVKLLHRITRFFNHESCGQCTPCREGTHWARLIVQDFLKGNGNERKMKRLHRVGGNMMGTTVCALGDAAAMPITSFVTKFPEEFEKYYPKAAA

SEQ ID NO: 100935 - protein, 470 aa, Unknown
  Bacterial polypetide isolated from the Sargasso Sea
MPKITINGKEIEFENGMTVLQACELADVEIPRFCYHEKLSIAGNCRMCLVELDKSAKPIASCAMPAAEGMNIRTNTEMVEKARKGIMEFLLANHPLDCPVCDQGGECDLQDQSLYYGVDKSRFSENKRVVKDKYMGPLIKTQMTRCIHCTRCVRFATEVAGVPEIGAIGRGENMEITTYLEKSMTSELSANVIDLCPVGALTSKPYAFEARPWELKKTESIDVMDAVGSNIRVDTYGWEVKRVLPRINEDINEEWLSDKSRYSCDGLSKQRLDVPYIKKQNKLVKSSWDEAIDIIVKKIIDTPKDQIAGHVGDMASLETMFAFKKLLNSNNIPNFDFREKKIKIINEQRMNYIFNSSIKGIEESDLIFLIGCNPRHEATMLNARIRKAYVQNKVEIFSIGDANDLTYPYKIVGENTEELKKIFDGKHEISSKVKSAKKPLFIIGESILELKSSGYILENLNNFCIDNNFI

SEQ ID NO: 100936 - protein, 163 aa, Unknown
  Bacterial polypetide isolated from the Sargasso Sea
LKAVIPGGSSMPMLPKQVCDHIKMDFDACVENKTGLGTAGIVVINNDQDIIKCMARIARFYKHESCGQCTPCREGSGWMWRMLERMAAGEATPEEVDMLMDVTKQIEGHTICAFGEGSSWPVQGLIRHFKDEIIERNKFDPIIKKEKNIPYLVDQHLLEKENA

SEQ ID NO: 100937 - protein, 377 aa, Unknown
  Bacterial polypetide isolated from the Sargasso Sea
MLKLKVNDIDIEVDDGLTVLQACEQAGVEIPRFCYHEKLSIAGNCRMCLVEMEKSPKPIASCAMPASDGMIIKTNTEKVEKARKGVMEFLLANHPLDCPVCDQGGECDLQDQSMFYGIDKSRFKENKRYVPEKYMGPLIKTQMTRCIHCTRCIRFATEVAGVTELGAIGRGEDMQITTYLEKSMDSELSANVIDLCPVGALTSKPYVFEARPWELKKTETIDVMDSVGSNIRVDTYGWEVKRVLPRINEDINEEWISDKTRYACDGLKNQRLDSPFEKVGKIFKKISWNDAFKKIQKKINETKAEKIAGLTGDLNNMETLFASKEFFQKILKSKHLDSRSDKAYIDCKERSNYIFNSSINGIEESDLILLIGTNPRL

SEQ ID NO: 100938 - protein, 252 aa, Unknown
  Bacterial polypetide isolated from the Sargasso Sea
MAKEKKTLNLNFGPQHPAAHGVLRLILQLDGEVVEKADPHIGLLHRGTEKLIENKTYIQAVPYFDRLDYVAPMNQEHAFALAIEKILKIEVPSRAKYIRVIFCEIGRILSHILNVTTQAMDVGALTPTLWGFEEREKLMGFYERVSGSRLHANYFRAGGVHKDLPTGLDSDISEFCEKFPKIIDDLETLLTDNRIFKQRNVDIGIVTKQDVLDYSFSGVMLRGSGVAWDLRRSQPYNCYDDLEFKIPIEKME

SEQ ID NO: 100939 - protein, 106 aa, Unknown
  Bacterial polypetide isolated from the Sargasso Sea
MELSSKGFLVASYDKILTWARTGSLWPMTFGLACCGVEMIHSYMARYDLDRYGVIPRGSPRQSDVMIVAGTLTNKMAPALRKVYDQMPEPRWVISMGSCANGGGYY

SEQ ID NO: 100940 - protein, 777 aa, Unknown
  Bacterial polypetide isolated from the Sargasso Sea
MSENIKFTVNGNELEAKSGELLIEACENSGIHIPRFCWHKRLEPVGMCRMCLVEVETPRGKALVPSCTTEITEDLVVETESEVVTKAQEGILEFLLINHPLDCPVCDKAGECPLQDQTMAYGPGESRFVEEKRHFEKPISISEIILLDRERCILCARCTRFSDEISGDPLIEFIQRGNKTEVNTFPDEPFRSYFSGNTVQICPVGALTSTSYRFKARPWDLKKVSSTCNCCSVGCSIELNTSQNKMLRILGEDNEFTNQGWLSDKGRYNFDYLHSENRVLNILNKSEDSFNEISISEAMAKIKNKIDELDNPNVKFLLGSSSTNEEYFVINEIGNYLNKDKFLSRDSSNIYFGDDLLFEGYFGDQYSQAKLEDLDNSETIVVWAEDIKDNLPILYLRIKKAVKNGSKLIVFGHTNTSIAGLADFYFGADIVSNKFELIRNPNEIEDLKNNIEGKKVTVIAGKSTVFQKKESLDKLINFLNEKSELQVFNAFSKGNTFGALQNIDEVKGLNEFCNEFDTNAKNIVFTIGVNPVNSSFFGQKIKEKLIASDFVISLDLFVNETTELADLILPTTSLGEKEGTVTNMEMRVMKQNKILPAPGSTLSEWEYLTSILNVLGEDVNYKNENEINNYLSEKYINQEKLPTFDNLNKPSNLFGVINKKDININIKDLEEDNFSLLMVRRLYGDSSTQINSPSISMLGAHKFIELNSITAKKYGINSKVGNLIQGPNSILINIDINEYLPDDLVIAPINRRGFENIDPCLDFDITEAKNREELNVN

SEQ ID NO: 100941 - protein, 352 aa, Unknown
  Bacterial polypetide isolated from the Sargasso Sea
MTVLQACEKAGVEIPRFCYHEKLSIAGNCRMCLVEMEKSPKPIASCAMPAAEGMVIKTNTPKIEKSRKGVMEFLLANHPLDCPVCDQGGECDLQDQSMFYGIDKSRFKENKRAVPDKNMGPLIKTQMTRCIHCTRCIRFATEIAGVPELGAIGRGEDMQITTYLEKSIQSELSGNVIDLCPVGALTSKPYVFEARPWELKKTETIDVMDAVGSNIRVDTYDWEVKRVLPIINEDINEEWISDKTRYACDGLLSQRLDTPYIKYNNKFEKASWDEVFKIIKSKIQNTDKQKIAGFVGDLINMEASYIFKEFLERVIDTKKYESRSSEMFMDNSKRENYLFNSTINGVEESDLI

SEQ ID NO: 100942 - protein, 501 aa, Unknown
  Bacterial polypetide isolated from the Sargasso Sea
MVKVIIDDKDYEVEEGLAIIQACEIAGVEVPRFCYHEKLSIAGNCRMCLVDVEDSRGLSPKPVASCAMQVSEGLKIYTKSERVKNAQEGALEFLLMNHPLDCPICDQGGECDLQDQSMAFGYGSSRFDGDKRAVESKDMGPFIKTEMTRCIHCTRCVRFSSEISGNDEIGSIGRGHDMEITTYLNQAVESELSGNVIDLCPVGALTSKPYAFSARPWELNKTETIDVMDAMGSNIRIDSKGLRVMRVLPRLNEDINEEWITDKTRFFWDGLSVQRIDKPYKRVDGSLKATSWKDALELAKDKISKSQPNKISALTGDLVDIETVYALKKLMNNIGSDNFDCRQENSRISGPPERWLFNSTFNGIENSDGCLIIGSDLRKEAPLLNSRLLRKSRDDDYKVGVIGFDNDLTFDFNFLGENPSIVEDILNEDNDFCEDLNSMKKPIMIIGQGALIGNDANNFLNICIELAHKFNFITSDWNGFNVLHSAASRPGAMSIGFFPSE

SEQ ID NO: 100943 - protein, 410 aa, Unknown
  Bacterial polypetide isolated from the Sargasso Sea
VPRFCYHEKLSIAANCRMCLVEVENSKNALPACATPVSDGMIVKTKSKSAKTAQESTMEFLLINHPLDCPICDQGGECELQDLAYTYGKNESRFDIQKQTKKNDDLGPLVSTDMTRCIMCTRCVRFGTEIAGIQELGTIGRGEDSNISTYVAQTVDHELSGNIIDLCPVGALNNKPYRYTDRTWELDQIESISPHDCIGTNIMVHKKNDIIRRIVPKNNPEINETWIADRDRFGFDGIYSEDRTSDTLIRTDQDLNQSKLSNAVDKTVELINSAKNNDQSIGVLFSPSISTEEQYLLSDLCHQIGIESIDSRLRQGEFSNDIDKRFIPHMNIRLSDVDSMKNILIVGSELRKETPILAHRVKKSAESGASIHTINSKESKYHFNVHQDLSCDDWINELGLVLKAAINLHT

SEQ ID NO: 100944 - protein, 380 aa, Unknown
  Bacterial polypetide isolated from the Sargasso Sea
MTKETKKLNLNFGPQHPAAHGVLRLILQLDGEIVEKADPHIGLLHRGTEKLIENKTYTQAVPYFDRLDYVAPMNQEHAFALAIEKILKINVPVRAQYLRVIFCEIGRILSHILNVTTQAMDVGALTPTLWGFEEREILMGFYEKVSGSRLHANYFRAGGVHQDLPKGLDSEIAEFCERFPKIIDDLETLLTDNRIFKQRNVDIGVVTKQDALDYSFSGVMLRGSGVPWDLRKSQPYDCYDQLKFKIPIGNNGDCYDRYLCRIEEMRESVKIINQCLANLPTGPIKTNDGKISPPPKKEIKQSMEALIHHFKLFTEGYRVDKDEIYTAVEAPKGEFGVYLISDGSSKPYKCKIRAPGFSHLQAMDYLIKGHMLADVPAVLG

SEQ ID NO: 100945 - protein, 489 aa, Unknown
  Bacterial polypetide isolated from the Sargasso Sea
MPKIFINNNEIEFKEGMTVLQACELAGVEIPRFCYHERLSIAGNCRMCLVEMEKSAKPIASCAMPAAEGMKIKTNTKMVEKARKGVMEFLLVNHPLDCPVCDQGGECDLQDQSLYYGFDGSRFKENKRLVKDKYMGPLIKTQMTRCIHCTRCIRFATEVAGVSELGAVGRGEDMEITTYLEKSMTSELSGNVIDLCPVGALTSKPYAFEARPWELKKTESIDVMDAVGSNIRVDSYGWEVKRILPRLNNSINEEWISDKTRYACDGLLKQRLDKVYIRKENQLVEANWEEAINLISSKINSTNPDKIAAHVGGLSSFETINSFKKLLDEINVRNYEFREKDFYVNPDQKMNYIFNSSIQGIEKSDFILLVGANPRHEATILNARIRKTYLKNKLPIFSIGNPGDLTYPYKIVGNKTDDIQQILNGKSEINSLLKKSKNPLIIIGESALELKSGKFILEGFKEFLYKNNFINENWNSFNVLTQNASTVER

SEQ ID NO: 100946 - protein, 154 aa, Unknown
  Bacterial polypetide isolated from the Sargasso Sea
MTKLLNMSRRYSMWVYQWGLACCAIEMGAAFASPRYDVMRLGVIPLPASPRQADFLVVSGTVTDKMAPAVRRLWEQMPDPKYVISMGSCANCGGPYWDSYSVTKGVDQIIPVDVYVPGCPPRPEALLEGIVLLQERIMNEDMAERWKGDPIVVE

SEQ ID NO: 100947 - protein, 449 aa, Unknown
  Bacterial polypetide isolated from the Sargasso Sea
MPKITINGKEIEFEKGMTVLQACEIANVEIPRFCYHEKLSIAGNCRMCLVEMEKSAKPIASCAMPAAEGMNIKTNTPFVEKARKGVMEFLLANHPLDCPVCDQGGECDLQDQSMFYGIDKSRFVENKRQVKEKYMGPLIKTQMTRCIHCTRCIRFATEVAGVPEIGAIGRGENMEITTYLEKAMESELSANVIDLCPVGALTSKPYAFEARPWELKKTESIDVMDSVGSNIRVDTYNWEVKRILPRLNNEINEEWISDKTRYSCDGLLKQRLDAPYIKKDNRLQKSSWDEAVDLILNKINAINPNEIGGHIGDMVNLENALAFKKLFKVLNSNNIEFREKKFYVNSSEKINYLFNSSIKGIENSDLILLIGTNPRHEATMVNARIRKVFAQKKIPIFSIGNPGDLTYDYTILGNKSDDIKKILNKEGEFSNKLLSSKKPIIIIGESAWA

SEQ ID NO: 100948 - protein, 338 aa, Unknown
  Bacterial polypetide isolated from the Sargasso Sea
MKVFIDDIEYNAEPEETIIQLSDRAGIHIPRFCYHKHLSIVASCRMCLVDIEGVKNAQPACSTPVREGMKIYTSSQKTKDAQKSSMEFLLINHPLDCPICDQGGECELQDVSLEHGDDHSQYMQLKRVVIDKDVSPLVSTDMTRCIHCSRCVRFGEEISNVKELGLLNRGDDMKIDVFIEDKISSELSGNMIDLCPVGALNNKPYRYKARTWDLRENTGISAHDCLGSNIFYHIYKNKILRAVPKENPGINQTWLSDRDRFGYEGIYSKDRIFKSYIRENKKLVELDKQLVVNEVNKLLKKSIENYSNNNIGCMISSRSTNEELYLYQKLFRSLGLNN

SEQ ID NO: 100949 - protein, 353 aa, Unknown
  Bacterial polypetide isolated from the Sargasso Sea
MIKLKVNNIDVEVDDGLTVLQACEKAGFEIPRFCYHEKLSIAGNCRMCLVEMEKSPKPIASCAMPATEGMVIKTNTEFVEKSRKGVMEFLLANHPLDCPVCDQGGECDLQDQSMFYGIDKSRFKENKRSVPEKYMGPLIKTQMTRCIHCTRCIRFATEVAGVPELGAIGRGEDMQITTYLEKSMESEMSANVIDLCPVGALTSKPYVFEARPWELKKTESIDVMDAVGSNIRVDTYGWEVKRILPIINEDINEEWISDKTRYACDGLKFQRLDTPYLKEKNEFKKISWNMAYSKLVEKIKIIPGEKIAGMTGDLTNMETMFIIKEFFNKTIKSKNLESRNDNYYINNSTKDNY

SEQ ID NO: 100950 - protein, 254 aa, Unknown
  Bacterial polypetide isolated from the Sargasso Sea
MASYRERGGYQAWEEVLKNQTPREEIIETLKTSGLRGRGGAGFPTGLKLSFMPRDAQGQKYIVCNSDESEPGTFKDRDILRFNPHQVIEGMALAGYAIGATVGFNYIRGEYYEPWQRFEAALAEARQAGLLGENLKGSDIAFELHSQRGAGAYICGEETALLESLEGKKGQPRFKPPFPAQVGAFGKPTTINNTETLASIPPIIRNGAEWFSSIGVENSGGTKIYSVSGHVNRPGNYEVPMGMPFRDLLEMAGG

SEQ ID NO: 100951 - protein, 776 aa, Unknown
  Bacterial polypetide isolated from the Sargasso Sea
MVELEIDGKKVEVPEGSMVIQAAHKADKYIPHFCYHKKLSVAANCRMCLVEVEKMPKAVPACATPVSAGMIVHTQSDKAVKAQQSVMEFLLINHPLDCPICDQGGECQLQDLAVGYGKSSSRYSEEKRVVFHKNVGPLISMEEMSRCIHCTRCVRFGQEIAGVMEFGMLGRGEHSEITTFVGKTVDSEMSGNMIDLCPVGALTSKPFRYSARTWELSRRKSVSPHDSVGANLVVQVKNNRVMRVLPFENEAINECWISDKDRFSYEGLNSEERLTKPMLKQGGQWIETDWQTALEYVAKGLKGIAADHGANALAMLASAHSTAEELFLVKQLANELKTPNVDFRLRQQDFSAPVQGAPWLGMPIADLSNVDAAFVVGSFLRRDHPLFASRLRQAAKNGAKLHFLHATGDDALIPTAQRIVAAPSAWLDQLAGIAAAVAQLRGVALPDTLAGVTASPAAQAVAQSLANGERRAVLLGNVAVRHPEFAKLHAVAKWIADNTGATFGFLTEAANTVGAHVVGALPGEGGLNAREAFAQPRKGYVLLNVEPEFDTADPAQALAALNQAEMVVVMSPFKHGLDYADVLLPVAPFTETAGTYVNAEGTVQSFNGVVRPLGDTRPGWKVLRVLGSLLGLPNFEYETAEEVRLAALGDAGVAGRLSNHTSVAPVRVAANAANGGFERLADVPIYHADALVRRAGALHLTAAAKAANAAALPAALFDKLGLKEGDAVRVRQGERAVQLPAVRDANLAETVVRVSAATPAGAALGGLSGELVVEKA

SEQ ID NO: 100952 - protein, 163 aa, Unknown
  Bacterial polypetide isolated from the Sargasso Sea
MGVLENKFQDNVIVASLDKILGWARSTSPWYFQFGLACCAIEMMASAASRHDLERIGMMPRSSPRQADVMIVAGTVTMKMALRVKKLYEQMADPKYVISMGSCATSGGPYWQHGYHVLKGVDLVVPVDVYVPGCPPRPEALIEGLLKLQEKIQTERPLTRKSA

SEQ ID NO: 100953 - protein, 205 aa, Unknown
  Bacterial polypetide isolated from the Sargasso Sea
MREFPEDSHQIEIYEKNNGYSALKKVLKEDNPENVINEIKDSNIRGRGGAGFPTGVKWGFLAENEDRYLVINGDESEPGTFKDRILLERDPHQLIEGVIITCFASNIKKAFIYIRGEYAKPARRVQDAVKQAYEKGYLGNNILGTNFSLDVVVHLGAGAYICGEETALLNSLEGKRGEPRLKPPYFPAVMGLYNKPTLVNNVETI

SEQ ID NO: 100954 - protein, 164 aa, Unknown; identical to SEQ ID NO: 100787
  Bacterial polypetide isolated from the Sargasso Sea

SEQ ID NO: 100955 - protein, 180 aa, Unknown
  Bacterial polypetide isolated from the Sargasso Sea
MSQQCQCQHNQSPQGQSSCQGKGKDFVLSQAERDAIEHEKHHYEDPRAASIEALKIVQQARGWVPDGAIHAIAAELGIPASDVEGVATFYSQIFRQPVGRHIIRVCDSMVCYINGHEQLLAGLKEVMDLAPGQTSADGRFTLLPVCCLGNCDKGPALMIDDDTYGGLDAVSLLKTLEAYP

SEQ ID NO: 100956 - protein, 194 aa, Unknown
  Bacterial polypetide isolated from the Sargasso Sea
GRTIGVAAYSTEQALAWGTTGGGLRATGLNFDVRKWRPYSGYDQFEFEVPVGANGDAYDRALVRIEEVRQSMRIIEQCMKNMPEGPFKADHPLTTPPPKERTLQDIETLITHFLQVSWGPVMPAAESFQMIEATKGINSYYLTSDGSTMSYRTRIRTPSFAHLQQIPSVIRGQMVSDLIVYLGSIDFVMSDVDR

SEQ ID NO: 100957 - protein, 183 aa, Unknown
  Bacterial polypetide isolated from the Sargasso Sea
IPLKELIEKHAGGVIGGWDNLKAVIPGGSSMPLLPKETCETIKMDFDACVENKTGLGTAGIVVINKDQDIIKCMARIARFYKHESCGQCTPCREGSGWMWRMLERMAKGEATRDEVDMLLDVTKQIEGHTICAFGEGSSWPVQGLIRNFKDEIIERNKFDPIVKKQKDIPYLVDQHLLEKENA

SEQ ID NO: 100958 - protein, 676 aa, Unknown
  Bacterial polypetide isolated from the Sargasso Sea
MLKLKVNDIEVEVEEGTTVLQACEQAGAEIPRFCYHEKLSIAGNCRMCLVEMEKSPKPIASCAMPAAEGMVLKTNTEKVKKARKGVMEFLLANHPLDCPVCDQGGECDLQDQSMYYGIDKSRFKENKRYVPEKYMGPLIKTQMTRCIHCTRCIRFATEVAGVPELGAIGRGENMQITTYLEKAMESELSANVIDLCPVGALTSKPYVFEARPWELKKTETIDVMDAVGSNIRVDTYGWEVKRVLPRINEEINEEWISDKTRYACDGLKNQRLDTPYVKINNKLKPSSWDEAFKAVSERISKTKSEKIAGFIGDMTNMETTYAAKDFFEKTIKSENLESRYEKLYINTNVRSNYLFNSSIEGIEKSDLIILIGTNPRFEATILNSRIRKNYLKNKTEIISLGDVGDLTYPYQVITNNTDTIKDIIDNKHEISEKIKKSKYPSIIFGQSALKLKSSPYIFEEFKNYLLENDKISDDWNALNVLSKNSSTVGSYDLNVLSKNSSFEILDKLDNNDFEILILFGQDNLNFEKKNEFIIYIGSHGDKGASIADVILPGAAYTEQDGYFTNLEGKLQKAYKASYPPGEAKEDWQIINELSSFIKRKNLYKDKNQLIDSLINYLNLNNKNEADFEVPEYNFKSEKIITEEIDYYHSNVIARASKTMSECKNIRMSLPKTGTDN

SEQ ID NO: 100959 - protein, 675 aa, Unknown
  Bacterial polypetide isolated from the Sargasso Sea
MLKLKVNEKEIEVEEGLTVLQACEQAGYEIPRFCYHEKLSIAGNCRMCLVEVEKSPKPVASCAMPVTEGMNIKTNTSMVEKARKGVMEFLLVNHPLDCPVCDQGGECDLQDQSMFYGVDKSRFKENKRQVPEKYMGPLIKTQMTRCIHCTRCIRFATEVAGVPELGAIGRGENMEITTYLEKAMDSELSANVIDLCPVGALTSKPYVFEARPWELKKTESIDVMDAVGSNIRVDTYGWEVKRILPRINEDINEEWISDKTRYSCDGLKNQRLDTPYLREGDKFNKISWNEAYKVLKLKLENTNSDKVGCFTGDLTNMETTFAVKELFNKVLKSSLIDSRPENYYVNFSQRQNYRFNSNILGIEESDLILMIGCNPRYEATILNSRIRKSYLKSKLPIYSTNDIGNQTYPYKIINNSSNLVKDIIDENNDLAEKIINAKKPIIIIGQSVLKLKSGKFIFEELKNFLIKNNKINTEWNSLNVLSKDASTVGSYDLTLFSSNNGRNLLLEKLNSNSIDLIFLLGQDKLKISRDGIFVVYIGSHGDEGARNSDLILPACAFTEQDGYYTNLEGKIQKAYKASYPTELAKEDWQIINEISNLVREKSLYKGKDELTDNMFNYLNQNRKEEFVKTEYIFENEKITIEDIDYYFSNVIAKNSKTMSECRSLRSNLQNTGTDG

SEQ ID NO: 100960 - protein, 777 aa, Unknown
  Bacterial polypetide isolated from the Sargasso Sea
MSENIKITVNGNELEAKSGELLIEACEKSGIHIPRFCWHKRLDPVGMCRMCLVEVETPRGKALVPSCTTEITEDLVVETESEVVTKAQEGILEFLLINHPLDCPVCDKAGECPLQDQTMAYGPGESRFVEEKRHFEKPIPISEIILLDRERCILCARCTRFSDEISGDPLIEFIQRGNKTEVNTFPDEPFRSYFSGNTVQICPVGALTSTSYRFKARPWDLKKVSSTCNCCSVGCSIELNTSQNKMLRILGEDNEFTNQGWLSDKGRYNFDYLHSENRLLNILSKSEDSFNEISISEATKKIKNKIDELDNPNVKFLVGSSSTNEEYFIINEIANYLNKDKFLSKDSSNIYFGDDLLFKGYFEDEYSQAKLEDLDSSETIVIWAEDIKDNLPILYLRVKKAVKNGSKLIVFGHTNTAIAGLADFYFGKDIVSNKFELIQNPNEIEDLKNNIEGKKVTIIAGKSTVFQKKESLDKLINYLNENSELKVLNSFSKGNTFGALQNLDEVKGLNEFCNEFDNNAKNIVFTIGVNPVNSSYFGKKIKENLIASDFVIALDLFVNETTELADMILPTTSLGEKEGTVTNMEMRVMKQNKILPAPGSTLSEWEYLTSLLNVLGVDVNYKNENEINNSLSKEYKDQEQIPTFDNLNKPSNLFGMINKKDININIEDLEEDDFSLLMVRRLYGDSSTQLNTPSISMLGSHRFIELNSSTAKKYGINSEVGNFIQGSNSILINIDINEYLPDDLVVAAINRRGFENIDPCLGFDISEAKNREELNVN

SEQ ID NO: 100961 - protein, 336 aa, Unknown
  Bacterial polypetide isolated from the Sargasso Sea
MPKIIINNKELEFENGMTIMQACELAGIEIPRFCYHDKLSIAGNCRMCLVEMEKSPKPIASCAMPAAEGMKIFTNTESVKNARKGVMEFLLINHPLDCPICDQGGECDLQDQALHYGFDKSRYEENKRAVNNKYMGPLVSTIMTRCIHCTRCVRFSTEIAGVDDLGLLGRGENAEITTYLEKTIQSELSGNVIDLCPVGALTSKPYAFQARPWELKKTESIDVFDAMGSSIRIDTIGKKPLRVLPRLNEDINEEWINDKSRFAIDGLSSQRIDRPYLKIDDKLSISDWNTVLEKIIKEISIRDQSKTLALSGKFTDIETFYSSKVFLESLGSNNYD

SEQ ID NO: 100962 - protein, 137 aa, Unknown
  Bacterial polypetide isolated from the Sargasso Sea
MHENQQPQTEAFELSAAEREAIEHEKHHYEDPRAASIEALKIVQKQRGWVPDGAIYAIADVLGIPPSDVEGVATFYSQIFRQPVGRHVIRYCDSVVCHINGYQGIQAALEKKLNIKPGQTTFDGRFTLLPTCCLGNC

SEQ ID NO: 100963 - protein, 452 aa, Unknown
  Bacterial polypetide isolated from the Sargasso Sea
ACELAGAEIPRFCYHEKLSIAGNCRMCLVEMEKAPKPIASCAMPAGDGMVIKTNTDTVQKARKGVMEFLLINHPLDCPICDQGGECDLQDQALHYGFDKSRYQENKRAVKNKHMGPLVSTIMTRCIHCTRCVRFSTEVAGVDDLGLLGRGENAEITTYLEKTIDSELSGNVIDLCPVGALTSKPYAFKSRPWELTKTETHDVLDGVGSSIRVDTRGKQVLRVLPRINEDTNEEWINDKTRFAIDGLSRQRLDKVYIKNDNKLNVADWDTALNKIKDELNKRGKEKTIALSGKFTDAETIIASKLFLEGLGSNLYDCRFDNAQIIHNESESYKFNSSIQEIENADAILLVGSNPRWEASVLNARIRKAYINNNCKVGVIGPDLDLSYTYTKISTCLSGLNDIKEKKSEFSKSFHNSNNPLIIIGTSAINNSEGESVLKLCADIAKKLPNYSNT

SEQ ID NO: 100964 - protein, 539 aa, Unknown
  Bacterial polypetide isolated from the Sargasso Sea
MSENIKITVNGNELEAKSGELLIEACEKSGIHIPRFCWHKRLDPVGMCRMCLVEVETPRGKALVPSCTTEITEDLVVETESDVVTKAQEGILEFLLINHPLDCPVCDKAGECPLQDQTMAYGPGESRFVEEKRHFEKPIPISEIILLDRERCILCARCTRFSDEISGDPLIEFIQRGNKTEVNTFPDEPFRSYFSGNTVQICPVGALTSTSYRFKARPWDLKKVSSTCNCCSVGCSIELNTSQNKMLRILGEDNEFTNQGWLSDKGRYNFDYLHSENRLLNILSKSEDSFNEISISEATTKIKNKIDELDNPNIKFLVGSSSTNEEYFIINEIANYLNKDKFLSKDSSNIYFGDDLLFKGYFGDEYSQAKLEDLDSSETIVIWAEDIKDNLPILYLRVKKAVKNGSKLIVFGHTNTAIAGLADFYFGKDIVSNKFELIQNPNEIEDLKNNIEGKKVTVIAGKSTVFQRKESLDKLINYLNEKSELKVLNSFSKGNTFGALQNIDEVKGLNEFCNEFDNNAKNIVFTIGVNPVNSSYFGK

SEQ ID NO: 100965 - protein, 114 aa, Unknown
  Bacterial polypetide isolated from the Sargasso Sea
IIRCMARIARFYKHESCGQCTPCREGCGWMWRMLERMADGDATYREIDILEDVTKQIEGHTICAFGEGSSWPVQGLIRHFKKDIEKRCHDDPIIKKKSDIPYLIDQHLLEKDSA

SEQ ID NO: 100966 - protein, 421 aa, Unknown
  Bacterial polypetide isolated from the Sargasso Sea
MTKLCTETFGLSNPASIETYIKCGGYKAWRNIVSNHTSKSEIINKIKNSGLRGKGGAGFLTGLKWSFIPLQSGQKYLVCNSDESEPGTCKDRDILRYNPHAVIEGMLIASYAIGASVAYNYLRGEFIEEQRKVFLGALDEALKHNLIGKNILSSKISIDVHCLLGAGAYIVGEETAMLESIEGKRGMPRTKPPFPAIKGLYGKPTIINNTETLASIPKIMLNKDDWYKDIGLDSSEGMKIFCMSGHVNKPGNYEIPLGTKFSTLLDMAGGVRDGGKLKAVIPGGSSVPVIKGSVMLDLKMDYDSISKAGSMLGSGGVIVMDDSTCMVSVLHRISRFYYEESCGQCTPCREGTGWLHRILTNVLSGHGSVDDLNQLDRIANQIEGHCICALGDAAAMPVRSFLKNFWDEFEFYVDKKKSLVS

SEQ ID NO: 100967 - protein, 750 aa, Unknown
  Bacterial polypetide isolated from the Sargasso Sea
MKVYIDDNEYSASEGETIIQVADRNNIHIPRFCYHKHLSVVASCRMCLVEIDKAKQAQPACSTLVYEDMHVNTKSQKTKDAQKSTMEFLLINHPLDCPICDQAGECELQDVSLQHGESKSNYLQFKRVVVDEEISPLISTEMTRCIHCSRCVRFGEEVAHEKELGLLHRGENMEIRSAIINGVNSELSGNMIDLCPVGALNNKPYSYKARTWDLKQHIGISPHDCIGSNIFYHTYNNKIVRAIPRDNPDINQTWIADRDRFGFEGIYSDDRCKRIMKRVNGILEDFDEDMLIDEINNSIRDHIKNNSNQDIGCFISGQTSSEEMFLIKKLFKNYEIENLDHRTNEIEFEYDHNFPIMPYLGCNLNELSDYDNIFLFGVNIKSEYPVLSIRFNEAVKSGTKIYSFHFSPYQEVFPLEKSYCISPKEIINKLKTGINGVDRTQKNLLIVGPSITYLPYQTLFHSAIGEFSKEIKGNVGYLTDYCNSTSGWLLGNVPNREIGGMNSNKKGLNVTQMLKNKLGMLIFYNLEPEHDFANSSEVIKALQTSNCNIFFTSYLTPIIEKYADYIIPITTFAETSGSYINIEGKLQSFNEIVKPDKGIQEGWRVLSELCKLNNYDINNITEVRNKIREILTNTKFDSSAMTTGDTKPITEDFSFSKYTLRHIYSTDQIVRRSQPLNLTKQSKNKKILISTDLMDYTDNSKSLLINENGKRYKINDFEVNKSLPPKSVIYSSCFNNKFVEGKSSDIKIDK

SEQ ID NO: 100968 - protein, 84 aa, Unknown
  Bacterial polypetide isolated from the Sargasso Sea
AYENNVIGKNASETGWDFDIYIHYGAGAYICGEETALLESLEGKKGLPRLKPPFPALIGLYGCPTIINNVETIAVVPTILKRER

SEQ ID NO: 100969 - protein, 316 aa, Unknown
  Bacterial polypetide isolated from the Sargasso Sea
MLKLKVNDIEVEVEEGLTVLQACEKAGVEIPRFCYHEKLSIAGNCRMCLVELEKSPKPIASCAMPAADGMVIKTNTPNIEKSRKGVMEFLLANHPLDCPVCDQGGECDLQDQSMFYGIDKSRFKENKRAVPDKNMGPLIKTQMTRCIHCTRCIRFATEIAGVPELGAIGRGEDMQISTYLEKSIQSELSGNVIDLCPVGALTSKPYVFEARPWELKKTETIDVMDAVGSNIRVDTYDWEVKRVLPVINEEINEEWISDKTRYACDGLLNQRLDTPYIKYNNKFEKASWDEVYKIIKSKIKNTKKENICGFVGDLTN

SEQ ID NO: 100970 - protein, 211 aa, Unknown
  Bacterial polypetide isolated from the Sargasso Sea
LGREKNTGTKIFCISGNVNNPCNVEEEMNIPLKELIEVHAGGVVGGWDNLQAVIPGGSSMPLIPKEKCETLTMDFDSLMAEKSGLGTAGVVVINKDQDIIKCMARIARFYKHESCGQCTPCREGTGWMWRMLERMSKGEATRDEVDMLGDVTNQIAGHTICAFGEGSSWPVQGLLRHFKKEIKERNKFDPIVKENKNIPYLVDQHLLDKNA

SEQ ID NO: 100971 - protein, 237 aa, Unknown
  Bacterial polypetide isolated from the Sargasso Sea
MPKLKVNDKEIEVEEGFTVLQACEQAGFEIPRFCYHEKLSIAGNCRMCLVEIEKSPKPIASCAMPATEGMNIKTNTSLVEKARKGVMEFLLVNHPLDCPVCDQGGECDLQDQSMFYGVDKSRFKENKRHVPEKYMGPLIKTQMTRCIHCTRCVRFATEVAGVPELGAIGRGENMQITTYLEKAMESELSANVIDLCPVGALTSKTYVFEARPWELKKTESIDVMDAVGSNIRVDTYG

SEQ ID NO: 100972 - protein, 201 aa, Unknown
  Bacterial polypetide isolated from the Sargasso Sea
YCISGNVNNPCNVEEEMGVPLKDLIEKHAGGVIGGWDNLKAVIPGGSSMPLLPKHICDTIKMDFDACVENKTGLGTAGIVVINNDQDIIKCMARIARFYKHESCGQCTPCREGSGWMWRMLERMAKGEASREEVDMLMDVTKQIEGHTICAFGEGSAWPVQGLLRHFKKEIEKRNNFNPLINTGQKNPYLVDQHLLEKENA

SEQ ID NO: 100973 - protein, 464 aa, Unknown
  Bacterial polypetide isolated from the Sargasso Sea
MTDQIKINVNGSEISSKPDQLIIEACEDSGIHIPRFCWHKRMDPVGMCRMCLVEIETPRGKALVPSCTTKVSEDLVVDTESDVVKKAQEGVLEFLLINHPLDCPVCDKAGECPLQDQTMAYGPGESRFVEDKRHFEKPIPISEIILLDRERCILCARCTRFSDEISGDPLIEFIQRGNKTQVNTFPDEPFRSYFSGNTVQICPVGALTSSSYRFKARPWDLKKVSSTSNCSSVGDSVELNVSQNKMLRILGEDNEFTNQGWLSDKGRYNFEYLHSDKRIETPLLVKNSNKELTINESMELISNEILTSNNPNISFIVGHNSTNEEYFALNKFAENLNKIENDNTVSNINFYLSDDYLYNGFFNDDYLLGEIKDLDSADTIILWAQDIKDNLPTLYLRIKQAVRNGKKLLIFGHTNTAIKQLSEEYYGENIVTNNFEFNVEISDIPNLSKYIDGKDVLAIVGKAS

SEQ ID NO: 100974 - protein, 410 aa, Unknown
  Bacterial polypetide isolated from the Sargasso Sea
TVLQHVNQAGAEIPRFCYHEKLSIAGNCRMCLVEMEKSPKPIASCAMPATEGMVIKTNTEKVEKARKGVMEFLLANHPLDCPVCDQGGECDLQDQSMFYGIDKSRFKENKRYVPEKYMGPLIKTQMTRCIHCTRCIRFATEVAGVPELGAIGRGENMEITTYLEKSMESEMSANVIDLCPVGALTSKPYVFEARPWELKKTETIDVMDAVGSNIRVDTYDWEVKRVLPRINDEINEEWISDKTRYACDGLKNQRLDKPFIKNNGNFEEISWQDAYKKIKEKISITSPDKIVGLTGDMTNMETMFAVKNLFQKTLNSSYLDSRAKDTYINFENRSNYLFNSGIEGIEESDLILLMGTNPRFEATILNSRIRKTYLKNKTEIFSLEDVGDLTYPYKVLENNSKVIDKIIKNE

SEQ ID NO: 100975 - protein, 219 aa, Unknown
  Bacterial polypetide isolated from the Sargasso Sea
MRKGGKWFASLGKPKNTGTKIFCISGNVNKPCNVEEEMGVPLKELIEKHAGGVIGGWDNLKAVIPGGSSMPLLPKDICETVTMDFDSLINNKSGLGTAGVVVINKDQDIIKCMARIARFYKHESCGQCTPCREGSGWMWRMLERMAKGEASKEEVEMLMDVTKQIEGHTICAFGEGSSWPVQGLIRHFKKEIMERNNFKPIINKDRKIPYLVDQHLLDK

SEQ ID NO: 100976 - protein, 490 aa, Unknown
  Bacterial polypetide isolated from the Sargasso Sea
MKIKINNKECSFNKGETIIQIADRNGIHIPRFCYHDKLSIAANCRMCLVEQVGINKPQPACSTPAMEDQEYFTKSELASNSQKNTMEFLLINHPLDCPVCDQGGMCELQDQALMHGRVKSRYEQEKRIVMDYKIGPLITTNMTRCIHCTRCVRFGEEIAGIKEFGAFGRGEGMEIRTYLKSAIDSPMSGNMIDICPVGALNAAPSHMKGRTWELEEVKHISSHDCVGSNMDLHVLDNSIFRVVPHENKKINEVWISDRDRFSYEAMEHTDRVKKPIAKINGRHVEVEWEQAFEIIYEKINKVKFNKSAGFVSANSTVEEQYLFQKWLREININNIDHRVSQNKFEYEDELIFPKIDINIEEIENIESVLLIDSNITYEQPILSHKIRKAYLKNAKINSIHSYSYNYNFDINNSFLVNPNQLAETLIDIVEYLTIITINDKSLKKFTIPDGIKKKFKGLSNKKIIEISNDILTKNSLIILGSNLKNHPDYA

SEQ ID NO: 100977 - protein, 280 aa, Unknown
  Bacterial polypetide isolated from the Sargasso Sea
MPKLKVNDIEVEVEDGLTVLQACEKAGAEIPRFCYHEKLSIAGNCRMCLVEMEKSPKPIASCAMPAAEGMNIKTNTPFVEKARKGVMEFLLANHPLDCPVCDQGGECDLQDQSMFYGVDKSRFKENKRAVPEKHMGPLIKTQMTRCIHCTRCVRFATEVAGVSELGAIGRGEDMQITTYLEQSMQSELSANVIDLCPVGALTSKPYVFEARPWELKKTETVDVMDAVGSNVRVDTYDWEVKRVLPIINEDINEEWISDKTRYACDGLLNHRLDTPFIKYN

SEQ ID NO: 100978 - protein, 313 aa, Unknown
  Bacterial polypetide isolated from the Sargasso Sea
MHIYINDTKLDVNENETIIQVADRNDIHIPRFCYHKRLSIVASCRMCLVDIENVKYPQPACSTIVKEGMRINTNNRTAEAAQKNTMEFLLINHPLDCPVCDQAGECELQDVSLEHGDYKSTYKELKRTVIDKNIGELVHTEMTRCIHCSRCVRFGEEVAGIKELGMTGRGEETKIETFINEGLSSQLSGNVIDLCPVGALNNSLYKYSARTWDLKQMSSISSNDCLGSNIFYHTYKDDIKRCVPKEDEEINLSWLSDNDRFGYEGIKSEDRILHPLIRRNENLEKTDFNSLTEKFSEYLEKYSSGSCAIMSAQ

SEQ ID NO: 100979 - protein, 332 aa, Unknown
  Bacterial polypetide isolated from the Sargasso Sea
MPKITINGKEIEFERGMTVLQACELADVEIPRFCYHEKLSIAGNCRMCLVEMEKSPKPIASCAMPAAEGMNIKTNTTLVEKARKGVMEFLLANHPLDCPVCDQGGECDLQDQSLYYGVDKSRFVENKRDVKEKYMGPLIKTQMTRCIHCTRCVRFATEVAGVPEIGAIGRGENMEITTYLEKSMESELSANVIDLCPVGALTSKPYAFEARPWELKKTESVDVMDAVGSNIRVDTYNWEVKRILPRLNNEINEEWISDKTRYSCDGLLKQRLDVPYIKKNNKLQKSSWDEAINLLIDKINSVQPNEIAGHIGDMINMENALSFKKFFKSLKS

SEQ ID NO: 100980 - protein, 297 aa, Unknown
  Bacterial polypetide isolated from the Sargasso Sea
YVRGEYFPSIKSLNEAIDELYAAGLLGENALGKGKRLDLTVHTGAGAYICGEESALLDSLEGKRGHPRVKPPFPAVSGFNACPTTVNNVETLTCLPFIVNEGAEAFKDFGPENNAGTHLVSLSGHVEKPGVYEVRMDVTLKQIIFDLGGGIRGGKALKGVIPGGASSPVLTAKEIDVEYSFDALGKAGTMMGSAAVMVFDEDTDVVKLLHRITRFFNHESCGQCTPCREGTHWARLIVQDFLKGNGNERKMKRLHRVGGNMMGTTVCALGDAAAMPITSFVTKFPEEFEKYYTQAAA

SEQ ID NO: 100981 - protein, 383 aa, Unknown
  Bacterial polypetide isolated from the Sargasso Sea
MPKLKVNDIDIEVEDGLTVLQACEQAGAEIPRFCYHEKLSIAGNCRMCLVEMEKSPKPIASCAMPAAEGMVIKTNTEKVEKARKGVMEFLLANHPLDCPVCDQGGECDLQDQSMFYGIDKSRFKENKRYVPEKYMGPLIKTQMTRCIHCTRCIRFATEVAGVPELGAIGRGENMEITTYLEKSMESEMSANVIDLCPVGALTSKPYVFEARPWELKKTETIDVMDAVGSNIRVDTYDWEVKRVLPRINEEINEEWISDKTRFACDGLKNQRLDTPFIKNNGNFEEVSWQDAYKKIKEKISTTSPDKIVGLTGDMTNMETMFAVKNLFQKTLNSSYLDSRAKHTYINFQNRGNYLFNSSIEGIEESDLILLIGTNPRFEATILN

SEQ ID NO: 100982 - protein, 126 aa, Unknown
  Bacterial polypetide isolated from the Sargasso Sea
MTADEIDVLYNFDELANIDTMLGSAAMMVFDEDTDVVQLLHRITRFYAHESCGQCTPCREGTHWSRNILRDFLNMNGSEEKLRRLDRVGGNMLGTTLCALGDAAALPIQSFVKKFPDDFRKYYANK

SEQ ID NO: 100983 - protein, 172 aa, Unknown
  Bacterial polypetide isolated from the Sargasso Sea
VEKPGVYEVRMDVTLKQIIYDLGGGIRGGKALKGVIPGGASSPVLTAKEIDVEYSFDALGKAGTMMGSAAVMVFDEDTDVVKLLHRITRFFNHESCGQCTPCREGTHWARLIVQDFLKGNGNERKMKRLHRVGGNMMGTTVCALGDAAAMPITSFVAKFPEEFEKYYTQAAA

SEQ ID NO: 100984 - protein, 157 aa, Unknown
  Bacterial polypetide isolated from the Sargasso Sea
MPKPISAVFNWARSYSLWYFQFGLACCAIEVMAVSGPRHDFMRLGVIPLPASPRQADLMIVAGTVTDKMAPAVKRLYDQMPEPKYVISMGSCSNSGGPYWDSYSVTKGVDQLIPVDVYVPGCPPRPEALQEGIILLQQKIKGEDIKAKWNEEQIEPV

SEQ ID NO: 100985 - protein, 675 aa, Unknown
  Bacterial polypetide isolated from the Sargasso Sea
MLKLKVNEIEVEVEEGLTVLQACEEAGVEIPRFCYHEKLSIAGNCRMCLVEMEKSPKPIASCAMPAAEGMNIKTNTALVEKARKGVMEFLLANHPLDCPVCDQGGECDLQDQSMYYGVDKSRFKENKRAVPEKNMGPLIKTQMTRCIHCTRCVRFATEVAGVPELGAIGRGEDMQITTYLEQSMQSELSANVVDLCPVGALTSKPYVFEARPWELKKTETIDVMDAIGSNVRVDTYDWEVKRVLPIINEDINEEWISDKTRYACDGLLHQRLDTPFIKYNGKFEKASWDEVYKIIKSKFENTPKEKICGFVGDLTNMETSYIFKEFFDRTIDNKNYESRSDNRFINTSKRENYLFNSSINGIEEADLILIAGSNPRYEATILNARIRKAYLKNNTKIISLNDVGDLTYPYQSLNGQTQTLNNILEGNHDVSKEIIKSKKPIIIIGESLLRLKSSEFLFNKTKEFLSKNNKISDEWNSLNILSSDAATVGNIDLGIINNENNLISDLKEHKFDIVYLMGQDNLEFDKKNEFIIYQGSHGDKGAESADIILPGAAYTEQDGYFTNLEGKIQKAYKASYPPGEAKEDWQIINEIAEFMNNRKLFNDKDELESSMFNYLNLQKEKQVNDINNSTYEFQNETLTIKVKDYYFSNVIARSSKTMVECNNSKLNLKSTGTEG

SEQ ID NO: 100986 - protein, 502 aa, Unknown
  Bacterial polypetide isolated from the Sargasso Sea
MLKLKVNDIDVEVEEGLTVLQACEKAGVEIPRFCYHEKLSIAGNCRMCLVEMEKSPKPIASCAMPAAEGMNIKTNTSLVEKARKGVMEFLLANHPLDCPVCDQGGECDLQDQSMFYGVDKSRFKENKRAVPEKNMGPLIKTQMTRCIHCTRCVRFATEVAGVPELGAIGRGEDMQITTYLEQSMQSELSANVVDLCPVGALTSKPYVFEARPWELKKTETIDVMDAIGSNIRVDTYDWEVKRVLPIINEDINEEWISDKTRYACDGLLHQRLDTPYIKYNGKFEKASWQEVYKIIKSKLENTSKEKVSGFVGDLTNMETAYIFKEFFDRTVETDNYESRSDNRYINTTKRENYLFNSSINGIEDADLILLLGANPRYEATILNARIRKSYLNNNTKIVSLNDCGDLTYPYESLDGQTKTIKEIIDDAHILSKEIESAKKPMIIIGESLLRLENAKYLFDNLKDFLNKKNKFSEDWNPLNILSCDAATVGNFDLGVLNNKTNK

SEQ ID NO: 100987 - protein, 360 aa, Unknown
  Bacterial polypetide isolated from the Sargasso Sea
MAKEKKTLNLNFGPQHPAAHGVLRLILQLDGEVVEKADPHIGLLHRGTEKLIENKTYIQAVPYFDRLDYVAPMNQEHAFALAIEKILKIEVPTRAKYIRVIFCEIGRILSHILNVTTQAMDVGALTPTLWGFEEREKLMGFYERVSGSRLHANYFRAGGVHKDLPSGLESDIDEFCEKFPKIIDDLETLLTDNRIFKQRNVDIGIVSKQDALDYSFSGVMLRGSGVAWDLRRSQPYDCYDDLEFKIPVGKNGDCYDRYLCRIEEMRESVKIIKQCLTNIPKGPIKTEDGKISPPPKKELKQSMEALIHHFKLFTEGYRVEKDEIYTAVEAPKGEFGVYLISDGSSKPYKCKIRAPGFTHL

SEQ ID NO: 100988 - protein, 677 aa, Unknown
  Bacterial polypetide isolated from the Sargasso Sea
MSDDLINIKVNQKEIQVDKNLTVMQACEIAGEEIPRFCYHDKLSIAGNCRMCLVEIEKAPKLVSSCTMPLMEGMSIITNSEKVNAGRKGVMEFLLINHPLDCPICDQGGECDLQDQAMYYGFDKSRYKENKRAVDNKNMGPLVNTIMTRCIHCTRCVRFATEVAGVPELGMLGRGENAEITTYLEKSITSELSGNVIDLCPVGALTSKPYQFKARPWELKRTDSIDIFDSVGSNIRVDSRAEEILRVTPRTNEYINEEWISDKVRFNYDGYYQQRIDTPYIKENQKLSISNWEESLKVLKDKLKTLKPLALIGEHVDLETGYAIKKFMSNYGKDNVECRTDNHTILESLDSYRFNTPLNDIENSDLIILLGTNPKIETPIINHKIFKAYNNDAKVFNIGENISLNYKTEYLGESLSSLNNENLIKALKKSSNPLMIIGSAFLNKIKNIKTLKSIFSYADKYKVITKEKNNLNFLNPYASRVGQLIIGNTTNNLCEPFSNLKKDNFELVLSFGSEHIANEQFNNCFKVYFGHHGDDGAMGSDIVLPTPLYTEKNGTFVNIEGRPQEAKKCHNPIGSAKEEWSILKKLSDELSFDFTPNTFDQLRSDLFDKYPILSDYHEIIAVENSISITPDIEFEDCKAEYPVSNFYMSDVISKNSVTMAKCVEEIISTPSLLEKSA

SEQ ID NO: 100989 - protein, 410 aa, Unknown
  Bacterial polypetide isolated from the Sargasso Sea
MIKLKVNDKEIDVEEGLTVLQACEQAGFEIPRFCYHEKLSIAGNCRMCLVEMEKSPKPIASCAMPAAEGMNIKTNTPKVEKSRKGVMEFLLANHPLDCPVCDQGGECDLQDQSMFYGIDKSRFKENKRHVPEKYMGPLIKTQMTRCIHCTRCIRFATEVAGVPELGAIGRGEDMQITTYLEKAMESELSANVIDLCPVGALTSKPYVFEARPWELKKTETIDVMDAVGSNIRVDTYGWEVKRVLPKVNDDINEEWISDKTRYACDGLKNQRLDSPFIKRNGQFQKTSWEDAYSLIKLKINQTTPDKISGFTGDLTNMETQFAAREFFDKILNSNYLESRSENIFVDTSKRENYIFNSSINSIEESDFILLVGTNPRYEATILNSRIRKSYLNNRAEIYSFWRSRRFNISL

SEQ ID NO: 100990 - protein, 237 aa, Unknown
  Bacterial polypetide isolated from the Sargasso Sea
WLSYIINNVETIAVVPTILRKGGNWFSSLGKEKNTGTKIFCISGNVNNPCNVEEEMSIPLKELIEVHAGGVVGGWENLQAVIPGGSSMPLIPKEKCETLTMDFDSLVKEKSGLGTAGVVVINKDQDIIKCMARIARFYKHESCGQCTPCREGSGWMWRMLERMAKGEASKNEVDMLMDVTKQIEGHTICAFGEGSSWPVQGLIRHFKKEIEKRNNFDPLINKDRKIPYLVDQHLLDK

SEQ ID NO: 100991 - protein, 290 aa, Unknown
  Bacterial polypetide isolated from the Sargasso Sea
MVKVKINGIENDVQEGVTILQACEEAGLEIPRFCYHDRLSIAGNCRMCLVDVEGAPKPVASCAMPINEGMSIHTNTQTVKKAREGVMEFLLINHPLDCPVCDQGGECDLQDQTVAFGPENSRFNENKRSVDEKHMGPLIKTYMTRCIHCTRCIRFGDEVAGVNQLGALNRGENMEITTYLEQTLDSELSANIVDLCPVGALTSKPYQFEARPWELKKTESIDVMDAVGSNIRVDTYGWKVKRILPVLNEDINEEWISDKTRYACDGLLTQRIDTPLIKNNGKFVESDWNE

SEQ ID NO: 100992 - protein, 262 aa, Unknown
  Bacterial polypetide isolated from the Sargasso Sea
MIKMFFKEDWIPKFSDRVIFTLAPMIAFTSLLLAFAIVPVSPNWVVADLNIGILFFLMMAGLAVYAVLFAGWSSNNKYSLLGAMRASAQTLSYEVFLGLSLMGVVAQAGSFNMTDIVNNQADIWNVIPQFFGFVTFAIAGVAVCHRHPFDQPEAEQELADGYHIEYSGMKFGLFFVGEYIGIVTISALMVTLFFGGWHGPFLPPFVWFALKTAFFMMMFILIRASLPRPRYDQVMSFGWKVCLPLTLVNLLVTAAVILWQAQ

SEQ ID NO: 100993 - protein, 676 aa, Unknown
  Bacterial polypetide isolated from the Sargasso Sea
MLKLKVNELDIEVEEGLTVLQACEQAGVEIPRFCYHEKLSIAGNCRMCLVEMEKSPKPIASCAMPAAEGMVIKTNTEKVEKSRKGVMEFLLANHPLDCPVCDQGGECDLQDQSMFYGIDKSRFKENKRYVPEKYMGPLIKTQMTRCIHCTRCIRFATEVAGVPELGAIGRGEDMQITTYLEKAMESEMSANVIDLCPVGALTSKPYVYEARPWELKKTETIDVMDAVGSNIRVDTYGWEVKRILPRINEDINEEWISDKTRYACDGLKNQRLDTPYLKNKNKFEKITWEKAYAKIFEKISVTPSDKIAGISGDMTNMETLYIIKEFFEKTIKSKNLDSRTENYYVNLSSRNNYIFNSKITGIEESDLIILIGTNPRYEATILNSRIRKAYKKNNTKIYSLGNVGDITYPYIELENSTNIIDEIINNNNTLSKIINDSKKPIIIIGQSALKLNSSVYIFEGLKKYLTKINKINKDWNSLNVLSNNASTVGSYDLNILSSNNEKNITLEKIKKNDFDVVFLFGQENLKFKKKNEFIIYIGSHGDRGAEMADIILPGASYTEQDGYFTNLEGKIQKAYQASYPPGDAKEDWKIINELSATLKRKNLYSNKDELIKSMMNYLNLYKDKKDFDIPEYKFIEEKIHVDDIDYYHSNSIARSSKTMAECKNLLKNIKKTGTYG

SEQ ID NO: 100994 - protein, 445 aa, Unknown
  Bacterial polypetide isolated from the Sargasso Sea
MPKIIINDKEIEFEDGMTVLQACELAGAEIPRFCYHERLSIAGNCRMCLVEMEKSPKPIASCAMPAADGMKIKTNTNFVDKARKGVMEFLLANHPLDCPVCDQGGECDLQDQSLFYGFDSSRYSENKRQVSEKYMGPLIKTQMTRCIHCTRCIRFATEVAGIPELGAIGRGEDMEITTYLEKSMESELSANVIDLCPVGALTSKPYAFEARPWELKKTETIDVMDAVGSNIRVDTYGWEVKRILPIINEDINEEWISDKTRYACDGLSKQRIDVPYIRENGNLRKSSWVEALNLIIDKIKKLNPNEIAGVVGDLADLEMIYSFKSFFEKCIGSLNLECRQDKTYLNPNSRMNYIFNSKINGIEDSDLILLVGTNPRLEATILNARIRKTYVKNKIKIYSVGDPGDLTYPYEIIGSNTSDIKDIISDKNLISSMIKKSKKPLIIME

SEQ ID NO: 100995 - protein, 241 aa, Unknown
  Bacterial polypetide isolated from the Sargasso Sea
MLKLKVNDIDVEVEEGLTVLQACEQAGVEIPRFCYHEKLSIAGNCRMCLVEMEKSPKPVASCAMPAADGMVIRTNTEKVEKSRKGVMEFLLANHPLDCPVCDQGGECDLQDQSMFYGIDKSRFKENKRYVPEKYMGPLIKTQMTRCIHCTRCVRFATEVAGVPELGAIGRGEDMQITTYLEKAMESELSANVIDLCPVGALTSKPYVFEARPWELKKTETIDVMDAVGSNIRVDTYGWEVK

SEQ ID NO: 100996 - protein, 123 aa, Unknown
  Bacterial polypetide isolated from the Sargasso Sea
IVVINKDQDIIKCMARIARFYKHESCGQCTPCREGSGWMWRMLERMAKGEATRDEVDMLMDVTKQIEGHTICAFGEGSSWPVQGLIRNFKDEILERNKYDPLIQRKKEVPYLVDQHLLEKENA

SEQ ID NO: 100997 - protein, 132 aa, Unknown
  Bacterial polypetide isolated from the Sargasso Sea
MGVEINEDNFGDQLNSKGFLVSNFDKLLTWARTGSLWPMTFGLACCGVEMIHTYMARYDLDRYGVIPRGSPRQSDVMIVAGTLTNKMAPALRKVYDQMPEPRWVISMVLAQMVVDIIITRILLYGVAIELCQ

SEQ ID NO: 100998 - protein, 80 aa, Unknown
  Bacterial polypetide isolated from the Sargasso Sea
MAPALRKVYDQMPEPRYVISMGSCANGGGYYHYSYSVVRGCDRIVPVDVYVPGCPPSAEALLYGILQLQKKIRNKGSITR

SEQ ID NO: 100999 - protein, 498 aa, Unknown
  Bacterial polypetide isolated from the Sargasso Sea
MLKLKVNDIDVEVEEGLTVLQACEQAGVEIPRFCYHEKLSIAGNCRMCLVEMEKSPKPIASCAMPAAEGMVIKTNTEKVEKSRKGVMEFLLANHPLDCPVCDQGGECDLQDQSMFYGIDKSRFKENKRYVPEKYMGPLIKTQMTRCIHCTRCIRFATEVAGVPELGAIGRGEDMQITTYLEKSMESEMSANVIDLCPVGALTSKPYVFEARPWELKKTETIDVMDAVGSNIRVDTYGWEVKRVLPRINEEINEEWISDKTRYACDGLKHQRLDTPYIKSKNKFEKISWNEAYSKIFDKISITASDKIAGITGDMTNMETLYIIKDFFDKTIKSNNLDSRNENYYVNSSSRNNYIFNSKISGIEDADLIFLIGTNPRYEATILNSRIRKTYMNKNINIYSLGPVGDITYPYITLENSTKTIKDIINNNHELSKIIDTTKKPMFIIGQSVLKQSSSIYLLEELKKYLTKNNKINDDWNSLNILSNNASTVGSYDLNILSS

SEQ ID NO: 101000 - protein, 211 aa, Unknown
  Bacterial polypetide isolated from the Sargasso Sea
MIKLKVNDVDIEVEEGLTVLQACEKAGVEIPRFCYHEKLSIAGNCRMCLVEIEKSPKPVASCAMPISEGINIKTNTEKVEKARKGVMEFLLANHPLDCPVCDQGGECDLQDQSMFYGIDKSRYKENKREVPDKYMGPLVKTQMTRCIHCTRCIRFATEVAGVPELGAIGRGEDMQITTYLEKSMESELSANVIDLCPVGALTSKPYVFEAR

SEQ ID NO: 101001 - protein, 366 aa, Unknown
  Bacterial polypetide isolated from the Sargasso Sea
MLKLKVNEIDVEVEEGLTVLQACEKAGVEIPRFCYHEKLSIAGNCRMCLVEMEKSPKPIASCAMPAAEGMNIKTNTEFVEKARKGVMEFLLANHPLDCPVCDQGGECDLQDQSMYYGVDKSRFKENKRLVPEKNMGPLIKTQMTRCIHCTRCVRFATEVAGVPELGAIGRGEDMQITTYLEQSMQSELSANVVDLCPVGALTSKPYVFEARPWELKKTETIDVMDAVGSNIRVDTYDWEVKRVLPIINEDINEEWISDKTRYACDGLLYQRLDTPYIKYNKKFEKASWAEVYKIIKSKFENTTKDKICGFVGDLTNMETSYIFKEFFDRTLNNNFYESRVDNRFINTSKRENYIFNTSNNGIEEAD

SEQ ID NO: 101002 - protein, 400 aa, Unknown
  Bacterial polypetide isolated from the Sargasso Sea
MPKLKVNDIEVEVEDGLTVLQACEKAGAEIPRFCYHEKLSIAGNCRMCLVEMEKSPKPIASCAMPAAEGMNIKTNTAFVEKARKGVMEFLLANHPLDCPVCDQGGECDLQDQSMFYGVDKSRFKENKRSVPEKYMGPLIKTQMTRCIHCTRCVRFATEVAGVSELGAIGRGEDMQITTYLEQSMQSELSANVIDLCPVGALTSKPYVFEARPWELKKTETVDVMDAVGSNVRVDTYDWEVKRVLPLINEDINEEWISDKTRYACDGLLNQRLDTPFIKYNGKFEKASWDEVFKIIKSKFENSSKEKICGFVGDLTNMETGYIFKEFFDRTLSNHNYDSRSDNRYVDVKERENYIFNSSINGIEDADLIFLIGANPRYEATILNARIRKAFVNNNTKNNLT

SEQ ID NO: 101003 - protein, 39 aa, Unknown
  Bacterial polypetide isolated from the Sargasso Sea
MARIARFYKHESCGQCTPCREGSGWMWRMLERMAKRRRY

SEQ ID NO: 101004 - protein, 438 aa, Unknown
  Bacterial polypetide isolated from the Sargasso Sea
MTTGSALYIPPYKADDQDVVVELNNRFGPDAFTAQATRTGMPVLWVARARLVEVLTFLRNLPKPYVMLYDLHGVDERLRTKRQGLPSGADFTVFYHLMSLERNSDVMIKVALSESDLSIPTVTGIWPNASWYEREVWDMFGIDFPGHPHLTRIMMPPTWEGHPLRKDFPARATEFDPFSLNLAKQQLEEEAARFRPEDWGMKRSGTNEDYMFLNLGPNHPSAHGAFRIILQLDGEEIVDCVPDIGYHHRGAEKMAERQSWHSFIPYTDRIDYLGGVMNNLPYVLSVEKLAGIKVPDRVDTIRIMMAEFFRITSHLLFLGTYIQDVGAMTPVFFTFTDRQRAYKVIEAITGFRLHPAWYRIGGVAHDLPNGWERLVKEFIDWMPKRLDEYQKAALDNSILKGRTIGVAQYNTKEALEWGVTGAGLRSTGCDFDLRKARP

SEQ ID NO: 101005 - protein, 461 aa, Unknown
  Bacterial polypetide isolated from the Sargasso Sea
MLKLKVNEIEVEVEEGLTVLQACEKAGVEIPRFCYHEKLSIAGNCRMCLVEMEKSPKPVASCAMPAAEGMNIKTNTALVEKARKGVMEFLLANHPLDCPVCDQGGECDLQDQSMYYGVDKSRFKENKRAVPEKNMGPLIKTQMTRCIHCTRCVRFATEVAGVPELGAIGRGEDMQITTYLEQSMQSELSANVVDLCPVGALTSKPYVFEARPWELKKTETIDVMDAIGSNVRVDTYDWEVKRVLPIINEDINEEWISDKTRYACDGLLHQRLDTPFIKYNGKFEKASWDEVYKIIKSKFENTSKEKICGFVGDLTNMETGYIFKEFFDRTVDVKNYDSRSDNRFINTSKRENYLFNSYLNGIEEADLILLVGTNPRYEATILNARIRKAYLNNNTKIISLNDVGDLTYPYQSLDGQTQTLNNILEGTHEISKEIINSKKPMIIIGESLLRLKFSEFLFNKT

SEQ ID NO: 101006 - protein, 153 aa, Unknown
  Bacterial polypetide isolated from the Sargasso Sea
MPLIPKEKCETLTMDFDSLIAEKSGLGTAGIVVINKDQDIIKCMARIARFYKHESCGQCTPCREGSGWMWRMLERMAKGDATKDEVDMLGDVTNQIAGHTICAFGEGSSWPVQGLLRHFKKEIEKRNNLDPIVQKKNNIPYLVDQHLLEKKNA

SEQ ID NO: 101007 - protein, 584 aa, Unknown
  Bacterial polypetide isolated from the Sargasso Sea
MSDNKKIIVTIDGIEHEARPGQMLIELTDQTGTYVPRFCYHEKLSIAANCRMCLVEVENSNNALPACATPVSDGMVVKTKSKSAKTAQESTMEFLLINHPLDCPICDQGGECELQDLAYTYGKNQSRFDIQKQTKKNDDLGPLVSTDMTRCIMCTRCVRFGTEIAGIQELGTIGRGEDSNISTYVSQTVDHELSGNIIDLCPVGALNNKPYRYTDRTWELDQVESISPHDCIGTNIMVHKKDDIIRRIVPKNNPEINEAWIADRDRFGFDGIYSEDRVSNALIKSDKDFDESKLSNAIDQVVEHIRSCKNENRSIAVLFSPSSSTEEQYLLSDLCHQLGITAIDSRLRQGEFINDLDRRFTPHMNITLSEVDTMKNTLVIGSDLRKETPILAHRVKKSADSGALIHSINAHSSEYHFKIDQDLSTDNWVNNIGLVLKAAINLTKNHLPNNIADHLDLLDEPTAEHEKVAASMCQDNSLIILGLNAYSNHKYQLIRSYVHILASVCKTNLCELSEGSNTIGASIHHTINDGAENIQNTSEILQSKHDLLIMYGFEPNDTIYKNELIECMKSANSLVVFSPYMNEH

SEQ ID NO: 101008 - protein, 339 aa, Unknown
  Bacterial polypetide isolated from the Sargasso Sea
SEPGTCHDRDILKYNPHALVEGMAIAGYAIGATVGYNYVRGEFMLECYPRIDAAVKDAYDAGLLGVNVLDSGIDFDLYNFLGAGAYICGEETGLLESLEGKQGKPRFKPPFPANYGLYGKPTTVNNTQTLATIPKILEKGAKWYADFGTEKSPGTLIFSISGHVNKPGNYELPLGISFEEVIDVAGGVLDGKKLKAVIPGGSSTKVLPAEIIQNCTMDYESLQDADSALGTGAMVVISEGTCMVELLKRISRFYYAESCGQCTPCREGTGWLYRILERITNGQGKESDLALLVDVAGRIEGNTICAFGDASAWPVQSFIKHYHHEFEYMIQNKGKTLAA

SEQ ID NO: 101009 - protein, 629 aa, Unknown
  Bacterial polypetide isolated from the Sargasso Sea
MPKITVNNKEIEFENGMTVLQACELAGAEIPRFCYHERLSIAGNCRMCLVEMEKSSKPIASCAMPATEGMKIKTNTEKVEKARKGVMEFLLANHPLDCPVCDQGGECDLQDQSLYYGFDKSRFKENKRKVKDKYMGPLIKTIMTRCIHCTRCVRFATEVAGVTEIGAIGRGENMEITTFLEKSMESELSANVIDLCPVGALTSKPYAFEARPWELKKTETIDVMDAVGSNIRVDTYGWEVKRVLPRLNEEINEEWISDKTRYACDGLLKQRIDKPFKRENGKLIECSWDEALNIVGSKIKETDKNQIGFHAGDMLSMETINSLKEFAKKLSIPNYEFREKPFYLNSDNKMNYIFNSSIKGIEESDCIVLIGTNPRHEATMLNARIRKAFVAKKIPIISFGDPGDLTYDYTNAGNSTEDIKKLLNKENETSKILLNSKKPIIIIGESALELESAKFILQGIKKFLKENNFINDNWNAFNVLLQNASSVGAIDLGFFEKDNSFNFFNKLKNNEFELLYFVGSDNLDFVKSNEFIIYQGSHGDRMAQIADVILPSPAYTEQNGLFINLEGRLQKSNKSTYPPGSSKEDWKIFNLILNNLEEDEKFKNFVELRTDTISKIKNQTDFDLLPKKT

SEQ ID NO: 101010 - protein, 299 aa, Unknown
  Bacterial polypetide isolated from the Sargasso Sea
MAKEIKKLNLNFGPQHPAAHGVLRLILQLDGEVVEKADPHIGLLHRGTEKLIENKTYIQAVPYFDRLDYVAPMNQEHAFALAIEKILKIDVPIRAQYLRVIFCEIGRILSHILNVTTQAMDVGALTPTLWGFEEREILMGFYEKVSGSRLHANYFRAGGVHQDLPKGLENEIAEFCLKFPNIIDDLETLLTDNRIFKQRNVDIGVVTKQDALDYSFSGVMLRGSGVPWDLRKSQPYDCYDQLQFKVPIGNNGDCYDRYLCRIEEMRESVKIINQCLANLPSGPIKTNDGKISPPPKKEI

SEQ ID NO: 101011 - protein, 562 aa, Unknown
  Bacterial polypetide isolated from the Sargasso Sea
MSDQININVNGSEIRTDSDQLIIEACEDSGIHIPRFCWHKRMDPVGMCRMCLVEIETPRGKALVPSCTTKVSEDLVVDTESEVVKKAQEGVLEFLLINHPLDCPVCDKAGECPLQDQTMAYGPGESRFVEDKRHFEKPIPISEIILLDRERCILCARCTRFSDEISGDPLIEFIQRGNKTQVNTFPDEPFRSYFSGNTVQICPVGALTSTSYRFKARPWDLKKVSSTSNCSSMGCSVELNVSQNKMLRILGEDNEFTNQGWLSDKGRYNFEYLHSEKRILKPVLNNDSTNEISINESMKLISNEISVDDNSNISFIVGHNSTNEEYYALNNFVENLNKVNKDQNMNVYLSDDYLYEGFFQNTDLLGKVQDLDSVDTIILWAQDIKDNLPSLYLRIRQAVKNGKKLVIFGHTNTAMKELADSYFGQEIISKNLEFNVEISKIPNFNQLINDKNVLAIIGKSSPIQNTNPISNLINYLDKNSNLKILNCFSKGNTFGALQNIDLVKGLNEFINEFDSSKNNIVFTIGSNPVNSSIYSNQIKDKLINANFVVSLDLFKNETTELA

SEQ ID NO: 101012 - protein, 198 aa, Unknown
  Bacterial polypetide isolated from the Sargasso Sea
VESSTGTRIFSLSGHVRTPGNFEIEMGKSFGEFVDTFGNGIKDDKKVKAYIPGGASAPWFTGDQLDIKMTIDDVANAGSMLGSGAVVVMDEDTNLVYAAKSIVSFFAHESCGQCTPCREGTTWLEMILERIASGRGRLSDISLLVDVCDNISPGLSWPPKMTTICPLGPSAVSPITSLLDNFSDELMKMLPTKIPIAQ

SEQ ID NO: 101013 - protein, 676 aa, Unknown
  Bacterial polypetide isolated from the Sargasso Sea
MLKLKVNDIDIEVEEGLTVLQACEQAGAEIPRFCYHEKLSIAGNCRMCLVEMEKSPKPIASCAMPAANGMVIKTNTEKVEKSRKGVMEFLLANHPLDCPVCDQGGECDLQDQSMFYGIDKSRFKENKRYVPEKYMGPLIKTQMTRCIHCTRCIRFATEIAGVPELGAIGRGENMEITTYLEKSMESEMSANVIDLCPVGALTSKPYIFEARPWELKKTETIDVMDAVGSNIRVDTYGWEVKRILPRINEEINEEWISDKTRYACDGLKNQRLDKPFIKKNNKFQKISWNEAHKIIFDKISSTSSEKIAGVIGDMTNMETAFIAKEFFEKTLKSKNLDSRSEDFYVNFSDRSNYIFNSKIQGIEESDLIVLIGSNPRYEATILNTRIRKNYVNKKTEIFSLGDIGDLTYPYNIVENKTNIIKEIVNNKHELSNKIIKSNKPLIIVGQSVLKIKSGKYIFEELKKFLLNNNKINNDWNSLNILSNNASTVGSYDLGIFSSENGKNVTLDKIKNNNLEIIFLFGQDNLKFNKKKEFIIYIGSHGDRGAEMADIILPGSAYTEQDGYFTNLEGVLQKSYKASYPPGEAKEDWMIINDLSANIKRNKLYSNKEELLSSMLNYLKINKKNDLFKVDDFEFFDEKIKVEDIDYYHSNSIARASKTMNECKNIKLNFKKTGTEG

SEQ ID NO: 101014 - protein, 163 aa, Unknown
  Bacterial polypetide isolated from the Sargasso Sea
MGVFENKFQDNVVVASLDKLLGWARSTSPWFFQFGLACCAIEMMATAASRHDLMRIGMLPRSSPRQADVMIVAGTVTLKMALRVKKLYEQMANPKYVISMGSCATSGGPYWQHGYHVLKGVDLVVPVDVYVPGCPPRPEALIEGLLKLQEKIQSDRPLTRKIA

SEQ ID NO: 101015 - protein, 355 aa, Unknown
  Bacterial polypetide isolated from the Sargasso Sea
MVEIELDGQKVEVAEGCMVMHAAEKAGTYIPHFCYHKKLSIAANCRMCLVDVEKAPKPMPACATPVTQGMIVRTKSDKAIKAQQSVMEFLLINHPLDCPICDQGGECQLQDLAVGYGGSSSRYEEEKRVVFHKDVGPLISMEEMSRCIHCTRCVRFGQEVAGVMELGMIHRGEHSEITTVTGDTVDSELSGNMIDICPVGALTSKPFRYSARTWELSRRRSVSPHDSTGANLIVQVKNHKVMRVVPFENEAVNECWIADRDRFSYEALNGDDRLTQPMLKQGGVWKEVDWQTALEYVANGLKNIKNDHGAASIGALVSPHSTVEELYLASALVRGLGSDNIDYRLRNAEFAAPEG

SEQ ID NO: 101016 - protein, 836 aa, Unknown
  Bacterial polypetide isolated from the Sargasso Sea
MAKVKINGSEIEVSDGMTILQACEEAGIEIPRFCYHDRLSIAGNCRMCLVDVEGSPKPVASCAMPINEGMSIHTNTQSVKKAREGVMEFLLINHPLDCPVCDQGGECDLQDQTIAFGPENSRFEENKRAVEEKHMGPLIKTYMTRCIHCTRCIRFADEVAGVNQLGAVNRGENMEITTYLEKTLDSELSANIVDLCPVGALTSKPYQFEARPWELKKTETIDVMDAVGSNIRVDTYGWKVKRVLPVLNEDINEEWISDKTRYACDGLLNQRLDTPYIKKNNKLEQVSWEETFSQLKKLVMDSDPDEIAFLVGDFIDLETSYLIKKLSEDLSIKAVDGRQEGCKVPFNHRSQFLFNSKIKGIDETDCILMIGTNTREEAAIINSRIRKRVISSNIPVALIGKNVDLTYKYNHLGDDINILIDLLNEKNSFYKKLTNASKPMIIIGQSVLNRDDSLQIYSLLETFTDKFNLIQEDWNGFNVLQLAAARAGILEMGLIQKNKSVDDLVADAEKGKFKLVFSFGADEISYENFSNCKIVYMGTHGDRGANAADFILPAAAYTEKDAIFINTEGRVQYANKASFPPGEAREDWKIINQFSEVLELKWSFLELYDVRDEMFAKFPHLKEDFNDQNNGLVKIIDNKANEEVEIINKDTRSSQEKKNDTINGNIKSFEENSAKKIFNTAWADLNDRQREYLRKYNYPETWSEFTEHYGFKVVNDIKKKNNVVLPYEDQYANSIGKAWNDLTYNQKKWAYTKRNKNNLIGLADDANFSPDGIVVLNDNQEAYYAQPKEINFKIKNLSFSIEDFYINDSITRHSSTMAECSRARSEVRSTLTEKAS

SEQ ID NO: 101017 - protein, 117 aa, Unknown
  Bacterial polypetide isolated from the Sargasso Sea
MPKEKKTLNLNFGPQHPAAHGVLRLILQLDGEVVEKADPHIGLLHRGTEKLIENKTYIQAIPYFDRLDYVAPMNQEHAFALAIEKILKIEVPSRAKYIRVIFCEIGRILSHILNITT

SEQ ID NO: 101018 - protein, 403 aa, Unknown
  Bacterial polypetide isolated from the Sargasso Sea
MPKIIINGKEIEFEKGMTVLQVCELADVEIPRFCYHEKLSIAGNCRMCLVEMEKSPKPIASCAMPATEGMNIKTNTKLVEKARKGVMEFLLANHPLDCPVCDQGGECDLQDQSLYYGVDKSRFVENKRQVKEKYMGPLIKTQMTRCIHCTRCVRFATEVAGVPEIGAIGRGENMEITTYLEKSMESELSANVIDLCPVGALTSKPYAFEARPWELKKTESIDVLDAVGSNIRVDTYNWEVKRILPRLNNQINEEWISDKTRYSCDGLLKQRLDVPYLKINNKLQKSSWDEVINVIAKKINETNPEEIAGHVGDMISLENAFAFKKLFNHLNIKNLEFREKKFYINPEEKMNYIFNSSIQGIEDSDLILLIGTNPRLEATMLNARIRKTYVNKKIPIFSIGKPW

SEQ ID NO: 101019 - protein, 594 aa, Unknown
  Bacterial polypetide isolated from the Sargasso Sea
MSENIKINVNGNQIESAPNKLLIEACEDSGIHIPRFCWHKRLDPVGMCRMCLVEIETPRGKMLVPSCTTEVTDEMVVDTESEVVKKAQEGVLEFLLINHPLDCPICDKAGECPLQDQTMAYGPGESRFVEEKRHFEKPISISEIILLDRERCILCARCTRFSDEISGDPLIEFIQRGNKTEVNTFPNEPFKSYFSGNTVQICPVGALTSTSYRFKARPWDLKSVRSTCNGCPVGCSTELNSSQNKMLRILGVDNDSVNQGWLCDKGRYNFEYLNSEFRLKTPLKKIDNEFKEISVKEIYTELSELISDRNTNINFLIGTNSTNEDYVAFNEFAKNFPTTNQTFYLNDDYLYAGYFEKDINRATIDDLNNSEAIVIWSEDLKENLPVLYLRVRQAVKNGAKLIVFGHSNSTLKDIADFYYSEDTVSKNFEIIKDISKLKGIKEHVKDKNVTAIIGKSTPYQLDENLDKLVSYLVENSNSKIMNAFSSGNTFGAINNLDNVKNLRDFTKNVSSENTDLLFVVGSDPIGRSVFSNEIHRIIEDIDNVVCLDLFLHETSELGNYIIPTSSTLGEKEGTFTNIEFRTSRIDKLVPSPGQ

SEQ ID NO: 101020 - protein, 391 aa, Unknown
  Bacterial polypetide isolated from the Sargasso Sea
MVKKTKSLSLNFGPQHPAAHGVLRLILQLDGEVVEKADPHIGLLHRGTEKLIEQKTYTQALPYFDRLDYVAPMNQEHAFALAAEKLLNVEVPIRAKYIRVIFCEIGRILSHILNVMTQALDVGALTPSLWGFEERETLMTFYERASGSRLHANYFRTGGVHKDIPLKLIEDIEKFCQSFPKIIDDLESLLTDNRIFKQRNVEIGIVSKQEALDHSFSGVMLRGSGVHWDLRKSQPYEIYKDLDFKIPIGKNGDCYDRYLCRIEEMRESVKIILQCINKLPKGPVKSIDNKISPPNRDEIKESMEALIHHFKLFTEGYRVPKGNVYTAVEAPKGEFGVYLISDGSSKPYRCKIRAPGFSHLQAMDYLIRGHMLADVPAVLGSLDIVFGEVDR

SEQ ID NO: 101021 - protein, 215 aa, Unknown
  Bacterial polypetide isolated from the Sargasso Sea
MLKLKINNKEIEIEEGLTVLQACEKAGEEIPRFCYHEKLSIAGNCRMCLVELEKSAKPIASCAMPATDGMNIKTNTPLVEKARKGVMEFLLANHPLDCPVCDQGGECDLQDQSLFYGIDKSRYKENKRHVPEKYMGPLIKTQMTRCIHCTRCIRFATEVAGVTELGAIGRGENMEITTYLEKSMQSELSANVVDLCPVGALTSKPYVFEARPWEL

SEQ ID NO: 101022 - protein, 113 aa, Unknown
  Bacterial polypetide isolated from the Sargasso Sea
QSGLGTAAVIVMNKSTDIVEAIARLSHFYKHESCGQCTPCREGTGWMYRMMEKMIHGNVEHQDIDKILDVTKQIEGHTICALGDAAAWPIQGLFRHFRPEIEKRIQERNRRVA

SEQ ID NO: 101023 - protein, 163 aa, Unknown
  Bacterial polypetide isolated from the Sargasso Sea
MGLLENKFQDNVVVASLDKILGWARSTSPWYFQFGLACCAIEMMASAASRHDLERIGMMPRSSPRQADVMIVAGTVTMKMALRVKKLYEQMADPKYVISMGSCATSGGPYWQHGYHVLKGVDLVVPVDVYVPGCPPRPEALIEGLLKLQEKIQTERPLTRKLA

SEQ ID NO: 101024 - protein, 675 aa, Unknown
  Bacterial polypetide isolated from the Sargasso Sea
MPKLKVNDIDIEVEDGLTVLQACEQAGAEIPRFCYHEKLSIAGNCRMCLVEMEKSPKPIASCAMPAAEGMVIKTNTEKVEKARKGVMEFLLANHPLDCPVCDQGGECDLQDQSMFYGIDKSRFKENKRYVPEKYMGPLIKTQMTRCIHCTRCIRFATEVAGVPELGAIGRGENMEITTYLEKSMESEMSANVIDLCPVGALTSKPYVFEARPWELKKTETIDVMDAVGSNIRVDTYDWEVKRVLPRINEEINEEWISDKTRYACDGLKNQRLDTPLIKNNGNFEEISWQDAYKKIKEKILKTSSDKIVGLTGDMTNMETMFAVKNLFQKTLNSSYLDSRANHTYINFENRSNYLFNSSIEGIEESDLILLIGTNPRFEATILNSRIRKTYLKNKTEIFSLEDVGDLTYPYKVLENNSKVINKIIKNEHDLSKKIASAEKPIIILGQSILNSNNGAYIFEELKRYLTSINKIDDNWNALNILSTDASAVGSYDLGIFSSNDGSNKTLKKIEDGEAEVIFLLGQDNLKIKKSNEFIIYIGSHGDKGADMADLILPGAAYTEQDGYFTNLEGKLQKAYKASYPPGEAKEDWQIINELSSTIHGNSLFNNKDELLKSMQNHLNNKNIKNFEVPAYNLNDEKILVEDIDYYYSNTIARASKTMSECRYARANLKKTGTEG

SEQ ID NO: 101025 - protein, 391 aa, Unknown
  Bacterial polypetide isolated from the Sargasso Sea
MAKEKKTLNLNFGPQHPAAHGVLRLILQLDGEVVEKADPHIGLLHRGTEKLIENKTYIQAVPYFDRLDYVAPMNQEHAFALAIEKILKIEVPSRGKYIRVIFCEIGRILSHILNVTTQAMDVGALTPTLWGFEEREKLMGFYERVSGSRLHANYFRAGGVHKDLPSALDSDIGEFCEKFPKIIDDLETLLTDNRIFKQRNVDIGIVSKQDALDYSFSGVMLRGSGVAWDLRRSQPYDCYDDLEFKIPVGKNGDCYDRYLCRIEEMRESVKIIEQCIKNIPKGPIKTEDGKISPPSKKELKQSMEALIHHFKLFTEGYRVEKDEIYTAVEAPKGEFGVYLISDGSSKPYKCKIRAPGFTHLQAMDYLIKGHMLADVPAVLGSMDIVFGEVDR

SEQ ID NO: 101026 - protein, 357 aa, Unknown
  Bacterial polypetide isolated from the Sargasso Sea
ERLSIAGNCRMCLVEMDKSAKPIASCAMPAAEGMKIKTNTDMVEKARKGVMEFLLANHPLDCPVCDQGGECDLQDQSLYYGFDKSRFKENKRKVKDKYMGPLIKTIMTRCIHCTRCVRFATEVGGVTEIGAIGRGENMEITTYLEKSMESELSANVIDLCPVGALTSKPYAFEARPWELKKTETIDVMDAVGSNIRVDTYGWEVKRILPRLNNNINEEWISDKTRYACDGLLKQRLDKPYKRDNGKLIESNWDEVINIVCSKIKETDTKHIAGHIGDLQSIETTNGFKTLLDSININNYDFREKPFYINYKNKINYTFNSSIRGIEDSDCIVLIGANPRHEATMVNARIRKVYISKK

SEQ ID NO: 101027 - protein, 592 aa, Unknown
  Bacterial polypetide isolated from the Sargasso Sea
MSDSVPNEVSVNINGAEVRAKAGEMLIAAADRAGVHIPRFCYHERMSSVGMCRMCLVDVDTGRGPMLQPSCMVPVAEGMSVDTQSEDTKRAQEGILEFLLVNHPLDCPVCDKGGECPLQDQTMAYGPGESRFVEEKRHYEKPIPISDLVHLDRERCILCDRCTRFADEIAGDPLIHFTERGNSTQVLTFPDEPFSSYFSGNTVQICPVGALTAAPYRFKARPWDLDQVESTCTTCSMGCRTAVQSSRNELVRYLGVDIESVNHGWLCDKGRFNFEATNSEERLTVPLIRDPNDERQLLGSDWGSALANATEAILDAGSDGIGIIGGSRLTNEDAYAWSKLARSIIRTDNLDAQLGDGLPAELVHSLPPATIADACEADTVLVVGPDLKEELAILHLRLRGAATKGHTKVVEINAAPSGCEPYVERAIRCGSGEAAKYLGEILNSDDDLATRLREGSVVAVVGRSSMAESEHSSIAVAALIRDELPHATFLTALRRGNVRGALDMGLAPGVLPGRTAIDNPSSALDDIWGYTPSMKGLDTTGMLPAAAEGKIRTLVLLGADPLSDFPDRNLAAEAIQRAETVISLDNFYRPHL

SEQ ID NO: 101028 - protein, 684 aa, Unknown
  Bacterial polypetide isolated from the Sargasso Sea
MVNIKIDDKDYEVEDGLAIIQACEIAGVEVPRFCYHEKLSIAGNCRMCLVDVEDSRGLSPKPVASCAMQVSEGLKIYTKSERVKNAQEGALEFLLMNHPLDCPICDQGGECDLQDQSMAFGYGSSRFDGDKRAVESKDMGPFIKTEMTRCIHCTRCVRFSSEISGNDEIGSIGRGHDMEITTYLNQAVESELSGNVIDLCPVGALTSKPYAFSARPWELNKTETIDIMDAMGSNIRIDSKGLRVMRVLPRLNEDINEEWITDKTRFFWDGLNNQRIDKPYKRVDGILKPTSWKSALELAKEKISNSKSEKISALSGDLVDIESIYALKKLMKNIGSDNFDCRQDGSRISGPPERWLFNSTFNGIEDSDGCLIIGSDIRKEAPLLNSRLLRKSRDDEYKIGVIGFNNDLTFDFNFLGENPSIVEDILIENNNFCNDLLSMKKPLMILGQGALIGKDAQNFQNICIELAYKFNFINNDWNGFNVLHSAASRAGAMSIGFFPSGKGMITEEIISNYNNNKLDLLYLLGADELNLEKNDDCFVIYQGHHGDIGAQIADLVFPAAAFCEQNGLYMNTEGRVQESIRSTFPLGEAKENWEIIYLLAKEMSIDIGFSNLNELRNQLIEEFPIINPYREFEPLPSPKKDEFNKLNGHQFKRIIDSYWQTNSIARASSNLSKRNNYIKEENNR

SEQ ID NO: 101029 - protein, 271 aa, Unknown
  Bacterial polypetide isolated from the Sargasso Sea
MLKLKVNDKDIEVEEGLTVLQACEQAGAEIPRFCYHEKLSIAGNCRMCLVELEKSPKPIASCAMPAAEGMNIKTNTSLVEKSRKGVMEFLLANHPLDCPVCDQGGECDLQDQSMFYGIDKSRFKENKRLVPEKYMGPLIKTQMTRCIHCTRCVRFATEVAGVTELGAIGRGENMQITTYLEKAMESELSANVIDLCPVGALTSKPYVFEARPWELKKTESIDVMDAIGSNIRIDTYGWEVKRILPKINDDINEEWISDKTRYACDGLKNKD

SEQ ID NO: 101030 - protein, 196 aa, Unknown
  Bacterial polypetide isolated from the Sargasso Sea
MLKEENKIFKNLYNNLGWEIDKAIERDDWKDTKEIISKGKEWIINEVKTSELRGRGGAGFSTGMKWSFAPKKIGSRPHYLVINADESEPGTCKDRDILRFEPQKLIEGCLIAGYATGAHVCYIYIRGEYSFEGQRLQDAIDQAYKRNFLGNNACGSGWDFDVHIHYGAGAYICGEETALLESIEGNKGQPRLKPPF

SEQ ID NO: 101031 - protein, 183 aa, Unknown
  Bacterial polypetide isolated from the Sargasso Sea
MLSDKDRIFKNLYNDLGWDIDSAINRGDWSETKNLIVKGKEWIIKEIKDSELRGRGGAGFPTGLKLSFAPKEPGSRPHYLVINADESEPGTCKDRDILRFEPQKLIEGCLIASYAISAHTCYIYIRGEYFTEGQRLQEAINQAYQKNFLGKNACGSGWNLDIYIHYGAGAYICGEETALLESL

SEQ ID NO: 101032 - protein, 106 aa, Unknown
  Bacterial polypetide isolated from the Sargasso Sea
MGVEENFQSIEQVQQDVKKKGFLLAKYDDLLTWARTGSLWPMTFGLACCGVEMMHSYMSRYDLDRYGVIPRGSPRQSDVMIVAGTLTNKMAPALRKVYDQMPEPRW

SEQ ID NO: 101033 - protein, 672 aa, Unknown
  Bacterial polypetide isolated from the Sargasso Sea
MADERKVVIDEVELEVDGSMTLIQACEEAGIEIPRFCYHERLSIAGNCRMCLVEIVGGPPKPAASCAMQVRDLRPGPDGQPPLVKTNSPMVKKAREGVMEFLLINHPLDCPICDQGGECDLQDQAMAYGVDFSRFREAKRASDDLDLGPLVETHMTRCISCTRCVRFTTEVAGASQMGQTGRGEDSEITSYLGETLESNLQGNIIDLCPVGALTSKPYSFTARPWELSKTETIDVMDALGSNIRVDTKGREVMRIMPRNHDGINEEWISDKTRFVWDGLRRQRLDTPYVRENGKLRVATWAEALEKAKSAITDKKIFGLVGDLVSVEATFALKQLIEALGGSVECRLDQARLPSDNRSAYVGTASIADIDTAKTIYIIGSNPRNEAPTLNARIRKAWLNGAEVKLIGEPCDLSYEYHHCGTGRKSLKDLIKSETSLAGDQESVVILGQGAIRDEDGLSVLSKVMELAEKTGSKFLNLHTVASRVGALDIGAVADGELSAEIANADVIYNLGADEIELPESVFVIYQGSHGDRGAHNADIIFPAAAYTEENGIFVNTEGRAQLSSRANFAPGEAKENWAIFRALSEELSNNLPFDNLRQLRALLVGLYPNLEQIDEVPLNEWKPLKAGKMLERDFLNVISDFYLTNPIARASSVMAELSAGAKARNNSKVAAE

SEQ ID NO: 101034 - protein, 383 aa, Unknown
  Bacterial polypetide isolated from the Sargasso Sea
MPKIFINNNEIEFKEGMTVLQACELAGVEIPRFCYHERLSIAGNCRMCLVEMEKSAKPIASCAMPAAEGMKIKTNTKMVEKARKGVMEFLLVNHPLDCPVCDQGGECDLQDQSLYYGFDGSRFKENKRLVKDKYMGPLIKTQMTRCIHCTRCIRFATEVAGVSELGAIGRGEDMEITTYLEKSMTSELSGNVIDLCPVGALTSKPYAFEARPWELKKTESIDVMDAVGSNIRIDSYGWEVKRILPRLNNSINEEWISDKTRYACDGLLKQRLDKVYLRKENKLVEVSWDEAINLISSKINSTNPDKIAAHVGGLSSIETINSFKKLLEEINVKNFEFREKDFYVNSDQKMNYIFNSSIQGIEKADFILLVGANPRHEATILNA

SEQ ID NO: 101035 - protein, 151 aa, Unknown
  Bacterial polypetide isolated from the Sargasso Sea
MVPKDICETLKMDFDSLVEVKSGLGTAGVVVINKDEDIVKCMARIARFYKHESCGQCTPCREGAGWMWRILERTTKGEATHKDINLLSDVTKQIEGHTICAFGEGSAWPVQGLLRHFRKEIDKRCFSEPVVKKKRKIPYLIDQHKLESKDA

SEQ ID NO: 101036 - protein, 258 aa, Unknown
  Bacterial polypetide isolated from the Sargasso Sea
LESLEGKKGQPRFKPPFPASFGVYGKPTTINNTETFAAVPFLLAIGPQNYLEIGKPNNGGTKIFSVAGDVERPGNYEVPLGTPFATLMELAGGMRGGKKIKAVIPGGSSAPVIPGDIMMQTDMDYDSIAKAGSMLGSGAVIVMDETRCMVRSLLRLSYFYYEESCGQCTPCREGTGWLYRVVHRIEHGQGRPEDLDLLNSVAENIMGRTICALGDAAAMPVRGMLKHYWDEFEYHVAHKHCLVGGHAGAAAASETVAA

SEQ ID NO: 101037 - protein, 165 aa, Unknown
  Bacterial polypetide isolated from the Sargasso Sea
MNNKIDQVPTEFKQLAEDFSKNGFITTSLDNLINWSRSGSLHWMTFGLACCAVEMMQTSMPRYDLERFGAAPRASPRQSDVMIVAGTLTNKMAPALRKVYDQMPEPRYVISMGSCANGGGYYHYSYSVVRGCDRIVPVDVYVPGCPPSAEALLYGILQLQKKIRD

SEQ ID NO: 101038 - protein, 325 aa, Unknown
  Bacterial polypetide isolated from the Sargasso Sea
NLYNDLGSDLISAQKRGDWVNTKEITEKGRDWIINEIKDSQLRGRGGAGFPTGLKWSFAPKEVGSRPHYLVINGDESEPGTCKDRDILRFEPHKLIEGCLIASYAIQAHVCYIYIRGEYFVDGQKLQAAIDEAYEKKLIGKNAAGTGWDLDIYIHYGAGAYICGEETALLESIEGNKGQPRLKPPFPALIGLYGCPTIINNVETIAVVPTILRRGGKWFASLGREKNTGTKIFCISGNVNNPCNVEEEMNIPLKELIEVHAGGVIGGWDNLQAVIPGGSSMPLIPKEKCETLTMDFDSLVAEKSGLGTAGVVVINKDQDIIKCMA

SEQ ID NO: 101039 - protein, 285 aa, Unknown
  Bacterial polypetide isolated from the Sargasso Sea
LCIFLSSILSIIIFYNGIVHDQYGNYLIFEWISSGDFTANWTINVDPLSSIILVVVSLISFLVHLYSIEYMRHDPNKPRFMSYLSLFTFSMMVLVVSDNFLQLFFGWEGVGLCSYLLIGFWYKKDSANQAAIKAFLVNRVGDLGLAIGVFLIFLYFGTINFSEIFVSVPNFSSKQINFLGIEINLITAICSFLFLGAMGKSAQLFLHTWLPDAMEGPTPVSALIHAATMVTAGVFLVARCSPIFEYSQVALNFVTIIGMLTALFAASVALVQNDIKRIIAYSTCS

SEQ ID NO: 101040 - protein, 306 aa, Unknown
  Bacterial polypetide isolated from the Sargasso Sea
SYAVQAHVCYIYIRGEYFIEGQKLQTAIDEAYEKKLLGKDAAGTGWDLDIYIHYGAGAYICGEETALLESIEGKKGQPRLKPPFPALIGLYGCPTIINNVETIAVVPTILRRGGKWFSSLGREKNTGTKIFCISGNVNNPCNVEEEMNIPLKELIEVHAGGVIGGWDNLQAVIPGGSSMPLIPKEKCETLTMDFDSLMAEKSGLGTAGIVVINKDQDIIKCMARIARFYKHESCGQCTPCREGSGWMWRMLERMAKGDATKDEVEMLGDVTNQIAGHTICAFGEGSSWPVQGLLRHFKKEIEERNN

SEQ ID NO: 101041 - protein, 199 aa, Unknown
  Bacterial polypetide isolated from the Sargasso Sea
MLKDQDRIFKNLYNDLGADVNSSQKRGDWVNTKDITNKGRDWIINEIKDSQLRGRGGAGFPTGLKWSFAPKEVGSRPHYLVINADESEPGTCKDRDILRFEPHKLIEGCLLASYAVQAHVCYIYIRGEYFIEGQKLQTAINEAYEKNLIGKNAAGTGWDLDIYIHYGAGAYICGEETALLESIEGKKGQPRLKPPFPAL

SEQ ID NO: 101042 - protein, 201 aa, Unknown
  Bacterial polypetide isolated from the Sargasso Sea
MLDSKDRIFDNLYGFEPWNLANAKLRGDWDNTKDILLKGREKITEEVISSGLRGRGGAGFSTGVKWTFMPKEPTGKTHYLVVNADESEPGTCKDREILRNEPHKLLEGCVIACAAMGAQVCYIYIRGEFINERYILESALKEAYDDGLVGNNACGSGLDIEIFIHHGAGAYICGEETALLESLEGKKGMPRLKPPFPAAAG

SEQ ID NO: 101043 - protein, 153 aa, Unknown
  Bacterial polypetide isolated from the Sargasso Sea
MFSPDNIFTTTIDKAVRWSRTQSMWPVTFGLACCAIEMMAAGSAKYDLARYGMEVFRASPRQADLMIVAGRVSQKMAPVLRQVYDQMAEPKWVIAMGACSSTGGMFNNYALVQGVDHIVPVDIYVPGCPPGPQSLMHGILTLHQKIMDREINR

SEQ ID NO: 101044 - protein, 173 aa, Unknown
  Bacterial polypetide isolated from the Sargasso Sea
MSLKEKEDQIPKEFKQLAKDFADKGFITTSLDNLVNWARTGSLHWMTFGLACCAVEMMQTSMPRYDLERFGAAPRASPRQSDVMIVAGTLTNKMAPALRKVYDQMPEPRYVISMGSCANGGGYYHYSYSVVRGCDRVVPVDVYVPGCPPSAEALLYGIMQLQKKIRDQGSISR

SEQ ID NO: 101045 - protein, 331 aa, Unknown
  Bacterial polypetide isolated from the Sargasso Sea
SIISLPLLGFLFCFLLGKQFNYRVYQISTTSILFLCTLFSWIIFIQFINNKETEIIFILNWITSGNFIVDWSIRLDTLTAVMFIVVTTVSACVHLYSIGYMEEDPSKIRFMGYLSLFTFFMLVLVSSNNLLQMFFGWEGVGLASYLLIGFWHHKDSANKAAIKAFVVNRVGDFGYAIGIAGIFYIFGTISFDSIFSQVDQFSEHQIQFLSFSFPTLDFLCFLLFIGAMGKSAQLGLHTWLPDAMEGPTPVSALIHAATMVTAGVFLVARMSPLYEFATFTNLFITFIGAATAIFAASIALTQNDIKRVIAYSTCSQLGYMFFAAGVGAYNA

SEQ ID NO: 101046 - protein, 262 aa, Unknown
  Bacterial polypetide isolated from the Sargasso Sea
MLKDQDRIFQNLYNDLGSNLTSSQKRGDWINTKEITNKGRDWIINEIKDSQLRGRGGAGFPTGLKWSFAPKKVGSRPHYLVINGDESEPGTCKDRDILRFEPHKLIEGCLIASYAIQAHVCYIYIRGEYFVDGQKLQAAIDEAYEKKLIGKNSAGTGWDLDIYIHYGAGAYICGEETALLESIEGNKGQPRLKPPFPALVGLYGCPTIINNVETIAVVPTILRRGGKWFASLGREKNTGTKIFCISGNVNNPCNVEEEMNIP

SEQ ID NO: 101047 - protein, 242 aa, Unknown
  Bacterial polypetide isolated from the Sargasso Sea
MLKEENKIFKNLYNEQGWELENALKRDDWLDTKKIIEKGRDWIINEIKASELRGRGGAGFSTGLKWSFAPKKVGSRPHYLVINADESEPGTCKDRDILRFEPQKLIEGCLIASYAVNAKICYVYIRGEYLNEGKRLQEAIDEAYSKNLIGKNACNSGWDLDIYIHYGAGAYICGEETALLESLEGNRGQPRLKPPFPALVGLYGCPTIVNNVETIAVVPTILRRGAKWFASMGRPKNTGTKI

SEQ ID NO: 101048 - protein, 301 aa, Unknown
  Bacterial polypetide isolated from the Sargasso Sea
MLEYSLIALLSPLFGGIMAAFLGKSFGKNFVNLVTIIGVSISFVLSCIIALEILETTAVINQNIYTWLNIGDQSFNIGLLIDNLTASMMVVVTFVSLMVHVYTIGYMHDDPGYHRFFSYISLFTFSMLSLVMSNNFLQLFFGWEAVGVMSYLLIGFWYTKESAIKANLKAFIVNRVGDLSLILGIGIIFSITGSLDYYAVFSNSQEIAQTELLLTSTLTVSALTASCILLFGGAMGKSAQMPLHVWLPDSMEGPTPISALIHAATMVTAGVFLIARMSPLFELSTTALSFVLIIGATTALF

SEQ ID NO: 101049 - protein, 318 aa, Unknown
  Bacterial polypetide isolated from the Sargasso Sea
FAPKEVGSRPHYLVINADESEPGTCKDRDILRFEPHKLIEGCLIASYAVNAHKCYIYIRGEYFNEGQKLQTAIDEAYKDGLLGKNSAGTDWELDIYIHYGAGAYICGEETALLESIEGKKGQPRLKPPFPALIGLYGCPTIINNVETISVVPTILRRGGKWFSSLGRPKNTGSKIYCISGNVNNPCNVEEEMGIPLKELIEKHAGGVIGGWENLKAVIPGGSSMPLLPKETCETIKMDFDACVENKTGLGTAGIVVINKDQDIIKCMARIARFYKHESCGQCTPCREGSGWMWRMLERMAKGEATRDEVDMLLDVQNK

SEQ ID NO: 101050 - protein, 130 aa, Unknown
  Bacterial polypetide isolated from the Sargasso Sea
MGINFDSFSKKEKDIPEEFKDLAKDFAEKGFITTSSENLINWARTGSLHWMTFGLACCAVEMMQTSMPRYDLERFGAAPRASPRQSDVMIVAGTLTNKMAPALRKVYDQMPEPRYVVSMGSCANGGGYYH

SEQ ID NO: 101051 - protein, 108 aa, Unknown
  Bacterial polypetide isolated from the Sargasso Sea
DLERFGAAPRASPRQSDVMIVAGTLTNKMAQPLRKVYDQMPEPRYVISMGSCANGGGYYHYSYSVVRGCDRIVPVDIYVPGCPPTAEALLYGILQLQKKIRREGNLKR

SEQ ID NO: 101052 - protein, 132 aa, Unknown
  Bacterial polypetide isolated from the Sargasso Sea
MNNKLEKIPEEFKKLAEDFGKNGFITTSLDNLINWSRSGSLHWMTFGLACCAVEMMQTAMPRYDLERFGAAPRGSPRQSDVMIVAGTLTNKMAPALRKVYDQMPEPRYVISMGKLCKWRWILSLFLFCCQGL

SEQ ID NO: 101053 - protein, 272 aa, Unknown
  Bacterial polypetide isolated from the Sargasso Sea
ICGEETALLESIEGNKGQPRLKPPFPALVGLYGCPTIVNNVETIAVVPTILRRGGKWFASLGRPKNTGTKIFCISGNVNSPCNVEEEMGIPLKELINTYAGGVIGGWDNLQAVIPGGSSMPLLPKKTCETIKMDFDSLIENQSGLGTAGIVVINKDQDIVSCMARIARFYKHESCGQCTPCREGSGWMWRILNRATKGETTLSDIDLLEDVTKQIEGHTICAFGEGSAWPVQGLLRHFRKEIDKKCSNDPLIKKKKDVPYLVDQHLLEKKNA

SEQ ID NO: 101054 - protein, 273 aa, Unknown
  Bacterial polypetide isolated from the Sargasso Sea
YICGEETALLESIEGKKGQPRLKPPFPALVGLYGCPTIVNNVETIAVVPTILRRGSKWFSSLGRSKNTGTKIFCISGNVNNPCNVEEEMGISLKDLIEKHAGGVIGGWENLKAVIPGGSSMPMLPKETCETIKMDFDSLVEEKSGLGTAGVVVINKDEDIISCMARIARFYKHESCGQCTPCREGSGWMWRMLERMKRNEASREEIEMLEDVTKQIEGHTICAFGEGSSWPVQGLLRHFKKEIIKRNNFNPLVKSNKNIPYLVDQHLLDKENA

SEQ ID NO: 101055 - protein, 169 aa, Unknown
  Bacterial polypetide isolated from the Sargasso Sea
IKKIKYPEEFQKLAQDFSENGFITTSLDNLINWSRSGSLHWMTFGLACCAVEMMQTSMPRYDLERFGAAPRASPRQSDVMIVAGTLTNKMAPALRKVYDQMPEPRYVISMGSCANGGGYYHYSYSVVRGCDRIVPVDVYVPGCPPSAEALLYGIMQLQKKIRNKGSAIR

SEQ ID NO: 101056 - protein, 178 aa, Unknown
  Bacterial polypetide isolated from the Sargasso Sea
MGIKLGSFSNKQKEIPEEFKDLAKDFAEKGFITTSSENLINWARTGSLHWMTFGLACCAVEMMQTSMPRYDLERFGAAPRASPRQSDVMIVAGTLTNKMAPALRKVYDQMPEPRYVVSMGSCANGGGYYHYSYSVVRGCDKIVPVDIYIPGCPPSAEALLYGILQLQKKIRREGTLQR

SEQ ID NO: 101057 - protein, 268 aa, Unknown
  Bacterial polypetide isolated from the Sargasso Sea
RGRGGAGFPTGLKWSFAPKKVGAKPHYLVINADESEPGTCKDRDILRFEPHKLIEGCLIASYAVNAHKCYIYLRGEYYNEGAKLQTAIDEAYKANLIGKNSSGTGWELDIYIHYGAGAYICGEETALLESIEGNKGQPRLKPPFPALVGLYGCPTIINNVETIAVVPSILRKGSNWFASLGKPKNTGTKIFCISGNVNSPCNVEEEMGIKLKDLIEKHAGGVVGGWDNLQAVIPGGSSMPMLSKEISENITMDFDSLVENKSGLGTAG

SEQ ID NO: 101058 - protein, 328 aa, Unknown
  Bacterial polypetide isolated from the Sargasso Sea
INEIKESQLRGRGGAGFPTGLKWSFAPKEIGSRPHYLVINGDESEPGTCKDRDILRFEPHKLIEGCLIASYAVQAHVCYIYIRGEYFVDGQKLQAAINEAYEKKLLGKNAAGTGWDLDIHIHYGAGAYICGEETALLESLEGNKGQPRLKPPFPALIGLYGCPTIINNVETIAVVPTILRRGAKWFASLGREKNTGTKIFCISGNVNNPCNVEEEMSISLKELIEVHAGGVVGGWENLQAVIPGGSSMPLIPKERCETLKMDFDACVEEKSGLGTAGIVVINKDQDIIKCMARIARFYKHESCGQCTPCREGSGLDVGECFERMAKGG

SEQ ID NO: 101059 - protein, 299 aa, Unknown
  Bacterial polypetide isolated from the Sargasso Sea
MLKDTDRIFKNLYNDNGFDIVSSQRRDDWKDTKELCNKGREWIINEIKNSELRGRGGAGFPTGLKWSFAPKEVGSRPHYLVINADESEPGTCKDRDILRFEPHKLIEGCLIASYAVNAHVCYVYIRGEYFNEGKNLQIAIDEAYEKNLIGKNASGTGWDLDIYIHYGAGAYICGEETALLESLEGKKGLPRLKPPFPALIGLYGCPTIINNVETIAVVPTILRKGAKWFTSLGKPKNTGTKIFCISGNVNKPCNVEEEMGIPLKELIEHHAGGVVGGWENLKAVIPGGSSMPLLPKKYL

SEQ ID NO: 101060 - protein, 150 aa, Unknown
  Bacterial polypetide isolated from the Sargasso Sea
MGLETDNDLIDQQGPGFIITSVDKLVNWARTGSMWPVTFGLACCAIEMMHAGAARYDTDRFGVFFRPSPRQSDVMIVAGTLVNKMAPALRKVYDQMAEPKWVISMGSCANGGGYYHHSYSVVRGCDQIIPVDIYVPGCPPTSEALINGII

SEQ ID NO: 101061 - protein, 173 aa, Unknown
  Bacterial polypetide isolated from the Sargasso Sea
MNLEDRKKDIPEEFKQLAQDFSDNGFITTSLDNLVNWARTGSLHWMTFGLACCAVEMMQTSMPRYDLERFGAAPRASPRQSDVMIVAGTLTNKMAPALRKVYDQMPEPRYVISMGSCANGGGYYHYSYSVVRGCDRVVPVDVYVPGCPPSAEALLYGILQLQKKIRNKGSLER

SEQ ID NO: 101062 - protein, 109 aa, Unknown
  Bacterial polypetide isolated from the Sargasso Sea
YDLERFGAAPRASPRQSDVMIVAGTLTNKMAPALRKVYDQMPEPRYVVSMGSCANGGGYYHYSYSVVRGCDKIVPVDIYIPGCPPSAEALLYGILQLQKKIRRDGNLQR

SEQ ID NO: 101063 - protein, 116 aa, Unknown
  Bacterial polypetide isolated from the Sargasso Sea
MQTSMPRYDLERFGAAPRASPRQSDVMIVAGTLTNKMAPALRKVYDQMPEPRYVISMGSCANGGGYYHYAYSVVRGCDKIVPVDIYVPGCPPSAEALLYGIMQLQKKIRREGTLVR

SEQ ID NO: 101064 - protein, 316 aa, Unknown
  Bacterial polypetide isolated from the Sargasso Sea
KIFKNLYNELGWKLEDSLKRDDWLDTKNLITKGRDWIINEIKASELRGRGGAGFPTGLKWSFAPKKVGSRPHYLVINADESEPGTCKDRDILRFEPQKLIEGCFITSYAVNAHVCYIYIRGEYYNEGIRLQQAIDEAYEKNFIGKNACNSGWDLDIYIHFGAGAYICGEETALLESLEGNKGQPRLKPPFPALVGLYGCPTIVNNVETIAVVPTILRKGGKWFASIGRPKNTGTKIFCISGNVNLPCNVEEEMGITLKDLIEKHAGGVIGGWKNLQAVIPGGSSMPLIPKDICETLKMDFDSLIAVKSGLGTAGVV

SEQ ID NO: 101065 - protein, 252 aa, Unknown
  Bacterial polypetide isolated from the Sargasso Sea
IKPPFPALIGLYGCPTIINNVETIAVVPTILRKGAKWFASIGKPKNTGTKIFCISGNVNNPCNVEEEMGVSLKDLIEQHAGGVIGGWENLKAVIPGGSSMPLLPKEICDTIKMDFDSLAEQKSALGTAGIIVINKDQDIIKCIARIARFYKHESCGQCTPCREGSGWMWRMLERMTKGEASREEVDMLMDVTKQIEGHTICAFGEATAWPVQGLLRHFKKEVVKRNNFNPMINKNKNIPYLIDQHLLEKENA

SEQ ID NO: 101066 - protein, 159 aa, Unknown
  Bacterial polypetide isolated from the Sargasso Sea
MIEGVMKEGFITTSYDSVVNWAKTGSLWPMTFGLACCAVEMMHAAAARYDIGRFGAEVFRASPRQSDLMIVAGTLCNKMAPALRKVYDQMSEPRWVLSMGSCANGGGYYHYSYSVVRGCDRIVPVDVYVPGCPPTAEALIYGIIQLQQKIRRTNTIARV

SEQ ID NO: 101067 - protein, 241 aa, Unknown
  Bacterial polypetide isolated from the Sargasso Sea
ICYIYIRGEYFNEGKRLQDAIDQAYKKGFLGKNACSSGWDFDIHIHYGAGAYICGEETALLESIEGNKGQPRLKPPFPALVGLYGCPTIVNNVETIAVVPTILRRGGKWFASIGKPKNTGTKIFCISGNVNSPCNVEEEMGIPLKELIEKHAGGVIGGWDNLQAVIPGGSSMPLLSKKICDTITMDFDALIENKSGLGTAGVVVINKNQDIISCMARIARFYKHESCGQGTPCREGAGWMW

SEQ ID NO: 101068 - protein, 281 aa, Unknown
  Bacterial polypetide isolated from the Sargasso Sea
MATSIIFLPLLGFLFCFLLGKQFNYRVYQISTTSILFLCTVFSWIIFIQFINNKETEIIFILNWISSGNFIVDWSIRLDTLTAVMFIVVTTVSACVHLYSIGYMEDDPSNIRFMGYLSLFTFFMLVLVSSNNLLQMFFGWEGVGLASYLLIGFWHHKDSANKAAIKAFVVNRVGDFGYAIGIAGIFYIFGTVSFDSIFLQVDQFSDHQIQFLSFSFPTLDFLCFLLFIGAMGKSAQLGLHTWLPDAMEGPTPVSALIHAATMVTAGVFLVARMSPLYEFAT

SEQ ID NO: 101069 - protein, 144 aa, Unknown
  Bacterial polypetide isolated from the Sargasso Sea
MNLTEREKQIPEEFKALAKDFSEKGFITTSFENLVNWARTGSLHWMTFGLACCAVEMMQTSMPRYDLERFGAAPRASPRQSDVMIVAGTLTNKMAPALRKVYDQMPEPRYVISMGSCANGGGYYHYSYSVVRGCDRVVPVDVYV

SEQ ID NO: 101070 - protein, 287 aa, Unknown
  Bacterial polypetide isolated from the Sargasso Sea
KFFGRKCSHWIANIGVALSFFLSTVVLYQIVTGAEPAFNENIYTWLEAGGVSFHIGFLIDTLTALMMVVVTFVSWMVHIYTIGYMSEDSGYQRFFSYISLFTFSMLMLVMSNNFLQLFFGWEAVGLVSYLLIGFWFKKESAIYANLKAFLVNRVGDFGFLLGIAGVLMYFGSLDYAAVFEMSGLLEGETFSILPGLVWESATVLCILLFIGAMGKSAQVPLHVWLPDSMEGPTPISALIHAATMVTAGIFMVARMSPLYEMSPTALEFIMVVGALTAFFMGLLGLVQ

SEQ ID NO: 101071 - protein, 231 aa, Unknown
  Bacterial polypetide isolated from the Sargasso Sea
PKEIGSRPHYLVINADESEPGTCKDRDILRFEPQKLIEGCLLASYAVNAHKCYIYIRGEYLNEGKKLQEAIDEAYENKLIGNNACDSGWDLDIYIHYGAGAYICGEETALLESIEGNKGQPRLKPPFPALIGLYGCPTIINNVETIAVIPTILRRSGKWFASLGRAKNTGSKIYCISGNVNNPCNVEEEMGIPLKDLIEKHAGGVIGGWDNLKAVIPGGSSMPLIPKKICE

SEQ ID NO: 101072 - protein, 208 aa, Unknown
  Bacterial polypetide isolated from the Sargasso Sea
MLKDKDRIFKNLYNDHGSDISSAISIGDWSNTKEILLKGKDWIINEIKASELRGRGGAGFPTGLKWSFAPKKITNKPHYLIINADESEPGTCKDRDILRFEPHKLIEGCLITSYAINAKTCYIYLRGEYLNEGLKLQNAIDEAYKKNFIGKNVFGSGWDLDIYVHYGAGAYICGEETALLESIEGNKGQPRLKPPFPALIGLYGCPTK

SEQ ID NO: 101073 - protein, 279 aa, Unknown
  Bacterial polypetide isolated from the Sargasso Sea
MIPGFSRFLLFMSLFIAAMLGLVMSSGLLQLFIHWELVGLTSYLLIGFWFERPAAAAAAKKAFIVTRFGDIGFVIALTVIWVNVGTFDISEINLLAHTGGITAPVLTGFTLGLLAGAAGKSAQFPLHFWLPDAMEGPTPVSSIVHSATMVAAGVYLLARFFPAIDAAPQSVSTVIAYVGGFTAIFAASMGVVVTDIKRVLAYSTVSQLGYMVMAIGLGGYVAAIFHLFTHAFFKSLLFWGAGSVSHATGTFEMGKMGGLRGVMPVTFLTFVIGSLSLAG

SEQ ID NO: 101074 - protein, 289 aa, Unknown
  Bacterial polypetide isolated from the Sargasso Sea
MEYAIVLLPLLGSIISGFFGKAVGIKYSQILTSLLVSISAIISIYIFFEVLINNYSSNKLIFNWITSGNFNVNWSINIDPITSVMLVVVCLISSIIHFYSIGYMIHDPHKTRFMSYLSLFTFSMLVLVTGDNFLQLFFGWEGVGLCSYLLIGFWYKKPSANYAAMKAFIVNRVGDFGFAIGIFLIFFFYGTLNYNEVFDLTPSLADKEIAFLGIQFNLITLICLMLFIGAMGKSAQFLLHTWLPDAMEGPTPVSALIHAATMVTAGVFLVIRCSPIFEYSQVALNFVAI

SEQ ID NO: 101075 - protein, 267 aa, Unknown
  Bacterial polypetide isolated from the Sargasso Sea
IWDNTKSILVKGRDWIVEQMKASGLRGRGGAGFPTGLKWSFMPKESDGRPSYLVVNADESEPGTCKDREIMRHDPHTLIEGCLIASFAMGANCCYIYIRGEYIREKEMLQIAIDEAYEAGFVGKNACNSDWNFDIFLHHGAGAYICGEETALLESLEGKKGMPRMKPPFPAGSGLYGCPTTVNNVESIAVVPTILRRGPDWFSGFGRSNNFGTKLFAISGHVNNPCVVEEAMSISFEELIDKHCGGIRGGWKNLKAVIPGGSSVPCV

SEQ ID NO: 101076 - protein, 293 aa, Unknown
  Bacterial polypetide isolated from the Sargasso Sea
LINAQRPLIVSGASLGDKALIEAAANIASALKNREKNGSLSLVVPEANSLGLALLGGESVDAALQALSGGQADAVIVLENDLYRRADAAKVEAALSAAQAVIVADHQRTDTSERAHLLLPVASFAEGDGTLVSLEGRAQRFFQVYEPSYYDAGILIREGWRWLHALHSTLQGKAVDWTQLDQVTAACAASNPHLSGIKDAAPSASFRIKGLKLAREPHRYSGRTAMRANISVHEPRQPQDQDSAFAFSMEGYAGSKEDRQQIPFAWSPGWNSPQAWNKFQDEVGGHLRAGDPG

SEQ ID NO: 101077 - protein, 282 aa, Unknown
  Bacterial polypetide isolated from the Sargasso Sea
GFPTGLKWSFAPKEVGSRPHYLVINADESEPGTCKDRDILRFEPHKLIEGCLIASYAVQAHVCYIYIRGEYFVDGQKLQAAIDEAYEKKLIGKDASGTGWDLDIFIHYGAGAYICGEETALLESIEGNKGQPRLKPPFPALVGLYGCPTIINNVETIAVVPTILRRGGKWFASLGREKNTGTKIFCISGNVNSPCNVEEEMNIPLKELIEVHAGGVVGGWDNLQAVIPGGSSMPLIPKEKCETLTMDFDSLVAEKSGLGTAGVVVINKDQDIIKCMARIARF

SEQ ID NO: 101078 - protein, 171 aa, Unknown
  Bacterial polypetide isolated from the Sargasso Sea
MNNKLDQVPEEFKQLAKDFSEKGFITTSMNNLINWSRSGSLHWMTFGLACCAVEMMQTAMPRYDLERFGAAPRGSPRQSDVMIVAGTLTNKMAPALRKVYDQMPEPRYVISMGSCANGGGYYHYSYSVVRGCDRIVPVDVYVPGCPPSAEALLYGIMQLQKKIRNKGSFNR

SEQ ID NO: 101079 - protein, 275 aa, Unknown
  Bacterial polypetide isolated from the Sargasso Sea
GYLSLFTFFMLVLVSSNNLIQMFFGWEGVGLASYLLIGFWHHKDTANNAAIKAFVVNRIGDFGYAIGIAGIFFIFGSISFDNIFDQVESFKGHQIEFLSITFPTLDLLCFLLFIGAMGKSAQLGLHTWLPDAMEGPTPVSALIHAATMVTAGVFLVARMSPLYEFASFTNLFITFIGASTAIFAASIALTQNDIKRVIAYSTCSQLGYMFFAAGVGAYNASIFHLTTHAFFKALLFLSAGSVIHAMHHEQDMRKMGGLFKKIPFTATMMWIGSLA

SEQ ID NO: 101080 - protein, 157 aa, Unknown
  Bacterial polypetide isolated from the Sargasso Sea
LAEDFGKNGFITTSLENLVNWSRSGSLHWMTFGLACCAVEMMQTAMPRYDLERFGAAPRGSPRQSDVMIVAGTLTNKMAPALRKVYDQMPEPRYVISMGSCANGGGYYHYSYSVVRGCDRIVPVDVYVPGCPPSAEALLYGIMQLQKKIRNKGSFKR

SEQ ID NO: 101081 - protein, 275 aa, Unknown
  Bacterial polypetide isolated from the Sargasso Sea
DKIFKNLYGFEDWKLEGAKKRGIWSNTKELIKMGSEEIVEEIKNSQLRGRGGAGFPAGLKWSFMPKDSGKDHYLVVNADESEPGTCKDREIMRNDPHLLLEGCLVAAFAMHAHTCYIYIRGEYYSESSNLQKAINEAYANNLIGKNACGSGWDFDIYLHRGAGAYICGEETALLESLEGKKGQPRLKPPFPAGAGLYGCPTTVTNVETVAVSPTILRRGSKWFADLGSANNTGTKIFSISGHVNNPCNVEEEMGIPLKDLIEKHAGGVIGGWENL

SEQ ID NO: 101082 - protein, 166 aa, Unknown
  Bacterial polypetide isolated from the Sargasso Sea
MGVEIKEDNFGEELNSKGFLVANFDKLLTWARTGSLWPMTFGLACCGVEMIHTYMARYDLDRYGVIPRGSPRQSDVMIVAGTLTNKMAPALRKVYDQMPEPRWVISMGSCANGGGYYHYSYSVVRGCDRIVPVDIYVPGCPPTAEALVYGILQLQKKIKRKNKFVR

SEQ ID NO: 101083 - protein, 279 aa, Unknown
  Bacterial polypetide isolated from the Sargasso Sea
SKREVNWVNTKEITNKGRDWIINEIKESQLRGRGGAGFPTGLKWSFAPKEVGSRPHYLVINGDESEPGTCKDRDILRFEPHKLIEGCLIASYAVQAHVCYIYIRGEYFIDGQKLQVAIDEAYEKKLLGKNAAGTGWDLDIYIHYGAGAYICGEETALLESIEGKKGQPRLKPPFPALIGLYGCPTIINNVETIAVVPTILRRGGKWFASLGREKNTGTKIFCISGNVNTPCNVEEEMNIPLKELIEVHAGGVIGGWDNLQAVIPGGSSMPLIPKEKCET

SEQ ID NO: 101084 - protein, 223 aa, Unknown
  Bacterial polypetide isolated from the Sargasso Sea
MLKEKDKIFKNLYGFKDWKLEGAKKRGIWSNNKELIKMGSEKIVEEIKNSQLRGRGGAGFPAGLKWSFMPKDFGKDHYLVVNADESEPGTCKDREIMRNDPHLLLEGCLVAAFAMHAHTCYIYIRGEYYSESYNLQKAIDEAYANNLIGKNACGTGWDFDIYLHRGAGAYICGEETALLESLEGKKGQPRLKPPFPAGAGLYGCPTTVTNVETIAVSPSILRR

SEQ ID NO: 101085 - protein, 171 aa, Unknown
  Bacterial polypetide isolated from the Sargasso Sea
MNNKLDKIPDEFKQLAKDFSENGFITTSLDNLVNWSRAGSLHWMTFGLACCAVEMMQTAMPRYDLERFGAAPRGSPRQSDVMIVAGTLTNKMAPALRKVYDQMPEPRYVISMGSCANGGGYYHYSYSVVRGCDRIVPVDIYVPGCPPSAEALLYGIMQLQKKIRNKGSINR

SEQ ID NO: 101086 - protein, 171 aa, Unknown
  Bacterial polypetide isolated from the Sargasso Sea
MNNKIDQVPEEFKQLAEDFSKNGFITTSLDNLINWSRSGSLHWMTFGLACCAVEMMQTAMPRYDLERFGAAPRGSPRQSDVMIVAGTLTNKMAPALRKVYDQMPEPRYVISMGSCANGGGYYHYSYSVVRGCDRIVPVDIYVPGCPPSAEALLYGILQLQKKIRKKGSFLR

SEQ ID NO: 101087 - protein, 157 aa, Unknown
  Bacterial polypetide isolated from the Sargasso Sea
MAKDFAEKGFITTSSENLIKWARTGSLHWMTFGLACCAVEMMQTSMPRYDLERFGAAPRASPRQSDVMIVAGTLTNKMAPALRKVYDQMPEPRYVVSMGSCANGGGYYHYSYSVVRGCDKIVPVDIYIPGCPPSAEALLYGILQLQKKIRREGTLQR

SEQ ID NO: 101088 - protein, 243 aa, Unknown
  Bacterial polypetide isolated from the Sargasso Sea
MLKDEDRIFQNLYNDSGADIESAKLRNDWNGTKEILEKGREWIINEVKLSELRGRGGAGFPTGLKWSFAPKEVGSRPHYLVINADESEPGTCKDRDILRFEPHKLIEGCLIASYAVNAHKCYIYIRGEYFNEGRKLQTAIDEAYKNNLIGKNALNSGWDLDIYIHYGAGAYICGEETALLESLEGKKGQPRLKPPFPALIGLYGCPTIINNVETVAAVPTILRRGAKWFSSLGRAKNTGTKIY

SEQ ID NO: 101089 - protein, 227 aa, Unknown
  Bacterial polypetide isolated from the Sargasso Sea
YFTEGQKLQAAIDEAYNKNLLGKNAAGTGWDLDIYIHYGAGAYICGEETALLESIEGKKGQPRLKPPFPALIGLYGCPTIINNVETIAVVPTILRKGSKWFSSLGREKNTGTKIFCISGNVNNPCNVEEEMNIPLKELIEIHAGGVIGGWDNLQAVIPGGSSMPLIPKEKCETLTMDFDSLMAEKSGLGTAGVVVINKDQDIIKCMARIARFYKHESCGQCTPCREG

SEQ ID NO: 101090 - protein, 256 aa, Unknown
  Bacterial polypetide isolated from the Sargasso Sea
YLWRRTALLESLEGKKGQPRLKPPFPAGVGLYGCPSTVSNVETIAVAPTILRRGAKWFSSLGNPKNTGTKIFSISGHVNNPCNVEEEMGISLKELIETHAGGVIGGWDNLLAVIPGGASVPLIPKSICDTIKMDFDNLSRVKSGLGTAAVIVMNKSTDIVEAITRLSHFYQHESCGQCTPCREGTGWMYRIMKKMIEGNIQYEDIDKLLNVTKQVEGHTICALGDAAAWPIQGLMRHFKPEVEKRIKDYSKKKAVA

SEQ ID NO: 101091 - protein, 284 aa, Unknown
  Bacterial polypetide isolated from the Sargasso Sea
FFMLMLVSSNNLLQMFFGWEGVGLASYLLIGFWYHKSSANSAAIKAFLVNRVGDFGYALGIAGVFFIFGSIEFDVIFNNAKNFKDHTIPFLGLSLSTIDLLCFLLFIGAMGKSAQLGLHTWLPDAMEGPTPVSALIHAATMVTAGVFLVARMSPLFEYAIITNLFITFIGAATAVFAATIALTQNDIKRVIAYSTCSQLGYMFFAAGLGAYNASIFHLMTHGFFKALLFLSAGSVIHAMHHEQDMRKMGGLFKKIPFTGTMMWIGSLAIIGFPYFFWVIIKGKS

SEQ ID NO: 101092 - protein, 210 aa, Unknown
  Bacterial polypetide isolated from the Sargasso Sea
MGCYIWNLGLIWFCFNDGFSSYSYNWFHIRVEKRSIGVAINTNIEETSPELERLKKLYADKGFVVTSINNLINWARTGSLHWMTFGLACCAVEMMHVGTPRYDVERFGAAPRASPRHADVLIVAGTLTNKMAAALRKAYDQMPEPRYVISMGSCANGGGYYHYSYSVVRGCDRIIPVDVYVPGCPPTAEGLLYGLLQLQKKIRREGNIKR

SEQ ID NO: 101093 - protein, 276 aa, Unknown
  Bacterial polypetide isolated from the Sargasso Sea
RGGIFGQNACGTGLDFDVNIHYGAGAYICGEETALIESLEGKQGKPRLKPPFPANVGLYGCPTTVTNVETVAVAPTILRRGPEWFASFGRKNNAGTKLFCISGHVNQPCTVEEEMSIPLRELIEKHAGGVRGGWDNLLAVIPGGSSVPMLNKETCDDVLMDFDALKEAGSGLGTAAVIVMDKSTDVVDAIARLAYFYKHESCGQCTPCREGTSWMYNIMQRLVKGDARVEEVEMLQQITKQIEGHTICVRHSPRRGSFFLFFFSQFRFARRRRARD

SEQ ID NO: 101094 - protein, 130 aa, Unknown
  Bacterial polypetide isolated from the Sargasso Sea
MDLQEKKIPEEFKQLAKDFSDNGFITTSFDNLVNWARAGSLHWMTFGLACCAVEMMQTSMPRYDLERFGAAPRGSPRQSDVMIVAGTLTNKMAPALRKVYDQMPEPRYVISMGSCANGGGYYHYSYSVVR

SEQ ID NO: 101095 - protein, 282 aa, Unknown
  Bacterial polypetide isolated from the Sargasso Sea
QKKFLGKNACESGWDLDIYVHYGAGAYICGEETALLESLEGKKGLPRLKPPFPALVGLYGCPTIVNNVETIAVVPTILKKGAKWFTSLGKPKNTGTKIFCISGDVNNPCNVEEEMGIPLKDLIEKHAGGVIGGWKNLQAVIPGGSSMPLLPKSICESITMDFDSLIKAKSGLGTAGIVVINKDRDIIKCIARIARFYKHESCGQCTPCREGCGWMWRMLERMVDGDATYKEIDLLHDVTKQIEGHTICAFGEGAAWPVQGLLRHFRKEIEKRNHDEPLIKKK

SEQ ID NO: 101096 - protein, 217 aa, Unknown
  Bacterial polypetide isolated from the Sargasso Sea
MLKDEDRIFTNLYGWMDSGLKGAKTRGDWDGTAKLIKLGHDEIVERMKASGLRGRGGAGFPTGLKWSFMPKEVGARPHYLVVNADESEPGTCKDRDIIRNEPHKLLEGCVLAGFAMRAHAAYIYIRGEFVNEARRLQAAIDEAYAAGLLGDNAANSGWKFDIYLHRGAGAYICGEETALIESLEGKKGQPRLKPPFPAGAGLYGCPTTVNNVESIAV

SEQ ID NO: 101097 - protein, 232 aa, Unknown
  Bacterial polypetide isolated from the Sargasso Sea
MLEDKDRIFQNLYNDFGADLKSAKQRGDWKDTKEICGKGREWIINEIKASELRGRGGAGFPTGLKWSFAPKEVGSRPHYLVINADESEPGTCKDRDILRFEPHKLIEGCLIASYAVNAHKCYIYIRGEYFNEGQKLQTAIDEAYKDGLLGKNSAGTDWELDIYIHYGAGAYICGEETALLESIEGKKGQPRLKPPFPALIGLYGCPTIINNVETISVVPTILRRSGRWFSSL

SEQ ID NO: 101098 - protein, 171 aa, Unknown
  Bacterial polypetide isolated from the Sargasso Sea
MNNKIDQVPEEFKQLAEDFSKNGFITTSLDNLINWSRSGSLHWMTFGLACCAVEMMQTAMPRYDLERFGAAPRGSPRQSDVMIVAGTLTNKMAPALRKVYDQMPEPRYVISMGSCANGGGYYHYSYSVVRGCDRIVPVDVYVPGCPPSAESLLYGILQLQKKIRKKGSFIR

SEQ ID NO: 101099 - protein, 209 aa, Unknown
  Bacterial polypetide isolated from the Sargasso Sea
MLEDKDRIFKNLYNDFGADVLSSQKRGDWLNVKEICSKGREWIINEIKSSELRGRGGAGFPTGLKWSFAPKEVGSRPHYLVINADESEPGTCKDRDILRFEPHKLIEGCLIASYAINAHKCYIYIRGEYFNEGEKLQKAIDEAYEKKLIGKNASDTGWDLDIFIHYGAGAYICGEETALLESLEGKKGLPRLKPPFPALIGLYGCPTYN

SEQ ID NO: 101100 - protein, 290 aa, Unknown
  Bacterial polypetide isolated from the Sargasso Sea
GDFYRKIEALQRAVDEAYDAGLIGKNACGSGYDFFLYIHRGSGAYVCGEETALIESLEGKKGQPRLKPPFPANSGLYGCPTTVNNVESIAVVPTILRRGKDWFANLGRANNTGTKLFNISGHVEQPCTIEEEMSIPLKDLIEKHAGGVRGGWDNLLAIIPGGASVPCLPKGICDTVLMDFDSLREQQSGLGTAAIMVMDQSTDIVAAVARLSSFYKHESCGQCTPCREGTGWMSRMMSRMVTGNATVEEIDLLEQVTRQVEGHTICALGDAAAWPIQGVIRHFRPEMEAR

SEQ ID NO: 101101 - protein, 177 aa, Unknown
  Bacterial polypetide isolated from the Sargasso Sea
MIDIEKEKKIPDEFKKLAKDFSENGFITTSFDNLVNWARTGSLHWMTFGLACCAVEMMHTSMPRYDLERFGAAPRGSPRQSDVMIVAGTLTNKMAPALRKVYDQMPEPRYVISMGSCANGGGYYHYSYSVVRGCDRIVPVDVYVPGCPPSAEALLYGILQLQKKNKKQRLFTKVNLW

SEQ ID NO: 101102 - protein, 246 aa, Unknown
  Bacterial polypetide isolated from the Sargasso Sea
FGWEGVGLASYLLIGFWHHKNSANKAAIKAFIVNRVGDFGFLLGIAGIYFIFDSVNFDTIFANVKNFENHKIYFAGIYFDTIDLLCFLLFIGAMGKSAQLGLHTWLPDAMEGPTPVSALIHAATMVTAGVFMIARMSPMFEFAINTNIFITFIGASTAIFAASIALTQNDIKRVIAYSTCSQLGYMFFAAGVGAYNASIFHLMTHGFFKALLFLSAGSVIHAMHHEQDMRKMGGLHSKIPFTAVMK

SEQ ID NO: 101103 - protein, 233 aa, Unknown
  Bacterial polypetide isolated from the Sargasso Sea
MLKDEDRIFKNLYNDLGSDIESAIKRDDWKNTKEICEKGRDWIINEIKTSELRGRGGAGFPTGLKWSFAPKEVGSRPHYLVINADESEPGTCKDRDILRFEPHKLIEGCLLSSYAVNAHVCYIYIRGEYYNEGRKLQEAIDEAYEKGFIGINASGTGWDLDIYIHYGAGAYICGEETALLESLEGKKGQPRLKPPFPALIGLYGCPTIINNVETISVVPTILRRGGKWFSSLG

SEQ ID NO: 101104 - protein, 274 aa, Unknown
  Bacterial polypetide isolated from the Sargasso Sea
LLKIEFYFERDPHQLIEGIIVTSFASNISKAFIYIRGEYAKPARRVQDAVEQAYEKGYLGKNIFDSGKDLDVLVHLGAGAYICGEETALLNSLEGRRGEPRLKPPYFPAVKGLYNKPTLVNNVETISSVPWIINNSGKDYAKLGVEGSTGTRIFSLSGHVNNPGNFEIEMGCSFGEFIDTFGNGVRENKAVKAFIPGGASAPWFTGEQLDIKMTIDDVANAGSMLGSGAVVVMDEDTNLVLAAKSIVSFFAHESCGQCTPCREGTTWLEMILER

SEQ ID NO: 101105 - protein, 294 aa, Unknown
  Bacterial polypetide isolated from the Sargasso Sea
MKHDISFNRFFIYTNFFTFSMLLIVFANNFLQLFIGWELVGLSSYLLIGFWIKKESAIKANYKAFLVNRVGDIGLLLGLCLILLSYSTTDYNQIFQIKNSINMDNVNIFGFTFNALSVICLLLFIGAMAKSAQVPLQFWLPDSMEGPTPISALIHAATMVTAGIYMVARLSPLYELTDGVLIFILYVGSITAFFLGLVALVQNDIKRIIAYSTISQLGYMTAALGASLYSLAMFHLITHAFFKALLFLCAGSIIIKCHHEQDIRKIGGLRKYMPITYLAFMYASLSLIGFPITS

SEQ ID NO: 101106 - protein, 237 aa, Unknown
  Bacterial polypetide isolated from the Sargasso Sea
EETALLESLEGKKGMPRMKPPFPAGAGLYGCPTTVNNVESIAVVPTILRRGADWFSKFGRENNAGTKLFAISGHVNHPCVVEEEMSIPFEELIERHCGGIRGGWKNLKAVIPGGASVPCVRGGEMREALMDFDYLRGELGSGLGTAAVIVMDQSTDVIKAIWRLSKFYKHESCGQCTPCREGTGWMMRVMERLVNGDADPSEIDMLLDVTKQVEGHTICALGDAAAWPIQGLIKNFR

SEQ ID NO: 101107 - protein, 315 aa, Unknown
  Bacterial polypetide isolated from the Sargasso Sea
IINEIKISELRGRGGAGFPTALKWSFAPKEIGSRPHYLVINADESEPGTCKDRDILRFEPQKLIEGCLIAGYSVNAHICYIYIRGEYFNEGKRLQEAIDQAYEKNFLGKNACGTGWDFDIYIHFGAGAYICGEETALLESLEGNKGQPRLKPPFPALVGLYGCPTIVNNVETIAVVPTILRKGAKWFTSIGRPKNTGTKIFCISGNVNYPCNVEEEMGIGLKELIEKYAGGVVGGWDNLQAVIPGGSSMPLIPKKICDTIKMDFDSLINVKSGLGTAGIVVINKDQDIIKCIARIARFYKHESCGQCTPCREGSG

SEQ ID NO: 101108 - protein, 127 aa, Unknown
  Bacterial polypetide isolated from the Sargasso Sea
MEKRCVGLGINMMNFKNKQKEIPEEFKKLAKDFSDKGFITTSLDNLINWSRTGSLHWMTFGLACCAVEMMQTSMPRYDLERFGAAPRASPRQSDVMIVAGTLTNKMAPALRKVYDQMPEPRYVISMG

SEQ ID NO: 101109 - protein, 255 aa, Unknown
  Bacterial polypetide isolated from the Sargasso Sea
KNASGTGWDFDIYIHFGAGAYICGEETALLESLEGKKGQPRLKPPFPALVGLYGCPTIINNVETVAVVPTILRRGGKWFASLGKPKNTGTKIFCISGNVNKPCNVEEEMGVPLKTLIESHAGGVIGGWENLKAVIPGGSSMPLLPKEICETITMDFDSLVSHKSGLGTAGIVVINKDQDIIKCMARIARFYKHESCGQCTPCREGSGWMWRMLERMAKGEASRDEVDMLMDVTKQIEGHTICAFGEGSSWPVQGL

SEQ ID NO: 101110 - protein, 324 aa, Unknown
  Bacterial polypetide isolated from the Sargasso Sea
DILRFEPHKLIEGCLISAFAVNAHVCYIYIRGEYFNEGHKLQKAIDEAYEEGLIGKNSSGTDWNLDIYIHYGAGAYICGEETALLESLEGKKGQPRLKPPFPALIGLYGCPTIINNVETIAVVPTILRRGGKWFSSLGRAKNTGTKIYCISGNVNNPCNVEEEMGIPLKDLIEKHAGGVVGGWDNLKAAIPGGSSMPLLPKKICDTIKMDFDACVENKTGLGTAGIIVINNDQDIIKCMARIARFYKHESCGQCTPCREGSGWMWRMLERMAKGDATRDEVDMLMDVTKQIEGHTICAFGEGSAWPVQGLIKHFKEEIIERNKF

SEQ ID NO: 101111 - protein, 330 aa, Unknown
  Bacterial polypetide isolated from the Sargasso Sea
RFEPQKLIEGCLIASYAINAKVCYVYIRGEYINEGKRLQEAIDEAYSKNLIGKNACNSGWDLDIYIHYGAGAYICGEETALLESLEGNKGQPRLKPPFPALVGLYGCPTIVNNVETIAVVPTILRRGAKWFASMGRPKNTGTKIFCISGNVNAPCNVEEEMGIPLKELIEKHADGVVGGWKNLQAVIPGGSSMPMVPKDICETLRMDFDSLVEVKSGLGTAGVVVINKDEDIIKCMARIARFYKHESCGQCTPCREGAGWMWRILERTAKGEATHKDIDLLSDVTKQIEGHTICAFGEGSAWPVQGLLRHFRKEIDKRCFSEPLIKKKKN

SEQ ID NO: 101112 - protein, 173 aa, Unknown
  Bacterial polypetide isolated from the Sargasso Sea
MNLDEKQKKIPDEFKKLAEDFSKNGFITTSFDNLVNWARTGSLHWMTFGLACCAVEMMQTSMPRYDLERFGAAPRASPRQSDVMIVAGTLTNKMAPALRKVYDQMPEPRYVISMGSCANGGGYYHYSYSVVRGCDRIVPVDIYVPGCPPSAEALLYGILQLQKKIRNRGSLER

SEQ ID NO: 101113 - protein, 126 aa, Unknown
  Bacterial polypetide isolated from the Sargasso Sea
FWLACCAVEMMQTSMPRYDLERFGAAPRASPRQSDVMIVAGTLTNKMAAPLRKVYDQMPEPRYVISMGSCANGGGYYHYSYSVVRGCDRIVPVDIYVPGCPPSAEALLYGVLQLQKKIRREGNQNR

SEQ ID NO: 101114 - protein, 272 aa, Unknown
  Bacterial polypetide isolated from the Sargasso Sea
GISTVLSLLVYKHHIIDGAADYNQSIYVWLTSGGIDFQIGFLIDKLSATMMVVVSFVSWMIHIYTIGYMQNDPGYQRFFSYISLFTFAMLMLVMSNNFLQLFFGWEAVGLVSYLLIGFWYKKESAIFANLKAFLVNRIGDFGFLLGIAAVLMHFDTLDYVEVFKNVEQHVDTTITIINGESWSLMTVICISLFIGAMGKSAQVPLHVWLPDSMEGPTPISALIHAATMVTAGIFMVSRMSPLFELSATALNFILIIGAITALSMGILGLFKM

SEQ ID NO: 101115 - protein, 312 aa, Unknown
  Bacterial polypetide isolated from the Sargasso Sea
PILPIMGVESVDAAFLIVLAPFLAFPIILVSGQLYNGNSTWKQNLKEGGVIGLSALLVSLTTALWVVVDYLRGAREIAKDPSGNVASSWGDWISFDVLLSDYSMSSGRVIGVGVWVDSVTLMLLFVATFLCFLICWFSLGYMNTDPINEDRNHRFYAEFVLFAMGMFGMVLADNFLWLFIFWEIMGLCSYLLIGFYFWKESAAYAAKKAFLTTRVGDVFLMVGLLILYDIYGSLEFSVIFEDPSLNGTVDSDKLFWALLMLFIGAVGKSAQFPLHVWLPDAMEGPTPVSALIHAATMVNAGLYLVARHGPHS

SEQ ID NO: 101116 - protein, 159 aa, Unknown
  Bacterial polypetide isolated from the Sargasso Sea
MEERGSRMGIGFFNKEKEKQIPQEFKQIAKDFSEKGFVTTSSDNLINWARTGSLHWMTFGLACCAVEMMQTSMPRYDLERFGAAPRASPRQSDVMIVAGTLTNKMAAPLRKVYDQMPEPRYVISMGSCANGGGYYHYSYSVVRGCDRVVPVDIYVPGCP

SEQ ID NO: 101117 - protein, 304 aa, Unknown
  Bacterial polypetide isolated from the Sargasso Sea
VFPLGLKWSFAPKEIGSRPHYLVINADESEPGTCKDRDILRFEPQKLIEGCLIAGYAVNAHVCYIYIRGEYLNEGKRLQNAINQAYEKKYLGKNACGSGWDFDIHIHYGAGAYICGEETALLESIEGNKGQPRLKPPFPALVGLYGCPTIVNNVETIAVVPTILRRGGKWFASLGKPKNTGTKIFCISGNVNSPCNVEEEMGVSLKELIEKHAGGVTGGWENLQAVIPGGSSMPLLPKKICDTITMDFDTLIENKSGLGTAGIVVINKDQDIIECMARIARFYKHESCGQCTPCREGAGWMWRI

SEQ ID NO: 101118 - protein, 262 aa, Unknown
  Bacterial polypetide isolated from the Sargasso Sea
MLKDQDRIFKNLYNDMGSDVKSAQKRGDWVNTSEIVAKGRDWIINEVKDSQLRGRGGAGFPTGLKWSFAPKEVGSRPHYLVINADESEPGTCKDRDILRFEPHKLIEGCLIASYAVQAHVCYIYIRGEYFIEGQKLQSAIDEAYEKNLIGKNAAGTGWDLDIYIHYGAGAYICGEETALLESIEGKKGQPRLKPPFPALIGLYGCPTIINNVETIAVVPTILRKSGKWFASLGREKNTGTKIFCISGNVNTPCNVEEEMIFL

SEQ ID NO: 101119 - protein, 242 aa, Unknown
  Bacterial polypetide isolated from the Sargasso Sea
MPRMKPPFPAGAGLYGCPTTVNNVESIAVVPTILRRGADWFSGFGRPNNTGTKIFAISGHVNKKCVVEEEMSISLRELIERHCGGVRGGWNNLKAVIPGGASVPLLPADLCEDAIMDFDWLREQKSGLGTAAVIVMDQSTDVIKAIWRLAKFYKHESCGQCTPCREGTGWMMRVMERLTKGEASVSEIDMLLDVTKQVEGHTICALGDAAAWPIQGLIRHFRDEIEDRIKNVKLKSPELAAE

SEQ ID NO: 101120 - protein, 137 aa, Unknown
  Bacterial polypetide isolated from the Sargasso Sea
MNLQDRKKDIPEEFKQLAQDFSDNGFITTSLDNLVNWARTGSLHWMTFGLACCAVEMMQTSMPRYDLERFGAAPRASPRQSDVMIVAGTLTNKMAPALRKVYDQMPEPRYVISMGSCANGGGYYHYSYSVVRGCDRV

SEQ ID NO: 101121 - protein, 157 aa, Unknown
  Bacterial polypetide isolated from the Sargasso Sea
MFQEEKLKKVPDEFKKIAKDFAEKGFITTSTDNLINWARTGSLHWMTFGLACCAVEMMQTSMPRYDLERFGAAPRASPRQSDVMIVAGTLTNKMAPALRKVYDQMPEPRYVISMGSCANGGGYYHYSYSVVRGCDKIVPVDIYVPGCPPSAEAFLRH

SEQ ID NO: 101122 - protein, 265 aa, Unknown
  Bacterial polypetide isolated from the Sargasso Sea
LLESIEGKKGQPRLKPPFPALIGLYGCPTIINNVETIAVVPTILRRGGKWFASLGREKNTGTKIFCISGNVNTPCNVEEEMNIPLKELIEVHAGGVIGGWDNLQAVIPGGSSMPLIPKEKCETLTMDFDSLMAEKSGLGTAGIVVINKDQDIIKCMARIARFYKHESCGQCTPCREGSGWMWRMLERMAKGDATKDEVDMLGDVTNQIAGHTICAFGEGSSWPVQGLLRHFKKEIEKRNNLDPIVQKKNNIPYLEDQHLLDKKNA

SEQ ID NO: 101123 - protein, 311 aa, Unknown
  Bacterial polypetide isolated from the Sargasso Sea
KLNEGCLIASYAVNAHKCYIYIRGEYFNEGQKLQTAIDEAYKDGLLGKNSAGTDWELDIYIHYGAGAYICGEETALLESIEGKKGQPRLKPPFPALIGLYGCPTIINNVETISVVPTILRRGGKWFSSLGRPKNTGSKIYCISGNVNNPCNVEEEMGIPLKELIEKHAGGVIGGWDNLKAVIPGGSSMPLLPKETCETIKMDFDACVENKTGLGTAGIVVINKDQDIIKCMARIARFYKHESCGQCTPCREGSGWMWRMLERMAKGEATRDEVDMLLDVTKQIEGHTICAFGEGSSWPVQGLIRNLKRNNE

SEQ ID NO: 101124 - protein, 133 aa, Unknown
  Bacterial polypetide isolated from the Sargasso Sea
MNLNEKKIPDEFKKLAKDFSDKGFITTSSDNLINWARAGSLHWMTFGLACCAVEMMQTSMPRYDLERFGAAPRGSPRQSDVMIVAGTLTNKMAPALRKVYDQMPEPRYVISMGSCANGGGYYHYSYSVVRGCD

SEQ ID NO: 101125 - protein, 263 aa, Unknown
  Bacterial polypetide isolated from the Sargasso Sea
NNACNSKFDFDIFVHRGAGAYICGEETALLESLEGKKGQPRLKPPFPAIMGLYGCPTIVNNVETIANVPSIMRRGSDWFSKIGKPNNTGTKIFSVSGHVNNPCNIEEEMGIPLKKLIENYAGGVIGGWDNLLAVIPGGASMPLLPKSICDYITMDFDSLNKVQSNLGTAAVIVMNKSTDIIEAVSRLAYFFKHESCGQCTPCREGTGWMFRMIEKMIYGNAKLEDIDKLFDVTKQVEGHTICAFGDAAAWPIQGLIRHFRPRN

SEQ ID NO: 101126 - protein, 250 aa, Unknown
  Bacterial polypetide isolated from the Sargasso Sea
MLKEEDKIFKNLYGFDDWSLSGAKKRGIWSNTKSLIEKGSDGIIEEIKNSQLRGRGGAGFPAGLKWSFMPKNSNKPHYLVVNADESEPGTCKDREIMRNDPHLLLEGCLVAGFAMQAHSCYIYIRGEYYSEYSNLQKAINEAYENQLIGKNACGTDWEFNIYLHRGAGAYICGEETALLESLEGKKGQPRLKPPFPAGAGLYGCPTTVTNVETVAVAPTILRKGSKWFASLGKANNTGTKIFSISGHVNN

SEQ ID NO: 101127 - protein, 173 aa, Unknown
  Bacterial polypetide isolated from the Sargasso Sea
MIPEDKLKEIPEEFRKLAKDFSDKGFITTSLDNLINWSRSGSLHWMTFGLACCAVEMMHTSMPRYDLERFGAAPRASPRQSDVMIVAGTLTNKMAPALRKVYDQMPEPRYVISMGSCANGGGYYHYSYSVVRGCDRIVPVDVYVPGCPPSAEALLYGVLQLQKKIRNQGSLER

SEQ ID NO: 101128 - protein, 296 aa, Unknown
  Bacterial polypetide isolated from the Sargasso Sea
APKEVGSRPHYLVINGDESEPGTCKDRDILRFEPHKLIEGCLIASYAVQAHVCYIYIRGEYFIDGQKLQAAINEAYEKNLIGKNSAGTGWDLDIYIHYGAGAYICGEETALLESIEGKKGQPRLKPPFPALIGLYGCPTIINNVETIAVVPTILRRGGKWFASLGREKNTGTKIFCISGNVNNPCNVEEEMNIPLKELIEVHAGGVVGGWDNLKAVIPGGSSMPLIPKEKCETLTMDFDSLMAEKSGLGTAGVVVINKDQDIIKCMARIARFYKHESCNQCTPCREGSGWMWRMLE

SEQ ID NO: 101129 - protein, 166 aa, Unknown
  Bacterial polypetide isolated from the Sargasso Sea
MGVEINEDNFGDQLNSKGFLVSNFDKLLTWARTGSLWPMTFGLACCGVEMIHTYMARYDLDRYGVIPRGSPRQSDVMIVAGTLTNKMAPALRKVYDQMPEPRWVISMGSCANGGGYYHYSYSVVRGCDRIVPVDIYVPGCPPTAEALVYGILQLQKKIKRKNKFVR

SEQ ID NO: 101130 - protein, 282 aa, Unknown
  Bacterial polypetide isolated from the Sargasso Sea
GDWNNTKEICERGREWIINEVKTSELRGRGGAGFPTGLKWSFAPKEVGSRPHYLVINADESEPGTCKDRDILRFEPQKLIEGCLITSFAVNAHACYIYIRGEYFNEGQILQKAIDEAYAEGLIGKNSLGTDWDLDIYIHYGAGAYICGEETALLESLEGKKGQPRLKPPFPALIGLYGCPTIINNVETIAVVPTILRRGGKWFSSLGRSKNTGTKIYCISGNVNNPCNVEEEMGIPLKDLIEKHAGGVVGGWDNLKAVIPGGSSMPLLPKKICDTIKMDFDA

SEQ ID NO: 101131 - protein, 228 aa, Unknown
  Bacterial polypetide isolated from the Sargasso Sea
MPQLIVFLPLLGFIFCFFFGKRFGFRSSQIVTTSLLFISAILSWILFFSYLGERETEIIHIFNWFTSGNFIVDWSIRLDSLTTTMFIVVCSVSACVHLYSIGYMGDDPCKERFMGYLSLFTFFMLMLVSSNNLLQMFFGWEGVGLASYLLIGFWHHKPSANNAAIKAFLVNRIGDFGYALGIAGIFYIFGSIEFSVIFDNAESFKDHSINFIGINFSTIDLLCFLLFI

SEQ ID NO: 101132 - protein, 301 aa, Unknown
  Bacterial polypetide isolated from the Sargasso Sea
DKDRILKNLYGDDSFELSSALKRGDWNATDKILAKGREWIISEIKNSELRGRGGAGFPTGVKWSFAPKTVQPNKPHYLIINADESEPGTCKDREILRNEPHKLLEGCLISSFAVGAKKCYIYIRGEYVREGEILQKAIDEAYESGLLGENAAKSGWSLDVYIHYGAGAYICGEETALLESLEGKRGLPRLKPPFPALIGLYGCPTIVNNVETVAVVPEILKRGAKWFSSFGRPKNRGTKIFCISGNVNNPCNVEESMSVPLKELIEEHAGGVVGGWENLQAVIPGGSSNAHYCQNKFCDKV

SEQ ID NO: 101133 - protein, 285 aa, Unknown
  Bacterial polypetide isolated from the Sargasso Sea
FPTGLKWSFAPKEIGSRPHYLVINADESEPGTCKDRDILRFEPHKLIEGCLIASYAVNAHKCYIYVRGEYFREGQSLQKAINEAYKKNLIGKNACDTGWDFDIYIHYGAGAYICGEETALLESIEGKKGQPRLKPPFPALIGLYGCPTIINNVETIAVVPTILRRSGKWFSSIGKPKNTGTKIFCISGNVNSPCNVEEEMGISLKELIEVHCGGVIGGWDNLQAVIPGGSSMPLLPKKTCDTISMDFDSLIKEKSGLGTAGVIVINKDQDIIQCMARIARFYKHE

SEQ ID NO: 101134 - protein, 171 aa, Unknown
  Bacterial polypetide isolated from the Sargasso Sea
MNNKLDQVPDEFKKLAEDFGKNGFITTSLENLVNWSRSGSLHWMTFGLACCAVEMMQTAMPRYDLERFGAAPRGSPRQSDVMIVAGTLTNKMAPALRKVYDQMPEPRYVISMGSCANGGGYYHYSYSVVRGCDRIVPVDVYVPGCPPSAEALLYGIMQLQKKIRNKGSFNR

SEQ ID NO: 101135 - protein, 173 aa, Unknown
  Bacterial polypetide isolated from the Sargasso Sea
MNLDNTKKEIPEEFKQLAQDFSDNGFITTSLENLVNWARTGSLHWMTFGLACCAVEMMQTSMPRYDLERFGAAPRASPRQSDVMIVAGTLTNKMAPALRKVYDQMPEPRYVISMGSCANGGGYYHYSYSVVRGCDRVVPVDVYVPGCPPSAEALLYGILQLQKKIRNKGSLER

SEQ ID NO: 101136 - protein, 171 aa, Unknown
  Bacterial polypetide isolated from the Sargasso Sea
MNNKIDQVPEEFKQLAEDFSKNGFITTSLDNLINWSRSGSLHWMTFGLACCAVEMMQTAMPRYDLERFGAAPRGSPRQSDVMIVAGTLTNKMAPALRKVYDQMPEPRYVISMGSCANGGGYYHYSYSVVRGCDRIVPVDVYVPGCPPSAEALLYGILQLQKKIRNKGSFIR

SEQ ID NO: 101137 - protein, 256 aa, Unknown
  Bacterial polypetide isolated from the Sargasso Sea
FMPKKSSIPHYLVVNADESEPGTCKDREIMRNDPHLLLEGCLVAGFAMGANVCYIYIRGEYFEESSNIQKAIEEAYKSNLIGKNASDSGWDFDIYLHRGAGAYICGEETALLESLEGKKGQPRLKPPFPAGSGLYGCPTTVTNVETVAVASTILRKGSKWFSSLGSPNNTGTKIFSISGHVNNPCNVEEEMGIPLKKLIEEHAGGVIGGWENLLAVIPGGASVPLIPKSVCEYVKMDFDSLKAVNSGLGTAAVIVM

SEQ ID NO: 101138 - protein, 173 aa, Unknown
  Bacterial polypetide isolated from the Sargasso Sea
MISEEKEKQIPEEFKQLAKDFSENGFITTSFDNLVNWARTGSLHWMTFGLACCAVEMMHTSMPRYDLERFGAAPRGSPRQSDVMIVAGTLTNKMAPALRKVYDQMPEPRYVVSMGSCANGGGYYHYSYSVVRGCDRIVPVDIYVPGCPPSAEALLYGIMQLQKKIRNKGSLQR

SEQ ID NO: 101139 - protein, 90 aa, Unknown
  Bacterial polypetide isolated from the Sargasso Sea
MIVAGTLTNKMAPALRKVYDQMPEPRYVISMGSCANGGGYYHYSYSVVRGCDRIVPVDVYVPGCPPSAEALLYGIMQLQKKIRNKGSFNR

SEQ ID NO: 101140 - protein, 178 aa, Unknown
  Bacterial polypetide isolated from the Sargasso Sea
MGIKINSTLEKQNKIPDEFKDLAKDFAEKGFITTSSDNLINWARTGSLHWMTFGLACCAVEMMQTSMPRYDLERFGAAPRASPRQSDVMIVAGTLTNKMAPALRKVYDQMPEPRYVVSMGSCANGGGYYHYSYSVVRGCDKIVPVDIYIPGCPPSAEALLYGILQLQKKIRREGSIER

SEQ ID NO: 101141 - protein, 239 aa, Unknown
  Bacterial polypetide isolated from the Sargasso Sea
MLKEKDKIFTNLFGDDAYSLKSAKKRGDWDNTKTLIKKGRDWIIDEMKKSELRGRGGAGFPTGLKWSFMPKDPALNNYLVVNADESEPGTCKDRDMIRNEPHKLIEGCLLASFAMNAHTCYIYIRGEYFNEAVVLQNAIDEAYEAGLVGKNAAKSGWDFDVYLHRGAGAYICGEETALLESLEGKKGFPRLKPPFPANKGLYGAPTTVNNVETIAVVPTILRRGGEWFSSFGRKKNTGT

SEQ ID NO: 101142 - protein, 173 aa, Unknown
  Bacterial polypetide isolated from the Sargasso Sea
MTISEKEKQIPDEFKKLAKDFSDNGFITTSFDNLVNWARTGSLHWMTFGLACCAVEMMQTSMPRYDLERFGAAPRGSPRQSDVMIVAGTLTNKMAPALRKVYDQMPEPRYVISMGSCANGGGYYHYSYSVVRGCDRIVPVDIYVPGCPPSAEALLYGIMQLQKKIRNKGSLER

SEQ ID NO: 101143 - protein, 242 aa, Unknown
  Bacterial polypetide isolated from the Sargasso Sea
IIGGFFWRSIGESQAIYLTIALLFLSCFLSWIVFLSHGADVEKITLFRWINSGDLSANWSIRLDRLTSIMLVVVTSVSALVHLYSVGYMAHDENWKEDEHYKARFFAYLSFFTFTMLMLVTSDNLIQMFFGWEGVGVASYLLIGFYYRKQSANAAAIKAFVVNRVGDFGFALGIFGLFMLTGSINFDDIFSAAPKLADTRLTFLWSDWNAANLIAFLLFFGAMGKSAQLFLHTWLPDAMEGP

SEQ ID NO: 101144 - protein, 299 aa, Unknown
  Bacterial polypetide isolated from the Sargasso Sea
PHKLVEGCLVAGFAMGADAAYIYVRGEFYNEAGILDAAIQQAYDAGLVGKNACGSGYDFDVYVHRGAGAYICGEETALLESLEGKKGQPRIKPPFPANTGLYGCPTTINNVETIAVSPTICRRGASWFAGIGRENNTGTKVFCISGHVNNPCNVEEAMSIPLKELIEKHAGGVRGGWDNLKAIIPGGSSVPLLPKSICDTVLMDFDSLREVKSGLGTAAVIVMDQSTDVIAAIARLAKFYKHESCGQCTPCREGTGWMWRVMERLVRGEAEVEEIDMLLDVSYEIEGHTICALGDAAAW

SEQ ID NO: 101145 - protein, 216 aa, Unknown
  Bacterial polypetide isolated from the Sargasso Sea
MLKDEDRIFQNLYNDFGAELDSAKKRGDWLETKEIFNKGRSWIIEEIKTSQLRGRGGAGFPTGLKWSFAPKEVGSKPHYLVINADESEPGTCKDRDILRFEPHKLIEGCLIASYAVNAHTCYIYIRGEYFKEGQKLQKAIDEAYSNGLIGKNASSTGWDFDIFIHYGAGAYICGEETALLESLEGNKGQPRLKPPFPALIGLYGCPTIINNVETIA

SEQ ID NO: 101146 - protein, 134 aa, Unknown
  Bacterial polypetide isolated from the Sargasso Sea
MNDKLEKVPKEFKKLAEDFSKNGFITTSFDNLVNWSRSGSLHWMTFGLACCAVEMMQTAMPRYDLERFGAAPRGSPRQSDVMIVAGTLTNKMAPALRKVYDQMPEPRYVISMGSCANGGGYYHYSYSVVRGCDR

SEQ ID NO: 101147 - protein, 168 aa, Unknown
  Bacterial polypetide isolated from the Sargasso Sea
MGVDTFQTIEDVQKDVKQKGFLLAKYNDLLTWARTGSLWPMTFGLACCGVEMMHSYMSRYDLDRYGVIPRGSPRQSDVMIVAGTLTNKMAPALRKVYDQMPEPRWVISMGSCANGGGYYHYSYSVVRGCDRIVPVDIYVPGCPPTAEALVYGILQLQKKIKRNNKSNS

SEQ ID NO: 101148 - protein, 125 aa, Unknown
  Bacterial polypetide isolated from the Sargasso Sea
WLACCAVEMMQTSMPRYDLERFGAAPRASPRQSDVMIVAGTLTNKMAPALRKVYDQMPEPRYVISMGSCANGGGYYHYSYSVVRGCDRIVPVDVYVPGCPPTAEALLYGILQLQKKIRNKGSLQR

SEQ ID NO: 101149 - protein, 267 aa, Unknown
  Bacterial polypetide isolated from the Sargasso Sea
KDEDRIFKNLYNDLGKDLISSQKRGDWSNTKEIFEKGRDWIINEIKSSELRGRGGAGFPTGLKWSFAPKEKGSRPHYLVINADESEPGTCKDRDILRFEPHKLIEGCLIASYAVNSNKCYIYIRGEYFNEGQLLQNAIDESYKNNLIGKNASGTGWDLDIYIHYGAGAYICGEETALLESLEGKKGQPRLKPPFPALVGLYGCPTIVNNVETISVVPTILRKGAKWFSSLGKPKNTGTKIFCISGNVNNPCNVEEEMSIPLKDLIET

SEQ ID NO: 101150 - protein, 266 aa, Unknown
  Bacterial polypetide isolated from the Sargasso Sea
MQLFFGWEGVGVASYLLIGFWFKKDSAHTAAMKAFVVNRVGDFGFALGILAVYQVFGSIQFDEIFTNAAAMKDAEIMFLGSTLPALEVAGILLFIGAMGKSAQLGLHTWLPDAMEGPTPVSALIHAATMVTAGVFMVCRLSPMLEYAPLSLDIITIVGALTAIFAATVGMTQFDIKRVIAYSTCSQLGYMFFAAGVSAYPAAMFHLTTHAFFKALLFLGAGSVIHALSDEQDLRNMGGIWRKIPFTYAMMWIGSLALAGFPFFAGF

SEQ ID NO: 101151 - protein, 258 aa, Unknown
  Bacterial polypetide isolated from the Sargasso Sea
ETALLESLEGNKGQPRLKPPFPALVGLYGCPTIVNNVETIAVVPTILRKGAKWFTSLGRAKNTGTKIFCISGNVNKPCNVEEEMGISLKDLIEHHAGGVVGGWENLKAVIPGGSSMPLLPKEICETIKMDFDSLVENKSGLGTAGIIVINKDQDIIKCMARIARFYKHESCGQCTPCREGSGWMWRMLERMAKGEASREEVDMLMDVTKQIEGHTICAFGEGSSWPVQGLLRHFKKEIIKRNNFDPLINKSRNIPYLV

SEQ ID NO: 101152 - protein, 288 aa, Unknown
  Bacterial polypetide isolated from the Sargasso Sea
GHCHLQDMTVMTGHNTRRYRFTKRTHQNQELGPFIAHEMNRCIACYRCVRYYKDYAGGTDLGVYGAHDNVYFGRVEDGTLESEFSGNLVEVCPTGVFTDKTHSERYNRKWDMQFAPSICHGCSSGCNISPGERYGELRRIENRFNGSVNQYFLCDRGRFGYGYVNREDRPRQPLLAGQAIGIDAALDKAAELLKGKRVIGIGSPRASLESNFALRELVGADNFYSGIAASELANIRLIRDILQNGPLQTPTLRDVELHDAIFVLGEDLTQTAARMALALRQAVKGKAN

SEQ ID NO: 101153 - protein, 274 aa, Unknown
  Bacterial polypetide isolated from the Sargasso Sea
AYICGEETALLESLEGKKGQPRLKPPFPALIGLYGCPTIINNVETIAVVPTILRRGGKWFSSLGKEKNTGTKIFCISGNVNNPCNVEEEMSIPLKELIENHAGGVIGGWDNLQAVIPGGSSMPLLPKKTCDTITMDFDSLMSEKSGLGTAGIVVINKDQDIIKCMARIARFYKHESCGQCTPCREGSGWMWRMLERMAKGEASRDEVDMLMDVTKQIEGHTICAFGEGSSWPVQGLLRHFKKEIEKRNNFSPLINKNKNIPYLIDQHLLDKDNA

SEQ ID NO: 101154 - protein, 220 aa, Unknown
  Bacterial polypetide isolated from the Sargasso Sea
MLKDEDRIFQNLYNDSGADIESAKLRNDWNGTKEILEKGREWIINEIKSSELRGRGGAGFPTGLKWSFAPKEVGSRPHYLVINADESEPGTCKDRDILRFEPHKLIEGCLIASYAVNAQKCYIYIRGEYFNEGQKLQTAIDEAYKKNLIGKNALNSGWDLDIYIHYGAGAYICGEETALLESLEGKKGQPRLKPPFPALIGLYGCPTIINNVETVAAVPT

SEQ ID NO: 101155 - protein, 283 aa, Unknown
  Bacterial polypetide isolated from the Sargasso Sea
ASELRGRGGAGFSTGLKWSFAPKKVGSRPHYLVINADESEPGTCKDRDILRFEPQKLIEGCLIASYAVNAKVCYVYIRGEYLNEGKRLQEAIDEAYSKNLIGKNACNSGWDLDIYIHYGAGAYICGEETALLESLEGNKGQPRLKPPFPALVGLYGCPTIVNNVETIAVVPTILRRGAKWFASMGRPKNTGTKIFCISGNVNTPCNVEEEMGIPLKELIEKHGGGVIGGWKNLQAVIPGGSSMPMVPKDICETLKMDFDSLVEVKSGLGTAGVVVINKDEDIV

SEQ ID NO: 101156 - protein, 240 aa, Unknown
  Bacterial polypetide isolated from the Sargasso Sea
MLKEENKIFKNLYNDYGWEIDNAIDRDDWKDTKKLISKGKDWIINEIKVSELRGRGGAGFSTGMKWSFIPKQQGSRPHYLVINADESEPGTCKDRDILRFEPQKLIEGCLIAGFAVGAHVCYIYIRGEYFFEGKRLQEAIDQAYEKNFLGKNACGTNWDFHIHIHYGAGAYICGEETALLESIEGNKGQPRLKPPFPALVGLYGCPTIVNNVETIAVVPTILRRGGKWFASIGRPKKYGN

SEQ ID NO: 101157 - protein, 318 aa, Unknown
  Bacterial polypetide isolated from the Sargasso Sea
NRGDWSNTKDICLKGRDWIINEIKISELRGRGGAGFPTGLKWSFAPKTIGTRPHYLVVNADESEPGTCKDRDILRFEPHKLIEGCLISSYAVNAHVCYIYIRGEYLREGEKLQKAIDEAYEKNLIGKKASGTEWDFDIYIHYGAGAYICGEETALLESLEGKKGQPRLKPPFPALIGLYGCPTIINNVETIAVVPTILRKGGKWFASLGKPKNTGTKIFCISGNVNKPCNVEEEMGIPLKDLIEHHSGGVIGGWENLKAVIPGGSSMPLLPKKICDTITMDFDSLIKEKSGLGTAGIIVINKDQDIIKCMARNSPGFI

SEQ ID NO: 101158 - protein, 231 aa, Unknown
  Bacterial polypetide isolated from the Sargasso Sea
MLDSKDRIFDNLYGFEPWNLDNAKLRGDWDNTKDILLKGREKITEEVISSGLRGRGGAGFSTGVKWTFMPKEPTGKTHYLVVNADESEPGTCKDREILRNEPHKLLEGCVIACAAMGAQVCYIYIRGEFINERYILESALKEAYDDGLVGKNACGSGLDIEIFIHHGAGAYICGEETALLESLEGKKGMPRLKPPFPAAAGLYGCPTTVNNVESIAVVPTILRRGSNWFSG

SEQ ID NO: 101159 - protein, 280 aa, Unknown
  Bacterial polypetide isolated from the Sargasso Sea
MLKDQDRIFQNLYNDLGSDVTSSQKRGDWVNTKEIIDKGREWIINEIKDSQLRGRGGAGFPTGLKWSFAPKELGARPHYLVINGDESEPGTCKDRDILRFEPHKLIEGCLIASYAVQAHVCYIYIRGEYFIDGQKLQDAIDEAYEKKLLGKNAAGTGWDLDIYIHYGAGAYICGEETALLESIEGKKGQPRLKPPFPALIGLYGCPTIINNVETIAVVPTILRRGGKWFASLGREKNTGTKIFCISGNVNTPCNVEEEMNIPLKELIEVHAGGVIGGWEN

SEQ ID NO: 101160 - protein, 290 aa, Unknown
  Bacterial polypetide isolated from the Sargasso Sea
ADESEPGTCKDRDILRFEPHKLIEGCLIASYAVNANVCYIYIRGEYFNEGQKLQKAIDEAYSNGLIGKNASSTGWDFDIFIHYGAGAYICGEETALLESLEGNKGQPRLKPPFPALIGLYGCPTIINNVETIAVVPTILRRGGKWFYSLGREKNTGTKIFCISGNVNNPCNVEEEMGVPLKDLIEKHAGGVVGGWDNLKAVIPGGSSMPLLPKEVCDTIKMDFDACVENKTGLGTAGIVVINKDQDIIKCMARIARFYKHESCGQCTPCREGSGWMWRMLERMAKGEATR

SEQ ID NO: 101161 - protein, 262 aa, Unknown
  Bacterial polypetide isolated from the Sargasso Sea
MLKDQDRIFQNLYNDKGSDVVASQSRGDWVNTKEITNKGRDWIINEIKESQLRGRGGAGFPTGLKWSFAPKEVGSRPHYLVINGDESEPGTCKDRDILRFEPHKLIEGCLIASYAVQAHVCYIYIRGEYFIDGQKLQAAIDEAYEKKLLGKNAAGTGWDLDIYIHYGAGAYICGEETALLESLEGKKGQPRLKPPFPALIGLYGCPTIINNVETIAVVPTILRRGAKWFASLGREKNTGTKIFCISGNVNNPCNVEEEMSIP

SEQ ID NO: 101162 - protein, 270 aa, Unknown
  Bacterial polypetide isolated from the Sargasso Sea
MLKDEDRIFTNLYGWFDGGLAGARKRGDWSNTKELLKNSPDEIVELVKASGLRGRGGAGFSTGLKWSFMPKEVTDRPHYLIVNADESEPGTCKDREIMRNDPHKLVEGCLIGGYAIRACAAFIYIRGEFYNEAQKLQAAIDEAYDAGLIGKNACGSGYDFDVILHRGAGAYICGEETALLESLEGKKGQPRLKPPFPAASGLYGCPSTVNNVESIAVVPTILRRGPEWFAGLGREKNVGTKLFCISGHVNNPCNVEEEMGIPLKDLMKNT

SEQ ID NO: 101163 - protein, 131 aa, Unknown
  Bacterial polypetide isolated from the Sargasso Sea
MEEKNNIPEEFKKLAEDFGKNGFVTTSFENLVNWARSGSLHWMTFGLACCAVEMMQTSMPRYDLERFGAAPRGSPRQSDVMIVAGTLTNKMAPALRKVYDQMPEPRYVISMGSCANGGGYYHYSYSVVRGC

SEQ ID NO: 101164 - protein, 208 aa, Unknown
  Bacterial polypetide isolated from the Sargasso Sea
MLKDEDRIFTNLYNDLGSDILSAQKRGDWQNTGEIIKKGKEWIINEIKSSELRGRGGAGFPTGLKWSFAPKEVGSKPHYLVINADESEPGTCKDRDILRFEPHKLIEGCLLAAYAVNAKKCYIYIRGEYFNEGNKLQEAINEAYKKKLIGVNASNSGWDFDIYIHYGAGAYICGEETALLESLEGKKGQPRLKPPFPALIGLYGCPTL

SEQ ID NO: 101165 - protein, 308 aa, Unknown
  Bacterial polypetide isolated from the Sargasso Sea
EGCLIAGYAVNAHICYIYIRGEYFNEGKRLQKAIDQAYEKNYLGKNACASGWDFDIHIHYGAGAYICGEETALLESIEGNKGQPRLKPPFPALVGLYGCPTIVNNVETIAVVPTILRRGGKWFASIGKPKNTGTKIFCISGNVNSPCNVEEEMGIPLKELIEKHAGGVIGGWDNLQAVIPGGSSMPLLSKKICDTITMDFDSLIDNKSGLGTAGVVVINKNQDIVSCMARIARFYKHESCGQCTPCREGAGWMWRILDRVEKRKATFSDIDLLSDVTKQIEGHTICAFGEGSAWPVQGLLRHFRKEMK

SEQ ID NO: 101166 - protein, 272 aa, Unknown
  Bacterial polypetide isolated from the Sargasso Sea
VGSRPHYLIINADESEPGTCKDRDILRFEPHKLIEGCLLAAYAVNANKCYIYIRGEYFNEGNKLQEAINEAYEKKLIGVNACDSGWDFDIFIHYGAGAYICGEETALLESLEGKKGQPRLKPPFPALIGLYGCPTIINNVETIAVVPTILKRGAKWFADIGKPKNTGTKIYCISGNVNNPCNVEEEMGISLKELIEKHAGGVVGGWENLQAVIPGGSSMPLLPKKICETINMDFDSLVEQKSGLGTAGIVVINNDQDIIKCMARIARFYKHE

SEQ ID NO: 101167 - protein, 160 aa, Unknown
  Bacterial polypetide isolated from the Sargasso Sea
MGLETDNDLIDQQGPGFIITSVDKLVNWARTGSMWPVTFGLACCAIEMMHAGASRYDTDRFGVFFRPSPRQSDVMIVAGTLVNKMAPALRKVYDQMAEPKWVISMGSCANGGGYYHHSYSVVRGCDQIIPVDIYVPGCPPTSEALINGIIELQEKIKNEE

SEQ ID NO: 101168 - protein, 163 aa, Unknown
  Bacterial polypetide isolated from the Sargasso Sea
PEEFKKIAKDFSEKGFITTSSDNLINWARTGSLHWMTFGLACCAVEMMQTSMPRYDLERFGAAPRASPRQSDVMIVAGTLTNKMAAPLRKVYDQMPEPRYVISMGSCANGGGYYHYSYSVVRGCDKIIPVDIYVPGCPPSAEALLYGILQLQKKIRREGTLRR

SEQ ID NO: 101169 - protein, 292 aa, Unknown
  Bacterial polypetide isolated from the Sargasso Sea
NACDTGWDFDIYVHYGAGAYICGEETALLESLEGKKGQPRLKPPFPALIGLYGCPTIINNVETVAVVPTILRRGAKWFAGIGKPKNTGTKIYCISGNVNNPCNVEEEMGISLKELIEKHAGGVIGGWDNLQAVIPGGSSMPLLPKKICETINMDFDSLVEQKSGLGTAGIVVINKDQDIIKCMARIARFYKHESCGQCTPCREGSGWMWRMLERMAKGEASRDEVDMLMDVTKQIEGHTICAFGEGSAWPVQGLLRHFKKEVAKRNNFNPLVNRNKKIPYLVDQHLWKNNIK

SEQ ID NO: 101170 - protein, 226 aa, Unknown
  Bacterial polypetide isolated from the Sargasso Sea
MLKEKDKIFKNLYGFEDWKLQGAKKRGVWSNTKGLIKMGSEKIVEEIKNSQLRGRGGAGFPAGLKWSFMPKDSGKDHYLVVNADESEPGTCKDREIMRNDPHLLLEGCLVAAFAMHAHTCYIYIRGEYYSESSNLQIAIDEAYANNLIGKNACGTGWDFDIYLHRGAGAYICGEETALLESLEGKKGQPRLKPPFPAGAGLYGCPTTVTNVETVAVSPTILRRGSK

SEQ ID NO: 101171 - protein, 280 aa, Unknown
  Bacterial polypetide isolated from the Sargasso Sea
MLKDEDRIFQNLYNDSGADYESAKKRNDWNGTKEILDKGRDWIINEVKSSELRGRGGAGFPTGLKWSFAPKEIGSRPHYLVINADESEPGTCKDRDILRFEPHKLIEGCLIASYAISAHKCYIYIRGEYFNEGQKLQIAIDEAYQNNLIGQNALNSGWDLDIYIHYGAGAYICGEETALLESLEGKKGQPRLKPPFPALIGLYGCPTIINNVETVAAVPTILRRGAKWFSSLGRPKNTGTKIYCISGNVNNPCNVEEEMGIPLKELIETHAGGVVGGWDN

SEQ ID NO: 101172 - protein, 281 aa, Unknown
  Bacterial polypetide isolated from the Sargasso Sea
MLMLVTADNLLQMFFGWEGVGVASYLLIGFYWRKPTAGAAAMKAFIVNRVGDFGFILGIFALYILTDSVDFATIFGEMDRLTTTSISFLGLDLPALEVVGFLLFIGAMGKSAQLFLHTWLPDAMEGPTPVSALIHAATMVTAGVFLVCRMSPVYDEAIYAAGFITTIGALTAFFAATVGLVQNDIKRVIAYSTCSQLGYMFVAAGVGFYQAAMFHLFTHAAFKAMLFLGAGSVIHAMHHEQDMRNYGGLRKKIPMTFWGMMLGTLAITGVGIPFSYDLFGV

SEQ ID NO: 101173 - protein, 92 aa, Unknown
  Bacterial polypetide isolated from the Sargasso Sea
DVMIVAGTLTNKMAPALRKVYDQMPEPRYVISMGSCANGGGYYHYSYSVVRGCDKIVPVDIYVPGCPPSAEALLYGILQLQKKIRREGDINR

SEQ ID NO: 101174 - protein, 160 aa, Unknown
  Bacterial polypetide isolated from the Sargasso Sea
FKQLAEDFGKNGFITTSLDNLINWSRSGSLHWMTFGLACCAVEMMQTSMPRYDLERFGAAPRASPRQSDVMIVAGTLTNKMAPALRKVYDQMPEPRYVISMGSCANGGGYYHYSYSVVRGCDRIVPVDVYVPGCPPSAEALLYGILQLQKKIRDKGSFTR

SEQ ID NO: 101175 - protein, 110 aa, Unknown
  Bacterial polypetide isolated from the Sargasso Sea
RYDLERFGAAPRASPRQSDVMIVAGTLTNKMAPALRKVYDQMPEPRYVISMGSCANGGGYYHYSYSVVRGCDKIVPVDIYVPGCPPSAEALLYGILQLQKKIRREGNLQR

SEQ ID NO: 101176 - protein, 129 aa, Unknown
  Bacterial polypetide isolated from the Sargasso Sea
MSLIDREKQIPEEFKDLAKEFADKGFITTSMDNLINWARAGSLHWMTFGLACCAVEMMQTSMPRYDLERFGAAPRASPRQSDVMIVAGTLTNKMAPALRKVYDQMPEPRYVISMGSCANGGGYYHYSYS

SEQ ID NO: 101177 - protein, 315 aa, Unknown
  Bacterial polypetide isolated from the Sargasso Sea
MLKDQDRIFKNLYNDFGEDVISAQKRGDWSDTKTLCQKGREWIINEIKSSELRGRGGAGFPTGLKWSFAPKEIGTKPHYLVINADESEPGTCKDRDILRFEPHKLIEGCLLTAYAVNAHKCFIYIRGEYFKEGKKLQKAIDEAYEKNLIGKNASGTEWDFDISIHYGAGAYICGEETALLESLEGKKGQPRLKPPFPALIGLYGCPTIINNVETIAVVPTILRKGAKWFASIGKPKNTGTKIFCISGNVNKPCNVEEEMGISLKELIEVHAGGVIGGWENLQAVIPGGSSMPLLPKKTCETITMDFDSLIKEKSG

SEQ ID NO: 101178 - protein, 296 aa, Unknown
  Bacterial polypetide isolated from the Sargasso Sea
DKGREWIINEIKESQLRGRGGAGFPTGLKWSFAPKEVGSRPHYLVINADESEPGTCKDRDILRFEPHKLIEGCLIASYAVQAHVCYIYIRGEYFIDGQKLQAAIDEAYEKKLIGKNAAGTGWDLDIYIHYGAGAYICGEETALLESIEGKKGQPRLKPPFPALIGLYGCPTIINNVETIAVVPTILRRGGKWFASLGREKNTGTKIFCISGNVNSPCNVEEEMNIPLKELIEVHAGGVIGGWDNLQAVIPGGSSMPLIPKEKCETLTMDFDSLVAEKSGLGTAGVVVINKDQDIIK

SEQ ID NO: 101179 - protein, 289 aa, Unknown
  Bacterial polypetide isolated from the Sargasso Sea
GEYFNEGKKLQEAINEAYEKKLLGLNACESGWNFDIYIHYGAGAYICGEETALLESLEGKKGQPRLKPPFPALIGLYGCPTIINNVETIAVVPTILRRGAKWFSNIGNPRNTGTKIYCISGNVNNPCNVEEEMGISLKDLIEKHAGGVTGGWDNLKAVIPGGSSMPLLPKNICETIKMDFDSLAEQKSGLGTAGIVVINKDQDIIKCMARIARFYKHESCGQCTPCREGSGWMWRMLERMAKGEASRDEVDMLMDVTKQIEGHTICAFGEGSAWPVQGLLRHFKKEVAK

SEQ ID NO: 101180 - protein, 168 aa, Unknown
  Bacterial polypetide isolated from the Sargasso Sea
ENQKKIPENLNNSKRFADKGFITTSFDNLVNWARTGSLHWMTFGLACCAVEMMQTSMPRYDLERFGAAPRGSPRQSDVMIVAGTLTNKMAPALRKVYDQMPEPRYVISMGSCANGGGYYHYSYSVVRGCDRIVPVDIYVPGCPPSAEALLYGILQLQKKIRNSGSLQR

SEQ ID NO: 101181 - protein, 310 aa, Unknown
  Bacterial polypetide isolated from the Sargasso Sea
KPHYLVVNADESEPGTCKDREILRNDPHLLLEGCLIAGFAMQAHTCYIYIRGEYYNESSNLQKAIDEAYKSNLIGKNSCGTNWDFDIFLHRGAGAYICGEETALLESLEGKKGQPRLKPPFPAGAGLYGCPSTVTNVETIAVAPTILRRGANWFASLGNPKNTGTKIFSISGHVNKPCNVEEEMGIPLKELIETHAGGVIGGWDNLLAVIPGGASVPLIPKSICDKVKMDFDSLKEVQSGLGTAAVIVMNKSTDIVEAITRLSHFYKHESCGQCTPCREGTGWMYRIMSKMINGNIENDDIDKFIDVTKQ

SEQ ID NO: 101182 - protein, 263 aa, Unknown
  Bacterial polypetide isolated from the Sargasso Sea
TCYIYIRGEYYSESSNLQKAIDEAYANNLIGKNACGSGWDFDIYLHRGAGAYICGEETALLESLEGKKGQPRLKPPFPAGSGLYGCPTTVTNVETIAVSPTILRRGSKWFANLGSANNTGTKIFSISGHVNNPCNVEEEMGIPLKDLIENHAGGVIGGWENLLAVIPGGASVPLLPKSICDTVKMDFDSLKEVQSGLGTAAVIVMNKSTDIVEAIARLSHFYKHESCGQCTPCREGTGWMYRMMEKMIHGNVKHKDIDKILDV

SEQ ID NO: 101183 - protein, 160 aa, Unknown
  Bacterial polypetide isolated from the Sargasso Sea
FKKLAKDFSDKGFITTSSDNLINWARAGSLHWMTFGLACCAVEMMQTSMPRYDLERFGAAPRGSPRQSDVMIVAGTLTNKMAPALRKVYDQMPEPRYVISMGSCANGGGYYHYSYSVVRGCDRIVPVDIYVPGCPPSAEALLYGIMQLQKKIRNQGSLER

SEQ ID NO: 101184 - protein, 120 aa, Unknown
  Bacterial polypetide isolated from the Sargasso Sea
AVEMMHTSMPRYDLERFGAAPRASPRQSDVMIVAGTLTNKMAPALRKVYDQMPEPRYVISMGSCANGGGYYHYSYSVVRGCDRIVPVDIYVPGCPPSAEALLYGVLQLQKKIRNKGSLER

SEQ ID NO: 101185 - protein, 252 aa, Unknown
  Bacterial polypetide isolated from the Sargasso Sea
MLNAKDKVFQNLHGFQEPFIEGALQRGSWSNTKEILSKNQNDIIELVKSSQLRGRGGAGFSTGLKWSFMPKDTGKQHYLVVNADESEPGTCKDREIIRNDPHTLVEGCLIASYAIQASKCYIYIRGEYHYEYVQLEKAIEEAYNRGYIGKNACGSGFDFDLYVHRGAGAYICGEETALLESLEGKKGQPRLKPPFPAGVGLYGMPTTINNVESIAVVPTILRRGPDWFKSIGAENNTGTKIFCISGNVNKPA

SEQ ID NO: 101186 - protein, 252 aa, Unknown
  Bacterial polypetide isolated from the Sargasso Sea
LKPPFPALIGLYGCPTIINNVETIAVVPTILRKGGKWFASLGREKNTGTKIFCISGNVNTPCNVEEEMNISLKELIEVHAGGVIGGWDNLQAVIPGGSSMPLIPKEKCETLTMDFDSLVAEKSGLGTAGIVVINKDQDIIKCMARIARFYKHESCGQCTPCREGSGWMWRMLERMAKGDATKDEVDMLGDVTNQIAGHTICAFGEGSSWPVQGLLRHFKKEIEKRNNLDPIIQKKNSIPYLVDQHLLDKKNA

SEQ ID NO: 101187 - protein, 173 aa, Unknown
  Bacterial polypetide isolated from the Sargasso Sea
MNLEDRKNQIPEEFKKLAQDFSENGFITTSLDNLINWSRSGSLHWMTFGLACCAVEMMQTSMPRYDLERFGAAPRASPRQSDVMIVAGTLTNKMAPALRKVYDQMPEPRYVISMGSCANGGGYYHYSYSVVRGCDRIVPVDVYVPGCPPSAEALLYGIMQLQKKIRNKGSIDR

SEQ ID NO: 101188 - protein, 112 aa, Unknown
  Bacterial polypetide isolated from the Sargasso Sea
MPRYDLERFGAAPRGSPRQSDVMIVAGTLTNKMAPALRKVYDQMPEPRYVISMGSCANGGGYYHYSYSVVRGCDKIVPVDIYVPGCPPSAEALLYGIMQLQKKIRNNGSLER

SEQ ID NO: 101189 - protein, 170 aa, Unknown
  Bacterial polypetide isolated from the Sargasso Sea
MGIDQSKDFIDQALDNELSSKGFLVASYDKVLTWARTGSLWPMTFGLACCGVEMIHSYMARYDLDRYGVIPRGSPRQSDVMIVAGTLTNKMAPALRKVYDQMPEPRWVISMGSCANGGGYYHYSYSVVRGCDRIVPVDVYVPGCPPTAEALVYGILQLQKKIRRENKFKR

SEQ ID NO: 101190 - protein, 173 aa, Unknown
  Bacterial polypetide isolated from the Sargasso Sea
MNFAEKEKKIPEEFKDLAKDFGEKGFITTSFDNLINWARTGSLHWMTFGLACCAVEMMQTSMPRYDLERFGAAPRASPRQSDVMIVAGTLTNKMAPALRKVYDQMPEPRYVISMGSCANGGGYYHYSYSVVRGCDRVVPVDVYVPGCPPSAEALLYGILQLQKKIRNKGSIER

SEQ ID NO: 101191 - protein, 303 aa, Unknown
  Bacterial polypetide isolated from the Sargasso Sea
NSAQNRGDWNNVKEICDKGRDWIINEIKSSELRGRGGAGFPTGLKWSFCPKELGSRPHYLVINADESEPGTCKDRDILRFEPHKLLEGCLIASYAVNAHKCYIYIRGEYYNEGQKLQKAIDEAYEKNLIGKNASNIGWDLDIYIHYGAGAYICGEETALLESLEGKKGQPRLKPPFPALIGLYGCPTIINNVETIAVVPTILRRGAKWFSSLGRPKNTGTKIYCISGNVNNPCNVEEEMGIPLKELIEKHAGGVTGGWDNLKAVIPGGSSMPLLPKNICESIKMDFDACVENKTGLGTAGIVV

SEQ ID NO: 101192 - protein, 329 aa, Unknown
  Bacterial polypetide isolated from the Sargasso Sea
FRGNCRCFFLRQIVKSQAIYLTIALIFLSCFLSWIVFLSHGAHVEKITLFRWINSGDLSANWSIRLDRLTSIMLVVVTSVSALVHLYSVGYMAHDENWKEDEHYKARFFAYLSFFTFTMLMLVTSDNLIQMFFGWEGVGVASYLLIGFYYRKQSANAAAIKAFVVNRVGDFGFALGIFGLFMLTGSINFDDIFSAAPKLAETSLTFLWSDWNAANLIAFLLFVGAMGKSAQLFLHTWLPDAMEGPTPVSALIHAATMVTAGVFLVCRMSPLMEYAPTALSFITILGAFTAFIAATIGLVQNDIKRVIAYSTMSQLGYMFVAAGVGCLFG

SEQ ID NO: 101193 - protein, 293 aa, Unknown
  Bacterial polypetide isolated from the Sargasso Sea
SIFFLPLFGFLFCFLFGKYFNDKVYEITTTSLLFICAVFSWIIFFQYINNREIEIIFIINWITSGNFIVDWSIRLDTLTAVMFIVVTTVSVCVHLYSIGYMEEDPSKIRFMGYLSLFTFFMLVLVSSNNLLQMFFGWEGVGLASYLLIGFWHHKDSANKAAIKAFVVNRVGDFGYAIGIAGIFFVFGTINLDNIFDQVDQFSAHQIEFLSLSFPTLDFLCFLLFIGAMGKSAQLGLHTWLPDAMEGPTPVSALIHAATMVTAGIFLVARMSPLYEFANFTNVFITFIGAGYCN

SEQ ID NO: 101194 - protein, 171 aa, Unknown
  Bacterial polypetide isolated from the Sargasso Sea
MNNKLNQVPEEFKQLAKDFSENGFITTSLDNLINWSRSGSLHWMTFGLACCAVEMMQTAMPRYDVERFGAAPRGSPRQSDVMIVAGTLTNKMAPALRKVYDQMPEPRYVISMGSCANGGGYYHYSYSVVRGCDRIVPVDIYVPGCPPSAEALLYGILQLQKKIRKKGSLNR

SEQ ID NO: 101195 - protein, 284 aa, Unknown
  Bacterial polypetide isolated from the Sargasso Sea
SGIDWDFDIYIHYGAGAYICGEETALLESLEGKKGQPRLKPPFPALIGLYGCPTIINNVETISVVPTILRRGGKWFSSLGRAKNTGTKIYCISGNVNNPCNVEEEMGIPLKDLIEKHAGGVVGGWDNLKAVIPGGSSMPLLPKQICDTIKMDFDFCVENKTGLGTAGIVVINNDQDIIKCMARIARFYKHESCGQCTPCREGSGWMWRMLERMARGDATRDEVDMLLDVTKQIEGHTICAFGEGSAWPVQGLIRHFKDEIIERNKFDPIVKKKKNIPYLVDQHL

SEQ ID NO: 101196 - protein, 259 aa, Unknown
  Bacterial polypetide isolated from the Sargasso Sea
EVQEHIFCGEETALLESLEGKKGQPRLKPPFPANKGLYGSPTTVNNVETIAVVPTILRKGGDWFASFGRAKNTGTKVFCISGHVNKPCNIEEEMSIPLKELIEKHAGGVIGGWSNLKAIIPGGSSVPLIPKKICDTVLMDFDSLVEVKSGLGTAAVIVMDKTTDLVKAIANLSHFYKHESCGQCTPCREGAGWMWRMMLKISKGEASPSDIDKLLDVTKQIEGHTICALGDAAAWPIQGLFRHFRDEIEDQLIKKIRAA

SEQ ID NO: 101197 - protein, 173 aa, Unknown
  Bacterial polypetide isolated from the Sargasso Sea
MNLEDRKNNIPEEFKQLAQDFSDNGFITTSLDNLVNWARTGSLHWMTFGLACCAVEMMQTSMPRYDLERFGAAPRASPRQSDVMIVAGTLTNKMAPALRKVYDQMPEPRYVISMGSCANGGGYYHYSYSVVRGCDRVVPVDVYVPGCPPSAEALLYGILQLQKKIRNKGSLER

SEQ ID NO: 101198 - protein, 281 aa, Unknown
  Bacterial polypetide isolated from the Sargasso Sea
YIHYGAGAYICGEETALLESLEGNKGQPRLKPPFPALVGLYGCPTIVNNVETVAVVPTILRRGSKWFSSLGKPKNTGTKIFCISGNVNSPCNVEEEMGIPLKELIEKYAGGVIGGWENLQAVIPGGSSMPLLPKKICDSINMDFDSLIAAKSGLGTAGIIVINKDQNIIECMARIAKFYKHESCGQCTPCREGSGWMWRILERLAKGEATHSDIDLLSDVTKQIEGHTICAFGEGSAWPVQGLLRHFRKEIDKKCIGEPLIKKKRNIPYLVDQHLLEKDNA

SEQ ID NO: 101199 - protein, 154 aa, Unknown
  Bacterial polypetide isolated from the Sargasso Sea
MNNKIDQVPEEFKQLAEDFSKNGFITTSLDNLINWSRSGSLHWMTFGLACCAVEMMQTAMPRYDLERFGAAPRGSPRQSDVMIVAGTLTNKMAPALRKVYDQMPEPRYVISMGSCANGGGYYHYSYSVVRGCDRIVPVDVYVPGCPPSAEALLY

SEQ ID NO: 101200 - protein, 173 aa, Unknown
  Bacterial polypetide isolated from the Sargasso Sea
MNLPNREKQIPEEFKELAKEFADKGFITTSVDNLINWARSGSLHWMTFGLACCAVEMMQTSMPRYDLERFGAAPRASPRQSDVMIVAGTLTNKMAPALRKVYDQMPEPRYVISMGSCANGGGYYHYSYSVVRGCDRIVPVDVYVPGCPPSAEALMYGILQLQKKIRNRGSLQR

SEQ ID NO: 101201 - protein, 225 aa, Unknown
  Bacterial polypetide isolated from the Sargasso Sea
MLEDKDRIFQNLYNDGGPDINSALKRGDWKDTKEICEKGKEWIINEIKSSELRGRGGAGFPTGLKWSFAPKEVGSKPHYLVINADESEPGTCKDRDILRFEPHKLIEGCLIASYAVNAHKCYIYIRGEYFNEGINLQTAIDEAYEKNLIGKNSCGTGWDLDIYIHYGAGAYICGEETALLESLEGKKGQPRLKPPFPALIGLYGCPTIVNNVETVAVVPTILRRG

SEQ ID NO: 101202 - protein, 165 aa, Unknown
  Bacterial polypetide isolated from the Sargasso Sea
MGLETDNDLIDQQGPGFIITSVDKLVNWARTGSMWPVTFGLACCAIEMMHAGAARYDTDRFGVFFRPSPRQSDVMIVAGTLVNKMAPALRKVYDQMAEPKWVISMGSCANGGGYYHHSYSVVRGCDQIIPVDIYVPGCPPTSEALINGIIELQEKIKNEESIANG

SEQ ID NO: 101203 - protein, 277 aa, Unknown
  Bacterial polypetide isolated from the Sargasso Sea
YGAGAYICGEETALLVSIEGKKGQPRLKPPFPALIGLYGCPTIINNVETIAVVPTILRKSGKWFSSLGREKNTGTKIFCISGNVNNPCNVEEEMNIPLKELIEVHAGGVIGGWDNLQAVIPGGSSMPLIPKEKCETLTMDFDSLAAEKSGLGTAGVVVINRDQDIIKCMARIARFYKHESCGQCTPCREGTGWMWRMLERMSKGEATRDEVDMLSDVTNQIAGHTICAFGEGSSWPVQGLLRHFKKEIKERNKFDPIVKENKNIPYLVDQHLLDKNA

SEQ ID NO: 101204 - protein, 212 aa, Unknown
  Bacterial polypetide isolated from the Sargasso Sea
MLKDKDRIFQNLYNDLGADIDSSQKRGDWINTKEIIDKGRDWIIDEIKNSQLRGRGGAGFPTGLKWSFAPKEVGHRPHYLVINGDESEPGTCKDRDILRFEPHKLIEGCLIASYAVQAHVCYIYIRGEYFVDGQKLQAAIDEAYERKLIGKNAAGTGWDLDIYIHYGAGAYICGEETALLESIEGNKGQPRLKPPFPALIGLYGCPTIINNG

SEQ ID NO: 101205 - protein, 175 aa, Unknown
  Bacterial polypetide isolated from the Sargasso Sea
MKIDTIKEDNKIPEEFKQIAKDFSENGFVTTSMTNLVNWARTGSLHWMTFGLACCAVEMMQTSMPRYDLERFGAAPRASPRQSDVMIVAGTLTNKMAPALRKVYDQMPEPRYVISMGSCANGGGYYHYSYSVVRGCDRIVPVDIYVPGCPPSAEALLYGIMQLQKKIRNKGSLER

SEQ ID NO: 101206 - protein, 111 aa, Unknown
  Bacterial polypetide isolated from the Sargasso Sea
SRYDLDRFGLVFRPSPRQSDVMIVAGTLTNKMAPALRKVYDQMPEPRWVISMGSCANGGGYYHYSYSVVRGCDRIVPVDVYVPGCPPTAEALLYGIIQLQKKITRQNSLGV

SEQ ID NO: 101207 - protein, 101 aa, Unknown
  Bacterial polypetide isolated from the Sargasso Sea
FRPSPRQSDVMIVAGTLTNKMAPALRRVYDQMPEPRWVLSMGSCANGGGYYHYSYAVVRGCDRIVPVDVYVPGCPPTAEALIYGLLQLQKKIRRTATISRN

SEQ ID NO: 101208 - protein, 278 aa, Unknown
  Bacterial polypetide isolated from the Sargasso Sea
MLKDKDKIFKNLYGFDDWKLEGAKKRGVWVGTKDLIEMGSEKIIEEIKNSQLRGRGGAGFPAGLKWSFMPKNSGKDHYLVVNADESEPGTCKDREIMRNDPHLLLEGCLVASFAMNAHTCYIYIRGEYYSESSNLQKAIDEAYANNLIGKNACNTGWDFDIFLHRGAGAYICGEETALLESLEGKKGQPRLKPPFPAGAGLYGCPTTVTNVETVAVSPTILRRGSKWFADLGSPNNTGTKIFSISGHVNNPCNVEEEMGISLRELMKNTPVELLVDGI

SEQ ID NO: 101209 - protein, 103 aa, Unknown
  Bacterial polypetide isolated from the Sargasso Sea
GAAPRASPRQSDVMIVAGTLTNKMAPALRKVYDQMPEPRYVISMGSCANGGGYYHYSYSVVRGCDRIVPVDVYVPGCPPSAEALLYGIMQLQKKIRNKGSLER

SEQ ID NO: 101210 - protein, 291 aa, Unknown
  Bacterial polypetide isolated from the Sargasso Sea
MGFEAIESAFLIVAVPLLIFPAILIIGQMNKGEDWWKNQLKEGGIVALAGLMITLSLTVWLIVEFLVHHAEFGAQGTILDWIHFEVLSSNGDWVTSTLSFGLWIDSVSLTVLFVAAFLCFLICWFAIGYMTTDHQNEDRNHRFFAEFVLFSMGMFGMVLADSFLWLFIFWEIMGLCSYLLIGFYWEKPSAAAAAKKAFLTTRVGDVFLMVGLFMLYDLYHSLEFAVIFGDPTLGGTIQGSELQWPLIMMFIGCVGKSAQFPLHVWLPDAMEGPTPVSALIHAATMVNAGLY

SEQ ID NO: 101211 - protein, 298 aa, Unknown
  Bacterial polypetide isolated from the Sargasso Sea
KVFIGINASGTGWDLDIYIHYGAGAYICGEETALLESLEGKKGQPRLKPPFPALIGLYGCPTIINNVETISVVPTILRRGGKWFSSLGRAKNTGTKIYCISGNVNNPCNVEEEMGIPLKDLIEKHAGGVVGGWDNLKAVIPGGSSMPLLPKKVCDTIKMDFDACVENKTGLGTAGIVVINQDQDIIKCMARIARFYKHESCGQCTPCREGSGWMWRMLERMAKGEATRDEVDMLMDVTKQIEGHTICAFGEGSAWPVQGLIRNFKDEIIERNKFDPVVKQRKNVPYLVDQHLLEKENA

SEQ ID NO: 101212 - protein, 136 aa, Unknown
  Bacterial polypetide isolated from the Sargasso Sea
MNNKIDQVPEEFKQLADDFSKNGFITTSLDNLINWSRSGSLHWMTFGLACCAVEMMQTAMPRYDLERFGAAPRGSPRQSDVMIVAGTLTNKMAPALRKVYDQMPEPRYVISMGSCANGGGYYHYSYSVVRGCDRMS

SEQ ID NO: 101213 - protein, 242 aa, Unknown
  Bacterial polypetide isolated from the Sargasso Sea
MLKDEDRIFKNLYNDLGPDILSAQKRGDWQNTNEIIKKGKDWIINEIKSSELRGRGGAGFPTGLKWSFAPKEIGSRPHYLVINADESEPGTCKDRDILRFEPHKLIEGCLLTAYAVNANKCYIYIRGEYFNEGNKLQEAINEAYEKKLIGLNACGSGWDFDIYIHYGAGAYICGEETALLESLEGKKGQPRLKPPFPALIGLYGCPTIINNVETIAVVPTILRKGAKWFASLGRPKNTGTKI

SEQ ID NO: 101214 - protein, 123 aa, Unknown
  Bacterial polypetide isolated from the Sargasso Sea
YDLDRLGVIPRASPRQSDLMIVAGTLCNKMAPALRKVYDQMPEPRWVISMGSCANGGGYYHYSYSVVRGCDRIVPVDVYVPGCPPTAEALVYGIIQLQNKIKREKTIFRDDMFSLKKLIKRGK

SEQ ID NO: 101215 - protein, 302 aa, Unknown
  Bacterial polypetide isolated from the Sargasso Sea
SIGYMNEDQSKIRFMGYLSLFTFFMLVLVSSNNLLQMFFGWEGVGLASYLLIGFWNHKETANNAAIKAFIVNRVGDFGYALGIAGIFYVFGSISFENIFNQVDQYKDHKLEFLSLTFPTLDLLCFLLFIGAMGKSAQLGLHTWLPDAMEGPTPVSALIHAATMVTAGVFLVARMSPIYEFASFTNLFITFIGAATAIFAASIALTQNDIKRVIAYSTCSQLGYMFFAAGVGAYNASIFHLTTHAFFKALLFLSAGSVIHAMHHQQDMRNMGGLFKKIPFTGSMMWIGSLAIIGFPYFSGILF

SEQ ID NO: 101216 - protein, 281 aa, Unknown
  Bacterial polypetide isolated from the Sargasso Sea
MLKDQDRIFQNLYNDKGSDVSSSQERGDWVNTKEITDKGRDWIINEIKESQLRGRGGAGFPTGLKWSFAPKEVGSRPHYLVINGDESEPGTCKDRDILRFEPHKLIEGCLIASYAVQAHVCYIYIRGEYFVDGQKLQAAIDEAYEKKLLGKNAAGTGWDLDIYIHYGAGAYICGEETALLESIEGKKGQPRLKPPFPALIGLYGCPTIINNVETIAVVPTILRRGGKWFASLGREKNTGTKIFCISGNVNTPCNVEEEMNIPLKELIEVHAGGVIGGWENL

SEQ ID NO: 101217 - protein, 296 aa, Unknown
  Bacterial polypetide isolated from the Sargasso Sea
MLCEEVYWEGTKQIMSKDPDEIIESIKNSGLRGRGGAGFSTGLKWSFMPKVVKDRPHYLVVNADESEPGTCKDRDIIRNEPHKLLEGCLIAGYAMRAHKCYIYIRGEFFNEANILQSAITEAYSSKLLGKNAAKSGWDFDVYLHRGAGAYICGEETALLESLEGKKGQPRLKPPFPAGVGLYGCPTTVNNVESIAVVPTILKRGEVWFSSLGNDNNTGTKLFCISGHVNNPCNVEEEMGIPLKDLIEKHAGGVRGGWHNLLAVIPGGSSTPLLPKEVCDDIKMDFDSLKSVGSGLG

SEQ ID NO: 101218 - protein, 138 aa, Unknown
  Bacterial polypetide isolated from the Sargasso Sea
MIDIDKEKKIPSEFKQLAKDFSENGFITTSFDNLVNWARTGSLHWMTFGLACCAVEMMHTSMPRYDLERFGAAPRGSPRQSDVMIVAGTLTNKMAPALRKVYDQMPEPRYVISMGSCANGGGYYHYSYSVVRGCDRIV

SEQ ID NO: 101219 - protein, 291 aa, Unknown
  Bacterial polypetide isolated from the Sargasso Sea
RGRGGAGFPTGLKWSFAPKEVGSRPHYLVINGDESEPGTCKDRDILRFEPHKLIEGCLIASYAVQAHVCYIYIRGEYFIEGQKLQTAINEAYEKKLLGKNAAGTGWDLDIYIHYGAGAYICGEETALLESIEGKKGQPRLKPPFPALIGLYGCPTIINNVETIAVVPTILRKGGKWFASLGREKNTGTKIFCISGNVNTPCNVEEEMNIPLKELIEVHAGGVIGGWDNLQAVIPGGSSMPLIPKEKCETLTMDFDSLMAEKSGLGTAGIVVINKDQDIIKCMARIARFLNT

SEQ ID NO: 101220 - protein, 308 aa, Unknown
  Bacterial polypetide isolated from the Sargasso Sea
MLKGRDWIINEIKTSELRGRGGAGFPTGLKWSFAPKEVKSRPHYLIINADESEPGTCKDRDILRFEPHKLIEGCLIASYAVNAHVCYIYIRGEYFNEGEKLQKAIDEAYQKNLIGKNASDTGWDFDIYIHYGAGAYICGEETALLESLEGKKGQPRLKPPFPALIGLYGCPTIINNVETIAVVPTILRRGSKWFASLGKPKNTGTKIFCISGNVNNPCNVEEEMGIPLKKLIENHAGGVIGGWENLKAVIPGGSSMPLLPKKTCDTITMDFDSLVQEKSGLGTAGIVVINNDQDIIKCIARIARFYKH

SEQ ID NO: 101221 - protein, 234 aa, Unknown
  Bacterial polypetide isolated from the Sargasso Sea
MLKDEDRIFQNLYNDSGADIESAKLRNDWNGTKEILEKGREWIINEVKSSELRGRGGAGFPTGLKWSFAPKEVGSRPHYLVINADESEPGTCKDRDILRFEPHKLIEGCLIASYAVNAHKCYIYIRGEYFNEGQKLQTAIDEAYKNNLIGKNALNSGWDLDIYIHYGAGAYICGEETALLESLEGKKGQPRLKPPFPALIGLYGCPTIINNVETVAAVPTILRRGAKWFSSLGR

SEQ ID NO: 101222 - protein, 173 aa, Unknown
  Bacterial polypetide isolated from the Sargasso Sea
MNLEEKKKNIPEEFKQLAQDFSDNGFITTSLDNLVNWARTGSLHWMTFGLACCAVEMMQTSMPRYDLERFGAAPRASPRQSDVMIVAGTLTNKMAPALRKVYDQMPEPRYVISMGSCANGGGYYHYSYSVVRGCDRIIPVDVYVPGCPPSAEALLYGIMQLQKKIRNKGSLER

SEQ ID NO: 101223 - protein, 182 aa, Unknown
  Bacterial polypetide isolated from the Sargasso Sea
MEKGSARVELSLGSSGPKSLVKDTEFAKQMSDKGYLLTSAESVINWARTGSLHWMTFGLACCAVEMMHTSMPRYDLERFGTAPRASPRQSDLMIVAGTLTNKMAPALRKVYDQMPEPRYVISMGSCANGGGYYHYSYSVVRGCDKIVPVDIYVPGCPPTAEALLYGILQLQRKIRRTGTIIR

SEQ ID NO: 101224 - protein, 229 aa, Unknown
  Bacterial polypetide isolated from the Sargasso Sea
MLKDKDRIFQNLYNDLGSDITSSQKRGDWVNTKDIIDRGRDWIINEIKDSQLRGRGGAGFPTGLKWSFAPKEVGSRPHYLVINGDESEPGTCKDRDILRFEPHKLIEGCLIASYAVQAHVCYIYIRGEYFIEGQKLQVAINEAYEKNLIGKNAAGTGWDLDIYIHYGAGAYICGEETALLESIEGNKGQPRLKPPFPALIGLYGCPTIINNVETIAVVPTILRRGGKWF

SEQ ID NO: 101225 - protein, 166 aa, Unknown
  Bacterial polypetide isolated from the Sargasso Sea
MGVEINEDNFGDELNSKGFLVANFDKLLTWARTGSLWPMTFGLACCGVEMIHTYMARYDLDRYGVIPRGSPRQSDVMIVAGTLTNKMAPALRKVYDQMPEPRWVISMGSCANGGGYYHYSYSVVRGCDRIVPVDIYVPGCPPTAEALVYGILQLQKKIKRKNKFVR

SEQ ID NO: 101226 - protein, 157 aa, Unknown
  Bacterial polypetide isolated from the Sargasso Sea
MNTELSSKGFLVASYDKILTWARTGSLWPMTFGLACCGVEMIHSYMARYDLDRYGVIPRGSPRQSDVMIVAGTLTNKMAPALRKVYDQMPEPRWVISMGSCANGGGYYHYSYSVVRGCDRIVPVDVYVPGCPPTAEALVYGILQLQKKIRRENKFKR

SEQ ID NO: 101227 - protein, 87 aa, Unknown
  Bacterial polypetide isolated from the Sargasso Sea
RCWTLTNKMAPALRKVYDQMPEPRWVISMGSCANGGGYYHYSYSVVRGCDRIVPVDIYVPGCPPTAEALVYGIMQLQKKIKRKNKNN

SEQ ID NO: 101228 - protein, 257 aa, Unknown
  Bacterial polypetide isolated from the Sargasso Sea
MLQDKDRIFTNIYGWQEAGLSGAKKRGDWDNTKAILAVGHDEIVDRMKQSGLRGRGGAGFPTGVKWSFMPKEVTNRPHYLVVNADESEPGTCKDRDIIRHEPHKLIEGCLVAGFAMRSHVAYIYIRGEFVNEYKALQSAVDEAYEDGLLGGNAADSGWAFDVYVHRGAGAYICGEETALLESLEGKKGQPRLKPPFPAGVGLYGCPTTVNNVESIAVGPTILRRGADWFSSLGKENNTGTKLFCISGHVNAPCNVEE

SEQ ID NO: 101229 - protein, 161 aa, Unknown
  Bacterial polypetide isolated from the Sargasso Sea
MKIILGDQLNSKGFLVSNFDKLLTWARTGSLWPMTFGLACCGVEMIHTYMARYDLDRYGVIPRGSPRQSDVMIVAGTLTNKMAPALRKVYDQMPEPRWVISMGSCANGGGYYHYSYSVVRGCDRIVPVDIYVPGCPPTAEALVYGILQLQKKIKRKNKFVR

SEQ ID NO: 101230 - protein, 174 aa, Unknown
  Bacterial polypetide isolated from the Sargasso Sea
MKVFRKRKKRYLEEFKDLAKNFAEKGFITTSSENLINWARTGSLHWMTFGLACCAVEMMQTSMPRYDLERFGAAPRASPRQSDVMIVAGTLTNKMAPALRKVYDQMPEPRYVVSMGSCANGGGYYHYSYSVVRGCDKIVPVDIYIPGCPPSAEALLYGILQLQKKIRREGSIKR

SEQ ID NO: 101231 - protein, 236 aa, Unknown
  Bacterial polypetide isolated from the Sargasso Sea
MLEDKDRIFQNLYNDLGEDVDSSRKRGDWKDTKEIILKGRDWIINEIKSSELRGRGGAGFPTGLKWSFAPKEVGSRPHYLVINADESEPGTCKDRDILRFEPHKLIEGCLFAAYTVNAHVCYIYIRGEYYNEGQKLQKAIDEAYSQKLIGKNASNTGWDLDIYIHYGAGAYICGEETALLESLEGKKGQPRLKPPFPALIGLYGCPTIINNVETIAVVPTILKRGAKWFSSLSKPK

SEQ ID NO: 101232 - protein, 243 aa, Unknown
  Bacterial polypetide isolated from the Sargasso Sea
KPPFPALIGLYGCPTIINNVETVAAVPTILRRGAKWFSSLGRPKNTGTKIYCISGNVNNPCNVEEEMGIPLKELIETHAGGVVGGWDNLKAVIPGGSSMPMLPKEICDNMKMDFDACVENKTGLGTAGIVVINNDQDIIKCMARIARFYKHESCGQCTPCREGSGWMWRMLERMAVGEATPDEVDMLFDVTKQIEGHTICAFGEGSSWPVQGLIRHFKDEILERNKFDPVVKKNKNIPYLVDQ

SEQ ID NO: 101233 - protein, 247 aa, Unknown
  Bacterial polypetide isolated from the Sargasso Sea
MLKEEDKIFKNLYGFEDWSLTGAKQRGIWSNTKEIIEKGSDFIVEEIKSSQLRGRGGAGFPAGLKWSFMPKNSGKPHYLVVNADESEPGTCKDREIMRNDPHLLLEGCLVAGFAMHANACYIYIRGEYYDEASNLQKAIDEAYANNLIGKNASGTNWHYDIYLHRGAGAYICGEETALLESLEGKKGQPRLKPPFPAGAGLYGCPTTVTNVETIAVAPTIIRRGASWFNALGRENTQVQKFLVFQGM

SEQ ID NO: 101234 - protein, 134 aa, Unknown
  Bacterial polypetide isolated from the Sargasso Sea
TGSLWPMTFGLACCGVEMMHAYMSRYDLDRYGVIPRGSPRQSDVMIVAGTLTNKMAPALRKVYDQMPEPRWVISMGSCANGGGYYHYSYSVVRGCDRIVPVDIYVPGCPPTAEALVYGIMQLQKKIKKKNKDNR

SEQ ID NO: 101235 - protein, 217 aa, Unknown
  Bacterial polypetide isolated from the Sargasso Sea
MATSIIFLPLLGFLFCFLIGKQFNYRVYQISTTSILFLCTLFSWIIFIQFINNKETEIIFILNWISSGNFIVDWSIRLDTLTAVMFIVVTTVSACVHLYSIGYMEDDPSKIRFMGYLSLFTFFMLVLVSSNNLLQMFFGWEGVGLASYLLIGFWHHKDSANKAAIKAFVVNRIGDFGYAIGIAGIFYIFGTVSFDSIFLQVDQFSDHQIEFLSFSFP

SEQ ID NO: 101236 - protein, 262 aa, Unknown
  Bacterial polypetide isolated from the Sargasso Sea
MLKDQDRIFQNLYNDKGSDVAASQLRGDWVNTKEITEKGRDWIINEIKESQLRGRGGAGFPTGLKWSFAPKEVGSRPHYLVINGDESEPGTCKDRDILRFEPHKLIEGCLIASYAVQAHVCYIYIRGEYFVDGQKLQAAIDEAYEKKLLGKNAAGTGWDLDIYIHYGAGAYICGEETALLESLEGKKGQPRLKPPFPALIGLYGCPTIINNVETIAVVPTILRRGAKWFASLGREKNTGTKIFCISGNVNNPCNVEEEMSIL

SEQ ID NO: 101237 - protein, 253 aa, Unknown
  Bacterial polypetide isolated from the Sargasso Sea
MLKPEDRIFKNLYNELGWEIDNAIKRNDWKDTKDIISKGREWIINEVKTSELRGRGGAGFSTGLKWSFAPKEVGSRPHYLVINADESEPGTCKDRDILRFEPQKLIEGCLIAGYAVNAHVCYIYIRGEYVNEGRRLQNAINQAYQKNFLGKNACGSGWDFDIHVHYGAGAYICGEETALLESMEGNKGQPRLKPPFPALVGLYGCPTIVNNVETIAVVPTILRRGGKWFASIGKPKNTGTKIFCISGKCKFTM

SEQ ID NO: 101238 - protein, 295 aa, Unknown
  Bacterial polypetide isolated from the Sargasso Sea
CLIAGYAVNAHICYIYIRGEYFNEGKRLQEAIDQAYEKKYLGKNACGSGWDFNIHIHYGAGAYICGEETALLESIEGNKGQPRLKPPFPALVGLYGCPTIVNNVETVAVVPTILRRGGKWFSSIGKPKNTGTKIFCISGNVNSPCNVEEEMGIPLKDLIEKHAGGVVGGWENLQAVIPGGSSMPLLPKKICDTITMDFDSLIENKSGLGTAGIVVINNDQDIVKCMARIARFYKHESCGQCTPCREGSGWMWRILDRVVKRKATYNDVELLADVTKQIEGHTICAFGEGSAWPVQ

SEQ ID NO: 101239 - protein, 290 aa, Unknown
  Bacterial polypetide isolated from the Sargasso Sea
MSRELLYLLIPLSCLAAALVAGFLGPRIGRVNAHRSAIGGVGFAFVLSCVVAWDVFAGNHFNGPVYTWAISGGTHFEIGFLIDPLSAVMMVIVTFVSLMVHIYTIGYMAEDPGYTRFFSYIALFTFAMLMLVMSNNFLQLFFGWEGVGLVSYLLIGFWYERDSAIRANMKAFLVNRVGDFGFILGIGAVLALFGSLDYQSVFDAAPTFADHTTQGPFGSEWHWLTLICLLLFVGAMGKSAQVPLHVWLPDSMEGPTPISALIHAATMVTAGIFLVAPDVPRYLNCPQPLY

SEQ ID NO: 101240 - protein, 141 aa, Unknown
  Bacterial polypetide isolated from the Sargasso Sea
MGINFLGSKNKDSEIPQEFKKIAKDFSEKGFITTSSDNLINWARTGSLHWMTFGLACCAVEMMQTSMPRYDLERFGAAPRASPRQSDVMIVAGTLTNKMAAPLRKVYDQMPEPRYVISMGSCANGGGYYHYSYSVVRGCDK

SEQ ID NO: 101241 - protein, 159 aa, Unknown
  Bacterial polypetide isolated from the Sargasso Sea
MEKGSSGMGVMDPSLAKPIPPGSDQDAILNAVGEEITNRGFVIAKADKLFNWARSGSLWPMTFGLACCAVEMMHSAASRYDMDRYGMLFRPSPRQSDVMIVAGTLTNKMAPALRRVYDQMPEPRWVLSMGSCANGGGYYHYSYAVVRGCDRIVPVDVYV

SEQ ID NO: 101242 - protein, 149 aa, Unknown
  Bacterial polypetide isolated from the Sargasso Sea
MDLEKEKQIPEEFKKLAKDFSEKGFITTSMDNLINWSRSGSLHWMTFGLACCAVEMMQTSMPRYDLERFGAAPRASPRQSDVMIVAGTLTNKMAPALRKVYDQMPEPRYVISMGSCANGGGYYHYSYSVVRGCDRIVPVDVYVPGCPPS

SEQ ID NO: 101243 - protein, 173 aa, Unknown
  Bacterial polypetide isolated from the Sargasso Sea
MNLQDKKKDIPEEFKQLAQDFSDNGFITTSLDNLVNWARTGSLHWMTFGLACCAVEMMQTSMPRYDLERFGAAPRASPRQSDVMIVAGTLTNKMAPALRKVYDQMPEPRYVISMGSCANGGGYYHYSYSVVRGCDRVVPVDVYVPGCPPSAEALLYGILQLQKKIRNKGSLER

SEQ ID NO: 101244 - protein, 261 aa, Unknown
  Bacterial polypetide isolated from the Sargasso Sea
RKYFEGKKGQPRLKPPFPALIGLYGCPTIINNVETISVIPTILRRGGKWFSSLGRPKNTGSKIYCISGNVNNPCNVEEEMGIPLKVLIDKHAGGVVGGWDNLKAVIPGGSSMPLIPKDICETIKMDFDTLVENKSGLGTAGIVVINKDQDIIKCMARIARFYKHESCGQCTPCREGSGWMWRILERMAKGECSKDEVDMLLDVTKQIEGHTICAFGEGSSWPVQGLIRHFKKDILSRNNFNPLVKKDKNVPYLIDQHLLEK

SEQ ID NO: 101245 - protein, 221 aa, Unknown
  Bacterial polypetide isolated from the Sargasso Sea
MLSDKNRIFTNLYGFKGNDLKAAIRLGDWSNTKSILSKGKEWILEEVKKSGLRGRGGAGFPSGLKWSFMKKKPNIPNYLVINADESEPGTCKDREILRNEPYKLLEGILYASLAMEANNCYIYIRGEFYNEYKKLQKAVDECYEAALLGKNILKSGWDLQVHIHRGAGAYICGEESALIESLEGKKGQPRLKPPFPANVGLYGCPTTVTNVETVAVVPEIL

SEQ ID NO: 101246 - protein, 153 aa, Unknown
  Bacterial polypetide isolated from the Sargasso Sea
MQNKIDQVPEEFKQLADDFSKNGFITTSLNNLINWSRAGSLHWMTFGLACCAVEMMQTSMPRYDLERFGAAPRASPRQSDVMIVAGTLTNKMAPALRKVYDQMPEPRYVISMGSCANGGGYYHYSYSVVRGCDRIVPVDIYVPGCPPSAEALL

SEQ ID NO: 101247 - protein, 304 aa, Unknown
  Bacterial polypetide isolated from the Sargasso Sea
EWIINEIKDSQLRGRGGAGFPTGLKWSFAPKELGSKPHYLVINGDESEPGTCKDRDILRFEPHKLIEGCLIASYAVQAHVCYIYIRGEYFIDGQKLQAAINEAYEKKLIGKNAAGTGWDLDIYIHYGAGAYICGEETALLESIEGKKGQPRLKPPFPALIGLYGCPTIVNNVETIAVVPTILRRGGKWFASLGREKNTGTKIFCISGNVNTPCNVEEEMNIPLKELIEVHAGGVVGGWDNLQAVIPGGSSMPLIPKDKCETLTMDFDSLVAEKSGLGTAGIVVINKDQDIIRCMARIARFYKHE

SEQ ID NO: 101248 - protein, 173 aa, Unknown
  Bacterial polypetide isolated from the Sargasso Sea
MNFAEKQKQIPEEFKELAKDFSDKGFITTSFDNLINWARTGSLHWMTFGLACCAVEMMHTSMPRYDLERFGAAPRASPRQSDVMIVAGTLTNKMAPALRKVYDQMPEPRYVISMGSCANGGGYYHYSYSVVRGCDRIVPVDVYVPGCPPSAEALLYGIMQLQKKIRNKGSIER

SEQ ID NO: 101249 - protein, 128 aa, Unknown
  Bacterial polypetide isolated from the Sargasso Sea
MNLEDRKKNIPEEFKQLAQDFSDNGFITTSLDNLVNWARTGSLHWMTFGLACCAVEMMQTSMPRYDLERFGAAPRASPRQSDVMIVAGTLTNKMAPALRKVYDQMPEPRYVISMGSCANGGGYYHYSY

SEQ ID NO: 101250 - protein, 138 aa, Unknown
  Bacterial polypetide isolated from the Sargasso Sea
MGIKDFQNIEEVQKDVKQKGFLLAKYQDLLTWARTGSLWPMTFGLACCGVEMMHTYMSRYDLDRFGVIPRGSPRQSDVMIVAGTLTNKMAPALRKVYDQMPEPRWVISMGSCANGGGYYHYSYSVVRGCDRIVPVDIY

SEQ ID NO: 101251 - protein, 174 aa, Unknown
  Bacterial polypetide isolated from the Sargasso Sea
MTGSNTAGRDFEVETTALSGQLQDKGYLLTSTEDVINWARTGSLHWMTFGLACCAVEMMHTSMPRYDLERFGTAPRASPRQSDLMIVAGTLTNKMAPALRKVYDQMPEPRYVISMGSCANGGGYYHYSYSVVRGCDRIVPVDVYVPGCPPTAEALLYGIMALQRKIRRTGTIVR

SEQ ID NO: 101252 - protein, 224 aa, Unknown
  Bacterial polypetide isolated from the Sargasso Sea
MLKDQDRIFKNLYNDMDADVAAAQTRGDWVNTSDLTSKGRDWIINEIKDSQLRGRGGAGFPTGLKWSFAPKEVGSRPHYLVINADESEPGTCKDRDILRFEPHKLIEGCLIASYAVQAHVCYIYIRGEYFIEGQKLQTAIDEAYEKKLLGKDAAGTGWDLDIYIHYGAGAYICGEETALLESIEGKKGQPRLKPPFPALIGLYGCPTIINNVETIAVVPTILRR

SEQ ID NO: 101253 - protein, 171 aa, Unknown
  Bacterial polypetide isolated from the Sargasso Sea
MNNKIDKVPEEFKQLAEDFSKNGFITTSLDNLINWSRSGSLHWMTFGLACCAVEMMQTSMPRYDLERFGAAPRASPRQSDVMIVAGTLTNKMAPALRKVYDQMPEPRYVISMGSCANGGGYYHYSYSVVRGCDRIVPVDVYVPGCPPSAEALLYGILQLQKKIRDKGSFIR

SEQ ID NO: 101254 - protein, 263 aa, Unknown
  Bacterial polypetide isolated from the Sargasso Sea
MLKDEDRIFQNLYNDSGADIESAKLRDDWNGTKEILEKGREWIINEVKSSELRGRGGAGFPTGLKWSFAPKEVGSRPHYLVINADESEPGTCKDRDILRFEPHKLIEGCLIASYAVNAHKCYIYIRGEYFNEGQKLQTAIDEAYKNNLIGKNALNLGWDLDIYIHYGAGAYICGEETALLESLEGKKGQPRLKPPFPALIGLYGCPTIINNVETVAAVPTILRRGAKWFSSLGRPKNTGTKIYCISGNVNNPCNVEEEMGIPL

SEQ ID NO: 101255 - protein, 172 aa, Unknown
  Bacterial polypetide isolated from the Sargasso Sea
MNLDEKRKIPEEFKQLSEDFSKNGFITTSLDNLINWSRTGSLHWMTFGLACCAVEMMHTSMPRYDLERFGAAPRASPRQSDVMIVAGTLTNKMAPALRKVYDQMPEPRYVISMGSCANGGGYYHYSYSVVRGCDRIVPVDIYVPGCPPSAEALLYGIMQLQKKIRNKGSLER

SEQ ID NO: 101256 - protein, 173 aa, Unknown
  Bacterial polypetide isolated from the Sargasso Sea
MNVTEREKQIPDEFKELAKDFSEKGFITTSFDNLVNWARTGSLHWMTFGLACCAVEMMQTSMPRYDLERFGAAPRASPRQSDVMIVAGTLTNKMAPALRKVYDQMPEPRYVISMGSCANGGGYYHYSYSVVRGCDRIVPVDIYVPGCPPSAEALLYGIMQLQKKIRNKGSIER

SEQ ID NO: 101257 - protein, 256 aa, Unknown
  Bacterial polypetide isolated from the Sargasso Sea
FRCLLHRGAGAYICGEETAMLESLEGKKGQPRLKPPFPAGAGLYGCPTTVNNVESIAVVPTILRRGSEWFSSFGRENNKGTKLFQISGHVERPCVVEETMGITFRELIETHCGGIKGGWDNLLAVIPGGSSVPLVPAAEIMDAPMDFDGLKDLKSGLGTAAVIVMDKSTDVVQAISRISYFYKHESCGQCTPCREGTGWMWRVMERLRTGDADIAEIDTLWEVTKQVEGHTICALGDAAAWPIQGLIRHFRPELER

SEQ ID NO: 101258 - protein, 247 aa, Unknown
  Bacterial polypetide isolated from the Sargasso Sea
MAQLIVFLPLLGFLFCFFLGKIFGFKASQIVTTSFLFISAILSWFLFFSYLGEREMEVIYIFNWFTSGNFIVDWSIRLDSLTTTMFIVVCSVSACVHLYSIGYMSDDPSKERFMGYLSLFTFFMLMLVSSNNLIQMFFGWEGVGLASYLLIGFWYHKPSANNAAIKAFIVNRIGDFGYALGIAGVFYIFGSVEFSVIFDNSESFKDHSIQFIGVSFNTIDLLCFLLFIGAMGKSAQLGLHTWLPDAM

SEQ ID NO: 101259 - protein, 162 aa, Unknown
  Bacterial polypetide isolated from the Sargasso Sea
EEFKDLAKNFAEKGFITTSSENLINWARTGSLHWMTFGLACCAVEMMHTSMPRYDLERFGAAPRASPRQSDVMIVAGTLTNKMAPALRKVYDQMPEPRYVVSMGSCANGGGYYHYSYSVVRGCDKIVPVDIYIPGCPPSAEALLYGILQLQKKIRREGNINR

SEQ ID NO: 101260 - protein, 222 aa, Unknown
  Bacterial polypetide isolated from the Sargasso Sea
MLKDKDRIFQNLYNDLGSDVASSQKRGDWTKTKELISKGRDWIINEIKDSQLRGRGGAGFPTGLKWSFAPKEVGSRPHYLVINGDESEPGTCKDRDILRFEPHKLIEGCLIASYAIQAHVCYIYIRGEYFVDGQKLQAAIDEAYEKNLIGKNAAGSGWDLDIYIHYGAGAYICGEETALLESIEGKKGQPRLKPPFPALIGLYGCPTIINNVETIAVVPTIS

SEQ ID NO: 101261 - protein, 143 aa, Unknown
  Bacterial polypetide isolated from the Sargasso Sea
FRYLVNGQRTGSLHWMTFGLACCAVEMMQTSMPRYDLERFGAAPRASPRQSDVMIVAGTLTNKMAPALRKVYDQMPEPRYVISMGSCANGGGYYHYSYSVVRGCDRVVPVDVYVPGCPPSAEALLYGIMQLQKKIRDQGSISR

SEQ ID NO: 101262 - protein, 296 aa, Unknown
  Bacterial polypetide isolated from the Sargasso Sea
SEASNLQKAIDEAYQNNLIGKNACGTNWNYDIYLHRGAGAYICGEETALLESLEGKKGQPRLKPPFPAGAGLYGCPTTVTNVETIAVAPTIIRRGASWFSGLGRENNTGSKIFSISGHVNNPCNVEEEMGIGLKELIENHAGGVIGGWDNLLAVIPGGASVPLLPKSICDTVKMDFDSLKEVQSGLGTAAVIVMNKSTDIVDAICRLSHFYKHESCGQCTPCREGTGWMFRMMEKMVKGSAQVDDIDKLLDVTKQIEGHTICALGDAAAWPIQGLIRHFRPEVEKRIKEYQLREVA

SEQ ID NO: 101263 - protein, 173 aa, Unknown
  Bacterial polypetide isolated from the Sargasso Sea
MAQLIVFLPLIGFLFCFFFGKKLNFKVSQILTTSLLFLSAILSWILFFSYIGERETQIIHIFNWFTSGNFIVDWSIRLDSLTTTMFVVVCSVSACVHLYSIGYMSDDPSKERFMGYLSLFTFFMLMLVSSNNLLQMFFGWEGVGLASYLLIGFWYHKPSANNAAIKAFLVNRV

SEQ ID NO: 101264 - protein, 172 aa, Unknown
  Bacterial polypetide isolated from the Sargasso Sea
MGIKFGVNQDRQKKIPEEFKDLAKDFAEKGFITTSSENLVNWARTGSLHWMTFGLACCAVEMMQTSMPRYDLERFGAAPRASPRQSDVMIVAGTLTNKMAPALRKVYDQMPEPRYVVSMGSCANGGGYYHYSYSVVRGCDKIVPVDIYIPGCPPSAEALLYGILQLQKKIRR

SEQ ID NO: 101265 - protein, 117 aa, Unknown
  Bacterial polypetide isolated from the Sargasso Sea
MMHSYMSRYDLDRLGVIPRGSPRQSDVMIVAGTLTNKMAPALRKVYDQMPEPRWVISMGSCANGGGYYHYSYSVVRGCDRIVPVDIYVPGCPPTAEALLYAIMQLQDKIKKKKKIYR

SEQ ID NO: 101266 - protein, 305 aa, Unknown
  Bacterial polypetide isolated from the Sargasso Sea
MLKEEDKIFKNLYNDFGWTLEDSLKRNDWSNTKDIISKGREWIINEIKTSELRGRGGAGFPTGVKWSFAPKKVGSRPHYLVINADESEPGTCKDRDIMRFEPQKLIEGCLITSFAVNAHICYIYIRGEYFNEGKRLQEAIDEAYKNNFIGKNACNSGWDLDIYIHFGAGAYICGEETALLESLEGNKGQPRLKPPFPALVGLYGCPTIVNNVETIAVVPTILRKSGKWFASIGRPKNTGTKIFCISGNVNKPCNVEEEMGIPLKELIEKHAGGVIGGLENLQAVIPGGSSMPLIPKDTCDTIKMG

SEQ ID NO: 101267 - protein, 257 aa, Unknown
  Bacterial polypetide isolated from the Sargasso Sea
KGQPRLKPPFPALIGLYGCPTIINNVETVAAVPTILRRGAKWFSSLGRPKNTGTKIYCISGNVNNPCNVEEEMGIPLKELIETHAGGVIGGWDNLKAVIPGGSSMPMLPKEICDNMKMDFDACVENKTGLGTAGIVVINNDQDIIKCMARIARFYKHESCGQCTPCREGSGWMWRMLERMAAGEATPDEVDMLFDVTKQIEGHTICAFGEGSSWPVQGLIRHFKDEILERNKFDPVVKKQKNIPYLVDQHLLEKENA

SEQ ID NO: 101268 - protein, 301 aa, Unknown
  Bacterial polypetide isolated from the Sargasso Sea
PTGLKWSFAPKEVGSRPHYLVINGDESEPGTCKDRDILRFEPHKLIEGCLIASYAVQAHVCYIYIRGEYFVDGQKLQAAIDEAYEKKLLGKNAAGTGWDLDIYIHYGAGAYICGEETALLESLEGKKGQPRLKPPFPALIGLYGCPTIINNVETIAVVPTILRRGAKWFASLGREKNTGTKIFCISGNVNNPCNVEEEMSIPLKELIEIHAGGVIGGWDNLQAVIPGGSSMPLIPKDRCETLKMDFDACVEEKSGLGTAGIVVINKDQDIIKCMARIARFYKHESCGQCTPCREGSGWMWR

SEQ ID NO: 101269 - protein, 299 aa, Unknown
  Bacterial polypetide isolated from the Sargasso Sea
DKGSDVSSSQERGDWVNTKEITDKGRDWIINEIKESQLRGRGGAGFPTGLKWSFAPKEVGSRPHYLVINGDESEPGTCKDRDILRFEPHKLIEGCLIASYAVQAHVCYIYIRGEYFVDGQKLQAAIDEAYDKKLLGKNAAGTGWDLDIYIHYGAGAYICGEETALLESIEGKKGQPRLKPPFPALIGLYGCPTIINNVETIAVVPTILRRGGKWFASLGREKNTGTKIFCISGNVNTPCNVEEEMNIPLKELIEIHAGGVIGGWDNLQAVIPGGSSMPLIPKEKCETLTMDFDSLMAEK

SEQ ID NO: 101270 - protein, 159 aa, Unknown
  Bacterial polypetide isolated from the Sargasso Sea
IQLADDFSKNGFITTSLDNLINWSRTGSLHWMTFGLACCAVEMMQTSMPRYDLERFGAAPRASPRQSDVMIVAGTLTNKMAPALRKVYDQMPEPRYVISMGSCANGGGYYHYSYSVVRGCDRIVPVDVYVPGCPPSAEALLYGILQLQKKIRDKGSFLR

SEQ ID NO: 101271 - protein, 246 aa, Unknown
  Bacterial polypetide isolated from the Sargasso Sea
GCAGVGVLDSQHGLKWSFMPKEVKERPHYLVINADESEPGTCKDRDIIRHEPHKLLEGCVVAGFSMRAHAAYIYIRGEFVNEARQLQTAIDEAYDAGLLGKNAAKSGWDFDIYLHRGAGAYICGEETALLESLEGKKGQPRLKPPFPAGVGLYGCPTTVNNVESIAVTPTILRRGPGWFAGLGKENNTGTKLFCISGHVNKPCNVEEEMGIPLRELLEKHAGGVRGGWDNLLAVIPGGSSTPLMPI

SEQ ID NO: 101272 - protein, 264 aa, Unknown
  Bacterial polypetide isolated from the Sargasso Sea
EGNKGQPRLKPPFPALVGLYGCPTIINNVETIAVVPTILRKGSKWFASLGKPKNTGTKIFCISGNVNSPCNVEEEMGIKLRDLIEKHAGGVVGGWDNLQAVIPGGSSMPMLSKEISENITMDFDSLVENKSGLGTAGIVVINKDQDIIKCMARIARFYKHESCGQCTPCREGSGWMWRILERMAKGEASKDEVNMLSDVTKQIEGHTICAFGEGSAWPVQGLLRHFKKEIIERNNFDPLVKNNKNIPYLIDQHTLEEDIKNVKS

SEQ ID NO: 101273 - protein, 169 aa, Unknown
  Bacterial polypetide isolated from the Sargasso Sea
MYENKIPDEFKKIAKDFSDNGFVTTSFENLVNWARSGSLHWMTFGLACCAVEMMQTSMPRYDLERFGAAPRGSPRQSDVMIVAGTLTNKMAPALRKVYDQMPEPRYVISMGSCANGGGYYHYSYSVVRGCDRIVPVDIYVPGCPPSAEALLYGILQLQKKIRNKGSLER

SEQ ID NO: 101274 - protein, 188 aa, Unknown
  Bacterial polypetide isolated from the Sargasso Sea
MYLIAIFSPLLGSLLAGSLSLLIPRVSETKRALFDRAAQVVTITGMLIASLAGTYSFIDVVVLDNPNYTPLFTWVNSGDLSFEWALRGDTLSVLMVLMVTWISTMIHIYSVGYMSHDKSIPRFMSYLSLFTFFMLMLVTSNNLIQLFFGWEGVGLASYLLIGFWYEKPSACAAAIKAFVVNRVGDFGF

SEQ ID NO: 101275 - protein, 110 aa, Unknown
  Bacterial polypetide isolated from the Sargasso Sea
RYDLERFGAAPRGSPRQSDVMIVAGTLTNKMAPALRKVYDQMPEPRYVISMGSCANGGGYYHYSYSVVRGCDRIVPVDIYVPGCPPSAEALLYGILQLQKKIRNNGSLER

SEQ ID NO: 101276 - protein, 97 aa, Unknown
  Bacterial polypetide isolated from the Sargasso Sea
SPRQSDVMIVAGTLTNKMAPALRKVYDQMPEPRYVISMGSCANGGGYYHYSYSVVRGCDRIVPVDIYVPGCPPSAEALLYGVLQLQKKIRNKGSLER

SEQ ID NO: 101277 - protein, 159 aa, Unknown
  Bacterial polypetide isolated from the Sargasso Sea
KKLAKDFSENGFITTSFDNLVNWARTGSLHWMTFGLACCAVEMMHTSMPRYDLERFGAAPRGSPRQSDVMIVAGTLTNKMAPALRKVYDQMPEPRYVISMGSCANGGGYYHYSYSVVRGCDRIVPVDIYVPGCPPSAEALLYGVLQLQKKIRNKGSLER

SEQ ID NO: 101278 - protein, 169 aa, Unknown
  Bacterial polypetide isolated from the Sargasso Sea
MGVNIEHNNSLNIDEVFEKKGFVTASFENLINWARSGSLWPMTFGLACCGVEMMHSYMSRYDLDRLGVIPRGSPRQSDVMIVAGTLTNKMAPALRKVYDQMPEPRWVISMGSCANGGGYYHYSYSVVRGCDRIVPVDIYVPGCPPTAEALLYAIMQLQDKIKKKKKIYR

SEQ ID NO: 101279 - protein, 241 aa, Unknown
  Bacterial polypetide isolated from the Sargasso Sea
MATIHVDGKEYEVDGADNLLQACLSLGLDVPYFCWHPALGSVGACRQCAVKQYQNADDKRGRLVMSCMTPSTDGTYISIEDEEAKEFRKTVVEWQMTNHPHDCPVCEEGGSCHLQDMTVMTGHNSRRYRFTKRTHQNQDLGPFINHEMNRCIACYRCVRYYKDYAGGEDLGVYGAHDNVYFGRVEDGTLESEFSGNLVEVCPTGVFTDKTHSERYNRKWDMQFAPSICQGCSVGCNISPGE

SEQ ID NO: 101280 - protein, 111 aa, Unknown
  Bacterial polypetide isolated from the Sargasso Sea
PRYDLERFGAAPRGSPRQSDVMIVAGTLTNKMAPALRKVYDQMPEPRYVISMGSCANGGGYYHYSYSVVRGCDRIVPVDIYVPGCPPSAEALLYGILQLQKKIRNKGSLER

SEQ ID NO: 101281 - protein, 115 aa, Unknown
  Bacterial polypetide isolated from the Sargasso Sea
MGIDFFRSKSREKEIPAEFKQIAKDFSEKGFITTSSDNLINWARTGSLHWMTFGLACCAVEMMQTSMPRYDLERFGAAPRASPRQSDVMIVAGTLTNKMAAPLRKVYDQMPEPRY

SEQ ID NO: 101282 - protein, 113 aa, Unknown
  Bacterial polypetide isolated from the Sargasso Sea
MAKDFAEKGFITTSSENLINWARTGSLHWMTFGLACCAVEMMQTSMPRYDLERFGAAPRASPRQSDVMIVAGTLTNKMAPALRKVYDQMPEPRYVVSMGSCANGGGYYHYSYS

SEQ ID NO: 101283 - protein, 218 aa, Unknown
  Bacterial polypetide isolated from the Sargasso Sea
MAQLIVFLPLIGFLFCFFLGKKFNFKVSQILTTSLLFLSAILSWILFFSYIGEKETQIIYIFNWFTSGNFIVDWSIRLDSLTTTMFVVVCTVSACVHLYSIGYMSDDPSKERFMGYLSLFTFFMLMLVSSNNLLQMFFGWEGVGLASYLLIGFWYHKPSANNAAIKAFLVNRVGDFGYALGIAGVFYIFGSIEFNVIFDNAENFKDHTIHFIGLNFST

SEQ ID NO: 101284 - protein, 214 aa, Unknown
  Bacterial polypetide isolated from the Sargasso Sea
RLKPPFPALIGLYGCPTIINNVETIAVVPTILRKGSKWFSSLGREKNTGTKIFCISGNVNNPCNVEEEMNIPLKELIEIHAGGVIGGWDNLQAVIPGGSSMPLIPKDKCETLTMDFDSLMTEKSGLGTAGVVVINKDQDIIKCMARIARFYKHESCGQCTPCREGTGWMWRMLERMSKGEATRDEVDMLSDVTNQIAGHTICAFGEGSSWPVSG

SEQ ID NO: 101285 - protein, 130 aa, Unknown
  Bacterial polypetide isolated from the Sargasso Sea
MILEDKKKEIPEEFKQLAQDFSDNGFITTSLDNLVNWARTGSLHWMTFGLACCAVEMMQTSMPRYDLERFGAAPRASPRQSDVMIVAGTLTNKMAPALRKVYDQMPEPRYVISMGSCANGGGYYHYSYSV

SEQ ID NO: 101286 - protein, 281 aa, Unknown
  Bacterial polypetide isolated from the Sargasso Sea
HKLIEGCLIASYAVQAHVCYIYIRGEYFVDGQKLQAAIDEAYEKKLLGKNAAGTGWDLDIYVHYGAGAYICGEETALLESIEGKKGQPRLKPPFPALIGLYGCPTIINNVETIAVVPTILRKGGKWFASLGREKNTGTKIFCISGNVNTPCNVEEEMNIPLKELIEVHAGGVIGGWDNLQAVIPGGSSMPLIPKEKCETLTMDFDSLMAEKSGLGTAGIVVINKDQDIIKCMARIARFYKHESCGQCTPCREGSGWMWRMLERMAKGDATKDEVDMLGDVT

SEQ ID NO: 101287 - protein, 336 aa, Unknown
  Bacterial polypetide isolated from the Sargasso Sea
EIDALTSTMLIVVTSVSFCVHLYSIGYMQADKSISRFMAYLSLFTFFMLMLVTSDNLVQMFFGWEGVGLTSYLLIGFWSHKESANKAAIKAFVVNRVGDFAFALGIAGIFFVFNSIQFSTIFDNASFFADHKIYFVGFEISTINFLCFLLFLGAMGKSAQLGLHTWLPDAMEGPTPVSALIHAATMVTAGVFMVARLSPLFEHADFTNLFITFVGATTAVFAATIALTQNDIKRVIAYSTCSQLGYMFFAAGLGAYNASIFHLTTHGFFKALLFLSAGSVIHAMHHEQDMRKMGGLFTKIPFTALMMWIGSLAIIGFPYFSGYYSKESILENAYFH

SEQ ID NO: 101288 - protein, 268 aa, Unknown
  Bacterial polypetide isolated from the Sargasso Sea
ILRFEPHKLIEGCLIASYAVNAHICYIYIRGEYFNEGQKLQQAIDEAYKEGLLGINASDTGWDLDIYIHYGAGAYICGEETALLESLEGKKGQPRLKPPFPALIGLYGCPTIVNNVETIAVVPTILRRGGKWFSSLGRAKNTGTKIYCISGNVNNPCNVEEEMGVPLKDLIEKHAGGVVGGWDNLKAVIPGGSSMPLLPKKICDTIKMDFDACVENKTGLGTAGIVVINKDQDIIKCMARIARFYKHESCGQCTPCREGSGWMWRMLE

SEQ ID NO: 101289 - protein, 171 aa, Unknown
  Bacterial polypetide isolated from the Sargasso Sea
MNNKIDQVPKEFKQLADDFSKNGFITTSLDNLINWSRSGSLHWMTFGLACCAVEMMQTSMPRYDLERFGAAPRASPRQSDVMIVAGTLTNKMAPALRKVYDQMPEPRYVISMGSCANGGGYYHYSYSVVRGCDRIVPVDVYVPGCPPSAEALLYGILQLQKKIRDKGSFLR

SEQ ID NO: 101290 - protein, 214 aa, Unknown
  Bacterial polypetide isolated from the Sargasso Sea
MLKPEDKIFKNLYNELGWEIDNAIKRNDWKDTKDIISKGREWIINEVKTSELRGRGGAGFSTGLKWSFAPKEVGSRPHYLVINADESEPGTCKDRDILRFEPQKLIEGCLIAGYAVNAHVCYIYIRGEYFNEGRRLQDAINQAYQKNFLGKNACGSGWDFDIHIHYGAGAYICGEETALLESMEGNKGQPRLKPPFPALVGLYGCPTIVNNVET

SEQ ID NO: 101291 - protein, 138 aa, Unknown
  Bacterial polypetide isolated from the Sargasso Sea
MNNLDKSKTIPEEFKDIAKDFSDNGFITTSMDNLVNWARTGSLHWMTFGLACCAVEMMQTSMPRYDLERFGAAPRASPRQSDVMIVAGTLTNKMAPALRKVYDQMPEPRYVISMGSCANGGGYYHYSYSVVRGCDRIV

SEQ ID NO: 101292 - protein, 302 aa, Unknown
  Bacterial polypetide isolated from the Sargasso Sea
MDLAIIFSPLIGSILSILLGNRLGYRYSQLITCLFILISAIFSTFIFYEVNFNNTFYNNDIFIWVTSGQFEASWSVHIDTLTSVMLIVVTYVSLLVHVYSIGYMDHDPHKPRFMSYLSLFTFAMLVLVTSNNFLQLFFGWEAVGLCSYLLIGFWYKKKSANNAAIKAFIVNRVGDFGLIIGIFLIFLYFDTIYYSDVFSNAANFKDTTIFFLGFEFNLITLICVALFIGCMGKSAQIFLHTWLPDAMEGPTPVSALIHAATMVTAGVFLVARCSPIFEYSQVALNFVAVIGMITAFFAASVA

SEQ ID NO: 101293 - protein, 139 aa, Unknown
  Bacterial polypetide isolated from the Sargasso Sea
INWSRSGSLHWMTFGLACCAVEMMQTSMPRYDLERFGAAPRASPRQSDVMIVAGTLTNKMAPALRKVYDQMPEPRYVISMGSCANGGGYYHYSYSVVRGCDRIVPVDVYVPGCPPSAEALLYGIMQLQKKIRNKGSIDR

SEQ ID NO: 101294 - protein, 173 aa, Unknown
  Bacterial polypetide isolated from the Sargasso Sea
MNLKEKENQIPKEFKQLAKDFADKGFITTSLDNLVNWARTGSLHWMTFGLACCAVEMMQTSMPRYDLERFGAAPRASPRQSDVMIVAGTLTNKMAPALRKVYDQMPEPRYVISMGSCANGGGYYHYSYSVVRGCDRVVPVDVYVPGCPPSAEALLYGIMQLQKKIRDQGSISR

SEQ ID NO: 101295 - protein, 150 aa, Unknown
  Bacterial polypetide isolated from the Sargasso Sea
MGVEINEDNFGNELNSKGFLVSNFDNLLTWARTGSLWPMTFGLACCGVEMIHTYMARYDLDRYGVIPRGSPRQSDVMIVAGTLTNKMAPALRKVYDQMPEPRWVISMGSCANGGGYYHYSYSVVRGCDRIVPVDIYVPGCPPTAEALVYG

SEQ ID NO: 101296 - protein, 144 aa, Unknown
  Bacterial polypetide isolated from the Sargasso Sea
MNNKIDQVPEEFKQLADDFSKNGFITTSLDNLINWSRSGSLHWMTFGLACCAVEMMQTAMPRYDLERFGAAPRGSPRQSDVMIVAGTLTNKMAPALRKVYDQMPEPRYVISMGSCANGGGYYHYSYSVVRGCDRIVPVDIYVPG

SEQ ID NO: 101297 - protein, 94 aa, Unknown
  Bacterial polypetide isolated from the Sargasso Sea
QSDVMIVAGTLTNKMAPALRKVYDQMPEPRYVISMGSCANGGGYYHYSYSVVRGCDRVVPVDVYVPGCPPSAEALLYGILQLQKKIRNKGSLER

SEQ ID NO: 101298 - protein, 276 aa, Unknown
  Bacterial polypetide isolated from the Sargasso Sea
GLGLDIHIHFGAGAYICGEETALLESLEGNKGQPRLKPPFPALVGLYGCPTIVNNVETIAVVPTILRRGGKWFASIGRPKNTGTKIFCISGNVNTPCNVEEEMGIPLKELVEKHGGGVIGGWKNLQAVIPGGSSMPLIPKETCETIKMDFDSLVAEKSGLGTAAVIVINKDQDIIKCMARIAKFYKHESCGQCTPCREGSGWMWRILERAAKGEATFKDIELLSDVTKQIEGHTICAFGEGSAWPVQGLLRHFRKEIDKRCFSEPLIKKRKKIPYL

SEQ ID NO: 101299 - protein, 135 aa, Unknown
  Bacterial polypetide isolated from the Sargasso Sea
MGVKINQLDNRQKEIPEEFKKLAKDFSEKGFITTSSENLINWARTGSLHWMTFGLACCAVEMMQTSMPRYDLERFGAAPRASPRQSDVMIVAGTLTNKMAPALRKVYDQMPEPRYVVSMGSCANGGGYYHYSYSV

SEQ ID NO: 101300 - protein, 250 aa, Unknown
  Bacterial polypetide isolated from the Sargasso Sea
MTTSILFICTIFSWIIFFQYLENKETEIIFILNWISSGNLVVDWSIRLDALTSVMFMVVTTVSGCVHLYSIGYMNEDPSKVRFMGYLSLFTFFMLVLVSSNNLLQMFFGWEGVGLASYLLIGFWHHKETANKAAIKAFIVNRVGDFGYAIGIAGIFYIFGSVNLDNIFSQVDQYKDHQIEFISLTFPTLDFLCFLLFIGAMGKSAQLGLHTWLPDAMEGPTPVSALIHAATMVTAGVFLVSRMSPLYEFA

SEQ ID NO: 101301 - protein, 229 aa, Unknown
  Bacterial polypetide isolated from the Sargasso Sea
MLKDKDRIFKNLYNDMGSDIVSSQKRGDWVNTKEIIDKGRDWIINEIKDSQLRGRGGAGFPTGLKWSFAPKELGSRPHYLVINGDESEPGTCKDRDILRFEPHKLIEGCLIASYAVQAHVCYIYIRGEYFVEGEKLQAAIDEAYEKKLLGKNAAGTGWDLDVYIHYGAGAYICGEETALLESIEGKKGQPRLKPPFPALIGLYGCPTIINNVETIAVVPTILRKGGKWF

SEQ ID NO: 101302 - protein, 175 aa, Unknown
  Bacterial polypetide isolated from the Sargasso Sea
MEKRGLGMGIDDFQSIEEVQKDVKQKGFLLAKYNDLLTWARTGSLWPMTFGLACCGVEMMHAYMSRYDLDRYGVIPRGSPRQSDVMIVAGTLTNKMAPALRKVYDQMPEPRWVISMGSCANGGGYYHYSYSVVRGCDRIVPVDIYVPGCPPTAEALVYGIMQLQKKIKKKNKDNR

SEQ ID NO: 101303 - protein, 94 aa, Unknown
  Bacterial polypetide isolated from the Sargasso Sea
QSDVMIVAGTLTNKMAPALRKVYDQMPEPRYVISMGSCANGGGYYHYSYSVVRGCDRIVPVDIYVPGCPPSAEALLYGVLQLQKKIRREGSIQR

SEQ ID NO: 101304 - protein, 173 aa, Unknown
  Bacterial polypetide isolated from the Sargasso Sea
MNLKEKEDQIPKEFKQLAKDFADKGFITTSFDNLVNWARTGSLHWMTFGLACCAVEMMQTSMPRYDLERFGAAPRASPRQSDVMIVAGTLTNKMAPALRKVYDQMPEPRYVISMGSCANGGGYYHYSYSVVRGCDRVVPVDVYVPGCPPSAEALLYGIMQLQKKIRDQGSISR

SEQ ID NO: 101305 - protein, 262 aa, Unknown
  Bacterial polypetide isolated from the Sargasso Sea
QKLIEGCLITAYAVNAHKCYIYIRGEYTKEGEYLQKAIDEAYEKNLIGKNACNSGWDLDIYIHYGAGAYICGEETALLESLEGNKGQPRLKPPFPALVGLYGCPTIVNNVETIAVVPTILRRGAKWFASLGRPKNTGTKIFCISGNVNKPCNVEEEMGISLKDLIEKHAGGVIGGWENLQAVIPGGSSMPLIPKASCDTLKMDFDSLVAEKSGLGTAGVIVINKDQDILKCMARIARFYKHKSCGQCTPCREGSGWMWRILE

SEQ ID NO: 101306 - protein, 178 aa, Unknown
  Bacterial polypetide isolated from the Sargasso Sea
MGIINDTSFNKQKEIPEEFKDLAKDFAEKGFITTSSDNLINWARTGSLHWMTFGLACCAVEMMQTSMPRYDLERFGAAPRASPRQSDVMIVAGTLTNKMAPALRKVYDQMPEPRYVVSMGSCANGGGYYHYSYSVVRGCDKIVPVDIYIPGCPPSAEALLYGILQLQKKIRREGSLER

SEQ ID NO: 101307 - protein, 309 aa, Unknown
  Bacterial polypetide isolated from the Sargasso Sea
FAPKEVGSRPHYLVINADESDLGTVKDRDLLRFDPHKLIEGCLIASFAVQAHVCYIYIRGEYFTEGQKLQAAIDEAYNKNLLGKNAAGTGWDLDIYIHYGAGAYICGEETALLESIEGKKGQPRLKPPFPALIGLYGCPTIINNVETIAVVPTILRKGSKWFSSLGREKNTGTKIFCISGNVNNPCNVEEEMNIPLKELIEIHAGGVIGGWDNLQAVIPGGSSMPLIPKEKCETLTMDFDSLMAEKSGLGTAGVVVINKDQDIIKCMARIARFYKHESCGQCTPCREGTGWMWRMLERMSKGEATRDEV

SEQ ID NO: 101308 - protein, 128 aa, Unknown
  Bacterial polypetide isolated from the Sargasso Sea
MGIKLGSFSNKQKEIPEEFKDLAKDFAEKGFITTSSENLINWARTGSLHWMTFGLACCAVEMMQTSMPRYDLERFGAAPRASPRRSDVMIVAGTLTNKMAPALRKVYDQMPEPRYVVSMGSCANGGGY

SEQ ID NO: 101309 - protein, 273 aa, Unknown
  Bacterial polypetide isolated from the Sargasso Sea
FTFAMLMLVTSDNLLQLFFGWEGVGLASYLLIGFWYEKPSANAAAMKAFVVNRVGDFGFLLGIAVIYIATGSISFDVIFQKINNVNQFTINIACLLLFMGAMGKSAQLFLHTWLPDAMEGPTPVSALIHAATMVTAGIFLVARCSPIFENSDLALSFIIIIGASTAFFAATVGLVQNDIKRIIAYSTCSQLGYMFVALGVGAYQVAIFHLFTHAFFKALLFLGSGSVIHAMSDEQDIQKMGGLYKIIPFTWIMMLKGTLALTGAPLLSGYYSK

SEQ ID NO: 101310 - protein, 269 aa, Unknown
  Bacterial polypetide isolated from the Sargasso Sea
KDRDILRFEPHKLIEGCMLSSFAVNAHVCYIYIRGEYYNEGRKLQEAIDEAYEKGLIGINASGTGWDLDIYIHYGAGAYICGEETALLESLEGKKGQPRLKPPFPALIGLYGCPTIINNVETIAVVPTILRRGGKWFSSLGRAKNTGTKIYCISGNVNNPCNVEEEMGIPLKDLIEKHAGGVVGGWDNLKAVIPGGSSMPLLPKKICDTIKMDFDACVENKTGLGTAGIVVINQDQDIIKCMARIARFYKHESCGQCTPCREGSGWMWR

SEQ ID NO: 101311 - protein, 279 aa, Unknown
  Bacterial polypetide isolated from the Sargasso Sea
HYGAGAYICGEETALLESLEGNKGQPRLKPPFPALVGLYGCPTIVNNVETIAVVPTILRKGGKWFASIGRPKNTGTKIFCISGNVNNPCNVEEEMGVPLKFLIEKYAGGVIGGWKNLKAVIPGGSSMPLIPKDVCETIKMDFDSLVAAKSGLGTAGIVVINNDQDILKCMARIAKFYKHESCGQCTPCREGSGWMWRILERAAKGDATKEDINLLSEVTKQIEGHTICAFGEGSAWPVQGLLRHFRKEIDKRCFSEPVIKKKRKIPYLVDQHLLESKDA

SEQ ID NO: 101312 - protein, 157 aa, Unknown
  Bacterial polypetide isolated from the Sargasso Sea
LAKDFSDNGFITTSFDNLVNWARAGSLHWMTFGLACCAVEMMHTSMPRYDLERFGAAPRGSPRQSDVMIVAGTLTNKMAPALRKVYDQMPEPRYVISMGSCANGGGYYHYSYSVVRGCDRIVPVDIYVPGCPPSAEALLYGILQLQKKIRNKGSLER

SEQ ID NO: 101313 - protein, 131 aa, Unknown
  Bacterial polypetide isolated from the Sargasso Sea
MKKFQDKEKQIPEEFKELAKNFAEKGFITTSTDNLINWARTGSLHWMTFGLACCAVEMMHTSMPRYDLERFGAAPRGSPRQSDVMIVAGTLTNKMAPALRKVYDQMPEPRYVISIGKLCPTVEGIITILTP

SEQ ID NO: 101314 - protein, 236 aa, Unknown
  Bacterial polypetide isolated from the Sargasso Sea
MLKDQDRIFQNLYNDLGSDVSSSQKRGDWVNTKEITDKGRDWIINEIKESQLRGRGGAGFPTGLKWSFAPKEVGSRPHYLVINGDESEPGTCKDRDILRFEPHKLIEGCLIASYAVQAHVCYIYIRGEYFVDGQKLQAAIDEAYEKKLIGKNAAGTGWDLDIYIHYGAGAYICGEETALLESLEGKKGQPRLKPPFPALIGLYGCPTIINNVETIAVVPTILRRGAKWFASLGREK

SEQ ID NO: 101315 - protein, 236 aa, Unknown
  Bacterial polypetide isolated from the Sargasso Sea
PRLKPPFPAGAGLYGCPTTVTNVETIAVSPTILRRGSKWFAGLGSLNNTGTKIFSISGHVNNPCNVEEEMGISLKELINNNAGGVIGGWDNLLAVIPGGASVPLIPKSICDTVKMDFDSLKEVQSGLGTAAVIVMNKSTDIVEAIARLSHFYKHESCGQCTPCREGTGWMYRMMEKMTHGNAQNQDIDKLLDVTKQIEGHTICALGDAAAWPIQGLFRHFRPEIEKRIEERNRRVA

SEQ ID NO: 101316 - protein, 309 aa, Unknown
  Bacterial polypetide isolated from the Sargasso Sea
MLKDQDRIFRNLYNDMGSDVVSSQKRGDWVNTKEITDKGRDWIINEIKDSQLRGRGGAGFPTGLKWSFAPKEVGSRPHYLVINGDESEPGTCKDRDILRFEPHKLIEGCLIASYAVQAHVCYIYIRGEYFVDGQKLQAAIDEAYEKKLLGKNAAGTGWDLDIYIHYGAGAYICGEETALLESIEGKKGQPRLKPPFPALIGLYGCPTIINNVETIAVVPTILRRGGKWFASLGREKNTGTKIFCISGNVNTPCNVEEEMNIPLKELIEVHAGGVIGGWDNLQAVIPGGSSMPLIPKEKCETLTMDFDSL

SEQ ID NO: 101317 - protein, 241 aa, Unknown
  Bacterial polypetide isolated from the Sargasso Sea
MLKDQDRIFQNLYNDLGPDLISSQKRGDWVNTKEITGKGRDWIINEIKDSQLRGRGGAGFPTGLKWSFAPKEVGSRPHYLVINGDESEPGTCKDRDILRFEPHKLIEGCLISSYVIQAHVCYIYIRGEYFVEGQKLQAAIDEAYEKKLLGKNAAGTGWDLDVYIHYGAGAYICGEETALLESIEGKKGQPRLKPPFPALIGLYGCPTIINNVETIAVVPTILRRGGKWFSSLGREKNTGTK

SEQ ID NO: 101318 - protein, 198 aa, Unknown
  Bacterial polypetide isolated from the Sargasso Sea
MIFFVVFLPLIGFLFCAFFGKKFNDIYSQVITTFLLFVSSIFSWIIFFKYLKKIETEQIYLLNWLTSGNFSVDWAFRIDSLTSTMLIVVTTVSACVHLYSVGYMKEDKSINRFMGYLSLFTFFMLVLVTSNNLLQMFFGWEGVGLASYLLIGFWFKKNTANLAAIKAFIVNRIGDFGFALGIVGIYFYFWINRFSSNF

SEQ ID NO: 101319 - protein, 276 aa, Unknown
  Bacterial polypetide isolated from the Sargasso Sea
LRGRGGAGFPTGLKWSFAPKEVGSRPHYLVINADESEPGTCKDRDILRFEPHKLIEGCLLAAYAVNANKCYIYIRGEYFNEGNKLQEAINEAYEKKLIGKNACDSGWDFDLYLHYGAGAYICGEETALLESLEGKKGQPRLKPPFPALIGLYGCPTIINNVETIAVVPTILRRGAKWFSSIGKPKNTGTKIYCISGNVNNPCNVEEEMGISLKDLIDTHAGGVIGGWDNLKAVIPGGSSMPLLPKNICETIKMDFDSLVEQKSGLGTAGIVVINKD

SEQ ID NO: 101320 - protein, 283 aa, Unknown
  Bacterial polypetide isolated from the Sargasso Sea
DIYIHYGAGAYICGEETALLESIEGKKGQPRLKPPFPALIGLYGCPTIINNVETISVVPTILRKGGKWFSSLGRPKNTGSKIYCISGNVNNPCNVEEEMGIPLKELIEKHAGGVIGGWENLKAVIPGGSSMPLLPKETCETIKMDFDACVENKTGLGTAGIVVINKDQDIIKCMARIARFYKHESCGQCTPCREGSGWMWRMLERMAKGEATRDEVDMLLDVTKQIEGHTICAFGEGSSWPVQGLIRNFKDEIIERNKFDPIVKKKKDIPYLIDQHLLEKENA

SEQ ID NO: 101321 - protein, 160 aa, Unknown
  Bacterial polypetide isolated from the Sargasso Sea
FKQLAEDFSKNGFITTSLDNLINWSRSGSLHWMTFGLACCAVEMMQTAMPRYDLERFGAAPRGSPRQSDVMIVAGTLTNKMAPALRKVYDQMPEPRYVISMGSCANGGGYYHYSYSVVRGCDRIVPVDVYVPGCPPSAESLLYGIMQLQKKIRNKGSLTR

SEQ ID NO: 101322 - protein, 281 aa, Unknown
  Bacterial polypetide isolated from the Sargasso Sea
MLQDKDRIFQNLYNDMGSDVISSQKRGDWVNTKDLIDKGREWIINEVKTSELRGRGGAGFPTGLKWSFAPKEIGSRPHYLVINADESEPGTCKDRDILRFEPHKLIEGCLITSYAVQAHVCYIYIRGEYYIEGQKLQSAIDEAYEKKLIGKNASGTGWDLDIFIHYGAGAYICGEETALLESIEGKKGQPRLKPPFPALIGLYGCPTIINNVETIAVVPTILRRGGKWFSSLGRAKNTGTKIFCISGNVNNPCNVEEEMNIPLKELIEVHAGGVIGGWDNL

SEQ ID NO: 101323 - protein, 250 aa, Unknown
  Bacterial polypetide isolated from the Sargasso Sea
MLKDQDRIFQNLYNDLGCDVISSQKRGDWVDTKELTNKGRDWIINEIKESQLRGRGGAGFPTGLKWSFAPKEVGSRPHYLVINADESEPGTCKDRDILRFEPHKLIEGCLIASYAVQAHVCYIYIRGEYFIDGQKLQAAIDEAYEKKLIGKNAAGTGWDLDIYIHYGAGAYICGEETALLESIEGNKGQPRLKPPFPALIGLYGCPTIINNVETIAVVPTILRRGGKWFSSLGREKNTGTKIFCISGNGK

SEQ ID NO: 101324 - protein, 137 aa, Unknown
  Bacterial polypetide isolated from the Sargasso Sea
MNNKIEQVPDEFKKLADDFSKNGFITTSFDNLVNWSRSGSLHWMTFGLACCAVEMMQTSMPRYDLERFGAAPRASPRQSDVMIVAGTLTNKMAPALRKVYDQMPEPRYVISMGSCANGGGYYHYSYSVVRGCDRIVP

SEQ ID NO: 101325 - protein, 296 aa, Unknown
  Bacterial polypetide isolated from the Sargasso Sea
LSIVLAPLLGSLVAGLFGNSIGRAGAHWVTIIGVAISSLLSMIVYKHHVINSAPDYNEAVYTWLTSGGIDFQIGFLIDPLSATMMVVVSFVSWMIHIYTIGYMHDDPGYQRFFSYISLFTFAMLMLVMANNFLQLFFGWEAVGLVSYLLIGFWYKKESAIFANLKAFIVNRVGDFGFLLGIAAILMYFNTLDYIDVFNNLEQHKDTTITIINGESWSVMTVICLSLFIGAMGKSAQVPLHVWLPDSMEGPTPISALIHAATMVTAGIFMVSRMSPLFELSVTTLNFILVIGSITAL

SEQ ID NO: 101326 - protein, 250 aa, Unknown
  Bacterial polypetide isolated from the Sargasso Sea
MEGKRECLGMKPPFPAGAGLYGCPTTVNNVESIAVVPTILRRGADWFSKFGRENNAGTKLFAISGHVNHPCVVEEEMSIPFEELIERHCGGIRGGWKNLKAVIPGGASVPCVRGGEMREALMDFDYLRGELGSGLGTAAVIVMDQNTDVIKAIWRLSKFYKHESCGQCTPCREGTGWMMRVMERLVNGDADPSEIDMLLDVTKQVEGHTICALGDAAAWPIQGLIKNFRDEIEDRLKNQSSMQNSLVAAQ

SEQ ID NO: 101327 - protein, 117 aa, Unknown
  Bacterial polypetide isolated from the Sargasso Sea
MGLDQGSSDFIEGKAAFEAAASDVRNKGFVVARIDKLFTWARTGSLWPMSFGLACCAVEMMHAGASRYDLDRFGLVFRPSPRQSDVMIVAGTLTNKMAPALRKVYDQMPEPRWVISM

SEQ ID NO: 101328 - protein, 282 aa, Unknown
  Bacterial polypetide isolated from the Sargasso Sea
KIFKNLYGEDDWSLTGALKRGIWDNTKDLISMGSDNIIDEIKKSDLRGRGGAGFPAGLKWSFMPKDSGKPHYLIVNADESEPGTCKDREILRNDPHLLLEGCLIAGFAMHAHTCYIYIRGEYYNESSNLQKAIDEAYKSNLIGKNACGTNWDFDIFLHRGAGAYICGEETALLESLEGKKGQPRLKPPFPAGSGLYGCPSTVTNVETIAVAPTILRRGANWFSSLGNPKNTGTKIFSISGHVNNPCNVEEEMGIPLKKLIETHAGGVIGGWDNLLAVIPGGA

SEQ ID NO: 101329 - protein, 274 aa, Unknown
  Bacterial polypetide isolated from the Sargasso Sea
RIFQNLYNDSGADIESAKLRNDWNGTKEILEKGREWIINEVKSSELRGRGGAGFPTGLKWSFAPKEVGSRPHYLVINADESEPGTCKDRDILRFEPHKLIEGCLIASYAVNAHKCYIYIRGEYFNEGQKLQTAIDEAYKNNLIGKNALNSGWDLDIYIHYGAGAYICGEETALLESLEGKKGQPRLKPPFPALIGLYGCPTIINNVETVAAVPTILRRGAKWFSSLGRPKNTGTKIYCISGNVNNPCNVEEEMGVPLKELIENHAGGVVGGWDN

SEQ ID NO: 101330 - protein, 173 aa, Unknown
  Bacterial polypetide isolated from the Sargasso Sea
MNQIDRQTKIPDEFKELAKDFSEKGFITTSFDNLINWARTGSLHWMTFGLACCAVEMMQTSMPRYDLERFGAAPRASPRQSDVMIVAGTLTNKMAPALRKVYDQMPEPRYVISMGSCANGGGYYHYSYSVVRGCDRVVPVDVYVPGCPPSAEALLYGIMQLQKKIRNKGSIER

SEQ ID NO: 101331 - protein, 149 aa, Unknown
  Bacterial polypetide isolated from the Sargasso Sea
MNDKIEQVPEEFKQLAKDFSKNGFITTSLDNLINWSRSGSLHWMTFGLACCAVEMMQTAMPRYDLERFGAAPRGSPRQSDVMIVAGTLTNKMAPALRKVYDQMPEPRYVISMGSCANGGGYYHYSYSVVRGCDRIVPVDVYVPGCPPSA

SEQ ID NO: 101332 - protein, 112 aa, Unknown
  Bacterial polypetide isolated from the Sargasso Sea
MPRYDLERFGAAPRASPRQSDVMIVAGTLTNKMAPALRKVYDQMPEPRYVVSMGSCANGGGYYHYSYSVVRGCDKIVPVDIYIPGCPPSAEALLYGILQLQKKIRREGNLQR

SEQ ID NO: 101333 - protein, 117 aa, Unknown
  Bacterial polypetide isolated from the Sargasso Sea
MMHTSMPRYDLERFGTAPRASPRQSDLMIVAGTLTNKMAPALRKVYDQMPEPRYVISMGSCANGGGYYHYSYSVVRGCDRIVPVDVYVPGCPPTAEALLYGILALQKKIRRTGTIKR

SEQ ID NO: 101334 - protein, 320 aa, Unknown
  Bacterial polypetide isolated from the Sargasso Sea
IASYAVNAHKCFIYIRGEYFNEGQKLQMAIDEAYKDGLLGKNSAGTDWELDIYIHYGAGAYICGEETALLESIEGKKGQPRLKPPFPALIGLYGCPTIINNVETISVVPTILRRGGKWFSSLGRPKNTGSKIYCISGNVNNPCNVEEEMGIPLKELIEKHAGGVIGGWDNLKAVIPGGSSMPLLPKETCETIKMDFDACVENKTGLGTAGIVVINKDQDIIKCMARIARFYKHESCGQCTPCREGSGWMWRMLERMAKGEATRDEVDMLLDVTKQIEGHTICAFGEGSSWPVPGLIRNFKDEIIERNKFDPIVKKQKIYR

SEQ ID NO: 101335 - protein, 123 aa, Unknown
  Bacterial polypetide isolated from the Sargasso Sea
ACCAVEMMHTSMPRYDLERFGAAPRASPRQSDVMIVAGTLTNKMAPALRKVYDQMPEPRYVISMGSCANGGGYYHYSYSVVRGCDRIVPVDVYVPGCPPSAEALLYGIMQLQKKIRNKGSIER

SEQ ID NO: 101336 - protein, 131 aa, Unknown
  Bacterial polypetide isolated from the Sargasso Sea
MIKEKKEIPEEFKQLAKDFSEKGFITTSLDNLINWSRTGSLHWMTFGLACCAVEMMQTSMPRYDLERFGAAPRASPRQSDVMIVAGTLTNKMAPALRKVYDQMPEPRYVISMGSCANGGGYYHYSYFSVRG

SEQ ID NO: 101337 - protein, 173 aa, Unknown
  Bacterial polypetide isolated from the Sargasso Sea
MKIQSTDEKIPEEFKQLAKDFSDNGFITTSFDNLVNWARTGSLHWMTFGLACCAVEMMHTSMPRYDLERFGAAPRGSPRQSDVMIVAGTLTNKMAPALRKVYDQMPEPRYVISMGSCANGGGYYHYSYSVVRGCDKIVPVDIYVPGCPPSAEALLYGILRLQKKIRTKGSIQR

SEQ ID NO: 101338 - protein, 284 aa, Unknown
  Bacterial polypetide isolated from the Sargasso Sea
LDIYIHYGAGAYICGEETALLESLEGKKGQPRLKPPFPALIGLYGCPTIINNVETIAVVPTILRRGAKWFASLGKPKNTGTKIFCISGNVNNPCNVEEEMSVSLKDLIEIHAGGVIGGWENLKAVIPGGSSMPLLPKKICDTVRMDFDSLIAEKSGLGTAGIVVINNDQDIIQCMARIARFYKHESCGQCTPCREGSGWMWRMLERMAKGEASKDEVEMLMDVTKQIEGHTICAFGEGSAWPVQGLLRHFKKEVEKRNNFNPLVNRNKNIPYLVDQHLLDKKNV

SEQ ID NO: 101339 - protein, 173 aa, Unknown
  Bacterial polypetide isolated from the Sargasso Sea
MNLNDRKDQIPEEFKKLAQDFSDNGFITTSLDNLINWSRSGSLHWMTFGLACCAVEMMQTSMPRYDLERFGAAPRASPRQSDVMIVAGTLTNKMAPALRKVYDQMPEPRYVISMGSCANGGGYYHYSYSVVRGCDRIVPVDIYVPGCPPSAEALLYGIMQLQKKIRNKGSINR

SEQ ID NO: 101340 - protein, 157 aa, Unknown
  Bacterial polypetide isolated from the Sargasso Sea
MAKDFSENGFITTSFDNLINWARTGSLHWMTFGLACCAVEMMQTSMPRYDLERFGAAPRASPRQSDVMIVAGTLTNKMAPALRKVYDQMPEPRYVISMGSCANGGGYYHYSYSVVRGCDRVVPVDVYVPGCPPSAEALLYGILQLQKKIRNSGNINR

SEQ ID NO: 101341 - protein, 297 aa, Unknown
  Bacterial polypetide isolated from the Sargasso Sea
MLKDEDRIFTNLYNDLGPDILSAQKRGDWKNTNEIIKKGKEWIINEIKSSELRGRGGAGFPTGLKWSFAPKKVGSRPHYLVINADESEPGTCKDRDILRFEPHKLIEGCLLTAYAVNANKCYIYIRGEYINEGIKLQEAINEAYEKKLIGQNACETGWDFDIYIHYGAGAYICGEETALLESLEGKKGQPRLKPPFPALIGLYGCPTIINNVETISVVPTILRRGAKWFSSLGKPKNTGTKIYCISGNVNKPCNVEEEMGISLKDLIEKHAGGVIGGWDNLKAVIPGGSSMPLYPKV

SEQ ID NO: 101342 - protein, 150 aa, Unknown
  Bacterial polypetide isolated from the Sargasso Sea
MNDKIDQVPEEFKQLAKDFSKNGFITTSLDNLINWSRSGSLHWMTFGLACCAVEMMQTAMPRYDLERFGAAPRGSPRQSDVMIVAGTLTNKMAPALRKVYDQMPEPRYVISMGSCANGGGYYHYSYSVVRGCDRIVPVDVYVPGCPPSAE

SEQ ID NO: 101343 - protein, 270 aa, Unknown
  Bacterial polypetide isolated from the Sargasso Sea
MRSHIGYIYIRGEFYEESDRLQAAIDQAYEARLIGKNACNSGWDFDLFIHRGAGAYICGEETGLIESLEGKPGRPRLKPPFPAGAGLYGCPSTVNNVETIAVAPTILRRGANWFSGLGRPKNSGTKLFCISGHVNEPCNVEEEMGIPLRELIDKHAGGVRGGWDNLLAVIPGGSSVPVIPKVICDEVLMDFDSLIEVKSGLGTAAVIVMDKSADIIEAIARLSHFYMHESCGQCTPCREGTGWVYRVMQRLITGNAAVSEIDKLEDVVDK

SEQ ID NO: 101344 - protein, 159 aa, Unknown
  Bacterial polypetide isolated from the Sargasso Sea
KKLAEDFSKNGFITTSIDNLINWSRSGSLHWMTFGLACCAVEMMQTAMPRYDLERFGAAPRGSPRQSDVMIVAGTLTNKMAPALRKVYDQMPEPRYVISMGSCANGGGYYHYSYSVVRGCDRIVPVDIYVPGCPPSAEALLYGIMQLQKKIRNKGSFNR

SEQ ID NO: 101345 - protein, 120 aa, Unknown
  Bacterial polypetide isolated from the Sargasso Sea
MDTDKQKKIPEEFKDLAKDFAEKGFITTSSENLINWARTGSLHWMTFGLACCAVEMMQTSMPRYDLERFGAAPRASPRQSDVMIVAGTLTNKMAPALRKVYDQMPEPRYVVSMGSCANGG

SEQ ID NO: 101346 - protein, 165 aa, Unknown
  Bacterial polypetide isolated from the Sargasso Sea
MGLETDNNLIDQQGPGFIITSVDKLVNWARTGSMWPVTFGLACCAIEMMHAGASRYDTDRFGVFFRPSPRQSDVMIVAGTLVNKMAPALRKVYDQMAEPKWVISMGSCANGGGYYHHSYSVVRGCDQIIPVDIYVPGCPPTSEALINGIIELQEKIKKEESIANG

SEQ ID NO: 101347 - protein, 240 aa, Unknown
  Bacterial polypetide isolated from the Sargasso Sea
MLKEENKIFKNLYNEQGWELENALKRDDWSDTKKIIDKGRDWIINEIKTSELRGRGGAGFSTGLKWSFAPKKVGSRPHYLVINADESEPGTCKDRDILRFEPQKLIEGCLIASYAVNAKVCYVYIRGEYLNEGKRLQEAIDEAYSKNLIGKNACNSGWDLDIYIHYGAGAYICGEETALLESLEGNKGQPRLKPPFPALVGLYGCPTIVNNVETIAVVPTILRRGAKWFASMGRPKKYRY

SEQ ID NO: 101348 - protein, 226 aa, Unknown
  Bacterial polypetide isolated from the Sargasso Sea
MLKEENKIFKNLYNEHGWSLDDSLKRNDWSNTKEIISKGRDWIINEIKLSELRGRGGAGFPTGVKWSFAPKKVGSRPHYLVINADESEPGTCKDRDILRFEPQKLIEGSLISAFAVNAHTCYIYIRGEYFNEGQRLQEALDQAYSKKLIGKNACNSGWDLDIYIHYGAGAYICGEETALLESLEGNKGQPRLKPPFPALVGLYGCPTIVNNVEKIAVIPTILRKGG

SEQ ID NO: 101349 - protein, 185 aa, Unknown
  Bacterial polypetide isolated from the Sargasso Sea
MEKRGTGVGMRILNSKDKLNQVPDEFKQIAKDFAEKGFITTSTNNLINWARTGSLHWMTFGLACCAVEMMHTSMPRYDLERFGAAPRASPRQSDVMIVAGTLTNKMAPALRKVYDQMPEPRYVISMGSCANGGGYYHYSYSVVRGCDKIVPVDIYVPGCPPSAEALLYGILQLQKKIRREGDVNR

SEQ ID NO: 101350 - protein, 169 aa, Unknown
  Bacterial polypetide isolated from the Sargasso Sea
MEKRGFRVGIEESNKVKQKSFLLAKFDDLLTWSRTGSLWPMTFGLACCGVEMMHSYMSRYDLDRYGVIPRASPRQSDVMIVAGTLTNKMAPALRKVYDQMPEPRWVISMGSCANGGGYYHYSYSVVRGCDRIVPVDIYVPGCPPTAEALVYGILQLQKKIKRLNASSKS

SEQ ID NO: 101351 - protein, 173 aa, Unknown
  Bacterial polypetide isolated from the Sargasso Sea
MNIDKQENQIPEEFKKLAKDFSENGFITTSFDNLVNWARTGSLHWMTFGLACCAVEMMQTSMPRYDLERFGAAPRGSPRQSDVMIVAGTLTNKMAPALRKVYDQMPEPRYVISMGSCANGGGYYHYSYSVVRGCDRIVPVDIYVPGCPPSAEALLYGIMQLQKKIRNHGSLER

SEQ ID NO: 101352 - protein, 169 aa, Unknown
  Bacterial polypetide isolated from the Sargasso Sea
MGINNNEVSEKNFDKELKSKGFLVTSIDNILTWARTGSLWPMTFGLACCGVEMMHSYMSRYDLDRLGVIPRGSPRQSDVMIVAGTLTNKMAPALRKVYDQMPEPRWVISMGSCANGGGYYHYSYSVVRGCDRIVPVDIYVPGCPPTAEALVYGIMQLQKKIKRLNKDNI

SEQ ID NO: 101353 - protein, 272 aa, Unknown
  Bacterial polypetide isolated from the Sargasso Sea
ICGEETALLESIEGNKGQPRLKPPFPALVGLYGCPTIVNNVETIAVVPTILRRGGKWFASLGKPKNTGTKIFCISGNVNSPCNVEEEMGISLKELIEKHAGGVVGGWDNLQAVIPGGSSMPLLSKKICDTITMDFDSLIENKSGLGTAGIVVINKDQDIVACMARIARFYKHESCGQCTPCREGAGWMWRILDRVEKRKATFSDIDLLSDVTKQIEGHTICAFGEGSAWPVQGLLRHFRKEIESRCREEPLIKKKSNNPYLVDQHLLENKNA

SEQ ID NO: 101354 - protein, 107 aa, Unknown
  Bacterial polypetide isolated from the Sargasso Sea
MNNKIDQVPEEFKQLAEDFSKNGFITTSLDNLINWSRSGSLHWMTFGLACCAVEMMQTAMPRYDLERFGAAPRGSPRQSDVMIVAGTLTNKMAPALRKVYDQMPEPR

SEQ ID NO: 101355 - protein, 210 aa, Unknown; identical to SEQ ID NO: 101092
  Bacterial polypetide isolated from the Sargasso Sea

SEQ ID NO: 101356 - protein, 130 aa, Unknown
  Bacterial polypetide isolated from the Sargasso Sea
HWMTFGLACCAVEMMQTSMPRYDLERFGAAPRASPRQSDVMIVAGTLTNKMAPALRKVYDQMPEPRYVISMGSCANGGGYYHYSYSVVRGCDRIVPVDVYVPGCPPSAEALLYGIMQLQKKIRNKGSLNR

SEQ ID NO: 101357 - protein, 116 aa, Unknown
  Bacterial polypetide isolated from the Sargasso Sea
MQTSMPRYDLERFGAAPRASPRQSDVMIVAGTLTNKMAPALRKVYDQMPEPRYVISMGSCANGGGYYHYSYSVVRGCDRVVPVDVYVPGCPPSAEALLYGIMQLQKKIRDQGSISR

SEQ ID NO: 101358 - protein, 263 aa, Unknown
  Bacterial polypetide isolated from the Sargasso Sea
MIVKNTRDLITKGREWIINEIKTSELRGRGGAGFSTGLKWSFAPKEVGSRPHYLVINADESEPGTCKDRDILRFEPQKLIEGCLVAGYAVNAHVCYIYIRGEYLNEGKRLQEAINQAYDKNFLGKNACGAGWNFDIHIHYGAGAYICGEETALLESIEGNKGQPRLKPPFPALVGLYGCPTIVNNVETIAVVPTILRRGGKWFASLGKPKNTGTKIFCISGNVNSPCNVEEEMGIPLKELIEKYAGGVVGGWNNLQAVIPGGS

SEQ ID NO: 101359 - protein, 173 aa, Unknown
  Bacterial polypetide isolated from the Sargasso Sea
MNLEDKKNQIPEEFKKLAQDFSDNGFITTSLDNLINWSRSGSLHWMTFGLACCAVEMMQTSMPRYDLERFGAAPRASPRQSDVMIVAGTLTNKMAPALRKVYDQMPEPRYVISMGSCANGGGYYHYSYSVVRGCDRIVPVDIYVPGCPPSAEALLYGIMQLQKKIRNKGSIDR

SEQ ID NO: 101360 - protein, 83 aa, Unknown
  Bacterial polypetide isolated from the Sargasso Sea
TNKMAPALRKVYDQMPEPRWVISMGSCANGGGYYHYSYSVVRGCDRIVPVDIYVPGCPPTAEALVYGILQLQKKIKRKNTYKS

SEQ ID NO: 101361 - protein, 153 aa, Unknown
  Bacterial polypetide isolated from the Sargasso Sea
MKLEDKTKKIPEEFKQLAKDFSDNGFITTSLDNLINWSRTGSLHWMTFGLACCAVEMMQTSMPRYDLERFGAAPRASPRQSDVMIVAGTLTNKMAPALRKVYDQMPEPRYVISMGSCANGGGYYHYSYSVVRGCDRIVPVDVYVPGCPPSAEA

SEQ ID NO: 101362 - protein, 180 aa, Unknown
  Bacterial polypetide isolated from the Sargasso Sea
MEEGRLRMAINTDIQETSPELERLKELYADKGFVVTSINNLINWARTGSLHWMTFGLACCAVEMMHVGTPRYDVERFGAAPRASPRHADVLIVAGTLTNKMASALRKAYDQMPEPRYVISMGSCANGGGYYHYSYSVVRGCDRIIPVDVYVPGCPPTAEGLLYGLLQLQKKIRREGNIKR

SEQ ID NO: 101363 - protein, 282 aa, Unknown
  Bacterial polypetide isolated from the Sargasso Sea
CGHADESEPGTCKDRDIIRHEPHKLLEGCVVAGFAMRAHVAYIYIRGEFVNEARRLQAAIDEAYDAGLLGKNAVKSGWAFDIYLHRGAGAYICGEETALLESLEGRKGQPRLKPPFPAGVGLYGCPTTVNNVESIAVAPTILRRGADWFAGLGKENNTGTKLFCISGHVNNPCNVEEEMGIPLRELLEKHAGGVRGGWANLMAVIPGGSSTPLMPIDVCADITMDFDALRNAGTGLGTAGVIVMDKSTDVVQAIARLSYFYKHESCGQCTPCREGTGWMWRM

SEQ ID NO: 101364 - protein, 238 aa, Unknown
  Bacterial polypetide isolated from the Sargasso Sea
IASYAVQAHVCYIYIRGEYFVEGQKLQAAIDEAYEKNLIGKKAAGTDWDLDIYIHYGAGAYICGEETALLESIEGKKGQPRLKPPFPALIGLYGCPTIINNVETIAVVPTILRRGGKWFSSLGREKNTGTKIFCISGNVNNPCNVEEEMNIPLKELIEVHGGGVIGGWENLQAVIPGGSSMPLIPKEKCETLTMDFDSLMAEKSGLGTAGIVVINKDQDIIKCIARIARFYKHESCGQ

SEQ ID NO: 101365 - protein, 247 aa, Unknown
  Bacterial polypetide isolated from the Sargasso Sea
MLEDKDRIFKNLYNDKGSDIDSSLLRDDWKNTKEILSKGREWIINEIKLSDLRGRGGAGFPTGLKWSFAPKELGSKPHYLVINADESEPGTCKDRDILRFEPQKLLEGCLIASYAINAHSCYIYVRGEYFREGQKLQTAINEAYEKKYIGKNSCDTGWELNIYIHYGAGAYICGEETALLESLEGNKGQPRLKPPFPALIGLYGCPTIVNNVETIAVVPTILRKGAKWFSSIGKPKNTGTKIFCISG

SEQ ID NO: 101366 - protein, 282 aa, Unknown
  Bacterial polypetide isolated from the Sargasso Sea
DKGSDVVSAQSRGDWSNTKEIFSKGRDWIINEIKTSELRGRGGAGFPTGLKWSFAPKELGSRPHYLVINADESEPGTCKDRDILRFEPHKLIEGCLIAAYAVNAHKCYIYIRGEYFNEGQKLQNAIDEAYQKKLIGKNASNTGWDLDIFIHYGAGAYICGEETALLESLEGKKGLPRLKPPFPALIGLYGCPTIVNNVETIAVVPTILRRGAKWFSSLGSPKNTGTKIFCISGNVNKPCNVEEEMGISLKDLIEKHAGGVVGGWENLKAVIPGGSSMPLLPK

SEQ ID NO: 101367 - protein, 111 aa, Unknown
  Bacterial polypetide isolated from the Sargasso Sea
MNNKLDQVPQEFKKLAKDFSENGFITTSLDNLINWSRSGSLHWMTFGLACCAVEMMQTAMPRYDLERFGAAPRGSPRQSDVMIVAGTLTNKMAPALRKVYDQMPEPRYVIS

SEQ ID NO: 101368 - protein, 249 aa, Unknown
  Bacterial polypetide isolated from the Sargasso Sea
MLKDQDRIFKNLYNDLGSDITSSQKRGDWANTKELTNKGRDWIINEIKESQLRGRGGAGFPTGLKWSFAPKEVGSRPHYLVINADESEPGTCKDRDLLRFEPHKLIEGCLIASFAVQAHVCYIYIRGEYFIEGQKLQAAIDEAYNKNLIGKNAAGTGWDLDIYIHYGAGAYICGEETALLESIEGKKGQPRLKPPFPALIGLYGCPTIINNVETIAVVPTILRKGSKWFSSLGREKNTGTKIFCISGNV

SEQ ID NO: 101369 - protein, 170 aa, Unknown
  Bacterial polypetide isolated from the Sargasso Sea
KISKIKYHEEFKKLAEDFGKDGFITTSFDNLVNWARTGSLHWMTFGLACCAVEMMQTSMPRYDLERFGAAPRASPRQSDVMIVAGTLTNKMAPALRKVYDQMPEPRYVISMGSCANGGGYYHYSYSVVRGCDRIVPVDIYVPGCPPSAEALLYGIMQLQKKIRRKGSLER

SEQ ID NO: 101370 - protein, 175 aa, Unknown
  Bacterial polypetide isolated from the Sargasso Sea
MEKRSFGMGVKNFQSIEEVQQDVKQKGFLLAKYDDLLTWARTGSLWPMTFGLACCGVEMMHSYMSRYDLDRYGVIPRGSPRQSDVMIVAGTLTNKMAPALRKVYDQMPEPRWVISMGSCANGGGYYHYSYSVVRGCDRIVPVDIYVPGCPPTAEALVYGIMQLQNKIKRQNKQNK

SEQ ID NO: 101371 - protein, 126 aa, Unknown
  Bacterial polypetide isolated from the Sargasso Sea
MVFACCAVEMMQTSMPRYDLERFGAAPRASPRQSDVMIVAGTLTNKMAPALRKVYDQMPEPRYVVSMGSCANGGGYYHYSYSVVRGCDKIVPVDIYIPGCPPSAEALLYGILQLQKKIRREGNLQR

SEQ ID NO: 101372 - protein, 176 aa, Unknown
  Bacterial polypetide isolated from the Sargasso Sea
MATSIIFLPLLGFLFCFLLGKQFNYKVYQISTTSILFLCTLFSWIIFIQFINDKETEIIFILNWITSGNFIVDWSIRLDTLTAVMFIVVTTVSACVHLYSIGYMEEDPSKIRFMGYLSLFTFFMLVLVSSNNLLQMFFGWEGVGLASYLLIGFWHHKDSANKAAIKAFVVKQSWRF

SEQ ID NO: 101373 - protein, 346 aa, Unknown
  Bacterial polypetide isolated from the Sargasso Sea
MLKEKDKIFKNLYGFDDWKLEGAKKRGIWSNTKELIKMGSEKIVEEIKNSQLRGRGGAGFPAGLKWSFMPKDSGKDHYLVVNADESEPGTCKDREIMRNDPHLLLEGCLVAAFAMHAHTCYIYIRGEYYSESSNLQKAIDEAYANNLIGKNACGTGWDFDIYLHRGAGAYICGEETALLESLEGKKGQPRLKPPFPAGAGLYGCPTTVTNVETVAVSPTILRRGSKWFANLGSANNTGTKIFSISGHVNNPCNVEEEMGIPLKELIEKHAGGVIGGWENLLAVIPGGASVPLLPKSICDTVKMDFDSLKEVQSGLGTAAVIVMNKSTDIVEAIARLSHFYKHESCG

SEQ ID NO: 101374 - protein, 428 aa, Unknown
  Bacterial polypetide isolated from the Sargasso Sea
MSTILNENLLLAIPLAPLAGSLIAGLFGKAVGRAGAHSVTILGVAISFILSAVVFFQVMDGASFNATVYNWMQIGQTKFEIGFLVDSLTAMMMCVVTFVSLMVHIYTIGYMADDDGYQRFFSYISLFTFSMLMLVMSNNFLQLFFGWEAVGLVSYLLIGFYFTRPTAIYANMKAFIVNRVGDFGFLLGIGLLFAFAGSMNYGDVFAKRTELAALSFPGTDWGLLTVACICLFIGAMGKSAQFPLHVWLPDSMEGPTPISALIHAATMVTAGIFMVTRMSPLFELSDTALSFVMIIGAITALFMGFLGIIQNDIKRVVAYSTLSQLGYMTVALGASAYSVAVFHLMTHAFFKALLFLGAGSVIIGMHHDQDIRNMGGLRKYMPITWITSLVGSLALIGTPFFSGFYSKDSNIDAVKLSHLPGSGFAYFA

SEQ ID NO: 101375 - protein, 315 aa, Unknown
  Bacterial polypetide isolated from the Sargasso Sea
MANAIIFLPLFSFLFCFLLGNRFNFKIYQIITTGILFICSIFAWIIFFQYLGNKEPEIIYILNWISSGNFIVDWSIRLDTLTAVMFIVVTTVSACVHLYSIGYMEEDTSKVRFMGYLSLFTFFMLVLVSSNNLLQMFFGWEGVGLASYLLIGFWHHKETANNAAIKAFVVNRVGDFGYAIGIAGIFFVFGSISFDNIFEQADLFKNHQIEFLSLNFPTLDLLCFLLFIGAMGKSAQLGLHTWLPDAMEGPTPVSALIHAATMVTAGVFLVARMSPLYEFANFTNLFITFIGAATAIFAASIALTQNDIKRVIAYS

SEQ ID NO: 101376 - protein, 177 aa, Unknown
  Bacterial polypetide isolated from the Sargasso Sea
MEKRSIRVGVDEAKKYVDNTLNTELSSKGFLVASYDKILTWARTGSLWPMTFGLACCGVEMIHSYMARYDLDRYGVIPRGSPRQSDVMIVAGTLTNKMAPALRKVYDQMPEPRWVISMGSCANGGGYYHYSYSVVRGCDRIVPVDVYVPGCPPTAEALVYGILQLQKKIRRENKFKR

SEQ ID NO: 101377 - protein, 150 aa, Unknown
  Bacterial polypetide isolated from the Sargasso Sea
MEKRSLRMGIDDFQSIEEVQKDVRQKGFLLAKYNDLLTWARTGSLWPMTFGLACCGVEMMHAYMSRYDLDRYGVIPRGSPRQSDVMIVAGTLTNKMAPALRKVYDQMPEPRWVISMGSCANGGGYYHYSYSVVRGCDRIVPVDIYVPRMS

SEQ ID NO: 101378 - protein, 170 aa, Unknown
  Bacterial polypetide isolated from the Sargasso Sea
MGVDKAKKYVEDTLNTELSSKGFLVASYDKVLTWARTGSLWPMTFGLACCGVEMIHSYMARYDLDRYGVIPRGSPRQSDVMIVAGTLTNKMAPALRKVYDQMPEPRWVISMGSCANGGGYYHYSYSVVRGCDRIVPVDVYVPGCPPTAEALVYGILQLQKKIRRENKFKR

SEQ ID NO: 101379 - protein, 250 aa, Unknown
  Bacterial polypetide isolated from the Sargasso Sea
MLKDQDRIFKNLYNDMGTDVAAAQARGDWVKTSDLTVKGRDWIINEVKDSQLRGRGGAGFPTGLKWSFAPKEVGSRPHYLVINADESEPGTCKDRDILRFEPHKLIEGCLIASYAVQAHVCYIYIRGEYFIEGQKLQAAIDEAYEKKLLGKNAAGTEWDLDIYIHYGAGAYICGEETALLESIEGKKGQPRLKPPFPALIGLYGCPTIINNVETIAVVPTILRRGGKWFSSLGREKNTGTKIFCISGKCK

SEQ ID NO: 101380 - protein, 171 aa, Unknown
  Bacterial polypetide isolated from the Sargasso Sea
MNNKIDQVPEEFKQLAEDFSKNGFITTSLDNLINWSRSGSLHWMTFGLACCAVEMMQTAMPRYDLERFGAAPRGSPRQSDVMIVAGTLTNKMAPALRKVYDQMPEPRYVISMGSCANGGGYYHYSYSVVRGCDKIVPVDVYVPGCPPSAEALLYGIMQLQKKIRNKGSLER

SEQ ID NO: 101381 - protein, 173 aa, Unknown
  Bacterial polypetide isolated from the Sargasso Sea
MNLEEKNKKIPEEFKEIAKDFSENGFITTSMDNLVNWARTGSLHWMTFGLACCAVEMMQTSMPRYDLERFGAAPRGSPRQSDVMIVAGTLTNKMAPALRKVYDQMPEPRYVISMGSCANGGGYYHYSYSVVRGCDRIVPVDVYVPGCPPSAEALLYGILKLQKKIRTKGSIER

SEQ ID NO: 101382 - protein, 287 aa, Unknown
  Bacterial polypetide isolated from the Sargasso Sea
YDAGLLGKNAAKSGWPFDVYLHRGAGAYICGEETALLESLEGRKGQPRLKPPFPAGVGLYGCPTTVNNVESIAVTPTILRRGADWFASLGKENNTGTKLFCISGHVNNPCNVEEEMGIPLRELLEKHAGGVRGGWANLLAVIPGGSSTPLMPDGVCADITMDFDALRNAGTGLGTAGVIVMDKSTDIVQAIARLSYFYKHESCGQCTPCREGTGWMWRMMERLVSGEAESHEIDTLDQVTRQIEGHTICALGDAAAWPIQGLIKHFRPEIERRIAARHSIDAVNVAE

SEQ ID NO: 101383 - protein, 168 aa, Unknown
  Bacterial polypetide isolated from the Sargasso Sea
MGIDDFQSIEEVQKDVRQKGFLLAKYNDLLTWARTGSLWPMTFGLACCGVEMMHAYMSRYDLDRYGVIPRGSPRQSDVMIVAGTLTNKMAPALRKVYDQMPEPRWVISMGSCANGGGYYHYSYSVVRGCDRIVPVDIYVPGCPPTAEALVYGIMQLQKKIKKKNKDNR

SEQ ID NO: 101384 - protein, 169 aa, Unknown
  Bacterial polypetide isolated from the Sargasso Sea
MGVNIEHNNSLNIDEVFEKKGFVTASFENLINWARSGSLWPMTFGLACCGVEMMHSYMSRYDLDRLGVIPRGSPRQSDVMIVAGTLTNKMAPALRKVYDQMPEPRWVISMGSCANGGGYYHYSYSVVRGCDRIVPVDIYVPGCPPTAEALLYGIMQLQDKIKKKKKIYR

SEQ ID NO: 101385 - protein, 173 aa, Unknown
  Bacterial polypetide isolated from the Sargasso Sea
MNSVEHDKQIPDEFKEIAKNFSEKGFITTSFDNLINWARAGSLHWMTFGLACCAVEMMQTSMPRYDLERFGAAPRGSPRQSDVMIVAGTLTNKMAPALRKVYDQMPEPRYVISMGSCANGGGYYHYSYSVVRGCDRIVPVDVYVPGCPPSAEALLYGILQLQKKIRNRGSLER

SEQ ID NO: 101386 - protein, 282 aa, Unknown
  Bacterial polypetide isolated from the Sargasso Sea
MLEDKDRIFKNLYNDKGSDIDSSLLRGDWKNTKEILSKGREWIINEIKLSDLRGRGGAGFPTGLKWSFAPKELGSKPHYLVINADESEPGTCKDRDILRFEPQKLLEGCLIASYAINAHNCYIYVRGEYFREGQKLQTAINEAYSKNYIGKNSCDTGWELNIYIHYGAGAYICGEETALLESLEGNKGQPRLKPPFPALIGLYGCPTIVNNVETIAVVPTILRRGAKWFSSIGKPKNTGTKIFCISGNVNKPCNVEEEMGIPLKSLIEHHAGGVIGGWDNLK

SEQ ID NO: 101387 - protein, 266 aa, Unknown
  Bacterial polypetide isolated from the Sargasso Sea
ALLESLEGKKGQPRLKPPFPALIGLYGCPTIINNVETVAAVPTILKRGAKWFSSLGRPKNTGTKIYCISGNVNNPCNVEEEMGIPLKELIETHAGGVIGGWDNLKAVIPGGSSMPMLPKEICGNMKMDFDACVENKTGLGTAGIVVINNDQDIIKCMARIARFYKHESCGQCTPCREGSGWMWRMLERMAAGEATPDEVDMLFDVTKQIEGHTICAFGEGSSWPVQGLIRHFKDEILERNKFDPVVKKQKDIPYLVDQHLLEKENA

SEQ ID NO: 101388 - protein, 405 aa, Unknown
  Bacterial polypetide isolated from the Sargasso Sea
MGAKSRGIWSDTKEIIEKGSDFIVEEIKSSQLRGRGGAGFPAGLKWSFMPKDSGKPHYLVVNADESEPGTCKDREIMRNDPHLLLEGCLIAGFAMHANICYIYIRGEYYDEASNLQKAIDEAYENNLIGKNACGTNWNYDIYLHRGAGAYICGEETALLESLEGKKGQPRLKPPFPAGAGLYGCPTTVTNVETIAVAPTILRRGASWFSSLGRENNTGSKIFSISGHVNNPCNVEEEMGIGLKELIENHAGGVIGGWDNLLAVIPGGASVPLIPKSICDTVKMDFDSLKEVQSALGTAAVIVMNKSTDIVDAICRLSHFYKHESCGQCTPCREGTGWMFRMMEKMVKGSAKINDIDKLLDVTKQVEGHTICALGDAAAWPIQGLMRHFRPEVERRIKEYRLGEVA

SEQ ID NO: 101389 - protein, 440 aa, Unknown
  Bacterial polypetide isolated from the Sargasso Sea
MLKDEDRIFTNLYNDLGPDILSAQKRGDWKNTSDIIKKGKEWIINEIKTSELRGRGGAGFPTGLKWSFAPKEVGSRPHYLVINADESEPGTCKDRDILRFEPHKLIEGCLLAAYSVNANKCYIYIRGEYFNEGNKLQEAINEAYEKKLIGKNACDSGWDFDIYIHYGAGAYICGEETALLESLEGKKGQPRLKPPFPALIGLYGCPTIINNVETIAVVPTILRRGAKWFSSIGKPKNTGTKIYCISGNVNNPCNVEEEMGISLKDLIEKHAGGVIGGWDNLKAVIPGGSSMPLLPKNICETIKMDFDSLVENKSGLGTAGIVVINKDQDIIKCMARIARFYKHESCGQCTPCREGSGWMWRMLERMAKGEASSDEVDMLMDVTKQIEGHTICAFGEGSAWPVQGLLRHFKKEVAKRNNFNPLVNRNKNIPYLVDQHLLDK

SEQ ID NO: 101390 - protein, 261 aa, Unknown
  Bacterial polypetide isolated from the Sargasso Sea
HRGAGAYICGEETALLESLEGKKGQPRLKPPFPAGVGLYGCPTTVNNVESIAVVPTILRRGENWFSKLGKENNTGTKLFCISGHVNKPCNVEEEMGIPLRELIEKHAGGVIGGWNNLLAIIPGGSSTPMLPKQVCDTITMDFDSLKNAGTGLGTAGVIVMDKTTDIVEAIVRLAFFYKHESCGQCTPCREGTGWMWRMLKKIASKDASPRDIDNLLELTKQVEGHTICALGDAAAWPIQGLFKNFRGEIEMGLKLKKIAAE

SEQ ID NO: 101391 - protein, 296 aa, Unknown
  Bacterial polypetide isolated from the Sargasso Sea
MELIILFSPLLGAIVGGFFWRSIGESQAIYLTIALLFLSCFLSWIVFLSHDAHVEKITLFRWINSGDLSANWSIRLDRLTSIMLVVVTSVSALVHLYSVGYMAHDENWKEDEHYKARFFAYLSFFTFTMLMLVTSDNLVQMFFGWEGVGVASYLLIGFYYRKQSANAAAIKAFVVNRVGDFGFALGIFGLFMLTGSINFDDIFSAAPKLADTSLTFLWSDWNAANLIAFLLFVGAMGKSAQLFLHTWLPDAMEGPTPVSALIHAATMVTAGVFLVCRMSPLMEYAPTALSFITILG

SEQ ID NO: 101392 - protein, 300 aa, Unknown
  Bacterial polypetide isolated from the Sargasso Sea
MKKNYLGKNAAGTGWDLDIYIHYGAGAYICGEETALLESLEGKKGQPRLKPPFPALVGLYGCPTIINNVETIAVVPTILRKSAKWFSSLGREKNTGTKIFCISGNVNNPCNVEEEMNIPLKELIEIHAGGVEGGWDNLQAVIPGGSSMPLIPKKTCETLTMDFDSLVAEKSGLGTAGIVVINKDQDIIKCMARIAKFYKHESCGQCTPCREGSGWMWRMLERMAKGEATKDEIDMLGDVTNQIAGHTICAFGEGSSWPVQGLLRHFKSEIEERNNLDPIIQKKNNIPYLVDQHLLDKKNA

SEQ ID NO: 101393 - protein, 182 aa, Unknown
  Bacterial polypetide isolated from the Sargasso Sea
MEKRSFGMGLAEDQQSNNKDLTQYSNAESYQQKGFMVTSIDALMNWARTGSMWPMTFGLACCAVEMMHAGAARYDLDRFGIIFRPSPRQSDVMIVAGTLVNKMAPALRKVYDQMPEPRWVISMGSCANGGGYYHYSYSVVRGCDRIVPVDVYVPGCPPTAEALVYGLLQLQKKIRKTTTIAR

SEQ ID NO: 101394 - protein, 153 aa, Unknown
  Bacterial polypetide isolated from the Sargasso Sea
MNNKIDQVPEEFKQLAKDFSKNGFITTSLDNLVNWSRSGSLHWMTFGLACCAVEMMQTAMPRYDLERFGAAPRGSPRQSDVMIVAGTLTNKMAPALRKVYDQMPEPRYVISMGSCANGGGYYHYSYSVVRGCDRIVPVDIYVPGCPPSAEALC

SEQ ID NO: 101395 - protein, 417 aa, Unknown
  Bacterial polypetide isolated from the Sargasso Sea
MAQLIVFLPLFGFLFCFFFGKIFGFKASQIITTSFLFISAILSWFLFFSYLGEREMEVIYIFNWFTSGNFIVDWSIRLDSLTTTMFIVVCSVSACVHLYSIGYMSDDPSKERFMGYLSLFTFFMLMLVSSNNLLQMFFGWEGVGLASYLLIGFWYHKPSANNAAIKAFLVNRIGDFGYALGIAGIFYIFGSVEFSVIFDNAESFKDHSIQFIGLNFSTIDLLCFLLFIGAMGKSAQLGLHTWLPDAMEGPTPVSALIHAATMVTAGVFLLARMSPLFEYALFTNLFIIFIGASTAIFAASIALTQNDIKRVIAYSTCSQLGYMFFAAGLGAYNASIFHLMTHGFFKALLFLSAGSVIHAMHHEQDMRKMGGLFKKIPFTGTMMWIGSLAIIGFPYFSGYYSKESILENAYYSNSSMA

SEQ ID NO: 101396 - protein, 135 aa, Unknown
  Bacterial polypetide isolated from the Sargasso Sea
MNNKLDQVPDEFKQLAEDFGKNGFITTSLENLVNWSRSGSLHWMTFGLACCAVEMMQTAMPRYDLERFGAAPRGSPRQSDVMIVAGTLTNKMAPALRKVYDQMPEPRYVISMGSCANGGGYYHYSYSVVRGCDRI

SEQ ID NO: 101397 - protein, 170 aa, Unknown
  Bacterial polypetide isolated from the Sargasso Sea
MGVDEAKKYVDDTLNTELSSKGFLVASYDKVLTWARTGSLWPMTFGLACCGVEMIHSYMARYDLDRYGVIPRGSPRQSDVMIVAGTLTNKMAPALRKVYDQMPEPRWVISMGSCANGGGYYHYSYSVVRGCDRIVPVDVYVPGCPPTAEALVYGILQLQKKIRRENKFKR

SEQ ID NO: 101398 - protein, 153 aa, Unknown
  Bacterial polypetide isolated from the Sargasso Sea
MYTPDNIFTTTIDKAVRWSRTQSMWPVTFGLACCAIEMMAAGSAKYDLARYGMEVFRASPRQADLMIVAGRVSQKMAPVLRQVYDQMADPKWVIAMGACSSTGGMFNNYALVQGVDHIVPVDIYVPGCPPGPQSLMHGILTLHDKIMDGEINR

SEQ ID NO: 101399 - protein, 240 aa, Unknown
  Bacterial polypetide isolated from the Sargasso Sea
MLKDQDRIFQNLYNDKGSDVVASQSRGDWVNTKEITEKGRDWIINEIKESQLRGRGGAGFPTGLKWSFAPKEVGSRPHYLVINGDESEPGTCKDRDILRFEPHKLIEGCLIASYAVQAHVCYIYIRGEYFVDGQKLQAAIDEAYKKKLLGKNAAGTGWDLDIYIHYGAGAYICGEETALLESLEGKKGQPRLKPPFPALIGLYGCPTIINNVETIAVVPTILRRGAKWFASLGREKNTGT

SEQ ID NO: 101400 - protein, 201 aa, Unknown
  Bacterial polypetide isolated from the Sargasso Sea
MLKEKDKIFKNLYGFEDWKLEGAKKRGIWSNTKELIKMGSEKIIEEIKNSQLRGRGGAGFPAGLKWSFMPKDSGKDHYLVVNADESEPGTCKDREIMRNDPHLLLEGCLVAAFAMHAHTCYIYIRGEYYSESSNLQKAIDEAYANNLIGKNACGTGWDFDIYLHRGAGAYICGEETALLESLEGKKGQPRLKPPFPAGAGL

SEQ ID NO: 101401 - protein, 297 aa, Unknown
  Bacterial polypetide isolated from the Sargasso Sea
MATSIIFLPLLGFLFCFLLGKQFNYKVYQISTTLILFLCTLFSWIIFIQFINNKETEIIFILNWITSGNFIVDWSIRLDTLTAVMFIVVTTVSACVHLYSIGYMEEDPSKIRFMCYLSLFTFFMLVLVSSNNLLQMFFGWEGVGLASYLLIGFWHHKDSANKAAIKAFVVNRVGDFGYAIGIAGIFYIFGTISFDSIFSQVDRFSEHQIQFLSFSFPTLDFLCFLLFIGAMGKSAQLGLHTWLPDAMEGPTPVSALIHAATMVTAGVFLVARMSPLYEFATFTNLFITFIGAATAIL

SEQ ID NO: 101402 - protein, 171 aa, Unknown
  Bacterial polypetide isolated from the Sargasso Sea
MNNKIDQVPEEFKKLAEDFSKNGFITTSLDNLVNWSRSGSLHWMTFGLACCAVEMMQTAMPRYDLERFGAAPRGSPRQSDVMIVAGTLTNKMAPALRKVYDQMPEPRYVISMGSCANGGGYYHYSYSVVRGCDRIVPVDVYVPGCPPSAEALLYGILQLQKKIRKKGSFIR

SEQ ID NO: 101403 - protein, 443 aa, Unknown
  Bacterial polypetide isolated from the Sargasso Sea
MLKDQDRIFQNLYNDRGSDIASSKERGDWVNTKEIIDKGRDWIINEIKDSQLRGRGGAGFPTGLKWSFAPKEVGSRPHYLVINGDESEPGTCKDRDILRFEPHKLIEGCLIASYAVQAHVCYIYIRGEYFIDGQKLQAAIDEAYEKKLLGKNAAGTGWDLDIYIHYGAGAYICGEETALLESIEGKKGQPRLKPPFPALIGLYGCPTIINNVETIAVVPTILRKGGKWFASLGREKNTGTKIFCISGNVNNPCNVEEEMNIPLKELIEVHAGGVIGGWDNLQAVIPGGSSMPLIPKEKCETLTMDFDSLMAEKSGLGTAGIVVINKDQDIIKCMARIARFYKHESCGQCTPCREGSGWMWRMLERMANGEATKDEVDMLGDVTNQIAGHTICAFGEGSSWPVQGLLRHFKKEIEKRNNLDPIVQKKNNIPYLVDQHLLDKKNA

SEQ ID NO: 101404 - protein, 153 aa, Unknown; identical to SEQ ID NO: 101043
  Bacterial polypetide isolated from the Sargasso Sea

SEQ ID NO: 101405 - protein, 415 aa, Unknown
  Bacterial polypetide isolated from the Sargasso Sea
TLTAVMFIVVTTVSACVHLYSIGYMEEDPSKIRFMGYLSLFTFFMLVLVSSNNLLQMFFGWEGVGLASYLLIGFWHHKDSANKAAIKAFIVNRVGDFGYAIGIAGIFYIFGTISFDSIFSQVDQFNEHQIQFLSFSFPTLDFLCFLLFIGAMGKSAQLGLHTWLPDAMEGPTPVSALIHAATMVTAGVFLVARMSPLYEFATFTNLFITFIGAATAIFAASIALTQNDIKRVIAYSTCSQLGYMFFAAGVGAYNASIFHLTTHAFFKALLFLSAGSVIHAMHHEQDMRKMGGLYKKIPFTATMMWIGSLAIIGFPYLSGYYSKESILENAFYTSNGIAYFAYLVGILTALLTAFYSWRLLFLTFHGENRSNNKTYDHAHESPLVMTVPLFILATGSIFSGIFFADYFIGYYKKEF

SEQ ID NO: 101406 - protein, 689 aa, Unknown
  Bacterial polypetide isolated from the Sargasso Sea
MELFVIFSPLVGAILAGFGWKIIGEKAALISATLLLFLACFVSWFLFIGFDGDLRIIEISKWMSSGSLEAYWAIRFDRLTAIMLIVVTTVSALVHLYSFGYMDHDPNWEHDESYKPRFFAYLSFFTFAMLMLVTSDNLLQMFFGWEGVGVASYLLIGFYYKKPTANSAAIKAFVVNRVGDFGFALGIFGIFYLTGSIQFSDVFLLAPGLVDQEISFLWTEWNAANLIAFLLFVGAMGKSAQLFLHTWLPDAMEGPTPVSALIHAATMVTAGVFLVCRMSPLMEFAPNAMAFITFIGATTAFFAATIGLVQNDIKRVIAYSTCSQLGYMFVAAGSGVYSAAMFHLFTHAFFKALLFLGAGSVIHAMHHEQDMRNYGGLRKKIPYTFVAMMIGTLAITGVGIPLTHYGFAGFLSKDAIIESAYAASVGGYSFWMLVMSALFTSFYSWRLIFMTFYGKPRGDSHTHTSAHESPKVMIIPLAILSLGAIFSGMIWYKSFFGDHYSVNKFFGIEETEYHSQYNGDNHGSSDVKNEGLNNHSSIYLPSGAIYMAPDNHILDEAHHVPKWVKLSPFVAMLLGFILSYTFYIWRTDLPQKLAENQRPLYLFLLNKWYFDEVYEILFVRSAKFFGRLLWKKGDGTVIDGFIDNLSMVFIPLLTRLAGRAQSGYIFTYAFAMVLGIVVLITWMTLGTGS

SEQ ID NO: 101407 - protein, 299 aa, Unknown
  Bacterial polypetide isolated from the Sargasso Sea
MLQRAIDEAYEAGLVGKNACNSGWDFDIFLHHGAGAYICGEETALLESLEGKKGMPRMKPPFPAGAGLYGCPTTVNNVESIAVVPTILRRGAHWFSSFGRPNNSGTKLFAISGHVNNPCVVEEVMSISFQELIDKHCGGVRGGWKNLKAVIPGGSSVPCVRGEDMKDAIMDFDYLRSDLGSGLGTAAVIVMDNSVDIIKAIWRLSKFYKHESCGQCTPCREGTGWMMRVMERLVHGNAEKDEIDMLFDVTKQVEGHTICALGDAAAWPIQGLIRNFRDEIEERIINRDIANVSKPLAAE

SEQ ID NO: 101408 - protein, 741 aa, Unknown
  Bacterial polypetide isolated from the Sargasso Sea
MGVESVDAAFLIVLAPFVAFPIILVSGQLYNGNSTWKQNLKEGGVIGLSALLVSLTTSLWVLVDYLRGAREIAKEPAGNVAASWGDWISFDVLLSDYSMSSGRVIGVGVWVDSITLMLLFVATFLCFLICWFSLGYMNTDPINEDRNHRFYAEFVLFAMGMFGMVLADNFLWLFIFWEVMGLCSYLLIGFYFWKESAAYAAKKAFLTTRVGDVFLMIGLLILYDIYGSLEFSVIFEDPSINGTVDSDKLFWALLMLFIGAVGKSAQFPLHVWLPDAMEGPTPVSALIHAATMVNAGLYLVARMVPFVDVGAHGVDGLSELGLIVAYVGGITAFMAASIAFVQNDIKKVLAYSTMSQLAYIFTGLGVALWFYNNGKTEAATLVFGGAMFHLFNHAMAKGMLFMASGSVIHEVHHAHDHLHEGDGHNHHDDFDPQDMRNMGGLASKLPVTSAAMMIGSMSIIGIPLIGGFWSKEAIVAKTWKASLDYEPLMFGPAILVLLTAGMTGFYMSRMWFMTFAGEPKHEVVDHVHESTPWIKEPLLILSVISALGGFGLAVLNVVKWLAKPYSYDLGLNGDSVVSRVVYELEHAFLPEDPNLRIVGWTTIFLSLVIGPIFAARVHGGSLREGQSAGPLVSWLVWLSGRFGSQDVKELSESSLSEALHNRLYFDHYYELALSKTVVPLAAFAAWFDRKVIDGVIKRVESNSVLGSVQIRRVTTGRASDYILMAAVGALSIFALAWGVSG

SEQ ID NO: 101409 - protein, 432 aa, Unknown
  Bacterial polypetide isolated from the Sargasso Sea
MKETLLLTKHMRENPENSHLIDVYEKNNGYSAARKVFKENNPGDVIEEIKTSNIRGRGGAGFPTGVKWGFLAEDEERYLVINADESEPGTFKDRILLERDPHQLIEGIIVTSFASNISKAFIYIRGEYAKPARRVQDAVEQAYEKGYLGKNIFDSGKDLDVVVHLGAGAYICGEETALLNSLEGRRGEPRLKPPYFPAVKGLYNKPTLVNNVETISSVPWIINNSGKDYAKLGVEGSTGTRIFSLSGHVNTPGNFEIEMGCSFGEFIDNFGNGIKENKSVKAYIPGGASAPWFTGEQLDIKMTIDDVANAGSMLGSGAVVVMDEDTNLVLAAKSIVSFFAHESCGQCTPCREGTTWLEMILERIASGRGRTSDIDLLLDVCDNISPGLAWPPQMTTICPLGPSAVSPITSLMGSFREEVESLLPKKVLINNE

SEQ ID NO: 101410 - protein, 153 aa, Unknown
  Bacterial polypetide isolated from the Sargasso Sea
MFSPDNIFTTTIDKAVRWSRTQSMWPVTFGLACCAIEMMAAGSAKYDLARYGMEVFRASPRQADLMIVAGRVSQKMAPVLRQVYDQMAEPKWVIAMGACSSTGGMFNNYALVQGVDHIVPVDIYVPGCPPGPQSLMHGILTLHDKIMEGEINR

SEQ ID NO: 101411 - protein, 442 aa, Unknown
  Bacterial polypetide isolated from the Sargasso Sea
MLKDQDRIFQNLYNDLGSDLTSAQRRGDWVNTKEITEKGRDWIINEMKDSQLRGRGGAGFPTGLKWSFAPKEVGSRPHYLVINGDESEPGTCKDRDILRFEPHKLIEGCLIASYAIQAHVCYIYIRGEYFVDGQKLQAAIDEAYEKKLIGKNAAGTGWDLDIYIHYGAGAYICGEETALLESIEGNKGQPRLKPPFPALIGLYGCPTIINNVETIAVVPTILRRGGKWFASLGREKNTGTKIFCISGNVNNPCNVEEEMNIPLKELIEVHAGGVIGGWDNLQAVIPGGSSMPLIPKEKCETLTMDFDSLVAEKSGLGTAGVVVINKDQDIIKCMARIARFYKHESCGQCTPCREGSGWMWRMLERMAKGEASKDEIEMLGDVTKQIEGHTICAFGEGSSWPVQGLLRHFKDEIKKRNNFDPIVKETQNIPYLVDQHLLDKNA

SEQ ID NO: 101412 - protein, 153 aa, Unknown
  Bacterial polypetide isolated from the Sargasso Sea
MYSPDNIFTTTIDKAVRWSRTQSMWPVTFGLACCAIEMMAAGSAKYDLARYGMEVFRASPRQADLMIVAGRVSQKMAPVLRQVYDQMAEPKWVIAMGACSSTGGMFNNYALVQGVDHIVPVDIYVPGCPPGPQSLMHGILTLHQKIMDREINR

SEQ ID NO: 101413 - protein, 213 aa, Unknown
  Bacterial polypetide isolated from the Sargasso Sea
MLKDQDRIFTNLYNDKGTDVEASKKRGDWNNTKEFCEKGKDWIINEIKSSELRGRGGAGFPTGLKWSFCPKEISNRPHYLVINADESEPGTCKDRDILRFEPQKLIEGCFIASYAVNAHVCYIYIRGEYFNEGKKLQEAIDEAYEKKLIGKNACGTNWDLDIYIHYGAGAYICGEETALLESLEGNKGQPRLKPPFPALIGLYGCPTIINNVE

SEQ ID NO: 101414 - protein, 422 aa, Unknown
  Bacterial polypetide isolated from the Sargasso Sea
MLKEKDKIFTNLFGDEPFHLKNAQARGDWDNTKELIKKGREWIIDEMKKSELRGRGGAGFPTGLKWSFMPKDSKLTNYLVVNADESEPGTCKDRDMIRNEPHKLIEGCLLASFAMNAHTCYIYIRGEYFNEAVVLQKAIDEAYDAGLIGKNAAKSGWDFDIFLHRGAGAYICGEETALLESLEGKKGQPRLKPPFPANKGLYGSPTTVNNVETIAVVPTILRRGGEWFSSFGRPKNTGTKVFCISGHVNNPCNIEEEMSIPLRELIEKHAGGVTGGWDNLKAVIPGGSSVPLIPKSTCDTVLMDFDSLSAVKSGLGTAAVIVMDKSTDLVKAISKLSHFYKHESCGQCTPCREGTGWMWRMMEKIGNGHASSNDIDKLLDVTKQIEGHTICALGDAAAWPIQGLFRHFRDEIEEQLKKTKAA

SEQ ID NO: 101415 - protein, 301 aa, Unknown
  Bacterial polypetide isolated from the Sargasso Sea
MIKEDNKIFHNLYNDFGWEIDNSIKRNDWNNTKEIISKGREWIINEVKSSELRGRGGAGFPTGLKWSFAPKEVGSRPHYLVINADESEPGTCKDRDILRFEPQKLLEGCLIAGFAVNAHVCYIYIRGEYYNEGKRLQEAINQAYKKNFLGKNACGTGWDFEIHIHYGAGAYICGEETALLESLEGNRGQPRLKPPFPALVGLYGCPTIVNNVETIAVVPTILRKGAKWFSSIGKPKNTGTKIFCISGNVNNPCNVEEEMGIPLKDLIEKYAGGVVGGWDNLQAVIPGGSSMPLLPKNICET

SEQ ID NO: 101416 - protein, 160 aa, Unknown
  Bacterial polypetide isolated from the Sargasso Sea
MNLKKEDQIPQEFKQLAKDFADKGFITTSLDNLVNWARTGSLHWMTFGLACCAVEMMQTSMPRYDLERFGAAPRASPRQSDVMIVAGTLTNKMAPALRKVYDQMPEPRYVISMGSCANGGGYYHYSYSVVRGCDRVVPVDVYVPGCPPSAEALLYGINAL

SEQ ID NO: 101417 - protein, 112 aa, Unknown
  Bacterial polypetide isolated from the Sargasso Sea
MNTELSSKGFLVASYDKILTWARTGSLWPMTFGLACCGVEMIHSYMARYDLDRYGVIPRGSPRQSDVMIVAGTLTNKMAPALRKVYDQMPEPRWVISMGSCANGGGYYHYSY

SEQ ID NO: 101418 - protein, 443 aa, Unknown
  Bacterial polypetide isolated from the Sargasso Sea
MLKDEDRIFQNLYNDSGADIESAKLRNDWNGTKDILEKGREWIINEVKSSELRGRGGAGFPTGLKWSFAPKEVGSRPHYLVINADESEPGTCKDRDILRFEPHKLIEGCLIASYAVNAHKCYIYIRGEYFNEGQKLQTAIDEAYKNNLIGKNALNSGWDLDVYIHYGAGAYICGEETALLESLEGKKGQPRLKPPFPALIGLYGCPTIINNVETVAAVPTILRRGAKWFSSLGRAKNTGTKIYCISGNVNNPCNVEEEMGIPLKELIETHAGGVVGGWDNLKAVIPGGSSMPMLPKEICDNMKMDFDACVENKTGLGTAGIVVINNDQDIIKCMARIARFYKHESCGQCTPCREGSGWMWRMLERMAAGEATPDEVDMLFDVTKQIEGHTICAFGEGSSWPVQGLIRHFKDEIIERNKFDPVVKKQKNIPYLVDQHLLEKENA

SEQ ID NO: 101419 - protein, 177 aa, Unknown
  Bacterial polypetide isolated from the Sargasso Sea
MGIGFFNKEKEKQIPQEFKQIAKDFSEKGFVTTSSENLINWARTGSLHWMTFGLACCAVEMMQTSMPRYDLERFGAAPRASPRQSDVMIVAGTLTNKMAAPLRKVYDQMPEPRYVISMGSCANGGGYYHYSYSVVRGCDRIVPVDIYVPGCPPSAEALLYGVLQLQKKIRREGTQNR

SEQ ID NO: 101420 - protein, 162 aa, Unknown
  Bacterial polypetide isolated from the Sargasso Sea
MGIGFFNKEKEKQIPQEFKQIAKDFSEKGFVTTSSENLINWARTGSLHWMTFGLACCAVEMMQTSMPRYDLERFGAAPRASPRQSDVMIVAGTLTNKMAAPLRKVYDQMPEPRYVISMGSCANGGGYYHYSYSVVRGCDRIVPVDIYVPGCPPSAEALLYGV

SEQ ID NO: 101421 - protein, 195 aa, Unknown
  Bacterial polypetide isolated from the Sargasso Sea
MIGDLAKVNGEGLEGLEHNFITARIENLVKWSRARSCWPATFGLACCAIEMMATGAAHYDLARYGMEVFRASPRQADLMIVAGRVSQKMAPILRQIYDQMMEPKWVISMGVCASSGGMFNNYAIVQGVDQVVPVDVYAPGCPPGPETLMHAILTLHEKIQSGELTRRREENSGGAAIQLSEPSVEISQPVELESR

SEQ ID NO: 101422 - protein, 173 aa, Unknown
  Bacterial polypetide isolated from the Sargasso Sea
MNIQDRKKDIPEEFKQLAQDFSDNGFITTSLDNLVNWARTGSLHWMTFGLACCAVEMMQTSMPRYDLERFGAAPRASPRQSDVMIVAGTLTNKMAPALRKVYDQMPEPRYVISMGSCANGGGYYHYSYSVVRGCDRVVPVDVYVPGCPPSAEALLYGILQLQKKIRNKGSLER

SEQ ID NO: 101423 - protein, 443 aa, Unknown
  Bacterial polypetide isolated from the Sargasso Sea
MLKDEDRIFQNLYNDSGADIESAKLRNDWNGTKEILEKGREWIINEVKSSELRGRGGAGFPTGLKWSFAPKEVGSRPHYLVINADESEPGTCKDRDILRFEPHKLIEGCLIASYAVNAHKCYIYIRGEYFNEGQKLQTAIDEAYKNNLIGKNALNSGWDLDIYIHYGAGAYICGEETALLESLEGKKGQPRLKPPFPALIGLYGCPTIINNVETVAAVPTILRRGAKWFSSLGRAKNTGTKIFCISGNVNNPCNVEEEMGVPLKELIETHAGGVVGGWENLKAVIPGGSSMPMLPKEICDNMKMDFDACVENKTGLGTAGIVVINNDQDIIKCMARIARFYKHESCGQCTPCREGSGWMWRMLERMAAGEATPDEVDMLFDVTKQIEGHTICAFGEGSSWPVQGLIRHFKDEILERNKFDPVVKKQKNIPYLVDQHLLEKENA

SEQ ID NO: 101424 - protein, 166 aa, Unknown
  Bacterial polypetide isolated from the Sargasso Sea
MKSSFSNRQASSSEYIISKVDGLINWARQGSLWPMTFGLACCAVEMMHTGAARYDLDRFGMIFRPSPRQSDVMIVAGTLTNKMAPALRKVYDQMPEPRWVISMGSCANGGGYYHYSYSVVRGCDRIVPVDIYVPGCPPTAEALLYGLLQLQKKIAQNKTTLLWYNR

SEQ ID NO: 101425 - protein, 289 aa, Unknown
  Bacterial polypetide isolated from the Sargasso Sea
MLSDKDRIFSNLYGMYDCSLKGALSRGHWDNTGGLLKKGQDWIIEEVKLSGLRGRGGAGFPTGLKWSFMPKQTDGRPSYLVVNADESEPGTCKDREIMRHDPHSLVEGCLIAGFAMSAASAYIYIRGEYIREREALQIAIDEAYSKGFLGRNACKSGYDFDLFLHHGAGAYICGEETALLESLEGKKGMPRMKPPFPAGAGLYGCPTTVNNVESIAMVPTILRRGAVWFSSFGRKNNAGTKIFSISGHVERKCVVEEEMSIPLRELIDKHCGGVRGGWDNLKAGNSWRS

SEQ ID NO: 101426 - protein, 361 aa, Unknown
  Bacterial polypetide isolated from the Sargasso Sea
MLKDEDRIFKNLYNDLGSDIESSQKRGDWSNTKDIIKKGREWIINEVKTSELRGRGGAGFPTGLKWSFAPKEVGSKPHYLVINADESEPGTCKDRDILRFESHKLIEGCLISSYAVNAHVCYIYIRGEYYKEGQILQKAIDESYAKGLVGKNAADTGWDLDIYIHYGAGAYICGEETALLESLEGNKGQPRLKPPFPALIGLYGCPTIINNVETIAVVPTILRRGGKWFSSLGRSKNTGTKIYCISGNVNNPCNVEEEMGIPLKDLIEKHAGGVVGGWDNLKAVIPGGSSMPLLRKEVCDTIKMDFDACVENKTGLGTAGIVVINKDQDIIKCMARIARFYKHESCGQCTPCREGSGWMWR

SEQ ID NO: 101427 - protein, 684 aa, Unknown
  Bacterial polypetide isolated from the Sargasso Sea
MSTTLNENLLLAIPLAPLAGSLIAGLFGNAVGRKGAHRITILGVMIAFLLSAKVFFDVMGGASFNATVYEWMNVGSLKLEVGFLVDSLTAMMMVVVTFVSLMVHVYTIGYMAEEDGYQRFFSYISLFTFSMLMLVMSNNFLQLFFGWEAVGLVSYLLIGFYFTRESAIYANMKAFLVNRVGDFGFLLGIGLLLAFAGSMNYGEVFAKRAELASLHFPGTDWGLLTVACICLFIGAMGKSAQFPLHVWLPDSMEGPTPISALIHAATMVTAGIFMVSRMSPLFELSDTALSFITVIGAITALFMGFLGIVQNDIKRVVAYSTLSQLGYMTVALGVSAYPVAVFHLMTHAFFKALLFLGAGSVIMGMHHDQDMRNMGGLRKYMPITWITSLVGSLALIGTPFFSGFYSKDSIIDAVKLSHLPGSGFAYFAVVASVFVTALYSFRMYFLVFHGEERFRKPKHPESPMGMAAAHGHDDHGHGHGHDDHAHEPHETPWVVWVPLVLLAIPSVIIGAIAISPMLFGDFFQHGVAFDKVIFIGENHPALAEMAEEFHGWVGMGLHSVSGLPVWLALAGVVVAWFLYLKRPELPASIRRAFGPIYTLLDNKYYMDKINEVVFARGSVAIGRGLWKEGDVVVIDGLVNGSARFIGWFAGVIRFLQSGYIYHYAFAMIIGMLGLLTLFVTLGGK

SEQ ID NO: 101428 - protein, 293 aa, Unknown
  Bacterial polypetide isolated from the Sargasso Sea
MSRGDWLNTKELCQKGKEWLINEIKISELRGRGGAGFPTGLKWSFAPKEIGSRQHYLVINADESEPGTCKDRDILRFEPHKLIEGCLLAAYAVGAHKCYIYVRGEYFNEGNKLQYAINEAYEKGLIGKNASGTNWDLDIYIHYGAGAYICGEETALLESIEGKKGQPRLKPPFPALIGLYGCPTIVNNVETIAVVPTILRRGGKWFASLGKKKNTGTKIFCISGNVNNPCNVEEEMGITLKELIEKHAGGVIGGWDNLKAVIPGGSSMPLLPKEICETITMDFDTLIENKSGL

SEQ ID NO: 101429 - protein, 424 aa, Unknown
  Bacterial polypetide isolated from the Sargasso Sea
MLKEKDKIFKNLYGFRDWKLEGAKKRGIWSNTKELIKMGSDKIIEEIKNSQLRGRGGAGFPAGLKWSFMPKDSGKDHYLVVNADESEPGTCKDREIMRNDPHLLLEGCLVAAFAMHAHTCYIYIRGEYYSESSNLQKAIDEAYANNLIGKNACGTGWDFDIYLHRGAGAYICGEETALLESLEGKKGQPRLKPPFPAGAGLYGCPTTVTNVETIAVSPSILRRGSKWFANLGSANNTGTKIFSISGHVKNPCNVEEEMGIPLKDLIEKHAGGVIGGWENLLAVIPGGASVPLLPKSICDTVKMDFDSLKQVQSGLGTAAVIVMNKSTDIVEAITRLSHFYKHESCGQCTPCREGTGWMYRMMEKMINGNVEHQDIDKILDVTKQIEGHTICALGDAAAWPIQGLFRHFRPEIEKRIQERNRRVA

SEQ ID NO: 101430 - protein, 144 aa, Unknown
  Bacterial polypetide isolated from the Sargasso Sea
NFDKLLTWARTGSLWPMTFGLACCGVEMIHTYMARYDLDRYGVIPRGSPRQSDVMIVAGTLTNKMAPALRKVYDQMPEPRWVISMGSCANGGGYYHYSYSVVRGCDRIVPVDIYVPGCPPTAEALVYGILQLQKKIKRKNKFVR

SEQ ID NO: 101431 - protein, 354 aa, Unknown
  Bacterial polypetide isolated from the Sargasso Sea
LYSIGYMEEDPSKIRFMGYLSLFTFFMLVLVSSNNLLQMFFGWEGVGLASYLLIGFWHHKDSANKAAIKAFVVNRVGDFGYAIGIAGIFYIFGTISFDSIFSQVDQFSEHQIQFLSFSFPTLDFLCFLLFIGAMGKSAQLGLHTWLPDAMEGPTPVSALIHAATMVTAGVFLVARMSPLYEFATFTNLFITFIGAATAIFAASIALTQNDIKRVIAYSTCSQLGYMFFAAGVGAYNASIFHLTTHAFFKALLFLSAGSVIHAMHHEQDMRKMGGLFKKIPFTASMMWIGSLAIIGFPYLSGYYSKESILENAFYASNGIAYFAYLVGILTALLTAFYSWRLLFLTFHGENRSNK

SEQ ID NO: 101432 - protein, 432 aa, Unknown
  Bacterial polypetide isolated from the Sargasso Sea
MKETLLLTKHMRENPENSHLIDVYEKNNGYSAARKVLKDNNPGDVIEEIKTSNIRGRGGAGFPTGVKWGFLAEDQERYLVINADESEPGTFKDRILLERDPHQLIEGIIVTSFASNISKAFIYIRGEYAKPARRVQDAVEQAYEKGYLGKNIFDSGKDLDVVVHLGAGAYICGEETALLNSLEGRRGEPRLKPPYFPAVKGLYNKPTLVNNVETISSVPWIINNSGKDYAKLGVEGSTGTRIFSLSGHVNNPGNFEIEMGCSFGEFIDTFGNGIKENKAVKAYIPGGASAPWFTGDQLDIKMTIDDVANAGSMLGSGAVVVMDEDTNLVLAAKSIVSFFAHESCGQCTPCREGTTWLEMILDRIASGRGRTSDIDLLLDVCDNISPGLTWPPQMTTICPLGPSAVSPITSLMGSFREEVESLLPKKVLINNE

SEQ ID NO: 101433 - protein, 376 aa, Unknown
  Bacterial polypetide isolated from the Sargasso Sea
MLKPENKIFKNLYNEFGWEIDNAIKRDDWKETKNIISKGREWIINEIKTSELRGRGGAGFSTGLKWSFAPKEVGSRPHYLVINADESEPGTCKDRDILRFEPQKLIEGSLIAGYAVNAHVCYIYIRGEYLNEGKRLQSAIDQAYKKNYLGKNACGSGWDFDIHIHYGAGAYICGEETALLESIEGNKGQPRLKPPFPALVGLYGCPTIVNNVETIAVVPTILRRGGKWFASLGKPKNTGTKIFCISGNVNSPCNVEEEMGIPLKELIEKHAGGVVGGWENLQAVIPGGSSMPLLPKNICDTITMDFDSLIENKSGLGTAGIVVINKDQDIVACMARIARFYKHESCGQCTPCREGAGWMWRILDRVTKRKATFSDI

SEQ ID NO: 101434 - protein, 319 aa, Unknown
  Bacterial polypetide isolated from the Sargasso Sea
MLKDENRIFRNLYNDLGADLISAKKRGDWNNTNEICKKGREWIINEIKTSELRGRGGAGFPTGLKWSFAPKEVGSRPHYLVINADESEPGTCKDRDILRFEPQKLIEGCLIASYAVNAHVCYIYIRGEYFNEGQKLQQAINEAYKDGLIGKNSSKTGWDFDIYIHYGAGAYICGEETALLESLEGKKGQPRLKPPFPALIGLYGCPTIINNVETIAVVPTILRRGGKWFSSLGREKNTGTKIYCISGNVNNPCNVEEEMGIPLKDLIEKHAGGVVGGWDNLKAVIPGGSSMPLLPKKICDTIKMDFDACVENKTGLGTA

SEQ ID NO: 101435 - protein, 411 aa, Unknown
  Bacterial polypetide isolated from the Sargasso Sea
DDWKLKGAIKRNVWKNTKEILSKGSDYIIEEIKKSELRGRGGAGFPAGLKWSFMPKDSDKPSYLVVNADESEPGTCKDREILRNDPHLLLEGCLVAGYAMRAHVCYIYIRGEYYSEFSNLQKAIDEAYENKLIGHNASGSEWDFDIYLHRGAGAYICGEETALLESLEGKKGQPRLKPPFPAGSGLYGCPTTVTNVETVAVTPTILRKGSSWFSNLGRPKNTGTKIFSISGHVNNPCNVEEEMGIPLKKLIETYAGGVIGGWENLLAVIPGGASVPLIPKSICDNVRMDFDSLSEVKSGLGTAAVIVMNKSTDIVEAISRLSHFYMHESCGQCTPCREGTGWMYRMMQKMIEGNLAQSDIDKLINVTKQVEGHTICALGDAAAWPIQGLIRHFRTEVERRIEEYNKKRKVA

SEQ ID NO: 101436 - protein, 165 aa, Unknown
  Bacterial polypetide isolated from the Sargasso Sea
MENKDIKKLSTEIDNKGFFVTSTEALINWARTGSLHWMTFGLACCAIEMFQTNGPRYDLERYGAAPRGSPRQSDVMIVAGTLTNKMAPAIRKVYDQMPEPRYVISMGSCANGGGYYHYSYSVVRGCDRILPVDIYVPGCPPTAEALMYGILQLQKKIRRTGTIER

SEQ ID NO: 101437 - protein, 385 aa, Unknown
  Bacterial polypetide isolated from the Sargasso Sea
MLKPENKIFKNLYNDMGWEIDDAIKRNDWKDTKNLISKGREWIINEIKSSELRGRGGAGFSTGLKWSFAPKEVGSRPHYLVINADESEPGTCKDRDILRFEPQKLLEGCLIAGYAVNAKVCYIYIRGEYFSEGKRLQEAIDQAYKKNYLGKNACGSGWDFDIHIHYGAGAYICGEETALLESIEGNKGQPRLKPPFPALVGLYGCPTIVNNVETIAVVPTILRRGSKWFASLGKPKNTGTKIFCISGNVNSPCNVEEEMGIPLKELIEKHAGGVIGGWENLQAVIPGGSSMPLLSKKICETITMDFDSLIENKSGLGTAGVVVINKNQDIVACMARIARFYKHESCGQCTPCREGAGWMWRILDRVVQRKATFSDIDLLSDVLSK

SEQ ID NO: 101438 - protein, 340 aa, Unknown
  Bacterial polypetide isolated from the Sargasso Sea
MLKDEDRIFQNLYNDSGADIESAKLRNDWNGTKEILEKGREWIINEVKSSELRGRGGAGFPTGLKWSFAPKEVGSRPHYLVINADESEPGTCKDRDILRFEPHKLIEGCLIASYAVNAHKCYIYIRGEYFNEGQKLQTAIDEAYKNNLIGKNALNSGWDLDIYIHYGAGAYICGEETALFESLEGKKGQPRLKPPFPALIGLYGCPTIINNVETVAAVPTILRRGAKWFSSLGRPKNTGTKIYCISGNVNNPCNVEEEMGVPLKELIETHAGGVVGGWDNLKAVIPGGSSMPMLPKEICDNMKMDFDACVENKTGLGTAGIVVINNDQDIIKCMARIARF

SEQ ID NO: 101439 - protein, 264 aa, Unknown
  Bacterial polypetide isolated from the Sargasso Sea
MLKDQDRIFQNLYNDKGSDVSSSQERGDWVNTKEITDKGRDWIINEIKESQLRGRGGAGFPTGLKWSFAPKEVGSRPHYLVINGDESEPGTCKDRDILRFEPHKLIEGCLIASYAVQAHVCYIYIRGEYFVDGQKLQAAIDEAYEKKLLGKNAAGTGWDLDIYIHYGAGAYICGEETALLESIEGKKGQPRLKPPFPALIGLYGCPTIINNVETIAVVPTILRRGGKWFASLGREKNTGTKIFCISGNVNNPCNVEEEMNFLER

SEQ ID NO: 101440 - protein, 514 aa, Unknown
  Bacterial polypetide isolated from the Sargasso Sea
DSILDFIFLIYWRERNSNNSYFNWFTSGNFIVDWSIRLDSLTTTMFVVVCSVSACVHLYSIGYMSDDPSKERFMGYLSLFTFFMLMLVSSNNLLQMFFGWEGVGLASYLLIGFWYHKPSANNAAIKAFLVNRVGDFGYALGIAGVFYIFGSIEFSVIFDNVDNYKDHTIYFIGLNFSTIDLLCFLLFIGAMGKSAQLGLHTWLPDAMEGPTPVSALIHAATMVTAGVFLVARMSPLFEYALVTNLFITFIGASTAIFAASIALTQNDIKRVIAYSTCSQLGYMFFAAGLGAYNASIFHLMTHGFFKALLFLSAGSVIHAMHHEQDMRKMGGLFKKIPFTGSMMWIGSLAIIGFPYFSGYYSKESILQNAYYSSSSMATFAYIIGILTALLTAFYSWRLLFMTFHGETRSDLKTYDHAHESPLVMTIPLILLAFGSIFAGILFSNFYIGKLQYSFWGDSIILHDGKHYYLPFIQTLIVKSSVAIGVMLAALIYFYRNHLSKNLAHNLDPLYSISY

SEQ ID NO: 101441 - protein, 184 aa, Unknown
  Bacterial polypetide isolated from the Sargasso Sea
MEKRSFGMGIKLGSSTIQKEIPEEFKDLAKDFAEKGFITTSSENLINWARTGSLHWMTFGLACCAVEMMQTSMPRYDLERFGAAPRASPRQSDVMIVAGTLTNKMAPALRKVYDQMPEPRYVISMGSCANGGGYYHYSYSVVRGCDRIVPVDVYVPGCPPSAEALLYGIMQLQKKIRNKGSIER

SEQ ID NO: 101442 - protein, 173 aa, Unknown
  Bacterial polypetide isolated from the Sargasso Sea
MNLEEKKKQIPDEFKQLAKDFSDNGFITTSLDNLVTWARTGSLHWMTFGLACCAVEMMQTSMPRYDLERFGAAPRASPRQSDVMIVAGTLTNKMAPALRKVYDQMPEPRYVISMGSCANGGGYYHYSYSVVRGCDRIVPVDVYVPGCPPSAEALLYGIMQLQKKIRNKGSLER

SEQ ID NO: 101443 - protein, 249 aa, Unknown
  Bacterial polypetide isolated from the Sargasso Sea
AITGFRMHPAWFRIGGVAHDLPRGWDKLLRDFLDWMPKRLDSYEKAALRNTILKGRSQGVAAYGKKEALDWGCTGAALRATGIDFDVRKARPYSGYENFDFEVPVGGGVSDCYTRVMLKVEELRQSLRILEQCLNNMPEGPFKADHPLTTPPPKERTLQHIETLITHFLQVSWGPVMPANESFQMVEATKGINSYYLTSDGSTMSYRTRIRTPSYAHLQQIPVAVRGSLVSDLIVHLGSIDFVMSDVDR

SEQ ID NO: 101444 - protein, 432 aa, Unknown
  Bacterial polypetide isolated from the Sargasso Sea
MKETLLLTKHMKENPENSHLIDVYEKNNGYSAARKVLKEDNPGDVIEEIKTSNIRGRGGAGFPTGVKWGFLAEDQERYLVINADESEPGTFKDRILLERDPHQLIEGIIVTSFASNISKAFIYIRGEYAKPARRVQDAVDQAYEKGYLGKNIFDSGKDLDVVVHLGAGAYICGEETALLNSLEGRRGEPRLKPPFFPAVKGLYNKPTLVNNVETISSVPWIINNSGKEYAKLGVEGSTGTRIFSLSGHVNNPGNFEIEMGCSFGEFIDTFGKGIKENKAVKAYIPGGASAPWFTGDQLDIKMTIDDVANAGSMLGSGAVVVMDEDTNLVLAAKSIVSFFAHESCGQCTPCREGTTWLEMILDRIASGRGRTSDIDLLLDVCDNISPGLTWPPQMTTICPLGPSAVSPITSLMGSFREEVESLLPKKVLINNE

SEQ ID NO: 101445 - protein, 144 aa, Unknown
  Bacterial polypetide isolated from the Sargasso Sea
MEKGSFRMGIKMNLSNNKEKEIPEEFKNLAKDFAEKGFITTSSENLINWARTGSLHWMTFGLACCAVEMMQTSMPRYDLERFGAAPRASPRQSDVMIVAGTLTNKMAPALRKVYDQMPEPRYVISMGSCANGGGYYHYSYSVVR

SEQ ID NO: 101446 - protein, 171 aa, Unknown
  Bacterial polypetide isolated from the Sargasso Sea
MNNKLDQIPEEFKKLAKDFSENGFITTSLDNLINWSRAGSLHWMTFGLACCAVEMMQTAMPRYDLERFGAAPRGSPRQSDVMIVAGTLTNKMAPALRKVYDQMPEPRYVISMGSCANGGGYYHYSYSVVRGCDRIVPVDIYVPGCPPSAEALLYGIMQLQKKIRNKGSFNR

SEQ ID NO: 101447 - protein, 443 aa, Unknown
  Bacterial polypetide isolated from the Sargasso Sea
MLKPEDKIFKNLYNELGWEIDNAIKRNDWKNTKNIISKGREWIINEVKTSELRGRGGAGFSTGLKWSFAPKEVGSRPHYLVINADESEPGTCKDRDILRFEPQKLIEGCLIAGYAVNAHVCYIYIRGEYLNEGKRLQDAIDQAYKKNFLGKNACDSGWDFDIHIHYGAGAYICGEETALLESMEGNKGQPRLKPPFPALVGLYGCPTIVNNVETIAVVPTILRRGGKWFASIGKPKNTGTKIFCISGNVNSPCNVEEEMGIPLKELIEKYAGGVVGGWENLQAVIPGGSSMPLLSKKICDTITMDFDSLIKNKSGLGTAGIVVINKNQDIVSCMARIARFYKHESCGQCTPCREGAGWMWRILDRVVKRKATFSDIDLLSDVTKQIEGHTICAFGEGAAWPVQGLLRHFRKEIESRCREEPLIKKKIDNPYLVDQHLLEDKNA

SEQ ID NO: 101448 - protein, 185 aa, Unknown
  Bacterial polypetide isolated from the Sargasso Sea
MEERCVRMGINFLNNRKNNKEIPEEFKKIAKDFSEKGFITTSSDNLINWARTGSLHWMTFGLACCAVEMMQTSMPRYDLERFGAAPRASPRQSDVMIVAGTLTNKMAAPLRKVYDQMPEPRYVISMGSCANGGGYYHFSYSVVRGCDKVVPVDIYVPGCPPSAEALLYGILQLQKKIRREGTQKR

SEQ ID NO: 101449 - protein, 348 aa, Unknown
  Bacterial polypetide isolated from the Sargasso Sea
DESEPGTFKDRILLERDPHQLIEGVIITCFASNIKKAFIYIRGEYAKPARRVQDAVEQAYEKGYLGNNILGTNFSLDVVVHLGAGAYICGEETALLNSLEGKRGEPRLKPPYFPAVMGLYNKPTLVNNVETISSVPWIIQNSGKEYSKLGVEGSTGTRIFSLSGHVNNPGNFEIEMGQSFGEFIDTFGKGIKNNKNVKAYIPGGASAPWFTGDQLDIKMTIDDVANAGSMLGSGAVVVMDEDTNLVYAAKSIVSFFAHESCGQCTPCREGTTWLEMILERIASGRGRLSDISLLIDICDNISPGLDWPPKMTTICPLGPSAVSPITSLLNNFSEEITNMLPTKIPITQ

SEQ ID NO: 101450 - protein, 127 aa, Unknown
  Bacterial polypetide isolated from the Sargasso Sea
MIESKIKQIPPEFKDVAENFSRDGFVTIASNTLINWARTGSLHWMTFGLACCAVEMMQTSMPRYDLERFGAAPRASPRQSDVMIVAGTLTNKMAPALRKVYDQMPEPRYVISMGSCANGGGYYHYSY

SEQ ID NO: 101451 - protein, 221 aa, Unknown
  Bacterial polypetide isolated from the Sargasso Sea
MLKDEDRIFKNLYNDRSTDINSAILRGDWTKTKEIFSKGKEWIINEIKISELRGRGGAGFPTGLKWSFAPKEVGSRPHYLVINADESEPGTCKDRDILRFEPQKLIEGCLIASYAVNAHVCYVYIRGEYFNEGQRLQKAIDEAYEKNLIGKNAAGTGWDFDIHIHYGAGAYICGEETALLESLEGKKGQPRLKPPFPALVGLYGCPTIINNVETIAVVPLF

SEQ ID NO: 101452 - protein, 326 aa, Unknown
  Bacterial polypetide isolated from the Sargasso Sea
SVNANKCYIYIRGEYFNEGNKLQEAINEAYEKKLIGVNACDSGWDFDIYVHYGAGAYICGEETALLESLEGKRGQPRLKPPFPALIGLYGCPTIINNVETVAVVPTILRRGAKWFASIGKPKNTGTKIYCISGNVNNPCNVEEEMGISLKELIEKHAGGVIGGWENLQAVIPGGSSMPLLPKKICETINMDFDSLVEQKSGLGTAGIVVINNDQDIIKCMARIARFYKHESCGQCTPCREGAGWMWRMLERMAKGEASRDEVDMLMDVTKQIEGHTICAFGEGSAWPVQGLLRHFKKEVAKRNNFNPLVNRNKKIPYLVDQHLLEK

SEQ ID NO: 101453 - protein, 425 aa, Unknown
  Bacterial polypetide isolated from the Sargasso Sea
MLKEEDKIFKNLYGFEDWSLKGAMQRGVWSNTKEIIEKGSDFIVEEIKSSQLRGRGGAGFPAGLKWSFMPKDSGKPHYLVVNADESEPGTCKDREIMRNDPHLLLEGCLVAGFAMHANACYIYIRGEYYSEASNLQKAIDEAYVNNLIGKNACGSNWDYDIYLHRGAGAYICGEETALLESLEGKKGQPRLKPPFPAGAGLYGCPTTVTNVETIAVAPTIIRRGASWFNSLGRENNTGTKIFSISGHVNNPCNVEEEMGIGLKELIETHAGGVIGGWDNLLAVIPGGASVPLIPKSICDTVKMDFDSLKEVQSGLGTAAVIVMNKSTDIVDAICRLSHFYKHESCGQCTPCREGTGWMFRMMEKMVKGDAEVNDIDKLLDVTKQIEGHTICALGDAAAWPIQGLMRHFRPEVERRIKEYRISRVA

SEQ ID NO: 101454 - protein, 153 aa, Unknown; identical to SEQ ID NO: 101043
  Bacterial polypetide isolated from the Sargasso Sea

SEQ ID NO: 101455 - protein, 615 aa, Unknown
  Bacterial polypetide isolated from the Sargasso Sea
MSLLYLTFLFPLLGWLVLAFSIGRFGERTAALIGVGSIGLSALTTLWVGIDFLNTIPTGGVYTQTLWQWISVGKFTPTFRLALDGLSLTMLGVVTGVGFFIHLFASWYMRGEEGYSRFFTYTNLFIASMVFLVLADDLLFVYLGWEGVGLCSYLLIGFYYRNPANGAAALKAFVVTRVGDVFLAIGLFVLYRELGTLNIHELLVRAPLMFAEGSPALSFACLMLLGGAVGKSAQLPLQTWLADAMAGPTPVSALIHAATMVTAGVYLIARTHGLFLLAPEILHLVALVGAITLVLAGFAALVQTDIKRILAYSTMSQIGYMFLALGVGAWEGAIFHLMTHAFFKALLFLSAGAVIVATHHEQNIFKMGGLRKSLPLVYACFLVGGSALAALPLVTAGFYSKDAILWQVQASGQSALLWAGLGGAFLTSLYTFRLIFIAFHGKEQTQAHAGHGLAHQLPLLVLLVLSTGIGALIVPPLAGVLPAGPGDHIEEGRHGLEITSAVIAIAGIALAAFLFLGERRLASSVANSAPGKLLSTLWFNAWGFDWLYDQLWVKPYLLATRLLGKDPLDWMMNLPAWLAQSGHQLLAWTVSGKLRWYAASMGMGAALILALLLLG

SEQ ID NO: 101456 - protein, 271 aa, Unknown
  Bacterial polypetide isolated from the Sargasso Sea
MRRRTALLESIEGKKGQPRLKPPFPALIGLYGCPTIINNVETIAVVPTILRRGGKWFSSLGREKNTGTKIFCISGNVNNPCNVEEEMNIPLKELIEVHAGGVIGGWENLQAVIPGGSSMPLIPKEKCETLTMDFDSLMAEKSGLGTAGIVVINKDQDIIKCMARIARFYKHESCGQCTPCREGSGWMWRMLERMAKGEATKDEVDMLGDVTNQIAGHTICAFGEGSSWPVQGLLRHFKKEIEERNNLDPIVQKKNNIPYLVDQHLLDKKNA

SEQ ID NO: 101457 - protein, 268 aa, Unknown
  Bacterial polypetide isolated from the Sargasso Sea
MLKDQDRIFKNLYNDMGADVAAAQSRGDWVKTSDLTAKGRDWIINEIKDSQLRGRGGAGFPTGLKWSFAPKEVGSRPHYLVINADESEPGTCKDRDILRFEPHKLIEGCLIASYAVQAHVCYIYIRGEYFIEGQKLQAAIDEAYDKKLLGKDAAGTGWDLDIYIHYGAGAYICGEETALLESIEGKKGQPRLKPPFPALIGLYGCPTIINNVETIAVVPTILRRGGKWFSSLGREKNTGTKIFCISGNVNNPCNVEEEMNIPLKELIE

SEQ ID NO: 101458 - protein, 309 aa, Unknown
  Bacterial polypetide isolated from the Sargasso Sea
KLQTAIDEAYKNNLIGKNALNSGWDLDIYIHYGAGAYICGEETALLESLEGKKGQPRLKPPFPALIGLYGCPTIINNVETVAAVPTILRRGAKWFSSLGRPKNTGTKIYCISGNVNNPCNVEEEMGVPLKELIETHAGGVIGGWDNLKAVIPGGSSMPILPKEICDNMKMDFDACVENKTGLGTAGIVVINNDQDIIKCMARIARFYKHESCGQCTPCREGSGWMWRMLERMAAGEATPDEVDMLFDVTKQIEGHTICAFGEGSSWPVQGLIRHFKDEILERNKFDPVVKKQKNIPYLVDQHILEKENA

SEQ ID NO: 101459 - protein, 151 aa, Unknown
  Bacterial polypetide isolated from the Sargasso Sea
MNLEERKKNIPEEFKQLAQDFSDNGFITTSLDNLVNWARTGSLHWMTFGLACCAVEMMQTSMPRYDLERFGAAPRASPRQSDVMIVAGTLTNKMAPALRKVYDQMPEPRYVISMGSCANGGGYYHYSYSVVRGCDRIVPVDVYVPRVSSFC

SEQ ID NO: 101460 - protein, 414 aa, Unknown
  Bacterial polypetide isolated from the Sargasso Sea
MIGSNTKDLISKGRDWIIDEVKLSELRGRGGAGFPTGLKWSFAPKEVGSRPHYLVINADESEPGTCKDRDILRFEPHKLIEGCLLASYAVNAHTCYIYIRGEYYFEGQRLQKAIDEAYKKNLIGKNASNSGWDLDIYIHYGAGAYICGEETALLESLEGKKGQPRLKPPFPALVGLYGCPTIINNVETIAVIPTILRRGGKWFSSLGKAKNTGTKIFCISGNVNKPCNVEEEMGVPLKTLIEKHAGGVVGGWDNLKAVIPGGSSMPLLPKEICDTITMDFDSLVKEKSGLGTAGIVVINKDQDIIKCMARIARFYKHESCGQCTPCREGSGWMWRMLERMAKGEASKDEVNMLMDVTKQIEGHTICAFGEGSSWPVQGLIRHFKKEIEERNNFNPLVKKDRNIPYLVDQHLLDK

SEQ ID NO: 101461 - protein, 177 aa, Unknown; identical to SEQ ID NO: 101419
  Bacterial polypetide isolated from the Sargasso Sea

SEQ ID NO: 101462 - protein, 330 aa, Unknown
  Bacterial polypetide isolated from the Sargasso Sea
MLKDEDRIFQNLYNDSGADIESAKLRNDWNGTKEILEKGREWIINEVKSSELRGRGGAGFPTGLKWSFAPKEVGSRPHYLVINADESEPGTCKDRDILRFEPHKLIEGCLIASYAVNAHKCYIYIRGEYFNEGQKLQTAIDEAYKNNLIGKNALNSGWDLDIYIHYGAGAYICGEETALLESLEGKKGQPRLKPPFPALIGLYGCPTIINNVETVAAVPTILRRGAKWFSSLGRPKNTGTKIYCISGNVNNPCNVEEEMGIPLKELIETHAGGVVGGWDNLKAVIPGGSSMPMLPKEICDNIKMDFDACVENKTGLGTAGIVVINNDQDI

SEQ ID NO: 101463 - protein, 222 aa, Unknown
  Bacterial polypetide isolated from the Sargasso Sea
MLKDQDRIFKNLYNDMGADVKSAQTRGDWVNTSELIAKGRDWIINEVKDSQLRGRGGAGFPTGLKWSFAPKEVGSRPHYLIINADESEPGTCKDRDILRFEPHKLIEGCLITSYAVQAHVCYIYIRGEYFIEGQKLQSAIDEAYEKNLIGKNAAGTGWDLDIYIHYGAGAYICGEETALLESIEGKKGQPRLKPPFPALIGLYGCPTIINNVETIAVVPTNS

SEQ ID NO: 101464 - protein, 173 aa, Unknown
  Bacterial polypetide isolated from the Sargasso Sea
MDLEERQKKIPEEFKKLAKEFSEKGFITTSFDNLINWSRSGSLHWMTFGLACCAVEMMQTSMPRYDLERFGAAPRASPRQSDVMIVAGTLTNKMAPALRKVYDQMPEPRYVISMGSCANGGGYYHYSYSVVRGCDRIVPVDIYVPGCPPSAEALLYGILQLQKKIRREGSIQR

SEQ ID NO: 101465 - protein, 173 aa, Unknown
  Bacterial polypetide isolated from the Sargasso Sea
MNLQDRKKDIPDEFKQLAQDFSDNGFITTSLDNLVNWARTGSLHWMTFGLACCAVEMMQTSMPRYDLERFGAAPRASPRQSDVMIVAGTLTNKMAPALRKVYDQMPEPRYVISMGSCANGGGYYHYSYSVVRGCDRVVPVDVYVPGCPPSAEALLYGILQLQKKIRNKGSLER

SEQ ID NO: 101466 - protein, 87 aa, Unknown
  Bacterial polypetide isolated from the Sargasso Sea
CWPLTNKMAPALRKVYDQMPEPRYVISMGSCANGGGYYHYSYSVVRGCDRIVPVDIYVPGCPPSAEALLYGILQLQKKIRREGSLKR

SEQ ID NO: 101467 - protein, 443 aa, Unknown
  Bacterial polypetide isolated from the Sargasso Sea
MLKDRDRIFQNLYNDKGSDVAASQSRGDWINTKEITDKGRDWIINEIKESQLRGRGGAGFPTGLKWSFAPKEVGSRPHYLVINGDESEPGTCKDRDILRFEPHKLIEGCLITSYAVQAHVCYIYIRGEYFVDGQKLQAAIDEAYEKKLLGKNAAGTGWDLDIYIHYGAGAYICGEETALLESLEGKKGQPRLKPPFPALIGLYGCPTIINNVETIAVVPTILRRGAKWFASLGREKNTGTKIFCISGNVNNPCNVEEEMSIPLKELIEVHAGGVIGGWDNLQAVIPGGSSMPLIPKDRCETLKMDFDACVEEKSGLGTAGIVVINKDQDIIKCMARIARFYKHESCGQCTPCREGSGWMWRMLERMAKGDATKDEVDMLGDVTTQIAGHTICAFGEGSSWPVQGLLRHFKKEIQERNNLDPIVQKKNNIPYLVDQHLLDKKNA

SEQ ID NO: 101468 - protein, 545 aa, Unknown
  Bacterial polypetide isolated from the Sargasso Sea
MAQLIVFLPLIGFLFCFFFGKRFNFKVSQIFTTSLLFISAILSWILFFSYIGERETQIIHIFNWFTSGNFIVDWSIRLDSLTTTMFIVVCSVSACVHLYSIGYMSDDPSKERFMGYLSLFTFFMLMLVSSNNLLQMFFGWEGVGLASYLLIGFWYHKPSANNAAIKAFLVNRVGDFGYALGIAGVFYIFGSIEFSVIFDNAESFKDHSIKFIGLNFSTIDLLCFLLFIGAMGKSAQLGLHTWLPDAMEGPTPVSALIHAATMVTAGVFLVARMSPLFEYAFFTNLFITFIGASTAIFAASIALTQNDIKRVIAYSTCSQLGYMFFAAGLGAYNASIFHLMTHGFFKALLFLSAGSVIHAMHHQQDMRKMGGLFKKIPFTGTMMWIGSLAIIGFPYFSGYYSKESILENAYYSSSSMATFAYIIGILTALLTAFYSWRLLFMTFHGETRSDLKTYDHAHESPLVMTIPLILLAFGSIFAGILFSNFYIGKLQYSFWGDSIILHDGKHHYLPFIQTLIVKSSVALGVIIAALIYFYKNHLSKKLAHN

SEQ ID NO: 101469 - protein, 157 aa, Unknown
  Bacterial polypetide isolated from the Sargasso Sea
MAQDFSDNGFITTSLDNLVNWARTGSLHWMTFGLACCAVEMMQTSMPRYDLERFGAAPRASPRQSDVMIVAGTLTNKMAPALRKVYDQMPEPRYVISMGSCANGGGYYHYSYSVVRGCDRIVPVDVYVPGCPPSAEALLYGILQLQKKIRTKGSLER

SEQ ID NO: 101470 - protein, 396 aa, Unknown
  Bacterial polypetide isolated from the Sargasso Sea
ILKLGHEKIIEMVKQSGLRGRGGAGFPSGLKWSFMPKEVKDRPHYLVVNADESEPGTCKDRDIIRHEPHKLIEGCLLAGFAMRAHAAYIYIRGEFYNEANVLQKAIDEAYEQKLIGQNACGSGWKFDVFLHRGAGAYICGEETALLESLEGKKGQPRLKPPFPAGVGLYGCPTTVNNVETIAVSPTILKRGSDWFSNLGRENNTGSKLFCISGHVNQPCNVEEEMGIPLRELIEKHAGGVKGGWDNLLAVIPGGSSTPLLTKNVCDTILMDFDSLKGAGSGLGTAGVIVMNKSTDVINAITKLSHFYKHESCGQCTPCREGTGWMWRMMERLVKGDADIEEIDVLLQVTKQVEGHTICALGDAAAWPIQGLIKNFRPLIEERINKFDELKNTKAAE

SEQ ID NO: 101471 - protein, 173 aa, Unknown
  Bacterial polypetide isolated from the Sargasso Sea
MNLQDRKKDIPEEFKQLAQDFSDNGFITTSLDNLVNWARTGSLHWMTFGLACCAVEMMQTSMPRYDLERFGAAPRASPRQSDVMIVAGTLTNKMAPALRKVYDQMPEPRYVISMGSCANGGGYYHYSYSVVRGCDRVVPVDVYVPGCPPSAEALLYGILQLQKKIRNKGSLER

SEQ ID NO: 101472 - protein, 172 aa, Unknown
  Bacterial polypetide isolated from the Sargasso Sea
MNLNEQKEIPEEFKKIAKDFSENGFITTSFDNLINWARSGSLHWMTFGLACCAVEMMQTSMPRYDLERFGAAPRGSPRQSDVMIVAGTLTNKMAPALRKVYDQMPEPRYVISMGSCANGGGYYHYSYSVVRGCDRIVPVDIYVPGCPPSAEALLYGILQLQKKIRNRGSIER

SEQ ID NO: 101473 - protein, 140 aa, Unknown
  Bacterial polypetide isolated from the Sargasso Sea
MNLEQRKDKIPDEFKQLAQDFSDNGFITTSLDNLVNWARTGSLHWMTFGLACCAVEMMQTSMPRYDLERFGAAPRASPRQSDVMIVAGTLTNKMAPALRKVYDQMPEPRYVISMGSCANGGGYYHYSYYVVRGCDKIVPV

SEQ ID NO: 101474 - protein, 423 aa, Unknown
  Bacterial polypetide isolated from the Sargasso Sea
MLNEKDKVFQNLHGFQEPFLEGALKRGSWSNTKEILSKDQNDIIELVKSSQLRGRGGAGFSTGLKWSFMPKNTGKQHYLVVNADESEPGTCKDREIIRNDPHTLVEGCLIASYAIQATKCYIYIRGEYHHEYVQLEKAIEEAYERGFIGKNACGSGFDFDLYVHRGAGAYICGEETALLESLEGKKGQPRLKPPFPAGVGLYGMPTTINNVESIAVVPTILRRGPDWFKSIGAENNTGTKIFCISGNVNKPCTIEEEMGIPLKELVEKHCDGVEGGWDNLKAIVPGGSSTPMLPKNICESVLMNFDDLKANGSGLGTAGVIVVNKNNDIAEVIERFAHFYKHESCGQCTPCREGTGWMHRMMQRLVRGEISPEQIELLENVTKQVEGHTICALGDAAAWPIQGLIKNFKSELISKYNKKLKAS

SEQ ID NO: 101475 - protein, 188 aa, Unknown
  Bacterial polypetide isolated from the Sargasso Sea
SAQKRGDWNNTKSLIKKGRDWIIDEMKKSELRGRGGAGFPTGLKWSFMPKDPAQNNYLVVNADESEPGTCKDRDMIRNEPHKLIEGCLLASFAMNAHTCYIYIRGEYFNEAVVLQNAIDEAYEAGLVGKNAANSGWDFDIYLHRGAGAYICGEETALLESLEGKKGFPRLKPPFPANKGSIWISNNCQ

SEQ ID NO: 101476 - protein, 147 aa, Unknown
  Bacterial polypetide isolated from the Sargasso Sea
MNNKIDQVPDEFKQLADDFSKNGFITTSLDNLINWSRSGSLHWMTFGLACCAVEMMQTAMPRYDLERFGAAPRGSPRQSDVMIVAGTLTNKMAPALRKVYDQMPEPRYVISMGSCANGGGYYHYSYSVVRGCDRIVPVDIYVPGCPP

SEQ ID NO: 101477 - protein, 443 aa, Unknown
  Bacterial polypetide isolated from the Sargasso Sea
MLKDEDRIFKNLYNDLGADLISSKKRGDWINTKEICEKGREWIINEVKTSELRGRGGAGFPTGLKWSFAPKEVGSRPHYLVINADESEPGTCKDRDILRFEPQKLIEGCLITSFAVNAHVCYIYIRGEYFNEGQKLQKAIDEAYAAGLIGKNSSGTDWDLDIYIHYGAGAYICGEETALLESLEGKKGQPRLKPPFPALIGLYGCPTIINNVETISVVPTILRRGGKWFSSLGRSKNTGTKIYCISGNVNNPCNVEEEMGIPLKDLIEKHAGGVVGGWDNLKAVIPGGSSMPLLPKKICDTIKMDFDACVENKTGLGTAGIVVINNDQDIIKCMARIARFYKHESCGQCTPCREGSGWMWRMLERMAKGEATRDEIDMLMDVTKQIEGHTICAFGEGSAWPVQGLIRHFKEEIIERNKFDPVIKQKKDIPYLVDQHLLEKENA

SEQ ID NO: 101478 - protein, 178 aa, Unknown
  Bacterial polypetide isolated from the Sargasso Sea
MGIKFGLASNKEKQIPDEFKDLAKDFAEKGFITTSSANLINWARTGSLHWMTFGLACCAVEMMQTSMPRYDLERFGAAPRASPRQSDVMIVAGTLTNKMAPALRKVYDQMPEPRYVVSMGSCANGGGYYHYSYSVVRGCDKIVPVDIYIPGCPPSAEALLYGILQLQKKIRREGNLQR

SEQ ID NO: 101479 - protein, 306 aa, Unknown
  Bacterial polypetide isolated from the Sargasso Sea
KLQEAINEAYEKKLIGTNACDSGWDFDIYIHYGAGAYICGEETALLESLEGKKGQPRLKPPFPALIGLYGCPTIINNVETIAVVPTILRRGAKWFSSIGKPKNTGTKIYCISGNVNNPCNVEEEMGIPLKELIEKHAGGVIGGWENLQAVIPGGSSMPLLPKKICETINMDFDSLVEQKSGLGTAGIVVINKDQDIIKCMARIARFYKHESCGQCTPCREGSGWMWRMLERMAKGEASRDEVNMLMDVTKQIEGHTICAFGEGSAWPVQGLLRHFKKEVAKRNNFNPLINKNKKIPYLVDQHLLEK

SEQ ID NO: 101480 - protein, 171 aa, Unknown
  Bacterial polypetide isolated from the Sargasso Sea
MNDKIEQVPEEFKQLAKDFSKNGFITTSLDNLINWSRSGSLHWMTFGLACCAVEMMQTAMPRYDLERFGAAPRGSPRQSDVMIVAGTLTNKMAPALRKVYDQMPEPRYVISMGSCANGGGYYHYSYSVVRGCDRIVPVDVYVPGCPPSAEALLYGILQLQKKIRKKGSFIR

SEQ ID NO: 101481 - protein, 443 aa, Unknown
  Bacterial polypetide isolated from the Sargasso Sea
MLKDQDRIFKNLYNDMGSDVVSSQKRGDWVNTKEITDKGRDWIINEIKDSQLRGRGGAGFPTGLKWSFAPKEVGSRPHYLVINGDESEPGTCKDRDILRFEPHKLIEGCLIASYAVQAHVCYIYIRGEYFVDGQKLQAAIDEAYEKKLLGKNAAGTGWDLDIYIHYGAGAYICGEETALLESIEGKKGQPRLKPPFPALIGLYGCPTIINNVETIAVVPTILRKGGKWFASLGREKNTGTKIFCISGNVNTPCNVEEEMNIPLKELIEVHAGGVIGGWDNLQAVIPGGSSMPLIPKEKCETLTMDFDSLMAEKSGLGTAGIVVINKDQDIIKCMARIARFYKHESCGQCTPCREGSGWMWRMLERMAKGDATKDEVDMLGDVTNQIAGHTICAFGEGSSWPVQGLLRHFKKEIEKRNNLDPIVQKKNNIPYLVDQHLLEKKNA

SEQ ID NO: 101482 - protein, 167 aa, Unknown
  Bacterial polypetide isolated from the Sargasso Sea
MKQIPEEFKKLAKDFSDKGFITTSLDNLINWSRSGSLHWMTFGLACCAVEMMHTSMPRYDLERFGAAPRASPRQSDVMIVAGTLTNKMAPALRKVYDQMPEPRYVISMGSCANGGGYYHYSYSVVRGCDRIVPVDVYVPGCPPSAEALLYGVLQLQKKIRNQGSLER

SEQ ID NO: 101483 - protein, 351 aa, Unknown
  Bacterial polypetide isolated from the Sargasso Sea
VINADESEPGTCKDREIMRHDPHHLIEGALFAGFAMGAHVTYIYIRGEYVREREALQCALDEAYDSGLLGKNACKSGWAFDVILHHGAGAYICGEETALLESLEGKKGMPRMKPPFPAGAGLYGCPTTVNNVESIAVVPTILRRGASWFSSIGRANNVGTKVFAISGHVNYPCVVEEAMSIPLKELIEKHCGGVRGGWKNLKAIIPGGASVPLLPPSLCDTAIMDFDWLKDNQSGLGTAAVIVMDNSADVIKAIWRLSKFYKHESCGQCTPCREGTGWMMRVMERLVKGEARIEEIDMLHKVSKQVEGHTICALGDAAAWPIQGLIRHFRSDLEQRITERNKVGIKYVAAE

SEQ ID NO: 101484 - protein, 310 aa, Unknown
  Bacterial polypetide isolated from the Sargasso Sea
MLDILVVFLPLIGSVMAGIIVFVQAADREKQHSLDMLAQWVTCLGLALSMICAIIVFNDVALEGNARTTELFTWIDSGALEASWALKVDTLTAVMMIVVTVVSAMVHIYSVGYMHHDTAIPRFMCYLSLFTFFMLMLITSDNLVQLFFGWEGVGLASYLLIGFWYNKPTANAAAIKAFLVNRVGDFGFALGIFAVFMLFQTVELDTIFAAAEGKKDATFVIFGAEVHALTACCLLLFVGAMGKSAQLGLHTWLPDAMEGPTPVSALIHAATMVTAGVFMVARLSPIFEFSDTALTVVTLVGATTAISPPP

SEQ ID NO: 101485 - protein, 342 aa, Unknown
  Bacterial polypetide isolated from the Sargasso Sea
MLKDEDRIFKNLYNDLGSDIDSAQLRDDWKNTKEICGKGREWIINEIKISELRGRGGAGFPTGLKWSFAPKEVGSRPHYLVINADESEPGTCKDRDILRFEPHKLIEGCLITSYAVNAHICYIYIRGEYFKEGQKLQQAIDEAYKKNLIGINASDTGWDLDIYIHYGAGAYICGEETALLESLEGNKGQPRLKPPFPALIGLYGCPTIINNVETIAVVPTILRRGGKWFSSLGRAKNTGTKIYCISGNVNNPCNVEEEMGIPLKDLIEKHAGGVVGGWDNLKAVIPGGSSMPLLSKKVCDTIKMDFDACVENKTGLGTAGIVVINKDQDIIKCMARIARFYK

SEQ ID NO: 101486 - protein, 210 aa, Unknown
  Bacterial polypetide isolated from the Sargasso Sea
MGRYIWNLGLIWFCFNDGFSSYSNNWFHIRVEKRSIGVAINTNIEETSPELERLKKLYADKGFVVTSINNLINWARTGSLHWMTFGLACCAVEMMHVGTPRYDVERFGAAPRASPRHADVLIVAGTLTNKMAAALRKAYDQMPEPRYVISMGSCANGGGYYHYSYSVVRGCDRIIPVDVYVPGCPPTAEGLLYGLLQLQKKIRREGNIKR

SEQ ID NO: 101487 - protein, 340 aa, Unknown
  Bacterial polypetide isolated from the Sargasso Sea
MLKDQDRIFTNIYGMHDRSLSGARARGHWDNTAKIIKKGRDWIVDEMKASGLRGRGGAGFPTGLKWSFMPKESDGRPAYLVVNADESEPGTCKDREIMRHDPHSLVEGCLIASFAMNANVCYIYIRGEYIREREALQAAIDEAYEAGLIGKNASKSGWKFDLFLHHGAGAYICGEETALLESLEGKKGMPRMKPPFPAGAGLYGCPTTVNNVESIAVVPTILRRGADWFSNFGRENNAGTKLFAISGHVNHPCVVEEEMSIPFEELIEKHCGGIRGGWKNLKAVIPGGASVPCVRGGEMREALMDFDYLRGELGSGLGTAAVIIMDQSTDVIKAIWRLSK

SEQ ID NO: 101488 - protein, 405 aa, Unknown
  Bacterial polypetide isolated from the Sargasso Sea
MLKDEDRIFTNLYNDQGADIVSAQKRSDWKDTHEIINKGKEWIISEVKLSELRGRGGAGFPTGLKWSFAPKEIGPKPHYLVINADESEPGTCKDRDIMRFEPHKLIEGCLLASYAVSAHKCYIYIRGEYANEGKKLQNAINEAYEKKLIGKNSCNSGWDLDIYIHYGAGAYICGEETALLESLEGKKGLPRLKPPFPALIGLYGCPTIINNVETIAVIPTILRRGGKWFASLGRPKNTGSKIYCISGNVNNPCNVEEEMGIPLKDLIEKHAGGVVGGWDNLKAVIPGGSSMPLIPKQICENIKMDFDECVENKTGLGTAGIVVINKDQDIIKCMARIARFYKHESCGQCTPCREGSGWMWRMLERMAKGEASRDEVDMLMDVTKQIEGHTICAFGEGSAWPVQGL

SEQ ID NO: 101489 - protein, 153 aa, Unknown
  Bacterial polypetide isolated from the Sargasso Sea
MYTPDNILTTTIDKAVRWSRTQSMWPVTFGLACCAIEMMAAGSAKYDLARYGMEVFRASPRQADLMIVAGRVSQKMAPVLRQVYDQMADPKWVIAMGACSSTGGMFNNYALVQGVDHIVPVDIYVPGCPPGPQSLMHGILTLHDKIMDGEINR

SEQ ID NO: 101490 - protein, 173 aa, Unknown
  Bacterial polypetide isolated from the Sargasso Sea
MTFNNREKEIPDEFKQLAKDFSENGFITTSFDNLVNWARTGSLHWMTFGLACCAVEMMQTSMPRYDLERFGAAPRGSPRQSDVMIVAGTLTNKMAPALRKVYDQMPEPRYVISMGSCANGGGYYHYSYSVVRGCDRIVPVDVYVPGCPPSAEALLYGIMQLQKKIRKHGSLTR

SEQ ID NO: 101491 - protein, 296 aa, Unknown
  Bacterial polypetide isolated from the Sargasso Sea
MLKEQDKIFKNLYNEYGWSIDDSLKRDDWSNTKEIISKGRDWIINEVKLSELRGRGGAGFPTGVKWSFTPKKIGSRPHYLVINADESEPGTCKDRDILRFEPQKLIEGCLISAFAVNAHVCYIYIRGEYFNEGQRLQKAIDEAYQKNFIGKNACGSGWDLDIHIHYGAGAYICGEETAMLESLEGNKGQPRLKPPFPALVGLYGCPTIVNNVETIAVVPTILRKGGKWFASIGRPKNTGTKIFCISGNVNNPCNVEEEMGVPLKFLIEKYAGGVIGGWKNLQAVIPGGSSMPLIPK

SEQ ID NO: 101492 - protein, 259 aa, Unknown
  Bacterial polypetide isolated from the Sargasso Sea
GNKGQPRLKPPFPALVGLYGCPTIVNNVETIAVVPTILRRGGKWFSSIGKPKNTGTKIFCISGNVNSPCNVEEEMGIPLKDLIEKHAGGVIGGWDNLQAVIPGGSSMPLLPKKICDSITMDFDSLIESKSGLGTAGIVVINNDQDIVECMARIARFYKHESCGQCTPCREGSGWMWRILDRVVKRKATYNDVELLADVTKQIEGHTICAFGEGSAWPVQGLLRHFRKEVESRCRDKPLIKKKLNNPYLVDQHLLENKNA

SEQ ID NO: 101493 - protein, 440 aa, Unknown
  Bacterial polypetide isolated from the Sargasso Sea
MLKQEDRIFKNLYNDLGSSLNDSFKRDDWSNTKELISKGKEWIINEVKLSELRGRGGAGFPTGVKWSFAPKKVGSRPHYLIINADESEPGTCKDRDIMRFEPQKLIEGCLITAYAVNAHKCYIYIRGEYTKEGEYLQKAIDEAYEKNLIGKNACNSGWDLDIYIHYGAGAYICGEETALLESLEGNKGQPRLKPPFPALVGLYGCPTIVNNVETIAVVPTILRRGAKWFASLGRPKNTGTKIFCISGNVNKPCNVEEEMGISLKDLIEKHAGGVIGGWENLQAVIPGGSSMPLIPKASCDTLKMDFDSLVAEKSGLGTAGVIVINKDQDILKCMARIARFYKHESCGQCTPCREGSGWMWRILERAAKGEATHKDIDLLSDVTKQIEGHTICAFGEGSAWPVQGLLRHFRKEIDKRCYSEPIIKKRKNIPYLVDQHLLEK

SEQ ID NO: 101494 - protein, 419 aa, Unknown
  Bacterial polypetide isolated from the Sargasso Sea
QKRGDWVNTKEITDKGRDWIINEIKDSQLRGRGGAGFPTGLKWSFAPKEVGSRPHYLVINGDESEPGTCKDRDILRFEPHKLIEGCLIASYAIQAHVCYIYIRGEYFVDGQKLQAAIDEAYEKKLIGKNASGTGWDLDIYIHYGAGAYICGEETALLESIEGNKGQPRLKPPFPALIGLYGCPTIINNVETIAVVPTILRRGGKWFASLGREKNTGTKIFCISGNVNKPCNVEEEMNIPLKELIEVHAGGVIGGWDNLQAVIPGGSSMPLIPKEKCETLTMDFDSLVAEKSGLGTAGVVVINKDQDIIKCMARIARFYKHESCGQCTPCREGSGWMWRMLERMAKGEASKDEIEMLGDVTKQIEGHTICAFGEGSSWPVQGLLRHFKDEIKKRNNFDPIVKETQNIPYLVDQHLLDKNA

SEQ ID NO: 101495 - protein, 390 aa, Unknown
  Bacterial polypetide isolated from the Sargasso Sea
MAVLVLFSPLIGAIIAGFFYKVIGESTAKIISVSSVFVSAVLSWFIFIGFQSGNVEKVYIMNWINSGSLNVSWGIRTDALTVVMLVVVNTVSLLVHLYSLGYMSHDKNWNEAEKYQARFFAYLSLFTFAMLVLVTSDNLLQLFFGWEGVGLASYLLIGFYYKKPSANAAAIKAFIVNRVGDFGFALGIFVIFLHTGSLYFDDLFDQLVELKLLETNFLGFNVKVIELAAFLLFMGAMGKSAQFLLHTWLPDAMEGPTPVSALIHAATMVTAGVFLVCRMSPLIENAPFTASFITIIGAITAFYAASVGLVQNDIKRIIAYSTCSQLGYMFVAAGVGFYQAAMFHLFTHAFFKALLFLGAGSVIHSMHHDQDVRNYGGLYKKIPYTCVFMV

SEQ ID NO: 101496 - protein, 173 aa, Unknown
  Bacterial polypetide isolated from the Sargasso Sea
MNLEEKKKQIPDEFKQLAQDFSDNGFITTSLDNLVTWARTGSLHWMTFGLACCAVEMMQTSMPRYDLERFGAAPRASPRQSDVMIVAGTLTNKMAPALRKVYDQMPEPRYVISMGSCANGGGYYHYSYSVVRGCDRIVPVDVYVPGCPPSAEALLYGILQLQKKIRNKGSLER

SEQ ID NO: 101497 - protein, 158 aa, Unknown
  Bacterial polypetide isolated from the Sargasso Sea
KLNSELSSKGFLVASYDKILTWARTGSLWPMTFGLACCGVEMIHSYMARYDLDRYGVIPRGSPRQSDVMIVAGTLTNKMAPALRKVYDQMPEPRWVISMGSCANGGGYYHYSYSVVRGCDRIVPVDVYVPGCPPTAEALVYGILQLQKKIRRENKFKR

SEQ ID NO: 101498 - protein, 175 aa, Unknown
  Bacterial polypetide isolated from the Sargasso Sea
MEKRCIGMGLIDNENIKKLSAEIDNKGFFVTSTEALINWARTGSLHWMTFGLACCAIEMFQTNGPRYDLERYGAAPRGSPRQSDVMIVAGTLTNKMAPAIRKVYDQMPEPRYVISMGSCANGGGYYHYSYSVVRGCDRILPVDIYVPGCPPTAEALMYGILQLQKKIRRTGTIER

SEQ ID NO: 101499 - protein, 302 aa, Unknown
  Bacterial polypetide isolated from the Sargasso Sea
MLKDQDRIFQNLYNDKGSDISSSQERGDWVNTKEITDKGRDWIINEIKESQLRGRGGAGFPTGLKWSFAPKEVGSRPHYLVINGDESEPGTCKDRDILRFEPHKLIEGCLIASYAVQAHVCYIYIRGEYFVDGQKLQAAIDEAYEKKLLGKNAAGTGWDLDIYIHYGAGAYICGEETALLESIEGKKGQPRLKPPFPALIGLYGCPTIINNVETIAVVPTILRRGGKWFASLGREKNTGTKIFCISGNVNTPCNVEEEMNIPLKELIEVHAGGVIGGWDNLQAVIPGGSSMPLIPKEKCETL

SEQ ID NO: 101500 - protein, 204 aa, Unknown
  Bacterial polypetide isolated from the Sargasso Sea
MADLSDIKHKLGLGDDGLAGLGHNIITAPVEELVKWARRRSLMPATFGLACCAIEMMATGTAHYDMARYGMETFRASPRQADLMIVAGRVSQKMAPVLRQIYDQMMEPKWVISMGVCASSGGMFNNYAIVQGVDQVVPVDIYAPGCPPGPETLLHAILALHEKIRTGELTQRRAATGRGAEIELGHDQAIDAQPEPVVIRTGGL

SEQ ID NO: 101501 - protein, 201 aa, Unknown
  Bacterial polypetide isolated from the Sargasso Sea
MLKDEDRIFTNLYNDLGSDISSAQKRGDWQNTNEIIKKGKEWIINEIKSSELRGRGGAGFPTGLKWSFAPKEVGSRPHYLVINADESEPGTCKDRDILRFEPHKLIEGCLLAAYAVNANKCYIYIRGEYFNEGNKLQEAINEAYEKKLIGVNACDSGWDFDIYVHYGAGAYICGEETALLESLEGKKGQPRLKPPFPAINR

SEQ ID NO: 101502 - protein, 305 aa, Unknown
  Bacterial polypetide isolated from the Sargasso Sea
AIDQAYEKNFLGKNACSSGWDFDIHIHYGAGAYICGEETALLESIEGNKGQPRLKPPFPALVGLYGCPTIVNNVETIAVVPTILRRGGKWFASIGKPKNTGTKIFCISGNVNSPCNVEEEMGIPLKELIDKHAGGVVGGWENLQAVIPGGSSMPLLPKKICDTITMDFDSLIENKSGLGTAGIVVINKDQDIIACMARIARFYKHESCGQCTPCREGAGWMWRILDRVVKRKATFSDIDLLSDVTKQIEGHTICAFGEGSAWPVQGLLRHFRKEIDSRCRDEPLIKKRTNNPYLVDQHLLENKNA

SEQ ID NO: 101503 - protein, 445 aa, Unknown
  Bacterial polypetide isolated from the Sargasso Sea
MLKDEDRIFKNLYNDLGADLSSSKKRGDWTNTRDLCDKGREWIIDEVKKSELRGRGGAGFPTGLKWSFAPKEVGSRPHYLVINADESEPGTCKDRDILRFEPHKLLEGCLISAYAVNAHVCYIYLRGEYYNEGVELQKAIDEAYKDNLIGKNASGTGWDLDIYIHYGAGAYICGEETALLESIEGNKGQPRLKPPFPALVGLYGCPTIVNNVETVSVVPTILRKGSKWFASLGKPKNTGTKIFCISGNVNKPCNVEEEMGIPLKDLIDTHAGGVIGGWENLQAVIPGGSSMPLLNKEISEKITMDFDSLVENKSGLGTAGIVVINKDQDIIKCFARIARFYKHESCGQCTPCREGSGWMWRILERMAKGEASREEVEMLFDVTKQIEGHTICAFGEGSAWPVQGLLRNFKKEIIKRNNFDPLIKSNKDIPYLVDQHLLEKDICPK

SEQ ID NO: 101504 - protein, 129 aa, Unknown
  Bacterial polypetide isolated from the Sargasso Sea
MDDFWFACCAVEMMQTSMPRYDLERFGAAPRASPRQSDVMIVAGTLTNKMAAPLRKVYDQMPEPRYVISMGSCANGGGYYHYSYSVVRGCDRIVPVDIYVPGCPPSAEALLYGVLQLQKKIRREGTQNR

SEQ ID NO: 101505 - protein, 443 aa, Unknown
  Bacterial polypetide isolated from the Sargasso Sea
MLKDQDRIFKNLYNDMGSDVVSAQSRGDWVNTKDITDKGRDWIINEIKNSQLRGRGGAGFPTGLKWSFAPKEVGSRPHYLVINGDESEPGTCKDRDILRFEPHKLIEGCLIASYAVQAHVCYIYIRGEYFVDGQKLQAAIDEAYEKKLLGKNAADTGWDLDIYIHYGAGAYICGEETALLESIEGKKGQPRLKPPFPALIGLYGCPTIINNVETIAVVPTILRRGGKWFASLGREKNTGTKIFCISGNVNTPCNVEEEMNIPLKELIEVHAGGVIGGWDNLQAVIPGGSSMPLIPKEKCETLTMDFDSLMAEKSGLGTAGIVVINKDQDIIKCMARIARFYKHESCGQCTPCREGSGWMWRMLERMAKGDATKDEVDMLSDVTNQIAGHTICAFGEGSSWPVQGLLRHFKKEIEKRNNLEPIVQKKNNIPYLVDQHLLDKKNA

SEQ ID NO: 101506 - protein, 390 aa, Unknown
  Bacterial polypetide isolated from the Sargasso Sea
MLKDQDRIFQNLYNDLGPDLTSSQKRGDWVNTKEITDKGRDWIINEIKDSQLRGRGGAGFPTGLKWSFAPKEVGSRPHYLVINGDESEPGTCKDRDILRFEPHKLIEGCLIASYAIQAHVCYIYIRGEYFVDGQKLQAAIDEAYEKKLLGKNAAGTGWDLDIYIHYGAGAYICGEETALLESIEGKKGQPRLKPPFPALIGLYGCPTIINNVETIAVVPTILRRGGKWFASLGREKNTGTKIFCISGNVNNPCNVEEEMNIPLKELIEVHAGGVIGGWDNLQAVIPGGSSMPLIPKEKCETLTMDFDSLMAEKSGLGTAGVVVINKDQDIIKCMARIARFYKHESCGQCTPCREGSGWMWRMLERMAKGEASKDEIDMLGDVTKQIEGHT

SEQ ID NO: 101507 - protein, 173 aa, Unknown
  Bacterial polypetide isolated from the Sargasso Sea
MNLQDKKKDIPDEFKQLAQDFSDNGFITTSLDNLVNWARTGSLHWMTFGLACCAVEMMQTSMPRYDLERFGAAPRASPRQSDVMIVAGTLTNKMAPALRKVYDQMPEPRYVISMGSCANGGGYYHYSYSVVRGCDRVVPVDVYVPGCPPSAEALLYGILQLQKKIRNKGSLER

SEQ ID NO: 101508 - protein, 178 aa, Unknown
  Bacterial polypetide isolated from the Sargasso Sea
MGVKFDLNADKQKQIPEEFKDLAKDFAEKGFITTSSENLINWARTGSLHWMTFGLACCAVEMMQTSMPRYDLERFGAAPRASPRQSDVMIVAGTLTNKMAPALRKVYDQMPEPRYVVSMGSCANGGGYYHYSYSVVRGCDKIVPVDIYIPGCPPSAEALLYGILQLQKKIRREGNLQR

SEQ ID NO: 101509 - protein, 333 aa, Unknown
  Bacterial polypetide isolated from the Sargasso Sea
PKDSEKDHYLVVNADESEPGTCKDREIMRNDPHLLLEGCFVAGFAMHAHTCYIYIRGEYYSESSNLQKAIDEAYANNLIGKNACGTGWDFDIYLHRGAGAYICGEETALLESLEGKKGQPRLKPPFPAGAGLYGCPTTVTNVETIAVSPTILRRGSKWFANLGSANNTGTKIFSISGHVNNPCNVEEEMGIPLKDLIEKHAGGVIGGWENLLAVIPGGASVPLLPKSICDTVKMDFDSLKEVQSGLGTAAVIVMNKSTDIVEAIARLSHFYKHESCGQCTPCREGTGWMYRMMEKMIHGNVKHEDIDKILDVTKQIEGHTICALGDAAAWPIQ

SEQ ID NO: 101510 - protein, 443 aa, Unknown
  Bacterial polypetide isolated from the Sargasso Sea
MLKDQDRIFKNLYNDMGADVAAAQTRGDWVNTSDLTSKGRDWIINEIKDSQLRGRGGAGFPTGLKWSFAPKEVGSRPHYLVINADESEPGTCKDRDILRFEPHKLIEGCLIASYAVQAHVCYIYIRGEYFIEGQKLQTAIDEAYEKKLLGKDAAGTGWDLDIYIHYGAGAYICGEETALLESIEGKKGQPRLKPPFPALIGLYGCPTIINNVETIAVVPTILRRGGKWFSSLGREKNTGTKIFCISGNVNNPCNVEEEMNIPLKELIEVHAGGVIGGWENLQAVIPGGSSMPLIPKEKCETLTMDFDSLMAEKSGLGTAGIVVINKDQDIIKCMARIARFYKHESCGQCTPCREGSGWMWRMLERMAKGDATKDEVEMLGDVTNQIAGHTICAFGEGSSWPVQGLLRHFKKEIEERNNLDPIVQKKNNIPYLVDQHLLDKKNA

SEQ ID NO: 101511 - protein, 171 aa, Unknown
  Bacterial polypetide isolated from the Sargasso Sea
MNNKIDQVPDEFKQLADDFSKNGFITTSLDNLINWSRSGSLHWMTFGLACCAVEMMQTAMPRYDLERFGAAPRGSPRQSDVMIVAGTLTNKMAPALRKVYDQMPEPRYVISMGSCANGGGYYHYSYSVVRGCDRIVPVDIYVPGCPPSAEALLYGILQLQKKIRNKGSITR

SEQ ID NO: 101512 - protein, 99 aa, Unknown
  Bacterial polypetide isolated from the Sargasso Sea
EASPRQSDVMIVAGTLTNKMAPALRKVYDQMPEPRYVISMGSCANGGGYYHYSYSVVRGCDRIVPVDVYVPGCPPSAEALLYGIMQLQKKIRNKGSIDR

SEQ ID NO: 101513 - protein, 173 aa, Unknown
  Bacterial polypetide isolated from the Sargasso Sea
MNLTEKQKKIPDEFKELAKEFGEKGFITTSLDNLVNWARTGSLHWMTFGLACCAVEMMHTSMPRYDLERFGAAPRASPRQSDVMIVAGTLTNKMAPALRKVYDQMPEPRYVISMGSCANGGGYYHYSYSVVRGCDRIVPVDVYVPGCPPSAEALLYGIMQLQKKIRNKGSIQR

SEQ ID NO: 101514 - protein, 171 aa, Unknown
  Bacterial polypetide isolated from the Sargasso Sea
MIDREKQIPEEFKDLAKEFADKGFITTSMDNLINWARSGSLHWMTFGLACCAVEMMQTSMPRYDLERFGAAPRASPRQSDVMIVAGTLTNKMAPALRKVYDQMPEPRYVISMGSCANGGGYYHYSYSVVRGCDRIVPVDVYVPGCPPSAEALLYGILQLQKKIRNRGSLQR

SEQ ID NO: 101515 - protein, 252 aa, Unknown
  Bacterial polypetide isolated from the Sargasso Sea
LKPPFPALVGLYGCPTIVNNVETIAVVPTILRRGGKWFSSIGKPKNTGSKIFCISGNVNFPCNVEEEMGIPLKELIEKYAGGVIGGWENLQAVIPGGSSMPLLPKKICDTITMDFDSLVENKSGLGTAGIVVINKQQDIVACMTRIARFYKHESCGQCTPCREGAGWMWRILDRVVKRKATFSDIDLLSDVTKQIEGHTICAFGEGSAWPVQGLLRHFRKEIESRCREEPLIKKKTNNPYLIDQHLLENKNA

SEQ ID NO: 101516 - protein, 296 aa, Unknown
  Bacterial polypetide isolated from the Sargasso Sea
YSESSNLQKAIDEAYANNLIGKNACGTGWDFDIYLHRGAGAYICGEETALLESLEGKKGQPRLKPPFPAGAGLYGCPTTVTNVETIAVSPTILRRGSKWFANLGRANNTGTKIFSISGHVNNPCNVEEEMGIPLKDLIEKHAGGVIGGWENLLAVIPGGASVPLLPKSICDTVKMDFDSLKEVQSGLGTAAVIVMNKSTDIVEAIARLSHFYKHESCGQCTPCREGTGWMYRMMEKMIHGNVKYKDIDKILDVTKQIEGHTICALGDAAAWPIQGLFRHFRPEIEKRIQERNRRVA

SEQ ID NO: 101517 - protein, 419 aa, Unknown
  Bacterial polypetide isolated from the Sargasso Sea
MRENPEDSHLIDSYEKNGGYETARKTLINGSPENVLEEIKASNIRGRGGAGFPTGVKWGFLAENEDRYLVINADESEPGTFKDRILLERDPHQLIEGIIITCFAANIKNAFIYIRGEYAKPARRVQDAVDQAYQKGYLGKNIFNSEMNLDLVVHLGAGAYICGEETALLNSLEGRRGEPRLKPPYFPAVKGLYMKPTLVNNVETISSVPWIMENTGKEYNKLGVEGSTGTRIFSLSGHVNNPGNYEIEMGSSFGEFVESLGNGIRNNKKVKAYIPGGASAPWFRGDQLDIKMTIDDVANNNSMLGSGAVVMMDEDTNLVNAAKSIVSFFAHESCGQCTPCREGTTWLEMILDRVASGRGRASDIDLLLDVCDNISPGLSWPPKMTTICPLGPSAVSPITSLMNDFREEVESLIPTKVLL

SEQ ID NO: 101518 - protein, 398 aa, Unknown
  Bacterial polypetide isolated from the Sargasso Sea
MLKDQDRIFQNLYNDKGSDVSSSQERGDWVNTKEITDKGRDWIINEIKESQLRGRGGAGFPTGLKWSFAPKEVGSRPHYLVINGDESEPGTCKDRDILRFEPHKLIEGCLIASYAVQAHVCYIYIRGEYFVDGQKLQAAIDEAYEKKLLGKNAAGTGWDLDIYIHYGAGAYICGEETALLESLEGKKGQPRLKPPFPALIGLYGCPTIINNVETIAVVPTILRRGAKWFASLGREKNTGTKIFCISGNVNTPCNVEEEMNIPLKELIEVHAGGVIGGWDNLQAVIPGGSSMPLIPKEKCETLTMDFDSLMAEKSGLGTAGIVVINKDQDIIKCMARIARFYKHESCGQCTPCREGSGWMWRMLERMAKGDATKDEVDMLGDVTNQIAGHTICAFGEGS

SEQ ID NO: 101519 - protein, 643 aa, Unknown
  Bacterial polypetide isolated from the Sargasso Sea
MISFLSLFIVFSPLLGALFLLFYPNKSDFISSIIANISVGISFLFSLFLLIKYFFDNDNQTLVHLFTWLNLNNFIFEFAFMIDSLTVIMSFIVTFISFFVHIFSIGYMKGDSSFNRFLIYTNFFTFSMLLIVFADNFLQLFIGWELVGLSSYLLIGFWYKKESAIKANLKAFIVNRIGDIGLLLGVIMIFVFSNTLNYNEFFLTLPNLSNIDISIFGFSLDLLPLIALLLFIGASAKSAQIPLHFWLPDSMEGPTPISALIHAATMVTAGIFMVARLSPLYDLSSYVLDIILYIGILTAFLMGLVALIQNDIKRIIAYSTISQLGYMTVALGASFYSFAIFHLLTHAFFKALLFLCAGSIILKCHHEQDITKMGGLRKLMPYTFYTFVIAALALIGFPFTSGFFSKDLIIDIFKYEENYAVYYILVFGILITTLYTAKIFFHVFFGENKMRIKDSQNIEHDDVILIPLVSLAIPSLLIGIALFDNILFSGFFSTSITDNSRILLMYENFINNSMTFTLNSFLSLNFMSLIIGLVLSYFIYYKKQYSSINIFKKSGRIYSILSAEYGFKNLSDIHVPNLFKNLSRVMWKTYDELLIDKLIVNGIANKIQYISMQIRRIQTGFIYHYAFVMIISLMTLLWIFFGL

SEQ ID NO: 101520 - protein, 168 aa, Unknown
  Bacterial polypetide isolated from the Sargasso Sea
MNLEERKKNIPEEFKQLAQDFSDNGFITTSLDNLVNWARTGSLHWMTFGLACCAVEMMQTSMPRYDLERFGAAPRASPRQSDVMIVAGTLTNKMAPALRKVYDQMPEPRYVISMGSCANGGGYYHYSYSVVRGCDRIVPVDVYVPGCPPSAEALLYGIMQLQKKIRNK

SEQ ID NO: 101521 - protein, 178 aa, Unknown
  Bacterial polypetide isolated from the Sargasso Sea
MGIKFSLDSEKENKIPEEFKDLAKDFAEKGFITTSSENLINWARTGSLHWMTFGLACCAVEMMQTSMPRYDLERFGAAPRASPRQSDVMIVAGTLTNKMAPALRKVYDQMPEPRYVVSMGSCANGGGYYHYSYSVVRGCDKIVPVDIYIPGCPPSAEALLYGILQLQKKIRREGNLQR

SEQ ID NO: 101522 - protein, 171 aa, Unknown
  Bacterial polypetide isolated from the Sargasso Sea
MNNKLNQVPEEFKQLAKDFSENGFITTSLDNLINWSRSGSLHWMTFGLACCAVEMMQTAMPRYDIERFGAAPRGSPRQSDVMIVAGTLTNKMAPALRKVYDQMPEPRYVISMGSCANGGGYYHYSYSVVRGCDRIVPVDVYVPGCPPSAEALLYGILQLQKKIRNKGSINR

SEQ ID NO: 101523 - protein, 220 aa, Unknown
  Bacterial polypetide isolated from the Sargasso Sea
MLKDEDRIFKNLYNDLGSDIDSAIKRDDWKNTKEICEKGRDWIINEIKTSELRGRGGAGFPTGLKWSFAPKEVGSRPHYLVINADESEPGTCKDRDILRFEPHKLIEGCLLSSYAVNAHVCYIYIRGEYYNEGRKLQQAIDEAYEKGFIGINASGTGWDLDIYIHYGAGAYICGEETALLESLEGKKGQPRLKPPFPALIGLYGCPTIINNVETIAVVPT

SEQ ID NO: 101524 - protein, 429 aa, Unknown
  Bacterial polypetide isolated from the Sargasso Sea
MGVESVDAAFLIVLAPFLAFPIILVSGQLYNGNSTWKQNLKEGGVIGLSALLVSLTTALWVVIDYLRGAREIAKDPSGNVATSWGDWISFDVLLSDYSMSSGRVIGVGVWVDSVTLMLLFVATFLCFLICWFSLGYMNTDPINEDRNHRFYAEFVLFAMGMFGMVLADNFLWLFIFWEIMGLCSYLLIGFYFWKESAAYAAKKAFLTTRVGDVFLMVGLLILYDIYGSLEFSVIFEDPSLNGTVDSDKLFWALLMLFIGAVGKSAQFPLHVWLPDAMEGPTPVSALIHAATMVNAGLYLVARMVPFVDVGAHGVDGLSELGLIVAYIGGITAFMAASIAFVQNDIKKVLAYSTMSQLAYIFTGLGVALWFYNNGKTEAATLVFGGAMFHLFNHAMAKGMLFMASGSVIHEVHHAHDHLHEGEGHDHHDD

SEQ ID NO: 101525 - protein, 443 aa, Unknown
  Bacterial polypetide isolated from the Sargasso Sea
MLKDQDRIFQNLYNDKGSDVSSSQERGDWVNTKEITDKGRDWIINEIKESQLRGRGGAGFPTGLKWSFAPKEVGSRPHYLVINADESEPGTCKDRDILRFEPHKLIEGCLIASYAVQAHVCYIYIRGEYFVDGEKLQAAIDEAYEKKLLGKNAAGTGWDLDIYIHYGAGAYICGEETALLESLEGKKGQPRLKPPFPALIGLYGCPTIINNVETIAVVPTILRRGAKWFASLGREKNTGTKIFCISGNVNNPCNVEEEMSIPLKELIEIHAGGVIGGWENLQAVIPGGSSMPLIPKERCETLKMDFDACVEEKSGLGTAGIVVINKDQDIIKCMARIARFYKHESCGQCTPCREGSGWMWRMLERMAKGDATKDEVDMLGDVTNQIAGHTICAFGEGSSWPVQGLLRHFKKEIEKRNNLDPIVQKKNNIPYLVDQHLLDKKNA

SEQ ID NO: 101526 - protein, 443 aa, Unknown
  Bacterial polypetide isolated from the Sargasso Sea
MLKDEDRIFQNLYNDSGVDIKSAKLRNDWNGTKEILEKGREWIINEVKSSELRGRGGAGFPTGLKWSFAPKEVGSRPHYLVINADESEPGTCKDRDILRFEPHKLIEGCLIASYAVNAHKCYIYIRGEYFNEGQKLQTAIDEAYKNNLIGKNALNSGWDLDIYIHYGAGAYICGEETALLESLEGKKGQPRLKPPFPALIGLYGCPTIINNVETVAAVPTILRRGAKWFSSLGRAKNTGTKIYCISGNVNNPCNVEEEMGVPLKELIETHAGGVVGGWDNLKAVIPGGSSMPMLPKEICDNMKMDFDACVENKTGLGTAGIVVINNDQDIIKCMARIARFYKHESCGQCTPCREGSGWMWRMLERMAAGEATPDEVDMLFDVTKQIEGHTICAFGEGSSWPVQGLIRHFKDEILERNKFDPVVKKNKNIPYLVDQHLLEKENA

SEQ ID NO: 101527 - protein, 173 aa, Unknown; identical to SEQ ID NO: 101465
  Bacterial polypetide isolated from the Sargasso Sea

SEQ ID NO: 101528 - protein, 178 aa, Unknown
  Bacterial polypetide isolated from the Sargasso Sea
MGLNFSNFKDKEKQIPEEFKKIAKDFSEKGFVTTSSENLINWARTGSLHWMTFGLACCAVEMMQTSMPRYDLERFGAAPRASPRQSDVMIVAGTLTNKMAAPLRKVYDQMPEPRYVISMGSCANGGGYYHYSYSVVRGCDKIVPVDIYVPGCPPSAESLLYGILQLQKKIRREGTQKR

SEQ ID NO: 101529 - protein, 447 aa, Unknown
  Bacterial polypetide isolated from the Sargasso Sea
MLKDEDRIFKNLYNDLGADLNSSKKRGDWTNTKDLCEKGRDWIIDEIKKSELRGRGGAGFPTGLKWSFAPKEVGSRPHYLVINADESEPGTCKDRDILRFEPHKLLEGCLIAAYAVNSHKCYIYLRGEYCNEGIELQKAIDEAYKDNLIGKNASGTGWDLDIYIHYGAGAYICGEETALLESIEGNKGQPRLKPPFPALVGLYGCPTIVNNVETVSVVPTILRKGSKWFASLGKPKNTGTKIFCISGNVNKPCNVEEEMGVPLKDLIETHAGGVVGGWENLQAVIPGGSSMPLLNKEISEKITMDFDSLVENKSGLGTAGIVVINKDQDIIKCFARIARFYKHESCGQCTPCREGSGWMWRILERMAKGEASREEVEMLFDVTKQIEGHTICAFGEGSAWPVQGLLRNFKKEIIKRNNFDPLIKSNKDIPYLVDQHLLEKDNAQNKS

SEQ ID NO: 101530 - protein, 171 aa, Unknown
  Bacterial polypetide isolated from the Sargasso Sea
MNDKIEQVPEEFKQLAKDFSKNGFITTSLDNLINWSRSGSLHWMTFGLACCAVEMMQTAMPRYDLERFGAAPRGSPRQSDVMIVAGTLTNKMAPALRKVYDQMPEPRYVISMGSCANGGGYYHYSYSVVRGCDRIVPVDVYVPGCPPSAEALLYGILQLQKKIRKKGSFLR

SEQ ID NO: 101531 - protein, 184 aa, Unknown
  Bacterial polypetide isolated from the Sargasso Sea
MEEGRIRMGVMLGDNTAGADLENSTRELNNQLQDKGFLVTSTEDIINWARTGSLHWMTFGLACCAVEMMHTSMPRYDLERFGTAPRASPRQSDLMIVAGTLTNKMAPALRKVYDQMPEPRYVISMGSCANGGGYYHYSYSVVRGCDRIVPVDVYVPGCPPTAEALLYGILALQKKIRRTGTIKR

SEQ ID NO: 101532 - protein, 171 aa, Unknown
  Bacterial polypetide isolated from the Sargasso Sea
MNKKIEQVPEEFKQLAEDFSKNGFITTSLDNLINWSRSGSLHWMTFGLACCAVEMMQTAMPRYDVERFGAAPRGSPRQSDVMIVAGTLTNKMAPALRKVYDQMPEPRYVISMGSCANGGGYYHYSYSVVRGCDRIVPVDVYVPGCPPSAEALLYGILQLQKKIRNKGSFIR

SEQ ID NO: 101533 - protein, 144 aa, Unknown
  Bacterial polypetide isolated from the Sargasso Sea
MNNKIDQVPEEFKQLAEDFSKNGFITTSLDNLINWSRSGSLHWMTFGLACCAVEMMQTAMPRYDLERFGAAPRGSPRQSDVMIVAGTLTNKMAPALRKVYDQMPEPRYVISMGSCANGGGYYHYSYSVVRGCDRIVPVDVYVPG

SEQ ID NO: 101534 - protein, 171 aa, Unknown
  Bacterial polypetide isolated from the Sargasso Sea
MNNKLDQVPDEFKKLAEDFSKNGFITTSFDNLINWSRSGSLHWMTFGLACCAVEMMQTAMPRYDLERFGAAPRGSPRQSDVMIVAGTLTNKMAPALRKVYDQMPEPRYVVSMGSCANGGGYYHYSYSVVRGCDKIVPVDIYIPGCPPSAEALLYGILQLQKKIRREGTSQR

SEQ ID NO: 101535 - protein, 147 aa, Unknown
  Bacterial polypetide isolated from the Sargasso Sea
ITTSSENLINWARTGSLHWMTFGLACCAVEMMQTAMPRYDLERFGAAPRASPRQSDVMIVAGTLTNKMAAPLRKVYDQMPEPRYVISMGSCANGGGYYHYSYSVVRGCDRIVPVDIYVPGCPPSAEALLYGILQLQKKIRREGSLER

SEQ ID NO: 101536 - protein, 314 aa, Unknown
  Bacterial polypetide isolated from the Sargasso Sea
NVCYIYIRGEYIREREALQAAIDEAYEAGLIGKNASKSGWKFDLFLHHGAGAYICGEETALLESLEGKKGMPRMKPPFPAGAGLYGCPTTVNNVESIAVVPTILRRGADWFSKFGRENNAGTKLFTISGHVNNPCVVEEEMSIPFEELIERHCGGIRGGWKNLKAVIPGGASVPCVRGGEMREALMDFDYLRGELGSGLGTAAVIVMDQSTDVIKAIWRLSKFYKHESCGQCTPCREGTGWMMRVMERLVNGDADPSEIDMLLDVTKQVEGHTICALGDAAAWPIQGLIKNFRDEIEDRLKNQSSMQNSLVAAQ

SEQ ID NO: 101537 - protein, 263 aa, Unknown
  Bacterial polypetide isolated from the Sargasso Sea
MLKDKDRIFTNIYGWHGSDLKSAQSRGDWQGTKEVIKLGHDKIIEIIKDSGLRGRGGAGFPSGLKWSFMPKEVKERPHYLVVNADESEPGTCKDRDIIRHEPHKLIEGCLLAGFAMRAHCAYIYIRGEFYNEAFVLQKAIDEAYDKKLLGNNACGSGWKFDVFLHRGAGAYICGEETALLESLEGKKGQPRLKPPFPAGVGLYGCPTTVNNVETIAVSPTILKRGAKWFASLGRENNTGSKLFCISSHVNQPCNVERRNGDFS

SEQ ID NO: 101538 - protein, 408 aa, Unknown
  Bacterial polypetide isolated from the Sargasso Sea
QGGYEAWEKILKGDLSPDDVIEEVKSSGLRGRGGAGFPTGLKWSFMPRSQPGQKYLVCNSDESEPGTCHDRETLRKNPHSLVEGMAIASYAMGVTVAYNYIRGEFIDEPVPRFKKAVKEAYESGYLGKNIKDSGIDFDLHTFVGAGAYICGEETALLESLEGKQGKPRFKPPFPANYGLYGKPTTINNTQSLASVPSIIRKGADWFRELGVENSGGTAQFSVSGHVENPGNYELPMGIPFKDLLSICGGMLGGRKLKAVIPGGSSCPVMPAEAILNCTMDYDSLKDAGSSFGTGAVIVMDETTCMVQVLRRIARFYMAESCGQCTPCREGTGWLYRMLTRITEGQGQMEDITKLVEVANKIEGHTICALGDAAAWPVQSFLKHFHDEFEYMVKNKGKSIIDNNNEAAA

SEQ ID NO: 101539 - protein, 294 aa, Unknown
  Bacterial polypetide isolated from the Sargasso Sea
GKNASGTGWEFDIYIHYGAGAYICGEETALLESLEGKKGQPRLKPPFPALIGLYGCPTIINNVETISVVPTILRRGAKWFSSIGRAKNTGTKIYCISGNVNNPCNVEEEMGIPLKDLIEKHAGGVVGGWDNLKAVIPGGSSMPLLPKKICDTIKMDFDECIENKTGLGTAGIVVINCDQDIIKCMARIARFYKHESCGQCTPCREGSGWMWRMLERMAKGEATRDEVEMLMDVTKQIEGHTICAFGEGSAWPVQGLIRNFKEEIIKRNNINPIFEEKKDIPYLIDQHLLEKENA

SEQ ID NO: 101540 - protein, 322 aa, Unknown
  Bacterial polypetide isolated from the Sargasso Sea
YVYIRGEYIKEGKRLQEAIDEAYSKNLIGKNACNSGWDLDIYIHYGAGAYICGEETALLESLEGNKGQPRLKPPFPALVGLYGCPTIVNNVETIAVVPTILRRGAKWFASMGRPKNTGTKIFCISGNVNAPCNVEEEMGIPLKELIEKHAGGVIGGWKNLQAVIPGGSSMPMVPKDICETLRMDFDSLVEVKSGLGTAGVVVINKDEDIVKCMARIARFYKHESCGQCTPCREGAGWMWRILERTAKGEATHKDIDLLSDVTKQIEGHTICAFGEGSAWPVQGLLRHFRKEIDKRCFSEPTIKKKRKIPYLIDQHKLESKDA

SEQ ID NO: 101541 - protein, 546 aa, Unknown
  Bacterial polypetide isolated from the Sargasso Sea
FFVHVYSITYMQKDISFKRFFIYTNFFTFSMLVIIFSNNFLQLFIGWELVGLSSYLLIGFWHKKESAIKANLKAFVVNRIGDIGLLLGVLLVFISTKSLSYNILFNNLALLTDEVVILFNYDFEIIPLIAVLLFIGAAAKSAQVPLHFWLPDSMEGPTPISALIHAATMVTAGIFMVARLSPLYDLSFYVLDIILITGLITAFFMGIVALVQNDIKRIIAYSTISQLGYMTVALGASFYSFAIFHLLTHAFFKALLFLCAGSIILKCHHEQNINKMGGLRFSMPITFLTFTVAGLSLIGFPGMSGFFSKDLIIDIFKYNNNYIIYYILVASIVITTLYTSKIFFKVFFGTNKLKVQKSDGLEHNKTLLVPLIILAAPSAIIGWALFDTLIFNNFFLDSITDNSTLNYFYQNYIIHSVNFFLHSFSSLSFLALLIGLLLSYFHYYKKNTVSHNFLVKIPVIKNILLNEYGFNHLSNFVIPNNIKKISDFLWKKADISLIDNTFVNGSANIVSLISNKIRLLQTGYIYHYAFIMIIGLLFFLIIFYDF

SEQ ID NO: 101542 - protein, 127 aa, Unknown
  Bacterial polypetide isolated from the Sargasso Sea
TFGLACCGVEMMHSYMSRYDLDRYGVIPRGSPRQSDVMIVAGTLTNKMAPALRKVYDQMPEPRWVISMGSCANGGGYYHYSYSVVRGCDRIVPVDIYVPGCPPTAEALVYGILQLQKKIKRQNKYSS

SEQ ID NO: 101543 - protein, 474 aa, Unknown
  Bacterial polypetide isolated from the Sargasso Sea
IDTLTAVMLVVVNTVSAVVHFYSIGYMHDDPSRQRFFSYLSLFTFAMLMLVTSNNFLQLFFGWEGVGLASYLLIGFWHHKESANNAAIKAFIVNRVGDFGFALGIFCIFYFFGSLDFNTVFSNASDLVDKKINIFGNSIGAISFICFLLFIGAMGKSAQFLLHTWLPDAMEGPTPVSALIHAATMVTAGVFLVARCSPLYELAPSIMSFIVFIGATTAIFAASVALVQNDIKKVIAYSTCSQLGYMFVALGVGAYQVGIFHLFTHAFFKALLFLGAGSVIHAMSNEQDMRYMGGLRKFIPKTYILMLVGTLALTGFGIPGLFGMAGFYSKDAIVEAAYVSSLGIGSYAFTMLLVAALMTSFYSWRLIFMTFHGTPRASKEVMSHLHESPNIMLIPLIILVIGSIFSGYVFYDSFIYAGFKEFWASSIFILKDNYILKELHDVSYLIKWSPTIMMIIGFTVAYYLYIRNPHIPQK

SEQ ID NO: 101544 - protein, 156 aa, Unknown
  Bacterial polypetide isolated from the Sargasso Sea
AEDFSKNGFITTSLDNLINWSRSGSLHWMTFGLACCAVEMMQTAMPRYDLERFGAAPRGSPRQSDVMIVAGTLTNKMAPALRKVYDQMPEPRYVISMGSCANGGGYYHYSYSVVRGCDRIVPVDIYVPGCPPSAEALLYGIMQLQKKIRNKGSISR

SEQ ID NO: 101545 - protein, 362 aa, Unknown
  Bacterial polypetide isolated from the Sargasso Sea
INADESEPGTCKDRDILRFEPQKLIEGCLIAGYAVNAHICYIYIRGEYFNEGRRLKEAIDQAYEKNFLGKNACGSGWDFDIHIHYGAGAYICGEETALLESIEGNKGQPRLKPPFPALVGLYGCPTIVNNVETIAVVPTILRRGGKWFASIGKPKNTGTKIFCISGNVNSPCNVEEEMGIPLKELIDKHAGGVVGGWENLQAVIPGGSSMPLLPKKICDTITMDFDSLIENKSGLGTAGIVVINKDQDIIACMARIARFYKHESCGQCTPCREGAGWMWRILDRVVKRKATFSDINLLSDVTKQIEGHTICAFGEGSAWPVQGLLRHFRKEIDSRCRDEPLIKKRTNNPYLVDQHLLENKNA

SEQ ID NO: 101546 - protein, 288 aa, Unknown
  Bacterial polypetide isolated from the Sargasso Sea
MWAGAKNIVPESAPMGLNPKKWMRLKIQDKVPLSHDSILLRLALESDAHQCGIPVGYHVYLRGEWNGKKIMRAYTPSSLNGTLGAVELVIKIYYSDAHEAYPEGGALTQYLHHLNEGDAIDVKGPVGHIRYLGNGDFTIDKKPLPRATKMTLLGGGTGVAPMLQLLVAALADESDETEISFIYANKTEDDVLLKYTLDRLEREHPKRFRVHYMISKETWPAERKTGAEWSSDRVEYGRVSLPVIRARGFPANGTSHVAVMCGPPAFEEDTCVPALLELGYPKEAIIRY

SEQ ID NO: 101547 - protein, 254 aa, Unknown
  Bacterial polypetide isolated from the Sargasso Sea
MLGHLAVQTASGRSVPLNQVATLESGFEEGIIWHRDRLPTVTVLADVKGDVLPATLMQQIMPELSQVQADLPPGYLLEVGGTVEESARGQKSVNAGMPLFILVVITLLMLQLRSFPLSLMVFITAPLGLIGVTFFLLLFQKPFGFVAMLGTIALAGMIMRNAVILVDQIGQDMEQGLTAWDAIIESTVRRFRPIVLTALTAVLAMIPLSRSVFFGPMAVAIMGGLIVATALTLLFLPALYAAWFRVKEEHADAQ

SEQ ID NO: 101548 - protein, 130 aa, Unknown
  Bacterial polypetide isolated from the Sargasso Sea
KVWYVADAEGKTLGRFASEIAKVLRGKHKPTFTPNLDMGDFVVVVNAEKVNLSGKKNTDKTYFKHTGYIGSKTFTKLDQIRKIHPERIVEKAVWGMLPKNRLGRSIIKNLKVYSGPQHPHMAQQPKELIT

SEQ ID NO: 101549 - protein, 226 aa, Unknown
  Bacterial polypetide isolated from the Sargasso Sea
IKVTDRESNNFYHFNDNRVLPPPVDAERATEEGWWFKPEFIINQLNINGAIAYPAPEEIIPKSKKTYEFRGYAYSGGGRKVIRAELSFDQGLSWQLADINVREQPRWADFGSGDKARHWCWCHWSMEVPVEKLLDPKCVEVCFRAVDQSMNKMDERPTWNVMGMLNNPWYRIRVHRAPNGDARVEHPCIAGPTPGGWMQKMAAERPTGELLWGWGGEGTPAAPPAE

SEQ ID NO: 101550 - protein, 785 aa, Unknown
  Bacterial polypetide isolated from the Sargasso Sea
SYWGSHEIVINTVFNEYGCILVGAAGNYGVYEPHYPAAYENVISVTATSMNNYFNCWPNFHETVDIAAPGEDIWTTVPFTGNGMRYQEVTGTSFSSPTVAGGIALLKTIFPNADNQMLVSNILNSASYFIGMDGSCSGQDLDGLLGSGQLNIYGAITNDIEPNILPINVAVLSESGLCAPGDTDQVVFSLANSYGGAPLENIIVTLASNDSLVTIINNEFSYGQILGSENHFEAEFLISSSENMNYGDIPFILTIDAEISGNIPSGISFDHYQSNMEVDIPFGFNQDGYPIDDINVYGSPIITDLYGNSAPQIFFTTDSTVYGKWMSGFDVLGFPIHISSKVSTTVAAGDLDGDNDKELVFGTEIGDLYVLNKDASQFMVFSQNDQIVSYPVLYDFEESSELEILFISKNDSISSVHVIDILGEYLNGFPMMIEGDLSNGAAVTDMDLDGLGDIIVVTLDGVLYAIQNDGSIRPDFPIFLPSNVNTPVTLANMDEDINIEIIVGLEEGGIHILNNDGSLMTNYEIEGASVDGGLSVADLDQDGSMEVVFNTDDHYLHVWEPESNSEIDGWPVHIGEISVTEPIIKDLNNDLNLEIINTTITGDIHIFNRDGSRYDNFPYISNDSTLFTPAVGDLDQDGDIEIIVGTNNNLKVLDILDDLGEQYSWSTYRGNAHRDGFYDASQSYLKNEKEILPINFELRDNYPNPFNPSTKITVSIDREMFMSLIIYDVAGRYITTLFSEIINSGESSVIWNGRDDHGKKVSSGIYFYELRSEMNTKAKKMVLIK

SEQ ID NO: 101551 - protein, 127 aa, Unknown
  Bacterial polypetide isolated from the Sargasso Sea
GGCTCPGDVSKGFGGGADFVMLGGMFAGHDEGEGKIVKSNGSKYIEFYGSSSETANKKHYGGLSNYRSSEGRTVRVKYRGKIKDTIQDILGGIRSSCTYVGAPSLKQLSKCTTFVRVTRQFNDTFAQ

SEQ ID NO: 101552 - protein, 264 aa, Unknown
  Bacterial polypetide isolated from the Sargasso Sea
MIEDFNNNEKKDINFKSLGLKIFFSLGLVVICYNLFFSSTNTSIKLIDIEKKEKIIKEFGYILNDYEVKRDTIQNGDSFGEILENNNLFYPKIYNIVQATNKVFNIRKINVGRPYTILYSKDSLKTPKVFIYQPNPVDYVIVSLSDSIWAEKKQKKVELKEFQASGTIYSSLSETMESLKLSPLLTNELSEIYAWNIDFFRLEKGDNFKIMYTSRYVNDSVYIGLNRIHNAFFEHRGKPFYAVEFKTDSLRNIYEYFDENGKNL

SEQ ID NO: 101553 - protein, 160 aa, Unknown
  Bacterial polypetide isolated from the Sargasso Sea
MRIEEEIKLDYSDVLFRPKRSTLKSRSEVDLKRKYKFKHSKLNWEGIPIIASNMDGVGEIGVASKLASFNMMTALTKQHGDKEIRILQKNKLIHNHVALSCGTSKGSYLRLNNLLKKNPKFKFVCIDVANGYSENFSQFVSEVRKKHPKKTIIAGNVVTA

SEQ ID NO: 101554 - protein, 226 aa, Unknown
  Bacterial polypetide isolated from the Sargasso Sea
KFICIDVANGYTEQFSDFIKQVRAEFEEKIIIAGNVCTPEMTEQLILSGADIVKVGIGGGSACITRNVAGVGIPQLSAVIDCSDAAHGIGGMVMSDGGCTCSGDISKAFGANADFVMLGGLLAGHDENSDKVIVDEETGEKSVKFYGMASNNALEKFYSNKIKIDYKASEGKLVNIPYKGPLEDTLLDLLGGVRSTCTYIGAKKIKDISKCTTFVCVNNQLNNYFN

SEQ ID NO: 101555 - protein, 166 aa, Unknown
  Bacterial polypetide isolated from the Sargasso Sea
IGPGSACLTRMKTGVGVPQLSAIIECSDAAHGLGGFIIGDGGITCPGDMSKAFGGGADFVMMGGQFAGHDENPGEVIEENGKQMKLFYGMSSEHAMKKHYGKMANYRSSEGREIKIPYKGPLENTILDYLGGVRSTCTYINAKCIKHIPKCTTFILANQQLNTHFV

SEQ ID NO: 101556 - protein, 286 aa, Unknown
  Bacterial polypetide isolated from the Sargasso Sea
MKIENEVKLDFIDVLIRPKRSTLSSRSQVNLVKTVNFVNSGQSWTGVPIITSNMDTIGTFQMYNTLKEYKIITCLSKHYTLEDFPDNLDKEYYMLSTGISDAEYDKLTTLIATLHPKFICVDVANGYMKKLVSFVRKLRDNYPTIVIACGNVVSREMVEELILNGGADIVKVGIGSGSVCTTRLQTGVGMPQLSAVLECSDAAHGINGAIISDGGITCPGDISKALGGGADFVMLGSMLSGHEECLGELIDEDGVKYKLFYGMSSANAMNKYHGGVAKYRSSEGKC

SEQ ID NO: 101557 - protein, 215 aa, Unknown
  Bacterial polypetide isolated from the Sargasso Sea
MRIEDEIKLTFDDVLIRPKRSTLISRSEVKLEREFKFRHNKHTWEGIPIFSANMDTTGTFETAKALQKHKMLTAIHKFYTLNDWKDNIDSLDPNYVSVTVGQSQEDYDLGKQIFELSKDLKFLCIDVANGYREDFLEAVKKYRETYKDKIIIAGNVATREMTEALILAGADIVKIGIGPGSVCTTRSVAGVGYPQLSSISECSDAAHGLGGHVLA

SEQ ID NO: 101558 - protein, 190 aa, Unknown
  Bacterial polypetide isolated from the Sargasso Sea
MRIEEDIKLDYADVLFRPKRSTLHSRKDVKLQRTYKFKYSNHEWSGVPLMAANMDGVGELQMAEKLAEHQIMTCLTKQHDFKTIKKFSSINKIFPHVVLSTGTSDEDYKRLNEILKEYSFFEFICIDIANGYSDHFSKFVSSVRKKYPTKTIIAGNVVTADMTQELILAGADIVKVGIGPGSVCTTRIQT

SEQ ID NO: 101559 - protein, 115 aa, Unknown
  Bacterial polypetide isolated from the Sargasso Sea
FGGGADFVMLGGMLAGHDEGKGKLVKSNGSKFIEFYGSSSETANKKHYGGLSDYRSSEGRTVRVKYRGKITETIKDILGGVRSSCTYVGAPSLKQLSKCTTFVRVTKQFNDTFVK

SEQ ID NO: 101560 - protein, 222 aa, Unknown
  Bacterial polypetide isolated from the Sargasso Sea
MFFHDLGEDLKQFNFICIDVANGYTEQFSDFIKQVRAEFDKKIIIAGNVCTPEMTEQLILSGADIVKVGIGGGSACITRNVAGVGIPQLSAVIDCSDAAHGIGGMVMSDGGCTCSGDISKAFGANADFVMLGGLLAGHDENSEKITVDEETGQKSVKFYGMASSNALEKYYSDSIKIDYKASEGKLVNIPYKGRLEDTLLDLLGGVRSTCTYIGAKKIKDIS

SEQ ID NO: 101561 - protein, 127 aa, Unknown
  Bacterial polypetide isolated from the Sargasso Sea
GGCTCPGDVSKAFGGGADFVMLGGMLAGHDEGKGKIIKSNGSKYIEFYGSSSIVANKKHYGGLSDYRSSEGRAVRVKYRGKIKDTISNILGGIRSSCTYVGAPSLKQLSKCTTFVRVSNQFNRTFVD

SEQ ID NO: 101562 - protein, 137 aa, Unknown
  Bacterial polypetide isolated from the Sargasso Sea
MVLGAHIIADGGCTCPGDVSKAFGGGADFVMLGGMLAGHDEGNGKIIKSNGSKYIEFYGSSSIVANKKHYGGLSDYRSSEGRAVRVKYRGKIKDTISNILGGIRSSCTYVGAPSLKQLSKCTTFVRVSNQFNRTFVD

SEQ ID NO: 101563 - protein, 137 aa, Unknown
  Bacterial polypetide isolated from the Sargasso Sea
MAWGAHIIADGGCTCPGDVAKGFGGGADFVMLGGMLAGHDEGKGKLVKSNGSKYIEFYGSSSDIANKKHYGGLSDYRSSEGRTVRVKYRGKIKDTILNILGGVRSSCTYVGAPSLKQLSKCTTFVRVSNQFNDTFSK

SEQ ID NO: 101564 - protein, 132 aa, Unknown
  Bacterial polypetide isolated from the Sargasso Sea
AHIIADGGCTCPGDIAKAFGGGADFVMLGGMFAGHDEGGGKVVKRNGSKLIEFYGSSSETALNKHYGGHADYRSSEGKKVQIKYRGKIKDTILNILGGLRSSCTYVGAPSLKQLSKCTTFVRVNQQYNDTFE

SEQ ID NO: 101565 - protein, 153 aa, Unknown
  Bacterial polypetide isolated from the Sargasso Sea
VCAECSEIANGLGGHMVSDGGCKLPGDIAKAFGGGAHFVMMGGMMAGHDESGGDLVEENGKQYKMFYGMSSEYAQDKHNGGMAKYRSSEGKVKKIPYKGEVSVTMQDILGGLRSTGTYMGASRIKDFPKCCTFVKVNRQVNEVYSNPEFDVKN

SEQ ID NO: 101566 - protein, 138 aa, Unknown
  Bacterial polypetide isolated from the Sargasso Sea
AHGLGAHVIADGGCTCPGDVSKAFGGGADFVMLGGMLAGHDEGKGKIVKINGNKYIEFYGSSSEVANKKHYGGLSSYRSSEGRKVRVKYRGKINDTILNLLGGVRSSCTYVGAPSLKQLSKCTTFVRVSSQFNDSLIK

SEQ ID NO: 101567 - protein, 147 aa, Unknown
  Bacterial polypetide isolated from the Sargasso Sea
CGNGMCRCSSWLGAHIIADGGCTCPGDVAKGFGAGADFVMLGGMLAGHKEGGGSVIEKSGKKFIEFYGSSSEEANEKHYGGLANYRSSEGKKVKLPLKTSIDKTIRDILGGVRSSCTYVGAPSLKQLSKCTTFVRVNSQYNDTFGKI

SEQ ID NO: 101568 - protein, 90 aa, Unknown
  Bacterial polypetide isolated from the Sargasso Sea
MGKSIKHFYGMSSDTAMNKHHGGVASYRSSEGKTIRVKHRGLIRNTVENILGGVRSTCTYIGAKKIKDMPKCATFVRVNQQSNEVFGKNV

SEQ ID NO: 101569 - protein, 138 aa, Unknown
  Bacterial polypetide isolated from the Sargasso Sea
HGLGAHIIADGGCTCPGDVAKGFGAGADFVMLGGMLAGHKEGGGDIIEENGSNYIEFYGSSSEEANEKHYGGLANYRSSEGKKVKIRMKNSLDSTIRDILGGVRSSCTYVGASSLKQLSKCTTFVRVNNQYNDTFGKV

SEQ ID NO: 101570 - protein, 190 aa, Unknown
  Bacterial polypetide isolated from the Sargasso Sea
MRIEEELKLDYSDVLFRPKRSTLKSRKDVNLLRTYRFKYSKNEWSGIPIMAANMDGVGELSVAEKLNEYGMITSLTKQHDVKKIKQNKNIKKIYPNIALSVGIKKEDFQNLDKVLKEFSFFKFICIDVANGYTEHFTNFIKSVRDKYPTKTIIAGNVVTADMTQELVLSGADIVKVGIGPGSVCTTRIQT

SEQ ID NO: 101571 - protein, 198 aa, Unknown
  Bacterial polypetide isolated from the Sargasso Sea
MRIEEELKLDYSDVLFRPKRSTLKSRKDVNLLRTYRFKYSKNEWSGIPIMAANMDGVGELGIAEKLNEYGMITSLTKQHDVKKLKQNKNIKKIFPNIALSVGIKREDFQNLDKVLKEFSFFKFICIDVANGYTEHFTNFIKSVRDKYPTKTIIAGNVVTADMTQELVLSGADIVKVGIGPGSVCTTRIQTGVGYPQLS

SEQ ID NO: 101572 - protein, 244 aa, Unknown
  Bacterial polypetide isolated from the Sargasso Sea
MEYAFPTFGLDNKNYITDYLNHISDSTGHTAKIIVLDVPNGYIDSFASLISDLKVLIPDITIFAGNVVTPEGVELLANAGVDGVKLGIGSGSVCTTSIETGVGYPQLSAILDCADTAKNNNVVLISDGGISESGDLGKAFVAGTDFIMIGGILAGHTEGGAPTITENDTEYRLYYGMSSEEAMNTHYDGIAEYRTAEGISKLVKDKGPVANTIKQLLGGLRSSCTYLNCQNIAELTSKGQFIKI

SEQ ID NO: 101573 - protein, 340 aa, Unknown
  Bacterial polypetide isolated from the Sargasso Sea
MSEALTYDDVLLVPSYNHWESRKVVDTNITDRSGLLSLEIPVMTSNMDTITEVDMANFIRSKGGVGVLHRFMSIEENVKMLGVCNSPVFVSVGCSEEDLQRAEALRDANAGFFCIDVAHAHAKYVGRTLKNLREMLGKGACIMAGNVATYAGADYLASCGADIIKVGIGGGSVCTTRIKTGFGVPNLTAIKDCTRVDRSVVADGGIRNPGDIVKALAFGADFVMIGSMLAGTRPTPGKVITRTTESGQELKFKMYRGMASSEVHEDYHGGLADWKTAEGVSMEVEYRETEEIIIADIVGGLRSGMTYAGAASISELQRKLDYVRITNAARIENLPHRTMH

SEQ ID NO: 101574 - protein, 275 aa, Unknown
  Bacterial polypetide isolated from the Sargasso Sea
MITCFHKYIDVDNIITNHCSPHFFMLSTGISDNDLERLQANIKKLSDNNINVEFICVDVANGYMFKLVEFCKKIRDLYPNKTIVAGNVVTREMVEELIINGKVDIVKVGIGSGAVCTTRLQTGVGMPQFSSIIECADAAHGLGGRIISDGGICCPGDISKAIGAGSDFVMMGSMFSGHDECAGSLISEDGKSYKLFYGMSSDTAMNKYNGGVAKYRSSEGKTVKVPYKGCVTDTVQNILGGVRSTCTYVGARRLKDLGKCCTFMRVNSQVNTFYS

SEQ ID NO: 101575 - protein, 207 aa, Unknown
  Bacterial polypetide isolated from the Sargasso Sea
SETELSEIIGVSNTYPDIAFVGLDVANGYTVNFVESVKRLREHLPSATIIAGNVVTGDMTAELILSGVDIVKVGVGPGSVCTTRIKTGIGYPQLSAVMECADAAHGLNAHIIADGGCNSSGDIVKAFAGGADFVMIGGILAGHDECEGELVFEDDNPEPIGMQFYGMASRTAMNKHGHSNREYRGEEGKTVSVPYRGAVRDTIVDIL

SEQ ID NO: 101576 - protein, 210 aa, Unknown
  Bacterial polypetide isolated from the Sargasso Sea
MYIFIFVRIEEELKLDYSDVLFRPKRSTLKSRKDVNLKRTYRFKYSNNEWSGIPIMAANMDGVGELGIAQKLSEYGMITCLTKQHDIKKIKQFKKIKSIYQNIALSIGTKKEDFENLNKVLKEFSFIKFICIDVANGYSEHFSKFLKSVRDKYPTKTIIAGNVVTADMTQELILSGADIVKVGIGPGSVCTTRIQTGVGYPQLSAVIECA

SEQ ID NO: 101577 - protein, 197 aa, Unknown
  Bacterial polypetide isolated from the Sargasso Sea
MLLNDEIKLDYSDVLIRPKRSTMSSRSEVDLERTHKFLWSKREWTGIPIMAANMDTVGTPAMHKVLSKHGLITCPARHFLEKDIEGFNKNDSNICWFGGIEDISTLFKIQADFIGLDVANGYTIRFVDAVKKLRETCPNATIAAGNVVTADMTQELILAGADIVKVGIGPGSVCTTRVKTGIGYPQLSAVIECADAA

SEQ ID NO: 101578 - protein, 189 aa, Unknown
  Bacterial polypetide isolated from the Sargasso Sea
MRIEEEIKLDYSDVLFRPKRSTLKSRKQVDLTRKYQFRHSNFVWEGVPIIASNMDGVGEIDVAKKLYEHKLMTALTKQHVIKDLKELVQNKSIYNFISLSCGTSNESYKRLNQIINKYPSIKFICIDVANGYSENFSSFVSDVRKKHPKKTIIAGNVVTADMTQELVLSGADIVKVGIGPGSVCTTRIQ

SEQ ID NO: 101579 - protein, 193 aa, Unknown
  Bacterial polypetide isolated from the Sargasso Sea
MYKFKFVRIEEELKLDYSDVLFRPKRSTLSSRKDVNLKRTYKFKYSNNEWSGIPIMAANMDGVGELGIAEKLSEYGMITCLTKQHDVKKIKQFKKIKSIYPNIALSIGIKKEDFQNLDKVLKEFSFIKFLCIDVANGYSERFSAFLKSVRDKYPTKTIIAGNVVTADMTQELILSGADIVKVGIGPGSVCTTR

SEQ ID NO: 101580 - protein, 162 aa, Unknown
  Bacterial polypetide isolated from the Sargasso Sea
VCTTRIQTGVGYPQLSAVIECADAAHGLGAHVIADGGCTCPGDVAKGFGGGADFVMLGGMLAGHDEGKGKIVKANGSKYIEFYGSSSEVANKKHYGGLADYRSSEGRKVRVKYRGKINDTVLNILGGVRSSCTYVGAPSLKQLSKCTTFVRVSSQFNDTFVK

SEQ ID NO: 101581 - protein, 291 aa, Unknown
  Bacterial polypetide isolated from the Sargasso Sea
MLINEDIKLDYSDVLIRPKRSTMSSRGEVRLQRTHRFLWSKKKWTGIPIMSANMDTVGTPSMHKVLSKHKLITCPAKHHLKKNSNEFKTGQPNICWFGGIDDISKLSKANSGFIGLDVANGYTIKFVDSVKKLRDKCPNATIAAGNVVTADMTQELILAGADIVKVGIGPGSVCTTRIKTGIGYPQLSAVIECADAAHGLNAHIIADGGCTSSGDIVKAFAGGADFVMIGGMLAGHDECDGEVEDGVMKFYGMASESAMTRHSNHNNYRGTEGKTVEVEYRGKANDTIKDI

SEQ ID NO: 101582 - protein, 212 aa, Unknown
  Bacterial polypetide isolated from the Sargasso Sea
MRIEEEIKLDYSDVLFRPKRSTLKSRREVNLKRKYRFKHSKLIWEGVPIIASNMDGVGEVGIAKKLASFNMMTALTKQHDNIEIKNLQKAKSIHNYVALSCGTSKDSFARLTKLLKKNPKFKFICIDVANGYSENFSHFVSEVRKKYPTKTIIAGNVVTADMTQELVLSGADIVKVGIGPGSVCTTRIQTGVGYPPIKCSSRMCRCCSWAWS

SEQ ID NO: 101583 - protein, 238 aa, Unknown
  Bacterial polypetide isolated from the Sargasso Sea
MRIEEELKLDYSDVLFRPKRSTLKSRKDVNLLRTYRFKYSKNEWSGIPIMAANMDGVGELSVAEKLNEYGMITSLTKQHDVKKIKQNKNIKKIYPNIALSVGIKKEDFQNLDKVLKEFSFFKFICIDVANGYTEHFTNFIKSVRDKYPTKTIIAGNVVTADMTQELVLSGADIVKVGIGPGSVCTTRIQTGVGYPQLSAVIECADAAHGLGAHVIADGGCTCPGDVAKGFGGGADFVM

SEQ ID NO: 101584 - protein, 101 aa, Unknown
  Bacterial polypetide isolated from the Sargasso Sea
SDKDFKRISDILKEYSFFQFICIDIANGYSDHFSKFVKSVREKYPTKIIIAGNVVTADMTQELILSGADIVKVGIGPGSVCTTRIQTGVGYPQLSAVIECA

SEQ ID NO: 101585 - protein, 109 aa, Unknown
  Bacterial polypetide isolated from the Sargasso Sea
VGIGPGSVCTTRLQTGVGYPQLSAVIECSDAAHGLGAHIIADGGCTCPGDVAKGFGGGADFVMLGGMLAGHDEGKGKLVKSNGSKYIEFYGSSSETANKKHYGGLSDYR

SEQ ID NO: 101586 - protein, 199 aa, Unknown
  Bacterial polypetide isolated from the Sargasso Sea
MLINEDIKLDYSDVLIRPKRSTMSSRGEVRLQRTHRFLWSKKKWTGIPIMSANMDTVGTPSMHKVLSKHKLITCPAKHHLKKNSNEFKTGQPNICWFGGIDDISKLSKANSGFIGLDVANGYTIKFVDSVKKLRDKCPNATIAAGNVVTADMTQELILAGADIVKVGIGPGSVCTTRIKTGIGYPQLSAVIECADAAHG

SEQ ID NO: 101587 - protein, 213 aa, Unknown
  Bacterial polypetide isolated from the Sargasso Sea
MSKYLKYSDVSLVPNYSEVYSRSDCDTSVELFGKRFKLPIIPANMKSVMNMDLAKWMSQNGYFYIMHRFENKLSEVVSQMNNEDWDVISVSMGVQIKDKKDLVVISKANQKVDYITIDIAHGHCERMKIAIEAVKKFLPDTKIIAGNVATPDAVADLSAWGADIVKVGIGQGSPCTTKHKTGFTMPMFSCVMKCSGVSFNKENGFMISEASMQ

SEQ ID NO: 101588 - protein, 147 aa, Unknown
  Bacterial polypetide isolated from the Sargasso Sea
CSDAAHGLGGHVLADGGCKYPGDVSKAFGAGADFVMLGGMFAGHEESGGELVTGEDGEQYKDFYGMSSTKAQQTYYGDLALHRAPEGKKVRLKYKGPIDKTVQSILGGMRSACSYVGAKKLKDLPKSTTFIRVTQTTNEIYTGSENL

SEQ ID NO: 101589 - protein, 149 aa, Unknown
  Bacterial polypetide isolated from the Sargasso Sea
QLSAVIECADAAHGLGAHVIADGGCTCPGDVAKGFGGGADFVMLGGMLAGHDEGKGKITKINGDKYIEFYGSSSEVANKKHYGGLSSYRSSEGRKVRVKYRGKINDTILNLLGGVRSSCTYVGAPSLKQLSKCTTFVRVSSQFNDSLIK

SEQ ID NO: 101590 - protein, 297 aa, Unknown
  Bacterial polypetide isolated from the Sargasso Sea
MLINEDIKLDYSDVLIRPKRSTMSSRGEVRLQRTHRFLWSKKKWTGIPIMSANMDTVGTPSMHKVLSKYKLITCPAKHHLKKNSNEFKTGQSNICWFGGIDDISKLSKANSGFIGLDVANGYTIKFVDSVKKLRDKCPNATIAAGNVVTADMTQELILAGADIVKVGIGPGSVCTTRIKTGIGYPQLSAVIECADAAHGLNAHIIADGGCTSSGDIVKAFAGGADFVMIGGMLAGHDECDGEVEDGVMKFYGMASESAMTRHSNHNDYRGTEGKTVEVEYRGKAKNTIKDILSGIRS

SEQ ID NO: 101591 - protein, 194 aa, Unknown
  Bacterial polypetide isolated from the Sargasso Sea
MHNLGTISAQSRHNLGTISAQSRQKVGIGPGSVCTTRKQTGVGYPQAISQPASQRASAAHQPTSPPARQKLAARQPRVGRAQLSAIVECMDAAHGLGGHIISDGGITCPGDAAKAFAAGADFIMCGGLFAGCDEAAGALVERDGRKYKQFYGMSSSTAMTKHVGGVAEYRSSEGKTVEVRADELRDTGRGLAEI

SEQ ID NO: 101592 - protein, 205 aa, Unknown
  Bacterial polypetide isolated from the Sargasso Sea
MRIEEELKLDYSDVLFRPKRSTLKSRKDVNLLRTYRFKYSKNEWSGIPIMAANMDGVGELSVAEKLNEYGMITSLTKQHDVKKIKQNKNIKKIYPNIALSVGIKKEDFQNLDKVLKEFSFFKFICIDVANGYTEHFTNFIKSVRDKYPTKTIIAGNVVTADMTQELVLSGADIVKVGIGPGSVCTTRIQTGVGYPQLSAVIECAD

SEQ ID NO: 101593 - protein, 206 aa, Unknown
  Bacterial polypetide isolated from the Sargasso Sea
MRIEEELKLDYSDVLFRPKRSTLKSRKDVNLLRTYRFKYSKNEWSGIPIMAANMDGVGELSVAEKLNEFGMITSLTKQHDVKKIKQNKNIKKIFPNIALSVGIKKEDFQNLDKVLKEFSFFKFICIDVANGYTEHFTNFIKSVRDKYPTKTIIAGNVVTADMTQELVLSGADIVKVGIGPGSVCTTRIQTGVGYPQLSAVIECADA

SEQ ID NO: 101594 - protein, 167 aa, Unknown
  Bacterial polypetide isolated from the Sargasso Sea
GIGSGSVCTTRLQTGVGMPQLSAVMECADAAHGVRGHIISDGGIVHPGDISKAFGGGADFVMMGSIFAGHTECAGDLIEEDGKQYKLFYGMSSDTAMNKYHGGVAKHRSSEGKTVKIPYRGDVNKTIQNFLGGVRSSCTYVGAKRLKDLPKCCSFIRVNNIVNTVYN

SEQ ID NO: 101595 - protein, 201 aa, Unknown
  Bacterial polypetide isolated from the Sargasso Sea
MRIEEDIKLDYADVLFRPKRSTLSSRKDVELKRTYKFKYSNHQWSGIPIIAANMDGVGEVEVAKNLAKFGIMTCLTKQHDLKTIKRNSSVKGIHSHLILSTGTSNEDYKRLNEIMKECSFFEFICIDIANGYSDHFSKFVSSVREKYPTKTIIAGNVVTADMTQELVMNGADIVKVGIGPGSVCTTRIQTGVGYPQLSAVI

SEQ ID NO: 101596 - protein, 142 aa, Unknown
  Bacterial polypetide isolated from the Sargasso Sea
CADAAHGLGAHIIADGGCTCPGDVAKAFGGGADFVMLGGMFAGHDEGEGKLIKSNGHKFIEFYGSSSDIANKKHYGGLSDYRSSEGRTVRIKYRGKIKDTINNILGGVRSSCTYVGAPSLKQLSKCTTFVRVAKQFNDTFAK

SEQ ID NO: 101597 - protein, 348 aa, Unknown
  Bacterial polypetide isolated from the Sargasso Sea
MRIEDEIKLTFDDVLIRPKRSTLVSRSEVILERDFKFKHTDVTWTGVPIFSANMDTTGTFETAITLQKHKMLTAIHKFYSLEEWENNIEKLDPEFISVTVGQSDDDLNLGKKIFELNNDIKYLCIDVANGYREDFIDSVKNYRETFPNKIIIAGNVATREMTEALILAGADIVKIGIGPGSVCTTRSVAGVGYPQLSSISECSDAAHGLGGHVMADGGCKYPGDISKAFGAGADYVMLGGMFAGHKESGGELVTGDDGIQYKDFYGMSSTKAQQTYYGDLAEHRAAEGKKVRLKYKGDLNNTVQKILGGMRSACSYVGAKKLKDLPKSTTFIRVTQTTNEIYTGSENN

SEQ ID NO: 101598 - protein, 348 aa, Unknown
  Bacterial polypetide isolated from the Sargasso Sea
MRIEDDIKLTFDDVLIRPKRSTLVSRSEVVLERDFKFKHTTATWTGVPIFSANMDTTGTFETAVTLQKHKMLTAIHKFYTLEEWKKNIDNLDPEYISVTVGQSQEDLQLGKEIFELNNDIKYLCIDVANGYREDFVNSVKNYRATFPEKIIIAGNVATREMTEALILAGADIVKIGIGPGSVCTTRSVAGVGYPQLSSISECSDAAHGLGGHVMADGGCKYPGDVSKAFGAGADYVMLGGMFAGHKESGGELVTDDDGEQYKDFYGMSSTKAQQTYYGDLAEHRAAEGKKVRLKYKGDLIGTVQGILGGMRSACSYVGAKKLKDLPKSTTFIRVTQTTNEIYTGSENN

SEQ ID NO: 101599 - protein, 272 aa, Unknown
  Bacterial polypetide isolated from the Sargasso Sea
MYKFGFVRIEEELKLDYSDVLFRPKRSTLQSRKDVNLLRTYRFKYSKNEWSGIPIMAANMDGVGELGVAEKLSEYGMITCLTKQHDVKKIKQFKKIKSIYKNIAISIGTKKEDFENLNKVLREFGFIKFICIDVANGYSEYFSKFLKSVRDKYPTKTIIAGNVVTADMTQELILSGADIVKVGIGPGSVCTTRIQTGVGYPQLSAVIECADAAHGLGAHIIADGGCTCPGDVAKGFGGGADFVMLGGMFAGHDEGKGKIVKSNGSKYMNSTA

SEQ ID NO: 101600 - protein, 293 aa, Unknown
  Bacterial polypetide isolated from the Sargasso Sea
MRIEEELKLDYSDVLFRPKRSTLKSRKDVNLLRTYRFKHSKNEWSGIPIMAANMDGVGELGIAEKLNEFKMITCLTKQHDVKKLKQFKKIKSMYQNIALSIGIKKEDFDNLDKIMKEFSFFKFICIDVANGYSEHFTSFIKSVRDKFPTKTIIAGNVVTADMTQELVLSGADIVKVGIGPGSVCTTRIQTGVGYPQLSAVIECADAAHGLGAHIIADGGCTCPGDVAKGFGGGADFVMLGGMLAGHDEGKGKLVKSNGSKFIEFYGSSSDVANKKHYGGLSDYRSSEGRTVRV

SEQ ID NO: 101601 - protein, 256 aa, Unknown
  Bacterial polypetide isolated from the Sargasso Sea
NSSFHNFVALSCGTSPDSFNRLNSILKKYPKFQFICIDVANGYSENFSNFVSNVRKKYPKKTIIAGNVVTADMTQELVLSGADIVKVGIGPGSVCTTRIQTGVGYPQLSAVMECADAAHGLGAHIIADGGCTCPGDVAKGFGAGADFVMLGGMLAGHKEGGGTVIEKNGKKFIEFYGSSSEEANEKHYGGLANYRSSEGKKVKLPLKTSIDKTIRDILGGVRSSCTYVGAPSLKQLSKCTTFVRVNSQYNDTFGKI

SEQ ID NO: 101602 - protein, 311 aa, Unknown
  Bacterial polypetide isolated from the Sargasso Sea
MDYSDVLFRPKRSTLKCRKDVNLLRTYRFKYSKNEWSGIPIMAANMDGVGELSIAEKLNEYGMITCLTKQHDVKKIKQSKNIKKIYPNIALSVGIKKEDFQNLDKVLKEYSFFKFICIDVANGYSEHFTNFVKSVRDKYPTKTIIAGNVVTADMTQELVLSGADIVKVGIGPGSVCTTRIQTGVGYPQLSAVIECADAAHGLGAHIIADGGCTCPGDVAKGFGGGADFVMLGGMLAGHDEGKGKLIKVNGSKYIEFYGSSSEVANKKHYGGLSDYRSSEGRAVRVKYRGKINDTILNILGGVRSSCTYVGA

SEQ ID NO: 101603 - protein, 275 aa, Unknown
  Bacterial polypetide isolated from the Sargasso Sea
MRIEEELKLDYSDVLFRPKRSTLKSRKDVNLLRTYRFKYSKNEWSGIPIMAANMDGVGELSVAEKLNEYGMITSLTKQHDVKKIKKNKNIKKIYSNIALSVGIKKEDFLNLDKVLKEFSFFKFICIDVANGYTEHFTNFIKSVRDKYPTKTIIAGNVVTADMTQELVLSGADIVKVGIGPGSVCTTRIQTGVGYPQLSAVIECADAAHGLGAHVIADGGCTCPGDVAKGFGGGADFVMLGGMLAGHDEGNGKIVKVNGDRFIEFYGSSSEVQIKN

SEQ ID NO: 101604 - protein, 191 aa, Unknown
  Bacterial polypetide isolated from the Sargasso Sea
GNVVTADMTQELVLSGADIVKVGIGPGSVCTTRIQTGVGYPQLSAVIECADAAHGLGAHIIADGGCTCPGDIAKAFGGGADFVMLGGMLAGHKEGGGEVIKLNGKQYIEFYGSSSEEANEKHYGGLADYRSSEGKKVKIPFRKSLDATLRDILGGIRSSCTYVGAPSLKQLSKCTTFVRVNNQYNDTFGKI

SEQ ID NO: 101605 - protein, 290 aa, Unknown
  Bacterial polypetide isolated from the Sargasso Sea
GKVYLVVAANMDTTGTFEMAKALQRNNMLTCLQKFYSVKEIKESIENGMSPGNIAVTSGSTEESLELLKRKMAIDKNLKFICLDVANGYREDFLQFVRRTRKHFTDKIIIAGNVATREMTEALILAGADIVKVGIGPGSVCTTRKVAGVGYPQLSAISECSDAAHGLAGHVMSDGGCTSPGDVAKAFAAGADFVMLGGMLAGHDESGGELKTKNDGKKYKSFYGMSSAKAMETYFGEVAKHRAPEGKEVEVPYRGPVEVTIQSILGGMRSACSYVGARRIKDLPKCTTFV

SEQ ID NO: 101606 - protein, 222 aa, Unknown
  Bacterial polypetide isolated from the Sargasso Sea
FICIDVANGYTEHFTNFIKSVRDKYPTKTIIAGNVVTADMTQELVLSGADIVKVGIGPGSVCTTRIQTGVGYPQLSAVIECADAAHGLGAHVIADGGCTCPGDVAKGFGGGADFVMLGGMLAGHDEGNGKIVKVNGEKYIEFYGSSSEVANKKHYGGLSDYRSSEGRKVRVKYRGKINDTILNILGGVRSSCTYVGAPSLKQLSKCTTFVRVSNQFNDSLIK

SEQ ID NO: 101607 - protein, 258 aa, Unknown
  Bacterial polypetide isolated from the Sargasso Sea
MITCLTKQHDVKKIKQNKNIKKMYSNIALSVGIKKEDFDNLDKVLKEFSFFKFICIDVANGYSEHFTNFVKSVRDKYPTKTIIAGNVVTADMTQELVLSGADIVKVGIGPGSVCTTRIQTGVGYPQLSAVIECADAAHGLGAHVIADGGCTCPGDVAKGFGGGADFVMLGGMLAGHDEGKGKIVKINGNKYIEFYGSSSEVANKKHYGGLSSYRSSEGRKVRVKYRGKINDTVLNLLGGVRSSCTYVGAPSLKQLSKC

SEQ ID NO: 101608 - protein, 264 aa, Unknown
  Bacterial polypetide isolated from the Sargasso Sea
LKKIKKFKKIKSIYKNIALSIGIKDEDFKRLDDVLKEYSFINFICIDVANGYSEHFSKYLKLVREKYPTKTIIAGNVVTADMTQELVLSGADIVKVGIGPGSVCTTRIQTGVGYPQLSAVIECADAAHGLGAHIIADGGCTCPGDVAKGFGAGADFVMLGGMFAGHDEGGGKVTKSNGSKYIEFYGSSSDTANKKHYGGLSDYRSSEGKSVRIKYRGQIKNTISNILGGVRSSCTYVGAPSLKQLSKCTTFVRVSNQFNDTFQD

SEQ ID NO: 101609 - protein, 321 aa, Unknown
  Bacterial polypetide isolated from the Sargasso Sea
EGLNWRIIEEIKLDFSDVLIKPKRSTLISRKEAWLARKFKFRHSKHTWEGVPIIASNMDHTGTIAMNHALLEYKMLTALCKFVESTEWSWNKNIIQTIGLDKNLDDSDVYNESHWVCLDVANGYTERFNDYVSKMRGHEATKNKIIIAGNVCTPEATEQIIMAGADIVKIGIGPGSVCTTRKMTGVGYPQLSATMECADAAHGLGGHIITDGGCTVVGDIAKSFGAGADFVMLGGMLAGHKECEGEVLGNHKGKVMEFYGMSSEEAQLKYYGEKKSHRASEGKKVQIPYKGNVANTVEEILGGLRSACTYAGARTIKALPK

SEQ ID NO: 101610 - protein, 225 aa, Unknown
  Bacterial polypetide isolated from the Sargasso Sea
FFKFICIDVANGYSEHFTNFIKSVRDKYPTKTIIAGNVVTADMTQELVLSGADIVKVGIGPGSVCTTRIQTGVGYPQLSAVIECADAAHGLGAHVIADGGCTCPGDVAKGFGGGADFVMLGGMLAGHDEGKGKIVKVNGTKYIEFYGSSSEVANKKHYGGLADYRSSEGRKVRVKYRGKINDTVLNILGGVRSSCTYVGAPSLKQLSKCTTFVRVSSQFNDTFVK

SEQ ID NO: 101611 - protein, 284 aa, Unknown
  Bacterial polypetide isolated from the Sargasso Sea
MRVDRDFKLDFDDVLIRPKRSTLSSRRLVDLNRKFEFRHSNETWEGIPVIAANMDTTGTFEIAESLKKEKMLTAIHKFYSLDQWAKAINSNQIDLEHCAVTFGVEEAENAEEFFDYLEKNNLNKPKFICLDVANGYTELFLDLVKKIRSKFDNPLIAGNVVTGEMTEALILAGADIVKIGIGPGSVCTTRTVTGVGYPQLSAIIECADAAHGLRGHVISDGGCSKPGDVAKAFGAGADFVMLGGMFAGHEESGGELIEKDGKKYKQFYGMSSDTAMERYYGDIK

SEQ ID NO: 101612 - protein, 212 aa, Unknown
  Bacterial polypetide isolated from the Sargasso Sea
VANGYTERFCTFIGKFRDTFPNIIIIAGNVCTADQTQELILKGADIIKCGIGPGSVCTTRVKTGVGYPQLSTIIECSDAAHGLGGHIISDGGCTVAGDIAKAFGGGADFVMLGGMLAGHDEGGGEIVDNKVQFYGMSSRTANEKHFGGLRDYRAAEGKTVEIPYRGKIINTVQDILGGLRSACTYSGARRLKDLCKCTTFIRTTVQENKVYS

SEQ ID NO: 101613 - protein, 293 aa, Unknown
  Bacterial polypetide isolated from the Sargasso Sea
AANMDGVGELVMAENLATHQIMTCLTKQHNSKIIKKFKSIKKIFPQVILSTGTSDQDYKRLNDILKENSFFEFICIDIANGYSDHFSKFVSSVRKKYPTKTIIAGNVVTADMTQELILAGADIVKVGIGPGSVCTTRIQTGVGYPQLSAVIECADAAHGLGAHIIADGGCTCPGDVAKAFGGGADFVMLGGMFAGHDEGGGKIIKKNGSKVIEFYGSSSETALNKHYGGHADYRSSEGKKVQLKYRGKINDTVLNILGGLRSSCTYVGAPSLKQLSKCTTFVRVNQQYNDTFE

SEQ ID NO: 101614 - protein, 234 aa, Unknown
  Bacterial polypetide isolated from the Sargasso Sea
MRIEEEIKLDYSDVLFRPKRSTLKSRKDVDLNRKYTFKHSKSSWNGIPIIASNMDGVGEIDVAKKLTSHKLMTALTKQHDINQIGSIYKKNIFFDSIALSCGTSKDSYNRLNSILKKYPKFKFICIDVANGYSENFSNFVSEVRKKYPKKTIIAGNVVTADMTQELVLSGADIVKVGIGPGSVCTTRIQTGVGYPQLSAVIECADAAHGLGAHIIADGGCTCPGDVAKGFGAGA

SEQ ID NO: 101615 - protein, 314 aa, Unknown
  Bacterial polypetide isolated from the Sargasso Sea
VDLKRTYKFKYSTNEWSGIPVMAANMDGVGELEVAETLSDFEMITCLTKQHDVNKLKKYKKLKSIYKNISLSIGIKKEDFEKLDKTLKEFSFIKFICVDVANGYSEHFTSFIKSVRDKYPTKTIIAGNVVTADMAQELVLSGADIVKVGIGPGSVCTTRIQTGVGYPQLSAVIECADAAHGLGAHIIADGGCTCPGDVAKGFGGGADFVMLGGMFAGHNEGGGKVIKSNGSKYIEFYGSSSETANKKHYGGLSDYRSSEGRSVKIKYRGKIKDTILNILGGVRSSCTYVGAPSLKQLSKCTTFVRVSNQYNDTF

SEQ ID NO: 101616 - protein, 154 aa, Unknown
  Bacterial polypetide isolated from the Sargasso Sea
GVGYPQLSAVIECADAAHGLGAHIIADGGCTCPGDVAKAFGGGADFVMLGGMFAGHDEGKGKLVKSNGSKYVEFYGSSSETANNKHYGGLSDYRSSEGRTVRVKYRGKINDTILNILGGVRSSCTYVGAPSLKQLSKCTTFVRVTKQFNDTFTK

SEQ ID NO: 101617 - protein, 234 aa, Unknown
  Bacterial polypetide isolated from the Sargasso Sea
LDEILKEFSFFKFICIDVANGYSEHFSKFIKSVREKYPTKTIIAGNVVTADMTQELILSGADIVKVGIGPGSVCTTRIQTGVGYPQLSAVIECADAAHGLGAHIIADGGCTCPGDVAKGFGGGADFVMLGGMLAGHDEGKGKIIKNNGTKYIEFYGSSSDIANKKHYGGLADYRSSEGRNVRVKYRGKIKDTLANILGGIRSSCTYVGAPSLKQLSKCTTFVRVARQFNDTFTK

SEQ ID NO: 101618 - protein, 318 aa, Unknown
  Bacterial polypetide isolated from the Sargasso Sea
KDVNLLRTYRFKYSKNEWSGIPIMAANMDGVGELSIAEKLNDYEMITCLTKQHDIKKIKQNKNIKKIYPNIALSVGIKKEDFQNLDKVLKEYNFFKFICIDVANGYSEHFTNFVKSVRDKYPTKTIIAGNVVTADMTQELVLSGADIVKVGIGPGSVCTTRIQTGVGYPQLSAVIECADAAHGLGAHIIADGGCTCPGDVAKGFGGGADFVMLGGMLAGHDEGKGKIVKINGSKYIEFYGSSSEIANKKHYGGLADYRSSEGRTVRVKYRGKINDTILNILGGVRSSCTYVGAPSLKQLSKCTTFVRVTNQFNDTFTK

SEQ ID NO: 101619 - protein, 167 aa, Unknown
  Bacterial polypetide isolated from the Sargasso Sea
GADATKVGVGPGKVCITKLKTGFGTGGWQLSALKWCARVATKPIIADGGIRSHGDIAKSIRFGASMVMIGSLFAGHEESPGKTVEVDGALFKEYYGSASDFNKGEYKHVEGKRILEPIKGKLAETLIEMEQDVQSSISYAGGTKLMDVRKVNYVILGGDNAGEHLLM

SEQ ID NO: 101620 - protein, 297 aa, Unknown
  Bacterial polypetide isolated from the Sargasso Sea
MKEEIKLDYSDVLFRPKRSTLKSRKEVDLSRTYQFKYSNREWTGIPIMASNMDGVGELEVAKSLSKFDILTALTKQHDLESINAFSEIKEIFNYISLSCGTSEKSYERLNTIISQHTYIQFICIDVANGYSENFSKFVSSVRDKYPSKTIIAGNVVTADMTQELILSGADIVKVGIGPGSVCTTRIQTGVGYPQLSAVIECADAAHGLGAHMIADGGCTCPGDVAKAFGGGADFVMLGGMLAGHQEGGGKVISKNGQNFIEFYGSSSEEANTKHYGGLADYRSSEGKKVSIPLRESL

SEQ ID NO: 101621 - protein, 305 aa, Unknown
  Bacterial polypetide isolated from the Sargasso Sea
KDVNLLRTYRFKYSKNEWSGTPIMAANMDGVGELGVAEKLNEYGMITCLTKQHDVKKIKQYKKIKSMYQNIAISIGIKKEDFQNLDKMMKEFSFFKFICIDVANGYSEHFTSFIKSVRDKYPTKTIIAGNVVTADMTQELVLSGADIVKVGIGPGSVCTTRIQTGVGYPQLSAVIECADAAHGLGAHIIADGGCTCPGDVAKGFGGGADFVMLGGMLAGHDEGKGKLVKSNGSKYIEFYGSSSDIANKKHYGGLSDYRSSEGRTVRVKYRGKIKDTILNILGGVRSSCTYVGAPSLKQLSKCTTF

SEQ ID NO: 101622 - protein, 179 aa, Unknown
  Bacterial polypetide isolated from the Sargasso Sea
ILSGADIVKVGIGPGSVCTTRIQTGVGYPQLSAVMECADAAHGLGAHIIADGGCTCPGDVAKGFGAGADFVMLGGMLAGHKEGGGDIIDKDGKKYIEFYGSSSEEANEKHYGGLADYRSSEGKKVVIPLKNSLDKSIRDILGGIRSSCTYVGAPSLKQLSKCTTFVRVNNQYNDTFGKV

SEQ ID NO: 101623 - protein, 242 aa, Unknown
  Bacterial polypetide isolated from the Sargasso Sea
FRSASRKVNTNHDIKMICIDVANGYREVFLDFVKRVRESFSDHIIIAGNVATREMTEALILAGADVVKVGIGPGSVCTTRKVAGVGYPQLSAISECADAAHGLNGHVMSDGGCASPGDVAKAFAAGADFVMLGGMLAGHDESGGEIIEESGRTYKSFYGMSSSKAMEEHYGIVAKHRAPEGKEVRVPYRGPLEGTVQSILGGLRSACSYVGARRIKDLPKCTTFVKVSMTTNEVYRKFNVDE

SEQ ID NO: 101624 - protein, 221 aa, Unknown
  Bacterial polypetide isolated from the Sargasso Sea
ICIDVANGYSEHFSKFLKSVRDKYPTKTIIAGNVVTADMTQELILSGADIVKVGIGPGSVCTTRIQTGVGYPQLSAVIECADAAHGLGAHIIADGGCTCPGDVAKAFGGGADFVMLGGMFAGHDEGKGKLVKSNGSKYVEFYGSSSETANNKHYGGLSDYRSSEGRTVRVKYRGKINDTILNILGGVRSSCTYVGAPSLKQLSKCTTFVRVTKQFNDTFTK

SEQ ID NO: 101625 - protein, 160 aa, Unknown
  Bacterial polypetide isolated from the Sargasso Sea
YDSHTNRVVGYPQLSAVIECADAAHGLGAHIIADGGCTCPGDVAKAFGGGADFVMLGGMFAGHEEGGGEIVKKNGSKFIEFYGSSSDTALNKHYGGLSDYRSSEGKKVQLKFRGKIKDTILNILGGLRSSCTYVGAPSLKQLSKCTTFVRVNQQYNDTFK

SEQ ID NO: 101626 - protein, 254 aa, Unknown
  Bacterial polypetide isolated from the Sargasso Sea
EDLKLDYSDVLFRPKRSTLSSRKDVNLKRTYRFKYSNNQWSGIPIMAANMDGVGELEIAEKLSEYGMITCLTKQHDVKKITKFKKIKNIYNNISLSIGIKKEDFDRLDKILKEFSFFKFICIDVANGYSEHFSNFIKSVRDKYPTKTIIAGNVVTADMTQELILSGADIVKVGIGPGSVCTTRIQTGVGYPQLSAVMECADAAHGLGSHIIADGGCTCPGDVSKGFGGGADFVMLGGMFAGHDEGKGKIVKSNG

SEQ ID NO: 101627 - protein, 279 aa, Unknown
  Bacterial polypetide isolated from the Sargasso Sea
MRIEEEIKLDYSDVLFRPKRSTLKSRKDVDLNRKYIFKYSKLSWKGTPIIASNMDGVGEIDVAKKLTYHKVMTALTKQHTIDQISLIYKNSDFHKTVALSCGTNTESYDRLNKILRKFPKFEFICIDVANGYSENFSHFVSSVRKKYPNKTIIAGNVVTADMTQELILSGADIVKVGIGPGSVCTTRIQTGVGYPQLSAVMECADAAHGLGAHIIADGGCTCPGDVAKGFGAGADFVMLGGMLAGHKEGGGEIIERNGKKYIEFYGSSSEEANEKHYGG

SEQ ID NO: 101628 - protein, 249 aa, Unknown
  Bacterial polypetide isolated from the Sargasso Sea
NIALSIGIKKEDFDNLDKILKEYSFFKFICIDVANGYSEHFSSFLKKVRDKYPTKTLIAGNVVTADMTQELILSGADIVKVGIGPGSVCTTRIQTGVGYPQLSAVIECADAAHGLGAHIIADGGCTCPGDVAKAFGGGADFVMLGGMFAGHDEGSGKIVKSNGSKYIEFYGSSSDTANKKHYGGLSSYRSSEGRTVRVKYRGKIKDTILNILGGLRSSCTYVGAPSLKQLSKCTTFVRVTKQFNDTFVK

SEQ ID NO: 101629 - protein, 240 aa, Unknown
  Bacterial polypetide isolated from the Sargasso Sea
KEDFENLNEVLKEFNFIKFICIDVANGYSEHFSKFVKSVRDKYPTKTIIAGNVVTADMTQELILSGADIVKVGIGPGSVCTTRIQTGVGYPQLSAVIECADAAHGLGAHIIADGGCTCAGDVAKGFGGGADFVMLGGMFAGHDEGKGKIVKSNGKKFIEFYGSSSDQANKKHYGGLSDYRSSEGRMVRLKYRGKIKDTILNILGGVRSSCTYVGAPSLKQLSKCTTFVRVSNQYNDTFVE

SEQ ID NO: 101630 - protein, 266 aa, Unknown
  Bacterial polypetide isolated from the Sargasso Sea
QHDSKIIKKFKSIKKIFPQVILSTGTSDEDYKRLNDILKENSFFEFICIDIANGYSDHFSKFVSSVRKKYPTKTIIAGNVVTADMTQELILAGADIVKVGIGPGSVCTTRIQTGVGYPQLSAVIECADAAHGLGAHIIADGGCTCPGDVAKAFGGGADFVMLGGMFAGHDEGGGKIIKKNGSKVIEFYGSSSETALNKHYGGHADYRSSEGKKVQLQYRGKIKDTVLNILGGLRSSCTYVGAPSLKQLSKCTTFVRVNQQYNDTFE

SEQ ID NO: 101631 - protein, 224 aa, Unknown
  Bacterial polypetide isolated from the Sargasso Sea
MRIEEEIKLDYSDVLFRPKRSTLKSRREVNLNRKYKFKHSKLSWEGVPIIASNMDGVGEVGIAKKLSSFKMMTALTKQHGSKEIKNLETSKFIHNYVALSCGTGKDSYARLKNLLKKNPKFKFICIDVANGYSENFSYFVSEVRKKYPNKTIIAGNVVTADMTQELVLSGADIVKVGIGPGSVCTTRIQTGVGYPQLSAVLECADAAHGLGAHIIADGGCTSHR

SEQ ID NO: 101632 - protein, 300 aa, Unknown
  Bacterial polypetide isolated from the Sargasso Sea
SGIPIIAANMDGVGELSIAEKLNEHGMITCLTKQHDVKKIKQNKNIKKIYQNIALSVGIKKEDFRNLDKVLKEFSFFKFICIDVANGYTEHFTNFIKSVRDKYPTKTIIAGNVVTADMTQELVLSGADIIKVGIGPGSVCTTRIQTGVGYPQLSAVIECADAAHGLGAHIIADGGCTCPGDVAKGFGGGADFVMLGGMLAGHDEGGGKIIKKNGSKYIEFYGSSSEVANIKHYGGLSNYRSSEGRSVKINYRGKINDTILNILGGVRSSCTYVGAPSLKQLSKCTTFVRVSNQFNETFTK

SEQ ID NO: 101633 - protein, 268 aa, Unknown
  Bacterial polypetide isolated from the Sargasso Sea
MRIEDEIKLTFDDVLIRPKRSTLVSRSEVQLDRDLKFRHTSLTWSGVPIVSANMDTTGTFETAISLQKHKMITAVHKFYTVEDWKQSIDKLDPNFIAVTVGQSDEDMQLAKDIFKLNDNIKFLCIDVANGYREDFINAVKRYRETFKDKIIIAGNVATREMTEALILAGADIVKIGIGPGSVCTTRSVAGVGYPQLSSISECSDAAHGLGGHVMADGGCKFPGDVSKAFGAGADFVMLGGMFAGHEESGGELVEDDDGVKYKDFYGMS

SEQ ID NO: 101634 - protein, 239 aa, Unknown
  Bacterial polypetide isolated from the Sargasso Sea
MRIEEDIKLDYADVLFRPKRSTLHSRKDVKLERTYKFKYSNHEWSGIPLMAANMDGVGELVMAENLASHQIMTCLTKQHNSKIIKKFKSIKKIFPQVILSTGTSDQDYKRLNDILKENSFFEFICIDIANGYSDHFSKFVSSVRKKYPTKTIIAGNVVTADMTQELILAGADIVKVGIGPGSVCTTRIQTGVGYPQLSAVIECADAAHGLGAHIIADGGCTCPGDVAKAFGGGADFVML

SEQ ID NO: 101635 - protein, 261 aa, Unknown
  Bacterial polypetide isolated from the Sargasso Sea
IKQFKKIKSIYKNIAISIGTKKEDFENLNKVLREFGFIKFICIDVANGYSEYFSKFLKSVRDKYPTKTIIAGNVVTADMTQELILSGADIVKVGIGPGSVCTTRIQTGVGYPQLSAVIECADAAHGLGAHIIADGGCTCPGDVAKGFGGGADFVMLGGMFAGHDEGKGKIVKSNGSKYIEFYGSSSETANKKHYGGLSNYRSSEGRTVRIKYRGKIKDTIQDILGGVRSSCTYVGAPSLKQLSKCTTFVRVAKQFNDTFTK

SEQ ID NO: 101636 - protein, 266 aa, Unknown
  Bacterial polypetide isolated from the Sargasso Sea
MRIEEDIKLDYADVLFRPKRSTLHSRKDVKLERTYKFKYSNHEWSGIPLMAANMDGVGELVMAENLASHQIMTCLTKQHNSKIIKKFKSIKKIFPQVILSTGTSDQDYKRLNDILKENSFFEFICIDIANGYSDHFSKFVSSVRKKYPTKTIIAGNVVTADMTQELILAGADIVKVGIGPGSVCTTRIQTGVGYPQLSAVIECADAAHGLGAHIIADGGCTCPGDVAKAFGGGADFVMLGGMFAGHDEGGGKIIKKNGLKVIEFYG

SEQ ID NO: 101637 - protein, 185 aa, Unknown
  Bacterial polypetide isolated from the Sargasso Sea
DMTQELVLSGADIVKVGIGPGSVCTTRIQTGVGYPQLSAVLECADAAHGLGAHIIADGGCTSPGDVAKGFGAGADFVMLGGMLAGHKEGGGNIIKHNGKSYIEFYGSSSEEANEKHYGGLANYRSSEGKKVRILFRSSLEKTVKDILGGIRSSCTYVGAPTLKQLSKCTTFVRVNNQYNDVFGKV

SEQ ID NO: 101638 - protein, 251 aa, Unknown
  Bacterial polypetide isolated from the Sargasso Sea
IHPHLILSTGTSNEDYKRLNEIMKECSFFEFICIDIANGYSDHFSKFVASVREKYPTKTIIAGNVVTADMTQELVMNGADIVKVGIGPGSVCTTRIQTGVGYPQLSAVIECADAAHGLGAHIIADGGCTCPGDIAKAFGGGGDFVMLGGMFAGHEEGGGKKVKKNGSQFIEFYGSSSDTAITKHYGGLSDYRSSEGKKVQLKYRGKIKDTVQNILGGLRSSCTYVGAPSLKQLSKCTTFVRVNQQYNDTFE

SEQ ID NO: 101639 - protein, 235 aa, Unknown
  Bacterial polypetide isolated from the Sargasso Sea
MRIEEEIKLDYSDVLFRPKRSTLKSRREVNLKRKYKFKHSKLSWEGIPIIASNMDGVGEVGIAKKLASFNMMTALTKQHDNKEINSLQKTKLIHNFVALSCGTSKDSYTRLNKILKKYPKFKFICIDVANGYSENFSHFVSEVRKKYPTKTIIAGNVVTADMTQELVLSGADIVKVGIGPGSVCTTRIQTGVGYPQLSAVLECADAAHGLGAHIIADGGCTSPGDVAKGLEQVQI

SEQ ID NO: 101640 - protein, 325 aa, Unknown
  Bacterial polypetide isolated from the Sargasso Sea
SRSDVDLEREFSFRHTNETLTGVPIVAANMDTTGLFSIAKVLQEHRMLTCTHKFYSTKDFSEAWENGVEPEFVSVTCGSTEESFDLLKRKVGTSTKTKMICIDVANGYREVFLEFVKRVREEFSDNIIIAGNVATREMTEALILAGADVVKVGIGPGSVCTTRKVAGVGYPQLSAISECSDAAHGLNGHVMSDGGCSSPGDVAKAFAAGADFVMLGGMLAGHDESGGEVIEVTGRKYKSFYGMSSSKAMEEHYGSVAKHRAPEGKEVRVPYRGPLEGTVQSILGGLRSACSYVGARRIKDLPKCTTFVKVSRTTNEVYRQFNVDE

SEQ ID NO: 101641 - protein, 223 aa, Unknown
  Bacterial polypetide isolated from the Sargasso Sea
MRIEEEVKLDYSDVLFRPKRSTLKSRKDVNLLRTYKFKYSNNEWSGIPIMGANMDGVGELGIAEKLSEFKMITCLTKQHDVKKLKQNKNIKKIYPNIALSAGIKKDDFNNLDKVLREFSFIKFICIDVANGYSEHFTNFVKSIRDKYPTKTIIAGNVVTADMTQELVLSGADIVKVGIGPGSVCTTRIQTGVGYPQLSAVIECADAAHGLGAHIIADGGCTCP

SEQ ID NO: 101642 - protein, 216 aa, Unknown
  Bacterial polypetide isolated from the Sargasso Sea
GLDVANGYTIKFVDSVKKLRDKCPNATIAAGNVVTADMTQELILAGADIVKVGIGPGSVCTTRIKTGIGYPQLSAVIECADAAHGLNAHIIADGGCASSGDIVKAFAGGADFVMIGGMLAGHDECDGEVEDGVMKFYGMASESAMTRHSNHNDYRGTEGKTVEVEYRGKVNDTIKDILSGVRSACTYVGANKLKDLSKCTTFVRVNNTHNTVFGNE

SEQ ID NO: 101643 - protein, 261 aa, Unknown
  Bacterial polypetide isolated from the Sargasso Sea
HDVKKIKKFKKIKSIYQNVAISIGIKKEDFDNLDKVLKEFSFIKFICIDVANGYSERFSAFIKKVREKYPTKTIIAGNVVTADMTQELILNGADIVKVGIGPGSVCTTRIQTGVGYPQLSAVIECADAAHGLGAHIIADGGCTCPGDVAKGFGAGADFVMLGGMFAGHDEGKGKIVKSNGSKFIEFYGSSSDTANNKHYGGLSNYRSSEGRTVRVKYRGKIKDSISNILGGVRSSCTYVGAPSLKQLSKCTTFVRVSNQFN

SEQ ID NO: 101644 - protein, 257 aa, Unknown
  Bacterial polypetide isolated from the Sargasso Sea
KKKGIEKFISLSCGTSQESYKRLNKILSKFPNFQFICIDVANGYSENFSKFVSQVRSKHPKKTIVAGNVVTADMTQELILSGADIVKVGIGPGSVCTTRIQTGVGYPQLSAVMECADAAHGLGAHIIADGGCTCPGDVAKAFGGGADFVMLGGMLAGHKEGGGKIIESQNKKFIEFYGSSSEEANHKHYGGLADYRSSEGKKVRIPFRNSLDETIRDILGGIRSSCTYVGAPTLKQLSKCTTFIRVNNQYNDTFGKI

SEQ ID NO: 101645 - protein, 309 aa, Unknown
  Bacterial polypetide isolated from the Sargasso Sea
EEEVKLDYSDVLFRPKRSTLKSRSEVDLKRKYKFKHSKMIWEGIPIIASNMDGVGEVGVAKKLTAFQMMTALTKQHGDKDIKNLQKNKFIHNYVTLSCGTSKDSYSRLNNLLKTNPKFKFICIDVANGYSENFSNFVSEVRKKHPSKTIIAGNVVTADMTQELVLSGADIVKVGIGPGSVCTTRIQTGVGYPQLSAVLECADAAHGLGAHIIADGGCTSPGDVAKGFGAGADFVMLGGMLAGHKEGGGDIIKDNNKKYIEFYGSSSEEANEKHYGGLADYRSSEGKKVRIEYRSSLDKTVRDILGGIRS

SEQ ID NO: 101646 - protein, 195 aa, Unknown
  Bacterial polypetide isolated from the Sargasso Sea
KTIIAGNVVTADMTQELVLSGADIVKVGIGPGSVCTTRIQTGVGYPQLSAVIECADAAHGLGAHVIADGGCTCPGDVAKAFGGGADFVMLGGMLAGHDEGKGKIIKINGNKYIEFYGSSSEVANKKHYGGLSSYRSSEGRKVRVKYRGKINDTILNILGGVRSSCTYVGAPSLKQLSKCTTFVRVSSQFNDSLIK

SEQ ID NO: 101647 - protein, 250 aa, Unknown
  Bacterial polypetide isolated from the Sargasso Sea
HQHLILSTGTSNEDYKRLNEIMKECSFFEFICIDIANGYSDHFSKFVASVREKYPTKTIIAGNVVTADMTQELVMNGADIVKVGIGPGSVCTTRIQTGVGYPQLSAVIECADAAHGLGAHIIADGGCTCPGDVAKAFGGGGDFVMLGGMFAGHEEGGGKKVKKNGSQFIEFYGSSSDTALEKHYGGLSDYRSSEGKKVQLKYRGKIKDTVQNILGGLRSSCTYVGAPSLKQLSKCTTFVRVNQQFNDTFE

SEQ ID NO: 101648 - protein, 233 aa, Unknown
  Bacterial polypetide isolated from the Sargasso Sea
KILKKYPKFQFICIDVANGYSENFSHFVSSIRKKYPKKTIIAGNVVTADMTQELVLSGADIVKVGIGPGSVCTTRIQTGVGYPQLSAVMECADAAHGLGAHIIADGGCTCPGDVAKGFGAGADFVMLGGMLAGHKEGGGRIIEQNGQKYIEFYGSSSEEANEKHYGGLADYRSSEGKKVKLLLKNSLDKTIRDILGGVRSSCTYVGAPSLKQLSKCTTFVRVNNQYNDTFGKV

SEQ ID NO: 101649 - protein, 153 aa, Unknown
  Bacterial polypetide isolated from the Sargasso Sea
GVGYPQLSAVIECADAAHGLGAHIIADGGCTCPGDVAKAFGGGADFVMLGGMFAGHDEGGGKIIKKNGSKVIEFYGSSSETALNKHYGGHADYRSSEGKKVQLKYRGKIKDTVLNILGGLRSSCTYVGAPSLKQLSKCTTFVRVNQQYNDTFE

SEQ ID NO: 101650 - protein, 309 aa, Unknown
  Bacterial polypetide isolated from the Sargasso Sea
MSSRGGSETKSEHINFLWSKKKWTGIPIMSANMDTVGTPAMHKVLSKYNLITCPARHHLKKKSDQFKKGQRNICWFGGIDDIPKLSKIADGFIGLDVANGYTIKFVDAVKKLREKCPNATIAAGNVVTADMTQELILAGADIVKVGIGPGSVCTTRIKTGIGYPQLSAVIECADAAHGLDAHIIADGGCVSSGDIVKAFAGGADFVMIGGMLAGHDECDGTVEDGVMKFYGMASESAMSKHGNHNEYRGTEGKTVEVKYRGKADDTVKDILSGIRSACTYVGANRLKTLSKCTTFVRVNNTHNTVYGNE

SEQ ID NO: 101651 - protein, 175 aa, Unknown
  Bacterial polypetide isolated from the Sargasso Sea
GADIVKVGMVLGSVCTTRIQTGVGYPQLSAVIECADAAHGLGAHIIADGGCTCPGDVAKGFGGGADFVMLGGMLAGHDEGKGKVVKINGSKYIEFYGSSSDVANKKHYGGLSDYRSSEGRTVRVKYRGNIKDTVLNILGGVRSSCTYVGAPSLKQLSKCTTFVRVAKQFNDTFTK

SEQ ID NO: 101652 - protein, 242 aa, Unknown
  Bacterial polypetide isolated from the Sargasso Sea
RWPRKICWFGGIDDISNLSKASSAFIGLDVANGYTIKFVDAVKQLREKCPKATIAAGNVVTADMTQELILAGADIVKVGIGPGSVCTTRIKTGIGYPQLSAVIECADAAHGLGAHIIADGGCTSSGDIVKAFAGGADFVMIGGMLAGHDECDGTVEDGVMKFYGMASESAMSRHGNHNDYRGTEGKLVEVNYRGKADDTIKDILSGIRSACTYVGANRLKTLSKCTTFVRVNNTHNTIFGNS

SEQ ID NO: 101653 - protein, 299 aa, Unknown
  Bacterial polypetide isolated from the Sargasso Sea
FRPKRSTLKSRKDVDLNRTYKFKHSNKEWSGVPIIASNMDGVGELNVSKTLSNYKMITTLTKQHNSNDINDYKLIKDIYNYISLSCGTSEESYDRLNNILREHSYFQFICIDVANGYSENFTKFVSSVREKHPSKTIIAGNVVTADMTQELILSGADIIKVGIGPGSVCTTRIQTGVGYPQLSAVIECADAAHGLGAHIIADGGCTCPGDVAKAFGGGADFVMLGGMLAGHKEGGGKILKENGKEFIEFYGSSSEEANDKHYGGLSDYRSSEGKKVSIPYRGKLDDTIKDILGGVRSSV

SEQ ID NO: 101654 - protein, 221 aa, Unknown
  Bacterial polypetide isolated from the Sargasso Sea
SSGFIGLDVANGYTIKFVDAVKKLRDKCPDATIAAGNVVTADMTQELILAGADIVKVGIGPGSVCTTRIKTGIGYPQLSAVIECADAAHGLDAHIIADGGCVNSGDIVKAFAAGADFVMLGGMLAGHDECDGEVENGVMKFYGMASESAMSRHGNHNAYRGVEGKTVEVEYRGKADDTIKDILSGIRSACTYVGATRLKTLSKCTTFVRVNNTHNTIFGIE

SEQ ID NO: 101655 - protein, 214 aa, Unknown
  Bacterial polypetide isolated from the Sargasso Sea
GYSEHFSKFLKSVRDKYPTKTIIAGNVVTADMAQELVLSGADIVKVGIGPGSVCTTRIQTGVGYPQLSAVIECADAAHGLGAHIIADGGCTCPGDVAKAFGGGADFVMLGGMFAGHDEGEGKLIKSNGHKFIEFYGSSSDIANKKHYGGLSDYRSSEGRTVRIKYRGKIKDTINNILGGVRSSCTYVGAPSLKQLSKCTTFVRVAKQFNDTFTK

SEQ ID NO: 101656 - protein, 171 aa, Unknown
  Bacterial polypetide isolated from the Sargasso Sea
VKVGIGPGSVCTTRIQTGVGYPQLSAVIECADAAHGLGAHVIADGGCTCPGDVAKGFGGGADFVMLGGMLAGHDEGNGKIVKVNGDKFIEFYGSSSEVANKKHYGGLSSYRSSEGRKVRVKYRGKINDTILNILGGVRSSCTYVGAPSLKQLSKCTTFVRVSNQFNDSLIK

SEQ ID NO: 101657 - protein, 276 aa, Unknown
  Bacterial polypetide isolated from the Sargasso Sea
LLRTYRFKYSKNEWSGIPIMAANMDGVGELSIAEKLNVHEMITCLTKQHDVKRIKQNKNIKKMYSNIALSVGIKKEDFDNLDKVLKEFSFFKFICIDVANGYSEHFTNFVKSVRDKYPTKTIIAGNVVTADMTQELVLSGADIVKVGIGPGSVCTTRIQTGVGYPQLSAVIECADAAHGLGAHVIADGGCTCPGDVAKAFGGGADFVMLGGMLAGHDEGKGKIVKFNGNKYIEFYGSSSEVANKKHYGGLSSYRSSEGRKVRVKYRGKINDTILNL

SEQ ID NO: 101658 - protein, 192 aa, Unknown
  Bacterial polypetide isolated from the Sargasso Sea
IAGNVVTADMTQELVLSGADIVKVGIGPGSVCTTRIQTGVGYPQLSAVIECADAAHGLGAHVIADGGCTCPGDVAKGFGGGADFVMLGGMLAGHDEGNGKIVKVNGEKYIEFYGSSSEVANKKHYGGLSNYRSSEGRKVRVKYRGKINDTILNILGGVRSSCTYVGAPSLKQLSKCTTFVRVSSQFNDSLIK

SEQ ID NO: 101659 - protein, 195 aa, Unknown
  Bacterial polypetide isolated from the Sargasso Sea
KTIIAGNVVTADMTQELILSGADIVKVGIGPGSVCTTRIQTGVGYPQLSAVIECADAAHGLGAHIIADGGCTCPGDVAKAFGGGADFVMLGGMFAGHDEGKGKLVKSNGSKYIEFYGSSSETANKKHYGGLSDYRSSEGRTVRVKYRGKINDTILNILGGVRSSCTYVGAPSLKQLSKCTTFVRVTKQFNDTFVK

SEQ ID NO: 101660 - protein, 181 aa, Unknown
  Bacterial polypetide isolated from the Sargasso Sea
ELILSGADIVKVGIGPGSVCTTRIQTGVGYPQLSAVMECADAAHGLGAHIIADGGCTCPGDVAKGFGAGADFVMLGGMLAGHKEGGGEIIERKGKKFIEFYGSSSEEANEKHYGGLANYRSSEGKKVVIPLKNSLDKTIRDILGGIRSSCTYVGAPSLKQLSKCTTFVRVNNQYNDTFGKI

SEQ ID NO: 101661 - protein, 217 aa, Unknown
  Bacterial polypetide isolated from the Sargasso Sea
ANGYSENFSHFVSEVRKKYPTKTIIAGNVVTADMTQELVLSGADIVKVGIGPGSVCTTRIQTGVGYPQLSAVLECADAAHGLGAHIIADGGCTSPGDVAKGFGAGADFVMLGGMLAGHKEGGGEIIRDHEKSYIEFYGSSSEEANEKHYGGLASYRSSEGKKVRIKYRSSLDKTVKDILGGIRSSCTYVGAPTLKQLSKCTTFVRVNNQYNDVFGKV

SEQ ID NO: 101662 - protein, 258 aa, Unknown
  Bacterial polypetide isolated from the Sargasso Sea
MRIEDEIKLTFDDVLIRPKRSTLISRSEVKLEREFKFRHNKHTWEGIPIFSANMDTTGTFETAKALQKHKMLTAIHKFYTLEDWKDNIDSLDPNYVSVTVGQSQEDYDLGKQIFELSKDLKFLCIDVANGYREDFLEAVKKYRETYKDKIIIAGNVATREMTEALILAGADIVKIGIGPGSVCTTRSVAGVGYPQLSSISECSDAAHGLGGHVLADGGCKYPGDVSKAFGAGADFVMLGGMFAGHEESGGELVTGEDG

SEQ ID NO: 101663 - protein, 171 aa, Unknown
  Bacterial polypetide isolated from the Sargasso Sea
VKVGIGPGSVCTTRIQTGVGYPQLSAVIECADAAHGLGAHIIADGGCTCPGDVAKAFGGGADFVMLGGMFAGHDEGKGKLVKSNGSKYIEFYGSSSETANKKHYGGLSDYRSSEGRTVRVKYRGKINDTILNILGGVRSSCTYVGAPSLKQLSKCTTFVRVTKQFNDTFVK

SEQ ID NO: 101664 - protein, 206 aa, Unknown
  Bacterial polypetide isolated from the Sargasso Sea
FLKSVRDKYPTKTIIAGNVVTADMTQELILSGADIVKVGIGPGSVCTTRIQTGVGYPQLSAVIECADAAHGLGAHIIADGGCTCPGDVAKGFGGGADFVMLGGMFAGHDEGKGKIVKSNGSKYIEFYGSSSETANKKHYGGLSNYRSSEGRTVRIKYRGKIKDTIQDILGGVRSSCTYVGAPSLKQLSKCTTFVRVAKQFNDTFTK

SEQ ID NO: 101665 - protein, 260 aa, Unknown
  Bacterial polypetide isolated from the Sargasso Sea
ASNMDGVGELGVAEKLSEYGMITCLTKQHNIQKIKKFKKIKSIHPNIALSIGIKKEDFENLDKILKEYSFIKFICIDVANGYSEHFSKFLKSVRDKYPTKTIIAGNVVTADMAQELVLSGADIVKVGIGPGSVCTTRIQTGVGYPQLSAVIECADAAHGLGAHIIADGGCTCPGDVAKAFGGGADFVMLGGMFAGHDEGEGKLIKSNGHKFIEFYGSSSDIANKKHYGGLSDYRSSEGRTVRIKYRGKKKDTINNILGGV

SEQ ID NO: 101666 - protein, 229 aa, Unknown
  Bacterial polypetide isolated from the Sargasso Sea
MYKFGFVRIEEDLKLDYSDVLFRPKRSTLSSRKDVNLKRTYKFKYSNNEWSGIPIMAANMDGVGELGIAEKLSNYGMITCLTKQHDVKKIKQFKKIKSIYPNVALSIGIKKEDFQNLDKVLKEYSFIKFLCIDVANGYSERFSAFLKSVRDKYPTKTIIAGNVVTADMTQELILSGADIVKVGIGPGSVCTTRIQTGVGYPQLSAVIECADAAHGLGAHMMQMVAVLPR

SEQ ID NO: 101667 - protein, 285 aa, Unknown
  Bacterial polypetide isolated from the Sargasso Sea
MRIEEELKLDYSDVLFRPKRSTLRSRKDVNLLRTYRFKYSKNEWSGIPIMAANMDGVGELSVAEKLNEYGMITSLTKQHDVKKIKQNKNIKKIYSNIALSVGIKKEDFLNLDKVLKEFSFFKFICIDVANGYTEHFTNFIKSVRDKYPTKTIIAGNVVTADMTQELVLSGADIVKVGIGPGSVCTTRIQTGVGYPQLSAVIECADAAHGLGAHVIADGGCTCPGDVAKGFGGGADFVMLGGMLAGHDEGNGKIVKVNGEKYIEFYGSSSEVANKKHYGGLSDYRS

SEQ ID NO: 101668 - protein, 226 aa, Unknown
  Bacterial polypetide isolated from the Sargasso Sea
KLSKTTSGFIGLDVANGYTIKFVDSVKKLRDKCPDATIAAGNVVTADMTQELILAGADIVKVGIGPGSVCTTRIKTGIGYPQLSAVIECADAAHGLNAHIIADGGCTNSGDIVKAFAGGADFVMIGGMLAGHDECDGVLEDGVMKFYGMASESAMTRHSNHNDYRGTEGKTVEVEYRGKADDTIKDILSGIRSACTYVGANKLKDLSKCTTFVRVNNTHNTVFGNE

SEQ ID NO: 101669 - protein, 231 aa, Unknown
  Bacterial polypetide isolated from the Sargasso Sea
FERYSFFQFICIDIANGYSDHFSKFVKSVREKYPTKTIIAGNVVTADMTQELILSGADVVKVGIGPGSVCTTRIQTGVGYPQLSAVIECADAAHGLGAHIIADGGCTCPGDVAKAFGAGADFVMLGGMFAGHDEGSGKVVKKNGSKYIEFYGSSSDTAVEKHYGGLADYRSSEGKTVRIEYRGKIKDTVLNILGGVRSSCTYVGAPSLKQLSKCTTFVRVNNQFNDTFKNK

SEQ ID NO: 101670 - protein, 292 aa, Unknown
  Bacterial polypetide isolated from the Sargasso Sea
PNHGCNMDGVGELGVADKMSEFDMITCLTKQHDVKKLKQYKKIKSIYKNIALSIGIKKEDFIRLDKLLKEFNFIKFICIDVANGYSERFSKFIKSVRDKYPTKTIIAGNVVTADMTQELILSGADIVKVGIGPGSVCTTRIQTGVGYPQLSAVMECADAAHGLGAHIIADGGCTCPGDVAKGFGGGADFVMLGGMLAGHDEGKGKIVRSNGHKYIEFYGSSSLTANKKHYGGLSDYRSSEGRNVRVKYRGKIKDTISNILGGIRSSCTYVGAPSLKQLSKCTTFVRVSNQFN

SEQ ID NO: 101671 - protein, 231 aa, Unknown
  Bacterial polypetide isolated from the Sargasso Sea
LKKYPKFKFICIDVANGYSENFSNFVSEVRKKYPKKTIIAGNVVTADMTQELVLSGADIVKVGIGPGSVCTTRIQTGVGYPQLSAVMECADAAHGLGAHIIADGGCTCPGDVAKGFGAGADFVMLGGMLAGHIEGGGDIIEEKGSKYIEFYGSSSEEANEKHYGGLANYRSSEGKKVKIQMKNSLDSTIRDILGGVRSSCTYVGASSLKQLSKCTTFVRVNSQYNDTFGKV

SEQ ID NO: 101672 - protein, 251 aa, Unknown
  Bacterial polypetide isolated from the Sargasso Sea
RFKYSKNEWSGIPIMAANMDGVGELSIAEKLSEHGMITCLTKQHDVKKLKKNKNIKKIYPNIALSVGIKKEDFANLDKVLKEFSFFKFICIDVANGYSEHFTNFVKSVRDKYPTKTIIAGNVVTADMTQELVLSGADIVKVGIGPGSVCTTRIQTGVGYPQLSAVIECADAAHGLGAHIIADGGCTCPGDVAKGFGGGADFVMLGGMLAGHDEGNGKIVKINGSKYIEFYGSSSEVANKKHYGGLADYRSS

SEQ ID NO: 101673 - protein, 264 aa, Unknown
  Bacterial polypetide isolated from the Sargasso Sea
GVPIMSSNMDTVGTFEMHEELSQYDMVTCIARQHNTKGELWNHAEKKNKLCVMSGISDTELSEIIGVSNTYPDIAFVGLDVANGYTVNFVDAVKRLREHLPHSTIIAGNVVTGDMTAELILSGVDIVKVGVGPGSVCTTRIKTGIGYPQLSAVMECADAAHGLNAHIIADGGCNSSGDIVKAFSGGADFVMIGGILAGHDECEGELVFEDDNPEPIGMQFYGMASRTAMDKHGHSNREYRGEEGKTVSVPYRGAVRDTIVDILS

SEQ ID NO: 101674 - protein, 269 aa, Unknown
  Bacterial polypetide isolated from the Sargasso Sea
TKQHDVKKIKQSKNIKKIYPNIALSVGIKKEDFQNLDKVLKEFSFFKFICIDVANGYSEHFTNFVKSVRDKYPTKTIIAGNVVTADMTQELVLSGADIVKVGIGPGSVCTTRIQTGVGYPQLSAVIECADAAHGLGAHIIADGGCTCPGDVAKGFGGGADFVMLGGMLAGHDEGKGKIVKVNGTKFIEFYGSSSEVANKKHYGGLANYRSSEGRNVRVKYRGKINDTILNILGGVRSSCTYVGAPSLKQLSKCTTFVRVSSQYNDTFTK

SEQ ID NO: 101675 - protein, 260 aa, Unknown
  Bacterial polypetide isolated from the Sargasso Sea
KDVNLKRTYRFKYSKNEWSGIPIMAANMDGVGVLGVAEKLSDYGMITCLTKQHDVKKIKQFKKIKSIYPNVALSIGTKKEDFQNLDKVLKEFSFIKFICIDVANGYSEHFSKFLKSVRDKYPTKTIIAGNVVTADMTQELILSGADIVKVGIGPGSVCTTRIQTGVGYPQLSAVIECADAAHGLGAHIIADGGCTCPGDVAKAFGGGADFVMLGGMFAGHDEGKGKLVKSNGSKYVEFYGSSSETANKKHYGGLSDYRSS

SEQ ID NO: 101676 - protein, 210 aa, Unknown
  Bacterial polypetide isolated from the Sargasso Sea
MDVANGYTELFLDLVKRIRENFSNPLIAGNVVTGEMTEALILAGADIVKIGIGPGSVCTTRTVTGVGYPQLSAIIECADAAHGLRGHVISDGGCSTPGDVAKAFGAGADFVMLGGMFAGHEESGGKLIEKDGKKYKQFYGMSSDTAMERYYGDIKNYRASEGETISLEYKGPIDKTIQQILGGLRSAATYVGAKDIKNLPKCTTFILKYK

SEQ ID NO: 101677 - protein, 245 aa, Unknown
  Bacterial polypetide isolated from the Sargasso Sea
MRIEEDIKLDYADVLFRPKRSTLHSRKDVKLKRTYKFKYSNHEWSGIPLMAANMDGVGELQIAEKLAEHEIATCLTKQHDSKAIKKFSSIKKIFPHVILSTGTSDEDYKRLNEILKEYSFFEFICIDIANGYSDHFSKFVSSVRKKYPTKTIIAGNVVTADMTQELVLAGADIVKVGIGPGSVCTTRIQTGVGYPQLSAVIECADAAHGLGAHIIADGGCTCPGDVAKAFGGGADFVMLGSMFAG

SEQ ID NO: 101678 - protein, 253 aa, Unknown
  Bacterial polypetide isolated from the Sargasso Sea
YKFKHSKLTWEGVPIIASNMDGVGEVGIASKLASFNMMTALTKQHDNKEIKSLQKTKSIHDFVALSCGTSKDSYSRLNNLFKKNPKFKFICIDVANGYSENFSHFVSEVRKKYPSKTIIAGNVVTADMTQELVLSGADIVKVGIGPGSVCTTRIQTGVGYPQLSAVLECADAAHGLGAHIIADGGCTSPGDVAKGFGAGADFVMLGGMLAGHKEGGGTIISDNGKSYIEFYGSSSEEANEKHYGGLAHYRSSE

SEQ ID NO: 101679 - protein, 298 aa, Unknown
  Bacterial polypetide isolated from the Sargasso Sea
DLNTSDNQWSGIPIMAANMDGVGELAIAEKLSEYGMITCLTKQHDVKKINKFKKIKKIYNNIALSIGIKKEDFERLDKILKQFSFFKFICIDVANGYSERFSNFIKSVRDKYPTKTIIAGNVVTADMTQELILSGADIVKVGIGPGSVCTTRIQTGVGYPQLSAVMECADAAHGLGSHIIADGGCTCPGDVAKGFGGGADFVMLGGMFAGHDEGKGKVVKSNGSKYVEFYGSSSDTANKKHYGGLSDYRSSEGRTVRVKYRGKIKDTLSNILGGIRSSCTYVGAPSLKQLSKCTTFVR

SEQ ID NO: 101680 - protein, 202 aa, Unknown
  Bacterial polypetide isolated from the Sargasso Sea
SVKKLRDKCPNATIAAGNVVTADMTQELILAGADIVKVGIGPGSVCTTRIKTGIGYPQLSAVIECADAAHGLNAHIIADGGCTNSGDIVKAFAGGADFVMIGGMLAGHDECDGEVEDGVMKFYGMASESAMTRHSNHNDYRGTEGKTVEVEYRGKADDSIKDILSGIRSACTYVGANKLKDLSKCTTFVRVNNTHNTIFGNE

SEQ ID NO: 101681 - protein, 221 aa, Unknown
  Bacterial polypetide isolated from the Sargasso Sea
ANGYREDFLEAVINYRETYKDKIIIAGNVATREMTEALILAGADIVKIGIGPGSVCTTRSVAGVGYPQLSSISECSDAAHGLGGHVLADGGCKYPGDVSKAFGAGADFVMLGGMFAGHEESGGELVTGEDGEQYKDFYGMSSTKAQQTYYGDLALHRAPEGKKVRLKYKGPIDQTVQSILGGMRSACSYVGAKKLKDLPKSTTFIRVTQTTNEIYTGSENL

SEQ ID NO: 101682 - protein, 257 aa, Unknown
  Bacterial polypetide isolated from the Sargasso Sea
CPAKHHLKKNSNEFRQGQSNICWFGGIDDISKLSKANSGFIGLDVANGYTIKFVDSVKKLRDKCPNATIAAGNVVTADMTQELILAGADIVKVGIGPGSVCTTRIKTGIGYPQLSAVIECADAAHGLNAHIIADGGCTSSGDIVKAFAGGADFVMIGGMLAGHDECDGEVEDGIMKFYGMASESAMTRHSNHNNYRGTEGKTVEVEYRGKANNTIKDVLSGIRSACTYVGANKLKDLSKCTTFVRVNNTHNTVFGSE

SEQ ID NO: 101683 - protein, 297 aa, Unknown
  Bacterial polypetide isolated from the Sargasso Sea
PIMAANMDGVGVLGVAEKLSDYGMITCLTKQHDVKKIKQFKKIKSIYPNVALSIGTKKEDFQNLDKVLKEFSFIKFICIDVANGYSEHFSKFLKSVRDKYPTKTIIAGNVVTADMTQELILSGADIVKVGIGPGSVCTTRIQTGVGYPQLSAVIECADAAHGLGAHIIADGGCTCPGDVAKAFGGGADFVMLGGMFAGHDEGKGKLVKSNGSKYVEFYGSSSETANNKHYGGLSDYRSSEGRTVRVKYRGKINDTILNILGGVRSSCTYVGAPSLKQLSKCTTFVRVTKQFNDTFTK

SEQ ID NO: 101684 - protein, 290 aa, Unknown
  Bacterial polypetide isolated from the Sargasso Sea
MDGVGEIEIAKNLAKFEMLTCLTKQHDLKTIKRNSSIKGIHPHLILSTGTSNEDYKRLNEIMKECSFFEFICIDIANGYSDHFSKFVSSVREKYPTKTIIAGNVVTADMTQELVMNGADIVKVGIGPGSVCTTRIQTGVGYPQLSAVIECADAAHGLGAHIIADGGCTCPGDVAKAFGGGGDFVMLGGMFAGHEEGGGKKVKKNGSQFIEFYGSSSDTAITKHYGGLADYRSSEGKKVQLKYRGKIKDTVQNILGGLRSSCTYVGAPSLKQLSKCTTFVRVNQQYNDTFE

SEQ ID NO: 101685 - protein, 178 aa, Unknown
  Bacterial polypetide isolated from the Sargasso Sea
KKTIIAGNVVTADMTQELVLSGADIVKVGIGPGSVCTTRIQTGVGYPQLSAVMECADAAHGLGAHIIADGGCTCPGDVAKGFGAGADFVMLGGMLAGHKEGGGNIIEYNGKEFIEFYGSSSEEANEKHYGGLANYRSSEGKKVKLPLKSSIDKTIRDILGGVRSSCTYVGAPSLKQFK

SEQ ID NO: 101686 - protein, 302 aa, Unknown
  Bacterial polypetide isolated from the Sargasso Sea
RSTLKSRKDVNLLRTYRFKYSKNEWSGIPIMAANMDGVGELSIAEKLNDHRMITCLTKQHDVKKIKQSKNIKKMYSNIALSVGIKKEDFENLDKVLKEFSFFKFICIDVANGYSEHFTNFVKSVRDKYPTKTIIAGNVVTADMTQELVLSGADIVKVGIGPGSVCTTRIQTGVGYPQLSAVIECADAAHGLGAHVIADGGCTCPGDVAKAFGGGADFVMLGGMLAGHDEGKGKVVKINGNKFIEFYGSSSEVANKKHYGGLSSYRSSEGRKVRVKYRGKINDTILNLLGGVRSSCTYVGAPS

SEQ ID NO: 101687 - protein, 246 aa, Unknown
  Bacterial polypetide isolated from the Sargasso Sea
MRIEEELKLDYSDVLFRPKRSTLKSRKDVNLLRTYRFKYSKNEWSGIPIMAANMDGVGELSIAEKLNEYQMITCLTKQHDVKKIKENKNIKKIYPNIALSVGIKKEDFQNLDKVLKEFSFFKFICIDVANGYSEHFTNFIKSVRDKYPTKTIIAGNVVTADMTQELVLSGADIVKVGIGPGSVCTTRIQTGVGYPQLSAVIECADAAHGLGAHVIADGGCTCPGDVAKGFGGGADFVMLGGMLAGH

SEQ ID NO: 101688 - protein, 257 aa, Unknown
  Bacterial polypetide isolated from the Sargasso Sea
IKQNKHIKKMYSNIALSVGIKKEDFENLDKVLKEFSFFKFICIDVANGYSEHFTNFVKSVRDKYPTKTIIAGNVVTADMTQELVLSGADIVKVGIGPGSVCTTRIQTGVGYPQLSAVIECADAAHGLGAHVIADGGCTCPGDVAKGFGGGADFVMLGGMLAGHDEGKGKIVKVNGDKFIEFYGSSSEVANKKHYGGLSSYRSSEGRKVRVKYRGKINDTILNILGGVRSSCTYVGAPSLKQLSKCTTFVRVSNQFND

SEQ ID NO: 101689 - protein, 288 aa, Unknown
  Bacterial polypetide isolated from the Sargasso Sea
WNGVPIIAANMDGVGEIEVAKKLASFKLMTALTKQHESKDINKIYKNKMNHSLVALSCGTSKESFNRLTKLIVKYPNFQFICIDVANGYSENFSQFVYNVRKKYPKKTIIAGNVVTADMTQELVLSGADIVKVGIGPGSVCTTRIQTGVGYPQLSAVIECADAAHGLGAHIIADGGCTCAGDVAKGFGAGADFVMLGGMLAGHSEGGGNLIEENGNKYIEFYGSSSEEANTKHYGGLADYRSSEGKKVKITYRPSLEKTIRDILGGIRSSCTYVGAPTLKQLSKCTTL

SEQ ID NO: 101690 - protein, 249 aa, Unknown
  Bacterial polypetide isolated from the Sargasso Sea
PHVVLSTGTSDEDYKRLNEILKEYSFFEFICVDIANGYSDHFSKFVSSVRKKYPTKTIIAGNVVTADMTQELILAGADIVKVGIGPGSVCTTRIQTGVGYPQLSAVIECADAAHGLGAHIIADGGCTCPGDVAKAFGGGADFVMLGGMFAGHDEGGGKVLKKNGSKLIEFYGSSSETALNKHYGGHADYRSSEGKKVQLKYRGKIKDTVLDILGGLRSSCTYVGAPSLKQLSKCTTFVRVNQQYNDTFE

SEQ ID NO: 101691 - protein, 162 aa, Unknown
  Bacterial polypetide isolated from the Sargasso Sea
VCTTRIQTGVGYPQLSAVIECADAAHGLGAHMIADGGCTCPGDVAKAFGGGADFVMLGGMFAGHDEGGGKIVKSNGNKYIEFYGSSSDTANKKHYGGLSNYRSSEGRTVSVKYRGSIKDTIQNILGGLRSSCTYVGAPSLKQLSKCTTFVRVARQFNDTFSK

SEQ ID NO: 101692 - protein, 276 aa, Unknown
  Bacterial polypetide isolated from the Sargasso Sea
MRIEEDLKLDYSDVLFRPKRSTLSSRKEVNLKRTYKFKYSNHEWTGIPIMAANMDGVGEMGVAESLSEFGMVTCLTKQHDVTKLKKFKKLKSIYQNIALSIGIKKEDFQRLDETLKEFSFIKFICVDVANGYSEHFSAFIKSVRDKYPTKTIIAGNVVTADMAQELVLSGADIVKVGIGPGSVCTTRIQTGVGYPQLSAVIECADAAHGLGAHIIADGGCTCPGDVAKGFGGGADFVMLGGMLAGHDEGSGKIVKSNGSKYIEFYGSSSETANKKH

SEQ ID NO: 101693 - protein, 347 aa, Unknown
  Bacterial polypetide isolated from the Sargasso Sea
MRIEEDLKLGFKDVLFRPKRSTLKSRSQVSLTRQFTFKHTQTQWQGVPVIAANMDTVGSFAMARTLANFEMMTAVHKHYSLAQWQTFVNETDPALLGHVMVSTGTSEDDFTKTRQILAMSSALRFICVDVANGYSQHFVEFLRKIREACPNHVILAGNVVTGEMVEELILSGADIVKVGIGPGSVCTTRVKTGVGYPQLSAIIECADAAHGLGGQIVGDGGCTCPGDVAKAFGGGADFVMLGGMLAAHEECGGEIVDVDGEPFMKFYGMSSSSAMDKHAGGVAEYRASEGKTVLLPYRGPVENTVRDILGGVRSTCTYVGASQLKELTKRTTFIRVREQENNVYGKE

SEQ ID NO: 101694 - protein, 189 aa, Unknown
  Bacterial polypetide isolated from the Sargasso Sea
HVVTADMTQELILSGADIVKVGIGPGSVCTTRIQTGVGYPQLSAVIECADAAHGLGAHMIADGGCTCPGDVAKGFGGGADFVMLGGMFAGHDEGKGKIVKSNGSKYIEFYGSSSDTANNKHYGGLSSYRSSEGRTVRVKYRGKIENTIQNILGGIRSSCTYVGAPSLKQLSKCTTFVRVAKQFNDTFTK

SEQ ID NO: 101695 - protein, 213 aa, Unknown
  Bacterial polypetide isolated from the Sargasso Sea
MRIEEEIKLDYSDVLFRPKRSTLKSRKDVDLNRTYNFKHSKLKWKGTPIIASNMDGVGEINIAKKLLSHKLMTALTKQHSIKQIGSINNNSSFHNFVALSCGTSPDSFNRLNSILKKYSKFQFICIDVANGYSENFSHFVSNVRKKYPKKTIIAGNVVTADMTQELVLSGADIVKVGIGPGSVCTTRIQTGVGYPQLSAVMECADAAHGLGAH

SEQ ID NO: 101696 - protein, 164 aa, Unknown
  Bacterial polypetide isolated from the Sargasso Sea
PGIVCTTRIQTGVGYPQLSAVIECADAAHGLGAHIIADGGCTCPGDVAKAFGGGADFVMLGGMFAGHDEGGGKIIKKNGSKVIEFYGSSSETALNKHYGGHADYRSSEGKKVQLQYRGKIKDTVLNILGGLRSSCTYVGAPSLKQLSKCTTFVRVNQQYNDTFE

SEQ ID NO: 101697 - protein, 330 aa, Unknown
  Bacterial polypetide isolated from the Sargasso Sea
MLVNEDIKLDYSDVLIRPKRSTMSSRGEVNLERTHTFLWSKKKWTGIPIMSANMDTVGTPAMHNVLSKYNLVTCPARHYLKKNSEKFKKRQTNICWLGGIDDISKLSKTSGGFVGLDVANGYTIKFVDAVKKLRQKCPNATIVAGNVVTADMTQELILAGADIVKVGIGPGSVCTTRIKTGIGYPQLSAVIECADAAHGLDAHIIADGGCTSSGDIVKAFAGGADFVMIGGMLAGHDECKGKVEDGFMKFYGMASESAMNKHGNHNSYRGTEGKTVVVKYRGKADDTVKDILSGIRSACTYVGANKLKTLSKCTTFVRVNNTHNKIFGEE

SEQ ID NO: 101698 - protein, 307 aa, Unknown
  Bacterial polypetide isolated from the Sargasso Sea
MYKFGFVRIEEELKLDYSDVLFRPKRSTLQSRKDVNLLRTYRFKYSKNEWSGIPIMAANMDGVGELGIAEKLSEYGMITCLTKQHDVKKIKQFKKIKSIYKNIAISIGTKKEDFENLNKVLREFGFIKFICIDVANGYSEYFSKFLKSVRDKYPTKTIIAGNVVTADMTQELILSGADIVKVGIGPGSVCTTRIQTGVGYPQLSAVIECADAAHGLGAHIIADGGCTCPGDVAKGFGGGADFVMLGGMFAGHDEGKGKIVKSNGSKYIEFYGSSSETANKKHYGGLSNYKSSEGRTVRIKYRGKIKD

SEQ ID NO: 101699 - protein, 330 aa, Unknown
  Bacterial polypetide isolated from the Sargasso Sea
MLVNEEIKLDYSDVLIRPKRSTMSSRGEVKLERTHRFLWSKKKWTGIPIMSANMDTVGTPAMHKVLSKYNLITCPARHHLKRKSDQFKKAHRNICWFGGIDDIPKLSKISDGFIGLDVANGYTIKFVDAVKKLRDKCPNATIAAGNVVTADMTQELILAGADIVKVGIGPGSVCTTRIKTGIGYPQLSAVIECADAAHGLDAHIIADGGCVSSGDIVKAFAGGADFVMIGGMLAGHDECDGIVEDGVMKFYGMASESAMSKHGNHNEYRGTEGKTVEVKYRGKADDTVKDILSGIRSACTYVGANRLKTLSKCTTFVRVNNTHNTVYGNE

SEQ ID NO: 101700 - protein, 345 aa, Unknown
  Bacterial polypetide isolated from the Sargasso Sea
MRIEEDIKLDYADVLFRPKRSTLSSRKDVELKRTYKFKYSNHQWSGIPLMAANMDGVGEIEVAKNLAKFEIMTCLTKQHDLRTIKRNSSVKGIHQHLILSTGTSAEDYKRLNEIMKECSFFEFICIDIANGYSDHFSKFVSSVREKYPTKTIIAGNVVTADMTQELVMNGADIVKVGIGPGSVCTTRIQTGVGYPQLSAVIECADAAHGLGAHIIADGGCTCPGDVAKAFGGGGDFVMLGGMFAGHEEGGGKKVKKNGSQLIEFYGSSSNTAITKHYGGLSDYRSSEGKKVQLKYRGKIKDTVQNILGGLRSSCTYVGAPSLKQLSKCTTFVRVNQQYNDTFGQD

SEQ ID NO: 101701 - protein, 199 aa, Unknown
  Bacterial polypetide isolated from the Sargasso Sea
KYPTKTIIAGNVVTADMTQELVLSGADIIKVGIGPGSVCTTRIQTGVGYPQLSAVMECADAAHGLGAHIIADGGCTCPGDVAKGFGGGADFVMLGGMLAGHDEGRGKVVKVNGSKYIEFYGSSSDVANKKHYGGLSDYRSSEGRNVRVKYRGKIKDTILNILGGVRSSCTYVGAPSLKQLSKCTTFVRVSKQFNDTFTK

SEQ ID NO: 101702 - protein, 181 aa, Unknown
  Bacterial polypetide isolated from the Sargasso Sea
TQELVLAGADIVKVGIGPGSVCTTRIQTGVGYPQLSAVIECADAAHGLGAHIIADGGCTCPGDVAKAFGGGADFVMLGGMFAGHDEGGGKVVKKNGSKLIEFYGSSSETALNKHYGGHADYRSSEGKKVQLKYRGKIKDTILNILGGLRSSCTYVGAPSLKQLSKCTTFVRVNQQYNDTFE

SEQ ID NO: 101703 - protein, 314 aa, Unknown
  Bacterial polypetide isolated from the Sargasso Sea
MLRTYRFKYSKNEWSGIPIMAANMDGVGELSIAEKLNEYGMITSLTKQHDVKKIKQNRNIKKIYPNIALSVGIKKEDFQNLDKVLKEFSFFKFICIDVANGYTEHFTNFIKSVRDKYPTKTIIAGNVVTADMTQELVLSGADIVKIGIGPGSVCTTRIQTGVGYPQLSAVIECADAAHGLGAHVIADGGCTCPGDVAKGFGGGADFVMLGGMLAGHDEGNGKIVKVNGEKYIEFYGSSSEVANKKHYGGLSDYRSSEGRKVRVKYRGKINDTILNILGGVRSSCTYVGAPSLKQLSKCTTFVRVSNQFNDSLIK

SEQ ID NO: 101704 - protein, 318 aa, Unknown
  Bacterial polypetide isolated from the Sargasso Sea
MYLIRPKRSRMSSRGEVRLHRTHRFLWSKKKWTGIPIMSANMDTVGTPAMHNVLSKHKLITCPAKHYLKNDSNKFKTGKSNICWFGGIDDISKLSKATSGFIGLDVANGYTIKFVDSVKKLRDKCPNATIAAGNVVTADMTQELILAGADIVKVGIGPGSVCTTRIKTGIGYPQLSAVIECADAAHGLNAHIIADGGCTSSGDIVKAFAGGADFVMIGGMLAGHDECDGTIEDGVMKFYGMASESAMTRHSNHNNYRGTEGKTVEIEYRGKADDTIKDILSGIRSACTYVGANKLKDLSKCTTFLRVNNTHNTVFGNE

SEQ ID NO: 101705 - protein, 330 aa, Unknown
  Bacterial polypetide isolated from the Sargasso Sea
MLINEDIKLDYSDVLIRPKRSRMSSRGEVRLQRTHRFLWSKKKWTGIPIMSANMDTVGTPSMHKVLSKHKLITCPAKHHLKKNSNEFKTGQPNICWFGGIDDISKLSKANSGFIGLDVANGYTIKFVDSVKKLRDKCPNATIAAGNVVTADMTQELILAGADIVKVGIGPGSVCTTRIKTGIGYPQLSAVIECADAAHGLNAHIIADGGCTNSGDIVKAFAGGADFVMIGGMLAGHDECDGEVEDGVMKFYGMASESAMTRHSNHNDYRGTEGKTVEVEYRGKADDSIKDILSGIRSACTYVGANKLKDLSKCTTFVRVNNTHNTIFGNE

SEQ ID NO: 101706 - protein, 330 aa, Unknown
  Bacterial polypetide isolated from the Sargasso Sea
MLINEDIKLDYSDVLIRPKRSTMSSRGEVKLQRTHRFLWSKKKWTGIPIMSANMDTVGTPSMHKVLSKYKLITCPAKHHLKKNSNEFKTGQSNICWFGGIDDISKLSKANSGFIGLDVANGYTIKFVDSVKKLRDKCPNATIAAGNVVTADMTQELILAGADIVKVGIGPGSVCTTRIKTGIGYPQLSAVIECADAAHGLNAHIIADGGCASSGDIVKAFAGGADFVMIGGMLAGHDECDGEVEDGVMKFYGMASESAMTRHSNHNDYRGTEGKTVEVEYRGKVNDTIKDILSGVRSACTYVGANKLKDLSKCTTFVRVNNTHNTVFGNE

SEQ ID NO: 101707 - protein, 345 aa, Unknown
  Bacterial polypetide isolated from the Sargasso Sea
MRIEEEIKLDYSDVLFRPKRSTLKSRKDVDLSRKYTFKHSRSSWKGIPIIASNMDGVGEIDVAKKLSSHKLMTALTKQHDINQIGTIYKKNIFFDSIALSCGTSKDSYNRLNSILKKYPKFKFICIDVANGYSENFSNFVSEVRKKYPKKTIIAGNVVTADMTQELVLSGADIVKVGIGPGSVCTTRIQTGVGYPQLSAVMECADAAHGLGAHIIADGGCTCPGDVAKGFGAGADFVMLGGMLAGHKEGGGDIIEENGNKFIEFYGSSSEEANEKHYGGLANYRSSEGKKVKIQMKNSLDSTIRDILGGVRSSCTYVGASSLKQLSKCTTFVRVNNQYNDTFGKV

SEQ ID NO: 101708 - protein, 233 aa, Unknown
  Bacterial polypetide isolated from the Sargasso Sea
MRIEEEIKLDYSDVLFRPKRSTLKSRKEVDLNRTYKFKHSNREWSGIPIIASNMDGVGELEVAKNLSKFSILTALTKQHDLNSINSFLPIKEIFNYVSLSCGTSDHSFERLNSIISQHTYIQFICIDVANGYSENFSKFVSSIRDKYPSKTIIAGNVVTADMTQELILSGADIVKVGIGPGSVCTTRIQTGVGYPQLSAVIECADAAHGLGAHMIADGGCTCPGDVAKAFGGG

SEQ ID NO: 101709 - protein, 344 aa, Unknown
  Bacterial polypetide isolated from the Sargasso Sea
MRIEEDIKLDYSDVLFRPKRSTLSSRKNVNLNRTYKFRYSNHEWSGIPVMAANMDGVGELRLAEKLNEHGMITCLTKQHDIKKLKQYKKIKSIYKNIALSIGIKTEDFERLDIVLKEFNFINFICIDVANGYSEHFSKFIKSVREKYPTKTIIAGNVVTADMTQELVLSGADIVKVGIGPGSVCTTRIQTGVGYPQLSAVIECADAAHGLGAHIIADGGCTCPGDVAKAFGGGADFVMLGGMFAGHDEGSGKIIKTNGKKFIEFYGSSSTVANKKHYGGLSDYRSSEGRTVRVKYRGKINDTISNILGGIRSSCTYVGAPSLKQLSKCTTFVRVSNQFNDTFVK

SEQ ID NO: 101710 - protein, 344 aa, Unknown
  Bacterial polypetide isolated from the Sargasso Sea
MRIEEDLKLDYSDVLFRPKRSTLSSRKDVDLERTYKFKYSKNEWSGIPVMAANMDGVGELEIAETLSDFGMITCLTKQHDVSKLKKYKKLKSIYKNISLSIGIKKEDFERLDKTLKEFSFIKFICVDVANGYSEHFSAFIKSVRDKYPTKTIIAGNVVTADMAQELVLSGADIVKVGIGPGSVCTTRIQTGVGYPQLSAVIECADAAHGLGAHIIADGGCTCPGDVAKGFGGGADFVMLGGMFAGHDEGGGKIIKSNGSKYIEFYGSSSETANKKHYGGLSDYRSSEGRSVRIKYRGKIKNTILNILGGVRSSCTYVGAPSLKQLSKCTTFVRVSNQFNDTFTK

SEQ ID NO: 101711 - protein, 208 aa, Unknown
  Bacterial polypetide isolated from the Sargasso Sea
TSFVKSVRDKYPTKTIIAGNVVTADMTQELVLSGADIVKVGIGPGSVCTTRIQTGVGYPQLSAVIECADAAHGLGAHIIADGGCTCPGDVAKGFGGGADFVMLGGMLAGHDEGKGKVVKINGSKYIEFYGSSSDVANKKHYGGLSDYRSSEGRTVRVKYRGNIKDTVLNILGGVRSSCTYVGAPSLKQLSKCTTFVRVAKQFNDTFTK

SEQ ID NO: 101712 - protein, 348 aa, Unknown
  Bacterial polypetide isolated from the Sargasso Sea
MRIEDEIKLTFDDVLIRPKRSTLISRSEVKLEREFKFRHNKHTWEGIPIFSANMDTTGTFETAKALQKHKMLTAIHKFYTLEDWKDNIDSLDPNYVSVTVGQSEEDYDLSKQIFELSKDLKFLCIDVANGYREDFIEAVIKYRETYKDKIIIAGNVATREMTEALILAGADIVKIGIGPGSVCTTRSVAGVGYPQLSSISECSDAAHGLGGHVLADGGCKYPGDVSKAFGAGADFVMLGGMFAGHEESGGELVTGEDGEQYKDFYGMSSTKAQQTYYGDLALHRAPEGKKVRLKYKGPIDQTVQSILGGMRSACSYVGAKKLKDLPKSTTFIRVTQTTNEIYTGSENL

SEQ ID NO: 101713 - protein, 293 aa, Unknown
  Bacterial polypetide isolated from the Sargasso Sea
ANMDGVGELGIAEKLNEYGMITSLTKQHDVKKLKQNKNIKKIFPNIALSVGIKREDFQNLDKVLKEFSFFKFICIDVANGYTEHFTNFIKSVRDKYPTKTIIAGNVVTADMTQELVLSGADIVKVGIGPGSVCTTRIQTGVGYPQLSAVIECADAAHGLGAHVIADGGCTCPGDVAKGFGGGADFVMLGGMLAGHDEGNGKIVKVNGEKYIEFYGSSSEVANKKHYGGLSDYRSSEGRKVRVKYRGKINDTILNILGGVRSSCTYVGAPSLKQLSKCTTFVRVSNQFNDSLIK

SEQ ID NO: 101714 - protein, 192 aa, Unknown
  Bacterial polypetide isolated from the Sargasso Sea
IAGNVVTADMTQELVLSGADIVKVGIGPGSVCTTRIQTGVGYPQLSAVIECADAAHGLGAHIIADGGCTCPGDVAKGFGGGADFVMLGGMLAGHDEGNGKVVKINGSKYIEFYGSSSDVANKKHYGGLSDYRSSEGRTVRVKYRGNIKDTVLNILGGVRSSCTYVGAPSLKQLSKCTTFVRVAKQFNDTFTK

SEQ ID NO: 101715 - protein, 264 aa, Unknown
  Bacterial polypetide isolated from the Sargasso Sea
MYTLVFVRIEEELKLDYSDVLFRPKRSTLKSRKDVNLKRTYRFKYSKNEWSGIPIMAANMDGVGVLGVAEKLSDYGMITCLTKQHDVKKIKQFKKIKSIYPNVALSIGTKKEDFQNLDKVLKEFSFIKFICIDVANGYSEHFSKFLKSVRDKYPTKTIIAGNVVTADMTQELILSGADIVKVGIGPGSVCTTRIQTGVGYPQLSAVIECADAAHGLGAHIIADGGCTCPGDVAKAFGGGADFVMLGGMFAGHDEGKGKLVKSNG

SEQ ID NO: 101716 - protein, 339 aa, Unknown
  Bacterial polypetide isolated from the Sargasso Sea
MRVNRDFKLDFDDVLIRPKRSTLSSRRLVDLNRKFTFRHSEDVWEGIPVIAANMDTTGTFEIADSLKKEKMLTAIHKFYSLDDWAKAIKSNQIELEHCAVTFGVEEAESAEEFFNFLKKNNLDKPKFICLDVANGYTELFLDLVKRIRENFNNPLIAGNVVTGEMTEALILAGADIVKIGIGPGSVCTTRTVTGVGYPQLSAIIECADAAHGLRGHVISDGGCSTPGDVAKAFGAGADFVMLGGMFAGHEESGGELIEKDGKKYKQFYGMSSDTAMERYYGDIKNYRASEGETISLEYKGPIDKTVQQILGGLRSAATYVGAKDIKNLPKCTTFILKYK

SEQ ID NO: 101717 - protein, 330 aa, Unknown
  Bacterial polypetide isolated from the Sargasso Sea
MLINEDIKLDYSDVLIRPKRSTMSSRGEVRLQRTHRFLWSKKKWTGIPIMSANMDTVGTPSMHKVLLKYKLITCPAKHHLKENSNKFKTGQSNICWFGGIDDISKLSKANSGFIGLDVANGYTIKFVDSVKKLRDKCPNATIAAGNVVTADMTQELILAGADIVKVGIGPGSVCTTRIKTGIGYPQLSAVIECADAAHGLNAHIIADGGCTSSGDIVKAFAGGADFVMIGGMLAGHDECDGEVEDGVMKFYGMASESAMTRHSNHNDYRGTEGKTVEVEYRGKVNDTIKDILSGVRSACTYVGANKLKDLSKCTTFVRVNNTHNTVFGNE

SEQ ID NO: 101718 - protein, 330 aa, Unknown
  Bacterial polypetide isolated from the Sargasso Sea
MLLNEEIKLDYSDVLIRPKRSTMSSRGEVYLGRTHKFLWSKKEWTGIPIMSANMDTVGTPAMHKVLAKHGMITCPAKHHLKKNINKFISGKKNICWFGGIDDISRLSKISSGFIGLDVANGYTIRFVDAVKKLRNKCPKATIVAGNVVTADMTQELILAGADIVKVGIGPGSVCTTRVKTGIGYPQLSAVIECADAAHGLNAHIIADGGCVSSGDIVKAFAGGADFVMIGGMLAGHDECEGELVNGEMKFYGMASKSAMNKHNNNNHYRGVEGKTVSVPYKGKVDDTIKDILSGIRSACTYVGANRLKTLSKCTTFVRVNNTHNTIYGNE

SEQ ID NO: 101719 - protein, 350 aa, Unknown
  Bacterial polypetide isolated from the Sargasso Sea
MYIFIFVRIEEELKLDYSDVLFRPKRSTLKSRKDVNLKRTYRFKYSKNEWSGIPIMAANMDGVGVLGVAEKLSDYGMITCLTKQHDVKKIKQFKKIKSIYPNVALSIGTKKEDFQNLDKVLKEFSFIKFICIDVANGYSEHFSKFLKSVRDKYPTKTIIAGNVVTADMTQELILSGADIVKVGIGPGSVCTTRIQTGVGYPQLSAVIECADAAHGLGAHIIADGGCTCPGDVAKAFGGGADFVMLGGMFAGHDEGKGKLVKSNGSKYVEFYGSSSETANNKHYGGLSDYRSSEGRTVRVKYRGKINDTILNILGGVRSSCTYVGAPSLKQLSKCTTFVRVTKQFNDTFAK

SEQ ID NO: 101720 - protein, 350 aa, Unknown
  Bacterial polypetide isolated from the Sargasso Sea
MYKFEFVRIEEDLKLDYSDVLFRPKRSTLSSRKDVNLKRTYKFKYSNNEWSGIPIMAANMDGVGELGIAEKLSEYGMITCLTKQHDIKKIKQFKKIKSIYPNIALSIGIKKEDFQNLDKVLKEYSFIKFICIDVANGYSERFSAFLKSVRDKYPTKTIIAGNVVTADMTQELILSGADVVKVGIGPGSVCTTRIQTGVGYPQLSAVIECADAAHGLGAHMIADGGCTCPGDVAKGFGGGADFVMLGGMFAGHDEGKGKIVKSNGTKYIEFYGSSSDTANNKHYGGLSSYRSSEGRTVRVKYRGKIENTIQNILGGIRSSCTYVGAPSLKQLSKCTTFVRVAKQFNDTFVK

SEQ ID NO: 101721 - protein, 242 aa, Unknown
  Bacterial polypetide isolated from the Sargasso Sea
MRIEEEIKLDYSDVLFRPKRSTLKSRKEVDLKRKYQFKYSRLTWQGVPIIAANMDGVGEIEVAKKLSSYKLMTALTKQHQISDINKINNNNMHNLVAFSCGTSKDSYSRLNKLLSKFPKFQFICIDVANGYSENFSKFVYEVRKKHPKKTIIAGNVVTADMTQELVLSGADIVKVGIGPGSVCTTRIQTGVGYPQLSAVLECADAAHGLGAHIIADGGCTCPGDVAKGFGAGADFVMLGGML

SEQ ID NO: 101722 - protein, 348 aa, Unknown
  Bacterial polypetide isolated from the Sargasso Sea
MRIERDLKLTFDDVLIRPKRSTLISRSDVNLVREFTFRHTEETWDGVPIVAANMDTTGLFSIAEILQGHKMLTCTQKFYSTKEFSDAWENGVNSEFVAVTCGSTDESFELLKRKMATNKGLKMICIDVANGYREVFLNFVKKVRGAFPEKIIIAGNVATREMTEALILAGADIVKVGIGPGSVCTTRKVAGVGYPQLSAISECADAAHGLNGHVMSDGGCSSPGDVAKAFAAGADFVMLGGMLAGHDESGGELIEDSGGSYKSFYGMSSAKAMETHYGEIADHRAPEGKEVRVPYRGPLEVTVQSILGGLRSACSYVGARRIKDLPKCTTFIRVSMTTNEVFQKFNVD

SEQ ID NO: 101723 - protein, 221 aa, Unknown
  Bacterial polypetide isolated from the Sargasso Sea
CIDVANGYSENFSHFVSEVRKKFPNKTIIAGNVVTADMTQELVLSGADIVKVGIGPGSVCTTRIQTGVGYPQLSAVLECADAAHGLGAHIIADGGCTSPGDVAKGFGAGADFVMLGGMLAGHKEGGGNIIKDNSKDYIEFYGSSSEEANEKHYGGLASYRSSEGKKVRIEYRSSLEKTVKDILGGIRSSCTYVGAPTLKQLSKCTTFVRVNNQYNDVFGKV

SEQ ID NO: 101724 - protein, 340 aa, Unknown
  Bacterial polypetide isolated from the Sargasso Sea
EELKLDYSDVLFRPKRSTLSSRKDVDLKRTYKFKYSKNEWSGIPVMAANMDGVGELEVAETLSDFGMITCLTKQHDVNKLKKYKKLKSIYKNISLSIGIKKEDFERLDKTLKEFSFIKFICVDVANGYSEHFTSFIKSVRDKYPTKTIIAGNVVTADMTQELVLSGADIVKVGIGPGSVCTTRIQTGVGYPQLSAVIECADAAHGLGAHIIADGGCTCPGDVAKGFGGGADFVMLGGMFAGHDEGGGKVTKSNGSKYIEFYGSSSETANKKHYGGLSDYRSSEGRSVRIKYRGKIKDSILNILGGVRSSCTYVGAPSLKQLSKCTTFVRVSNQFNDTFSK

SEQ ID NO: 101725 - protein, 218 aa, Unknown
  Bacterial polypetide isolated from the Sargasso Sea
MFANGYSEHFTSFIKSVRDKYPTKTIIAGNVVTADMAQELVLSGADIIKIGIGPGSVCTTRIQTGVGYPQLSAVIECADAAHGLGAHVIADGGCTCPGDVAKGFGGGADFVMLGGMLAGHDEGKGKLVKTNGSKFIEFYGSSSDEANKKHYGGLSDYRSSEGRKVRVKYRGKIRDTILNILGGVRSSCTYVGAPSLKQLSKCTTFVRVSNQFNDTFSK

SEQ ID NO: 101726 - protein, 312 aa, Unknown
  Bacterial polypetide isolated from the Sargasso Sea
MRIEEELKLDYSDVLFRPKRSTLKSRKDVNLLRTYRFKYSKNEWSGIPIMAANMDGVGELSVAEILNDYGMITSLTKQHDVKKIKQNKNIKKIYSNIALSVGIKKEDFKNLDKVLKEFSFFKFICIDVANGYTEHFTNFIKSVRDKYPTKTIIAGNVVTADMTQELVLSGADIVKVGIGPGSVCTTRIQTGVGYPQLSAVIECADAAHGLGAHVIADGGCTCPGDVAKGFGGGADFVMLGGMLAGHDEGNGKIVKINGEKYIEFYGSSSEVANKKHYGGLSDYRSSEGRKVRVKYRGKINDTILNILGGVRK

SEQ ID NO: 101727 - protein, 208 aa, Unknown
  Bacterial polypetide isolated from the Sargasso Sea
TNFIKSVRDKYPTKTIIAGNVVTADMTQELVLSGADIVKVGIGPGSVCTTRIQTGVGYPQLSAVIECADAAHGLGAHVIADGGCTCPGDVAKGFGGGADFVMLGGMLAGHDEGNGKIVKVNGEKYIEFYGSSSEVANKKHYGGLSDYRSSEGRKVRVKYRGKLNDTILNILGGVRSSCTYVGAPSLKQLSKCTTFVRVSNQFNDSLIK

SEQ ID NO: 101728 - protein, 343 aa, Unknown
  Bacterial polypetide isolated from the Sargasso Sea
MRIEEDIKLDYADVLFRPKRSTLSSRKDVELERTYKFKYSNHQWKGVPIMAANMDGVGEIEVAKNLASFEIMTCLTKQHDLKTIKRNSSVKGIHKHLILSTGTSNEDYKRLNEIMKECSFFEFICIDIANGYSDHFSKFVSSVREKYPTKTIIAGNVVTADMTQELVMNGADIVKVGIGPGSVCTTRIQTGVGYPQLSAVIECADAAHGLGAHIIADGGCTCPGDVAKAFGGGADFVMLGGMFAGHEEGGGKKVKKNGSQFIEFYGSSSDTALEKHYGGLSDYRSSEGKKVQLKYRGKIKDTVQNILGGLRSSCTYVGAPSLKQLSKCTTFVRVNQQFNDTFE

SEQ ID NO: 101729 - protein, 283 aa, Unknown
  Bacterial polypetide isolated from the Sargasso Sea
VAEKLSEYGMITCLTKQHDVKKIKQFKKIKSIYPNVALSIGTKKEDFQNLDKVLKEFSFIKFICIDVANGYSEHFSKFLKSVRDKYPTKTIIAGNVVTADMTQELILSGADIVKVGIGPGSVCTTRIQTGVGYPQLSAVIECADAAHGLGAHIIADGGCTCPGDVAKAFGGGADFVMLGGMFAGHDEGKGKLVKSNGSKYVEFYGSSSETANNKHYGGLSDYRSSEGRTVRVKYRGKINDTILNILGGVRSSCTYVGAPSLKQLSKCTTFVRVTKQFNDTFTK

SEQ ID NO: 101730 - protein, 343 aa, Unknown
  Bacterial polypetide isolated from the Sargasso Sea
MRIEEDIKLDYADVLFRPKRSTLSSRKDVELQRTYKFKYSNHQWKGIPIMAANMDGVGEIDVAKNLATFEIMTCLTKQHDLKIIKRNSSVKGIHKHLILSTGTSNEDYKRLNEIMKECSFFEFICIDIANGYSDHFSKFVSSVREKYPTKTIIAGNVVTADMTQELVMNGADIVKVGIGPGSVCTTRIQTGVGYPQLSAVIECADAAHGLGAHIIADGGCTCPGDVAKAFGGGADFVMLGGMFAGHEEGGGKKVKKNGSQFIEFYGSSSDTALEKHYGGLSSYRSSEGKKVQLKYRGKIKDTVQNILGGLRSSCTYVGAPSLKQLSKCTTFVRVNQQYNDTFE

SEQ ID NO: 101731 - protein, 311 aa, Unknown
  Bacterial polypetide isolated from the Sargasso Sea
TYRFKYSKNEWSGIPIMAANMDGVGELGVAEKLSEYGMITCLTKQHDVKKIKQFKKIKSIYKNIAISIGTKKEDFENLNKVLREFGFIKFICIDVANGYSEYFSKFLKSVRDKYPTKTIIAGNVVTADMTQELILSGADIVKVGIGPGSVCTTRIQTGVGYPQLSAVIECADAAHGLGAHIIADGGCTCPGDVAKGFGGGADFVMLGGMFAGHDEGKGKIVKSNGSKYIEFYGSSSETANKKHYGGLSNYRSSEGRTVRVKYRGKIKDTIQDILGGVRSSCTYVGAPSLKQLSKCTTFVRVAKQFNDTFTK

SEQ ID NO: 101732 - protein, 241 aa, Unknown
  Bacterial polypetide isolated from the Sargasso Sea
MYKFEFVRIEEELKLDYSDVLFRPKRSTLSSRKDVNLKRTYKFKYSNNEWSGIPIMAANMDGVGELGIAEKLSEYGMITCLTKQHDVKKIKQFKKIKSIYPNIALSIGIKKEDFQNLDKVLKEFSFIKFLCIDVANGYSERFSAFLKSVRDKYPTKTIIAGNVVTADMTQELILSGADIVKVGIGPGSVCTTRIQTGVGYPQLSAVIECADAAHGLGAHMIADGGCTCPGDVAKGFGGGAD

SEQ ID NO: 101733 - protein, 183 aa, Unknown
  Bacterial polypetide isolated from the Sargasso Sea
MAQELVLSGADIVKVGIGPGSVCTTRIQTGVGYPQLSAVIECADAAHGLGAHIIADGGCTCPGDVAKAFGGGADFVMLGGMFAGHDEGEGKLIKSNGHKFIEFYGSSSDIANKKHYGGLSDYRSSEGRTVRIKYRGKIKDTINNILGGVRSSCTYVGAPSLKQLSKCTTFVRVAKQFNDTFTK

SEQ ID NO: 101734 - protein, 350 aa, Unknown
  Bacterial polypetide isolated from the Sargasso Sea
MYKFGLVRIEEELKLDYSDVLFRPKRSTLQSRKDVNLKRTYRFKYSNNEWSGIPIMASNMDGVGELGVAEKLSEYGMITCLTKQHNIQKIKKFKKIKSIHPNIALSIGIKKEDFENLDKILKEYSFIKFICIDVANGYSEHFSKFLKSVRDKYPTKTIIAGNVVTADMAQELVLSGADIVKVGIGPGSVCTTRIQTGVGYPQLSAVIECADAAHGLGAHIIADGGCTCPGDVAKAFGGGADFVMLGGMFAGHDEGEGKLIKSNGHKFIEFYGSSSDIANKKHYGGLSDYRSSEGRTVRIKYRGKIKDTINNILGGVRSSCTYVGAPSLKQLSKCTTFVRVAKQFNDTFTK

SEQ ID NO: 101735 - protein, 314 aa, Unknown
  Bacterial polypetide isolated from the Sargasso Sea
MLRTYRFKYSNNEWSGIPIMAANMDGVGELSIAEKLNDYGMITCLTKQHDIKKIKQNRNIKKIYPNIALSVGIKKEDFQNLDKVLKEFNFFKFICIDVANGYSEHFTNFIKSVRDKYPTKTIIAGNVVTADMTQELVLSGADIVKVGIGPGSVCTTRIQTGVGYPQLSAVIECADAAHGLGAHIIADGGCTCPGDVAKGFGGGADFVMLGGMLAGHDEGKGKLVKSNGSRFIEFYGSSSEVANKKHYGGLSDYRSSEGRTVRVKYRGKINDTVLNILGGVRSSCTYVGAPSLKQLSKCTTFVRVSSQYNDTFVK

SEQ ID NO: 101736 - protein, 328 aa, Unknown
  Bacterial polypetide isolated from the Sargasso Sea
MLVNEEIKLDYSDVLIRPKRSTMSSRGEVNLERTHNFLWSKNKWTGIPIMSSNMDTVGTPAMHKVLSKYKLITCPAKHHLKKDQGKFKKGKANICWFGGIDDINNLAKTSSGFIGLDVANGYTIKFVDAVKKLRDKCPDATIAAGNVVTADMTQELILAGADIVKVGIGPGSVCTTRIKTGIGYPQLSAVIECADAAHGLDAHIIADGGCVNSGDIVKAFAAGADFVMLGGMLAGHDECDGEVENGVMKFYGMASESAMSRHGNHNAYRGVEGKTVEVEYRGKADDTIKDILSGIRSACTYVGATRLKTLSKCTTFVRVNNTHNTYSE

SEQ ID NO: 101737 - protein, 204 aa, Unknown
  Bacterial polypetide isolated from the Sargasso Sea
RYPNHIIVAGNVATREMVETLLIEGDVDVVKVGIGPGSVCTTRKKTGVGMPQLSCVLECADAAHGVGKFIVSDGGITCPGDLSKALCAGADFVMMGGAFAGHDENPGEMIVKTAADGTEKKYKIFYGMSSEHAMLQFYGKKNDYRSSEGKVVQVPYKGPVENTILDYLGGVRSTCTYIGAKCVKHMPKCTTFVLVSRQLNQVYS

SEQ ID NO: 101738 - protein, 268 aa, Unknown
  Bacterial polypetide isolated from the Sargasso Sea
VEYYFEKKDDRKGFVKFPWDSGTTVEQMETYYDAIEFSDWTHALSKTPMLKAQHPGYETWKLGVHGKNDVSCVDCHMPKVTNDKGRKYTDHKVGNPFDRFDETCATCHSQSKEFLEGITKERYAKVKELKARAEGQLVKAHFEAAKAWEVGATEAEMKPILTDIRHAQWRWDFAIASHGVAAHAPEEALRILGTAVDKAADARVKLAQLLAKKGVTDAVAIPDISTKAKAQAALGMDMDKMNAEKEAFKKDVLPKWDEEAKKREATYK

SEQ ID NO: 101739 - protein, 178 aa, Unknown
  Bacterial polypetide isolated from the Sargasso Sea
HKVGNPFDRFDQTCRNCHTQSKEMLQGVVKQRKDAVTEIKLKVEKQLVHAHFEAKAAWDAGATEAEMKDILQDIRHAQWRWDFSIASHGVQMHAPEVALRMLGTALDKAADARTKLARLLAAKGISHEIAIPDISSKEKAQAALGMDMKQMNSDKAQFLKTTVPAWDAEAKAAGRLAQ

SEQ ID NO: 101740 - protein, 230 aa, Unknown
  Bacterial polypetide isolated from the Sargasso Sea
MDETPMARIKSRVRRFFSLLVPLLFITAVHAEQTPVPAKTVTVEAKNEVFAPQHPDQYLSWKATSEQSAREDALAEDPRLVILWAGYPFSRDYNKPRGHAYAVTDVRETLRTGAPKTAEDGPLPMACWSCKSPDVARLIQKDGEDGYFHGKWARGGPEIVNNLGCGDCHNTASPDFAKGKPELTLSRPYAERAMETIGKPFEKAGRFDQQSMVCGQCHVEYYFDGKNKAV

SEQ ID NO: 101741 - protein, 364 aa, Unknown
  Bacterial polypetide isolated from the Sargasso Sea
MDIILIIILASILIATLSILYLNIKSNIKKEDENKADEIANLNAEIIKLKDSLNTTINTSLSSMSSSFNNLSTGVTKDMTAALTKVDEKVAAFNSQVENLNESQKGINKILAGVKKYGTLAEFSLGSLIKDLLPSSQYLSNVKMKEETSENVEFAIKLQEGVLVPVDSHFPVERFKAIQDAHQEDDKKAIADARTKLAKAFKEKAKSINEKYIVPPKTTDFAIVYAPTESLFLELANYQDPNTKELLSQELMKKYKVTVMGPNNLSGYLQSLHMGFQTLKVQKHATEIYDHLKTISTRFTKHFDGIVNLRKKLEEAMTAVDKFGTDARSIKRTLENIKDPEQIEKAIETENVEKFEDIPRQAKN

SEQ ID NO: 101742 - protein, 281 aa, Unknown
  Bacterial polypetide isolated from the Sargasso Sea
TSVNEKVSAFNTQVENLNKSQEGINKILAGVKKYGTLAEFSLASLLKDLLPASQFISNVKMKEDTSENVEFAIKLQGDILVPVDSHFPVERFKAIDDAHQSDDKKAMADARTKLARAFKDKAKSVNEKYIVPPKTTDFGIVYAPTESLYKELTDYQDPSTKELLTQELMKKYKIVIMGPNTLSAYLQSLHMGFQSLKVQKGATEIYNQLKTISTRFTKHFDNVIVLRKKLEEAMKVVDTFGTDARSITRTLENIKDPEQVEMASKAENVEKFADHSKQLKN

SEQ ID NO: 101743 - protein, 290 aa, Unknown
  Bacterial polypetide isolated from the Sargasso Sea
GTPKLRISRPFAERAMETIGTPFDKASKKDKQSMVCGQCHVEYYFEKKDDRKGFVKFPWDSGTTVEQMEAYYDAIEFSDWTHALSKTPMLKAQHPGYETWKLGVHGKNDVSCVDCHMPKVTNDKGRKYTDHKVGNPFDRFDETCATCHSQSKEFLEGITKERYAKVKELKARAEGQLVKAHFEAAKAWEVGATEAEMKPILTDIRHAQWRWDFAIASHGVAAHAPEEALRILGTAVDKAADARVKLAQLLAKKGVTDAVAIPDISTKAKAQAALGMDMDKMNAEKEAFKK

SEQ ID NO: 101744 - protein, 466 aa, Unknown
  Bacterial polypetide isolated from the Sargasso Sea
MKKMIGKSFALSALVAASFMAAGAMASDKTEPRNEVYKDKFANQYNSWHDTAKSEEITDALAGDPSLVILWAGYGFAKDYNAPRGHMYAVTDVRNTLRTGAPANAEDGPMPMACWSCKSPDVPRLIEEQGEDGYFKGKWAKGGPEVVNTIGCSDCHEKGTPKLRISRPFAERAMETIGTPFDKASKKDKQSMVCGQCHVEYYFEKKDDRKGFVKFPWDSGTTVEQMEAYYDAIEFSDWTHALSKTPMLKAQHPGYETWKLGVHGKNDVSCVDCHMPKVTNDKGRKYTDHKVGNPFDRFDETCATCHSQSKEFLEGITKERYAKVKELKARAEGQLVKAHFEAAKAWEVGATEAEMKPILTDIRHAQWRWDFAIASHGVAAHAPEEALRILGTAVDKAADARVKLAQLLAKKGVTDAVAIPDISTKAKAQAALGMDMDKMNAEKEAFKKNVLPKWDEEAKKREATYK

SEQ ID NO: 101745 - protein, 466 aa, Unknown
  Bacterial polypetide isolated from the Sargasso Sea
MKKMTGKSFALSALVAASFMAAGAMASDKTEPRNEVYKDKFKNQYNSWHDTAKSEELVDALAQDPNMVILWAGYSFAKDYNAPRGHMYAVTDVRNTLRTGAPANAEDGPMPMACWSCKSPDVPRLIEEQGEDGYFKGKWAKGGPEVTNTIGCGDCHEKGSPKLRISRPYVDRAMDAIGTPFDKASKKDKQSMVCGQCHVEYYFEKKEDRKNFVKFPWDMGITVDQMEVYYDGIEFSDWTHALSKTPMLKAQHPEYETWKMGIHGKNNVSCVDCHMPKVTSPEGKKFTDHKVGNPFDRFEETCATCHSQTKEFLVGVTNERKAKVKEMKLKAEEQLVKAHFEAAKAWELGATEAEMKPILTDIRHAQWRWDLAIASHGVAAHAPEEALRVLGTSVNKAADARVKLAQLLAKKGLTDPVAIPDISTKAKAQAVLGMDMEKLNAEKEAFKKDMLPKWDAEAKKREATYK

SEQ ID NO: 101746 - protein, 390 aa, Unknown
  Bacterial polypetide isolated from the Sargasso Sea
NKPRGHFYALTDVRETLRTGAPKTAEDGPLPMACWSCKGPDVARVIDEKGEDGYFKGMWAKGGPEIVNTIGCADCHDTASKEFKEGKPALHLSRPYADRAMTAIGKPFKEQGRFDQQSQVCGQCHVEYYFSGPTKAVKFPWDKGTTVEQMEQYYDEIGFADWTHALSKTPMLKAQHPEYETWRAGIHGQNNVACVDCHMPKVQNEQGKVYTDHKVGNPFDRFDQTCRNCHTQSKEMLQGVVKQRKDAVTEIKLKVEKQLVHAHFEAKAAWDAGATEAEMKDILQDIRHAQWRWDFSIASHGVQMHAPEVALRMLGTALDKAADARTKLARLLAAKGISHEIAIPDISSKEKAQAALGMDMKQMNSDKAQFLKTTVPAWDAEAKAAGRLAQ

SEQ ID NO: 101747 - protein, 95 aa, Unknown
  Bacterial polypetide isolated from the Sargasso Sea
MPYVLGSTEVYAQGTSWPLISENSNTIVLWSNDPYKNLQVGWNAETHEAFAYLAQLKEKVKQGKIRVISIDPVVTKTQAYLGCEQLYVNPQTDVT

SEQ ID NO: 101748 - protein, 320 aa, Unknown
  Bacterial polypetide isolated from the Sargasso Sea
RRTLINVGLSVQRADHGEQSYWTATALACALGQIGLPGGGIAFPFGAQGNVGAGQVRKRVPGIPIPPRPEGPPIISVSRFRELLDNPGAIYNFNGQTGRYPEIKMIWWAGGNPFHHHQDLNELSSAWERPDTVIVQEPFWTPTARRADIVLPSTTPLERNDLGGAENMLISHGKAVEAPGDALDDYQILEMVAERLGIKDQFTEGRTADQWVEVLYEIFRAENDWAPNFEQFREAGYLRHPEMSEMGENEQVFLAEYRDDPTVHPLGTPSGRIELWSETIAEFDYDDCPPHPTWIEPFERLGGKGSEHWPLHLGSNQPTS

SEQ ID NO: 101749 - protein, 313 aa, Unknown
  Bacterial polypetide isolated from the Sargasso Sea
MGQIGTPGGGFGLSYHFANGGNPTRRAAVLASMQGCVAGGTEAVEKIPVARIVEALENPGAPYQHNGMDRHFPDIRFVWWCGGANFTHHQDTNRLIRAWQKPELIVISECFWTAAARHADIVLPATTSFERHDMTMTGDYSNQHLVPMKRVVAPRDEARDDFDVFADLSERWEEGGRARFTEGKTDLQWLETFYQIAAQRGASQQVTLPPFDQFWQANQLIEMPENPENARFARFAAFRADPQANPLKTASGKIEIHSPTIGRFCLLRLSTAPNVAGNRTNGTAMPGLAAAGAVRSSGASSAQPAETHVAARK

SEQ ID NO: 101750 - protein, 292 aa, Unknown
  Bacterial polypetide isolated from the Sargasso Sea
QVTLKNSWNMPDHEGQAGFKALKEKGTRIISIDPVYNETAKLAGAEWIAPNAYTDVAMMLGVAHTLYSEQKHDQAFLDRYTTGFDKFLAYLLGQEDGQPKSAEWASTICGVDAKVIRQLALDMASKRTMIMAGWGMQRQQHGEQPNWMLVTLAAMLGQIGLPGGGYGFSYHYSSGGSPTAKGGILAGISAGNAPKNGPAPIPVARIADCLANPGKTIDFNGRKVTYPDIKLVYVAGGNPFHHHQDTNNLVKAWRKPQTVIVHEPYWTATAKHADIVLPATTSYERNDLEMGG

SEQ ID NO: 101751 - protein, 242 aa, Unknown
  Bacterial polypetide isolated from the Sargasso Sea
MKLTRRDFIKTAGAATGTMAISSVIPMPAWAEGQNGGAILTAARWGAVYVEVKDGKVVSSKGALPKTVPNSLQQTAPDQVHTNIRVKYPMVRKSYLENPGKADGKRGNDPFVRVSWEQALKLIHEQHSRIRSSYGPSSIFAGSYGWRSSGVLHKAQTLLQRYMSMAGGYAGHTGDYSTGAAQVIMPYVVGSVEVYEQQTTWPMVLEHSQVVVLWGMNPLNTLKIAWSSTDEQGIEYFNLLKK

SEQ ID NO: 101752 - protein, 205 aa, Unknown
  Bacterial polypetide isolated from the Sargasso Sea
MINISRRGFLGGLLASGASALIGPSLLGRAVMATESGDKLVQSGSHWGAFRARVVDGRWVETLPFEHDKHPTEMLKALSEVVYNPSRIRYPMVRLDWLRKGHQSDTSERGQNRFVRVTWSQALDFFYHELERVQKTYGPSALYAGHSGWQSVGKLHSAGAMLGRAMNLHGTYLAKAGDYSTGAAQVILPHVAGAMEVYEQQDLLA

SEQ ID NO: 101753 - protein, 555 aa, Unknown
  Bacterial polypetide isolated from the Sargasso Sea
NPQTDVPLMLGIAHTLYSEKRHDEACLKDYTTGFDKFLPYLLGTSDGQVKNAEWASAICGVPAEIIRELARAMSSGRTQLIGGWCVQRMHHGEQYAWMLVVLASMIGQIGLPGGGYGFGWHYNGAGTITSSGPIMSGFSSVIPGVKPRHDGDWKGYSKFIPVARFIDCILNPGKQIAFNGQTITYPHMKMAVFCGNNPFHHQQDRNKMVAAWRKLETVVSIDHQWTASCRFADIVLPATTTYERDDIEQWGSHSNAGILAMYKVVEPLFEARDDYDIFADLCRRFGREAEFTGGKSKLEWIQSIYDDARLQGRGIGIRLPRFSQFWHGEGFVTFPAGQPWVRHESFRQEPDLEPLGTPSGLIEIYSKTIADYGYGDCPGHPVWIEPYERSHGGPGSKQYPLHLQSCHPDKRLHSQLCSSDNYRATYTVQGREPVYMNPQDAKSRGLKDGDLVRVFNGRGQVLAGLVVSDDYAPGVVRIQEGAWYGPQEGGKVGTLCTYGDPNVLTADIGSSSLAQATTAHTALVEIEKFRGQAPAVTAFGAPESAKGIDPMFPAL

SEQ ID NO: 101754 - protein, 313 aa, Unknown
  Bacterial polypetide isolated from the Sargasso Sea
MNRRDFLKGLASTSFVALGGSSVLAPLNALASTGLNEDEWLTTGSHFGAFKIKRKNGVIAEVKAFDLDKYPTDMINGIRGMVYNPSRVRYPMVRLDFLLKGHKSNTQQRGDFRFVRVTWDKALKLFKHSLDEIQTKYGPSGLHAGQTGWRATGQLHSSTSHMQRAVGMHGNYVKKIGDYSTGAGQTILPYVLGSTEVYAQGTSWPLILENSNTIVLWSNDPYKNLQVGWNAETHEAFAYLAQLKEKVKQGKIRVISIDPVVTKTQAYLGCEHLYVNPQTDVTLMLAIAHEMITQKLYDDKFIQGYSLGFEEFV

SEQ ID NO: 101755 - protein, 305 aa, Unknown
  Bacterial polypetide isolated from the Sargasso Sea
MASTGLNEDEWLTTGSHFGAFKIKRKNGVIAEVKAFDLDKYPTDMINGIRGMVYNPSRVRYPMVRLDFLLKGHKSNTQQRGDFRFVRVTWDKALKLFKHSLDEIQTKYGPSGLHAGQTGWRATGQLHSSTSHMQRAVGMHGNYVKKIGDYSTGAGQTILPYVLGSTEVYAQGTSWPLILENSNTIVLWSNDPYKNLQVGWNAETHEAFAYLAQLKEKVKQGKIRVISIDPVVTKTQAYLGCEQLYVNPQTDVTLMLAIAHEMITQKLYDDKFIQGYSLGFEEFVPYVMGTKKGIAKTPEWAAPIC

SEQ ID NO: 101756 - protein, 267 aa, Unknown
  Bacterial polypetide isolated from the Sargasso Sea
CDCRGQAFDLDKYPTDMINGIRGMVYNPSRVRYPMVRLDFLLKGHKSNTQQRGDFRFVRVTWDKALKLFKHSLDEIQTKYGPSGLHAGQTGWRATGQLHSSTSHMQRAVGMHGNYVKKIGDYSTGAGQTILPYVLGSTEVYAQGTSWPLILENSNTVVLWSNDPYKNLQVGWNAETHEAFAYLAQLKEKVKQGKIRVISIDPVVTKTQAYLGCEQLYVNPQTDVTLMLAIAHEMITQKLYDDKFIQGYSLGFEEFVPYVMGTKDGIA

SEQ ID NO: 101757 - protein, 273 aa, Unknown
  Bacterial polypetide isolated from the Sargasso Sea
RFAALMGKEKEYTRNMSEMEWIETLYNECKAANAGKYEMPDFATFWKQGYVHFGDGELWTRHADFRNDPEINPLGTPSGLIEIFSRKIEQFGYDDCQGHPIWMEKAERSHGGPGSDKYPVWLQSCHPDKRLHSQMCESKEYRETYTVNGREPIYISPVDAKARGIKDGDLVRVFNDRGQLLAGAVVSDRFPKGVVRIHEGAWYGPVGKDGSVEGGAEIGALCSYGDPNTLTLDIGTSKLAQACSAYTCLVEFEKYQGKVPKVSSFDGPIEVEI

SEQ ID NO: 101758 - protein, 829 aa, Unknown
  Bacterial polypetide isolated from the Sargasso Sea
MNRRDFLKGLASTSFVALGGSSVLAPLNALASTGLNEDEWLTTGSHFGAFKIKRKNGVIAEVKAFDLDKYPTDMINGIRGMVYNPSRVRYPMVRLDFLLKGHKSNTQQRGDFRFVRVTWDKALKLFKHSLDEIQTKYGPSGLHAGQTGWRATGQLHSSTSHMQRAVGMHGNYVKKIGDYSTGAGQTILPYVLGSTEVYAQGTSWPLILENSNTIVLWSNDPYKNLQVGWNAETHEAFAYLAQLKEKVKQGKIRVISIDPVVTKTQAYLGCEQLYVNPQTDVTLMLAIAHEMITQKLYDDKFIQGYSLGFEEFVPYVMGTKDGIAKTPEWAAPICGVEPHIIRDLAKTLVKGRTQIMMGWCIQRQQHGEQPYWMAAVLATMIGQIGLPGGGISYGHHYSSIGVPATNAAAPGAFPRNLDENQKPLFDSTDFKGASSTIPVARWIDAILEPGKTIDANGSKVVYPDIKMMIFSGNNPWNHHQDRNRMKQAFHKLECVVTIDVNWTATCRFSDIVLPACTTYERNDIDVYGAYANRGILAMQKMVEPLFESLSDFEIFTRFAALMGKEKEYTRNMSEMEWIETLYNECKAANAGKYEMPDFATFWKQGYVHFGDGELWTRHADFRNDPEINPLGTPSGLIEIFSRKIEQFGYDDCQGHPIWMEKAERSHGGPGSDKYPVWLQSCHPDKRLHSQMCESKEYRETYTVNGREPIYISPEDAKARGIKDGDLVRVFNDRGQLLAGAVVSDRFPKGVVRIHEGAWYGPVGKDGSVEGGAEIGALCSYGDPNTLTLDIGTSKLAQACSAYTCLVEFEKYQGRVPKVSSFDGPIEVEI

SEQ ID NO: 101759 - protein, 829 aa, Unknown
  Bacterial polypetide isolated from the Sargasso Sea
MNRRDFLKGLASTSFVALGGSSVLAPLNALASTGLNEDEWLTTGSHFGAFKIKRKNGMIAEVKAFDLDKYPTDMINGIRGMVYNPSRVRYPMVRLDFLLKGHKSNTLQRGDFRFVRVTWDKALKLFKHSLDEVQTKYGPSGLHAGQTGWRATGQLHSSTSHMQRAVGMHGNFVKKIGDYSTGAGQTILPYVLGSTEVYAQGTSWPLILENSNTIVLWSNDPYKNLQVGWNAETHEAFAYLAQLKEKVKQGKIRVISIDPVVTKTQAYLGCEQLYVNPQTDVTLMLAIAHEMITQKLHDEKFIQGYSLGFEEFVPYVMGTKDGIAKTPEWAAPICGVEPHIIRDLAKTLVKGRTQIMMGWCIQRQQHGEQPYWMAAVLATMIGQIGLPGGGISYGHHYSSIGVPATTAAAPGAFPRNLDENQKPLFDSTDFKGASSTIPVARWIDAILEPGKAIDANGSKVVYPDIKMMIFSGNNPWNHHQDRNRMKQAFQKLECVVTIDVNWTATCRFSDIVLPACTTYERNDIDVYGAYANRGILAMQKMVEPLFESLSDFEIFTRFAALMGKEKEYTRNMSEMEWIETLYNECKAANAGKYEMPDFATFWKQGYVHFGDGELWTRHADFRNDPEINPLGTPSGLIEIFSRKIEQFGYEDCQGHPIWMEKAERSHGGPGSDKYPMWLQSCHPDKRLHSQMCESKEYRETYTVNGREPIYISPVDAKARGIKDGDIVRVFNDRGQLLAGAVVSDRFPKGVVRIHEGAWYGPVGKDGSVEGGAEIGALCSYGDPNTLTLDIGTSKLAQACSAYTCLVEFEKYQGKVPKVSSFDGPIEVEI

SEQ ID NO: 101760 - protein, 826 aa, Unknown
  Bacterial polypetide isolated from the Sargasso Sea
MSISRREFLKANAAVAAATAVGVTLPVKMVEAAESDSIKWDKAPCRFCGVGCSVLVGTKAGKVVATKGDPESPVNRGLNCIKGYFLSKIMYGKDRLTTPLLRMKDGKYHKEGEFTPVSWDVAFDTMAAKWKHSIATKGPTSVGMFGSGQWTIWEGYAASKLHKAGFLTNNIDPNARHCMASAVGGFMRTFGIDEPMGCYDDLEAADQFVLWGANMAEMHPILWARLSDRRLSHKDCRVHVLSTFENRSFDLADNPMVFRPQSDLVILNFIANYIIQHKAVNTDFVTKHTKFALGVDDIGYGLRPDHPLEKKAKNPGNGKSSPISFDEYAKFVSTYTLEYAAKISGVEPEKLETLAKAYADPKVKVMSLWTMGINQHVRGVWANNMLYNIHLLTGKIATPGNSPFSLTGQPSACGTAREVGTFAHRLPADMEVANDKHRAITEKVWQVPEGTIPPKPGFHAVLQSRMLKDGKLNCYWTMCTNNMQAGPNINDEIYPGFRNPENFIVVSDPYPTVTAMAADLILPTAMWVEKEGAYGNAERRTHMWHQQVKAPEGAKSDLWQLVEFSKRFKVSEVWPAELIAKQPEYADKTLYEVLFANGVINKFPTTDCKGDLNDESAHFGFYLQKGIFEEYAAFGRGHGHDLADFDRYHETRGLRWPVVEGKETLRRFVEGSDPYVKAGEGYKFYGKPDGKAVIFALPYEPAAEEPNEEYDLWMSTGRVLEHWHTGSMTARVPELYRAYPDAQIFMHPEDAKARGLQRGDEVLVASPRGEVKTRVETKGRNKPPRGVVFMPFFDARQLVNKLILDATDPLSKETDFKKCPVKVMKA

SEQ ID NO: 101761 - protein, 826 aa, Unknown
  Bacterial polypetide isolated from the Sargasso Sea
MSISRREFLKANAAVAAATAVGVTLPVKMVEAAESDSIKWDKAPCRFCGVGCSVLVGTKAGKVVATKGDPESPVNRGLNCIKGYFLSKIMYGKDRLTTPLLRMKDGKYHKEGEFTPVSWDVAFDTMAAKWKNSIATKGPTSVGMFGSGQWTIWEGYAASKLHKAGFLTNNIDPNARHCMASAVGGFMRTFGIDEPMGCYDDLEAADQFVLWGANMAEMHPILWARLSDRRLSHKDCRVHVLSTFENRSFDLADNPMVFRPQSDLVILNFIANYIIQNKAVNTDFVTKHTKFALGVDDIGYGLRPDHPLEKKAKNPGNGKSSPISFEEYAKFVSTYTLEYAAKMSGVEPEKLETLAKAYADPKVKVMSLWTMGINQHVRGVWANNMLYNIHLLTGKIATPGNSPFSLTGQPSACGTAREVGTFAHRLPADMEVANDKHRAITEKVWQVPEGTIPPKPGFHAVLQSRMLKDGKLNCYWTMCTNNMQAGPNINDEIYPGFRNPENFIVVSDPYPTVTAMAADLILPTAMWVEKEGAYGNAERRTHMWHQQVKAPEGAKSDLWQLVEFSKRFKVSEVWPAELIAKQPEYADKTLYEVLFANGVINKFPTTDCKGDLNDESAHFGFYLQKGIFEEYAAFGRGHGHDLADFDRYHETRGLRWPVVEGKETLRRFVEGSDPYVKSGEGYKFYGKPDGKAVIFALPYEPAAEEPNEEYDLWMSTGRVLEHWHTGSMTARVPELYRAYPDAQIFMHPEDAKARGLQRGDEVLVASPRGEVKTRVETKGRNKPPRGVVFMPFFDARQLVNKLILDATDPLSKETDFKKCPVKVMKA

SEQ ID NO: 101762 - protein, 826 aa, Unknown
  Bacterial polypetide isolated from the Sargasso Sea
MSISRREFLKANAAVAAATAVGVTLPVKMVEAAESDNIKWDKAPCRFCGVGCSVLVGTKAGKVVATKGDPESPVNRGLNCIKGYFLSKIMYGKDRLTTPLLRMKDGKYHKEGEFTPVSWDVAFDTMAAKWKHSIATKGPTSVGMFGSGQWTIWEGYAASKLHKAGFLTNNIDPNARHCMASAVVGFMRTFGIDEPMGCYDDLEAADHFVLWGANMAEMHPILWARLSDRRLSSKDCRVHVLSTFENRSFDLADNPMVFHPQSDLVILNYIANYIIQNKAVNTDFVTKHTKFALGVDDIGYGLRPDHPLEKKAKNPGNGKSSPISFEEYAKFVSTYTLEYAAKMSGVEPEKLETLAKAYADPKVKVMSLWTMGINQHVRGVWANNMLYNIHLLTGKIATPGNSPFSLTGQPSACGTAREVGTFAHRLPADMVVDNDKHRAITEKMWQVPEGTIPPKPGYHAVLQSRMLKDGKLNCYWTMCTNNMQAGPNINDEIYPGFRNPENFIVVSDPYPTVTAMAADLILPTAMWVEKEGAYGNAERRTHMWHQQVKAPEGAKSDLWQLVEFSKRFKVSEVWPAELIAKKPEYADKTLYEVLFANGVINKFPTTDCKGDLNDESEHFGFYLQKGIFEEYAAFGRGHGHDLADFDRYHETRGLRWPVVEGKETLRRFVEGSDPYVKAGEGFKFYGKPDGKAVIFALPYEPAAEEPNSEYDLWMSTGRVLEHWHTGSMTARVPELYRAYPDAQIFMHPEDAKARGLQRGDEVIVASPRGEVKTRVETKGRNKPPRGVVFMPFFDARQLVNKLILDATDPLSKETDFKKCPVKVMKA

SEQ ID NO: 101763 - protein, 276 aa, Unknown
  Bacterial polypetide isolated from the Sargasso Sea
ANPDLPEIDDYYEPFDFDYDHLKSAPEMKAFPTARPRSRISGERMEKIEKGPNWEEILGGEFSKRSEDYNFEGIQKDIYGEYENTFMMYLPRLCEHCLNPACAASCPSGAIYKREEDGIVLIDQEKCRGWRMCVSGCPYKKVYYNWSTGKSEKCTLCYPRIESGNPTVCSETCVGRIRYIGVMLYDADKIEAAANAEETTDLYDAQLGVFLDPKDPEVIAAARADGVPEDWIKAAQESPIWKMAMEWKVAFPLHPEYRTLPMVWYIPPLSPIQNAA

SEQ ID NO: 101764 - protein, 294 aa, Unknown
  Bacterial polypetide isolated from the Sargasso Sea
MPQIDDYYEPFTFDYDHLQSAPESKAAPTARPRSLITGKRMEKIEWGPNWEEILGGEFSKRSKDKNFDDVQKDIYGQFENTFMMYLPRLCEHCLNPACVASCPSGSIYKREEDGIVLIDQDKCRGWRMCVSGCPYKKIYYNWQSGKAEKCIFCYPRIEAGQPTVCSETCVGRIRYLGVLLYDADRIQEAASVERDRDLYQAQLDIFLDPNDPDVIKQARIDGIPDSWMEAARNSPVYKMAVQWKVALPLHPEYRTLPMVWYVPPLSPITAAANAGHVGVNGDIPDVSQLRIPVQ

SEQ ID NO: 101765 - protein, 277 aa, Unknown
  Bacterial polypetide isolated from the Sargasso Sea
FDFDYQHLHTAPISEHQPVARPRSVISGKRMEKIEWGPNWEEILGTEFAKRRKDKNFDQIQADIYGEYENTFMMYLPRLCEHCLNPACAASCPSGAIYKREEDGIVLIDQEKCRGWRMCISGCPYKKIYFNWKSGKSEKCIFCYPRIEAGMPTVCSETCVGRIRYLGVLLYDADRIQEVASAPSEQDLYQKQLEIFLDPNDPEVIAQALSDGVPMSVIEAAQQSPVYKLAVDWQLALPLHPEYRTLPMVWYVPPLSPIQNAASNGSVSMDGVLPDVD

SEQ ID NO: 101766 - protein, 769 aa, Unknown
  Bacterial polypetide isolated from the Sargasso Sea
MNRRDFIKANAVIAAAGAAGLALPASASNLITSSEQTKLEWNKAPCRFCGTGCSVIVATREGKVVATHGDANSEVNRGLNCIKGYFLSKIMYGSDRLTTPMLRMTDGKYDKHGEFTPISWDSAFDIMAQKWKETLKAKGPTAVGMFGSGQWTVWEGYAAVKLMKAGFGSNNIDPNARHCMASAVVGFMRTFGIDEPMGCYDDMEAADAFVLWGSNMAEMHPILWTRVTDRRLSASHVKVAVLSTFEHRSFDLADLPIVFTPQTDLAILNFIANYIIQNDKVNWDFVKKHVNFRQGTTDIGYGLRPTHPLEQKAKNVKTAGDSTPIDFDTFKAFVAEYTVEKVSKMSGVPEAKLIELAKLYADPETKVTSFWTMGFNQHTRGVWCNNLIYNIHLLTGKISTPGNSPFSLTGQPSACGTAREVGTFSHRLPADMVVTNPEHRKHAEEIWKIPSGIIPPKPGYHAVEQNRRLKDGDLNCYWVQVNNNMQAGPNINEEGLPGYRNPANFIVVSDAYPTVTTQAADLILPTAMWVEKEGAYGNAERRTQFWHQMVQAPGESHSDLWQLMEFSKRFTTDEVWSKEVLAANPQFKGKTLFEVLYKNGNVDKFPLADTDPKYLNNEAKHFGFYVQKGLFEEYATFGRGHGHDLAPFDAYHEAHGIRWPVVNGKETKWRFREGSDPYVKPGSGFEFYGKPDGRAVIYALPFEPPAESPDTEYDMWLSTGRVLEHWHSGSMTQRVPELYRAFPDAVCFMHPEDAKKRGLRRGDEVRVVS

SEQ ID NO: 101767 - protein, 291 aa, Unknown
  Bacterial polypetide isolated from the Sargasso Sea
MKIRSQVGMVLNLDKCIGCHTCSVTCKNVWTSREGVEYAWFNNVETKPGIGYPKEWENQKKWNGGWMRRRGDGKIEPRIGGKWRVLANLFANPDLPEIDDYYEPFDFDYQHLHTAKAGKHQPVARPRSLITGKRIKKIEWGPNWEEILGTEFAKRRKDINFEQVQADIYGQFENTFMMYLPRLCEHCLNPTCVASCPSGAIYKREEDGIVLIDQDKCRGWRMCVSGCPYKKIYYNWKSGKSEKCIFCYPRIEAGEPTVCSETCVGRIRYLGILLYDADRIFEVASTADERD

SEQ ID NO: 101768 - protein, 361 aa, Unknown
  Bacterial polypetide isolated from the Sargasso Sea
MLKDGKLNAYWVMCNNNMQAGPNMNEEGLPGYRNPANFIVVSDPYPTVTAQAADLILPTAMWVEKEGAYGNAERRTQFWHQQVKPPEGAKSDLWQLMEFSKRFKVEEVWPAELIAKMPEVKGKTLFDVLYANGQVNQFPKEQSKGALNDEAEHFGFYVQKGLFEEYATFGRGHGHDLAPFDQYHEARGLRWPVVDGKETLWRYREGFDPYVKAGEGVRFYGKPDGKAVIFALPYEPAAEAPDKEYDMWLSTGRVLEHWHTGTMTRRVPELYRAFPDAVLFMHPEDAKARGVRRGEEVIVSSRRGEVKTRVETRGRNRPPKGLVFMPFFDASQLVNKLTLDATDPLSKETDYKKCAVKVVKA

SEQ ID NO: 101769 - protein, 829 aa, Unknown
  Bacterial polypetide isolated from the Sargasso Sea
MNRRDFIKANAVIAAAGAAGLALPASASNLITSSEQTKLEWNKAPCRFCGTGCSVIVATRDGKVVATHGDANSEVNRGLNCIKGYFLSKIMYGSDRLTTPMLRMTDGKYDKHGEFTPISWDSAFDIMAQKWKETLKAKGPTAVGMFGSGQWTVWEGYAAVKLMKAGFGSNNIDPNARHCMASAVVGFMRTFGIDEPMGCYDDMEAADAFVLWGSNMAEMHPILWTRVTDRRLSASHVKVAVLSTFEHRSFDLADLPIVFTPQTDLAILNFIANYIIQNDKVNWDFVKKHVNFRQGTTDIGYGLRPTHPLEQKAKNVKTAGDSTPIDFDTFKAFVAEYTVEKVSKMSGVPEAKLIELAKLYADPETKVTSFWTMGFNQHTRGVWCNNLIYNIHLLTGKISTPGNSPFSLTGQPSACGTAREVGTFSHRLPADMVVTNPEHRKHAEEIWKIPSGIIPPKPGYHAVEQNRRLKDGDLNCYWVQVNNNMQAGPNINEEGLPGYRNPANFIVVSDAYPTVTTQAADLILPTAMWVEKEGAYGNAERRTQFWHQMVQAPGESHSDLWQLMEFSKRFTTDEVWSKEVLAANPQFKGKTLFEVLYKNGNVDKFPLADTDPKYLNNEAKHFGFYVQKGLFEEYATFGRGHGHDLAPFDAYHEAHGIRWPVVNGKETKWRFREGSDPYVKPGSGFEFYGKPDGRAVIYALPFEPPAESPDTEYDMWLSTGRVLEHWHSGSMTQRVPELYRAFPDAVCFMHPEDAKKRGLRRGDEVRVVSRRGEIKTRVETRGRNKPPVGLVFVPWFDASQLINKVTLDATDPLSKQTDFKKCAVKIVKV

SEQ ID NO: 101770 - protein, 829 aa, Unknown
  Bacterial polypetide isolated from the Sargasso Sea
MNRRDFIKANAVIAAAGAAGLALPASASNLITSSEQTKLEWNKAPCRFCGTGCSVIVATREGKVVATHGDANSEVNRGLNCIKGYFLSKIMYGSDRLTTPMLRMTDGKYDKHGEFTPISWDSAFDIMAQKWKETLKAKGPTAVGMFGSGQWTVWEGYAAVKLMKAGFGSNNIDPNARHCMASAVVGFMRTFGIDEPMGCYDDMEAADAFVLWGSNMAEMHPILWTRVTDRRLSASHVKVAVLSTFEHRSFDLADLPIVFTPQTDLAILNFIANYIIQNDKVNWDFVKKHVNFRQGTTDIGYGLRPTHPLEQKAKNVKTAGDSTPIDFDTFKAFVAEYTVEKVSKMSGVPEAKLIELAKLYADPETKVTSFWTMGFNQHTRGVWCNNLIYNIHLLTGKISTPGNSPFSLTGQPSACGTAREVGTFSHRLPADMVVTNPEHRKHAEEIWKIPSGIIPPKPGYHAVEQNRRLKDGDLNCYWVQVNNNMQAGPNINEEGLPGYRNPANFIVVSDAYPTVTTQAADLILPTAMWVEKEGAYGNAERRTQFWHQMVQAPGESHSDLWQLMEFSKRFTTDEVWSKEVLAANPQFKGKTLFEVLYKNGNVDKFPLADTDPKYLNNEAKHFGFYVQKGLFEEYATFGRGHGHDLAPFDAYHEAHGIRWPVVDGKETKWRFREGSDPYVKPGSGFEFYGKPDGRAVIYALPFEPPAESPDTEYDMWLSTGRVLEHWHSGSMTQRVPELYRAFPDAVCFMHPEDAKKRGLRRGDEVRVVSRRGEIKTRVETRGRNKPPVGLVFVPWFDASQLINKVTLDATDPLSKQTDFKKCAVKIVKV

SEQ ID NO: 101771 - protein, 323 aa, Unknown
  Bacterial polypetide isolated from the Sargasso Sea
LTRYIPVPKNPHGLNTSPDGKYFMPNGKLSPTVTIISIEKLDDLFDGAIEPRDTVVGEPELGLGPLHTTYDGRGNAYTTLFIDSQVCKWNIADAIRHYNGEDVNYIRQKLDVHYQPGHNHASLTESRDADGKWLVVLSKFSKDRFLPVGPLHAENDQLIDISGEEMKLVHDGPAFAEPHDCILVRRDQIKTRKIYDRDDPFFASAVEQAKKDGVTLEADNKVIRDGNKVRVYMTSIAPQYGMTEFKVKQGDEVTVYVTNLDTIEDVTHGFCMVNHGVSMEVSPQQTASVTFKADRPGVHWYYCNWFCHALHMEKRGRMIVEKA

SEQ ID NO: 101772 - protein, 241 aa, Unknown
  Bacterial polypetide isolated from the Sargasso Sea
RAAQYGARVALIEAGPLGGTCVNVGCVPKKIMWNAAHFADALAISQDYGFKLPEAEFNWASFKKTRDAYVERLNGIYLRNLDGSGVDLFQGWASFESSHQIRVGDTLLSADHILIATGGRPTIPDLPGAELGITSDGFFELTEQPKRPLVIGAGYIATELAGVLHSLGSDVTMLLRKDILLRGFDTTLREAVMDEMQSAGVNILTCIQMESIGREDNGRLAVHRQDGEVISGFDCVLLLSG

SEQ ID NO: 101773 - protein, 180 aa, Unknown
  Bacterial polypetide isolated from the Sargasso Sea
MTQHFDYDLLVIGAGSGGVRAARKSAEFGAKVAVVEEAALGGTCVNVGCIPKKLYVYASEYAAAWRESAGFGWQTEGVSFHWNTLRNNKINEVARLNAIYARLLEAPGVDIIEGHGALAGPQEVVVGESRYHAEKILLATGTWPAMPEIPGIELALTSNDIFDIERFLERLLIVGWVATS

SEQ ID NO: 101774 - protein, 97 aa, Unknown
  Bacterial polypetide isolated from the Sargasso Sea
MVVGGGSGGMGLARRAAELGANAAVVEAAPLGGTCVNVGCVPKKVMWTAVCGKNSFRAVLPSIIPHQLTQGTKSGNSERGVQGREGVRLRRRRRARL

SEQ ID NO: 101775 - protein, 290 aa, Unknown
  Bacterial polypetide isolated from the Sargasso Sea
MWWNIDINSFSWSNLINNKDIEIDRLNEIYKKILSSNNVKLFENKGVFVDNHTLKVGDKTITADKILISTGGLPFLPNISGINNVITSNEAFHLEKIPKKIIINGGGYIAVEFASIFNGLGSEVTIIYRGEQILKGFDLQLRNFLAEEIKKKGIKLFTSQEIVSIEESDSKKIVKTNNDLKIETDVVMFATGRIPNTRNLGLENIGVRMNGKGAVIVDSNHKTNISNIYAIGDVTDRFNLTPVALNEGICFADTVFGNKNNLMDYSMVPTAVFSLPNVATVGLTEEEAKE

SEQ ID NO: 101776 - protein, 95 aa, Unknown
  Bacterial polypetide isolated from the Sargasso Sea
ARSYLKKYGEDNVKVYTSSFASMYTAVTRHRQMTKMKLVCAGKDQKVVGLHGIGHGMDEILQGFAVAIKMGATKADFDACVAIHPTSAEEFVTMT

SEQ ID NO: 101777 - protein, 95 aa, Unknown
  Bacterial polypetide isolated from the Sargasso Sea
NNLNKREITLIRGEARLEDKHKVCVSDESFKTEHIIIATGGKPTIPDIAGASYGITSDGFFELEEKPKNVCIVGSGYIAVEFAGMLSALGTNVPM

SEQ ID NO: 101778 - protein, 224 aa, Unknown
  Bacterial polypetide isolated from the Sargasso Sea
MTQHFDYDLLVIGAGSGGVRAARKSAEFGAKVAVVEEAALGGTCVNVGCIPKKLYVYASEYAAAWRESAGFGWQTEGISFHWNTLRDNKTSEIARLNAIYVRLLEAPGVDIIEGHGALAGPQEVVVGESRYRAEKILLATGTWPAMPEIPGIELALSSNEIFDMERFPERLLVVGGGYIATEFASIFSGLGASVVQSYRGELFLRGFDHDIRRFLAEEMRKAGV

SEQ ID NO: 101779 - protein, 132 aa, Unknown
  Bacterial polypetide isolated from the Sargasso Sea
MGQHFDYICLGAGSGGIASANRAAMRGAKVLLIEAKHVGGTCVNVGCVPKKVMWYGAHIAEAMNLYAKDYGFDVSVNKFDWNTLVNSREAYIGRIHEAYGRGFTNNKVTLLNGYGRFVNGNTIEVNGEHYTA

SEQ ID NO: 101780 - protein, 243 aa, Unknown
  Bacterial polypetide isolated from the Sargasso Sea
MQNSNFEYDLIVIGAGSGGVRAARVAAGHGAKVAIIEEERPGGTCVLRGCVPKKLLVYASEFKKQVSDSRGFGWEVKDFSHNWDNLNLSLKNELDRLSEVYKSMLSNSGCKLINGTARLVGNHEVEVNSKIIQSKKILIATGGVSYIPEIDGLRKNAITSNEALKLSNLPKTIVIMGSGYIAIEFACIFSSFGSQVHLVYRADLPLKGFDNEIRKNLEIELQKKGINLYPNSKILSVKGKDKL

SEQ ID NO: 101781 - protein, 132 aa, Unknown
  Bacterial polypetide isolated from the Sargasso Sea
MESFDYDLIVIGAGSGGTRTARVSAGYGAKTAVVEVDRPGGTCVLRGCVPKKLLIYGSEFSKNVEDAIGYSWEVGDIKPNWFDLIAKKNKELDRLHEIYKNLIINSGCDLHYGYGKLISKNKVLVTYNNKEK

SEQ ID NO: 101782 - protein, 82 aa, Unknown
  Bacterial polypetide isolated from the Sargasso Sea
MLDLIVIGAGSAGLAAAKRSAGYGKSVMICDNDAIGGTCVNVGCVPKKLWHGIAHFNQHVAMAKCQGWSVKNLSFDWTKIQP

SEQ ID NO: 101783 - protein, 101 aa, Unknown
  Bacterial polypetide isolated from the Sargasso Sea
GTIGLTEPEATEEYGEDNVKVYTSSFASMYTAVTRHRQMTKMKLVCAGKDQKVVGLHGIGHGMDEILQGFAVAIKMGATKADFDACVAIHPTSAEEFVTMT

SEQ ID NO: 101784 - protein, 58 aa, Unknown
  Bacterial polypetide isolated from the Sargasso Sea
MPKFDYDLITIGAGSGGVRASRLAGAYGARVAIIEELREGGTCVLRGCVPKKLLVYGS

SEQ ID NO: 101785 - protein, 117 aa, Unknown
  Bacterial polypetide isolated from the Sargasso Sea
MFDLIVIGAGSGGLAAAKRAAAAKKKVALIENDSVGGTCVTYGCVPKKMWHAISMFAHQSTIANHHGWSFGSPSFDWKTVKPKLSAYIQSLNQRHEQKCLDIGIEMIRGTARLASPT

SEQ ID NO: 101786 - protein, 87 aa, Unknown
  Bacterial polypetide isolated from the Sargasso Sea
KDGSSSELNIDGVFMAIGHTPNVDFLDGLIELDEKGYVKTGFTTETSTSVPGVFAAGDVADSIYRQAVTAAGTGCQAAIDAERWLDH

SEQ ID NO: 101787 - protein, 62 aa, Unknown
  Bacterial polypetide isolated from the Sargasso Sea
MPKFDYDLITIGAGSGGVRASRLAGSYGARVAIVEELREGGTCVLRGCVPKKLLVYGSHVTE

SEQ ID NO: 101788 - protein, 368 aa, Unknown
  Bacterial polypetide isolated from the Sargasso Sea
IEQSGHGTVTIGSVEKFITENAWEKGWVKPIAVKNERKESVGIIGAGPAGLACAEELRKEGIQVTIYDRYDRSGGLLIYGIPNFKLEKHVVTRRTELLEQSGIKFVHNFEVGKDASLKELRKKHNAILIATGVYKAREIDLPGSDLANIFPAMEFLTASNKKGLGDKVQLFDDGTLNAKGKDVVVIGGGDTAMDCVRTAIRQDAKSVKCIYRRDKKNMPGSSREVQNAEEEGIEFVWLTTPSKFNGKNKVESVEVNKIKLGEPDDSGRRRPEIIEGSNYNVKADLVIKSLGFDPEDLPKLFGEDNLNLTKWGTIKIDFDTMETSVPGVFAAGDIVRGASLVVWAIKDGRDVSGQILKFINSNKKLKVA

SEQ ID NO: 101789 - protein, 97 aa, Unknown
  Bacterial polypetide isolated from the Sargasso Sea
NVESVSLADTKDGSSSELNIDGVFMAIGHTPNVDFLDGLVELDEKGYVKTGFTTETSTSVPGVFAAGDVADSIYRQAVTAAGTGCQAAIDAERWLDH

SEQ ID NO: 101790 - protein, 532 aa, Unknown
  Bacterial polypetide isolated from the Sargasso Sea
MLDANLKNQLKAYLEKITRPIELVASLDDSAKSQELLALLTEIASLTDRVTVTERRDDAERKPSFSIGEPGKPAGIRFAGIPMGHEFTSLVLALLQTGGHPIKLDDDVIEQIRALDGDYAFETYFSLSCQNCPEVVQALNVMSLINPRIRHVAIDGALFQGEVESRQIMAVPTMFLNGASFGQGRSSVKEILAKLDTGASARAAKSLENKPVFDTLIVGGGPAGAAAAIYSARKGIATGVVAERFGGQVLDTMAIENFVSVQETEGPKFATALEQHVKQYDVDIMDVQRADALIPGDVHQIRLANGAVLKAKTIVLATGARWREINVPGEREYRNRGVAYCPHCDGPLFKGKRVAVVGGGNSGVEAAIDLAGIVKAVTLIEYGAQLRADEVLQRKLRSLPNVTIVTQAQTTELTGDGSKLNGLVYKDLRSGDTQRIDLEGVFVQIGLVPNTEWLKGTVELSKHGEIVVDARGATSVPGVFAAGDVTTVPFKQIVIAVGEGAKASLGAFDHLIRQDVAPVAAAQPQAEEAVAA

SEQ ID NO: 101791 - protein, 103 aa, Unknown
  Bacterial polypetide isolated from the Sargasso Sea
MRSGETKSIELEGVFVQIGLVPNTEWLKGTVELSKHGEIVVDARGATSVPGVFAAGDVTTVPFKQIVIAVGEGAKASLSAFDHLIRNSDADEVVSEAEAEAAV

SEQ ID NO: 101792 - protein, 376 aa, Unknown
  Bacterial polypetide isolated from the Sargasso Sea
MSQTKVEAPFVENNRPFRNLIINGDMSISQRGTSQSGVANNANEGHDTPVDRFGLFFYGNEGGAATVSRDSDVPSDTTYGKFNTSIKIDVTTADTSIGVTGSHSLQQTIESSFIFHSGWDYTNSSSKITLQFWAKSVKAGDYHVMFRDHDASGERYYVSKYTLVANTWKHVEIVVPGNSDLVFNNDNGEGLEVRWMLSTGDDRDGATADTWFNPGSDYFQSTSTQVNFFDSTDNEFFLTGVQLEVGDVASAFEHLPTDIQQYRCERYYQVIDFTNTFAQPGNAYTASAAVTNFRLHTEMRADPTITLASAGGGSGGLAFLTSAGAYPGTVGSHTAGGISTHQFKMDAGSYSGLENGGASPLYVTGHGHKHEASAEY

SEQ ID NO: 101793 - protein, 64 aa, Unknown
  Bacterial polypetide isolated from the Sargasso Sea
MPHYEYDLFIIGGGSGGIRAARISSNLGARVALAEESDLGGTCVNVGCVPKKLLFYASHFAEDF

SEQ ID NO: 101794 - protein, 186 aa, Unknown
  Bacterial polypetide isolated from the Sargasso Sea
MSKFDYDLIVIGAGSGGTRTARISASYGAKVLVVEGDRAGGTCVLRGCVPKKLLVYASQFSEQVSDAEGFCWQVSNFQSNWHELILKKNKELDRLHEIYVNLIKNSGCDLISGWGKITGPNTVSIIKEDNKKIELSSQKIMIAAGGESSFPNFEGNNYMINSDKALDLLELPDSIAIYGSGYIAVE

SEQ ID NO: 101795 - protein, 189 aa, Unknown
  Bacterial polypetide isolated from the Sargasso Sea
MQEFDYICIGGGSGGIASANRAAKHGKKVLLIEAKAVGGTCVNVGCVPKKAMWYGAQVAEAIHKYGPDYGFDVTVNKFDWSTLVKNRQAYISRIHASYDRVLGNNQVTLLKGYAKFVNNTTVEVDGEQYTAPHILIATGGKPFRPDIPGADYGIDSDGFFELDEQPRRVAVVGGGYIGVELAGVLHALG

SEQ ID NO: 101796 - protein, 207 aa, Unknown
  Bacterial polypetide isolated from the Sargasso Sea
MPKFDYDLITIGAGSGGVRASRLAGSCGARVAIVEELREGGTCVLRGCVPKKLLVYGSHVTEEITDAEGYGWSFESVDHNWAKMIQAKNNELDRLHQIYVGLLDKAGVERISGRGVLADRNTVRVGEKEITAERILVAVGGWPNKPDIPGIEHSISSNEALDLSERPKRIVIVGSGYIAVEFAGIFAGFGSEVDIVFRADKVLRGFD

SEQ ID NO: 101797 - protein, 60 aa, Unknown
  Bacterial polypetide isolated from the Sargasso Sea
MTHFDYICIGGGSGGIASANRAAKHGKKAAIIEAKDIGGTCVNVGCVPKKAMWYGAQVAE

SEQ ID NO: 101798 - protein, 239 aa, Unknown
  Bacterial polypetide isolated from the Sargasso Sea
MTDYKFDLFVIGGGSGGVRAARVASSNGLKVGLAEGWDLGGTCVNRGCVPKKLYSYASHIRDDFDLMDSFGWSITKKKFSWKKLVDNKKKELSRLNGIYSSLLINSGVEIFRSYASFVSPKSIKVGNKIIHSKKFLIAVGTKPRKLDFLTSNEIITSDEAFDLKNLPKSIMILGGGYIAVEFASIFNGLGVDTTICIRGKKILKGFDDDVVEHLMNSMKHKGVKFITGEFPDEIKKESN

SEQ ID NO: 101799 - protein, 100 aa, Unknown
  Bacterial polypetide isolated from the Sargasso Sea
MSRYEYDLFVIGGGSGGIRAARLSSSFGARVAIAEEKYLGGTCVNVGCVPKKLFFYASHFSEEFNHAKSYGWYYNNNKFVWDDLIKNKNKEIKRLNGIYQ

SEQ ID NO: 101800 - protein, 221 aa, Unknown
  Bacterial polypetide isolated from the Sargasso Sea
MSNQIKNNIEYDLIVIGAGSGGVRAARIAANYGAKVAIVESVRVGGTCVLRGCVPKKLLVYGAQFAQQIKSAEGYGWSFQGAKHDWNSLIKAKNIELDRLNKIYIGLLSKVDIFNGYGDILSSNEIVVGDKILKTKNIIIAVGGKPFMPNISGVEYCIDSDQALDLPSLPKSIVIYGGGYIALEFAGIFNLLGSKVTLIYRGKYLLRGFDEELSHFITEEY

SEQ ID NO: 101801 - protein, 317 aa, Unknown
  Bacterial polypetide isolated from the Sargasso Sea
RGCVPKKLLIYGAHYADHIVDARNYGWTIDARHDWGALIENKNAEMDRLNGIYMRILKNNNVDLHEGRGVLEDEHTVNVDGKRITAENILIAVGGWPSTPEIPGVEHVISSNEALELPSLPKRMVVVGGGYIAVEFAGIFASLGVDVTEIVRADTLLRGFDEDIRQALNEEMSKHGINIMSKTVIQRIEKQDNVYRLHLANNDIIETDLVMYATGRRANTENLGLENIGVALKDNGAVIVDQWNRTSVDNIYAVGDVTDRVQLTPVAIQEGTAVSETLFNNNPITVDYGDVPTAVFSTPPIGTVGLTEQQARQKYGK

SEQ ID NO: 101802 - protein, 285 aa, Unknown
  Bacterial polypetide isolated from the Sargasso Sea
DWGALIDNKNAEMDRLNGIYMRILKNNNVDLHEGRGVLEDEHTVNVDGKRITAENILIAVGGWPSTPEISGVEHVISSNEALELPSLPKRMVVVGGGYIAVEFAGIFASLGVDVTEIVRADTVLRGFDEDIRQALDEEMSKHGINIMSKTVIQRIEKQESVYRLHLENNDVIETDLVMYATGRRANTENLGLENIGVALKDNGAIIVDQWNRTSVDNIYAVGDVTDRVQLTPVAIQEGAAVSETLFNNNPITVDYGDVPTAVFSTPPIGTVGLTEQQARQKYGKV

SEQ ID NO: 101803 - protein, 213 aa, Unknown
  Bacterial polypetide isolated from the Sargasso Sea
MSEYNYDLITIGAGSGGVRASRLAGGYGAKVAIVEELREGGTCVLRGCVPKKLLVYGSHIQEELSDAEGYGWTVDGLKHNWERMMDAKNAELDRLHGIYVNLLKNANVERFHGRGIIVDEHTVSVDGKHITAERILMAVGGWPSTPEIPGIEYVISSNEALDLRERPDRILVVGSGYIAVEFAGIFNSFGSRVDLVFRADQVLRGFDKDIRST

SEQ ID NO: 101804 - protein, 256 aa, Unknown
  Bacterial polypetide isolated from the Sargasso Sea
MTHFDYICIGGGSGGIASANRAAKHGKKAAIIEAKDIGGTCVNVGCVPKKAMWYGAQVAEAIHRYAPEYGFDLSVNHFSWDSLIASRQAYIARIHASYDRALTANDVTLIRGFAKFIDNNTVEVNGEKYTADHITIAVGGRPIFPDIEGAEYGIDSDGFFALKEQPKRAVVVGAGYIGVELAGVLHALGTESHLVVRKHAPLRNFDPIIHETLVDMIHAEGCKLHDHASVEKVEKADDGELSVHLTNGRSVKKLTA

SEQ ID NO: 101805 - protein, 103 aa, Unknown
  Bacterial polypetide isolated from the Sargasso Sea
MTEHFDYIAIGGGSGGIASANRAASHGQKCAIIEAKFLGGTCVNVGCVPKKAMWFAGQIADAFKYAPDYGLDVQMPALNWGKLVESREGYISRIHALYDRVLA

SEQ ID NO: 101806 - protein, 184 aa, Unknown
  Bacterial polypetide isolated from the Sargasso Sea
MTEHFDYIAIGGGSGGIASANRAASHGQKCAIIEAKFLGGTCVNVGCVPKKAMWFAGQIADAMKYAPDYGLDVEMPALNWAKLVESREAYISRIHGSYDRVLAKNGVTVIRGFARFVNKNTVEVDGKLYSADHITIATGGRPVRPDVPGAELGIDSDGFFALQSQPKRVVVVGAGYIAVEIAGV

SEQ ID NO: 101807 - protein, 248 aa, Unknown
  Bacterial polypetide isolated from the Sargasso Sea
MTTHYDYDLIVLGGGSGGLAAAFRAAQHGRRVAMLEPGELGGTCVNVGCVPKKAMWLAADLAGRIGLAAAMGFDVPLRPALDWKELVVHRQAYIANIHASYLKRLDENKVVRVPRRGRLVDAHTVECSDGVRISAEHILIATGAHPQRPDIPGAALGLVSDDFFNLCSAPARVAIVGGGYIAVELAGLLQALGSRVTLLVRGDRLLERFDAELTAQLADNLRHQGVQLHFGYRLRELQRDGDAVGGVW

SEQ ID NO: 101808 - protein, 236 aa, Unknown
  Bacterial polypetide isolated from the Sargasso Sea
MKNEFDLIVIGGGSGGLASAQRAAEYGKNVALIEKAPLGGTCVNVGCVPKKIMWYASHLVHQMEIAEDYGFNFSSITHEWEPLKKRRDEYIKRLNLIYENNLNKREITLIRGEARLEDKHKVCVSDESFKTEHIIIATGGKPTIPDIAGASYGITSDGFFELEEKPKNVCIVGSGYIAVEFAGMLSALDTNVTMNIRTESILRSFDSMLSENLKEIMTHHDIKIQTGKIPESIESA

SEQ ID NO: 101809 - protein, 290 aa, Unknown
  Bacterial polypetide isolated from the Sargasso Sea
MGGTCVNVGCVPKKVMWNAAQISQEIEDAADYGFNISQHGHDWPVLKQKRDAYVKRLNGIYQSNLEKKSIDLIQSRGKFISAKEIETEYGDKVHAENILIATGGFPIVPEIPGANFGITSDGFFDLEEMPKRVGIIGSGYIAVELAGVLNALGSHVMQFLRYDSLLRSFEEKLGSHLLEHMRATGIEVINQAVPQSVKHEKGLALTMEDGRTFDNFDSLLWAIGRAPNTHFLTLKNAGVKVDDRGYIVVDRYQNTSTSGVYAVGDVTGKAQLTPVAIAAGRRLADRVFNA

SEQ ID NO: 101810 - protein, 306 aa, Unknown
  Bacterial polypetide isolated from the Sargasso Sea
RNCIMTRHFDYLSIGAGSGGIASANRAAMRGAKAAVVEANVVGGTCVNVGCVPKKVMWYGAHIAEALKYSPDYGFDVTQHSFDWATLVKNREAYIQRIHTSYQKGFANNNVTYIEGFARFIDAHTVEVNGEHITADHITIATGGRPSRPDIPGSEHGIDSDGFFALSKQPKKALVIGAGYIAVEIAGVLHALGTETHLLVRKDRPLRNFDQDITDMLLERMAQDKLPLHTHSNVASVEKVSDGNLTVNLDNGVQFTNIDCLIWAIGREPATDKLGLAAAGVKTDADGYIRTDKYQNTNVKGIYAVG

SEQ ID NO: 101811 - protein, 188 aa, Unknown
  Bacterial polypetide isolated from the Sargasso Sea
MEFDYDLFVLGAGSGGVRASRMSASYGAKVAVAESMFLGGTCVNVGCVPKKLFVYGSHFHEEFQDAKNYGWDVPPSTFDWPTLRDNKTNEINRLNGIYQNLLDNAGVTLYNEHACLLDAHTVQVGSETVTARYILVATGGWPDMPDIPGVEHAISSNEAFYLPEFPREVTVIGGGYIAVEFAGIFAGL

SEQ ID NO: 101812 - protein, 251 aa, Unknown
  Bacterial polypetide isolated from the Sargasso Sea
LGGTCVNVGCVPKKLFVYGSHYSEEFSNAASYGWSVGDATFEWSTMRDNKNREIERLNAIYGGLLSDAGVTLFNDRASLLDAHTIAVGEEEITSKNILIATGSWPIVPDVKGKEHIITSNEAFYLEDFPKKVTVVGGGYIAVEFAGIFNGFGAETTLVYRGDMFLTGFDKSLREFVKQELEKSGIDLKFNTQVKEIRSTDDKDTNSKYQISLEDGGILNADLVMYATGRKPKTDNLGLENLGIEQGANGKI

SEQ ID NO: 101813 - protein, 424 aa, Unknown
  Bacterial polypetide isolated from the Sargasso Sea
MKYDYDLYVIGAGSGGVRASRMAAQFGARVAVAESTFLGGTCVNVGCVPKKLFVYGSHFHEEFQDAKFYGWENKVNQFNWPTLRDNKTKEIERLNGIYANLLDGAGVKVHHGKAVLKDEHTVEVEGQSYSAKYILVASGSTPTIPDFPGNDLVITSNEAFYLPELPKKIVVVGGGYIAVEFAGIFAGLGVETTLIYRGPLFLRGFDISIREFVKNEIINKNINLMFNTKVNSISFSRDSRILSLSNGEEVSSDLVLYATGRNPNTSNLGLEQANVELGERGEILVNEKYQTSQKNIYAIGDVTDRIQLTPVAIEEGMCIANHLFGDESYPTLSYDNIPTAVFCQPNIGTVGLTEEEALASYAGDLDIYESQFKPMKLTMTDREERSFMKMIVQRSTDAVLGIHMVGGDAGELIQGLAVALIAGA

SEQ ID NO: 101814 - protein, 208 aa, Unknown
  Bacterial polypetide isolated from the Sargasso Sea
PEWFGQYVGALDENSNQTDYWKFTVFAIIVTALAGLFVVNLRRGVTGRRFLAIRSNERAAAAAGVNVARTKMLGFGVSSFLAGLAGVLVAYKMPMVTSEFFSPFVGLAMIAFVYLGGITTVWGAVLGGMLVGGGLLSEFGSLHFEGITQAYINAVGGVGLIVNAILTSGEGISLTVTNQAKHMVATMRGKTSEVDVVKEINEPEKENV

SEQ ID NO: 101815 - protein, 227 aa, Unknown
  Bacterial polypetide isolated from the Sargasso Sea
MDKISSVLSQFRLDNRVAMVTGSGNGIGRIAALALSEAGAHVCVSDLNAASAEKVASEIKESEGSADSWQLDVSKNQEIKKTISDVVEQHQRIDILVNNAGMAKRGPTEDMTLEEWSKVVQTNQTQVFMCSREVGRHMLAAGTGAIINVTSIMGLVGGGLYPNLSYHATKGALVNMTRALAAEWAGRGIRVNAIAPTFVRTNFARAVLADPKTSQSIVDRTPMGRVA

SEQ ID NO: 101816 - protein, 267 aa, Unknown
  Bacterial polypetide isolated from the Sargasso Sea
SKEHSGSKEHGKQLMEGYWAFRLAVAAADAHDAALSFSQSAHRARQSQGRTYYSGVVCANRQLTTKEAVKQVHHLELEPMDSSTSTSYDSGDVLGVLPHSLHPDDDNLTGLLKRMGFAPNVRVRIYPLATPEKRDSFPVIPLKYLIAGGIDVNSASPRRYFFEVMSHFTASEHEKERLQYFASGEGAVDLYKYNQRERRTVFEIFDDFPSLKPSLEWFLHVAPHLHPRLYSISSSPYDTVQTRATHITVASVEWVTPMKRKRKGLCS

SEQ ID NO: 101817 - protein, 257 aa, Unknown
  Bacterial polypetide isolated from the Sargasso Sea
ISLPKAEQRKLDSDHLREPLQSELGNELPNFSEDALQILKFHGSYQQDDRDKREKGKDKTWQMMLRLRSPGGRIPARLFLALDDLSDRLGDGTLRATTRQAFQMHGIPKADLKEVIGTIVRNLGSTLAACGDINRNVMAPAAPFEKGGYPAARRLADEIADLLSPEAAEGSYLDLWVDGDLSYRFSPPAAVRRARKRQLEPGVFSGSEAEPLYGDTYLPRKFKVAVTVPGDNSVDLLTQDIGLVAFTDPSGDLRGCN

SEQ ID NO: 101818 - protein, 178 aa, Unknown
  Bacterial polypetide isolated from the Sargasso Sea
KISYFVSKGNISLPPPDVPMILIGPGTGIAPFRSFVRTRLFQSQASDKGPVGDVLVFFGCRNALHDYLYEDEWEELQKSGFFARKNAFGGIVVAFSRPTQNEKKKYVQNRITDEEKRVWSFLEAGAKIFVAGAAEKMPTAVREAIQKVVQSQGSRSEKESSIYMTKMDTNGRYFVDAW

SEQ ID NO: 101819 - protein, 99 aa, Unknown
  Bacterial polypetide isolated from the Sargasso Sea
MISDSQSAPQLHKNEGIKTRSNYLRGTILEGIADSSNGSIAADDQQLSKFHGLYQQDDRDVRAKRRKHKLDKAYAFLARICLPGGICTPEQWQVMDKLA

SEQ ID NO: 101820 - protein, 281 aa, Unknown
  Bacterial polypetide isolated from the Sargasso Sea
KLLLDLSKEQIIWINGYLAGKVDISIEKPEQQSKPNIDKLTIIYATETGNSKKIAIDLNKRIKSLGIKTNLKAIEQYSYDNLVKEEYLVFVTSTHGEGELPETAKEFWTFLEREELNLSKLKYAILSLGDSNYPKFCEAGKLLDSKLKELDAKEWLPMKELDLDFADYINSWIGEVINLITKPIKKNHIGKIKSNIVLNDEGSNKEIHHIEIETDAKYQPGDSIGIKIDDNSPRLYSISSSPDAHEGEIHLTVKKLDNGLCSPYLASLEKNDEVEFYISPK

SEQ ID NO: 101821 - protein, 240 aa, Unknown
  Bacterial polypetide isolated from the Sargasso Sea
MSASTRAAATATTRKTRASGTVGGGTTTSTTRTSRPRCGVVRWANDRVARFDALGRERTSRASVVTRVATPTGKGPDRPVKRSKVEIIKENSDFLRHPLIEELATEASNISEDAAQLYKFHGGYQQDDREKRAFGEGKFYQFMMRTKQPAGKVPNKLYLTMDDLANTHGNGTLRLTTRQTYQLHGILKSDLKATFATVIRNMGSTLGACGDINRNVTASPAPYANRPEYDIAQEWPRTSL

SEQ ID NO: 101822 - protein, 325 aa, Unknown
  Bacterial polypetide isolated from the Sargasso Sea
VIDGDKKFFNILVGGGLGSHHRQSQTFPRLADELGMCEEDQVIDVVKGIISIQRDYGVRTDRKQARMKYLLENWGVNKFREELELRIGFKLNEYIKKSLTKIDNYYGWHKQKQAGKFYCGIFVENGRIKDKGSVKLKSGLAKIIKKYNVETRLTATQDLILVNIDKQNVEGVKEMLAEHNIDTNERYSNLRLASMACPALPTCSLAVAEAERFLPSLIDELEHMGLGDEKIKIRMSGCPNSCSRPPVSEVGLIGATAKKYNIYLGGDFYGTRLNKLFMELVDDSELAYKISKLINYWKKNKNAEEEPFGDFCNRTDFELLRKEVI

SEQ ID NO: 101823 - protein, 74 aa, Unknown
  Bacterial polypetide isolated from the Sargasso Sea
MKKELKLVKNEGIKESSNGLRGTIHEELMDSESIKFTGDNQQVLKFHGIYQQDDRDKRKALMKAKLEKDYSFMI

SEQ ID NO: 101824 - protein, 128 aa, Unknown
  Bacterial polypetide isolated from the Sargasso Sea
MAEAERYLPDAVTELEGLLAKHGLADDSVIFRVTGCPNGCGRAMLSEVGLVGKGPGKYNLHLGGDREGTRIPRMYRENISEQEIMSELDTLFGQWASNREDGEAFGDFVVRTGVVKPVVDSARDFYEQ

SEQ ID NO: 101825 - protein, 256 aa, Unknown
  Bacterial polypetide isolated from the Sargasso Sea
MLLASLAAQASPLSAQQIKDLQSLVSQLNPIQQAWVSGYLAAAAQLAGGLSAAPVQQTNESAVLTILYGSQTGNAKAVATKVKAAAEQQGIAVKLADIGSYKTTALAKEKYLLIVTSTYGEGEPPESAVAFHKFLFSKKAPKLDGLKYAVLGLGDTSYEFFCKTAIDFDEQLAALGAKRLHARADLDVDYAAQAASWTEAAVLAFAPELKQETGSAQVIAWPGATATASHDSAYTKETPYSAELSVNQKITGRDST

SEQ ID NO: 101826 - protein, 81 aa, Unknown
  Bacterial polypetide isolated from the Sargasso Sea
KLVWWGKRPGRYNLHLGGNRIGTRIPRMFKENITEPEILASLDELIGRWAKEREAGEGFGDFTVRAGIIRPVLDPARDFWE

SEQ ID NO: 101827 - protein, 175 aa, Unknown
  Bacterial polypetide isolated from the Sargasso Sea
LSDKCEIGSRVKIFLIPNKLFRLPKDQTKPIIMIGPGTGVAPFLSFIQERKYLKSNGKNWLFFGAQTKKDDFIYEDEISNFVKEKILNNLDTAFSRDQDKKIYVQDKINDRSVEFFKWLENGAIIYVCGDAKKMAKDVETTIIKMIEKELKCNDRKALEYLKILKKDKRYLLDVY

SEQ ID NO: 101828 - protein, 72 aa, Unknown
  Bacterial polypetide isolated from the Sargasso Sea
MTQPINPDLQVQGQLSDNERLKKDSHLLRGTITKDLKDEITGGFNGDNFMLIRFHGMYQQDDRDIRPERAEQ

SEQ ID NO: 101829 - protein, 378 aa, Unknown
  Bacterial polypetide isolated from the Sargasso Sea
VEFDLGSSGITYKPGDSVGVIPQNNAELVRGIVSRLKLDSDAVFALNWKKEDTDKHATHPLPHIRTPCTVESAFTNYIDITGCPRKSLLRVLAEHCSNEGEKNALLHLSSRGGRTDYEKEIRSQSPTLLTLLEQFKSCSPPLAELLDALSPLAPRLYSITCAPEAAPTTPSVAFSVVKFEVSGSGERLGVATNWLDAKMDSDNKKVPVYIKPSLKFGLPEDSAAPLIMIGPGTGVAPFRGFLQARRARMQQGHVLSEAMLFFGCRKPDEDFLYREDWDGFTADGTLSRFVCAFSRETSEKVYVQHKLKEHAKDIARLISEGAYIMVCGDGAHMAKDVHAVLAGIVADAGVCGVADLKAAEALLMDFTKSGRYVRDIWS

SEQ ID NO: 101830 - protein, 725 aa, Unknown
  Bacterial polypetide isolated from the Sargasso Sea
MSDSSLLILFGSESGNAEDLASIAEKQAKSQGLSPTVKGMDEIEIGDLAGSKHVLIYCSTWGEGDMPDNAIDLWEAANGDSPPNLEGCNFAVCALGDTSYEFFCQSGKDWDAWFEKQGATRVVDRVDCDVEYDDPAAEFTASALSIFASLGGGAPAESDAVNESDADEAPPVEDSVAEGGESVDGLDDLLSSGDRSLVLLFGSQSGNSEGLAAKIAKDAKAYGLEGEVHDMDGFDFNSLSSKRRVMIVCSTWGEGEQPDNAEDLWQFSISDSASRMEGVHFAILALGDSSYEFFCQSGKDWDGQFEKLGATRAIDRLDCDVDYDAPAAEWLMDALPTLAAVDSTGHFHEDMVDSIKMYASGDSLGAEGEDGFSVPKIAIEAIQVEATIFRYDPETSSTGTDTWLCSLSANMSVLEVLRTLKMTQDGSLTFRDGTADDPNTAISVNGRLVLPGLTRLDSVAPMRDGQVSLRIEPLPGFDVIRDLAIDPWSLERKRESSEPWMVAATREGAQTPQGAIGTMEPGAAAKIHSIRNFASQNIIHSSSDAIPHANGYLGPAVIASSWSRRNDPRTSPTKRKAIDDMLSSHNGIKAETDFAPIRRQSSVPRQVSDALLEAKNSVMTDEGFNGKHGKHVWWYTWSVKSSGLVNDTVIYRQALGPFALLGNLFSGVTARMVLGFTRTGGNMFNGMLGMVAPPAGIGKMPKQFNSSVDKHHEVVAIFNEMDGRF

SEQ ID NO: 101831 - protein, 290 aa, Unknown
  Bacterial polypetide isolated from the Sargasso Sea
MLLGQLNAAASPLSQEQVQKLQGLVAELNPIQQAWVSGYLAANANASALGMPTAGTSVTGDAAELTILYGSQTGNAKGVATQMKEQAESRGLSAKLVSMSDYKPTALKKEKFLTVVVSTYGEGEPPEDGETLHAFLATKKAPKLDGVKIAVIGLGDSSYEFFCQTAKDFEERLNKLGAESVYQRADLDVDYEEEAATWIQGALDAFEPDLKAQQGNAGGQAAVMPFGAPTPAASQYTKQNPFEAELLAVQKITGRDSTKDVRHVEISLEGSDITYTPGDSLGVYFLNDEA

SEQ ID NO: 101832 - protein, 301 aa, Unknown
  Bacterial polypetide isolated from the Sargasso Sea
ATLIESQKITGRDSIKDIRHIEISLEDSGITYQPGDALGVWFKNAPLLVSELISILSLNGDAEVTVGDATMSLTDALTSKLELTLSYPNFIKSYQAATGSETLATLMEDKAQLRTYMAERQIIDIVRDHPGKISEQQLVEALRPLTPRLYSIASSQAEVEEEVHLTVAHVDYEAFGHRHQGGASGFLCEYLEENGEVDVFVENNDNFRLPADPNTPVIMVGPGTGIAPFRSFMQERDVQGAEGKNWLFFGNPHFTQDFLYQVEWQGYVKEGLLDKITLAFSRDQEEKVYVQHRLLEHGKEV

SEQ ID NO: 101833 - protein, 321 aa, Unknown
  Bacterial polypetide isolated from the Sargasso Sea
HVVFDLGDSGLEYKAGDALGVIPRCPPELVEQLISTANFSGDELVETHLGEATLKEALTDHLEIHRISKKWIQNLGSRMADDGPVEIRIARRHRVSTEDGSLLVDWSGSGEDGDVPEGYEEIGAACDPAEALWRSLTGDADAMEDYIWSRDYIDAMGDFGHIGFTAQQFVDGMDRLKPRLYSIASSPEHEPGTVHLTVGIVRYSHHGRDRTGLCTGFLSDRCETNDTEIGVFMSPTRSFILPEDGSTDCIMVGPGTGIAPFRAYLQQRDINSDKGRNWLFFGDWTEEGEYYYRDEMEDWKERGVINRHDLAWSRAGDEKVY

SEQ ID NO: 101834 - protein, 277 aa, Unknown
  Bacterial polypetide isolated from the Sargasso Sea
KAETHVAVFVSTHGEGDAPDDAIELHEFLAGKKAPKLADTKYAVLGLGDSSYEFFCQTGKDFDERLGKLGGKAIVERLDCDVDYEAEAEAWLSKLIDSLKDDFSAAPQAAVAAQTGAAVQGVAAQTYTKKAPFKATLIDAQKITGRDSVKDIRHIEISLEDSGITYKPGDALGVWFKNAASLVSELISILSLNGNTEVSVADATMSLTEALTSKLELTLSYPNFIKSYQEATGSESLATLMEDKAQLRTYMAERQIIDKVRDHPGKLSEQQLVDALR

SEQ ID NO: 101835 - protein, 227 aa, Unknown
  Bacterial polypetide isolated from the Sargasso Sea
RFGWVEGIDGKHHLTVFIENGRILDYPGKTLKTGVAEIARIHKGDFRMTANQNLIIAGVAAEDKTRIEALARQHGLINDSVTEQRKNSMACVSLPTCPLAMAEAERYLPTLVTHVEALLSKHGVPDDHIILRVVGCPNGCGRAMLAEAGLVGRGPGKYNLYLGGNTQGTRIPKLYLDNVAEAEILQALDGLIGRWVLERQSGECFGDFVVRVGVVAEVKVSKTDFHA

SEQ ID NO: 101836 - protein, 293 aa, Unknown
  Bacterial polypetide isolated from the Sargasso Sea
QKITGVVDSVKDIRHIEISLEDSGITYKPGDALGVWFKNAASLVSELISILSLNGNTEVSVADATMSLTEALTSKLELTLSYPNFIKSYQEATGSESLATLMEDKAQLRTYMAERQIIDIVRDHPGKLSEQQLVDALRPLTPRLYSIASSQAEVEEEVHLTVAHVDYEAFGHRHQGGASGFLCEYLEENGDVEVFVESNDNFRLPADPNTPVIMVGPGTGIAPFRSFMQERDVQGAEGKNWLFFGNPHFTQDFLYQVEWQGYVKEGLLDKITLAFSRDQEEKVYVQHRLLENG

SEQ ID NO: 101837 - protein, 285 aa, Unknown
  Bacterial polypetide isolated from the Sargasso Sea
TLDVAAAVVTTQRDWGNRVNRKNAKTKYTLERVGVDNFKAEVEKRAGVTFQESRPYEFTDRGDRFGWVEGIDGKYHLTVFIENGRILDYPGKTLKTGCAEIAKIHKGDFRLTANQNLIIAGVPPQDKDKIEALAREHGLIAPSISNQRLDSMACVALPTCPLAMAEAERYLPDAVTELEGLLAKHGLEEDSVIFRVTGCPNGCGRAMLSEVGLVGKGPGKYNLHLGGNREGTRIPRMYRENISEQEIMAELDTLLGQWAKERDSGEAFGDYVVRAGVVKPVVDSA

SEQ ID NO: 101838 - protein, 204 aa, Unknown
  Bacterial polypetide isolated from the Sargasso Sea
GEIHLTVAIVKYNNFERDRFGLATGDLAKGITVNETEVPIYIQPTRDFVIPSDGSKDIIMVGPGTGIAPFRAFMEERVNTGATGRNWLFFGEVHEESTFFYKDEWFEYMKGGHLTKLTTAFSRDQKEKIYVQNRITNNGKEIWDWLQNGAYFFICGDKQYMAKDVHKALINIAEEHGKMKKEEAEHYINQTLMKEEHRYLRDVY

SEQ ID NO: 101839 - protein, 266 aa, Unknown
  Bacterial polypetide isolated from the Sargasso Sea
WQAIDKFAHDNTIYGSICLTNRQTFQFHGILKKNVKPVHQMLHSVGLDALATANDMNRNVLCTSNPYESELHAEAYEWAKKISEHLLPRTRAYAEIWLDQEKVATTDEEPILGQTYLPRKFKTTVVIPPQNDIDLHANDMNFVAIAENGKLVGFNLLVGGGLSIEHGNKKTYARTASEFGYLPLEHTLAVAEAVVTTQRDWGNRTDRKNAKTKYTLERVGVETFKAEVERRAGIKFEPIRPYEFTGRGDRIGWVKGIDNKWHLTLF

SEQ ID NO: 101840 - protein, 281 aa, Unknown
  Bacterial polypetide isolated from the Sargasso Sea
MSLTEALTSKLELTLSYPNFIKSYQEATGSESLATLMEDKAQLRTYMAERQIIDIVRDHPGKLSEQQLVDALRPLTPRLYSIASSQAEVEEEVHLTVAHVDYEAFGHRHQGGASGFLCEYLEENGDVEVFVESNDNFRLPADPNTPVIMVGPGTGIAPFRSFMQERDVQGAEGKNWLFFGNPHFTQDFLYQVEWQGYVKEGLLDKITLAFSRDQEEKVYVQHRLLENGKEVYEWLEQGAHFYVCGDAMHMAKDVENALISIVQEHGGKSEADAKAYVVDLR

SEQ ID NO: 101841 - protein, 234 aa, Unknown
  Bacterial polypetide isolated from the Sargasso Sea
LQNPAPLTAQQLVDSLRKQQPRLYSIASSQAEVGDEVHLTVGVVRYDAFGETHLGGASGFLAERLEEGSQVKVFVEHNDNFRLPDHETPVIMIGPGTGIAPFRAFLQERDQAGATGQNWLFFGNPHFTQDFLYQVELQDYLKRGVLSKLDVAFSRDQAQKVYVQDKLRVKAEEIWTWLQQGAYLYICGDGNKMAKDVHQALLDIAQQQGGFSAEQAEQYFDDLRQAKRYQKDVY

SEQ ID NO: 101842 - protein, 263 aa, Unknown
  Bacterial polypetide isolated from the Sargasso Sea
MSNEKSPFIVEGKLADNERLKRESNNLRGTITTDLKDDLTGGFTADNFQLIRFHGMYQQDDRDIRAERAKQKLEPLHNVMLRARLPGGVITPDQWLAIDKFAADHTMYGSIRLTTRQTFQFHGVLKPKIKSMHQMLNKVGIDSIATAGDVNRNVLCTSNPVESELHLQAFEWAKKISEHLLPKTRAYAEIWLDGEKVETTEKPVEPILGDNYLPRKFKTTVVIPPQNDVDVHANDLNFVAIAENGQLVGFNVLVGGGLAMTHG

SEQ ID NO: 101843 - protein, 214 aa, Unknown
  Bacterial polypetide isolated from the Sargasso Sea
VNRNVLCTSNPVESELHLQAFEWAKKISEHLLPKTRAYAEIWLDGEKVETTEKPVEPILGDNYLPRKFKTTVVIPPQNDVDVHANDLNFVAIAENGQLVGFNVLVGGGLAMTHGDKSTYPRKASDFGFIPLENTLDVAAAVVTTQRDWGNRVNRKNAKTKYTLERVGVDNFKAEVEKRAGVTFQESRPYEFTGRGDRFGWVEGIDGKYHLTVFI

SEQ ID NO: 101844 - protein, 316 aa, Unknown
  Bacterial polypetide isolated from the Sargasso Sea
MSEQKLALNEYLKTDSDYLRGTIKEGLDSSVTGSFSDGDQQLIKFHGFYQQDDRDLRNERKEQKLEPLYSFMLRARVPGGVCTPKQWLGVDEIASTLTSSNSIRLTTRQTFQYHGIPKRNLKTIIQGLDREALDSIAACGDVNRNVMCNPNPVESKLHAQAYEVAKKLSDHLLPHTRAYAEIWLDEEKLLTTEDETVEPVYGKTYLPRKFKMAVAVPPDNDVDVYTNDLGFIAVAENGELVGFNLTAGGGMGSTHGEVETFPRLADDFGFIKTEDVMKFAEAVMTVQRDWGNRTNRKRSRLKYTIVDHGYEKFKAE

SEQ ID NO: 101845 - protein, 254 aa, Unknown
  Bacterial polypetide isolated from the Sargasso Sea
RKVRQFILHHQFADLVANYQLKADANLDANKLVELLRPLTPRLYSIASSQSEVDTEVHLTVALVEDEHQGQARFGGASHFLASAEEGAEVKVYVEPNKHFRLPEDPQTPVIMIGPGTGVAPFRAFMQERVAQGAEGDSWLFFGNPHFEQDFLYQTEWQQYLKNGDLTRIDVAFSRDQAHKIYVQHRIKEQGQTLWQWLQNGAHLYICGDAERMAKDVHQALLAVAVEFGGLSSEAAEEYFESLRSHKRYQKDVY

SEQ ID NO: 101846 - protein, 306 aa, Unknown
  Bacterial polypetide isolated from the Sargasso Sea
MSADATVNVSGVGEMHLADALARHYEIARPSPAALAFIAARSSNSALRDLLGTERKADLKQWLWGQQLADVLHEFPVKLTAAELTGMLKRLQPRLYSIASSPKAHPGEVHLTVAAVRYSNGRRHRKGVSSTFLADRASDVSVPVFVQKSAHFRLPHVPGTPIIMVGPGTGIAPFRGFLHERRARGDKGRNWLFFGEQHAATDFYYRDELEAMRDSGVLTRLDLAFSRDQTEKIYVQDRMREQGAQLWAWLEDGAHFYVCGDANRMARDVDATLRHVVAQHGGMSEEKAAEYVSHLAQEKRYVRDVY

SEQ ID NO: 101847 - protein, 565 aa, Unknown
  Bacterial polypetide isolated from the Sargasso Sea
MSEQKLALNEYLKTDSDYLRGTIKEGLDSSVTGSFSDGDQQLIKFHGFYQQDDRDLRNERKEQKLEPLYSFMLRARVPGGVCTPKQWLGVDEIASTLTSSNSIRLTTRQTFQYHGIPKRNLKTIIQGLDREALDSIAACGDVNRNVMCNPNPVESKLHAQAYEVAKKLSDHLLPHTRAYAEIWLDEEKLLTTEDETVEPVYGKTYLPRKFKMAVAVPPDNDVDVYTNDLGFIAVAENGELVGFNLTAGGGMGSTHGEVETFPRLADDFGFIKTEDVMKFAEAVMTVQRDWGNRTNRKRSRLKYTIVDHGYEKFKAEVEARAGVKFEPKRDVVIGDRGDRYGWVEGVDGKWHLTLFIESGRIKDLPGKSLQTGMREIAKIHKGDFRMTSNQNMIIAGVAPEDKATIEGLARKHGLLGQVLTQTRGHSIACVALPTCPLAMAEAERYFPEFIDHIDALQAKNGISDQAIVVRMTGCPNGCARPFAAEIGLVGKAPGRYNLYLGANFEGTRLNKMYRENIQEAEILAELDALFARYAIERNAGETFGNFTVRVGVVKAVIDAAKDFHG

SEQ ID NO: 101848 - protein, 606 aa, Unknown
  Bacterial polypetide isolated from the Sargasso Sea
MLLKELSSLASPLSQPQVDKLKQLTAELNAVQLAWVSGYLAATANAGGNQAQLVPVSDTQAAQTVTILYGSQTGNGRGIAKALAEKAKAQGYSVNLASMGEYNVRQLKQETLLLLVVSTHGEGDAPDDAIELHKFLTSKRAPQLNNLHYSVLALGDSSYEFFCQTGKDFDARLSALGAKALLPLVECDVDYEAAAGQWHADVLTAVKPLIQTTANVVALNEINSTSAQVASEGEFTKQNPYSAEVLVSQKITGRDSDRDVRHVEIDLGESGLRYEVGDALGVWFSNSETLVDEILAGLGLAADAKVTVANESISLKQALIEKKELTQLYPGLVKTWAELSASPELLAISEDKEQVRQFILHHQFADLVANYKLKPDANLDANKLVELLRPLTPRLYSIASSQSEVDTEVHLTVALVEDEHQGQTRFGGASHFLASAQEGAEVKVYVEPNKHFRLPEDPQTPVIMIGPGTGVAPFRAFMQERVAQGAEGDSWLFFGNPHFEQDFLYQTEWQQYLKNGDLTRIDVAFSRDQAHKVYVQHRIKEQGQALWQWLQNGAHLYICGDAERMAKDVHQALLEVAVEFGGLSSEAAEEYFETLRSHKRYQKDVY

SEQ ID NO: 101849 - protein, 544 aa, Unknown
  Bacterial polypetide isolated from the Sargasso Sea
MRGTIAQDLTDPLTGGFNGDNFQLIRFHGMYQQDDRDIRPERTAQKLEPLHNVMLRARLPGGIITPAQWQVIDKFAEDHSLYGSIRLTTRQTFQFHGVLKRDIKMMHQTLNSTGIDSIATAGDVNRNVLCTSNPVESELHQEAYEWAKKISEHLLPKTRAYVEIWLDGEKLGGDEEPILGSNYLPRKFKTTVVIPPHNDVDIHANDLNFVAISDHGKLVGFNVLVGGGLAMTHGDTSTYPRKASDFGFVPLSHVLEVAAAVVSTQRDWGNRVNRKNAKTKYTLERVGVEAFKAEVESRAGIPFGPVRPYEFTSRGDRFGWVEGIDGKHHLTLFIENGRLLDFPGKPLKTGMLEIAKIHQGDFRLTANQNLIIAGVPAGEKARIEALARQYGLLDDGVSEQRKQSMACVALPTCPLAMAEAERMLPAFVSDIEGLLAKHGLADDAIIFRVTGCPNGCGRAMLAEVGLVGKAPGRYNLHLGGNLEGTRIPRLHLENITEPQILAELDALIGRWAKDRSAGECFGDFVIRAGIIAPVIDSARDFYAA

SEQ ID NO: 101850 - protein, 431 aa, Unknown
  Bacterial polypetide isolated from the Sargasso Sea
MAGKSSKSEWSAKKPYFTKITDNFVLNGESSRKETRHIVFDLGDSGLEYKAGDALGVVPRCPPEEVEEILRICGFSGEEIVETNLGDCSLRDALTDRYEVHRVSKKWIKGLAERSGGDAPKSEIRIVSRKRSSSVDGALIVDWSSSGEGDVPEGYVEMGEMGDNSAILLHELISDNDAMEDYIWSRDYVDALGDFASFGFTPQQLLEGMDRLKPRLYSIASSPDFEEGTVHLTVAIVRYSHHERDRTGLCTGFMADRCETNTTEVGVYMSPTRSFVLPEDGTKDIIMVGPGTGIAPFRAFLQQREINGDSGRNWLFFGDWTEEGEYLYRDEMGDWKDRGIISKHDLAWSRQGSEKVYVQHLMEKNGEEIWNWIDGGAYFYVCGDKQYMAKDVHSTLIGICSEFGGMSPEDAKDFVETGLMKTEKRYLRDVY

SEQ ID NO: 101851 - protein, 1395 aa, Unknown
  Bacterial polypetide isolated from the Sargasso Sea
MTATPVKSVCPYCGVGCGMVLHVEEGEVVKVSGDADHPANFGRLCTKGSSAHVALRRSGRLDRAFVRRAREDDLVPLPARDAIADTARRLRAVLDAHGPDALSFYVSGQMSIEAQYLVNKLAKGFVGTHNIESNSRLCMASAGTGYKQSLGADGPPGSYQDFDRANLFFVIGANMADCHPILFLRMMDRVKAGAKLIVVDPRRTGTADKADLFLQIRPGTDLALTNGLLHLLHANGRTDAAFIDAYTEGWDAMPAFLADYTPERVAEITGLAEADLRTAAQWIGDAQEWMSCWTMGLNQSTHGVWNTNTICNLHLATGKICRPGSGPFSLTGQPNAMGGREMGYMGPGLPGQRSVASDDDRRFVENLWRVPAGTLRTETGQGTVDMFSRMAAGDIKACWIICTNPVATVPNRQNVIAGLQAAELVIAQDAFLDTETNRYADILLPGALWAEGDGVMINSERNMTLMRAAIAPPGDALPDWRIVAEVARAMGYGDAFDYASAADVFDEIVRFSNPATGYDLRGASHAALRDGPVQWPVAPGTARERHPIRYLNDGVSQTLRPAADGNDAPRVAFPTPSGKARFFARPHVDPAELPGDTFPIVLNTGRLQHQWHTMTKTGKVAMLNKLNPRPFVELHPDDASALGIAAKDSVEIRSARGRAVLPAVVTERVQRGNCFAPMHWNDVYGDELCINAVTNDAIDPESQQPELKYCAVALRRVETDAFASADEAAAHPDARADDAQPAPALVQATASQESDMADIDTFAAALGVADIAPPPLTDTERLYVAGFVSGLKAGAGRREGGVPVVPAAAPLTLPVRFWLDGMLAGLFSRSAPARAQDGAAPSLPADAGASGGVRIVRARPKVVLLWASQTGNIESLTEDYATQLMNAGFDIRTACMSDYPVASLAGAQYVLLMTSTFGDGDAPDNGSEFWDALQAGSAARLDGVHFAVLAFGDRNYDQFCGHGRRLDARLAELGAARLCARVDCDVEFQRDADQWLERVVARIKEADAALHAVPTGGMSPSGLLPTKAHPAPSKLVANLRLNRPGAAKETRYVSLSTEGANLEYETGDALGVWPTNCPELVDELLSVTALKADAPVSVAGVGDVRLGDALARHFDITRPHPDTLAFIASRSANGALKALLGDDRKGDLKQWLWGQQLADVLHEFPVELSGTELVGMLKRMQPRLYSIASSPSAHAGEIHLTVSAVRYHNGRRARKGVASTFLADRADDGRVPVFVQKSAHFRPPVSGDVPIVMVGPGTGVAPFRGFLHERQARGARGRNWLFFGEQHAQTDFYYGDELRAMHDSGFLTRLDLAFSRDQADKIYVQDRMREQGAELFAWLEEGAHFYVCGDAARMAKDVDAALKAVVAEHGGMSDEAANDYVARLSKARRYMRDVY

SEQ ID NO: 101852 - protein, 565 aa, Unknown
  Bacterial polypetide isolated from the Sargasso Sea
MSEQKLALNEYLKTDSDYLRGTIKEGLDSSVTGSFSDGDQQLIKFHGFYQQDDRDLRNERKEQKLEPLYSFMLRARVPGGVCTPKQWLGVDEIASTLTSSNSIRLTTRQTFQYHGIPKRNLKTIIQGLDREALDSIAACGDVNRNVMCNPNPVESKLHAQAYEVAKKLSDHLLPHTRAYAEIWLDEEKLLTTEDETVEPVYGKTYLPRKFKMAVAVPPDNDVDVYTNDLGFIAVAENGELVGFNLTAGGGMGSTHGEVETFPRLADDFGFIKTEDVMKFAEAVMTVQRDWGNRTNRKRSRLKYTIVDHGYEKFKAEVEARAGVKFEPKRDVVIGDRGDRYGWVEGVDGKWHLTLFIESGRIKDLPGKSLQTGMREIAKIHKGDFRMTSNQNMIIAGVAPEDKATIEGLARKHGLLGQVLTQTRGHSIACVALPTCPLAMAEAERYFPEFIDHIDALQAKNGISDQAIVVRMTGCPNGCARPFAAEIGLVGKAPGRYNLYLGANFEGTRLNKMYRENIQEAEILAELDALFARYAVERNAGETFGNFTVRTGVVKAVIDAAKDFHG

SEQ ID NO: 101853 - protein, 603 aa, Unknown
  Bacterial polypetide isolated from the Sargasso Sea
MLLKELSSLASPLSQPQVEKLKQLTAELNAVQLAWVSGYLAATANAGNQAQLAPVSDAQAAQTVTILYGSQTGNGRGIAKALAEKAKAQGYGVNLASMGEYNVRQLKQETLLLLVVSTHGEGEAPDDAIELHKFLASKRAPQLNNLHYSVLALGDSSYEFFCQTGKDFDARLSALGAKALLPLVECDVDYEAAAGQWHADVLTAVKPLIQTTANVVALNDTGSAQVASESEFTKQNPYSAEVLVSQKITGRGSDRDVRHVEIDLGESGLRYEVGDALGVWFSNNETLVDEILAGLGLAADTTVTVGNESISLKQALIEKKELTQLYPGLVKAWAELSASPELLAISEDKEQVRQFILHHQFADLVANYQLKADANLDANKLVELLRPLTPRLYSIASSQSEVDTEVHLTVALVEDEHQGQARFGGASHFLASAEEGAEVKVYVEPNKHFRLPEDPQTPVIMIGPGTGVAPFRAFMQERVAQGAEGDSWLFFGNPHFEQDFLYQTEWQQYLKNGDLTRIDVAFSRDQAHKIYVQHRIKEQGQTLWQWLQNGAHLYICGDAERMAKDVHQALLAVAVEFGGLSSEAAEEYFETLRSHKRYQKDVY

SEQ ID NO: 101854 - protein, 334 aa, Unknown
  Bacterial polypetide isolated from the Sargasso Sea
SGLCYQPGDALGVWYQNDPALVKELVELLWLKGDEPVTVEGKTLSLAEALQWHFELTVNTGNIVENYATLTRSETLLPLVGDKAQLQHYAATTPIVDMVRFSPAQLDAQALVDLLRPLTPRLYSIASSQAEVESEVHVTVGVVRYEIEGRARAGGASSFLADRVEEEGEVRVFIEHNDNFRLPSNPQTPVIMIGPGTGIAPFRAFMQQRAADGAEGKNWLFFGNPHFTEDFLYQVEWQRYVKEGVLSRIDLAWSRDQKEKVYVQDKLRQQGAELWRWINDGAHIYVCGDANRMAKDVEQALLEVIAEFGGMDIEAADEFLSELRVERRYQRDVY

SEQ ID NO: 101855 - protein, 287 aa, Unknown
  Bacterial polypetide isolated from the Sargasso Sea
MSEKHPGPLVVEGKLTDAERMKLESNYLRGTIAEDLNDGLTGGFKGDNFLLIRFHGMYQQDDRDIRAERAEQKLEPRHAMLLRCRLPGGVITTKQWQAIDKFAGENTIYGSIRLTNRQTFQFHGILKKNVKPVHQMLHSVGLDALATANDMNRNVLCTSNPYESELHAEAYEWAKKISEHLLPRTRAYAEIWLDQEKVATTDEEPILGQTYLPRKFKTTVVIPPQNDIDLHANDMNFVAIAENGKLVGFNLLVGGGLSIEHGNKKTYARTASEFGFLPLEHTLAVAG

SEQ ID NO: 101856 - protein, 601 aa, Unknown
  Bacterial polypetide isolated from the Sargasso Sea
MLFASLAAQASPLSAQQIKDLQSLVSQLNPIQQAWVSGYLAAAAQLAGGQTAAVSPQSHESAVLTILYGSQTGNAKAVANKIQAAAEQQGIAVKLTDIGSYKTTQLAKEKYLLIVTSTYGEGEPPESAVAFHKFLFSKKAPKLDGLKYAVLGLGDTSYEFFCKTAIDFDEQLAALGGKRLHARADLDVDYAAQAASWTETAVQAFAPELKQATGSAQVIAWPGATATAGHDSAYSKETPYLAELSVNQKITGRDSTKDVRHIEISLADSGITYQPGDALGVYFLNDDKAVDAILAATGLDGASEVQLAGQTYSLKTALTEHLELTQSYPSFVEKYAQATANSELLELVKDKAALRQYLDNRQTLDVILQNPAPLTAQQLVDALRKQQPRLYSIASSQAEVGDEVHLTLGVVRYDAFGDTHLGGASGFLAERLEEGAQLKVFVEHNDNFRLPDHETPVIMIGPGTGIAPFRAFLQERDQAGATGQNWLFFGNPHFTQDFLYQVELQDYLKRGVLSKLDVAFSRDQAQKVYVQDKLRLKAKEIWTWLQQGAYLYICGDGNKMAKDVHQALLDIAQQQAGFTVEQAEQYFDDLRQAKRYQKDVY

SEQ ID NO: 101857 - protein, 557 aa, Unknown
  Bacterial polypetide isolated from the Sargasso Sea
MSDNERLKKDSHLLRGTITKDLKDEITGGFNGDNFMLIRFHGMYQQDDRDIRPERAQQKLEPLHNVMLRARMPGGIIKPEQWLAIDEFAADNTIYGSIRLTTRQTFQFHGVLKPKIKGMHQMLNSIGIDSIATAGDVNRNVLCTSNPVESVLHQQAYQWAAKISEHLLPKTKAYAEIWLDEQKVETTEVEPILGEAYLPRKFKTTVVIPPQNDVDVHANDLNFVAIAENGQLVGFNVLVGGGLAMTHGDKGTYPRKAEDFGFIGLEHVLAVAEHVVTVQRDYGDRVNRKNAKTKYTIDRIGVDVFKAEVEKRVGVKFQPSRAYEFTGRGDRFGWVEGIDGKHHLTVFIENGRILDYPGKTLKTGVAEIARIHKGDFRMTANQNLIIAGVAEEDKARIEALARQHGLINDSVTEQRKNSMACVSLPTCPLAMAEAERYLPTLVTHVEELLTKHGVPDDHIILRVVGCPNGCGRAMLAEAGLVGRGPGKYNLYLGGNTQGTRIPKLYLDNVAEAEILQALDQLIGRWVLERNSGECFGDFVVRVGVVAEVKVSKTDFHA

SEQ ID NO: 101858 - protein, 323 aa, Unknown
  Bacterial polypetide isolated from the Sargasso Sea
MFDVVVIGSGPAGYVAAIRSSQLGLKTLCIEESYDEKGNINFGGTCLNIGCIPSKALLDSSQRYYEANKNLDKHGIKVGDLKLDLKKMMHRKNEIVKKLTTGISGLFLTNKVESLCGRGKVISENIVEVTMSDGSVENIETKNIIIATGSKPIEIPAANFSNNIVDSTGALSFNKVPKSLGVIGAGIIGLELGSVWSRLGSKVTVIEALDNFLPMVDSDLSKESFKEFKKQGLDIHLGSKLTSSKELKDSVQILYEQKGNEAEMTFDKLIVAVGRKANSEDIISKELDIKLENGLIEVNNYCQTSISNIWAIGDIVRGQMLAH

SEQ ID NO: 101859 - protein, 348 aa, Unknown
  Bacterial polypetide isolated from the Sargasso Sea
LLNLSENFHKAKNFEKIGIETGEIKLNLGKMMKNKEKAVTVLTKGIEFLFKKNKVSYFKGKGSFKSSNEVVVSRDGKETVIETKKAIISTGSEPVSIPGMEFDEEKIISSTRALSLEKLPKKMVVVGGGYIGLEMGSVWSRLGTEVEVVEFLDHITPGMDREISSEFMKILKKQGIKFKLNTKVEKITKNENGVILEVIDKENKKNNIEADVVLISVGRRPYTTGLKLENVGVKTDEKGKVKVDKNFETNIKNIFAIGDVIDGPMLAHKAEEEGIAVAEFIAGQSGHVNYEIIPGVIYTTPEVASVGKTEEQLNEKKINFKVGKFPFMANSRAKAIDEPEGFVKILAD

SEQ ID NO: 101860 - protein, 176 aa, Unknown
  Bacterial polypetide isolated from the Sargasso Sea
MTEKFQATIIGGGPGGYVCAIRLAQLGLKTACIESRGSLGGTCLNIGCIPSKSLLNLSENFHKAKNFSKIGIEVGEVKLNLQKMMENKDKAVTTLTKGVEFLFKKNKVTYFKGTGKLKSKSEISIIDKNNKETNIESENIIISTGSEPVPLPGVEFDEEKIISSTGALSLKSVPKK

SEQ ID NO: 101861 - protein, 328 aa, Unknown
  Bacterial polypetide isolated from the Sargasso Sea
CIPSKALLHAAKVIDDAHAMKDHGIDFGTPRIDPIRLSAWKNSVVGKLTNGLKSLAKQRKVECLTGKGTFLDSHHLQIESKSGTTIVRFENAIIAAGSEPVKLPFLPDDPRIIDSTGALNLQKIPETMLVIGGGIIGLEMATVYRSMGTKITVVEMLDELMAGADRDLVKPFHRDVSRQNDNIWLETRVTQVEAQKKGLKVHFEGKNAPEKPVVFEKILSAVGRTPNGLKIGAENAGVSVDEKGFIAVDSQMRTNVSHIYAIGDIVGQPMLAHKATHEGKVAAEVICGMKSHFDARAIPSVAYTDPEVAWAGITEEEAKSQGMNYAKG

SEQ ID NO: 101862 - protein, 284 aa, Unknown
  Bacterial polypetide isolated from the Sargasso Sea
LKTLCIEELSNDKGKPNFGGTCLNVGCIPSKSLLDSSHRYYEAKKNLSDHGIQLGDVKLDLKTMMERKDNIVSKLTGGIDGLFLTNKVESICGKGKVISKNTVQIDKADGSSEKVDAKNIIIATGSSPIEIPAASFGKHIVDSTGALAFDSVPKRLGVVGAGIIGLELGSVWSRLGSEVTVLEALEDFLPMTDTDISKESFKEFKKQGLDIQLASKVTSTKELKNLVKVKYEQKGKEIEVEFDKLIVAVGRKPNSEKVLPKNLGIKIENGFIQVNEYCQTSVEN

SEQ ID NO: 101863 - protein, 343 aa, Unknown
  Bacterial polypetide isolated from the Sargasso Sea
LFMNYDLLVLGGGPGGYTAAFRAADLGLNVALVERYSSLGGVCLNVGCIPSKTLLHVSKVIGEVRGLADYGIHYESNQINLEKLNIKKRSVISQLSNGLAGLAKQRRIEVITGEGRFTRANRLSVNSSQTPSIEVQFKNVIISTGSKSIGLPDIPDDPRIIDSTGALELSDIPERLLIVGGGIIGLEMASVYAELGSRVTIVELASDLMVGLDQDLVVPLEKSILKIVEAIFKSTRVSRIVSHKDSLSVDLDGPDVPSNMNFDKVLLAIGREPNTRGLGFEELGIQLSHDGFVSVDSMMCAAPGVYAVGDIVGTPMLAHKAAHQGKVAAEAVAGLKTEFSPST

SEQ ID NO: 101864 - protein, 306 aa, Unknown
  Bacterial polypetide isolated from the Sargasso Sea
IKASQLGLNTACVEFASDEKGNQKYGGTCLNVGCIPSKSLLDSSHKYYEAQKDFASHGIDLKDLSVNIPSMMKRKDEVVNKLTTGITGLFKANGVEAISGRGKVINQNLVEVSNNGDITSLETKFIILATGSNPIEIPIAKWSENIVDSTGALNFDRVPERLGIIGAGVIGLELGSVWSRLGAEVTVIEAMDDFLPIVDKQISKECHREFKKQGLDIHLGLKLTSAKDNGKDVEISYESKGEELKASFDKLIVAVGRKPNTADISDESFPIELDELGRVQVDDFCKTNYENIYAVGDIVRGPMLAH

SEQ ID NO: 101865 - protein, 172 aa, Unknown
  Bacterial polypetide isolated from the Sargasso Sea
IEIKDNFQTSVEGIYAIGDVAPGPMLAHKAEEEGVACVEFINGQKPHINYDAIPAIVYTNPEIASVGKTEEQLKQEKKDFKVGKFPFMANGRALTTSASEGFVKILVDKQTDEILGAHIIGHDAGQLIAEIVTTIEFGGSAEDIARVCHAHPTTSEAVKEAALSVDGRAIHI

SEQ ID NO: 101866 - protein, 266 aa, Unknown
  Bacterial polypetide isolated from the Sargasso Sea
MTKTQFDIAVIGGGPGGYVAAIRAAQLGIKTVVIEREHLGGICLNWGCIPTKALLRAAELRHSLGEMTDFGIMVGEVSVDLGAVVNRSRKVASRLSKGVKQLLKKNKIQVIEADAKLGEAKAGLRQLTLSDGNTVLAKHVIIATGARARALPMIEVNGETILTYREAMVPQSMPESLIIVGSGAIGSEFASFYHDMGVKVTLVEAMDRILPVEDAEVSAFVQKSFEKRGITVMTGVKLQSVKSSKNAVSAVIEGQDSPLQASRMIL

SEQ ID NO: 101867 - protein, 112 aa, Unknown
  Bacterial polypetide isolated from the Sargasso Sea
MSEKFQAVVIGGGPGGYVCAIRLAQLGLKTACIESRGSLGGTCLNIGCIPSKSLLNLSEEFHKVKGLANKGIEIGEVKLNLDKMMKSKDKAVTVLTKGVEFLLKKNKVTYFK

SEQ ID NO: 101868 - protein, 295 aa, Unknown
  Bacterial polypetide isolated from the Sargasso Sea
GYVCAIRLSQLGLKTACIESRGSLGGTCLNIGCIPSKSLLNMSESFHRAKNFSNIGIETGEIKLNLEKMMSNKDSSVATLTKGVEFLFKKNKVTYIKGVGSFNEKNEILVKNDKSEMKIKTDKTIISTGSEPLSLPGIDFDEKKILSSTGALNISKLPKKMVVVGGGYIGLEMGSVWSRLGTEVHVIEYLDHITPGLDKEISNEFMKILKKQNIQFELNTKVEKISKNDQGVIIETSNKDAKNKIEADVVLISVGRKPYTDKLNLDKIGVNLDKKGKITVNRNFETSVKKYLCNR

SEQ ID NO: 101869 - protein, 290 aa, Unknown
  Bacterial polypetide isolated from the Sargasso Sea
NERTKHLASHGVSFGEPKIDLDKIRDYKDGVVKQLTNGLAGMSKMRKTQHVKGYGKFTGSNTLEVQGDDGVTTITFEKAIIAAGSEPISLPFIPEDDRVIDSTGALEMKDIPEKMLVLGGGIIGLEMGTVYEALGSNVDVVEFLDQLIPAADKDIMKVFMKDYKEKFNIMLETKVTAVEAKDDGLYVTFEGKKAPAEPVRYDKVLVAVGRKPNGNLVSADKAGVNVDERGFINVDKQMRTNVEHIFAIGDLVGQPMLAHKAVHEGHVAAEVVAGQKHYFDPRAIPSVAYT

SEQ ID NO: 101870 - protein, 311 aa, Unknown
  Bacterial polypetide isolated from the Sargasso Sea
LVVDPEGYVCAIRAAQLGLKTGCIESRGTLGGTCLNVGCIPSKSLLNLSDMYKKAQKDYNNLGIEVGEVKLNLKKIMMNKSKSVQVLTKGVEFLFKKNKVTYIKGKGVLFSKNDVVVYENGKKTSYKSKNIVIATGSSSSSVPGIEINEKNIISSTGAISLEKVPKSMVVIGGGYIGLEMGSVWSRLGSDVTVIEYLDHITPGMDREVSKEFQKILTKQGIKFLLNNKVTNVKDENNKVIVEFEDKNTKTKNKIECEKVLVSVGRKPYTDGLNLSKIGIDKDKKGRIDVDKEFRTSIKNIFAIGDVIKGPM

SEQ ID NO: 101871 - protein, 190 aa, Unknown
  Bacterial polypetide isolated from the Sargasso Sea
MSEKFDVTVIGGGPGGYVCAIRLSQLGLKTACIESRGSLGGTCLNIGCIPSKSLLNLSEKFHSAKNFEKIGIETGEIKLNLDKMMKNKDKAVTVLTKGVEFLFKKNKVTYFKGKGSFENENSIKIEGSEGTKIIQTDKTIISTGSEPVSLPGVDFDEEKILSSTGALSIPKLPSKMIVVGGGYIGLEMGS

SEQ ID NO: 101872 - protein, 245 aa, Unknown
  Bacterial polypetide isolated from the Sargasso Sea
MSRYDLAVLGGGPGGYVAAIRGAQLGQAVCVIDKDKLGGVCLNWGCIPTKALLKNAEVYNIIKNADKYGINVDQVSVNFKKNVKRSRDVSARLSKGIEFLMKKNNVVHINGVGRLITNNKIEVQNGNNKKIIESENIVIATGARPRSFPGMKFDGRRVISSKEAMSLESPPDKMIIIGSGAIGCEFAYYFNEFGTQVHLLEMEDRILPNEDLEISNEVQNSFEKIGIKISKGIRVSKIESLKTKV

SEQ ID NO: 101873 - protein, 35 aa, Unknown
  Bacterial polypetide isolated from the Sargasso Sea
MDFDVVVIGGGPGGYVAAIKSAQLGQKVACIEFDS

SEQ ID NO: 101874 - protein, 219 aa, Unknown
  Bacterial polypetide isolated from the Sargasso Sea
ESRGSLGGTCLNVGCIPSKSLLNLSENFHKAKNFSKIGIEVGDLKLNLPKMMQNKTKAVTVLTKGVEFLFKKNKITYFKGTGKFKSKNEITIQQDKGEISIQTSNVVICTGSEPVNFKGTSFDEEKIVSSTGALSLNKVPKKMLIIGAGYIGLEMGSVWSRLGSEVHVLEYLDHITPGMDREIGIEFMKILKKQGITFHLKTKVNSIKKNQKGVIISAS

SEQ ID NO: 101875 - protein, 186 aa, Unknown
  Bacterial polypetide isolated from the Sargasso Sea
NLGIKIENGFIQVNEYCQTTEENIWAVGDVVRGPMLAHKGSEEGIMVAERIANKQAEVNYDLVPNVIYSHPEIAWVGKNENELKSSGIKYKVGKFPFAASGRALAVDQSVGFVKVISDEKTDSIIGVHVFGPAAAEIVQQALISMEFGSSAEDIALTMFSHPTVSEAFHEAALSVNNQAIHIGNKK

SEQ ID NO: 101876 - protein, 229 aa, Unknown
  Bacterial polypetide isolated from the Sargasso Sea
GKGASRKVEITFEKHGSEQTLKVDKVLVTVGRKPNTKGWGLENIGARMDGSGTFIRTDRQCRTSVPGVYAIGDVSGEPMLAHKASAEGEMVAEIIAGHKREFDKVAIPEIVFTEPEIVSVGLTPEEARERGEEIIVGKFPLAANGRALSLEAEKTGGFIRVTARESDHVILGVQAVGSHIAELHSEFVLALEMGALLEDVAGTVHAHPTMSEAFHESVLKTLGHAIHIS

SEQ ID NO: 101877 - protein, 203 aa, Unknown
  Bacterial polypetide isolated from the Sargasso Sea
MQENFDLIVIGGGPGGYVCAIRAAQLGLKAACIESRGTLGGTCLNIGCIPSKSLLNSSELYHKAKTNFNNIGIETSSINLNLEKLMMNKNKSVQVLTKGVEFLFKKNKVTYIKGKAVLFSKNNVVVYNDQKKTSYSSKNIVIATGSEPTSLPGIKIDEKEIISSTGALSLNKVPRKLIVIGGGYIGLEMGSVWSRLGSEVTVM

SEQ ID NO: 101878 - protein, 77 aa, Unknown
  Bacterial polypetide isolated from the Sargasso Sea
MANKESYDIAVIGSGPGGYAAAFRAADLGKKVVLVDRDKDLGGVCLNRGCIPSKALLHISRVINEVEHLSGIGVSFG

SEQ ID NO: 101879 - protein, 243 aa, Unknown
  Bacterial polypetide isolated from the Sargasso Sea
MAEKFQATIIGGGPGGYVCAIRLAQLGIKTACIESRGTLGGTCLNIGCIPSKNLLNFSENFHKAKNFSKIGIEVGEVKLNLQKMMQNKDKAVMNLTKGVEFLFKKNKVTYFKGTGKLKSPSEIIIIDKENKETNIQSDNIIISTGSEPVPLPGIEFDEEKIISSTGALSLKSVPKKMLVVGGGYIGLEMGSVWSRLGTEVHVIEFLDHITPGMDKEISKEFMKILKKQGLNFHLKTKVEKISK

SEQ ID NO: 101880 - protein, 269 aa, Unknown
  Bacterial polypetide isolated from the Sargasso Sea
MTHVDFDLMVIGGGPGGYVAAIRASQLGMTVALIEDKHLGGICLNWGCIPTKALLRASEIRHMLDNVDEFGFTVSGIKMDINNITKRSRKVASQLSSGISHLLKKNKVKVFEGFGSLVKDSSNIKKIRIKTKDNNLEKTAKNVILATGARSRNLPFVSSDGVNIWDYKTAMTPPKLPSSLIIVGSGAIGMEFASFYNDLGVDVTIVEALPSILPNEDNDISKIVKLNFEKRGIKIKTNSALKSVTNKENSVLAEIITNEKVETINSEKL

SEQ ID NO: 101881 - protein, 174 aa, Unknown
  Bacterial polypetide isolated from the Sargasso Sea
MSEKFQAVVIGGGPGGYVCSIRLAQLGIRTACIESRGSLGGTCLNIGCIPSKSLLNLSESFHRAKNLSSLGIETGDVKLNLQKMMKNKDKAVTVLTKGVEFLFKKNKVTYFKGTGSFKSSNQISIKDEQKKETVIEADKVIISTGSEPVSLPGVVFDEKIIISSTGALSLEASS

SEQ ID NO: 101882 - protein, 150 aa, Unknown
  Bacterial polypetide isolated from the Sargasso Sea
MIDKFQAVVIGGGPGGYVCAIRLSQLGLKTACIESRGSLGGTCLNIGCIPSKSLLNLSEEFHKAKNLSNKGIEVGEIKLNLSKMMKNKDKAVTVLTKGVEFLLKKNKVTYFKGTGSFKSKNEILIIEKESKKETSIKADKIVIATGSLPV

SEQ ID NO: 101883 - protein, 245 aa, Unknown
  Bacterial polypetide isolated from the Sargasso Sea
LGSHGITFGKPQIDLDKLRDFKSGVVRKLTGGLAGMAKARKVEVVTGTGAFVDPHHMEVQTEGGKKVVKFKQAIIAAGSEAVKLPFIPEDPRVVDSTGALELRQIPQRMLVIGGGIIGLEMATVYATLGAKIDVVEMLDGLMAGADRDLVKVWEKYNSKRFANVMLKTKTTAAEAKEDGIYVSFEGEKAPAEAQRYDLVLVAVGRTPNGKRISADKAGVAVTERGFIEVDKQMRTNVPHIFAIGD

SEQ ID NO: 101884 - protein, 306 aa, Unknown
  Bacterial polypetide isolated from the Sargasso Sea
FDLAAMMRRKDEVVSTLSKGIEALLKKNKITRYAGVGRLSGPGQVEVLATDGVMSVVESPRILLAVGSRSTVLPGIEVDGTFVGTSTEALAFNEVPPHLVVIGGGYIGLELGSVWRRLGSKVTVLEFADRILTGIDADIASEALSLFKKQGLDIRLQTNVTSARRVGETCIVEVEGNEAIECNRVLAATGRQPATTDIGLESVGIVTDKRGCIPVNDHFQTSAAGIWAIGDCIPGPMLAHKAEEDGVACIDGMTGGWAHVDYRLIPAVVFTHPEIATVGIMEDQLVADGVPYNKGVFPFRANGRAR

SEQ ID NO: 101885 - protein, 251 aa, Unknown
  Bacterial polypetide isolated from the Sargasso Sea
MYDVVVIGGGPAGYVAAIKASQLGLNTACVEFASDEKGNQKYGGTCLNVGCIPSKSLLDSSHKYFEAQKDFASHGIDLKDLSVNIPSMMKRKDEVVNKLTTGITGLFKANGVEAISGRGKVINENLVEVSNNGDKTSLETKFIILATGSNPIEIPVAKWSENIVDSTGALNFDRVPERLGIIGAGVIGLELGSVWSRLGAEVTVIEAMDDFLPIVDKQISKECHREFKKQGLDIHLGSKLTSAKDNGKDVE

SEQ ID NO: 101886 - protein, 122 aa, Unknown
  Bacterial polypetide isolated from the Sargasso Sea
MHGKKHDLVVLGGGPGGYVAAIRAAQLGMSVAIIEKEHLGGICLNWGCIPTKAMLKSAEVFSLINKAEAYGVSAGTTSFDLNKIVDRSKQIAAQLSSGVKYLLEKNKITVINGVGTLMEIIM

SEQ ID NO: 101887 - protein, 65 aa, Unknown
  Bacterial polypetide isolated from the Sargasso Sea
MDFDLIIVGSGPGGYVAAIRGAQLGLKVAIIEKEALGGICLNWGCIPTKSFLRSAEVLKIIEGSE

SEQ ID NO: 101888 - protein, 298 aa, Unknown
  Bacterial polypetide isolated from the Sargasso Sea
KKFKADKILIATGSVPSTIPGIDIDEKNIVSSTGALEFEKVPKKLAVIGGGYIGLELGSVWKRLGADVTVIEFSDTLVPAMDKDIAKVFHSTLKKQGINFMLSTKVESALNKKEKVQINCLNLLNNKSEILDFDKVLVAVGRKPFTGGLGLDNLNININKNGTIDVDKNFQTNIEGIYAIGDVISGPMLAHKASSEGHVFAEQLLGNKPEVNYQCIPAVVYTEPEVAWVGPSERELETKKIAYKKGIFPFSANARGKTTGDTIGSIKFLSDKDNDKVLAVHIIGAHAGELIGEAVAAI

SEQ ID NO: 101889 - protein, 271 aa, Unknown
  Bacterial polypetide isolated from the Sargasso Sea
MTDTQFDIAVIGGGPGGYVAAIRAAQLGLKSVVIERENLGGICLNWGCIPTKALLRAAELRHSIDEMADFGITVGDVKVDLAVVVKRSRKVAGRLSMGVKHLLKKNKVTVIAAEAKLGAAKGGLRQINLSNGETVSAKNVIIATGARARALPNFEANGKTILTYREAMVPETMPESLIIVGSGAIGSEFASFYHDMGVKVTLVEALDRILPVEDEDVSAFVQKSFEKRGIKIMTGVKLQAVTSDANGVQASIKGHDKSLQASRMILAVGIT

SEQ ID NO: 101890 - protein, 251 aa, Unknown
  Bacterial polypetide isolated from the Sargasso Sea
ISVGPGDSVSQGDLISIVSSESKPNEEDESNTEEKETEQPIQESEDTSESSKFKHDYDLIVVGAGPGGYAAAFRASDLGLKVGLVERNSDLGGVCLNVGCIPSKAFLHAAKILDDSKEAEVSGIVFKEPEINLSKMKEWKNNIIGGLTGGLSGLAKQRGVDVIHGTAKFSSKNEIEVNHESDSRRISSNQFIIAVGSEPAELSFLPDDPRIIDSTGALEPDQIPNDILIIGGGIKGLEMATIYSALGSEVT

SEQ ID NO: 101891 - protein, 284 aa, Unknown
  Bacterial polypetide isolated from the Sargasso Sea
MYDVVVIGGGPAGYVAAIKASQLGLNTACVEFASDEKGNQKYGGTCLNVGCIPSKSLLDSSHKYFEAKKDFASHGIDLKDLSVNIPSMMKRKDEVVNKLTTGITGLFKANGVEAISGRGKVINENIVEVSNNGDKTSLETKFIILATGSNPIEIPVAKWSENIVDSTGALNFDRVPERLGIIGAGVIGLELGSVWSRLGAEVTVIEAMDDFLPIVDKQISKECHREFKKQGLDIHLGSKLTSAKDNGKDVEISYESKGEELKASFDKLIVAVGRKPNTADISDE

SEQ ID NO: 101892 - protein, 162 aa, Unknown
  Bacterial polypetide isolated from the Sargasso Sea
MDLKYDVTIIGSGPGGYVAAIRSAQLGHKTAIIEKDKLGGICLNWGCIPTKALLKSSEVYSIMKKSDYYGVTAENVSFNFKNIIDRSRGVANDLSQGIGYLLKKNKIDLINGNGYILDNNTIKIQADNKETIISTKNIIISTGARPKELPGISFSEDVWSYK

SEQ ID NO: 101893 - protein, 274 aa, Unknown
  Bacterial polypetide isolated from the Sargasso Sea
MSEKFDVAIIGGGPGGYVCAIRMSQLGLKTACIESRGTLGGTCLNIGCIPSKSLLNLSETYHKAKKFEKIGIEISNLKLNLEKMMKNKEKAVTILTKGVEFLFKKNKISYFKGIASFKSKNEILITDSNKKQTIIETKNSIISTGSEPLALPGVKFDEEKILSSTGALSLSKVPKKMAIVGGGYIGLEMGSVWSRLGSEVQVLEFLDHITPGMDKEISNEFMQILKKQGISFNLKTKVEKISKSKNGVLIEISDVEGKKKIETDVVLICVGRKP

SEQ ID NO: 101894 - protein, 217 aa, Unknown
  Bacterial polypetide isolated from the Sargasso Sea
MSEKFDATVIGGGPGGYVCAIRLSQLGFKTACVEARDTLGGTCLNIGCIPSKSLLNLSENYHKIKTLDKMGIEVDSIKLNLEKMMKNKDKSVENLTKGVEFLFKKNKISYFKGIGSFHSKNQISVIDKNKKKTIIETKYTIISTGSEPISLPKVKFDEKKIVSSTGALSLTSVPKKMIVIGGGYIGLELGSVWSRLGAEVHIIEYLDHITPGLDREI

SEQ ID NO: 101895 - protein, 159 aa, Unknown
  Bacterial polypetide isolated from the Sargasso Sea
MEENFDLLVIGGGPGGYVCAIRASQLGLKTGCIESRGTLGGTCLNIGCIPSKSLLNSSELYHKAKNNFSSIGIESQGIKLNLKKMMANKNKSVQVLTKGVEFLFKKNKVSYIKGKAALFSKNNVIVYENGKKTSYKSKNIVIATGSYPTSLPGIKIDEK

SEQ ID NO: 101896 - protein, 309 aa, Unknown
  Bacterial polypetide isolated from the Sargasso Sea
ATGSSSIEIPNIPVDEKQIVSSTGALSLSKIPKSLLVIGGGYIGLEMGSVWSRLGSKVTVVEALDRIVPTMDDEIAKEFMKMLTKQGLEFKLSHRVSSAKSSKSGVDVEMETSDKKKIKENYEIVLMSVGRKPNTEGLGLEKIGIKLTEKKSIEIKDNFQTSVKGIYAIGDVAPGPMLAHKAEEEGVACVEFINGQKPHINYDAIPAIVYTNPEIASVGKTEEQLKQEKKDFKVGKFPFMANGRALTTSASEGFVKILVDKKTDEILGAHIIGHDAGQLIAEIVTTIEFGGSAEDIARVCHAHPTTRKR

SEQ ID NO: 101897 - protein, 117 aa, Unknown
  Bacterial polypetide isolated from the Sargasso Sea
HPEVAWVGRGEEELKKEKIDYITGTFPFAANGRALTSGESTGFVKIISDKGTDKILGVHVFGPSAADIVQQAIIAMNFGSTAEQLGSTIFSHPTVSEALHEAALAVNRKAIHIGNRN

SEQ ID NO: 101898 - protein, 188 aa, Unknown
  Bacterial polypetide isolated from the Sargasso Sea
GLGLEKIGIKLTEKKSIEIKDNFQTSVEGIYAIGDVAPGPMLAHKAEEEGVACVEFINGQKPHINYDAIPAIVYTNPEIASVGKTEEQLKQEKKDFKVGKFPFMANGRALTTSASEGFVKILVDKKTDEILGAHIIGHDAGQLIAEIVTTIEFGGSAEDIARVCHAHPTTSEAVKEAALSVDGRAIHI

SEQ ID NO: 101899 - protein, 225 aa, Unknown
  Bacterial polypetide isolated from the Sargasso Sea
CLTGKGTFLDSHHLQIESKSGTTTVRFENAIIAAGSEPVKLPFLPDDPRIMDSTGALNLQEIPETMLVIGGGIIGLEMATVYRSMGTKITVVEMLDGLMAGADRDIVKPFHRHVSRQYDNIWLETRVTQVEAQKKGLKVHFEGKNAPEKAVVFEKILSAVGRTPNGFKIGAENAGVSVDEKGFIAADSQMRTNVSNIYAIGDIVGQPMLAHKATHEGKVAAEVIC

SEQ ID NO: 101900 - protein, 186 aa, Unknown
  Bacterial polypetide isolated from the Sargasso Sea
VSKKFGIKLTDKKSIEIKNNFKTSVEGIYAIGDVAPGPMLAHKAEEEGVACVEFINGQKPHINYDAIPAIVYTNPEIASVGKTEEQLKQEKKDFKVGKFPFMANGRALTTSASEGFVKILVDKKTDEILGAHIIGHDAGQLIAEIVTAIEFGGSAEDIARVCHAHPTTSEAVKEAALSVDGRAIHI

SEQ ID NO: 101901 - protein, 131 aa, Unknown
  Bacterial polypetide isolated from the Sargasso Sea
MDYLEKDLVVLGGGPGGYAAAFYAASHGLNVTLIDKNENLGGTCLNEGCIPSKALIHATELIHAAEEGKAFGVTFTKPKIDLDQLRDWKSSIISKLNKGIASLCDKKKVSFIHGRGYFEDGKTLRVESKKG

SEQ ID NO: 101902 - protein, 31 aa, Unknown
  Bacterial polypetide isolated from the Sargasso Sea
MNFDLVIIGSGPGGYVAAIRGAQLGLKVAVM

SEQ ID NO: 101903 - protein, 56 aa, Unknown
  Bacterial polypetide isolated from the Sargasso Sea
MSEKFDAIVIGGGPGGYVCAIRLAQLGKKTACVEYRGTLGGTCLNIGCIPSKILLN

SEQ ID NO: 101904 - protein, 250 aa, Unknown
  Bacterial polypetide isolated from the Sargasso Sea
KYNSKRFANVMLKTKTTGAEAKDDGIYVSFEGEKAPAEAQRYDLVLVAVGRTPNGKKIGADKAGVAVTDRGFIDVDKQMRTNVPHIFAIGDIVGQPMLAHKAVHEGHVAAEAAHGEKAYFDALQIPSVAYTDPEVAWAGKTEDQLKAAGIKYGKAVFPWAASGRAIANGRDEGFTKLLFDEETHRVIGGGIVGLNAGDLISEVCLAVEMGADATDIGKTIHPHPTLGESIGMAAELYEGVCTDLPPQKKK

SEQ ID NO: 101905 - protein, 67 aa, Unknown
  Bacterial polypetide isolated from the Sargasso Sea
MAEKFEVIVIGGGPAGYVCSIRLAQLGFKTACVESSLTLGGTCLNVGCIPSKSLLNLSEKFHNTKYL

SEQ ID NO: 101906 - protein, 198 aa, Unknown
  Bacterial polypetide isolated from the Sargasso Sea
MAVGVEGLSEGIGLEALGVRKNNDLMEVNEKQQTSVNGIWAIGDVAGAPQLAHAAVAEGIAAVEFISGRERPPVNRQNIPNCIYSQPQVASTGLSEALALSRGIKVKIGRFPFQASGKALASGHTDGFVKLIFGSEYGELLGGTIIGFGATELIAEVSLAVNMEATYEELLWTIHAHPTLSEVVMEAAGAAFDEAINI

SEQ ID NO: 101907 - protein, 133 aa, Unknown
  Bacterial polypetide isolated from the Sargasso Sea
KARMNYDLVPNVIYTHPEVAWVGKTQQELEDHGVEFKIGSFPFAASGRALAAADSVGSVKVLADKKDDTILGVHVFGPSAADIVQQAVIAMEFGSSAEDIGLTVFSHPTVSEAFHEAALAANNSAIHIGNKRK

SEQ ID NO: 101908 - protein, 144 aa, Unknown
  Bacterial polypetide isolated from the Sargasso Sea
KAEDEAVACIERIAGHAAEVNYGVIPGVIYTRPEVASVGKGEEELKAEGRAYKVGKFPFTANSRAKINHETEGFVKILADANTDQILGVHMIGPSVGELIGEYCVAMEFSASAEDIALTCHPHPTRSEAGRQAAMGVHGWTMQA

SEQ ID NO: 101909 - protein, 123 aa, Unknown
  Bacterial polypetide isolated from the Sargasso Sea
MSDKFDVTVIGGGPGGYVCAIRLSQLGLKTACIESRGSLGGTCLNIGCIPSKNLLNFSENFYKAKNFNEIGIEVGEVKLNIDKMMKNKEKAVAVLTKGIEFLFKKNKVTYFKGIGAFKSANEI

SEQ ID NO: 101910 - protein, 222 aa, Unknown
  Bacterial polypetide isolated from the Sargasso Sea
MPDKFQAVVIGGGPGGYVCAIRLSQLGLKTACIESRGSLGGTCLNIGCIPSKSLLNLSEEFHKVQNLSSKGIEIGEVKLNLSKMMKSKDKAVTILTKGVEFLLKKNKVTYFKGTGSFKSENEILIKNNKNEEKLIQADKIIIATGSVPVSLPGIKFDEKVIVSSSGALKFEQVPKKMLVVGGGYIGLEMGSVWSRLGSEVHVIEFLDHITPGMDKEISHEFM

SEQ ID NO: 101911 - protein, 160 aa, Unknown
  Bacterial polypetide isolated from the Sargasso Sea
MYDVVVIGGGPAGYVAAIKASQLGLNTACIEFASDEKGNQKYGGTCLNVGCIPSKSLLDSSHKYYEAQKDFASHGIDLKDLSVNIPSMMKRKDEVVNKLTTGITGLFKANGVEAISGRGKVISENLVEVSNNGDITSLETKFIILATGSNPIEKSHCKMV

SEQ ID NO: 101912 - protein, 108 aa, Unknown
  Bacterial polypetide isolated from the Sargasso Sea
KEQGVSYETATFPWAASGRAIASDATNGMTKMIFEKETGRVIGGAMVGTNAGEMLGEIGLAIEMGADAEDVALTIHAHPTLNESIGLASEIFEGSITDLPNPKAKKKK

SEQ ID NO: 101913 - protein, 300 aa, Unknown
  Bacterial polypetide isolated from the Sargasso Sea
ALSLSKIPKSLLVIGGGYIGLEMGSVWSRLGSKVTVVEALDRIVPTMDGEIAKEFMKMLTKQGLEFKLSHKVSSAKSGKSGVDIEMETSDKKKIKENYEIVLMSVGRKPNTEGLGLEKIGIKLTEKKSIEIKDNFQTSVEGIYAIGDVAPGPMLAHKAEEEGVACVEFINGQKPHINYDAIPAIVYTNPEIASVGKTEEQLKQEKKDFKVGKFPFMANGRALTTSASEGFVKILVDKKTDEILGAHIIGHDAGQLIAEIVTTIEFGGSAEDIARVCHAHPTTSEAVKEAALSVDGRAIHI

SEQ ID NO: 101914 - protein, 91 aa, Unknown
  Bacterial polypetide isolated from the Sargasso Sea
MKKYDVIVIGGGPGGYVAAIRAAQLNKKVALIESQHLGGICLNWGCIPTKSLLKNAEVLDIIKNSSKYGIDVKDYTINWDKVIKRSRDIAN

SEQ ID NO: 101915 - protein, 205 aa, Unknown
  Bacterial polypetide isolated from the Sargasso Sea
MYDVVVIGGGPAGYVAAIKASQLGLNTACVEFASDEKGNQKYGGTCLNVGCIPSKSLLDSSHKYYEAQNDFASHGIDLKDLSVNIPSMMKRKDEVVNKLTTGITGLFKANGVEAISGRGKVINENLVEVSNNGDITSLETKFIILATGSNPIEIPIAKWSENIVDSTGALNFDRVPERLGIIGAGVIGLELGSVWSRLGAEVTVI

SEQ ID NO: 101916 - protein, 213 aa, Unknown
  Bacterial polypetide isolated from the Sargasso Sea
DKDGNKNNFDCDVVLISVGRKPNTDGLNLESVGVNLDERNRIKTDKNFMTNVQNIYAIGDVIVGPMLAHKAEDEGIAVAENIIGQSGHVNYDTIPGVVYTTPEVASIGKTEEQLKKLNKKYKVGKFSFMANSRAKAIDDAEGFVKILADEQTDKVLGAHIIGPHAGELIAEIGVAMEFGASAEDIARTCHAHPTFSEAVKEAALSVDKRAIHS

SEQ ID NO: 101917 - protein, 50 aa, Unknown
  Bacterial polypetide isolated from the Sargasso Sea
MSQKFDAIVIGGGPGGYVCSIRLSQLGLKTACIESRGSLGGTCLNIGCIP

SEQ ID NO: 101918 - protein, 224 aa, Unknown
  Bacterial polypetide isolated from the Sargasso Sea
LGMKVACIEKEPSLGGTCLNIGCIPSKALLNSSEKFVEISNHAAEHGIKTSKIDLDLNVLMDRKTKIVKKLTTGISFLFKKNKITHIPGMGSFVDKNTISITNGKNEITASAKNFIIATGSSSIEIPNIPVDEKQIVSSSGALSLSKIPKSLLVIGGGYIGLEMGSVWSRLGSKVTVVEALDRIVPTMDGEIAKEFMKMLTKQGLEFKLSHKVSSAKSGKSGVD

SEQ ID NO: 101919 - protein, 300 aa, Unknown
  Bacterial polypetide isolated from the Sargasso Sea
LAEGKETTIQTDKTIISTGSEPISIPGMEFDEEKILSSTGALSLSKLPKKMVVVGGGYIGLEMGSVWSRLGTQVEVIEFLDHITPGMDKEISKEFEKILKKQGIKFQLNTKVEKIIKSKNCVSINTVDKEKKKNKIDADVVLISVGRKPHTKDLNLENVGVQTDEKGRVKVNKYFQTNVKNIYAIGDVIEGPMLAHKAEEEGIAVAELIAGQSGNVNYDIIPGVVYTSPEVASVGKTEEQLKTNKNNYKVGKFPFMANSRAKAIDEQEGFVKILADAITDKVLGVHIIGPHAGEMIAEMA

SEQ ID NO: 101920 - protein, 280 aa, Unknown
  Bacterial polypetide isolated from the Sargasso Sea
IIQSEKTIIATGSVATPLPGIEIDEQKIVSSTGALKLEKVPNKMVVVGGGYIGLEMGSVWSRLGAEVEVVEFLDHITPGMDKEISSEFMKILKKQGIKFNMQNKVETIKKNKSGVVVSTVDKEGNKNNFESDVVLISVGRKANTEGLNLETIGVELDDRKRIKTDKSFKTNLENIYAIGDVISGPMLAHKAEDEGVAVAENIAGQSGHVNYDTIPGVIYTTPEVAAIGKTEEQLKDSKMEYKVGKFSFMANSRAKAIDDAEGFVKILADEKTDKVLGAHI

SEQ ID NO: 101921 - protein, 157 aa, Unknown
  Bacterial polypetide isolated from the Sargasso Sea
MYDIIVIGSGPAGYVAAIRASQLGLKTACIEKSSINNKPQLGGTCLNIGCIPSKALLDSSHRYADALNHFSHHGIKVTKPKIDISQMMERKNKIVSQLTSGVAGLLKANKVSQITGSAKIIDSNNVEVSNEENTELLKTKNIIIATGSMPIDIPVAR

SEQ ID NO: 101922 - protein, 48 aa, Unknown
  Bacterial polypetide isolated from the Sargasso Sea
MSEKFQAVVIGGGPGGYVCAIRLAQLGLKTACIESRGSLGGTCLNVGC

SEQ ID NO: 101923 - protein, 94 aa, Unknown
  Bacterial polypetide isolated from the Sargasso Sea
MTEKFDSVVIGGGPGGYVCAIRLAQLGQKTACIEARGALGGTCLNIGCIPSKSLLNLSENFKKAKNFSKLGIETGDVKLNLDKMMKNKEKAVSI

SEQ ID NO: 101924 - protein, 291 aa, Unknown
  Bacterial polypetide isolated from the Sargasso Sea
KNLEKHGIGVENVTLDLSSMMKRKDDIVSKLTGGISSLFLANKVQSLSGKGKIISKNIIQVTQASGKTKDIQAKNIIIATGSNPIEIPSANFSKNIVDSTGALSFKSVPKTLGVVGAGIIGLELGSVWSRLGSEVTVLEALEDFLPMADPDIAKDSLKEFKKQGLNIELASKVISSKELKNAVEVTYQHKGKEIQKEFEKLIVAVGRTPNSSNVISEKLNIKTQDGFIEVNEFCQTSVKNIWAIGDVVRGPMLAHKGSEEGIMVAERIADKQAQVNYDLVPSVIYSHPEIA

SEQ ID NO: 101925 - protein, 275 aa, Unknown
  Bacterial polypetide isolated from the Sargasso Sea
MNKNYDIVVIGGGPGGYVAAIRAAQLGNSVAVIEKEALGGICLNWGCIPTKSLLKDSEVLHLVKNADKFGIKIDNYRIDFSSTVKRSRSVAKRLSKGIEFLLKKNNIEHISGVASLKSLTEIEVLNEKGEMSILSGKNIILASGARNREVSGLKTDGNRIISSKEAMVLKKIPKSIVIIGAGAIGIEFASFFNEYNSEVQIVEMLPELLPVEDDEVSSILKRSFEDRGILIHTSAKVEKIEKLKTKVKVHILSNGNKSVLEAELALVAVGVQGNV

SEQ ID NO: 101926 - protein, 269 aa, Unknown
  Bacterial polypetide isolated from the Sargasso Sea
VIGGGPAGYVCAIRLSQLGLKTACIESRGSLGGTCLNIGCIPSKSLLNMSESFHKAKNFSNIGIETGEIKLNLEKMMSNKESSVATLTKGVEFLFKKNKVTYIKGVGSFNEKNEILVKNDKSEIKIKTDKTIISTGSEPLSLPGIDFDEKKILSSTGALNISKLPKKMVVVGGGYIGLEMGSVWSRLGTEVHVIEYLDHITPGLDKEISNEFMKILKKQNIKFELNTKVEKITKNEQGVIIETSNKGSKNKIEADVVLISVGRNPTLIN

SEQ ID NO: 101927 - protein, 223 aa, Unknown
  Bacterial polypetide isolated from the Sargasso Sea
MSEKFDVIVIGGGPGGYVSAIRLSQLGLKTACIESRGSLGGTCLNIGCIPSKNLLNFSENFHKAKNFEKIGIEVGQVKLNLDKMMKNKEKAVGILTKGIEFLFKKNKVTYFKGTGAFISANEISILSEGKETTIQSDKTIISTGSEPTSIPGIEFDEEKIISSTGALSLSKLPKKMVIVGGGYIGLEMGSVWSRLGTQVEVIEFLDHITPGMDREVSSEFEKI

SEQ ID NO: 101928 - protein, 273 aa, Unknown
  Bacterial polypetide isolated from the Sargasso Sea
MADKFQATIIGGGPGGYVCAIRLAQLGIKTACIESRGTLGGTCLNIGCIPSKNLLNLSENFHKAKNFSKIGIEVGEVKLNLQKMMENKDKAVMTLTKGVEFLFKKNKVTYFKGIGKLKSPNEITIVDKENKETNIQSDNIIISTGSEPMPLPGIEFDEKKIISSTGALSLKSVPKKMLVVGGGYIGLEMGSVWSRLGSEVHVVEFLDHITPGMDKEISNEFMKILKKQGLNFHLETKVEKISKSKNGVIIETSDKEGKKIKFESDVVLISVGR

SEQ ID NO: 101929 - protein, 79 aa, Unknown
  Bacterial polypetide isolated from the Sargasso Sea
MNKKNFDVVVIGGGPAGYPAAIRAAQNGLSVACVDEWKNRDGSDAFGGTCLNAGCIPSKALLESTELYYRAASEFNSTE

SEQ ID NO: 101930 - protein, 268 aa, Unknown
  Bacterial polypetide isolated from the Sargasso Sea
LSNTELVDIVVIGSGPGGYAAAFRAADLGQKVLMIDRDSDLGGVCLNRGCIPSKALLHISKVMTEASHLSTIGVSFSEPQIELDVVRDYKNKIVSRLSSGISQLANARKVNTIHGDASFISNNELIVKSETGDETIAFKKCIIAVGSSSAMLPGLPDNNPSILTSKTALDLKDIPKNLLVVGGGVIGLELGQVYASLGSDVSVVEFLPSLIPGADQDIVKPLQRRLSKQFKSILLSSKVVAVKETEEGDLSVSIESKDGTEDLRLKKY

SEQ ID NO: 101931 - protein, 267 aa, Unknown
  Bacterial polypetide isolated from the Sargasso Sea
DVVEFMDSIIPTMDKDCGKELTKALKKEGFKFHMKHRVQSVENTGKGIKVTALNKKDETVVLEADYCLVSVGRKPYTEGLGLENAGVSLDEKGRVNVDEHCATNVPGIYAIGDVVRGVMLAHKAEEEGVYVAEQIAGQKPHINHNLIPGVVYTWPEVSAVGKTEQELKDAGIEYKTGKFNMRALGRARASMDLAGFVKILADKNTDEILGVHIVGARAADLIMEAVTAMEYRASAEDLARICHPHPTFTEAIKEAALDATDKRAIHA

SEQ ID NO: 101932 - protein, 239 aa, Unknown
  Bacterial polypetide isolated from the Sargasso Sea
CLNVGCIPSKALLDSSEHFNNAKHNFELHGIKTQKLELNWPRMLERKDDVVSQTCDGLQYLMKKNKITFLNGHGTFNDKNTITVKGKDNDEQRLKTKYTIVATGSKPSSIPGVNCDKKHIITSTEALSLPNIPEKLIVIGGGVIGLELGSVFKRLGSTVQVVEYLDRLVAGMDISLSKEILRVLKKQGIEFFLSHAVQKAVVNGKNVEITAKNKQGKEVEFSGDYCLVAVGRRPYTENL

SEQ ID NO: 101933 - protein, 277 aa, Unknown
  Bacterial polypetide isolated from the Sargasso Sea
MIVVGGGYIGLEMGSVWSRLGSEVHVIEFLDHITPGMDKEVSKEFMKILTKQGISFHMQTKVESIKKNKTSAKILLMDKDGRKKELECDVVLISVGRKPNTKNLKLDSVGVLLDEKKRIKVNKNFETNIKNIYAIGDVIAGPMLAHKAEEEGIAVAELISGQSGHVNYDVIPGVIYTSPEVATVGKTEEQLKSLGIKYKVGKFPFIANSRAKAINEPEGFVKILADEKTDKILGVHMIGPHVGEIIGEVAVAMEFGASSEDVARTCHAHPTFSEAVK

SEQ ID NO: 101934 - protein, 242 aa, Unknown
  Bacterial polypetide isolated from the Sargasso Sea
MVKNFDLAIIGSGPGGYVAAIRASQLGLSVVLIEKAELGGVCLNWGCIPTKALLRSAEVFDLVKRSQDFGIDIPGHSLNIENIVLRSKNVAAKLSNGVKFLLAKNKVEVIRGKGTLLDNNRLSIEKENKDGDITIVARNIIIATGARPKEIPGLKVDGSTVWDYKYALRPSQIPEKLIIIGSGAIGIEFASFYNAIGSEVTVLEMKNRILLAEDKDVADYAQKCFEKKGIKFVLGTSFEVAS

SEQ ID NO: 101935 - protein, 299 aa, Unknown
  Bacterial polypetide isolated from the Sargasso Sea
GGPGGYVAAIRGAQLGQTVCVIDKDKLGGICLNWGCIPTKALLKNAEVYNIIKNADKYGINVDQVSVNFKKNVKRSRDVSARLSKGIEFLMKKNNVVHINGIGRLITNNKIEVQNGNNKKIIESENIVIATGARPRSFPGMKFDGRRVISSKEAMSLESPPDKMIIIGSGAIGCEFAYYFNEFGTQVHLLEMEDRILPNEDLEISNEVQNSFEKVGIKISKGIRVSKIESLKTKVKVFTNGDHKKGFQESDIALLAVGVTGNIENIGLEDLGIKTDQGAIKINEYNQTNISNIYAIGDV

SEQ ID NO: 101936 - protein, 227 aa, Unknown
  Bacterial polypetide isolated from the Sargasso Sea
RGSLGGTCLNIGCIPSKSLLNLSEEFHKVKGLANKGIEIGEVKLNLDKMMKSKDKAVTVLTKGVEFLLKKNKVTYFKGHGSFKSKNEILIKDDQKKETIIQTEKTVIATGSVPVSLPGIEIDEKIIVSSTGALKLEKVPNKMVVVGGGYIGLEMGSVWSRLGAKVEVVEFLDHITPGMDKEISSEFMKILKKQGMKFNMQNKVETIQKNNSGAVVSTIDKDGNKNNF

SEQ ID NO: 101937 - protein, 151 aa, Unknown
  Bacterial polypetide isolated from the Sargasso Sea
MIDKFQAVVIGGGPGGYVCAIRLAQLGFKTACIEARGSLGGTCLNIGCIPSKSLLNLSEEFHKVKGLSNKGIEIGEVNLNLSKMMKNKDKAVSILTKGVEFLLKKNKVTYIKGTASFKSKNEILVKNHENKETIVNAEKIIIATGSLPVSL

SEQ ID NO: 101938 - protein, 88 aa, Unknown
  Bacterial polypetide isolated from the Sargasso Sea
QVGLNTAGVELASEEKGNQKYGGTCLNVGCIPSKSLLESSHKYYEAQKEFASHGIDLKELSVNIPSRMKRKDEVVNKLTTGITGLLKA

SEQ ID NO: 101939 - protein, 251 aa, Unknown
  Bacterial polypetide isolated from the Sargasso Sea
MYDVVVIGGGPAGYVAAIKASQLGLNTACVEFASDEKGNQKYGGTCLNVGCIPSKSLLDSSHKYYEAQKDFASHGIDLKDLSVNIPSMMKRKDEVVNKLTTGITGLFKANGVEAISGRGKVINENLVEVSNNGDITSLETKFIILATGSNPIEIPIAKWSENIVDSTGALNFDRVPERLGIIGAGVIGLELGSVWSRLGAEVTVIEAMDDFLPIVDKQISKECHREFKKQGLDIHLGSKLTSAKDNGKCVE

SEQ ID NO: 101940 - protein, 281 aa, Unknown
  Bacterial polypetide isolated from the Sargasso Sea
MEPHINHFGSKITVAEFSSTLLSMADQDLVNPLSKILNQKFDNIFLSTEVVNIEEKNNNVIATFKKNNEIFQDSFDIALISIGRTPNTRYLNLDSTGIKLDKRGFIPVNKKRRTIIPNIYAIGDITGDPMLAHKATHEGKIAAENISGLNVIFQPLSIPSVIYTNPEIAWVGHTEVELKNKKIDYNKATFPWSASGRAMTTGSTSGKTKILTSKDNSSILGVGICGTNAGELISEAMLAIEMGANIEDISLTIHPHPTLSETIANASEMITKTITDLYIKN

SEQ ID NO: 101941 - protein, 170 aa, Unknown
  Bacterial polypetide isolated from the Sargasso Sea
MTKKYDLIVLGSGPGGYVTAIRASQLGLKTAIVEKESLGGVCLNWGCIPTKALLKSAQVFEYLKKADSYGLKVKDFDKDFESVVKRSRNVADGMSKGVTFLMKKNKIDVINGYGKVLPNKKVSVENDGEVQEFESSNIIIATGGRSRVIDSIPQDGKKIIGYREAMTLPK

SEQ ID NO: 101942 - protein, 199 aa, Unknown
  Bacterial polypetide isolated from the Sargasso Sea
MDNFDLVVIGGGPGGYVCAIRAAQLGLKTACVESRGALGGTCLNIGCIPSKSLLNLSENFHKAKKDFDRQGIEIEGIKLNIEKMMLNKNKSIQVLTKGVEFLFKKNKVTYIKGKGVLFSKNDIVVYENNKKTNYKTKNIVIATGSDVASLPGIEIDEKNIISSTGALSLNKVPKKLAVIGGGYIGLEMGSVWSRLGSEV

SEQ ID NO: 101943 - protein, 266 aa, Unknown
  Bacterial polypetide isolated from the Sargasso Sea
EFHTHGIKTSKVSIDIPSMMERKAKVVTQLTQGIKGLFAANKVDSLHGVGTISDNNEVFVLDAKGNSDKYLAKNIIIATGSVPINIPPAPVDNEVIVDSTGALEFDAVPERLGIIGAGVIGLELGSVWGRLGAKVTVLEALDEFLPSVDTQIAREAKKILGKQGLDIKLGSKVTGHKISKGKKKEVTVTFETKGASEEITFDKLIVAVGRRPVTDSLLANDVSIDLCDRGFIKVNEQCQTNVPNIYAVGDVVRGPMLAHKGSEEGV

SEQ ID NO: 101944 - protein, 265 aa, Unknown
  Bacterial polypetide isolated from the Sargasso Sea
MDNFDLLVIGGGPGGYVCAIRAAQLGLKTACVESRGALGGTCLNIGCIPSKSLLNLSENYLKAKKDFNQQGIEIEGIKLNIDKMMSNKNKSIQVLTKGVEFLFKKNKVTYIKGKGVLFSKNDVVVYDNNKRTSYKTKNIVIATGSEVVSLPGIDIDEKNIISSTGALSLKKVPNKLAVIGGGYIGLEMGSVWSRLGSEVTVIEYLDYITPGMDREISDEFKKILIKQGIKFKLGSKVNSVKNTNTGVSINYTDIKNSKNETLSFD

SEQ ID NO: 101945 - protein, 179 aa, Unknown
  Bacterial polypetide isolated from the Sargasso Sea
NLTDNKSIEIRDNFLTSVKGIFAIGDVAPGPMLAHKSEEEGVACVEFINGQKPHINYDAIPAIVYTNPEIASVGKTEEQLKKENKDFKVGKFPFMANGRALTTSASEGFVKILVDKKTDEILGAHIIGHDAGQLIAEIVTTIEFGGSAEDIARVCHAHPTTSEAVKEAALSVDGRAIHI

SEQ ID NO: 101946 - protein, 142 aa, Unknown
  Bacterial polypetide isolated from the Sargasso Sea
MSDEFDVIIIGGGPGGYVCAIRASQLGLKTACVESRGALGGTCLNIGCIPSKSLLNLSENFYKAKKDFSNQGIEVSNVKLNVEKMMLNKNKSVQTLTKGVEFLFKKNKVSYLKGKGVIFSPSSVVVYNEGKKTSYNAKNIVI

SEQ ID NO: 101947 - protein, 256 aa, Unknown
  Bacterial polypetide isolated from the Sargasso Sea
RIVPTMDGEIAKEFMKMLTKQGLEFKLSHKVSSAKSGKSGVDVEMVTSDKKKIKENYEIVLMSVGRKPNTEGLGLEKIGIKLTEKKSIEIKDNFQTSVEGIYAIGDVAPGPMLAHKAEEEGVACVEFINGQKPHINYDAIPAIVYTNPEIASVGKTEEQLKQEKKDFKVGKFPFMANGRALTTSASEGFVKILVDKKTDEILGAHIIGHDAGQLIAEIVTTIEFGGSAEDIARVCHAHPTTSEAVKEAALSVDGKA

SEQ ID NO: 101948 - protein, 144 aa, Unknown
  Bacterial polypetide isolated from the Sargasso Sea
MDFDLVIIGSGPGGYVAAIRGAQLGLNVAIIEKEALGGICLNWGCIPTKSFLRSAEVLKIIKSSEKYGIKSELGHVDISEIVKRSRSIAKKLSNGVQYLLKKNKVRIFYGEASFKSSKCIKIKSRNNTVQEISSENICIASGGR

SEQ ID NO: 101949 - protein, 269 aa, Unknown
  Bacterial polypetide isolated from the Sargasso Sea
GAGPAGYHAAIRAAQLGLKTACIDAALGKDGKPALGGTCLRVGCIPSKALLDSSRQFWNMGHIFGDHGISFKDAKMDVEAMIGRKDKIVKQFTGGIGMLFKANKVTPYYGFGELQPGNIVKVKQHDGSEVELKGTNVIIAAGSDSIELPFAKFDGDTIVDNVGGLDFTEVPARLAVIGAGVIGLELGSVWKRLGAEVTILEALPDFLAAADAEVAKVAAKEFKKQGLDIRLGAKVSKAEVTGKGKKKEVALTYTDGEGEKSLVVDKLLV

SEQ ID NO: 101950 - protein, 277 aa, Unknown
  Bacterial polypetide isolated from the Sargasso Sea
GINFLFNKNKIDRFIGEAKILKENKVKILANKKEEIIKAKNIIIATGSNPSKLRNVDIDESKVVSSTGALKFDKVPKKLLVIGAGVIGLEMGTVWRRLGSEVEVIEFLPRILNGMDTEISEKFMKILVNQGIKFRLGWSVEKTSINGDVVDLQIKEQLNSNEENLQADAVLVAVGREPNTQNLGLSDIGLKLDKKGFIETDENFETNISNIYAIGDVIKGPMLAHKAEEDAVALVELINNEAGHIDYNLVPNIIYTSPEVASIGLTEDDLKEKKYPI

SEQ ID NO: 101951 - protein, 287 aa, Unknown
  Bacterial polypetide isolated from the Sargasso Sea
IFGGGPGGYVAAIRASQLGHKVCIIEMEKLGGVCLNWGCIPTKALLKNAEVYKTLKDAHLYGISTGKISVNIKKIIQRSREASKKLSKGIEFLMNKNGITHVSGVGKLIGGHDLIVTNKKEQKKISAKNIIIATGARPKLIPGVEIDGKQIIGSKAAMVLEILPKKILIIGSGAIGCEFAYYFNSFGVEVQIIEMQNRILPMEDEEISKTVEKCFKDSGIKVLTNSKVQKITKLKNKVNITVKNESIFSTDLVLVATGVQGNIEDIGLNKVGIKTRDSSIVIDEYCR

SEQ ID NO: 101952 - protein, 254 aa, Unknown
  Bacterial polypetide isolated from the Sargasso Sea
MDKSFDVIVIGGGPAGYVCAIRSAQLGFKTACIESRGSLGGTCLNVGCIPSKSLLNLSENYYKAKKEFNSLGIETNSIKLNLSKMMANKNKSVLTLTKGVEYLFKKNNISYLKGKGSISSKNTVTVIDESKKKSNYQAKNIVISTGSVSTTLPGIKIDEKTIVSSTGALSFEKVPKELIIIGGGYIGLEMGSVWKRLGSNVTVIEYLDHIIPGMDKDISNEFLKILKKQGINFKLNSKVTAVNVVKGRAIVIYK

SEQ ID NO: 101953 - protein, 273 aa, Unknown
  Bacterial polypetide isolated from the Sargasso Sea
GDPVLTLETEKAAMDVPSPFAGVVEKISVGPGDSVSQGDLISIVSSESKPNEEDQSNTEEKETEQAIQESEDPSESSQSENDYDLIVLGAGPGGYAAAFRASDLGLKVGLVERNSDLGGVCLNVGCIPSKAFLHAAKILDDSKEAEVSGIVFKEPEINLSKMKEWKNNIIGGLTGGLSGLAKQRGVDVIHGTAKFSSKNEIEVNHESNSRRISSNQFIIAVGSEPAELSFLPDDPRIIDSTGALEPDQIPNDILIIGGGIIGLEMATIYSALG

SEQ ID NO: 101954 - protein, 130 aa, Unknown
  Bacterial polypetide isolated from the Sargasso Sea
MSENNFDVTVLGGGPGGYVAAIRAAQLGLKTALVEKDDGSGIAGLGGVCLNWGCIPSKSLLKNAELVNQVNDSEKWGISFDNVTFDFPKAIARSRDVSKQLTQGIEYLIKKNKIQLYKDEGVLESGTEIS

SEQ ID NO: 101955 - protein, 78 aa, Unknown
  Bacterial polypetide isolated from the Sargasso Sea
MNMSRNIFDVVVIGAGPGGYVAAIRSAQLGLKTAIIEKEHMGGICLNWGCIPTKAMLRSAEIFHLMHRANEFGLRAEK

SEQ ID NO: 101956 - protein, 97 aa, Unknown
  Bacterial polypetide isolated from the Sargasso Sea
MTEKFDSVVIGGGPGGYVCAIRLAQLGQKTACIEARGALGGTCLNIGCIPSKSLLNLSENFKKAKNFSKLGIETGDVKLNLDKMMKNKEKAVSILTK

SEQ ID NO: 101957 - protein, 201 aa, Unknown
  Bacterial polypetide isolated from the Sargasso Sea
MYDIIVIGSGPAGYVAAIRASQLGLKTACIEKSSSNNKPQLGGTCLNIGCIPSKALLDSSHRYADVLNHFSDHGIRVSKPKIDISQMMERKNKIVSQLTSGVAGLLKANKVSQITGSAKIIDSNNVEVSNEENTELLKTKNIIIATGSMPIDIPVAKVDNNNIVDSTGALEFKAVPKTLGIIGAGIIGLELGSVWSRLGSK

SEQ ID NO: 101958 - protein, 135 aa, Unknown
  Bacterial polypetide isolated from the Sargasso Sea
MAEKFQAVVIGGGPGGYVCAIRLAQLGLKTACIESRGSLGGTCLNIGCIPSKSLLNLSEEFHKVKDLSNKGIEVGQVKLNLPKMMKSKDKAVTVLTKGVEFLLKKNKVTYFKGTGSFKSKNEILIKDSENKETHV

SEQ ID NO: 101959 - protein, 262 aa, Unknown
  Bacterial polypetide isolated from the Sargasso Sea
MAQKFDLAVVGGGPGGYVAAIRAAQLGKSVVLVESEHLGGICLNWGCIPTKAMLKSAEVFYTMKHAKEYGLILKDINFDLEAIVNRSRNIASRLSTGVTHLLKKNKVTVVSGKAKIEDQRTLIVNEDKKQNISFENLIIATGSRAKEMKGLETDGTLVWNYKHALIPKKIPETLLVVGSGAIGVEFASFYNSLGVDTTLIEIAERILPNEDDEISAEAKKEFINRGIKVLDNTSLTKIAKNEQTVEVTLKTLENIETHEFDT

SEQ ID NO: 101960 - protein, 229 aa, Unknown
  Bacterial polypetide isolated from the Sargasso Sea
MYDVVVIGGGPAGYVAAIKASQLGLNTACVELASDEKGNQKYGGTCLNVGCIPSKSLLDSSHKYYEAQKDFASHGIDLKDLSVNIPSMMKRKDEVVNKLTTGITGLFKANGVEAISGRGRVINENLVEVSNNGDKTSLETKFIILATGSNPIEIPIAKWSENIVDSTGALNFERVPERLGIIGAGVIGLELGSVWSRLGAEVTVIEAMDDFLPIVDKQISKECHREFKN

SEQ ID NO: 101961 - protein, 159 aa, Unknown
  Bacterial polypetide isolated from the Sargasso Sea
MSEKFDVTVIGGGPGGYICAIRLSQLGLKTACIESRGSLGGTCLNVGCIPSKSLLNLSENYHKAKNFEKIGIEIGEIKLNLGKMMKNKEKAVTVLTKGIEFLFKKNKVSYFKGKGSFKSSNEILVTGDGEETVIETEKAIISTGSEPVSIPGMEFDEEK

SEQ ID NO: 101962 - protein, 73 aa, Unknown
  Bacterial polypetide isolated from the Sargasso Sea
MSNFDYDLIVIGGGPGGYVAAIKASQLGMSVALVEDKHLGGICLNWGCIPTKALLRASEIRHMLDNVDEFGFT

SEQ ID NO: 101963 - protein, 287 aa, Unknown
  Bacterial polypetide isolated from the Sargasso Sea
KIGMEVGSLKLNLPKNDEKQRKSSNSLTKGIEFLFKKNKVTYFKGTGSITSTNQISIKSNDNKNETIEAKNIIIATGSDPVSLPDVKFDEEKIVSSTGALSLKEVPKKLVVVGGGYIGLEMGSVWSRLGSEVQVVEFLDHITPGMDKEISNEFQKLLKKQGINFNLKTKVDSISKNKNGVSINTTDEKGNKKQFDCDVVLISVGRKPNTSNLNLEKVGVDKDDKGRVKVNKHFQTNIKNVYAIGDVIEGPMLAHKAEEEGIAVAEIIAGQSGHVNYDTIPGVIYTSP

SEQ ID NO: 101964 - protein, 238 aa, Unknown
  Bacterial polypetide isolated from the Sargasso Sea
KASQLGLNTACVEFASDEKGNQKYGGTCLNVGCIPSKSLLDSSHKYYEAQKDFASHGIDLKDLSVNIPSMMKRKDEVVNKLTTGITGLFKTNGVEAISGRGKVINENLVEVSNNGDITSLETKFIILATGSNPIEIPIAKWSENIVDSTGALNFDRVPERLGIIGAGVIGLELGSVWSRLGAEVTVIEAMDDFLPIVDKQISKECHREFKKQGLDIHLGSKLTSAKDNGKCVEISYES

SEQ ID NO: 101965 - protein, 292 aa, Unknown
  Bacterial polypetide isolated from the Sargasso Sea
SNLGIETGELKLNIEKMMKNKDKAVTVLTKGVEFLFKKNKVTYFKGTGSFKSPNQISIIDDKKKETILEAQKIIISTGSEPLSLPNVKFDEKIILSSTGALSLNSVPKKMIVVGGGYIGLEMGSVWSRLGSEVHVIEFLDHITPGMDKEVSKEFMKILTKQGISFHMQTKVESIKNNKTSAKVFLMDKDGKKKELECDVVLISVGRKPNTKNLKLDSVGVLLDEKKRIKVNKNFETNIKNIYAIGDVIAGPMLAHKAEEEGIAVAELISGQSGHVNYDIIPGVIYTSPRSCC

SEQ ID NO: 101966 - protein, 254 aa, Unknown
  Bacterial polypetide isolated from the Sargasso Sea
MYDVVVIGGGPAGYVAAIKASQLGLNTACVEFASDEKGNQKYGGTCLNVGCIPSKSLLDSSHKYYEAQKDFASHGIDLKDLSVNIPSMMKRKDEVVNKLTTGITGLFKANGVEAISGRGKVINENLVEVSNNGDKTSLETKFIILATGSNPIEIPVAKWSENIVDSTGALNFDRVPERLGIIGAGVIGLELGSVWARLGAEVTVIEAMDDFLPIVDKQISKECHREFKKQGLDIHLGSKLTSARDNGKDVEISY

SEQ ID NO: 101967 - protein, 118 aa, Unknown
  Bacterial polypetide isolated from the Sargasso Sea
MTNTKFDIAVIGGGPGGYVAAIRAAQLGLKPLVIERENLGGICLNWGCIPTKALLRAAELRHSVEEMADFGITVGEVKVDLAAVVKRSRKVAGRLSMGVKHLLKKNKVTVIAAEAKLV

SEQ ID NO: 101968 - protein, 167 aa, Unknown
  Bacterial polypetide isolated from the Sargasso Sea
MTKKYDLIVLGSGPGGYVTAIRASQLGLKTAIVEKESLGGVCLNWGCIPTKALLKSAQVFEYLKKADSYGLKVKDFDKDFDSVVKRSRSVADGMSKGVNFLMKKNKIDIINGHGKVLPNKKVSVENTGEVQEFESSNIIIATGGRSRVIDSIPQDGKKIIGYREAMT

SEQ ID NO: 101969 - protein, 82 aa, Unknown
  Bacterial polypetide isolated from the Sargasso Sea
MADTNFDVIIIGAGPGGYVAAIRASQLGMKTAIIEKEHLGGICLNWGCIPTKALLRTAEIYNFIKHAAEYGLSVEKASFDLK

SEQ ID NO: 101970 - protein, 106 aa, Unknown
  Bacterial polypetide isolated from the Sargasso Sea
MNSFDLVVIGGGPGGYVCAIRAAQLGLKTACIESRGALGGTCLNIGCIPSKSLLNLSENFHKAKKDFNQQGIEIEGIKLNIDKMMANKNKSIQVLTKGVEFLFKKN

SEQ ID NO: 101971 - protein, 302 aa, Unknown
  Bacterial polypetide isolated from the Sargasso Sea
KYSRIGGVCLNVGCIPSKSLLHAAKVIEENQSFSNNGIFFGEPKIDLTKLRNWKNEIIKNLTGGLENLANKRKVNVLTGLGKFLDKNNICVINSSGEERYVNFENAIIATGSHPIKLPFLPEDNRIFDSTDALEINSIPNHLLIIGGGIIGLEMATVYSALGSKITIVEMMDGLITGADRDIVKPLHKMIEKKCENIWLETSVKKIELSKKGLKVFFKGKNAPDEPKYFDNILSSVGRSPNSSFISVDKVGVNVDEKGFIKTDSQMRTNISNIFAIGDLVGPPMLAHKATHEAKVAAEVIWE

SEQ ID NO: 101972 - protein, 388 aa, Unknown
  Bacterial polypetide isolated from the Sargasso Sea
MNLPKMMKSKEKAVTVLTKGVEFLLKKNKVTYFKGTGSFKSKKEIIIRDDKNKETIIQAEKVIIATGSLPVSLPKIEFDEKIIVSSTGALNLEKVPQKMVVVGGGYIGLEMGSVWSRLGAEVHVVEFLDHITPGMDKEISQEFMKILKKQGIKFHLQHKVEKVTKNELGAVVSTSDKDGNKKDFECDVVLISVGRKPNTNGLNLEKIGVKIDEKNRIKTSKAFQTNLDNIYAIGDVISGPMLAHKAEDEGIAVAENIAGQSGHVNYDTIPGVIYTTPEVASIGKTEEQLKEKNIQYKIGKFSFMANSRAKAIDDAEGFVKILADEKTDKVLGAHLIGPHAGELIAEIGIAMEFGASSEDIARTCHAHPTFSEAVKEAALSVDKRAIHS

SEQ ID NO: 101973 - protein, 334 aa, Unknown
  Bacterial polypetide isolated from the Sargasso Sea
MAIIDIKVPDIGDFAEVAIIEVLVKPGDTIKAEQSLITVESDKASMEIPSSHAGVVKELKVKLGDKVAEGSVVLTLEVQGAGAAAPAPAAAPAPAVSEQKQAPAPVQQAQAAINPVASSFAGSADLDCDVLVLGGGPGGYSAAFRAADLGLKVVIVERYATLGGVCLNVGCIPSKALLHVAAVMDEVSHMADLGVDFGAPAVNIDKLRGHKEKVIGKLTGGLAAMAKMRKVTTVRGYGAFVGTNHLEVEETTGTGQEKTGTKKVIAFKKAIIAAGSQAVRLPFMPDDPRVVDSTGALALKEVPKRMLILGGGIIGLEMGTVYSTLGARLDVVEM

SEQ ID NO: 101974 - protein, 196 aa, Unknown
  Bacterial polypetide isolated from the Sargasso Sea
MSEKFDVTVIGGGPGGYVCAIRLSQLGLKTACIESRGSLGGTCLNIGCIPSKSLLNLSEKFHSAKNFEKIGIETGEIKLNLDKMMKNKDKAVTVLTKGVEFLFKKNKVTYFKGKGSFENEKSIKIVGSEGTKIIQTGKTIISTGSEPVSLPGVDFDEERILSSTGALSIPKLPNKMIVVGGGYIGLEMGSVWSRLA

SEQ ID NO: 101975 - protein, 454 aa, Unknown
  Bacterial polypetide isolated from the Sargasso Sea
MKKLTIIGGGPAGYAAALYASNFDLEITLIESDTLGGTCLNRGCIPAKYWLHVAELNHEIETSSEFGIDIDKKSINWAKTAEKRYDIVNKLVGGIGMLLNSKKVNVIEGWGLIKDKNNVLVKKADGEEIVIESDFILLATGSKPRSLPSIEIDNEFVITSDTALNWEIPPKKVCVIGAGAIGCEFASLLNDLDSEVVVVELATEILPGLDKRTSGELRKQLTKRGVNFKLGTSVDLINDKKVRFSDGESDSFDCVLVAVGREPLTQNIGLEEVGIKVNKGFVQTNLETLQTEIENIYALGDIVEGTPQLAHVAFAEAVSSITHIATGENKPVNYNAIPYVVYTRPELAEVGINSHKAKELGMKINQSQHSFAGIGRAMIQNQNEGLVKVYSEENGPIVGASVCGPAAGEMIHELMYMVGWEALPDEAAEFIHAHPTLSEAIGESLMSLSGKGLH

SEQ ID NO: 101976 - protein, 243 aa, Unknown
  Bacterial polypetide isolated from the Sargasso Sea
MSEKFDVIVIGGGPGGYVSAIRLSQLGLKTACIESRGSLGGTCLNIGCIPSKNLLNFSENFHKAKNFEKIGIEVGQVKLNLDKMMKNKEKAVGILTKGIEFLFKKNKVTYFKGTGAFISANEISILSEGKETTIQSDKTIISTGSEPTSIPGIEFDEEKIISSTGALSLSKLPKKMVIVGGGYIGLEMGSVWSRLGTQVEVIEFLDHITPGMDREVSSEFEKILKKQGIKISIEYQSRENNKK

SEQ ID NO: 101977 - protein, 202 aa, Unknown
  Bacterial polypetide isolated from the Sargasso Sea
MTILGGVCLNVGCIPSKALLHMAKFIDEAAEMKAHGIDVGTPKLDIDKIRGFKDSVISKLTGGLKMMSKQRKVQIVKGYGSFVDANTLSVESDGEITEVKFSNCIIAAGSQPVSLPFIPKDPRIMDSTGALQLEQTQGELLVMGGGIIGLEMATVYSALGMKISIVEMLPQLIPGADADVVKPYQKRIQKKYDSIMLETKVV

SEQ ID NO: 101978 - protein, 265 aa, Unknown
  Bacterial polypetide isolated from the Sargasso Sea
MAEIRIPDLGDFDEVEVVELHVAEGDRIEEGDPVLTLETEKAAMDVPSPFTGVVEKISVGPGDSVSQGDLISIVSSESKPNEEDESKTEEKETEQPIQESEDTSESSKFKHDYDLIVVGAGPGGYAAAFRASDLGLKVGLVERNSDLGGVCLNVGCIPSKAFLHAAKILDDSKEAEVSGIVFKEPEINLSKMKEWKNNIIDGLTGGLSGLAKQRGVDVIHGTAKFSSKNEIEVNHESDSRSISSDQFIIAVGSEPAELSFLPDDP

SEQ ID NO: 101979 - protein, 316 aa, Unknown
  Bacterial polypetide isolated from the Sargasso Sea
MPGIEIDEKTIVSSTGALKLEKVPNKLVVVGGGYIGLEMGSVWSRLGAEVQVIEFLDHITPGMDKEISLEFMKILNKQGIKFNMQNKVQTIKKSNSGVIVSTVDNEGNKNHFDCDVVLISVGRKPNTEGLNLEAIGVKLDERKRIKTNKEFKTNLDNIFAIGDVIDGPMLAHKAEDEGIAVAENIAGQSGHVNYDTIPGVIYTTPEVASIGKTEEQLKESNKKYKIGKFSFMANSRAKAIDNAEGFVKILADETTDKVLGAHIIGPHAGELIAEIGVAMEFGASSEDIARTCHAHPTFSEAVKEAALSVDKRAIHS

SEQ ID NO: 101980 - protein, 241 aa, Unknown
  Bacterial polypetide isolated from the Sargasso Sea
MENKFQAVVIGGGPGGYVCAIRLAQLGIKTACIESRGSLGGTCLNIGCIPSKSLLNLSEEFHKVKNLSNKGIDIGDVKLNLSKMMKNKDKAVSILTKGVEFLLKKNNVTYFKGKGSFKSKNEISIKDDKQKETLIKTDKVIIATGSVPVSLPGIEFDENVIVSSTGALELKKVPKKMIVVGGGYIGLEMGSVWSRLGAEVHVVEFLDHITPGMDREISNEFMKILSKQGINFHMQHKVEKS

SEQ ID NO: 101981 - protein, 454 aa, Unknown
  Bacterial polypetide isolated from the Sargasso Sea
MKKITIIGGGPAGYAAALYANNFDLDVTLIESDVLGGTCLNRGCIPAKYWLHVAELNHEIENANEYGIEINQKNINWANTTNKRNEIVNKLVSGIGTLLKSKKVNVIEGWGQIESKNVVIVKKENGEEEKIASDYILLATGSQPRSLPSLEFDNNFIINSDTALNWDEPPKKVCIVGAGAIGCEFASLLIDLDSEVTVVELEDEILPGLDKRTSAELRKQLTKRGVNFKLKTSIESTSNNEIVFSDGEKENFDSVLVAIGRQPFTQNIGLDNVGISNENGFINVDLETMQTSTDNIYALGDIVKDSPQLAHVAFAEAISAITHIATGEKSPVNYSAIPYVVYTNPELAEVGTNSEKAKVNELNVSQSQHSFVGVGRALIQNQNQGIVKVYAEENGPIVGASVCGPSAGELIHELMYMVGWEALPSEAAEFIHAHPTLSEAIGESLMSLSGKGLH

SEQ ID NO: 101982 - protein, 373 aa, Unknown
  Bacterial polypetide isolated from the Sargasso Sea
IFTRQKIFEKIGIEIGEIKLNLGKMMKNKEKAVTVLTKGIEFLFKKNKVSYFKGKGSFKSSNEIVVSGDGKETVIETGKAIISTGSEPVSIPGMEFDEEKIISSTGALSLEKLPKKMVVVGGGYIGLEMGSVWSRLGTEVEVVEFLDHITPGMDREISTEFMKILKKQGIKFKLNTKVEKITKNEKGVTLEVIDKENKKNNIEADVVLISVGRRPYTTGLKLENVGVKTDEKGKVKVDKNFETNIKNIFAIGDVIDGPMLAHKAEEEGIAVAEFIAGQSGHVNYDIIPGVIYTSPEVASVGKTEEQLNEKKINFKVGKFPFMANSRAKAIDEPEGFVKILADATSDKVLGVHIIGPHAGEMIAEMAIAMEFGA

SEQ ID NO: 101983 - protein, 329 aa, Unknown
  Bacterial polypetide isolated from the Sargasso Sea
MTDKFDVTVIGGGPAGYVCAIRLAQLGLNTACIESRGSLGGTCLNIGCIPSKSLLNLSENFHKAKNFADIGIETGEVKLNLKKMMENKDKSVLVLTKGVEFLFKKNKVTYIKGTGTLKSRDEILVKNNEEEKTIKTDKIIISTGSAPLSLPGIEFDEKQILSSTGALSISKLPKKMIVVGGGYIGLEMGSVWSRLGTEVQVVEYLDHITPGLDKEISSEFMKILKKQNIKFDLNTKVEKISKSSEGVIVEISNKGNKSKLEADVVLISVGRKPYTDNLNLDQIGVILDKKGRVKVNKNFETNIKNIYAIGDVIDGPMLAHKAEEEGIAV

SEQ ID NO: 101984 - protein, 463 aa, Unknown
  Bacterial polypetide isolated from the Sargasso Sea
MEQFDITVIGSGPAGYVCAIRASQLGYKVCCIEKGQTLGGTCLNIGCIPSKSLLHSSHLFHQASELNQLGINFDNVSFDLNKIMKSKNESVESLTNGIDFLFKKNKVTRKLGFAKFINNEQIEILTGDSSEVIKSSKTIIATGSEVVSPEGVIIDEIDILSSTGALSLSSVPKHLMVIGAGYIGLEMGSVWSRLGSKVTVIEYADRILPGMDQEISDAFQKILIKQGFDFKLSTALRKVNKSNGSLSVSVENNGQTLDMDCDKVLISTGRKPYTFGLNLEKIGVKTNDKGFIETNQHFNTSIENIYAIGDCKVGPMLAHKASEEGTAVAEIIDGQAGHVNYNTIPSVIYTAPEVASVGKTEEELKKNNITYKIGKFPFSANGKAKVMNETSGFVKILSDKNTDEVLGVHIIGADAGNLIGELTIAMEFGASAEDIARTCHAHPTLTESIKEAALNVDDQAIHI

SEQ ID NO: 101985 - protein, 454 aa, Unknown
  Bacterial polypetide isolated from the Sargasso Sea
MKKITIIGGGPAGYAAALYAHNFNLEVTLIESDVLGGTCLNRGCIPAKYWLHVAELNHEISTSENYGINVDGKSIDWNKTSLKRIEIVEKLVSGIKMLLKSKNVNVIEGWGSIESQSSVLVQKSDGTSEKIDSDYIILATGSKPRNLPNIEPDEDFIITSDTALNWEEPPKKVCIVGAGAIGCEFASLLNDLESEVTVVELAKEILPGLDKRTSGELRKQLTKRGVEFKLNTSIDGIDDKTVNFSDGEKKEFDAVLIAVGRAPLTENIGLDNVNIASENGFINVDLDTFETSVANIFALGDIVNNTPQLAHAAFAEAISAITYIASGEKKPLDYKAIPYVVYTRPELAEIGLNAEKAKLENIEIEQSQHSFAGVGRAMITEQNQGLVKVYAEKEGPIVGASVCGPSAGEMIHEIMYMVGWEALPEEAAEFIHAHPTLSEAVGESLLGLTGKGLH

SEQ ID NO: 101986 - protein, 474 aa, Unknown
  Bacterial polypetide isolated from the Sargasso Sea
MSSKKHIDILVIGSGPGGYAAAFRAADLGRKVIIVDKDPTLGGVCLNRGCIPSKTLLHIAKVLEETESLKKMGVSFAKPKIDINTVRDWKNKIIKQLSGGIAQMAKARKVETIEGVATFISDKEIQVERKSDKENITFDHCIIAAGSSSSRIPGIPFDNKNVLTSKTALDIEKIPKNLLVIGGGYIGLEMGTVFNALGADVSIAEFLPNLLPGADPDLVKPLARKLKKHFNEIHLSTKIVDVKPSKPNGLIVTMEKDGETTTKKFEQVLVSVGRKPNTKTIGLENTTIKTNTKGFIEVDKQQKTNVKNIYAIGDIAGDPMLAHKATHEGKVAAEVICGLPAAFDAKAIPAVIFTDPEIAWVGITESEAKEKSIPYEKGEFPWAASGKSLAIGRNEGKTKIIFDPITKRTIGVGIVGPNAGDLISEGALAIEMGADAEDISLTVHPHPTLGETFANAAEVFEGTVTDLYIPKKPG

SEQ ID NO: 101987 - protein, 187 aa, Unknown
  Bacterial polypetide isolated from the Sargasso Sea
MAEKFDVTVIGGGPAGYVCAIRLSQLGLKTACIESRGSLGGTCLNIGCIPSKSLLNMSESFHKAKNFSNIGIETGEIKLNLEKMMSNKDSSVATLTKGVEFLFKKNKVTYIKGFGSFNEKNEILVKNDKSEIKIKTDKTIISTGSEPLSLPGIDFDEKIILSSTGALNISKLPKKMVVVGGGYIGLE

SEQ ID NO: 101988 - protein, 282 aa, Unknown
  Bacterial polypetide isolated from the Sargasso Sea
MFDIIVIGSGPAGYVAAIRASQLGLKTACIEKSSSNGKPQLGGTCLNIGCIPSKALLDSSHRYADALNHLSDHGIKVTKPKIDISQMMDRKNKIVSQLTSGVAGLLKANKVSQITGSAKIIDSNNVEVTNEEKTELLKTKNIIIATGSMPIDIPVAKVDNKNIVDSTGALEFKSVPKTLGIIGAGIIGLELGSVWSRLGSKVTILEAMDDFLPMADSKVSDDVFKEFNKQGLNINLGCKVTAANSNEKKVTVNFEKNGNQSELTFEKLIVAVGRKPYTNNLF

SEQ ID NO: 101989 - protein, 83 aa, Unknown
  Bacterial polypetide isolated from the Sargasso Sea
MSEKFQATIIGGGPGGYVCAIRLAQLGIKTACIESRGTLGGTCLNIGCIPSKSLLNLSENFHKAKNFSKIGIEVGEVKLNLEK

SEQ ID NO: 101990 - protein, 36 aa, Unknown
  Bacterial polypetide isolated from the Sargasso Sea
MADYDLIVIGAGPGGYVAAIRAAQLGMNVACVEKEE

SEQ ID NO: 101991 - protein, 522 aa, Unknown
  Bacterial polypetide isolated from the Sargasso Sea
MSKNKKILVPDLGDFDNVEVTEVLVNAGQKIEKNENIITVESDKASIDIPSDISGTIVSINVNKGDILKKDDQILLIKETTKNRQEKENLKNSKNKSSVMHDSELLVLGAGPGGYTAAFRAADLGMNVTLVERSPTLGGVCLNEGCIPSKALLHAANVIEQTSAMKDHGIKFSNPKIEMKKLMTWKQGIISKLNSGLVDLSKKRNVKIIKGNAQFQSDNSVVIDNKKVIKFEKCIIAVGSESATIPGLPDDDRVLDSSKALELEKVPSKMLIVGGGIIGLEMACVYHALGSEITVVELTDSLMPGTDGDLVKIYTKFIRDRYKDVYLKTKVGKIQPVKNGLKVFFEGNDCPKTATYDNILVSVGRKSNGNQINIEKTGVACDQRGIIKVDKQMRTNIDNIFAIGDLTGDPMLAHKATHQAKVAAEVASGKKSSFDARVIPSVAYTDPEIAWVGVTENQAKSDGIDYEKSRFPWAASGRSLAIGRDEGFTKLLFEKETDRVIGGGIIGPYAGDLISEVALAMK

SEQ ID NO: 101992 - protein, 338 aa, Unknown
  Bacterial polypetide isolated from the Sargasso Sea
MGNKEIETKNIVIATGSIPTSIPGVEISGDKIISSTEALSLNEVPNKLIVVGGGYIGLELGSVWSRLGSEVTVVEYLNRITPGMDNEVSSALQKILSKQGLNFSLNSQVISVSEEGSNASVVMKNRESNEEETIEADYVLISTGRKPYLENLFNDGIDVQKTDAGFLKTDSHLRTNIDGIWAIGDVVEGPMLAHKAEEEGIAVAELIAGKPGHVNYDIIPSVIYTNPEVASVGMTEEQLKEKSIDYSVGKFPFLANGRAKVNNTTDGFVKILSSTDTDQILGVHIIGDQAGNMIGEAAVAMEFEATSEDLARICHAHPTLSEAIKEAALSVDGRALHM

SEQ ID NO: 101993 - protein, 105 aa, Unknown
  Bacterial polypetide isolated from the Sargasso Sea
MAEKFQATIIGGGPGGYVCAIRLAQLGIKTACIESRGTLGGTCLNIGCIPSKNLLNFSENFHKAKNFSKIGIEVGEVKLNLQKMMQNKDKAVMNLTKGSRIFIKK

SEQ ID NO: 101994 - protein, 452 aa, Unknown
  Bacterial polypetide isolated from the Sargasso Sea
AAFRAADLGKKVILIDRDPTLGGVCLNRGCIPSKALLHIAKVMDETNNLSKMGVSYNKPDIDLEKIRLHKNKIVSQLNQGIDKMAKARGVETIQGLASFKNNSELEVRTKSSNITIKYEKCIIATGSTSGMIPGISIKHDSILTSRTALELVDIPNKLLVIGGGAIGLELGQVYASLGSKVTIVEFMPNIIPGADEDIVKPLYRKLTKQFESILLSSKVTNLEVQKNHSINVSIENGKGVTNDNYDKVLVAIGRKPNTELLNLNNTDIKLNSEGYIDVDVYQRTSVKNIFAIGDIVGNPMLAHKATHEGKVAAEVCSGHPAAMDYKAIPSVVYTDPEVAWAGLNEVEAKLNKVNYTKGEFPWAASGRAISMGANQGKTKILFDPETKRVLGVGIVGPGAGDMISEGMLSIEMGADAEDISLTIHPHPTVGETFAMAAEVFLGTITDLYAPKK

SEQ ID NO: 101995 - protein, 258 aa, Unknown
  Bacterial polypetide isolated from the Sargasso Sea
MADPDISKESYKEFKNQGLDIKLSSKVIDTKELKNSVKVTYEQKGKKHEMEFEKLIVAVGRIPNSEEILSEDINIKIDKGFIEVNEFCQTSIQNIWAIGDLVRGPMLAHKGSEEGIMVAEKIANNHVQVNYDLVPSVIYTHPEIAWVGMNENELKSKDIKFKIGKFPFAASGRALAVDQSEGFVKVLTDIKTDTILGVHVFGPAAAEIVQQALISMEFGSSAEDIGLTMFSHPTVSEAFHEAALASNNQAIHIGNKRK

SEQ ID NO: 101996 - protein, 472 aa, Unknown
  Bacterial polypetide isolated from the Sargasso Sea
MSKNKHTEILVIGAGPGGYAAAFRAADLGKKVTLVDRDEVMGGVCLNRGCIPSKALLHITKVMDEAASLSKAGVTFGKPKIDIDTIRQHKDKIVSQLNNGIAGMAKARKVDFLQGKAMFRSNSEVEVVNGKKKEVLSFDQCIIAAGSSSAMLPNIPKSKNILTSKTALELENIPKTMLVVGGGVIGVELGQVYATLGTKVSLVEFLPNIIPGADQDIVKPLERKLNKQFDSIMLNSKVVNIKESKKNVLSVTIEKEKTSTIIEYEKILIAIGRKPNTNLLNLKATSVTINDQGFINVDNYQRTSVKTIFAIGDISDNPMLAHKATHQGKVAAEVACGEPSIFDPKAIPSVVYTDPEVAWCGLTEIQAKTDDIPYSKAEFPWAASGRAIAMGANQGKTKILFDPDSKRVLGVGIVGPSAGDIISEGMLAIEMGSDAEDISLTIHPHPTIGETIGLASEVFDGTITDLYIPKKK

SEQ ID NO: 101997 - protein, 324 aa, Unknown
  Bacterial polypetide isolated from the Sargasso Sea
ATGSEAMPMPNIEFDEKTIVSSTGALSLKEVPKNLVVVGGGYIGLEMGSVWSRLGAEVNVIEFLDHITPGMDREISEEFMKILKKQNIKFHLNRKVTSIKKTNSGVQISTSDKSGDNKDFNCDVVLISIGRKPFTSNLNLISAGVKSDEKGRIKINKKFQTTTKNIYAIGDVIDGPMLAHKAEEEGIAVAEIVAGQSGHVNYDLIPGVIYTSPEVASIGLTEEQLKEKNKSYKIGKFPFMANSRAKAIDEPEGFVKILADKDTDKVLGVHMIGPHVGEMIAEMAVAMEFGASSEDIARTCHAHPTFSEAIKEAALSVEKRQIHS

SEQ ID NO: 101998 - protein, 196 aa, Unknown
  Bacterial polypetide isolated from the Sargasso Sea
RRPFTDNLLDESCGITLDEKGFVPVDEHCQTDLENVYAVGDLVRGPMLAHKAMEEGVMVAERIAGKKMEVNYDLVPSVIYTHPEIAWVGKTEKQLKNEGVDFKKGNFPFAASGRALAAGDAVGSVKVLADKETDQVLGVQIFGNSASEILQQGLIGMEFSASSEDFGLTMFSHPTVSEALHEAALAVNKQAIHIGN

SEQ ID NO: 101999 - protein, 141 aa, Unknown
  Bacterial polypetide isolated from the Sargasso Sea
AEVICGMKSHFDARGIPSVAYTDPEVAWAGITEEEAKSQGINYGKGIFPWAASGRSLALGRDEGMTKIMFEEGTKKVIGIGIVGPNAGELIAEGMLAIEMGADATDIGSTIHPHPTLSETLGLAVEAYEGTITDLYLPKRK

SEQ ID NO: 102000 - protein, 177 aa, Unknown
  Bacterial polypetide isolated from the Sargasso Sea
MSEKFQVAIIGGGPAGYVCAIRLSQLGFKTACIEAKETLGGTCLNVGCIPSKSLLNLSENFYKARNFSKLGIEIGDLKLNLEKMMKNKDRAVTVLTKGIEFLFKKNKIAHFKGLGVLKSKNEVLIIDENKNEKTIVAEKIIISSGSEPISFPGTKFDEQKYCIFNPEHYPLKSVPKK

SEQ ID NO: 102001 - protein, 288 aa, Unknown
  Bacterial polypetide isolated from the Sargasso Sea
MTIIGSGAIGCEFAYYFNEFGTQVHLLEMMDYILPNEDSEVSDEVEKSFKRAGIKISKGVKVSKIESLKTKVKIHTDKTESNLIESDVALLAIGVTGNLENIGLESLGIKTEKGAICVDEFNQTNISNIYAIGDVSGPPWLAHVASAQGHIVAEHMNGLAPEPVDYSNVPGCTYCQPQVGSLGLTEAEAIKEGFNVKVGKFLFQASGKAMAVGDTTGFVKLVFDEKYGELLGAHIVGSEATELIAELGVAKALETTWEEIAMTIHAHPTLSESIMEAAMDAFGSAIHQ

SEQ ID NO: 102002 - protein, 99 aa, Unknown
  Bacterial polypetide isolated from the Sargasso Sea
MSEKFDAIVIGGGPGGYVCAIRLAQLGKKTACVEYRGTLGGTCLNIGCIPSKNLLNLSENFQKAKNFSKVGIEISDIKLNLDKMMKNKDKAVTVLTKGV

SEQ ID NO: 102003 - protein, 57 aa, Unknown
  Bacterial polypetide isolated from the Sargasso Sea
MEDFDLIIIGAGPGGYVAAIRAAQLGMKVACIEKETSLRRYVFKYRMYSIKSFIKLF

SEQ ID NO: 102004 - protein, 36 aa, Unknown
  Bacterial polypetide isolated from the Sargasso Sea
MKTNTYDIIIIGGGPGGYVAAIRAAQLGFKVACMKK

SEQ ID NO: 102005 - protein, 372 aa, Unknown
  Bacterial polypetide isolated from the Sargasso Sea
MSEKFDVVVIGGGPAGYVCAIRSSQLGLKTACIESRGSLGGTCLNIGCIPSKSLLNLSEAFHEAQSFSKIGIETGDIKLNLGKMMQNKDKAVTILTKGVEFLFKKNKVTYLKGKGSLLDKNKILVEDKNNKQTIESKNIVLSTGSEAASLPGLSFDEEKILSSTGALNMSKVPRKMFIIGGGYIGLEMGSVWSRLGSEVHVIETLDHITPGLDKEISSEFLKILKKQGLKFHLSTKVEKVYKIEKGINIEVIDVNQKKVLHECDVVLVSVGRKPYTKNLNLEKIGINTDSKGRIKVNKNFQTNVNNIYAIGDVIEGPMLAHKAEEEGIAVAELISGQAGHVNYDLIPGVIYTTPEVAYVGKSEEELKKINQG

SEQ ID NO: 102006 - protein, 403 aa, Unknown
  Bacterial polypetide isolated from the Sargasso Sea
VKGLAKKGIEIGNVKLNLDKMMKNKDKAVTVLTKGVEFLLKKNKVTYFKGKGSFKSKNEILIKDNQNKELLIKTEKTVIATGSTAVSLPGIEIDEKIIVSSTGALKFDKVPKKMVVVGGGYIGLEMGSVWSRLGSEVHVIEFLDHITPGMDKEISSEFMKILKKQGIKFNMQNKVEKIKKNNSGAVVLTVDKDGNKHNLECDVVLISVGRKPNTEGLNLDALGVDLDERKRIKTDKNFKTNVENIYAIGDVIDGPMLAHKAEDEGMAVAENIVGQSGHVNYETIPGVIYTTPEVASIGKTEEQLKELKKKYKVGKFSFMANSRAKAIDDVEGFVKILADEKTDKVLGAHIIGPHAGELIAEIGVAMEFGASAEDIARTCHAHPTFSEAVKEAALSVDKRAIHS

SEQ ID NO: 102007 - protein, 68 aa, Unknown
  Bacterial polypetide isolated from the Sargasso Sea
MKKSYDIIVLGSGPGGYVAAIRASQLGLKTAIIEKESLGGVCLNWGCIPTKALLKSAQVFEYLKKCRS

SEQ ID NO: 102008 - protein, 303 aa, Unknown
  Bacterial polypetide isolated from the Sargasso Sea
FTGALSLSKIPKSLLVIGGGYIGLEMGSVWSRFGSKVTVVEALDRIVPTMDGEIAKEFMKMLTKQGLEFKLSHKVSSAKSAKSGVDVEMETSDKKKIKENYEIVLMSVGRKPNTEGLGLEKIGIKLTEKKSIEIKDNFQTSVEGIYAIGDVAPGPMLAHKAEEEGVACVEFINGQKPHINYDAIPAIVYTNPEIASVGKTEEQLKQEKKDFKVGKFPFMANGRALTTSASEGFVKILVDKKTDEILGAHIIGHDAGQLIAEIVTTIEFGGSAEDIARVCHAHPTTSEAVKEAALSVDGRAIHI

SEQ ID NO: 102009 - protein, 72 aa, Unknown
  Bacterial polypetide isolated from the Sargasso Sea
MKEKFQATVIGGGPGGYVCAIRLAQLGIKTACIESRGTLGGTCLNIGCIPSKNLLNLSENFYKAKNFSKIGN

SEQ ID NO: 102010 - protein, 85 aa, Unknown
  Bacterial polypetide isolated from the Sargasso Sea
MSEKFQAVVIGGGPGGYVCAIRLAQLGLKTACVESRGSLGGTCLNIGCIPSKSLLNLSEEFHKVKSLANKGIEVGEVKLNLEKMM

SEQ ID NO: 102011 - protein, 384 aa, Unknown
  Bacterial polypetide isolated from the Sargasso Sea
TFQALLHIVKIVNETKHLSSLGVSFGDLKFDIEKIRNHKNKIISQLNGGISQLAKARNVEVLCGEASFLSNDELLVKTKTEKKQIGFKHCIIAAGSRSTMLPNIPQNHPSILTSRTALELESIPKSLLVIGGGIIGLELGQVYSTLGSSVSVVEFMPNLVPGADDDVAKPLVRKLRKQFESTMLSSKVTNVEILENSGVKVSIENNGEVSESTYEKVLVAVGRKPNTDLLGIENTEIKTDEKGFIAVDVYQKTSVENIYAIGDISGNPMLAHKATHEGKVAAEVCSGLPSAMDAKSIPSVIYTDPEVAWVGLTEKEAKEKDIPYELGEFPWSASGKAMILNAVQGKTKVLFDPANKRVLGGAVVGPSAGDIVSEIVLALEMGSD

SEQ ID NO: 102012 - protein, 243 aa, Unknown
  Bacterial polypetide isolated from the Sargasso Sea
MTNDKIYDVIIIGSGPGGYVAAIRASQLGLNTAVIEKDKLGGICLNWGCIPTKALLRASEINHIISETSGFGINVKNFRIDWKTIVSRSRNVSEQLSKGVDYLLKKNKVDIIKGEGRISGKGRVIVKNSDKETLYTTSNIILATGASPKKIKGLESDNKYIWSYKEAMVPEKRPDSILIVGAGAIGIEFASFYNDFGTEVTVVEAQEYILPSEDKDISMFAKKCFEDCKIKIFNNSKNKLCKI

SEQ ID NO: 102013 - protein, 420 aa, Unknown
  Bacterial polypetide isolated from the Sargasso Sea
GCIPSKSLLNLSENFKKAKNFSKLGIETGDVKLNLDKMMKNKDKAVSILTKGVEFLFKKNKVTYLKGFGSFISEKKILVKDEDGKKREIEAKNIIIATGSEAMPMPNVEFDEKTIVSSTGALSLKEVPKSLVVVGGGYIGLEMGSVWSRLGAEVNVIEFLDHITPGMDREISEEFMKILKKQNIKFHLNRKVTSIKKTKNGVHISTSDKNGDSKDFNCDVALISIGRKPFTSNLNLSSAGVKSDEKGRIKIDKKFQTSAKNIYAIGDVIDGPMLAHKAEEEGIAVAEIIAGQSGHVNYDLIPGVIYTTPEVASIGLTEEQLKEKNKSYKIGKFPFMANSRAKAIDEPEGFVKILADKDTDKVLGVHMIGPHVGEMIAEMAVAMEFGASSEDIARTCHAHPTFSEAIKEAALSVEKRQIHS

SEQ ID NO: 102014 - protein, 37 aa, Unknown
  Bacterial polypetide isolated from the Sargasso Sea
MVVIGSGPGGYVCAIRASQLGIKTALLKNIHLLEEHA

SEQ ID NO: 102015 - protein, 154 aa, Unknown
  Bacterial polypetide isolated from the Sargasso Sea
DVIDGPMLAHKAEEEGIAVAELISGKAGHVNYDIIPGVIYTSPEVASVGKTEEQLKKNNVNYKVGKFPFTANSRAKAIDEPLGFVKMLADSKTDRVLGVHIIGPHAGELIAEMTLAMEFGASSEDIARTCHAHPTFSEAIKESALSVEKRQIHS

SEQ ID NO: 102016 - protein, 327 aa, Unknown
  Bacterial polypetide isolated from the Sargasso Sea
MEQFDITVIGSGPAGYVCAIRASQLGYKVCCIEKGQTLGGTCLNIGCIPSKSLLHSSHLFHQASELNQLGINFDNVSFDLNKIMKSKNESVESLTSGIDFLFKKNKVTRKLGFAKFIDNEQIEILTGDSSEVIKSSKTIIATGSEVVSPEGVIIDEIDILSSTGALSLSSVPKHLMVIGAGYIGLEMGSVWSRLGSKVTVIEYADRILPGMDQEISDAFQKILIKQGFDFKLSTALRKVNKSNGSLSVSVENNGQTLDMDCDKVLISTGRKPYTFGLNLEKIGVKTNDKGFIETNQHFNTSIENIYAIGDCKVGPMLAHKASEEGTA

SEQ ID NO: 102017 - protein, 87 aa, Unknown
  Bacterial polypetide isolated from the Sargasso Sea
MLKFDLAVLGGGPGGYVAAIRAAQLGQKICIIDEDKLGGICLNWGCIPTKSLLKNAEVYHIIKNADRYGITVDQVKVNFKNNVKRSR

SEQ ID NO: 102018 - protein, 374 aa, Unknown
  Bacterial polypetide isolated from the Sargasso Sea
MVATLTKGVEFLFKKNKVTYIKGVGSFNEKNEILVKNDKSEIKIKTDKTIISTGSEPLSLPGIDFDEKKILSSTGALNISKLPKKMVVVGGGYIGLEMGSVWSRLGTEVHVVEYLDHITPGLDKEISNEFMKILKKQNIKFELNTKVEKITKNDKGVIIETTNKDSKNNIEADVVLISVGRKPYTDKLNLEKIGVNLDKKGKIKVNKNFETNVKNVYAIGDVIDGPMLAHKAEEEGIAVAELIAGQSGHVNYDIIPGVIYTSPEVAYVGKNEEELKEKKINFKVGKFPFMANSRAKAINEPEGFVKILAESTTDRVLGVHIIGPHAGEMIAEMSVAMEFGASSEDIARTCHAHPTFSEAIKEAALSVDKRQIHS

SEQ ID NO: 102019 - protein, 215 aa, Unknown
  Bacterial polypetide isolated from the Sargasso Sea
MYDVVVIGGGPAGYVAAIKASQLGLNTACVEFASDEKGNQKYGGTCLNVGCIPSKSLLDSSHKYFEAQKDFASHGIDLKDLSVNIPSMMKRKDEVVNKLTTGITGLFKANGVEAISGRGKVINENIVEVSNNGDKTSLETKFIILATGSNPIEIPVAKWSENIVDSTGALNFDRVPERLGIIGAGVIGLELGSVWSRLGAKVTVIEAMDDFLPIV

SEQ ID NO: 102020 - protein, 210 aa, Unknown
  Bacterial polypetide isolated from the Sargasso Sea
KKKIKENYEIVLMSVGRKPNTEGLGLEKIGIKLTAKKSIEIKDNFQTSVEGIYAIGDVAPGPMLAHKAEEEGVACVEFINGQKPHINYDAIPAIVYTNPEIASVGKTEEQLKQEKKDFKVGKFPFMANGRALTTSASEGFVKILVDKKTDEILGAHIIGHDAGQLIAEIVTTIEFGGSAEDIARVCHAHPTTSEAVKEAALSVDGRAIHI

SEQ ID NO: 102021 - protein, 452 aa, Unknown
  Bacterial polypetide isolated from the Sargasso Sea
VGPGGYVTAIRASQLGLKTAIVEKESLGGVCLNWGCIPTKALLKSAQVFEYIKKADTYGLKIKDFDKDFDAVIKRSRDVAGGMSKGVNFLMKKNKIEVINGYGKIKPNKVVSVEKEGTEMDFESDNIIIATGGRSRVIDSIPQDGKKIIGYREAMTLKKQPKKMIIVGSGAIGIEFAYFYNSMGTEVKVIEYMDRILPVEDKDISNQLNKTFKKSGIEILTNSEVISSDVKGKGVKVQVKSDGQISDHEADIVLSAVGYKSNIENIGLEEVGIAVDKDKIIVDEFYKTNIPGYYAIGDITSGQALAHVASAEGILCVEKIANHDVEPINYDNIPGCTYCSPEVASVGLTEEKALEMGYEIKVGKFPFTASGKAQASGHSDGFVKVIFDEKYGEWLGCHMIGAGVTDMIAEAVLGRKLETTGKEILNAVHPHPTMSEALMEAVADAYDEVIHL

SEQ ID NO: 102022 - protein, 383 aa, Unknown
  Bacterial polypetide isolated from the Sargasso Sea
CIPSKSLLNLSEEFHKVKGLANKGIEVGEVKLNLEKMMKSKDKAVTVLTKGVEFLLKKNKVSYFKGHGSFKSKNEISIKDDKNKETVIQTEKTVIATGSVPVSLPGIDIDEKTIISSTGALKLEKVPKKMVIVGGGYIGLEMGSVWSRLGAEVQVVEFLDHITPGMDKEISTEFMKILKKQGMKFNMQNKVETIEKNEAGVVVSTLDKEGNKNNFECDVVLISVGRKPNTDGLNLDSVGVNLDERYRIKTDKNFKTNVENIYAIGDVIVGPMLAHKAEDEGIAVAENIVGQSGHVNYDTIPGVIYTTPEVASIGKTEEQLKELDKKYKVGKFSFMANSRAKAIDDAEGFVKILADEQTDKVLGAHIIGPHAGELIAEIGVAME

SEQ ID NO: 102023 - protein, 242 aa, Unknown
  Bacterial polypetide isolated from the Sargasso Sea
MDNFDLIVIGGGPGGYVCAIRAAQLGLKTACVESRGSLGGTCLNVGCIPSKSLLNLSENFHKAKKDFNQQGIEIEGIKLNIEKMMSNKNKSIQVLTKGVEFLFKKNKVTYIKGKGVIFSKNDVVVYEDNKKTNYKSKNIVIATGSDVASLPGIKIDEKNIISSTGALSLNKVPKKLAVIGGGYIGLEMGSVWSRLGSEVTVIEYLDFITPGMDREISNEFKKILIKQGIKFKMGSKVNSVKN

SEQ ID NO: 102024 - protein, 222 aa, Unknown
  Bacterial polypetide isolated from the Sargasso Sea
MSEKFQAVVIGGGPGGYVCAIRLAQLGLKTACIESRGSLGGTCLNIGCIPSKSLLNLSEEFHKVKGLANKGIEIGEVKLNLDKMMKSKDKAVTVLTKGVEFLLKKNKVTYFKGHGSFKSKNEILIKDDQKKETIIQTEKTVIATGSVPVSLPGIEIDEKIIVSSTGALKLEKVPNKMVVVGGGYIGLEMGSVWSRLGARVEVVEFLDHITPGMDKEISSEFM

SEQ ID NO: 102025 - protein, 235 aa, Unknown
  Bacterial polypetide isolated from the Sargasso Sea
MVDFDLIVIGAGPGGYVAAIRGAQLGMKVACIEKEKTLGGTCLNIGCIPSKALLNSSEKYFELSKHLDEHGISTGKVALDLSKLMQRKNKIVKQLTSGIGFLFKKNKITHIQGSASFIDNKKIKVTTSEGEKNYTATNFIIATGSTSISIDAIPVDEKQIVTSTGALALESVPKSLLVIGGGYIGLEMGSVWSRLGSKVTVVEALDRIVPTMDEEIAKEFMKSLQKQGLEFKLSS

SEQ ID NO: 102026 - protein, 66 aa, Unknown
  Bacterial polypetide isolated from the Sargasso Sea
MEDFDLIVIGAGPGGYVAAIRAAQLGMKVACIEKEPSLGGTCLNIGCIPSKALLNSSEKFVEISNH

SEQ ID NO: 102027 - protein, 155 aa, Unknown
  Bacterial polypetide isolated from the Sargasso Sea
MADFDLIVIGAGPGGYVAAIRAAQLGMKVACVEKGQTLGGTCLNIGCIPSKALLNSSEKFAEISKHSEEHGISTGKVEIDLSKLMQRKNKIVKQLTSGIGFLFKKNKVTHIQGLASFVDKNTIKVSSSDGEKNYSAKNFIIATGSSSISIDAIPV

SEQ ID NO: 102028 - protein, 302 aa, Unknown
  Bacterial polypetide isolated from the Sargasso Sea
MTDKFQAVVIGGGPGGYVCAIRLAQLGLKTACIESRGSLGGTCLNIGCIPSKSLLNLSEEFYKVKSLANKGIEVGEVKLNLDKMMKSKDKAVTVLTKGVEFLLKKNKVTYFKGHGSFKSQNEISIKDDKNKETIIQAEKIVIATGSVPVSLPGIDIDEKTIVSSTGALKLEQVPQKMVVVGGGYIGLEMGSVWSRLGAEVQVIEFLDHITPGMDKEISSEFMKILKKQGMKFNMQNKVETIKKKGTGAIVSTVNKDGNKNNFECDVVLISVGRKPNTDGLNLKAVGVNLDEKKRIKTDKNFK

SEQ ID NO: 102029 - protein, 48 aa, Unknown
  Bacterial polypetide isolated from the Sargasso Sea
MADQQFDIGVIGAGPGGYVAAIRCAQLGLNTVIIEKRNTLGGTCLNWG

SEQ ID NO: 102030 - protein, 311 aa, Unknown
  Bacterial polypetide isolated from the Sargasso Sea
QLNNIKLSTHVVDSEGALKLEEVPKTLVIIGAGVIGLELGSVWARLGSEVVILEAQDDFLPMLDKRISRQVLKEFQNQGLDIRLGSNVLEAEEDQEGMKLTYTDGDKETFLRTEKIILAVGRKPNLDNLFDDTLLNLNKQGFIDVNEFCQTSIDNIWAIGDVVRGPMLAHKASEEGVMVAERIADNDVRLNYDHVPNVIYTHPEVAWVGLNETQLKEQNIDFKSGSFPFLASGRALASGESVGSVFITADNETDKILGIQVFGPSAAEILQQGLIAMDQGVTSEDFGKTIFSHPTVSEALHEATLAMNTKR

SEQ ID NO: 102031 - protein, 67 aa, Unknown
  Bacterial polypetide isolated from the Sargasso Sea
MFDKFDVTVIGSGPGGYVCAIRLAQLGLKTACIDSRTKPGGTCLNIGCIPSKNLLNISENFSKAKNF

SEQ ID NO: 102032 - protein, 282 aa, Unknown
  Bacterial polypetide isolated from the Sargasso Sea
GSVWARLGSKVTILEAQQEFLPMLDARMSRQILREFNRQELDIRFGSNILDISDTTTGVEVKFQENGEDINLKAEKMIIAIGRKPNTQDLFNNDLVSIDDKGFIEVDEYCLTKTKSIWAIGDAVRGPMLAHKASEEGIMVSERIAGENFQINYAHIPNVIYTHPEVAWVGKNEKELKSLEVDYKSGSFPFAASGRALASGESTGSVTIYADNKTDQILGIQVFGPSASEIMHQGLIAMDNKITSEKFSSTIFSHPTVSEALHEATLAMNQKAIHIQNRKKKK

SEQ ID NO: 102033 - protein, 297 aa, Unknown
  Bacterial polypetide isolated from the Sargasso Sea
GAKSLAVIGAGYIGLELGSVWQRLGSNVTVIEYMDSIVPTMDEDIANIFYKDLQKQGLNFLLSHELLSSKILDNKQIELKIKDLQSNKKIKQKFDKVLLSIGRKPASKGMGLHDIGINLDEYGRIIVDEKYQTSLANIYAIGDIIAGPMLAHKASSEAEALIDILVGKKGQLNYNAIPSVVYTSPEVAWVGKTKKELDLSKLKYSTGIFKFSSNSRSKVTGNIIGEVKVYSEEVTKEILGAHIIGENAGEMIGEFVVAMEMGATAEDLALICHAHPTLSESVKEASSISAYGNTIHS

SEQ ID NO: 102034 - protein, 95 aa, Unknown
  Bacterial polypetide isolated from the Sargasso Sea
MDNFDLVVIGGGPGGYVCAIRAAQLGLKTACIESRGALGGTCLNVGCIPSKSLLNLSENFHKAKKDFNQQGIEIEGIKLNIEKMMSNKNKSVQVL

SEQ ID NO: 102035 - protein, 183 aa, Unknown
  Bacterial polypetide isolated from the Sargasso Sea
MDNFDLVVIGGGPGGYVCAIRAAQLGLRTACVEYRGSLGGTCLNVGCIPSKSLLNLSENFQKAKKDFNQQGIEIEGIKLNIEKMMSNKNKSIQVLTKGVEFLFKKNKVTYIKGKGALLSKNDIVVYENDKKTNYKAKNIVIATGSDIVSLPGIDIDEKNIISSTGALSLKKVPKRLAVIGGGY

SEQ ID NO: 102036 - protein, 156 aa, Unknown
  Bacterial polypetide isolated from the Sargasso Sea
MSNEIKTQVVVLGAGPGGYSAAFRAADLGLEVTLVEARSTLGGVCLNVGCIPSKALLHVAKVIDDAREMASHGVTFGAPQIDLDKIRAWKDKVVGQLTNGLSGMSKMRKVKVVTGYGKFTGPNTLVVGDTTITFESAIIAAGSEPVALPFIPKDDA

SEQ ID NO: 102037 - protein, 205 aa, Unknown
  Bacterial polypetide isolated from the Sargasso Sea
MNSFDLVVIGGGPGGYVCAIRAAQLGLKTACVESRGTLGGTCLNVGCIPSKSLLNLSENFHKAKKDFNNQGIEIEGVKLNIEKMMSNKNKSVQVLTKGVEFLFKKNKVTYIRGKGVLFSKNNIIVYDNNNKTSYNAKNIVIATGSAVSSLPGIEIDEKNIISSTGALSLNSVPKKLAVIGGGYIGLEMGSVWSRLGAEVTVIEYP

SEQ ID NO: 102038 - protein, 161 aa, Unknown
  Bacterial polypetide isolated from the Sargasso Sea
MDYDVLVIGGGPGGYVAAIKASQLGLKSACVEFDSTKDNKVKLGGTCLNVGCIPSKSLLDSSYKFYQLKKELLVHGIKTGKASIDLDVMMHRKDQIIEKLTGGVGQLFKHNKVESIHGKGTLVDQHTVEVTNAKGKKKIYKSKNIILATGSRPTYIPSVPW

SEQ ID NO: 102039 - protein, 106 aa, Unknown
  Bacterial polypetide isolated from the Sargasso Sea
MSEKFDAVVIGGGPGGYVCAIRLAQLGQKTACIESRGSLGGTCLNVGCIPSKSLLNLSENFHKAKNFDKIGIEVGSLKLNLPKMMKNKEKAVTVLTKGIEFLFKNK

SEQ ID NO: 102040 - protein, 62 aa, Unknown
  Bacterial polypetide isolated from the Sargasso Sea
MFDVVVIGSGPAGYVAAIKASQLGLKTLCIEESSDAKGNTNLGGTCLNVGCIPSKALLDSSH

SEQ ID NO: 102041 - protein, 215 aa, Unknown
  Bacterial polypetide isolated from the Sargasso Sea
MSKQFDLIVIGAGPGGYVAAIRGAQLGLSVAIIEKEPTLGGTCLNWGCIPSKALLDSSELFYLAKEKFQTHGIDINKPKVNMKQMMTRKRDVVIATTKGIDYLMSKNNITRFEGIASFVDEHSILISGKDSETISGKHIMIATGSEVTPLPPVPVDGKRVITSTEALELEEVPKKLIVIGGGVIGVEIGSVYARLGTEVTVVEFMDGIIPTMDKE

SEQ ID NO: 102042 - protein, 267 aa, Unknown
  Bacterial polypetide isolated from the Sargasso Sea
LDGLMAGADRDLVKPFHRIVSRQYDNIWLETRVTQVEAQKKGLKVSFEGKNAPEKPVVFEKILSAVGRIPNGLKIGAENAGVSMDEKGFIKVDSQMRTNVSNIYAIGDIVGQPMLAHKATHEGKVASEVICGMKSHFDARTIPSVAYTDPEVAWAGITEEEAKSQGINYGKGIFPWAASGRSLALGRDEGMTKIMFDEGTKKVIGIGIVGPNAGELIAEGMLAIEMGADATDIGSTIHPHPTLSETIGLAAEAYEGTITDLYLPKRK

SEQ ID NO: 102043 - protein, 284 aa, Unknown
  Bacterial polypetide isolated from the Sargasso Sea
MDNNFDVIVVGAGPGGYVAAIRSAQLGLKTACVESRKTLGGTCLNVGCIPSKSLLNISEMYHKAQKEFKNLGIDTTDVKLNLPKMMANKNKSILTLTKGVEFLFKKNKISHLKGKGLILDSNTVIVTEDSKKKLTYKAKNIIIATGSSPTSLPNIKIDEKIIVSSTGALSFDKPPKELIVIGGGYIGLELSSVWKRLGSNVTVIEYLDHIIPGMDRDISSEFLKILNKQGINFKLNSKVTGVNIIKNKVIVDFTNNKSTKKERVECDKVLVAVGRKPNIGEDIK

SEQ ID NO: 102044 - protein, 322 aa, Unknown
  Bacterial polypetide isolated from the Sargasso Sea
GGYVAAIRAAQLGMKVACIEKEPSLGGTCLNIGCIPSKALLNSSEKFVEISNHAAEHGIKTSKIDLDLNVLMDRKTKIVKKLTTGIGFLFKKNKITHIPGTASFVDKNTISIINGKNEITASAKNFIIATGSSSIEIPNIPVDEKQIVSSTGALSLSKIPKSLLVIGGGYIGLEMGSVWSRLGSKVTVVEALDRIVPTMDAEIAKEFMKMLTKQGLEFKLSHKVSSAKSGKSGVDVEMETSDKKKIKENYEIVLMSVGRKPNTEGLGLEKIGIKLTDKKSIEIKDNFKTSVEGIYAIGDVVPGPMLAHKAEEEGVACVEFIN

SEQ ID NO: 102045 - protein, 202 aa, Unknown
  Bacterial polypetide isolated from the Sargasso Sea
MEENFDLLVIGGGPGGYVCAIRAAQLGLKTGCIESRGTLGGTCLNVGCIPSKSLLNLSDMYRKAQKDYNNLGIEVGEVKLNLKKIMMNKSKSVQVLTKGVEFLFKKNKVTYIKGKGVLFSKNNVVVYENGKKTSYSSKNIVIATGSSSSSVPGIEINEKNIISSTGAISLEKVPKSMVVIGGGYIGLEMGSVWSRLGSEVTV

SEQ ID NO: 102046 - protein, 302 aa, Unknown
  Bacterial polypetide isolated from the Sargasso Sea
STGALEPNEIPSNILIIGGGIIGLEMATIYSALGSEVTIVELTKDLMPGTDRDLVRPLEKVLKKKCNKIMKSTQVISAEATDDGINISFKQDEEEFSEVFQNVLVAVGRKSNGNLLGLNEIGVNIDDQGIIKVDQQFKTSVESILAIGDVIGDPMLAHKASYEGKVAAEVTAGERVSNDARCIPSVAYTDPEVAWVGLSEDECKDKGMNYGKGVFPWSASGRSLAIGRNEGMTKLLFNNSTKKVIGGGIVGPNAGDLISEIALAIEMDLRCDDVALTVHPHPTLSETVAMAAEVFEGTITDL

SEQ ID NO: 102047 - protein, 296 aa, Unknown
  Bacterial polypetide isolated from the Sargasso Sea
MENNFDVIVIGGGPGGYVCAIRSSQLGLKTACVESRGTLGGTCLNVGCIPSKSLLNLSENYHKAKKDFKNQGIEISDIKLNIDKMMQNKAKSVQVLTKGVEFLLKKNKVSYLRGKGVIFSPNDVVVYDGSDKKSYKTKNIVIATGSAPLTLPGIDIDEKNILSSTGALSLNKVPKSLAIIGGGYIGLEMGSVWSRLGTEVTVIEYLDHITPGMDREISKEFQKILTKQGIKFKLNNKVKSVISSSQGSTIVFEDNNSKKEEKLIADKVLLSVGRKPYTEGLNLSKIGVKKDSKSRV

SEQ ID NO: 102048 - protein, 53 aa, Unknown
  Bacterial polypetide isolated from the Sargasso Sea
MSEQFDLLVIGGGPGGYVCAIRAAQLGLKTGCIESRGTLGGTCLNVGCIPSKS

SEQ ID NO: 102049 - protein, 50 aa, Unknown
  Bacterial polypetide isolated from the Sargasso Sea
MIADNIYDLIVIGGGPGGYVAAIRASQLGLKVLCIEKRSTFGGTCLNVGC

SEQ ID NO: 102050 - protein, 103 aa, Unknown
  Bacterial polypetide isolated from the Sargasso Sea
MENNFDLVVIGGGPGGYVCAIRAAQLGLKTACIESRGALGGTCLNVGCIPSKSLLNLSENFHKAKKDFNQQGIEIDGIKLNIEKMMSNKNKSIQVLTKGVEFL

SEQ ID NO: 102051 - protein, 248 aa, Unknown
  Bacterial polypetide isolated from the Sargasso Sea
VLKKKCNKIMKSTQVISAEATDDGINISFKQDEEEFSEVFQNVLVAVGRKSNGNLLGLNEIGVNIDDQGIIKVDQQFKTSVESILAIGDVIGDPMLAHKASYEGKVAAEVTAGERVSNDARCIPSVAYTDPEVAWVGLSEDECKDKGMNYGKGVFPWSASGRSLAIGRNEGMTKLLFNNSTKKVIGGGIVGPNAGDLISEIALAIEMDCDVNDVALTVHPHPTLSETVAMAAEVFEGTITDLYLKSSK

SEQ ID NO: 102052 - protein, 188 aa, Unknown
  Bacterial polypetide isolated from the Sargasso Sea
MENNFDLVVIGGGPGGYVCAIRAAQLGLKTACVESRGALGGTCLNVGCIPSKSLLNLSENFHKAKKDFNQQGIEISNIKLNIEKMMSNKNKSIQVLTKGVEFLFKKNKVTYFKGKGVLFSKNDIVVYEDNNKRINIKAKNIVLATGSEATSLPGIKIDENNIVSSTGALSFNKVPKRLAVIGGGYIGV

SEQ ID NO: 102053 - protein, 25 aa, Unknown
  Bacterial polypetide isolated from the Sargasso Sea
MDNNFDVIVIGSGPGGYVAAIRSFA

SEQ ID NO: 102054 - protein, 60 aa, Unknown
  Bacterial polypetide isolated from the Sargasso Sea
MENNFDLVVIGGGPGGYVCAIRAAQLGLKTACVESRGALGGTCLNVGCIPSKSLLNLSEN

SEQ ID NO: 102055 - protein, 95 aa, Unknown
  Bacterial polypetide isolated from the Sargasso Sea
MSDKFQVVVIGGGPGGYVCAIRLAQLGLRTACIESRGSLGGTCLNVGCIPSKSLLNLSEEFHKVKSLSNKGIEIGDVKLNLAKLMRSKDKAVTVL

SEQ ID NO: 102056 - protein, 77 aa, Unknown
  Bacterial polypetide isolated from the Sargasso Sea
MSEKFQAVVIGGGPGGYVCAIRLAQLGLKTACIESRGSLGGTCLNVGCIPSKSLLNLSEEFHKVKSFSNKGIEVGEV

SEQ ID NO: 102057 - protein, 236 aa, Unknown
  Bacterial polypetide isolated from the Sargasso Sea
MSEKFDVTVIGGGPGGYVCAIRLSQLGLKTACIESRGSLGGTCLNVGCIPSKSLLNLSENFTRAKNFSKLGIEISDLKLNLDKMMKNKEKAVTILTKGVEFLFKKNKVSYFKGVGKFKSKNKISIIDTNNEEIFIETKSTVIATGSEPTSIPGVNFDENQILSSTGALSLKKVPKKMIVVGGGYIGLEMGSVWSRLGSEVHVIEFLDFITPGMDREISNEFMKILTKQGIKFHLKT

SEQ ID NO: 102058 - protein, 81 aa, Unknown
  Bacterial polypetide isolated from the Sargasso Sea
MGAEQEFDVVVIGAGPGGYVCAIRCAQLGMKTALVEKNPRLGGTCLNVGCIPSKALLHSTEIYHELKHGASGHGIVAKGIS

SEQ ID NO: 102059 - protein, 280 aa, Unknown
  Bacterial polypetide isolated from the Sargasso Sea
TLGGVCLNVGCIPSKALLHVAKVIEEAKAVAAHGVVFGEPTIDLDKLRSFKQKVISQLTGGLGGMSKMRKVNVVNGFGKFTGPNSLEVTAEDGTVTVVKFDQAIIAAGSRPIKLPFIPHEDPRIWDSTDALELKEVPGKLLVMGGGIIGLEMGTVYSSLGSEIDVVEMFDQVIPAADKDVVRVFTKQIKKKFNLILETKVTAVEAREDGIYVSMEGKSAPTEPVRYDAVLVAIGRTPNGKLIDAEKAGVKIDERGFINVDKQLRTKIPHIYAIGDIVGQP

SEQ ID NO: 102060 - protein, 328 aa, Unknown
  Bacterial polypetide isolated from the Sargasso Sea
MLLQLKLLNLALKPLCIEESVDKKGNANFGGTCLNVGCIPSKALLDSSHRYYEANKNLSEHGIEIGELKLDLSSMMKRKDDIVNKLTGGINGLFSSNKVESCSGRGKIIDANTVEVVKADGTVEKIETKNIIIATGSKPIEIPSAPFGKNIVDSTGALGFTKVPETLGVVGAGIIGLELGSVWSRLGSKVTVIEALDDFLPMADKDISKESFKEFKKQGLDIKLSSSVTKCSEHKEYVSVSYECQGKEIEKKFEKLIVAVGRYPNSSGVIGEKVNISINKGFIEVNEFCQTSVPNIWAVGDVVRGPMLAHKGSEEGIMVAERIAEKQA

SEQ ID NO: 102061 - protein, 62 aa, Unknown
  Bacterial polypetide isolated from the Sargasso Sea
MLEKFQAVVIGGGPGGYVCAIRLSQLGLKTACIESRGSLGGTCLNVGCIPSKSLLNLTEELT

SEQ ID NO: 102062 - protein, 269 aa, Unknown
  Bacterial polypetide isolated from the Sargasso Sea
MSEKFDVTVIGGGPGGYVCAIRLSQLGLKTACIESRGSLGGTCLNVGCIPSKSLLNLSENFHKAKNFEKIGIEIGEIKLNLGKMMKNKEKAVTVLTKGIEFLFKKNKVSYFKGKGSFKSSNEIVVSGDGKETIIKTGKAIISTGSEPVSIPGMEFDEEKIISSTGALSLEKLPKKMVVVGGGYIGLEMGSVWSRLGTEVEVVEFLDHITPGMDREISSEFMKILKKQGIKFKLNTKVEKITKNENGVILEVIDKENKKNNIEADVVLIS

SEQ ID NO: 102063 - protein, 48 aa, Unknown
  Bacterial polypetide isolated from the Sargasso Sea
MSETRFDLIVIGAGPGGYVAAIRAAQLGMSVACVEKRTTLGGTCLNVG

SEQ ID NO: 102064 - protein, 68 aa, Unknown
  Bacterial polypetide isolated from the Sargasso Sea
MIDKFQAVVIGGGPGGYVCAIRLAQLGLKTACIESRGSLGGTCLNVGCIPSKSLLIYLKSFITHKVYQ

SEQ ID NO: 102065 - protein, 178 aa, Unknown
  Bacterial polypetide isolated from the Sargasso Sea
MADFDLIVIGAGPGGYVAAIRGAQLGMKVACIEKEKTLGGTCLNIGCIPSKALLNSSEKFMEILNHAEEHGISTGKVNLDLSKLMQRKNKIVKQLTSGIGFLFKKNKITHLQGAASFVDKKTIKLASSDGEKNYSATNFIIATGSSSIAIDAIPVDEKQIVTSTGALTLEEVPKSLLV

SEQ ID NO: 102066 - protein, 218 aa, Unknown
  Bacterial polypetide isolated from the Sargasso Sea
MSEKFQVVVIGGGPGGYVCAIRLAQLGLKTACIESRGSLGGTCLNVGCIPSKSLLNLSEEFHKVKSLANKGIEVGEVKLNLDKMMKSKDKAVTVLTKGVEFLLKKNKVTYFKGHGSFKSINEILIKDDKNKETIIQTEKTVIATGSVPVSLPGIEIDEKIIVSSTGALKLEKVPKKMVVVGGGYIGLEMGSVWSRLGAEVQVVEFLDHITPGMDKEIS

SEQ ID NO: 102067 - protein, 273 aa, Unknown
  Bacterial polypetide isolated from the Sargasso Sea
MEEMFDVVVIGSGPAGYVSAIRCSQLGLKTLCIEESHSDSGKPNFGGTCLNVGCIPSKALLDSSHRYYEANKKLSEHGIQIESLKLDLKSMMKRKDDIVSKLTGGISGLFSANKVESIIGRGKIIDINTVEVTKSDGSTETIDAKNIIVATGSKPIEIPSAKFSKHIVDSTGALCFDSVPKKLGVVGAGIIGLELGSVWSRLGSEVTVLEALDEFLPMTDHDISKESLKEFKKQDLDIKLGSKVTSTKELKNSVKVKFESNDQENEMEFDKLI

SEQ ID NO: 102068 - protein, 310 aa, Unknown
  Bacterial polypetide isolated from the Sargasso Sea
WWTGGYVCAIRLSQLGIITACIESRGTLGGTCLNVGCIPSKSLLSLSENYSKAKNFSNLGIEIGNIQLNLQKMMKNKDKAVTILTKGVEFLFKKNKITHYKGIGSFKSSNIISINDGKSVIEVETENTIICTGSEPIALPNINFDEKTIISSTGALSLNAVPKKMVVVGGGYIGLEMGSVWSRLGTEVHVVEFLDNITPGMDKEISIEFMKILQKQGINFHLQTKVDSIKKNNKEAIVETTGKDGKKNNFNCDVVLVSVGRRPYTENLNLDSVGVILDDKKRIKVDKNFKTSVDNIYAIGDVIKGPMLAH

SEQ ID NO: 102069 - protein, 89 aa, Unknown
  Bacterial polypetide isolated from the Sargasso Sea
MKNEHTTLLIIGGGPGGYVAAIRAGQLGIPTVLVERDRLGGTCLNIGCIPSKALIHVADAFEQACGHAGEGAIGIRVRTPEIDIAKSVA

SEQ ID NO: 102070 - protein, 166 aa, Unknown
  Bacterial polypetide isolated from the Sargasso Sea
CATAVPNVYAIGDVVRGPMLAHKAEDEGVLVAEIIDGQKPHIDYNCIPWVIYTEPEIAWVGKTEQQLKAEGREIKTGQFPFMANGRALGINKADGFVKMIADAKTDELLGVHIISANASDLIAEAVVAMEFKAASEDIGRICHPHPSLSEVMREAALAVDKRPLNM

SEQ ID NO: 102071 - protein, 180 aa, Unknown
  Bacterial polypetide isolated from the Sargasso Sea
MDNNFDVIVIGSGPGGYVCAIRSAQLGLKTACVESQKTLGGTCLNIGCIPSKSLLHSSEIYHKSMKEFGNLGIEFGNIKLNLSKMMSNKNKSIITLTKGIEFLFKKNKVTHLKGKGSISGKNSVTVFDDSGKKNNYKAKNIVIATGSVPSSLPNIKIDEKTVVSSTGALSFNKVPKKLVL

SEQ ID NO: 102072 - protein, 135 aa, Unknown
  Bacterial polypetide isolated from the Sargasso Sea
MSEKFDVTVIGGGPGGYVCAIRLSQLGLKTACIESRGSLGGTCLNVGCIPSKNLLNFSENFNKAKNFEKIGIEIGEVKLNLDKMMKNKEKAVTVLTKGIEFLFKKNKVTYFKGTGSFKGVNEISILDEGKETTVN

SEQ ID NO: 102073 - protein, 104 aa, Unknown
  Bacterial polypetide isolated from the Sargasso Sea
MEDFDLIIIGAGPGGYVASIRAAQLGMKVACIEKETSLGGTCLNIGCIPSKALLNSSEKFVEISNHAAEHGIKTSKVDLDLDILMQRKTKIVKKLTTGIGFLLK

SEQ ID NO: 102074 - protein, 89 aa, Unknown; identical to SEQ ID NO: 102069
  Bacterial polypetide isolated from the Sargasso Sea

SEQ ID NO: 102075 - protein, 279 aa, Unknown
  Bacterial polypetide isolated from the Sargasso Sea
SVIGKLTGGLAGMAKARNVQVVRGVGAFLDPNHLEVQLTDGDGKATTGEKKVIRFAKAIIAAGSEAVKLPFIPEDPRIVDSTGALELREVPAKMLVIGGGIIGLEMATVYSTLGARIDVVEMLDGLMQGADRDLVKVWDKMNKGRFDKVMLKTKTVGVEAKPDGIYVKFEGEAAPAEPQRYDMVLVAVGRAPNGKRIGAEKAGVAVTDRGFIDVDKQQRTNVPHIFAIGDIVGQPMLAHKAVHEGHVAAEAAHGEKAYFDAKQIPSVAYTDPEVAWAGL

SEQ ID NO: 102076 - protein, 62 aa, Unknown
  Bacterial polypetide isolated from the Sargasso Sea
MADYDLIVIGAGPGGYVAAIRAAQLGMKVACIEKEATLGGTCLNIGCIPSKALLNSSEKYIE

SEQ ID NO: 102077 - protein, 191 aa, Unknown
  Bacterial polypetide isolated from the Sargasso Sea
MADFDLIVIGAGPGGYVAAIRASQLGMKVACVEKEKTLGGTCLNIGCIPSKALLNSSEKFAEISKHAEEHGISTGKVSLDLAKLMQRKNKIVKQLTSGIGFLFKKNKITHIQGSASFLDTKTIKVSSSDGEKNYKAKKYIIATGSTSIAIDAIPIDEKKIVTSTGALALESVPKSLLVIGGGYIGLEMGSV

SEQ ID NO: 102078 - protein, 245 aa, Unknown
  Bacterial polypetide isolated from the Sargasso Sea
GADRDLVKPLERMLGKSLEAVYTGTSVTRIEPNEDGLLVHFDGGKAPATSIFDNVLVSVGRKPNGDQIGAEKAGVKVGTNGFIEVDSQQRTNVPNIFAIGDIVGQPMLAHKAVHEGKIAAEVIAGHKVAFDARVIPSVAYTDPEVAWVGMTEREAKERGLAIGKGVFPWAASGRSLSLGRNEGLTKLIFEEKTDRIIGAGIVGPAAGDLIAEVALAIEMGCDAEDLALTIHPHPTLSETVAMGAE

SEQ ID NO: 102079 - protein, 146 aa, Unknown
  Bacterial polypetide isolated from the Sargasso Sea
MTEEFQAVVIGGGPGGYVCAIRLAQLGLKTACIESRGSLGGTCLNVGCIPSKSLLNLSEEFHKVKNLSNKGIEIGAVKLNLDKMMKSKDKAVTVLTKGVEFLFKKNKVTYFKGHGSFKNKNEISILDDQNKTKVIKSEKVIIATGS

SEQ ID NO: 102080 - protein, 168 aa, Unknown
  Bacterial polypetide isolated from the Sargasso Sea
MSEKFQAVVIGGGPGGYVCAIRLAQLGLKTACIESRGSLGGTCLNVGCIPSKSLLNLSEEFHKVKSLANKGIEVGEVKLNLDKMMKSKDKAVTVLTKGVEFLLKKNKVTYFKGQGSFKSKNEILIKDDKNKETIIQTEKTVIATGSVPVSLPGIEIDEKTIVSSTGAL

SEQ ID NO: 102081 - protein, 211 aa, Unknown
  Bacterial polypetide isolated from the Sargasso Sea
METKRCKVLVIGAGPGGYVAAIRSGQLGMDTIIVEGERAGGTCLIRGCIPSKAIIHAAHKFHSLGKHSTEKGHMGITLPSPAELNLANLISWKEDIVDKLNKGVEGLLKAAKVNLVSGWAKFIDAKTCIVSNSNGETRIEAEHVILANGSIPIELPFMPFDENVISSRDALELKELPKHLVVVGGGYIGLELGIAYKLLGSEVTIIEAMDS

SEQ ID NO: 102082 - protein, 37 aa, Unknown
  Bacterial polypetide isolated from the Sargasso Sea
MDKFDVTVIGSGPGGYVAAIRCAQLGMKTAIIERFST

SEQ ID NO: 102083 - protein, 170 aa, Unknown
  Bacterial polypetide isolated from the Sargasso Sea
MEDFDLIVIGAGPGGYVAAIRAAQLGMKVACIEKEPSLGGTCLNIGCIPSKALLNSSEKFVEISNHAAEHGIKTSKIDLDLNVLMDRKTKIVKKLTTGIGFLFKKNKITHIPGMASFVDKNTISITNEKNEITASAKNFIIATGSSSVEIPNIPVDEKQIVSSTGALSLS

SEQ ID NO: 102084 - protein, 68 aa, Unknown
  Bacterial polypetide isolated from the Sargasso Sea
MSEQFDLLVIGGGPGGYVCAIRAAQLGLKTGCIESRGTLGGTCLNVGCIPSKSLLNLSDMYKKAQKDY

SEQ ID NO: 102085 - protein, 285 aa, Unknown
  Bacterial polypetide isolated from the Sargasso Sea
SLSEVPNRLVVVGGGYIGLELGSVWSRLGSEVTVIEYLDRITPGMDNEVSAALQKILAKQGLSFSLNSQVVSVTETGSNVSIAVKNRENNEEENIEADYVLVSTGRKPYIENLFSDGIDIEKTENGFIKTDSHLRTNLDGIWAIGDVVEGPMLAHKAEEEGIAVAELIAGKPGHVNYDIIPSVIYTNPEVASVGMTEEQLKEKSIDYSIGKFPFMANGRAKVNNTTEGFVKILSSTDTDQILGVHIIGDQAGNMIGEAAVAMEFEATSEDLARKCHAHPTLSEAI

SEQ ID NO: 102086 - protein, 156 aa, Unknown
  Bacterial polypetide isolated from the Sargasso Sea
MENNFDVIIIGGGPGGYVCAIRAAQLGLKTACVESRGALGGTCLNVGCIPSKSLLNLSENFHKAKKDFNQQGIEIEGIKLNIEKMMSNKNKSVQVLTKGVEFLFKKNKVTYLKGKGVLLSKNDVVVYDNNKKTNYNSKNIVIATGSEVTSLPGIEI

SEQ ID NO: 102087 - protein, 96 aa, Unknown
  Bacterial polypetide isolated from the Sargasso Sea
MSEKFQAVVIGGGPGGYVCAIRLAQLGLKTACIESRGSLGGTCLNVGCIPSKSLLNLSEEFHKVKSLANKGIEVGEVKLNLDKMMKSKDKAVTVLT

SEQ ID NO: 102088 - protein, 171 aa, Unknown
  Bacterial polypetide isolated from the Sargasso Sea
MNKNNFDVVVIGSGPGGYVCAIRLAQLGFNTGIIEKYNSLGGTCLNVGCIPSKSLLDSSHHYEDIIKNAVSHGIEIKGKVNLNFNKMIDRKNSVVNQTVKGIDFLMNKNKISVFNGKASFIDKNNIKIEGCNDIINFKKCVIATGSKPISLPFIKVDKKRIITSTEALSLK

SEQ ID NO: 102089 - protein, 175 aa, Unknown
  Bacterial polypetide isolated from the Sargasso Sea
MSDKFQAVVIGGGPGGYVCAIRLAQLGLKTACIESRGSLGGTCLNVGCIPSKSLLNLSEEFHKVKNLSNKGIEVGEVKLNLSKMMKSKEKAVTVLTKGVEFLLKKNKVTYYKGVGSFKSKNEISIKDSNNNETLIFSEKIIIATGSVPVALPGISFDERTIVSSTGVLKLDKVPK

SEQ ID NO: 102090 - protein, 195 aa, Unknown
  Bacterial polypetide isolated from the Sargasso Sea
MSEQFDLLVIGGGPGGYVCAIRAAQLGLKTGCIESRGTLGGTCLNVGCIPSKSLLNLSDMYKKAQKDYNNLGIEVGEVKLNLKKIMMNKSKSVQVLTKGVEFLFKKNKVTYIKGKGVLFSKNDVVVYENGKKTSYKSKNIVIATGSSSSSVPGIEINEKNIISSTGAISLEKVPKNLVVIGGGYIGLEMGSVWSR

SEQ ID NO: 102091 - protein, 145 aa, Unknown
  Bacterial polypetide isolated from the Sargasso Sea
MSEKFQAVVIGGGPGGYVCAIRLAQLGLKTACIESRGSLGGTCLNVGCIPSKSLLNLSDEFHKVKSLANKGIEVGEVKLNLNKMMKSKDKAVTVLTKGVEFLLKKNKVAYFKGHGSFKSKNEILIKDDKNKETIIQTEKTVMQQD

SEQ ID NO: 102092 - protein, 292 aa, Unknown
  Bacterial polypetide isolated from the Sargasso Sea
LSKMKEWKNNIIGGLTGGLSGLAQQRGVDVVHGTAKFSSKNEIEVNHEIDSQRISSDQFIIAVGSEPAELSFLPDDSRIIDSTGALEPDQIPKNILIIGGGIIGLEMATIYSALGSEVTIVELTKQLMPGTDPDLVRPLEKILNKKCKKIMKSSQVTSATASDEGISVSFKQDGEESSEMFQNVLVAVGRKSNGSLLGLSEIGVNVDEKGIIGVDKQFRTTVESIFAIGDVIGDPMLAHKASHEGKIAAEVAAGHKSTNDIRCIPSVAYTDPEVAWVGFSEEECKAKGIDYG

SEQ ID NO: 102093 - protein, 272 aa, Unknown
  Bacterial polypetide isolated from the Sargasso Sea
MSEKFQAVVIGGGPGGYVCAIRLAQLGLKTACIESRGTLGGTCLNVGCIPSKSLLNLSEEFHKVKGLAKKGIEIGNVKLNLDKMMKSKDKAVTVLTKGVEFLLKKNKVTYFKGKGSFKSKNEILIKDNQNKETLIKTEKTVIATGSVPASLPGIVIDEQIIVSSTGALKLDKVPKKMVVVGGGYIGLEMGSVWSRLGSEVHVIEFLDHITPGMDKEISSEFMKILKKQGIKFNMQNKVERIKKNNSGAVVLTVDKDGKQNNLECDVVLISVG

SEQ ID NO: 102094 - protein, 229 aa, Unknown
  Bacterial polypetide isolated from the Sargasso Sea
MLEKYQVVVIGGGPGGYVCAIRLSQLGYKTACIDHNDTLGGTCLNVGCIPSKSLLNLSEKFHNAKNLSEKGIEIGEIRLNLEKMMKNKEKAVSTLTKGVEFLLKKNKVFIIKGHASFKDVNKILITDKNKNEKTIETEKTVICSGSEPISLPKVNFDEKRILSSTGALSLKSVPKKMVIIGAGYIGLEMGSVWSRLGSEIHIIEFLDHITTQVWIVKFQKEFLKILQKQ

SEQ ID NO: 102095 - protein, 288 aa, Unknown
  Bacterial polypetide isolated from the Sargasso Sea
KLVEVNDVSGKTVQYKADHIIIAAGSVPINIPPAPLVDDIVVDSTGALEFKKVPPRLGVIGAGVIGLELGSVWARLGSKVTVLEALDEFLPAADKTISKETFKTFKKQGLDIKLGTRVTGSEVTGQGDDRQVNVKFTDSSGTTEMVFDRLIVCVGRRPLSENLLSPDSGVTLDERGFIFVNEQCETEVRDIYAVGDIVRGPMLAHKASEEGVMVAERIAGKKPQINYENIPNVIYTHPEIAWVGKTEQELTAAGIECNIGIFPFSASGRAMAANETTGMVKIIADAKS

SEQ ID NO: 102096 - protein, 96 aa, Unknown
  Bacterial polypetide isolated from the Sargasso Sea
MDNFDLIVIGGGPGGYVCAIRAAQLGLKTACIESRGALGGTCLNVGCIPSKSLLNLSENFHKAKKDFNQQGIEIEGIKLNIEKMMSNKNKSIQVLT

SEQ ID NO: 102097 - protein, 63 aa, Unknown
  Bacterial polypetide isolated from the Sargasso Sea
MSEKFQTVVIGGGPGGYVCAIRLSQLGIKTACIESRGTLGGTCLNVGCIPSKSLLNLSESYSR

SEQ ID NO: 102098 - protein, 226 aa, Unknown
  Bacterial polypetide isolated from the Sargasso Sea
MDNYFDVIVVGAGPGGYVAAIRSAQLGLKTACVESRKTLGGTCLNVGCIPSKSLLNASEMYHKAQKEFKNLGIEVTDLKLNLSRMMANKNKSVLTLTKGVEFLFKKNKISHLKGKGSILNKNTVVVIDEAKKKVTYKAKSIIIATGSTPTSLPGIKIDEKSIVSSTGALMFDKAPKNLIVIGGGYIGLELSSVWKRLGSNVIVIEYLDHIISGIDKDISNEFLKIL

SEQ ID NO: 102099 - protein, 187 aa, Unknown
  Bacterial polypetide isolated from the Sargasso Sea
MLDKFQIVVIGGGPGGYVCAIRLAQLGFKTACIESRNTLGGTCLNVGCIPSKSLLNLSEEFHKVKNLSSKGIEIGEVKLNLSKMMKSKDKAVTVLTKGVEFLFKKNKVTYIRGTGSFKSTNEILIKDDKNKETTIQTEKTIIATGSLPTTLSGIEFDEKIIVSSNRCSKFKPSPKENDCSGWRLYRA

SEQ ID NO: 102100 - protein, 172 aa, Unknown
  Bacterial polypetide isolated from the Sargasso Sea
MSEKFQAVVIGGGPGGYVCAIRLAQLGLKTACIESRGSLGGTCLNVGCIPSKSLLNLSEEFHKVKNLSNKGIEVSEVKLNLPKMMKSKEKAVTVLTKGVEFLLKKNKVTYFRGIGSFKSKKEILIKDNTNKEITIQTEKVIIATGSVPVSLPNIKFDEKSIVSSTGALNLEK

SEQ ID NO: 102101 - protein, 283 aa, Unknown
  Bacterial polypetide isolated from the Sargasso Sea
DLIVIGAGPGGYVAAIRAAQLGMKVACIEKEPSLGGTCLNIGCIPSKALLNSSEKFVEISNHAAEHGIKTSKIDLDLNVLMDRKNKIVKKLTTGIGFLFKKNNITHIPGMASFVDKNTISITNGKNEITASAKNFIIATGSSSIEIPTIPVDEKQIVSSTGALSLSKIPKSLLVIGGGYIGLEMGSVWSRLGSKVTVVEALDRIVPTMDGEIAKEFMKMLTKQGLEFKLSHKVSSAKSGKSGVDVEMETSDKKKIKENFEIVLMSVGRKPNTEGLGLEKLVLN

SEQ ID NO: 102102 - protein, 258 aa, Unknown
  Bacterial polypetide isolated from the Sargasso Sea
MSEKFQAVVIGGGPGGYVCAIRLAQLGLKTACIESRGSLGGTCLNVGCIPSKSLLNLSEEFHKAQHLSNKGIEIGEIKLNLPKMMKNKDKAVTVLTKGVEFLLKKNNVTYFKGIGSFKSKNEISIKDDKKNEISIQTDKVIIATGSVPVSLPGVNFDEKVIVSSTGALEFEKVPKKMIVVGGGYIGLEMGSVWSRLGTEVHVIEFLDHITPGMDKEISKEFMKILKRQKINFHMQHKVEKIEKNNTGVIVSTKDKDGT

SEQ ID NO: 102103 - protein, 65 aa, Unknown
  Bacterial polypetide isolated from the Sargasso Sea
MENNFDVIVIGAGPGGYVCAIKCAQLGLKTACVEVNKTLGGTCLNVGCIPSKSLLNSSEIYHKAS

SEQ ID NO: 102104 - protein, 65 aa, Unknown
  Bacterial polypetide isolated from the Sargasso Sea
MSNNFDLIVIGAGPGGYVCAIRAAQLGLKTACIESRKTLGGTCLNVGCIPSKSLLNASELYHKAQ

SEQ ID NO: 102105 - protein, 298 aa, Unknown
  Bacterial polypetide isolated from the Sargasso Sea
AVIGGGPGGYVCAIRLAQLGLKTACIESRGSLGGTCLNIGCIPSKSLLNLSEEFHKVKNLSNKGIEVGEVKLNLSKMMKSKDKAVTVLTKGVEFLLKKNKVTYFKGHGSFKSKNEINIKDANNKETIISADKIIIATGSVPVSLPGINFDEKIILSSTGALKIEQVPKKMVVVGGGYIGLEMGSVWSRLGADVHVVEFLEHITPGMDREISHEFMKILKKQGMKFHMQHKVEKIKKNNMGAIVSTVDKDGNKTDFDCDVVLISVGRKPNTNGLNIEAAGIELDNKQRIKTDKNFKTNQ

SEQ ID NO: 102106 - protein, 149 aa, Unknown
  Bacterial polypetide isolated from the Sargasso Sea
MSNEIKTQVVVLGAGPGGYSAAFRAADLGLEVTLVEARSTLGGVCLNVGCIPSKALLHVAKVIDDAKEMASHGVTFGAPQIDLDKIRAWKDKVVGQLTNGLAGMSKMRKVKVVTGYGKFTGPNTLVVGDTTITFESAIIAAGSEPVALP

SEQ ID NO: 102107 - protein, 259 aa, Unknown
  Bacterial polypetide isolated from the Sargasso Sea
HGVVFGEPTIDLDKLRSFKQKVISQLTGGLGGMSKMRKVNVVNGFGKFTGPNSLEVTAEDGTVTVVKFDQAIIAAGSRPIKLPFIPHEDPRIWDSTDALELKEVPGKLLVMGGGIIGLEMGTVYSSLGSEIDVVEMFDQVIPAADKDVVRVFTKQIKKKFNLILETKVTAVEAREDGIYVSMEGKSAPTEPVRYDAVLVAIGRTPNGKLIDAEKAGVKIDERGFINVDKQLRTNVPHIYAIGDIVGQPMLAHKGVHEGH

SEQ ID NO: 102108 - protein, 113 aa, Unknown
  Bacterial polypetide isolated from the Sargasso Sea
MEDFDLIVIGAGPGGYVAAIRAAQLGMKVACIEKEPSLGGTCLNIGCIPSKALLNSSEKFVEISNHAAEHGIKTSKIDLDLNVLMDRKTKIVKKLTTGIGFLFKKNKITHIPG

SEQ ID NO: 102109 - protein, 202 aa, Unknown
  Bacterial polypetide isolated from the Sargasso Sea
MDEFDIIVIGGGPGGYVAAIRASQLGKKTACIESRGALGGTCLNIGCIPSKSLLHSSELFKKANSEFKSLGINTGNISIDISKMMQHKKKSVDTLTKGVEFLFKKNKVTYFKGHGSFLDTNSIEIKLNDGTKKSIKGKNIVVATGSSVLSLPNITIDEKVIVSSTGALSLPRIPKKLIVIGGGYIGLEMGSVWSRLGAQVKL

SEQ ID NO: 102110 - protein, 158 aa, Unknown
  Bacterial polypetide isolated from the Sargasso Sea
MSEKFDVTVIGGGPGGYVCAIRLSQLGLKTACIESRGSLGGTCLNVGCIPSKSLLNLSENFHKAKNFEKIGIEIGEIRLNLGKMMKNKEKAVTVLTKGIEFLFKKNKVSYFKGKGSFKSSNEIVVSGDGKETIIETGKAIISTGSEPVSIPGIEFMRK

SEQ ID NO: 102111 - protein, 270 aa, Unknown
  Bacterial polypetide isolated from the Sargasso Sea
MSEKFDAIVIGGGPGGYVCAIRLSQLGLNTACVESRGALGGTCLNVGCIPSKSLLNLSENYQKAKNFGKMGIELGEIKLNLDKMMKNKDKAVSILTKGVEFLFKKNKIKYFKGTGSFKNKNQILVIDNEKKETILETKNIIICTGSEPVSLPNIKFDEDKILSSTGALKISKVPKKMVVVGGGYIGLEMGSVWSRLGSEVQVVEFLDQITPGMDKEVSNEFLKILKKQGIKFNLKTKVEKISKTNSGVSIDVIDNEGKKSKIESSVVLIS

SEQ ID NO: 102112 - protein, 275 aa, Unknown
  Bacterial polypetide isolated from the Sargasso Sea
VIGGGIIGLEMATVYRAMGTKITVVEMLDGLMAGADRDLIKPFHRIVSRQYDNIWLETRVTQVEAQKKGLKVHFEGKNAPEKPVVFEKILSAVGRTPNGLKIGAENAGVSVDEKGFIAADSQMRTNVPNIYAIGDIVGQPMLAHKATHEGKVAAEVICGIKSHFDARAIPSVAYTDPEVAWAGITEEEAKSQGINYGKGIFPWAASGRSLALGRDEGMTKIMFEEDTKKVIGIGIVGPNAGELIAEGMLAIEMGADATDIGSTIHPHPTLSETLG

SEQ ID NO: 102113 - protein, 238 aa, Unknown
  Bacterial polypetide isolated from the Sargasso Sea
SAAFRAADLGLETVIVERFSTLGGVCLNVGCIPSKALLHVAKVIEEAKAVAAHGVVFGEPTIDLDKLRSFKQKVISQLTGGLGGMSKMRKVNVVNGFGKFTGPNSLEVTAQDGTVTVVKFDQAIIAAGSRPIKLPFIPHEDPRIWDSTDALELKEVPGKLLVMGGGIIGLEMGTVYSSLGSEIDVVEMFDQVIPAADKDVVRVFTKQIKKKFNLILETKVTAVEAREDGIYVSMEGKS

SEQ ID NO: 102114 - protein, 140 aa, Unknown
  Bacterial polypetide isolated from the Sargasso Sea
GDPMLAHKASYEGKVAAEVTAGERVSNDARCIPSVAYTDPEVAWVGLSEDECKAKGMNYGKGVFPWSASGRSLAIGRNEGMTKLLFNNSTKKVIGGGIVGPNAGDLISEIALAIEMDCDVNDVALTVHPHPTLSETVAMA

SEQ ID NO: 102115 - protein, 305 aa, Unknown
  Bacterial polypetide isolated from the Sargasso Sea
EVLCVEKRGRSTYSDAGIWNNSHIKQLKKIAAYIRSQGSIPAAQIGHCGPKSSRQRPYDGLQPLKNFHNKEEPGWRIVSCSGIPAAPGYDTPSALSTSGVKSLVKKFGLAAKRCDEAGFDVLDVHAAHGYLIHSFLSPLSNFRTDEYGGSQENRNRFAIEIALEIREFWPANKPLFFRLSCIDRFPGGLEIEDTISLSKALKKAGVDLIDCSSGGIKGPNSLFSLAAKEVPKPGFQVGFSEAIKLNANVATMAVGMISEPQHANDIIEQKKADLIALGREALVNPNWPLYAMRDLSKDKNFNDWP

SEQ ID NO: 102116 - protein, 244 aa, Unknown
  Bacterial polypetide isolated from the Sargasso Sea
MSEKFQAVVIGGGPGGYVCAIRLAQLGLKTACVESRGSLGGTCLNIGCIPSKSLLNLSEEFHKVKSLANKGIEVGEVKLNLDKMMKSKDKAVTVLTKGVEFLLKKNKVTYFKGHGSFKSKNEILIKDDKNKETIIQTEKTVIATGSVPVSLPGIEIDEKTIVSSTGALKLEKVPKKMVVVGGGYIGLEMGSVWSRLGAEVQVVEFLDHITPGMDKEISSEFMKILKKQGMKFNMQNKVETIKKN

SEQ ID NO: 102117 - protein, 277 aa, Unknown
  Bacterial polypetide isolated from the Sargasso Sea
MSDKFQAVVIGGGPGGYVCAIRLAQLGLKTACIESRGSLGGTCLNIGCIPSKSLLNLSEEFHKVKSLANKGIEVGEVKLNLDKMMKSKDKAVTVLTKGVEFLLKKNKVTYFKGHGSFKSKNEILIKDDKNKETIIQTEKTVIATGSVPVSLPGIEIDEKTIVSSTGALKLEKVPQKMVVVGGGYIGLEMGSVWSRLGAEVQVVEFLDHITPGMDKEISSEFMKILKKQGMKFNMQNKVETIKKNAAGVVVSTVDKDGNKNNFECDVVLISVGRKPNT

SEQ ID NO: 102118 - protein, 208 aa, Unknown
  Bacterial polypetide isolated from the Sargasso Sea
MIIAIGRKPNTQDLFNNDLVSIDDKGFIEVDEHCQTKTKNIWAIGDAVRGPMLAHKASEEGIMVAERISGEDSLINYAHIPNVIYTHPEVAWVGRSENELKKLKVDYKSGSFPFAASGRALASGDSIGSVTIHADNQTDQILGIQVFGTSASEIMQQGLIAMDNKVTSEEFSTTIFSHPTVSEALHEATLAMNQKAIHIQNRKKKISI

SEQ ID NO: 102119 - protein, 263 aa, Unknown
  Bacterial polypetide isolated from the Sargasso Sea
EELINSDPTTQKSLEEKTPFPVENINPSKTSATPFSQKVSKADLNCEVLVLGAGPGGYTAAFRAADLGKKVILVERYESLGGVCLNVGCIPSKALLHAAKVIDDAHAMKDHGIDFGNPKIDPIRLSAWKNSVVGKLTNGLKSLAKQRKVECLTGKGTFLDSHHLQIESKSGATTVRFENAIIAAGSEPVKLPFLPDDPRIMDSTGALNLQQIPETMLVIGGGIIGLEMGTVYRSMGTKITVVEMLDGLMDGADRDLVKPFHRH

SEQ ID NO: 102120 - protein, 201 aa, Unknown
  Bacterial polypetide isolated from the Sargasso Sea
MKDYKDKFNIMLETKVTAVEAKDDGLYVTFEGKKAPAEPVRYDKVLVAVGRKPNGKLVGADAAGVNVDDRGFINVDKQMRTNVDHIFAIGDLVGQPMLAHKAVHEGHVAAEVIAGQKHYFDPRAIPSVAYTEPEVAWVGLTEKEAKEQGVSYETATFPWAASGRAIASDATNGMTKMIFEKDTGRVIGGAMVGTNAGEMLG

SEQ ID NO: 102121 - protein, 139 aa, Unknown
  Bacterial polypetide isolated from the Sargasso Sea
MANNYDVAIIGSGPAGYVSAIRCAQLGLKTVCVEKVTQEKEVALGGTCLNVGCIPSKALLESSLVLLNANENLKVHGIKASKISFDLNQMHERKNGIVSTMSKGVAGLFKLNKIDVIQGQAYVADEHTLQIISESDDSN

SEQ ID NO: 102122 - protein, 287 aa, Unknown
  Bacterial polypetide isolated from the Sargasso Sea
NAKEVLETKNIIIATGSSPIQLNNIKLSTHVVDSEGALKFEEVPKTLVIIGAGVIGLELGSVWARLGSEVVILEAQDDFLPMLDKRISRQVLKEFQNQGLDIRLGSNVLKAEEDQEGMKLTYSNGDKETSLRTEKIILAVGRKPNLDNLFDETLLNLNKQGLIDVNEFCQTSVDNVWAIGDVVRGPMLAHKASEEGVMVAERIADNDVRLNYDHVPNVIYTHPEVAWVGLNESQLKEQEIDFKSGSFPFLASGRALASGESAGSVFITADNQTDKILGIQVFGPSAA

SEQ ID NO: 102123 - protein, 178 aa, Unknown
  Bacterial polypetide isolated from the Sargasso Sea
MENNFDVIIIGSGPGGYVCAIRCAQLGLKTACVESRKTLGGTCLNVGCIPSKSLLNLSEAYSKARKEFSKFGIDVGDVKLNLPKMMDNKNKSVITLTKGVEFLFKKNKITHLKGKGSVVSNNTVSVIDDSGKKNNYKTKNIVISTGSITTSLSGIKIDEETIVSSTGALTFSKVPKEL

SEQ ID NO: 102124 - protein, 218 aa, Unknown
  Bacterial polypetide isolated from the Sargasso Sea
MSNYDVLIIGGGPGGYNAAIRAGQLGLRVACIEGRETLGGTCLNVGCMPSKALLHASELYEAATSGELNNLGIEVTPTLNLAQMMKQKDESVTALTKGIEFLFRKNKVEWIKGWGRLNGPGKVTVTLADGSVRELQAKDIVIATGSEPTPLPGVTIDNQRILDSTGALALPQVPKHLVVIGAGVIGLELGSVWRRLGSEVTVVEYLDRICPGLDNETA

SEQ ID NO: 102125 - protein, 301 aa, Unknown
  Bacterial polypetide isolated from the Sargasso Sea
LAQMMKQKAESVTALTKGVEFLFRKNKVDWVKGWGRIDGPGKVEVTAADGSKSSLTAKDIIIATGSEPSPLPGVEVDNKRILDSTGALSIPEVPKHLVVIGAGVIGLELGSVWRRLGAEVTVIEYLDRICPGMDLETAKTFQRALTKQGMSFKLGSKVTQAKVSGKQVTLSVEPAAGGAAESIQADYVLLAIGRRPYTQGLGLESVGLATDKRGMLENHEHRSSVPGIWVIGDVTSGPMLAHKAEDEAIACVELIAGKAGEVNYDVIPSVIYTHPEVATVGKTEEQLKAEGRAYKVGKFPF

SEQ ID NO: 102126 - protein, 160 aa, Unknown
  Bacterial polypetide isolated from the Sargasso Sea
MEKIFDVLVIGGGPGGYVCAIRAAQLGLKVGCIELRGTLGGTCLNVGCIPSKSLLNSSELFSKAKNNFANIGIETSDIKLNLKKMMINKLKSVQVLTKGVEFLFKKNKVTYIKGKGVLLSKNNVVVYNEGKKTSYNTKNIVVATGSSSVSLPGINIDEKN

SEQ ID NO: 102127 - protein, 243 aa, Unknown
  Bacterial polypetide isolated from the Sargasso Sea
MSEKFQAVVIGGGPGGYVCAIRLAQLGIKTACIESRGSLGGTCLNVGCIPSKSLLNLSEEFHKVKNLSKKGIEVGQIKLNLSKMMKSKEKAVTVLTKGVEFLFKKNKVTYFKGTGSFKSKSEISIKDDKNKEITIQTEKVVIATGSVPVSLPNIEFDEKFIVSSTGALNLEKVPKKMVVVGGGYIGLEMGSVWSRLGSEVHVVEFLDHITPGMDKEISKEFIKILKKQGINFHLQHKVEKVEK

SEQ ID NO: 102128 - protein, 50 aa, Unknown
  Bacterial polypetide isolated from the Sargasso Sea
MSEKFQAVVIGGGPGGYVCAIRLSQLGFKTACVESRNTLGGTCLNVGCIP

SEQ ID NO: 102129 - protein, 295 aa, Unknown
  Bacterial polypetide isolated from the Sargasso Sea
MSEKFQAVVIGSGPGGYVCAIRLSQLGIKTACVESRESLGGTCLNIGCIPSKNLLYFSENFHKAKKLTNLGIEVGEVKFNLEKMMKNKEKAVSTLTKGVEFLFKKNKVTHLKGVASFRSKNEISIVNKEKKETIIETDNVIISTGSEPVSLPGTKFDEETIVSSTGALSLKKVPKKMVVIGGGYIGLEMGSVWSRLGSEVHVIEFLDHITPGMDKEISKEFMKILQKQGIKFHMQTKVESIKKNKEGASILTVNKEGKKVNFECNVVLVSVGRKSYTKNLNLDAAGVALDNKKRI

SEQ ID NO: 102130 - protein, 99 aa, Unknown
  Bacterial polypetide isolated from the Sargasso Sea
MSEKFQAVVIGGGPGGYVCAIRLAQLGLKTACIESRGSLGGTCLNVGCIPSKSLLNLSEEFHKVKSLANKGIEVGEVKLNLDKMMKSKDKAVTVLTKGG

SEQ ID NO: 102131 - protein, 273 aa, Unknown
  Bacterial polypetide isolated from the Sargasso Sea
LGLKTACIESRGSLGGTCLNVGCIPSKSLLNLSEEFHKVQNLSNKGIEIGEVKLNLSKMMKSKDKAVTILTKGVEFLLKKNKVTYFKGTGSFKSKNEVLIKDEKNKETIISSEKTIIATGSVPVSLPGIDFDEKVIVSSTGALKLEKVPKKMVVVGGGYIGLEMSSVWSRLGSEVHVIEFLDHITPGMDKEVSHKFMKILKKQGINFHMQHKVESVKTNGSGAIVSTKDKDGNKKDFNTDIVLVSVGRKPNTKNLNLEKIGVELDDKKRIKTN

SEQ ID NO: 102132 - protein, 268 aa, Unknown
  Bacterial polypetide isolated from the Sargasso Sea
MGGTCLNVGCIPSKSLLNLSEEFHKVKSLANKGIEVGEVKLNLNKMMKSKDKAVTVLTKGVEFLLKKNKVTYFKGHGSFKSKNEILIKDDKNKETIIQTDKTVIATGSVPVSLPGIEIDEKIIVSSTGALKLEKVPQKMVVVGGGYIGLEMGSVWSRLGADVQVVEFLDHITPGMDKEISSEFMKILKKQGMKFNMQNKVETIKKNPAGVVVSTVDKDGNKNNFDCDVVLISVGRKPNTDGLNLESVGVNLDERNRIKTDKSFRTNVE

SEQ ID NO: 102133 - protein, 176 aa, Unknown
  Bacterial polypetide isolated from the Sargasso Sea
MSEQFDLLVIGGGPGGYVCAIRAAQLGLKTGCIESRGTLGGTCLNVGCIPSKSLLNLSDMYKKAQKDYNNLGIEVGEVKLNLKKIMMNKSKSVQVLTKGVEFLFKKNKVTYIKGKGVLFSKNDVVVYENGKKTSYKSKNIVIATGSSSTSVPGIEINEKNIISSTGAISLGKVQKV

SEQ ID NO: 102134 - protein, 51 aa, Unknown
  Bacterial polypetide isolated from the Sargasso Sea
MTDKFQAVVIGGGPGGYVCAIRLAQLGLKTACIESRGSLGGTCLNVGCIPF

SEQ ID NO: 102135 - protein, 326 aa, Unknown
  Bacterial polypetide isolated from the Sargasso Sea
QAVVIGGGPGGYVCAIRLAQLGLKTACIESRGSLGGTCLNVGCIPSKSLLNLSEEFHKVKNLSNKGIEVGEVKLNLSKMMKSKDKAVTVLTKGVEFLLKKNKVTYYQGHGSFKSKNEINIKDIDNKEITIKAENIVIATGSVPVSLPGINFDEKIILSSTGALKIEQVPKKMIVVGGGYIGLEMGSVWSRLGAEVHVVEFLDHITPGMDKEISQEFMKILKKQGMKFHMQHKVEKIQKNNKGAIVSTTDKDGNNKDFDCDVVLISVGRKPNTNGLNIETAGIELDDKQRIKTDKNFRTNQNNIYAIGDVIVGPMLAHKAEDEGIAV

SEQ ID NO: 102136 - protein, 156 aa, Unknown
  Bacterial polypetide isolated from the Sargasso Sea
MEQFDLIVIGSGPGGYVCAIRAAQLGLKVCCVEKRQTLGGTCLNIGCIPSKSLLHASQIYYDTKNYADIGINIDNVKLDLSKMMSSKDKSVEGLTDGIQFLFKKNKVSHIQGFGKITGKNEVTILNDDGDQIINGKNIVIATGSEVAVPDNVVIDE

SEQ ID NO: 102137 - protein, 69 aa, Unknown
  Bacterial polypetide isolated from the Sargasso Sea
MESNFDLVVIGGGPGGYVCAIRAAQLGLKTACIESRGALGGTCLNVGCIPSKSLLNLSENFNKAKKDFN

SEQ ID NO: 102138 - protein, 183 aa, Unknown
  Bacterial polypetide isolated from the Sargasso Sea
DEKGFIAADSQMRTNVSHIYAIGDIVGQPMLAHKATHEGKVAAEVICGMKSHFDARAIPSVAYTDPEVAWAGITEGEAKSQGMNYGKGIFPWAASGRSLALGRDEGMTKIMFEEDTKKVIGIGIVGPNAGELIAEGMLAIEMGADATDIGSTIHPHPTLSETLGLAAEAYEGTITDLYLPKRK

SEQ ID NO: 102139 - protein, 51 aa, Unknown
  Bacterial polypetide isolated from the Sargasso Sea
MSEKFQAVVIGGGPGGYVCAIRLAQLGLKTACIESRGSLGGTCLNVGCIPS

SEQ ID NO: 102140 - protein, 59 aa, Unknown
  Bacterial polypetide isolated from the Sargasso Sea
MLSDSFDIIIIGGGPGGYVASIRAAQLGFKVACIEKKQTLGGTCLNEGCIPSKALLNSS

SEQ ID NO: 102141 - protein, 242 aa, Unknown
  Bacterial polypetide isolated from the Sargasso Sea
GLDIHLGSKLTSAKDNGKCVEISYESKGEELKASFDKLIVAVGRKPNTADISDESFPIELDELGRVQVDDFCKTNYENIYAVGDIVRGPMLAHKGSEEGVMVAERIAGKKARMNYDLVPNVIYTHPEVAWVGKTQQELEDHGVEFKIGSFPFAASGRALAAADSVGSVKVLADKKDDTILGVHVFGPSAADIVQQAVIAMEFGSSAEDIGLTVFSHPTVSEAFHEAALAVNNSAIHIGNKRK

SEQ ID NO: 102142 - protein, 423 aa, Unknown
  Bacterial polypetide isolated from the Sargasso Sea
MDNNFDVVVIGGGPGGYVCAIRLSQLGLKTACIESRGSLGGTCLNVGCIPSKNLLNLSENFYRAKNFHKIGIEIDNLKLNLNKMMENKNNSVETLTKGVAFLLKKNKVSYFKGTGSFKSKNEISLIDDKKKETIIKTKSTVISSGSKPTQFPGSKFDEKLILSSTGVLNLESVPKKLIIVGGGYIGLEMGSVWSRLGSEVHVIEFMDHITSGMDREISNEFMKILAKQGIKFSLETKVNKILKLSNSVKLETTNKDGKNNILEADKVLISIGRKPNTESLQLDKIGVKLDKKGSISVQNNYETSVKNIFAIGDVISGPMLAHKAEEEGIAVAEIIAGQSGHVNYDIIPSVIYTSPEVASVGKTEEDLVSKGQSYKVGKFPFMANSRAKAINDTEGFVKILADSKTDKVLGVHIIGPHAGEIIC

SEQ ID NO: 102143 - protein, 179 aa, Unknown
  Bacterial polypetide isolated from the Sargasso Sea
MTDVIVIGSGPAGYVAAIRCAQLGLETICIEKESSSDGKEVLGGTCLNVGCIPSKALLDSSHKFYATKNNYQEHGISVTNLKLDLPKMMERKEGIVNKLTSGIQGLFKLNKVNSIQGTAKVVSANQVEVTNGDNKEIIEGANIIIASGSRPIEIPSAKWDQNIVDSTGALEFDSVPKKL

SEQ ID NO: 102144 - protein, 424 aa, Unknown
  Bacterial polypetide isolated from the Sargasso Sea
MIEKFDSVVIGGGPGGYVCAIRLAQLGQKTACIEARGALGGTCLNIGCIPSKSLLNLSENFKKAKNFSKLGIETGDVKLNLDKMMKNKEKAVSILTKGVEFLFKKNKVTYLKGFGSFISDKKISVKGEDGKKKEIEAKNIIIATGSEAMPMPNVEFDEKTIVSSTGALSLKEVPKSLVVVGGGYIGLEMGSVWSRLGAEVNVIEFLDHITPGMDREISEEFMKILKKQNIKFHLNRKVTSIKKTNNGVQISTSDKNGDSKDFNCDVALISIGRKPFTSNLNLSSAGVKSDEKGRIKIDKKFQTSAKNIYAIGDVIDGPMLAHKAEEEGIAVAEIIAGQSGHVNYDLIPGVIYTTPEVASIGLTEEQLKEKNKSYKIGKFPFMANSRAKAIDEPEGFVKILADKDTDKVLGVHMIGPHVGEMIAE

SEQ ID NO: 102145 - protein, 183 aa, Unknown
  Bacterial polypetide isolated from the Sargasso Sea
MSDFDIAIIGSGPGGYVCAIRAAQLGLSVCCVEKSETLGGTCLNVGCIPSKSLLHTSYLFKQTKDLNKIGITVSDVQIDIKKMINSKNESVVGLTDGIKYLFKKNKIIHKKGFGRIINSNEIEILSDNNSETIKAKNIVIATGSEVSTPKDILLDEIDILSSTGALNLSEVPGELIIIGAGYI

SEQ ID NO: 102146 - protein, 382 aa, Unknown
  Bacterial polypetide isolated from the Sargasso Sea
RKDDIVGKLTGGISGLFSANKVESMIGRGKIIDINTVEVTKPDGSTETIDAKNIIVATGSKPIEIPSAKFSKHILDSTGALCLNSVPKKLGVVGAGIIGLELGSVWSRLGSEVTVIEALDEFLPMTDHDISKETLKEFKKQGLDIKLGSKVTSTKELKNSVKVKFESNDQENEMEFDKLIVAVGRAPNSSNVISDELNIEIEDGFIKVNDFCQTSVNNIWAIGDVVRGPMLAHKGSEEGIMVAERIAEKHTEVNYDLVPSVIYTHPEIAWVGQNEKELKDNNIDYKVGKFPFAASGRALAVDQSVGFVKVLSHAKTDTILGVHVFGPAAAEIVQQALISMEFGSSSEDIALTMFSHPTVSEAFHEAALSANNLAIHIGNKKK

SEQ ID NO: 102147 - protein, 300 aa, Unknown
  Bacterial polypetide isolated from the Sargasso Sea
MKDIFVPNIGDFDEVEIIEIHVSLGEKVEIEQSLITLESDKATMDIPSPNAGIVKEINIVQGQNISQGDLILKLEIKETTTKNKLEEKPKQKEENINKNTKKGLDAEVVVLGAGPGGYTAAFRAADLGLKTILIERYPSLGGVCLNVGCIPSKALLHVSKVISEIEELKEQGVELGSNNPDAKSVRHWTESIINKLTSGLKSMAKKRNVQVIEGDGRFSSPNTIEINNNGETKTITFNSAIIAAGSQASKLPFLPEDPRIMDSTDALLLKDIPDRMLVIGGGIIGLEMATVYASMGTKIT

SEQ ID NO: 102148 - protein, 304 aa, Unknown
  Bacterial polypetide isolated from the Sargasso Sea
MSEKFQAVVIGGGPGGYVCAIRLAQLGLKTACIESRGSLGGTCLNVGCIPSKSLLNLSEEFHKVQNLSNKGIEVGEVRLNLEKMMKSKDKAVTILTKGVEFLLKKNKVTYYKGTGSFKSQNEIIIKDDQNKETIIEAEKTVIATGSVPVSLPGIEIDEKVIVSSTGALKLDKVPKKMVVVGGGYIGLEMGSVWSRLGSEVQVVEFLDHITPGMDKEISLEFMKILKKQGIKFNMQNKVEAIKNNKSGAVVSTVDKDGNKNNFDCDVVLISVGRKANTNGLNLEAAGVKLDERKRIKTDNTFKTN

SEQ ID NO: 102149 - protein, 466 aa, Unknown
  Bacterial polypetide isolated from the Sargasso Sea
MNNFDLVVIGGGPGGYVCAIRAAQLGLKTACVESRGALGGTCLNVGCIPSKSLLNLSENFHKAKKDFNQQGIEIEGIKLNIEKMMSNKNKSIQVLTKGVEFLFKKNNVTYIKGKGVLFSKNDIVVYDNNKKNNFKAKNIVIATGSEVASLPGIDIDEKNIISSTGALSLKQVPKKLAIIGGGYIGLEMGSVWSRLGSKVTVFEYLEYITPGMDREISNEFKKILTKQGINFKMGSKVSSVKNIGDIVSINYTDIKNSKNEKDEFDKVLVSVGRKPYTEGLNLTKLGVKKDNKGRIEVNDKLQTSVKNIYAIGDVIKGPMLAHKAEEEGIAVAEILAGQAGHVNYDVIPGVIYTSPEVATVGKTEEQLKEENRSYKVGKFPFLANSRAKVNNETDGFVKILADSKTDKVLGVHIIGPHCGNMIAEMALAMEFGASAEDIARTCHAHPTHTEAIKEAALAVDKRPIHF

SEQ ID NO: 102150 - protein, 321 aa, Unknown
  Bacterial polypetide isolated from the Sargasso Sea
MGGTCLNIGCIPSKSLLNMSESFHKAKNFSNIGIETGKIKLNLEKMMSNKESSVATLTKGVEFLFKKNKVTYIKGVGSFNEKNEILVKNDKSEIKIKTDKTIISTGSEPLSLPGIDFDEKKILSSTGALNISKLPKKMVVVGGGYIGLEMGSVWSRLGTEVHVVEYLDHITPGLDKEISNEFMKILKKQNIKFELNTKVEKITKNDKGVVIETTNKDSKNNIEADVVLISVGRKPYTDKLNLEKIGVNLDKKGKIKVNKNFETNVKNVYAIGDVIDGPMLAHKAEEEGIAVAELIAGQSGHVNYDIIPGVIYTSPEVAYVR

SEQ ID NO: 102151 - protein, 191 aa, Unknown
  Bacterial polypetide isolated from the Sargasso Sea
MSQKFDSVVIGGGPGGYVCAIRLAQLGQKIACVESRGSLGGTCLNVGCIPSKNLLNLSENYHKAKNFEKIGIEVGSLKLNLPKMMKNKEKAVTVLTKGIEFLFKKNKVTYFKGTGSIIGSNQISIKSADNKNESIEAKNIIIATGSDAVSLPGIEFDEEKIVSSTGALSLKEVPKKLVIVGGGYIGLEMGS

SEQ ID NO: 102152 - protein, 261 aa, Unknown
  Bacterial polypetide isolated from the Sargasso Sea
MSEKFNVVVIGGGPGGYVCAIRLAQLGFKTACVESRGSLGGTCLNVGCIPSKNLLNLSENFHKAKNFSNLGIETGKLKLNIEKMMKNKDKAVTVLTKGVEFLFKKNKVTYFKGTGSFKSPNQISIIDDKKKETILEAEKIIISTGSEPVSLPNVKFDEKIILSSTGALSLNSVPKKMIVVGGGYIGLEMGSVWSRLGSEVHVIEFLDHITPGMDKEVSKEFMKILTKQGISFHMQTKVESIKNNKTSAKVFLTDKDEKKKS

SEQ ID NO: 102153 - protein, 465 aa, Unknown
  Bacterial polypetide isolated from the Sargasso Sea
MSEKFDVTVIGGGPGGYVCAIRLSQLGLKTACIEFRGSLGGTCLNVGCIPSKNLLNFSENFHKAKNFTNIGIEVGEVKLNLSKMMKNKDKAVADLTKGIEFLFKKNKVTYFKGKGSFKSSNEISILADNKETVIQTDKTIISTGSEPVSLPGIDFDEEKILSSTGALSISKLPKKMIIVGGGYIGLEMGSVWSRLGTQVEVVEYLDHITPGMDKEISKEFEKILKKQGIKFHLNTKVEKINKNKNGVSINTLDKSNKKNTIEADVVLISVGRRPFTKYLNLEKIGVQTDKKGMVKVNKSFETNIKNIYAIGDVIDGPMLAHKAEEEGIAVAEIIAGQSGHVNYDVIPGVIYTTPEVAYVGKTEEQLKVNKTNYKVGKFPFLANSRAKAINEPEGFVKILADTKTDKVLGVHIIGPHAGEMIAEMSVAMEFGASSEDIARTCHAHPTFSEAIKEAALSVDKRQIHS

SEQ ID NO: 102154 - protein, 236 aa, Unknown
  Bacterial polypetide isolated from the Sargasso Sea
MADFDLIVIGAGPGGYVAAIRASQLGMKIACVEKEKTLGGTCLNIGCIPSKALLNSSEKFAEISKHAEEHGISTGKVSIDLAKLMQRKNKIVKQLTSGIGFLFKKNKITHIQGAASFLDTKTIKVSSSDRDKNYSAKNYIIATGSTSIAIDAIPIDEKQIVTSTGALALESVPKSLLVIGGGYIGLEMGSVWNRLGSKVTVVEALDRIVPTMDEEIATEFMKSLKKQGLEFKLLTK

SEQ ID NO: 102155 - protein, 465 aa, Unknown
  Bacterial polypetide isolated from the Sargasso Sea
MSEKFQAVVIGGGPGGYVCAIRLSQLGIKTACIDARGALGGTCLNIGCIPSKSLLNLSENFEKTKNFPNLGIEVGQVKLNLDRIMKNKNKAVDTLTKGVEFLFKKNKVSYYKGTASFKTAKKISIKDEKKEIIIETEKTIISTGSEPISLPGAEFDEKKILSSTGALSLEKVPKKMLVVGGGYIGLEMGSVWLRFGSEVHVIESLDHITPGMDREISKEFMKILTKQGMKFHLQTKLESIKKNDSGVIVTSSSKDGKKIDFNCDAVLISIGRKPNTKNLNLEKINIILDDKKCIKTNKNFETSVKNIYAIGDVISGPMLAHKAEEEGIAVAELIAGQSGHVNYDVIPGVIYTSPEVASVGKTEEQLKELNKKYKIGKFPFLANSRAKAIDVPEGFVKILADDKTDKILGAHMIGPHAGEMIAEIGIAMEFGASAEDIARTCHAHPTFSEAVKEAALSVDKRAIHS

SEQ ID NO: 102156 - protein, 466 aa, Unknown
  Bacterial polypetide isolated from the Sargasso Sea
MADKFDVTVIGGGPAGYVCAIRLSQLGFKTACIESRGALGGTCLNVGCIPSKSLLNLSENFQKAKNFQKVGIEIEGLKLNLDKMMKSKQKSVTVLTKGVEFLFKKNKITYFKGLGILKSKNLISILDEKNKQTSIESKNIILCTGSEPTSLPGIKFDEDKIVSSTGALSLSKVPPKMVVVGGGYIGLEMGSVWARLGSEVHVIEYLDHITPGMDKEISNEFMKILIKQGIKFSLQTKVNSIKKTNNSVIVNAEDLKKGKKSYECDVVLISVGRKPYTKNLNLEGLGIEKDKKGTIKVNNKFQTNISNIYAIGDLISGPMLAHKAEEEGIAVAEIIAGQSGHVNYDVIPSVIYTFPEVASIGKTEEQLKEKNSEYKIGKFPFMANSRAKAIDQPEGFVKILADSKTDKVLGVHIIGPHAGEMIAEMAIAMEFGASSEDIARTCHAHPTFSEAIKEAALSVDKRTIHS

SEQ ID NO: 102157 - protein, 376 aa, Unknown
  Bacterial polypetide isolated from the Sargasso Sea
MLEKFDATVIGGGPAGYVCAIRLSQLGLKTACIESRGSLGGTCLNVGCIPSKSLLNLSENFHKAKNFEKIGIEVGEVKLNLDKMMKNKEKAVTVLTKGIEFLFKKNKITYFKGKGSLKSANAISIISNGKETTIETEKTIISTGSEPISIPGMEFDEEKILSSTGALSISKLPKKMVVVGGGYIGLEMGSVWSRLGTDVEVIEFLDHITPGMDREISNEFMKILKKQGIKFQLNTKVEKIIKTQNGVTIETKDKENKKNKIEANVVLISVGRKPNTYGLNLENIGVHMDEKGRIKVNKNFETNVKNIYAIGDVIEGPMLAHKAEEEGIAVAELIAGQSGHVNYNVIPGVIYTSPEVASIGKTEEQLKNNNTNYKVG

SEQ ID NO: 102158 - protein, 466 aa, Unknown
  Bacterial polypetide isolated from the Sargasso Sea
MAEKFQATIIGGGPGGYVCAIRLAQLGIKTACIESRGTLGGTCLNIGCIPSKNLLNLSENFHKAKNFSKIGIEVGEVKLNLQKMMENKDKAVTTLTKGVEFLFKKNKVTYFKGIGKLKSPTEITIVDKENKETNIQSDNIIISTGSEPMPLPGIEFDEEKIISSTGALSLKSVPKKMLVVGGGYIGLEMGSVWSRLGSEVHVVEFLDHITPGMDKEISNEFMKILKKQGLNFHLETKVEKISKSKNGVIIETSDKKGKKIKFESDVVLISVGRKPYTKNLNLEKVGIELDEKKRIKVSKNYQTNIKNIYAIGDVIEGPMLAHKAEEEGIAVAELISGQSGHVNYEVIPGVIYTTPEVASVGKTEEQLKEKNQKYKIGKFPFMANSRAKAIDEPDGFVKILADATTDKVLGVHLIGPHAGELIAEMAIAMEFGASSEDIARTCHAHPTFSEAVKEAALSVEKRQIHS

SEQ ID NO: 102159 - protein, 466 aa, Unknown
  Bacterial polypetide isolated from the Sargasso Sea
MADKFQAVVIGGGPGGYVCAIRLAQLGFKTACIESRGSLGGTCLNIGCIPSKSLLNLSESFHKAKNFSKIGIEVGEIKLNLQKMMENKDKAVSVLTKGVEFLFKKNKVTYFKGIGKLKSNKEINIIGLDNSQTTIESDNIIISTGSEPVSIPGVEIDEKIIVSSTGALSLKTVPKKMVVVGGGYIGLEMGSVWSRLGSEVHVVEFLDHITPGMDKEISSEFMKILKKQGLKFHLNTKVEKIVKNNNGVRIDTIDKTGKKEELDSDVVLIAVGRKAFTKHLNLEKLGIELDEKKRINVNKKFQTNIENIYAIGDVIQGPMLAHKAEEEGIAVAELIAGQSGHVNYNVIPGVIYTTPEVAAIGDTEEQLIEKNLKYKVGKFPFMANSRAKAIDEPEGFVKILADSTTDKVLGVHLIGPHAGELIAEMAIAMEFGASSEDIARTCHAHPTFSEAVKEAALSVDKRQIHS

SEQ ID NO: 102160 - protein, 262 aa, Unknown
  Bacterial polypetide isolated from the Sargasso Sea
MFDVVVIGSGPAGYVAAIKASQLGLKTLCIEESIDKKGKVNLGGTCLNVGCIPSKALLDSSHRYYEAHKNLSEHGIKIEKLGLDLSSMMKRKDDIVNKLTGGISGLFSANKVKSLSGRGKVISPNTIEVTKADGSIENIEAKNIIIATGSKPIEIPSAKFSKNIVDSTGALSFDKVPKTLGVVGAGIIGLELGSVWSRLGSEVTVIEALDDFLPIADKDISKESLKEFKKQGLDIQLGSKVTKSSQEKDCVTVTYENQGKEI

SEQ ID NO: 102161 - protein, 467 aa, Unknown
  Bacterial polypetide isolated from the Sargasso Sea
MSNKFQAVVIGGGPAGYVCAIRLSQLGIKTACVEAKNTLGGTCLNIGCIPSKSLLNLSEYFLKAKKLSSLGIEVGEIKLNLDKMMKNKDKAVTILTRGVEFLFKKNNITHFKGIASFKTSNKILITDTQNKKETSIEAEKFIICTGSEPISLPGINFDEKIIVSSTGALSLNSVPKKMLVVGGGYIGLEMGSVWSRLGSEVHVIEFLDHITPGMDREVSKEFMKILQKQGMKFHLETKVEKIKKKNNSAIVSTSNREGKKIDFECDAVLVSIGRRPNTKNLNLEKLGIKTNKNMRIIVNKNFQTTVKNIYAIGDVIDGPMLAHKAEEEGIATAELIAGQSGHVNYDVIPGVVYTSPEVASIGKTEEQLKENNIKYKVGKFSFMANSRAKAINEAEGFVKMLSDYETDKVLGVHIIGSHAGEMIAEAGVAMEFGASSEDIARTCHAHPTFSEAIKEAALSVDKRAIHS

SEQ ID NO: 102162 - protein, 463 aa, Unknown
  Bacterial polypetide isolated from the Sargasso Sea
MEEFDITVIGSGPAGYVCAIRAAQLGYNVCCIEKGQTLGGTCLNIGCIPSKSLLHSSHLFDQASDLKKLGINFDNVSFDLSKIMEKKSESVESLTKGVEFLFKKNKINRKSGFAKLKNINEIEILSGEKSETIKSAKIIIATGSEVSSPDGVVIDEKDILSSTGALSLQSVPNHLVVIGAGYIGLEMGSVWSRLGSKVTVIEYADRILPGMDTEVSSSFQKILIKQGFDFKLSTALRSVSKEGDSLAVSVENKGQTMDIDCDKVLISTGRRPYTFGLNLEELGVKLNDKGFIITDNHFKTSIDNIYAVGDCKLGPMLAHKASEEGTAVAEIIDGQAGHVNYSAIPSVIYTAPEVASVGKTEDELKAAGITYKVGKFPFTANAKAKVMNDTGGFVKILSDNKTDEVLGVHIIGADAGNMIGELTVAMEFGASAEDIARTCHAHPTLTESIKEAALNVENQAIHI

SEQ ID NO: 102163 - protein, 577 aa, Unknown
  Bacterial polypetide isolated from the Sargasso Sea
MAEIRIPDLGDFEEVEVVEVHVKEGDSIKEGDPILTLETEKAAMDVQSNVSGVIEKVSVSLGEKVSNGDLVSTVSSESETDQKHESIEKEEELNKKIEFTDSVNTPMGSEHDYHLIVVGAGPGGYAAAFRASDLGLKVALVDKNSDLGGVCLNVGCIPSKAFLHAAKILDDSKDAAVSGIKFNEPEIDLSKMKGWKNKIIGGLTNGLEGLAKQRNVDVIQGTATFSSRNEITIKHRGESQTISSEQFIIAVGSEPAELNFMPDDPRIMDSTGALEPSEIPSNILIIGGGIIGLEMATIYSALGSEVTIVELTKDLMPGTDRDLVRPLEKVLKKKCNKIMKSTQVISAEATDDGINISFKQDEEEFSEVFQNVLVAVGRKSNGNLLGLNEIGVNIDDQGIIKVDQQFKTSVESILAIGDVIGDPMLAHKASYEGKVAAEVTAGERVSNDARCIPSVAYTDPEVAWVGLSEDECKAKGMNYGKGVFPWSASGRSLAIGRNEGMTKLLFNNSTKKVIGGGIVGPNAGDLISEIALAIEMDCDVNDVALTVHPHPTLSETVAMAAEVFEGTITDLYLKSSK

SEQ ID NO: 102164 - protein, 199 aa, Unknown
  Bacterial polypetide isolated from the Sargasso Sea
MEYDVIVIGGGPGGYVAAIKASQLGLKTACIEFDEDDQGKQKLGGTCLNVGCIPSKSLLDSSYKYHQISESFDEHGIKVSKPNYDLKKMMERKNDIVKKLTGGVSHLFSHNKVEAIHGKGKLLNQNEVEVTDLKGKKKKYKGKNIVLATGSRPINIPSVPWNGTTVVGSAGALEFTETPKKLGIIGAGVIGLELGSVWS

SEQ ID NO: 102165 - protein, 143 aa, Unknown
  Bacterial polypetide isolated from the Sargasso Sea
MLEKFDVTVIGGGPGGYVCAIRLSQLGLKTACIESRGSLGGTCLNVGCIPSKNLLNFSENFHKAKNFEKIGIEVGEVKLNLDKMMKNKENAVTVLTKGIEFLFKKNKVTYFKGKGSFKSTNEISILAEGKETTIQTDKTIIST

SEQ ID NO: 102166 - protein, 80 aa, Unknown
  Bacterial polypetide isolated from the Sargasso Sea
MYDVVVIGSGPGGYVAAIRSSQLGLKTACIEKESDTESKSQLGGTCLNKGCIPSKSLLDSSQEYIEARNKLSGHGIKIDE

SEQ ID NO: 102167 - protein, 109 aa, Unknown
  Bacterial polypetide isolated from the Sargasso Sea
AAQLGLRVICVDKRGSHGGTCLNVGCIPSKALLHASELFIEKTKFSSMGIEADNISLNLESMMSYKDEGVQGNVKGIDFLFKKNKIEAVYGEAKIIDANKISITLDDGQ

SEQ ID NO: 102168 - protein, 427 aa, Unknown
  Bacterial polypetide isolated from the Sargasso Sea
EAQRGYVCAIRLSQLGLKTACIESRKTLGGTCLNVGCIPSKSLLNLSENFSKAKNFQKLGIEIEGLKLNLDKMMLSKEKAVTNLTKGVEFLFKKNKIKYFQGTGSLKSKNSISIFDEKNNETLIESKNIILCTGSEPLSLPGIKFDEEKIVSSTGALSLKKVPKKLVIVGGGYIGLEMGSVWSRLGSEVQVIEYLDHITPGMDKEISMEFMKILSKQGIKFNLKTKVKSIKKTKKNLIIETSDSNGKLDNIECDVVLVSVGRKPFTNKLNIENLGIEIDKKGRIKVNNKFQTSISNIYAIGDVIDGPMLAHKAEEEGIAVAEIIAGQSGHVNYEVIPGVIYTFPEVASVGKTEEQLKNDNINYKIGKFPFIANSRAKAIDQQEGFVKILADSKTDKVLGVHIIGPHAGEMIAEMSVAMEFGASSEDI

SEQ ID NO: 102169 - protein, 74 aa, Unknown
  Bacterial polypetide isolated from the Sargasso Sea
MFDVVVIGSGPAGYVSAIRASQLGLKTLCVEQSVDEKGKANLGGTCLNVGCIPSKALLDSSQRYYEANKNLGDH

SEQ ID NO: 102170 - protein, 262 aa, Unknown
  Bacterial polypetide isolated from the Sargasso Sea
MSDKFQAVVIGGGPGGYVCAIRLAQLGFKTACIESRGSLGGTCLNVGCIPSKSLLNLSEEFHKLKHLGNKGIEIGEVKLNLSKMMKSKDKAVTILTKGVEFLLKKNKVVYFKGVGSFKSKNEILIKDDQNKESLIQAEKVIIATGSVPVSLPGINFDEKVIVSSTGALKLNQVPKKMIVVGGGYIGLEMGSVWSRLGADVNVVEFLDHITPGMDKEISNEFMKILKKQGIHFHMKHKVETIKKNNSGVIVKTDRQPMEIKKI

SEQ ID NO: 102171 - protein, 303 aa, Unknown
  Bacterial polypetide isolated from the Sargasso Sea
MSEQFDLLVIGGGPGGYVCAIRAAQLGLQTGCIESRGTLGGTCLNVGCIPSKSLLNLSDMYKKAQKDYNNLGIEVGEVKLNLKKIMMNKSKSVQVLTKGVEFLFKKNKVTYIKGKGVLFSKNDVVVYENGKKTSYKSKNIVIATGSSSSSVPGIEINEKNIISSTGAISLEKVPKSMVVIGGGYIGLEMGSVWSRLGSDVTVIEYLDHITPGMDREVSKEFQKILTKQGIKFLLNNKVTNVKDENNKVIVEFEDKNTKNKNKIECEKVLVSVGRKPYTEGLNLSKIGINKDKKGRIDVDKEFR

SEQ ID NO: 102172 - protein, 414 aa, Unknown
  Bacterial polypetide isolated from the Sargasso Sea
EVIDILIQSGDRIQEEDPLITLESDKASMDVPSPFSGTISSIHLKVGDKVSEGNLILELDEELINSEPTTQKSLEKKTPPYEENINPSKNTATPSSRQVSKSDLNCEILVLGAGPGGYTAAFRAADLGKKVILVERYESLGGVCLNVGCIPSKALLHAAKVIDDAHAMKDHGIDFGTPKIDPIRLSAWKNSVVGKLTNGLKSLAKQRKVECLTGKGTFLDSHHLQIESKSGTTTVRFENAIIAAGSEPVKLPFLQDDPRIIDSTGALNLQEIPETMLVIGGGIIGLEMATVYRSMGTKITVVEMLDGLMTGADRDLVKPFHRNVSRQYDNIWLETRVTQVEAQKKGLKVHFEGKNAPEKPVVFEKILSAVGRTPNGLKISAENAGVSVDEKGFIKVDSQMRTKCIEYLCHRRYR

SEQ ID NO: 102173 - protein, 466 aa, Unknown
  Bacterial polypetide isolated from the Sargasso Sea
MDNFDLIVIGGGPGGYVCAIRAAQLGLKTACIESRGTLGGTCLNVGCIPSKSLLNLSENFHKAKKDFNHQGIEIEGIKLNIEKMMSNKNKSVQVLTKGVEFLFKKNKVTYIKGKGVLFSKNDIVVYDNNKKTNYKAKNIVIATGSSVASLPGIEIDEKNIISSTGALSLKSVPKKLAVIGGGYIGLEMGSVWSRLGAEVTVLEYLDYITPGMDREISNEFKKILSKQGIIFKMGSKVNKVNSSGSTVIINYTDLKSSKDETLEFDKVLVSVGRKPYTEGLNLTKIGVKKDEKGRIEVNAKLQTSIKNIYAIGDVIKGPMLAHKAEEEGIAVAEILAGQAGHVNYDVIPGVIYTSPEVATVGKTEEQLKEEKKSYKVGKFPFLANSRAKVNNETEGFVKILADSKTDKVLGVHIIGPHCGDMIAEMALAMEFGASAEDIARTCHAHPTHTEAIKEAALAVDKRPIHF

SEQ ID NO: 102174 - protein, 416 aa, Unknown
  Bacterial polypetide isolated from the Sargasso Sea
MFDVVVIGSGPAGYVAAIRASQLGLKTLCIEELSNDKGKPNFGGTCLNVGCIPSKSLLDSSHRYYEAKKNLSDHGIQLGDVKLDLKTMMERKDNIVSKLTGGIDGLFLTNKVESICGKGKVISKNTVQIDKADGSSEKVDAKNIIIATGSSPIEIPAASFGKHIVDSTGALAFGSVPKRLGVVGAGIIGLELGSVWSRLGSEVTVIEALEDFLPMTDTDISKESLREFKKQGLDIQLASKVTSTKELKNSVKVKYEHKGKEIEVEFDKLIVAVGRKPNSDKVLPKNLGIKIENGFIQVNEYCQTSVENIWAVGDVVRGPMLAHKGSEEGIMVAERIANKQAEVNYDLVPNVIYSHPEIAWVGKNENELKSSGIKYKVGKFPFAASGRALAVDQSVGFVKVISDEKTDSILGVHVFG

SEQ ID NO: 102175 - protein, 203 aa, Unknown
  Bacterial polypetide isolated from the Sargasso Sea
MSDKFQAVVIGGGPGGYVCAIRLAQLGLKTACIESRGSLGGTCLNVGCIPSKSLLNLSEEFHKVKHLSNKGIDVGEIKLNLSKMMKNKEKAVTVLTKGVEFLLKKNKVTYFKGTGSFKSKNEISIKDDKKKETMIQADKVIIATGSLPVSLPGIEFDEKVIVSSTGALELEGVPKKMIVVGGGYIGLEMGSVWSRLEQKFMLL

SEQ ID NO: 102176 - protein, 434 aa, Unknown
  Bacterial polypetide isolated from the Sargasso Sea
MKKKLHLGGTCLNIGCIPSKALLNSSEKFVEISSHVAEHGIKTSKVDLDLDVLMQRKTKIVKKLTTGIGFLFKKNKITHIPGSASFVDSKTVSIESGKQEITASAKNFIIATGSSSIEIPNIPVDEKQILSSTGALSLTKVPKSLLVIGGGYIGLEMGSVWSRLGSKVTVVEALDRIVPTMDGEIAREFMKMLQKQGLEFKLSHKVSSAKSSKLGVDVEIETSDKKVIKENYEVVLMSVGRKPNIEGLGLEKIGVKLTDKKSIEIKDNFQTSVKGIFAIGDVVPGPMLAHKAEEEGVACVEYINGQKPHINYDAIPAIVYTNPEIASVGKTEEQLKEENKEFKTGKFPFMANGRALTTSASEGFVKILVDKKTDEILGAHIIGHDAGQLIAEIVTTIEFGGSAEDIARVCHAHPTTSEAVKEAALSVDGRAIHI

SEQ ID NO: 102177 - protein, 463 aa, Unknown
  Bacterial polypetide isolated from the Sargasso Sea
MNKSYDIAILGGGPGGYVAAIKASQLGLKTAIIDQDELGGICLNWGCIPTKALLKNAEMIESIKNADQYGISISSYSIDFDKIINRSRQISERLSKGISYLMKKNNITHIQGRGVFTKKNNIEVSKGKKVTNVEAKHFIIATGGRPRTIPELKIDGKQIISSKEAMILKTPPKDMVIIGGGAIGCEFAYFYNSCGSKITMIEMLERVLPMEDEDISKELRKQFVNSGIQINTNTIVEKVEKLKTKVKVHIKSGNKRTIIESKVVLVAIGITGNIEDIGLDSIGVSTNNGSIETDDYCQTSIPNIFAIGDVSGPPWLAHVASAQGHIAIEKIKNVSTHPIDYNNIPACTYCQPQVASLGLTEIQAKEAGHNIKVGKFHFKSSGKALSIGKPEGFVKIIFDSKYGELLGCHIIGSEATELIQELVLAKNLEATWENLAYTMHPHPTLSEAIMEAAMDAYGSGVHQ

SEQ ID NO: 102178 - protein, 466 aa, Unknown
  Bacterial polypetide isolated from the Sargasso Sea
MDNFDLIVIGGGPGGYVCAIRAAQLGLKTACVESRGALGGTCLNVGCIPSKSLLNLSENFHKAKKDFNQQGIEIEGIKLNIEKMMSNKNKSIQVLTKGVEFLFKKNKVTYLKGKGVIFSKNDVVVYDNNKKTNYKTKNIVIATGSEVASLPSIKIDEKNIISSTGALSLNKVPKKLAVIGGGYIGLEMGSVWSRLGSEVTVIEYLDFITPGMDKEISNEFKKILTKQGIKFKMGSKVNSVKNISSKVLINYTDIKNSKDETLEVDKVLVSVGRKPYTEGLNLTKVGVKKDNKGRIETNEKLQTSIQNIYAIGDVIKGPMLAHKAEDEGIAVAEILAGQAGHVNYDVIPGVIYTSPEVATVGKTEEQLKKENIDYKVGKFPFLANSRAKVNNETEGFVKILADSKSDKVLGVHIIGPHCGDMIAEMALAMEFGASAEDIARTCHAHPTHTEAIKEAALAVDKRPIHF

SEQ ID NO: 102179 - protein, 212 aa, Unknown
  Bacterial polypetide isolated from the Sargasso Sea
MSEKFDAVIIGGGPGGYVCAIRLAQLGQKTACIESRGSLGGTCLNVGCIPSKSLLNLSENFHKAKNFDKIGIEVGSLKLNLPKMMKNKEKAVTVLTKGIEFLFKKNKVTYFKGTGSITSANKISIKSNDNKNETIEAKNIVIATGSDPVSLPGVKFDEEKIVSSTGALSLKEVPKKLVVVGGGYIGLEMGSVWSRLGSEVQVVEFLDHITPG

SEQ ID NO: 102180 - protein, 194 aa, Unknown
  Bacterial polypetide isolated from the Sargasso Sea
MSEKFQAAVIGGGPGGYVCAIRLAQLGLKTACIESRGSLGGTCLNIGCIPSKSLLNLSEEFHKVKSLANKGIEVGEVKLNLNKMMKSKDKAVTVLTKGVEFLLKKNKVSYFKGHGSFKSKNEILIKDDKNKETIIQTEKTVIATGSVPVSLPGIEIDEKIIVSSTGALKLEKVPQKMVVVGGGYIGLEMGSVWS

SEQ ID NO: 102181 - protein, 363 aa, Unknown
  Bacterial polypetide isolated from the Sargasso Sea
MAEKFDVTVIGGGPAGYVCAIRLSQLGLKTACIESRGSLGGTCLNIGCIPSKSLLNMSESFHKAKNFSNIGIETGEIKLNLEKMMSNKDSSVATLTKGVEFLFKKNKVTYIKGVGSFNEKNEILVKNDKSEIKIKTDKTIISTGSEPLSLPGIDFDEKKILSSTGALNISKLPKKMVVVGGGYIGLEMGSVWSRLGTEVHVVEYLDHITPGLDKEISNEFMKILKKQNIKFELNTKVEKITKNEKGIIIETSNKNSKDKIEADVVLISVGRKPYTDKLNLEKIGVNLDKKGKIKVNKNFETNVKNIYAIGDVIDGPMLAHKAEEEGIAVAELIAGQSGHVNYDVIPGVIYTSPEVAYVGKNEE

SEQ ID NO: 102182 - protein, 368 aa, Unknown
  Bacterial polypetide isolated from the Sargasso Sea
VEFLFKKNKVTYFKGTGKLKSKSEIVIIDKENKEINIESENIIISTGSEPVPLPGIEFDEEKIISSTGALSLKSVPKKMVVVGGGYIGLEMGSVWSRLGSEVHVVEFLDHITPGMDSEISNEFMKILKKQGINFHLETKVEKISKSSNGVLIETQNKNGKKIKFESDVVLISVGRKPYTKNLNLEKIGIKLDEKKRIKINKNYQTNVPNIYAIGDVIEGPMLAHKAEEEGIAVAELISGQSGHVNYDIIPGVIYTKPEVASIGKTEEQLKKKNQKYKIGKFPFMANSRAKAIDEPEGFVKILADATTDKVLGVHLIGPHAGELIAEMAIAMEFGASSEDIARTCHAHPTFSEAVKEAALSVEKRQIHS

SEQ ID NO: 102183 - protein, 466 aa, Unknown
  Bacterial polypetide isolated from the Sargasso Sea
MAEKFQAVVIGGGPGGYVCAIRLSQLGFKTACVEARNTLGGTCLNVGCIPSKSLLNLSENFQKAKKLQNLGIEVGEVKLNLEKMMKNKEKSVSILTKGVEFLFKKNKVSHFNGTGSIASANEVLVTTKDNKKISLDTDNIIISTGSIPVELPGMKFDEKIILSSSGALDLKSVPKKMIIVGGGYIGLEMGSVWSRLGSEVHVVEALNYITPGMDKEISSEFLKILKKQGIIFHLETKVQNIKNEKNSAKVSIQDKTGKNSELIADVVLISVGRKANTKNLNLEKIGVSLDNKKRIKVNKEFRTSTKNIFAIGDVISGPMLAHKAEEEGIAVAELIAGQSGHVNYDLIPGVIYTSPEVAVIGKTEEQLKEGNIKYKVGKFPFMANSRAKTVNNAEGFVKILADEKTDKVLGVHMIGSHVGEMIAEMAVAMEFGASSEDIARTCHAHPTFSEAIKEAALSVEKRAIHS

SEQ ID NO: 102184 - protein, 92 aa, Unknown
  Bacterial polypetide isolated from the Sargasso Sea
MKDVLIIGSGPAGYVAAIRCAQNGLDTAIIESKAEFGGTCLNVGCIPSKALLDSSNKYYQAKEHFSEHGISFTEQSFDLGTMMTRKDDVIKK

SEQ ID NO: 102185 - protein, 492 aa, Unknown
  Bacterial polypetide isolated from the Sargasso Sea
FETKVSGSIYTKISADSSTVSDINCEVLVLGSGPGGYTAAFRAADLGLRVVLVERHEQIGGVCLNVGCIPSKSLLHVAKIIFEAQEIDTHGISFGKPTIDLDKLREWKNSTIRQLTGGLKSMAKQRKVKIINGFGEFADSNNLTVTDKNDKISRINFSNAVIAAGSRPVKLPFLPEDPRIIDSTGSLELAYIPKNLLVIGGGIIGLEMATVYHALGSKITIVEMLDGLMAGADRDLVRPFQKRIAKQYNDIFLETRVTEVEALKKGLRVHFEGKNSPDEPHMYDCILSSVGRVPNGLNIGAEKAGVEVDEKGFISTDSQMRTNVSHIFAIGDLAGQPMLAHKASHEAKVAAEAISGMKSFFDARAVPSVAYTDPEVAWTGITEEEAKTQGIAYGKGSFPWAASGRSLSMGRSEGLTKVIFEEVSKRVIGLGIVGPNAGDLIAEGTLAIEMGCNAIDIGSTIHPHPTLSETVAFAAEAYEGTITDLYIPGKKK

SEQ ID NO: 102186 - protein, 465 aa, Unknown
  Bacterial polypetide isolated from the Sargasso Sea
MSEKFDVTVIGGGPGGYVCAIRLSQLGLKTACIESRGSLGGTCLNIGCIPSKSLLNLSEKFHSAKNFEKIGIETGEIKLNLDKMMKNKDKAVTVLTKGVEFLFKKNKVTYFKGKGSFENENSIKIEGLEGTKIIQTDKTIISTGSEPVSLPGVDFDEERILSSTGALSIPKLPNKMIVVGGGYIGLEMGSVWSRLGTEVTVVEFLDHITPGMDRDISNEFMKILKKQGIKFNLNTKVDKITKNSNGVTVETSQNDGQKVKHDVDVVLISVGRRPYTKNLNLDKVGVKLDEKGRVKVNKNFETNVKNIYAIGDVIDGPMLAHKAEEEGIAVAELIAGQSGHVNYDIIPGVVYTSPEVAYVGKSEEQLKKENIGYKIGKFPFMANSRAKAIDEPEGFVKILADQSTDKVLGVHIIGPHAGEMIAEMAVAMEFGASSEDIARTCHAHPTFSEAIKEAALSVDKRQIHS

SEQ ID NO: 102187 - protein, 466 aa, Unknown
  Bacterial polypetide isolated from the Sargasso Sea
MSEKFQAVVIGGGPGGYVCAIRLAQLGLKTACIESRGSLGGTCLNIGCIPSKSLLNLSEEFHKVKGLANKGIEIGEVKLNLDKMMKSKDKAVTVLTKGVEFLLKKNKVTYFKGHGSFKSKNEILIKDDQKKETIIQTEKTVIATGSVPVSLPGIEIDEKIIVSSTGALKLEKVPNKMVVVGGGYIGLEMGSVWSRLGAKVEVVEFLDHITPGMDKEISSEFMKILKKQGMKFNMQNKVETIQKNNSGAVVSTIDKDGNKNNFECDVVLISVGRKPNTDGLNLKNAGVSLDEKNRIKTDKKFKTNVENIYAIGDVIVGPMLAHKAEDEGIAVAENIVGQSGHVNYDTIPGVVYTSPEVASIGKTEEQLKELNKSYKVGKFSFMANSRAKAIDDAEGFVKILADAETDKVLGAHIIGPHAGELIAEIGVAMEFGASAEDIARTCHAHPTFSEAVKEAALSVDKRAIHS

SEQ ID NO: 102188 - protein, 433 aa, Unknown
  Bacterial polypetide isolated from the Sargasso Sea
KKKLHLGGTCLNIGCIPSKALLNSSEKFTEISNHLAEHGIKTSKVDLDLDVLMQRKTKIVKKLTTGIGFLFKKNKITHIPGSASFVDSNTVSIINGKQEITASAKNFIIATGSSSIEIPNIPVDEKQIVSSTGALSLTKVPKSLLVIGGGYIGLEMGSVWSRLGSKVTVVEALDRIVPTMDGEIAKEFMKMLQKQGLEFKLSHKVSSAKSSKSGVDVEMETSDKKVIKENYEVVLMSVGRKPNTEGLGLEKIGVNLTDKKSIEIKDNFQTSVKGIFAIGDVAPGPMLAHKAEEEGVACVEYINGQKPHINYDAIPAIVYTNPEIASVGKTEEQLKQENKDFKVGKFPFMANGRALTTSASEGFVKILVDKKTDEILGAHIIGHDAGQLIAEIVTTIEFGGSAEDIARVCHAHPTTSEAVKEAALSVDGRAIHI

SEQ ID NO: 102189 - protein, 217 aa, Unknown
  Bacterial polypetide isolated from the Sargasso Sea
MSEQFDLLVIGGGPGGYVCAIRAAQLGLKTGCIESRGTLGGTCLNVGCIPSKSLLNLSDMYKKAQKDYNNLGIEVGEVKLNLKKIMMNKSKSVQVLTKGVEFLFKKNKVTYIKGKGVLFSKNDVVVYENGKKTSYKSKNIVIATGSSSSSVPGIEINEKNIISSTGAISLEKVPKNLVVIGGGYIGLEMGSVWSRLGSEVTVIEYLDHITPGMDREV

SEQ ID NO: 102190 - protein, 96 aa, Unknown
  Bacterial polypetide isolated from the Sargasso Sea
MTDKFDVTVIGGGPGGYVCAIRLSQLGLKTACIESRGSLGGTCLNVGCIPSKSLLNLSENYHKAKNFEKIGIEVGEVKLNLGKMMKNKEKAVTVLT

SEQ ID NO: 102191 - protein, 474 aa, Unknown
  Bacterial polypetide isolated from the Sargasso Sea
MSEKFDAIVIGGGPGGYVCAIRLAQLGKKTACVEYRGTLGGTCLNIGCIPSKNLLNLSENFQKAKNFSKVGIEISDIKLNLDKMMKNKDKAVTVLTKGVEFLFKKNKVSYFKGFGSFLSDKKIKIKSSDGKESEIEGENIIIATGSEPSKMPNINFDEERIVSSTGALSLKKVPKKMIVIGGGYIGLEMGSVWSRLGSDVHVIEFLDHITPGMDKEISNEFMKILKKQNIKFHMSTKVEKIIKKGENVEIETYNIKGEKSSHDCDVALISIGRKAFTDKLNLEKINLKTDEKGRVRVDKNFKTDQKNIFAIGDVIQGPMLAHKAEEEGIAVAEIIAGQSGHVNYDLIPGVIYTSPEVATIGKTEEQLKKQNISYKIGKFPFMANSRAKAIDEPEGFVKILADNSTDKVLGVHIIGPHAGEMIAEMAVAMEFGASYEDIARTCHAHPTFYEAIKEDALSVDKSTDSFVIYILYYK

SEQ ID NO: 102192 - protein, 466 aa, Unknown
  Bacterial polypetide isolated from the Sargasso Sea
MAEKFQAVVIGGGPGGYVCAIRLAQLGFKTACIESRGTLGGTCLNIGCIPSKNLLNLSENFHKAKNFSEIGIEVGEVKLNLQKMMQNKDKAVKVLTKGVEFLFKKNKVTYFKGTGKLISNTQINILSSDNSEIKIESENIIISTGSEPVSIPGVDFDEKTIVSSTGALSLETVPKKLVVIGGGYIGLEMGSVWSRLGSEVHVIEFLDHITPGMDKEISSEFLKILKKQGLKFHLSTKVEKVIKNKNGVNISTIDKSGKKNTIDCDVVLIAVGRKAYTKNLNLDGLGIDLDDKKRIKVNKKFQTNIKNIYAIGDVIEGPMLAHKAEEEGIAVAELIAGQSGHVNYNIIPGVIYTTPEVAVIGETEEQLIKKNLKYKVGKFPFMANSRAKAIDEPDGFVKILADATSDKVLGVHLIGPHAGELIAEMAIAMEFGASSEDIARTCHAHPTFSEAVKEAALSVDKRQIHS

SEQ ID NO: 102193 - protein, 154 aa, Unknown
  Bacterial polypetide isolated from the Sargasso Sea
MTDKFQAVVIGGGPGGYVCAIRLAQLGLKTACIESRGSLGGTCLNVGCIPSKSLLNLSEEFHNAQSLSNKGIEIGEVKLNLSKMMKNKDKAVTILTKGVEFLLKKNKVTYFKGTGSFKSKNDIVIKDNDNKETIIQTENTIIATGSVPSIITRH

SEQ ID NO: 102194 - protein, 122 aa, Unknown
  Bacterial polypetide isolated from the Sargasso Sea
MSKYDVIVIGGGPGGYVASIRCAQMGLQTACVEGRETLGGTCLNIGCIPSKALLHASHQLHEAEHNFEKMGLIAKPPSIDWAKMQNYKTETIEANTKGIEFLFKKNKIDHLKGWASISAKGK

SEQ ID NO: 102195 - protein, 199 aa, Unknown
  Bacterial polypetide isolated from the Sargasso Sea
MGDFDLIVIGAGPGGYVAAIRAAQLGMKVACIEKEPSLGGTCLNIGCIPSKALLNSSEKFVEILNHAAEHGIKTSKIDLDLNVLMDRKTKIVKKLTTGIGFLFKKNKITHIPGMASFVDKNTISITNGKNEITASAKNFIIATGSSSIEIPNIPVDEKQIVSSTGALSLSKIPKSLLVIGGGYIGLEMGSVWSRLGSKV

SEQ ID NO: 102196 - protein, 477 aa, Unknown
  Bacterial polypetide isolated from the Sargasso Sea
MVESRKCQVLVVGAGPGGYVAGIRAAQLGLDTVIVEGDKAGGTCLIRGCIPSKAIIHAAERFENLRLHSEGGHMGLSVTGEPEVDMMALVSWKDSIVDRLNKGVEGLLKAAGAELVQGWAKFDGPKTCTVENDGEVVKIEAENVIIATGSSHIDLPFMPCDEEFILSSTGALDMESLPKSVAIIGGGYIGLELGCALSKLGTEVTVIEGMETILAIMDKEIRRPLDLWLKKNNVTIHTESLARGAEIKGKGASRKVEITFEKDGSEQTLKVDKVLVTVGRKPNTKGWGLENIGARMDGSGRFIRTDRQCRTSVPGVYAIGDVSGEPMLAHKASAEGEMVAEIIAGHKREFDKVAIPAIVFTEPEIVSVGLTPDEAKERGEDIIVGKFPLAANGRALSLEAEKTGGFIRVTARESDHVILGVQAVGSHVAELHSEFVLALEMGALLEDVAGTVHAHPTMSEAFHESVLKTLGHAIHIS

SEQ ID NO: 102197 - protein, 466 aa, Unknown
  Bacterial polypetide isolated from the Sargasso Sea
MTEKFDSVVIGGGPGGYVCAIRLAQLGQKTACIEARGALGGTCLNIGCIPSKSLLNLSENFKKAKNFSKLGIETGDVKLNLDKMMKNKDKAVSILTKGVEFLFKKNKVTYLKGFGSFISEKKISIKGEDGKIKEIEAKNIIIATGSEAMPMPNVEFDEKSIVSSTGALSLKEVPKSLVVVGGGYIGLEMGSVWSRLGAEVNVIEFLDHITPGMDREISEEFMKILKKQNIKFHLNRKVTSIKKTNSGVQITTSDKNGDNKDFNCNVALISIGRKPFTSNLNLSSAGVKSDEKGRIKIDKKFQTSAKNIYAIGDVIDGPMLAHKAEEEGIAVAEIIAGQSGHVNYDLIPGVIYTTPEVASIGLTEEQLKEKNKSYKIGKFPFMANSRAKAIDEPEGFVKILADKDTDKVLGVHMIGPHVGEMIAEMAVAMEFGASSEDIARTCHAHPTFSEAIKEAALSVEKRQIHS

SEQ ID NO: 102198 - protein, 476 aa, Unknown
  Bacterial polypetide isolated from the Sargasso Sea
MANKESYDIAVIGSGPGGYAAAFRAADLGKKVVLIDRDKDLGGVCLNRGCIPSKALLHISRVINEVEHLSGIGVSFGSPNIDIEAVRSYKERIVSQLNKGIVQLAKVRKVKTLNGLATFLSNTELLVDNGEESKNIEFERCIIAAGSTSSRLPNMPENHPSVLTSRTALELPDVPDTLLIVGGGVIGLELGQVYSSLGSKVSVVEFLPNLIPGADPDIVKPLQRKINKQFEKILLSSKVESVTPADNNRLKVSIKTSKDEMVEEVFDKILLSVGRKPNTGLLKLENTDINIDKRGFIDVDVYQRTSVKNIFAIGDIIGNPMLAHKATYEGKVAAEVACGHPAAMDVTAIPSVVYTDPEIAWAGLTETEAKEKGIPYEKGEFPWAASGKAMILNASQGKSKLLFDPESKKILGAGIVGPSAGDLISEAVLAIEMGADCEDIALTMHPHPTLGETFAAASEVYTGTITDLYIPKKGER

SEQ ID NO: 102199 - protein, 397 aa, Unknown
  Bacterial polypetide isolated from the Sargasso Sea
MSEKFQAVVIGGGPGGYVCAIRLAQLGIKTACIESRGSLGGTCLNIGCIPSKSLLNLSEEFHKVKGLANKGIEVGEVKLNLEKMMKSKDKAVTVLTKGVEFLLKKNKVTYFKGHGSFKSKNEILIKDDKNKETVIQTEKTVIATGSVPVSLPDIEIDEKIIISSTGALKLEKVPQKMVVVGGGYIGLEMGSVWSRLGAEVQVVEFLDHITPGMDKEISSEFMKILKKQGMKFNMQNKVETIKKNSAGAVVSTLDKDGNKNNFECDVVLISVGRKPNTDGLNLESVGVDLDERNRIKTDKSFKTNVENIYAIGDVIVGPMLAHKAEDEGIAVAENIVGQSGHVNYDTIPGVIYTTPEVASIGKTEEQLKKLDKKYKVGKFSFMANSRAKAIDDAEGFG

SEQ ID NO: 102200 - protein, 452 aa, Unknown
  Bacterial polypetide isolated from the Sargasso Sea
AAAFRAADLGKNVVLIDCDPTLGGVCLNRGCIPSKALLHISKIMDEAHSLSKMGVLYNKPSINLDQIRSHKNKIVSQLNQGIDKMAKARGVETIQGLASFKNNNELNVKTKSSVSTIKFQKCIIAAGSTSSMIPGISVEHESVLNSRTALELNDIPKNLLVIGGGAIGLELGQVYSSLGSKVTLVEFMPNIIPGADEDIVKPLYRKLNKQFDSILLSSKVTKLEVQKNNSINVTIENGSSVTRSNYNKVLIAIGRKPNLELLKIENTDIKLNVDGYIDVDVYQRTSVENIFAIGDIVGNPMLAHKATHEGKVAAEVCAGHPAAMDCQAIPSVVYTDPEVAWAGLNEVEAKQNKIKYNKGEFPWAASGRAIAMGANQGKTKILFDPDNKKVLGVGIVGPGAGDMISEAMISIEMGVDAEDIALTVHPHPTVGETFAMAAEAFLGTITDLYVPK

SEQ ID NO: 102201 - protein, 380 aa, Unknown
  Bacterial polypetide isolated from the Sargasso Sea
MTDKFQAVVIGGGPGGYVCAIRLSQLGLKTACIESRGSLGGTCLNIGCIPSKSLLNLSEEFHNAKNLSNKGIEVGEIKLNLSKMMKNKDKAVTVLTKGVEFLLKKNKVTYFKGTGSFKSKNEILIIENESKKEISIKADKIVIATGSLPVSLPGIEFDEKVIVSSTGALKFEQVPKKMVVVGGGYIGLEMGSVWSRLGTEVHVIEFLDHITPGMDKEISNEFMKILKKQGINFHMQHKVEEIKKSNSGAIVSTIDKDGNKKDFNSDIVLVSVGRKPNTSGLSLEKVGIEIDKKKRIKTDKYFKTNQNNIYAIGDVIAGPMLAHKAEDEGIAVAENIAGQSGHVNYDTIPGVIYTTPEVASIGKTEEQLKESKIKYKIGKF

SEQ ID NO: 102202 - protein, 238 aa, Unknown
  Bacterial polypetide isolated from the Sargasso Sea
MSEKFDITVIGGGPGGYVCAIRLSQLGFKTACIESRGSLGGTCLNIGCIPSKNLLNFSENFHKAKNFEKIGIEVGQVKLNLDKMMKNKEKAVEILTKGIEFLFKKNKVTYFKGTGAFKSANEISILSEGKETTILSDKTIISTGSEPTSIPGIEFDEEKIISSTGALSLSKLPKKMVVVGGGYIGLEMGSVWSRLGTQVEVIEFLDHITPGMDREVSSEFEKILKKQGIKFQLNTKVE

SEQ ID NO: 102203 - protein, 325 aa, Unknown
  Bacterial polypetide isolated from the Sargasso Sea
MENKFDVIIIGGGPGGYVCAIRAAQLGLKTACVESRGTLGGTCLNIGCIPSKSLLNLSENYNKAQKEFKQQGIEISEIKLNIEKMMSNKNKSVQVLTKGVEFLFKKNKVTYIKGKGIPFSKNDVVVYDGDKKNSYKTKNIVIATGSTVSSLPGIKIDEKNIISSTGALSLNKVPKKLVVIGGGYIGLEMGSVWSRLGSEVTVVEYLDYITPGMDREISKEFQKILSKKGIIFRLNSKVTSVKKKGNSSIVEFVNNSSSKKETIEADKVLVSVGRKPYTEGLNLSKIGINRDSKGRIEVNNKFQTSVKNIYAIGDVIKGPMLAHKG

SEQ ID NO: 102204 - protein, 177 aa, Unknown
  Bacterial polypetide isolated from the Sargasso Sea
MSQKFDSVVIGGGPGGYVCAIRLAQLGQKTACIESRGSLGGTCLNVGCIPSKSLLNLSENFHKAKNFEKIGIEVGSLKLNLPKMMKNKEKAVTVLTKGIEFLFKKNKVTYLKGTGSITGTNQISLKSVDNKNETIEAKNIIIATGSDPTSLPGIEFDEEKIVSSTGALSLKESSKKI

SEQ ID NO: 102205 - protein, 466 aa, Unknown
  Bacterial polypetide isolated from the Sargasso Sea
MSEKFDVTIIGGGPGGYVCAIRLSQLGLKTACIESRGSLGGTCLNVGCIPSKSLLNLSENFTRAKNFSKLGIEISDLKLNLDKMMKNKEKAVTILTKGVEFLFKKNKVSYFKGVGKFKSKNKISIIDNNNQEILIETKSTVIATGSEPTSIPGVNFDETQILSSTGALSLKKVPKKMIVVGGGYIGLEMGSVWSRLGSEVHVIEFLDFITPGMDREISNEFMRILTKQGIKFHLKTKVEKVSKSNESVLIDVLNSEGKKEKLDCDVVLISIGRKPNTKSLNLDEAGIKIDEKGKIKVNKKFQTNISDVYAIGDVIDGPMLAHKAEEEGIAVAELIAGQSGHVNYDVIPGVIYTTPEVAYVGKTEEELKNSNKIYKIGKFPFMANSRAKAIDEAEGFVKILADSSTDKVLGVHIIGPHAGEIIAEVAVAMEFGASSEDIARTCHAHPTFSEAIKEAALSVDKRQIHS

SEQ ID NO: 102206 - protein, 346 aa, Unknown
  Bacterial polypetide isolated from the Sargasso Sea
SSTIRSETACVESRGTLGGTCLNVGCIPSKSLLNLSENFHKAKKDFNKQGIEIDGIKLNIEKMMSNKNKSVQVLTKGVEFLFKKNKVTYIKGKGVLFSKNDIVVYENNKKTNYKAKNIVIATGSAVVSLPGIEIDEKNIISSTGALSLNEVPKKLAVIGGGYIGLEMGSVWSRLGSEVTVIEYLDHITPGMDREISDEFKKILTKQGIKFKMGSKVNTVKTNGTGILINFTDVKTSKAESLEFDKVLVSVGRKPYTEGLNLTKVGIKKDNKGRIEVNSKLQTSIKNIYAIGDVIKGPMLAHKAEEEGIAVAEILAGQAGHVNYDVIPGVIYTSPEVATVGKTEEQL

SEQ ID NO: 102207 - protein, 347 aa, Unknown
  Bacterial polypetide isolated from the Sargasso Sea
VIEITKPDGSKENLDAKNIIIATGSKPIEINVAPFSKNIVDSTGALSFKKVPKKLGVVGAGIIGLELGSVWSRLGSNVTVLEALDDFLPMSDPDISKDSLKEFKKQGLDIQLGSKVISTKDMKNSVKLSYSKEDNEIEMEFDKLIVAAGRSSNVDNILNDDLGVSIKNGLIEVDEYCQTSVSNIWAVGDVVRGPMLAHKGSEEGIMVAERIADKHTEVNYDLVPSVIYTHPEIAWVGKNENELKQSGVKYNVGKFPFAANGRALAVSESIGFVKLLSDKKTDAILGVHVFGPSAADIVQQALIAMEFGASAEDISLTMFSHPTVSEALHEAALASNNQAIHIGNKKQ

SEQ ID NO: 102208 - protein, 66 aa, Unknown
  Bacterial polypetide isolated from the Sargasso Sea
MSNIVEYDLIVIGGGPGGYVAAIRAAQLGINVMCIEKRKSFGGTCLNVGCIPSKTLLHSSHLYEQS

SEQ ID NO: 102209 - protein, 71 aa, Unknown
  Bacterial polypetide isolated from the Sargasso Sea
MSEKFQAVVIGGGPGGYVCAIRLAQLGLKTACIESRGSLGGTCLNVGCIPSKSLLNLSEEFLKAKGWQIKV

SEQ ID NO: 102210 - protein, 214 aa, Unknown
  Bacterial polypetide isolated from the Sargasso Sea
MYDVVVIGSGPAGYVAAIRAAQLGLKTVCIEQSSNDDGKPNFGGTCLNVGCIPSKALLDSSHRFYEANKNLSDHGIDIKDMKLDLSAMMKRKDDIVSKLTGGISGLFAANKVDSISGSGKVVGSNLVEVTKSDGSTEELEAKNIIIATGSLPIEIPAGKFGDKIVDSTGALAFNKVPKSLGIVGAGIIGLELGSVWSRLGSKVTVIEALDTFCQ

SEQ ID NO: 102211 - protein, 343 aa, Unknown
  Bacterial polypetide isolated from the Sargasso Sea
MSEKFQAVVIGGGPGGYVCAIRLAQLGLKTACIESRGSLGGTCLNVGCIPSKSLLNLSEEFHKVKGLAKKGIEIGEVKLNLDKMMKSKDKAVTVLTKGVEFLLKKNKVTYFKGHGSFKSKNEILIKDDQNKETVIQTEKTIIATGSVPVSLPGIEIDEKVIVSSTGALKLEKVPNKMLVVGGGYIGLEMGSVWSRLGANVEVVEFLDHITPGMDKEISSEFMKILKKQGIKFNMQNKVESIKKNNNAAVVSTVDKDGKKNNFECDIVLISVGRKPNTDGLNLEAIGVNIDERNRIKTDKTFKTNVENIYAIGDVIVGPMLAHKAEDEGIAVAENIVGQSGHVN

SEQ ID NO: 102212 - protein, 167 aa, Unknown
  Bacterial polypetide isolated from the Sargasso Sea
MKKMFDVVVVGSGPAGYVSAIRCSQLGLKTLCIEESHSDNGKPNFGGTCLNVGCIPSKALLDSSHRYYEANKKLSDHGIQIESLKLDLKSMMKRKDDIVGKLTGGISGLFSANKVESMIGRGKIIDINTVEVTKPDGSTETIDAKNIIVATGSKPIEIPSAKFSKHI

SEQ ID NO: 102213 - protein, 258 aa, Unknown
  Bacterial polypetide isolated from the Sargasso Sea
MTDPDISKETFKEFKKQGLDIKLNSKLVASKELKNTVKVTFNENGTDVEEEFDKLIVAVGRKPNSSNIIDESLNIAIEEGFIKVDEHCQTSVKNIWAIGDVVRGPMLAHKGSEEGIMVAERIADKHAEVNYDLVPSVIYSHPEIAWVGKNETELKDKKISYKVGKFPFAASGRALAVDQSVGFVKVLSDSKTDTILGVHVFGPAAAEIVQQALISMEFGASAEDIALTMFSHPTVSEAFHEAALAANNQAIHIGNKTR

SEQ ID NO: 102214 - protein, 269 aa, Unknown
  Bacterial polypetide isolated from the Sargasso Sea
VELTKDLMPGTDRDLVRPLEKVLKKKCNKIMKSTQVVSAEATNDGINISFKQDEEEFSEVFQNVLVAVGRKSNGNLLGLNEIGVNIDDQGIIKVDQQFKTSVESILAIGDVIGDPMLAHKASYEGKVAAEVTAGQRVSNDARCIPSVAYTDPEVAWVGLSEDECKAEGINYGKGVFPWSASGRSLAIGRNEGMTKLLFNNSTKKVIGGGIVGPNAGDLISEIALAIEMDCDVNDVALTVHPHPTLSETVAMAAEVFEGTITDLYIKPSK

SEQ ID NO: 102215 - protein, 389 aa, Unknown
  Bacterial polypetide isolated from the Sargasso Sea
CIESRGSLGGTCLNVGCIPSKSLLNLSEEFHKVRGLANKGIEVGEVKLNLEKMMKSKDKAVTVLTKGVEFLLKKNKVSYFKGHGSFKSKNEILIKDDKNKETIIQTEKTVIATGSIPVSLPGIEIDEKIILSSTGALKLNKVPKKMVVVGGGYIGLEMGSVWSRLGAEVQVVEFLDHITPGMDKEISSEFMKILKKQGMKFNMQNKVEIIKKNSLGAVVLTVDKDGNKNNFECDVVLISVGRKPNTDGLNLESVGVDLDEKNRIKTDKSFKTNVENIYAIGDVIVGPMLAHKAEDEGIAVAENIVGQSGHVNYDTIPGVVYTSPEVASIGKTEEQLKELNKKYKVGKFSFMANSRAKAIDDAEGFVKILADEQTDKVLGAHIIDLMQEN

SEQ ID NO: 102216 - protein, 291 aa, Unknown
  Bacterial polypetide isolated from the Sargasso Sea
GGGIIGLEMATIYSALGSEVTIVELTKDLMPGTDQDLVRPLEKVLKKKCNKIMKSTQVISAEATDDGINISFKQDEEEFSEVFQNVLVAVGRKSNGNLLGLNEIGVNIDDQGIIKVDQQFKTSVESILAIGDVIGDPMLAHKASYEGKVAAEVTAGERVSNDARCIPSVAYTDPEVAWVGLSEDECKAKGMNYGKGLFPWSASGRSLAIGRNEGMTKLLFNNSTKKVIGGGIVGPNAGDLISEIALAIEMDCDVNDIALTVHPHPTLSETVAMAAEVFEGTITDLYLKPSK

SEQ ID NO: 102217 - protein, 373 aa, Unknown
  Bacterial polypetide isolated from the Sargasso Sea
YGGTCLNVGCIPSKSLLDSSHKYFEAQKDFASHGIDLKDLSVNIPSMMKRKDEVVNKLTTGITGLFKANGVEAISGRGKVINENLVEVSNNGDKTSLETKFIILATGSNPIEIPVAKWSENIVDSTGALNFDRVPERLGIIGAGVIGLELGSVWSRLGAEVTVIEAMDDFLPIVDKQISKECHREFKKQGLDIHLGSKLTSAKDNGKDVEISYESKGEELKASFDKLIVAVGRKPNTADISDESFPIELDELGRVQVDDFCKTNYENIYAVGDIVRGPMLAHKGSEEGVMVAERIAGKKARMNYDLVPNVIYTHPEVAWVGKTQQELEDHGVEFKIGSFPFAASGRALAAADSVGSVKVLADKKDDTILGVHV

SEQ ID NO: 102218 - protein, 99 aa, Unknown
  Bacterial polypetide isolated from the Sargasso Sea
MSDFDVVVIGAGPGGYVAAIRCAQLGLKTACIDRWVGKNGKPSVGGTCLNVGCIPSKALLNSSERYEDIQLHAADHGIHSGDVSIDVEKMLARKDKIVS

SEQ ID NO: 102219 - protein, 84 aa, Unknown
  Bacterial polypetide isolated from the Sargasso Sea
MEKFDAIVIGSGPGGYVCAIKLAQLGIKVACVEGNTSLGGTCLNVGCIPSKALLNASHNYHNSVENFSKMGIEVDPPVVNWGKM

SEQ ID NO: 102220 - protein, 239 aa, Unknown
  Bacterial polypetide isolated from the Sargasso Sea
MSKYDVIVIGGGPGGYVASIRCAQMGLHTACVEGRDTLGGTCLNVGCIPSKALLHASHQLHEAEHNFEKMGLIAKPPSIDWAKMQNYKTETIDANTKGIEFLFKKNKIDHLKGWASIPAPGKVQINKTIYDAKNIIIASGSEPSTIPNVKIDEKTIVSSTGALSLSKIPKTMTVIGAGVIGLELGSVYARLGTKVTIIEYLDYITPGMDKEVQKTFQRILKKQGISFIMGAAVQSATKS

SEQ ID NO: 102221 - protein, 274 aa, Unknown
  Bacterial polypetide isolated from the Sargasso Sea
MSNEIKTQVVVLGAGPAGYSAAFRAADLGLETVIVERFSTLGGVCLNVGCIPSKALLHVAKVIEEAKAVAAHGVVFGEPTIDLDKLRSFKQKVISQLTGGLGGMSKMRKVNVVNGFGKFTGPNSLEVTAQDGTVTVVKFDQAIIAAGSRPIKLPFIPHEDPRIWDSTDALELKEVPGKLLVMGGGIIGLEMGTVYSSLGSEIDVVEMFDQVIPAADKDVVRVFTKQIKKKFNLILETKVTAVEAREDGIYVSMEGKSAPTEPVRYDAVLVAIGR

SEQ ID NO: 102222 - protein, 334 aa, Unknown
  Bacterial polypetide isolated from the Sargasso Sea
AAFRAADLGLETVIVERFSTLGGVCLNVGCIPSKALLHVAKVIEEAKAVAAHGVVFGEPTIDLDKLRSFKQKVISQLTGGLGGMSKMRKVNVVNGFGKFTGPNSLEVTAEDGTVTVVKFDQAIIAAGSRPIKLPFIPHEDPRIWDSTDALELKEVPGKLLVMGGGIIGLEMGTVYSSLGSEIDVVEMFDQVIPAADKDVVRVFTKQIKKKFNLILETKVTAVEAREDGIYVSMEGKSAPTEPVRYDAVLVAIGRTPNGKLIDAEKAGVKIDERGFINVDKQLRTNVPHIYAIGDIVGQPMLAHKGVHEGHVAAEVIAGMKHYFDPKVIPSIAYT

SEQ ID NO: 102223 - protein, 275 aa, Unknown
  Bacterial polypetide isolated from the Sargasso Sea
MKKYDVIVIGSGPGGYVAAIRCAQLGLKTAIVEKYNTLGGTCLNVGCIPSKALLDSSEHFYNAKHTFADHGIQTGEIKADLTQMIARKNKVVEQTCSGVKYLMDKNKIEVLEGIGSFKDKNIVIVQSGKNKDEIEGKNIIIATGSKPNYFPGMEPDKKRIITSTEALSLTEIPKKMLVIGAGVIGLELGAVYKRLGSEVEVIEFAPKILPTMDGTISKEFTKVLKKSGFKLHMEHKVQKVENKGKEVIVKALNKKNEEVELKGDYCLVAVGRKAY

SEQ ID NO: 102224 - protein, 124 aa, Unknown
  Bacterial polypetide isolated from the Sargasso Sea
MEKFDIIVIGGGPGGYVCAIKAAQLGFRVACIEGRKKLGGTCLNVGCIPSKALLHASEAYHDSIENFSRMGLEIGKPKINWPNMLTYKQNMIKQNTQGIEYLFKKNKVDHIQGWATIIDTNQVK

SEQ ID NO: 102225 - protein, 270 aa, Unknown
  Bacterial polypetide isolated from the Sargasso Sea
ANKFDLVVIGAGPGGYVAAIRAAQLGLKVACVDKRETLGGTCLNVGCIPSKALLSASEKYIEASKNFSEIGIELSGLKINLEKMLSKKDRIVAELTKGIQFLFKKNNVMRFHGEAVIKSASEIEVTSVDGKATQLQTDKIIIAVGSEPICLPNLAFDEKKIVSSTGALNLDRVPKRLVVIGGGYIGLEMGSVWSRLGSKVTVVEFLNKIVPNVDVEIGKQFQKNLEKQGIVFMLETKVVEVSVKDKKLEIIAEQINREDRETIECDVVLI

SEQ ID NO: 102226 - protein, 62 aa, Unknown
  Bacterial polypetide isolated from the Sargasso Sea
MTKFDTIVIGSGPGGYVAAIRCAQLGMKTAIIERYPTLGGTCLNVGCIPSKALLDSSEHFNN

SEQ ID NO: 102227 - protein, 282 aa, Unknown
  Bacterial polypetide isolated from the Sargasso Sea
MAKSYDLVVIGGGPGGYVAAIRAAQLGLKTVCVEKRGTLGGTCLNVGCIPSKTLLQSSEKFAEAQHELKEHGVDVKGVSLNLEAMMARKDRIVSNLTKGIEFLFKKNEVEYIVGHGTLSGPNSVTVSLNKGGNKTLEAKAILLATGSESTFLPGIKVDEKQIVTSTGALTLGRVPKHLVVIGGGYIGLELGSVWRRLGAEVTVVEFLDRITPGMDGDVAKNFQRILKKQGFKFRLGTKVTNVKKRKGSVTLSLEPAIGGEAESLKCDTVLLSVGRRPYTDKL

SEQ ID NO: 102228 - protein, 264 aa, Unknown
  Bacterial polypetide isolated from the Sargasso Sea
MEYDVVIIGGGPGGYVAAIKAAQLGLKTACIEFDEDASGKVKLGGTCLNVGCIPSKSLLDSSYKFKQISESFDDHGIKVSKPSYDLNKMMLRKDEIIQKLTGGVGHLFKHNKVESIHGRGKLISANEVEVTNPKGKKQIVKGKNIILAAGSRPINIPSVPWNGSTVVGSSGALEFNQTPKKLAIIGAGVIGLELGSVWSRLGSIVDIYEAEQTLLPMLDEDVSRLIEREFRKQNLNIQLGTFVKGSKKSRKGISLELEINGKTS

SEQ ID NO: 102229 - protein, 194 aa, Unknown
  Bacterial polypetide isolated from the Sargasso Sea
DAGKAGVEVDERGFIRVDKQLRTNVPHIFAIGDIVGQPMLAHKGVHEGHVAAEVISGLKHYFDPKVIPSIAYTEPEVAWVGLTEKEAKEKGISYETATFPWAASGRAIASDCADGMTKLIFDKETHRVIGGAIVGTNGGELLGEIGLAIEMGCDAEDIALTIHAHPTLHESVGLAAEVFEGSITDLPNAKAKKK

SEQ ID NO: 102230 - protein, 273 aa, Unknown
  Bacterial polypetide isolated from the Sargasso Sea
MTEYDVVVIGSGPGGYVASIRAAQLGLKVACIEGQSTLGGTCLNVGCIPSKALLHCSQNFFDSINKFSKMGIDISRPTINWSKMQDYKQSMIDQNTQGISYLFKKNNVVHIKGWARIKNNHTIEVNSQLIQTRNVIIATGSEPSSLGEIKIDEEKIVSSTGILNLKKIPNKLTIVGAGVIGIELGSVFSRLGTEVNIIEYLDHIITGFDQELSKNFKRILKKQGLNFILNSAVKTIENVKKGVLVTYSNQRDGKKEVLGSDVVLIATGRKLYT

SEQ ID NO: 102231 - protein, 105 aa, Unknown
  Bacterial polypetide isolated from the Sargasso Sea
MMSTEIKTQVVVLGAGPAGYSAAFRCADLGLETVIVERYSTLGGVCLNVGCIPSKALLHVAKVIEEAKALAEHGIVFGEPKTDIDKIRTWKEKVITQLTGGLAGM

SEQ ID NO: 102232 - protein, 57 aa, Unknown
  Bacterial polypetide isolated from the Sargasso Sea
MTQKFDVVVIGAGPGGYVAAIKAAQLGLKTACIEKYQGSDGKVALGGTCLNVGCIPS

SEQ ID NO: 102233 - protein, 127 aa, Unknown
  Bacterial polypetide isolated from the Sargasso Sea
MDKFDVTVIGSGPGGYVAAIRCAQLGMKTAIIERYSTLGGTCLNVGCIPSKALLDSSEHYHNALKNFGKHGIETDGVRLNWPGMLGRKDDVVGQTCSGVEYLMKKNEIQVIHGHGSFETNQKMLVQG

SEQ ID NO: 102234 - protein, 262 aa, Unknown
  Bacterial polypetide isolated from the Sargasso Sea
VSIPPAPIDGDAIVDSTGALEFQAAPKRMGVIGAGVIGLELGSVWSRLGSEVIILEALNEFLPSTDGRVSKDLLRTLKKQGLDIRLGTRVVATEVKGKGAKKTVSVTYEKDGEENKIEVDKLIVAVGRRPYTEGLLSPDSGVNLDERGFLFVNDICATDAPNVYAVGDVVRGPQLAHKGMEEGIMVAERIAGKKPLVNYDVVPSVIYTHPEVAWVGKTEEQLKAAGEPYNVGSFPYAANGRALAAHENEGFIKILSDAESDR

SEQ ID NO: 102235 - protein, 100 aa, Unknown
  Bacterial polypetide isolated from the Sargasso Sea
MSETRFDLIVIGAGPGGYVAAIRAAQLGMSVACIEKRPTLGGTCLNVGCIPSKALLNASEHYAGAAGGGLAGLGIDIGSVRLDLPKMMQGKDKIVDSLTT

SEQ ID NO: 102236 - protein, 82 aa, Unknown
  Bacterial polypetide isolated from the Sargasso Sea
MTKFDTIVIGSGPGGYVAAIRCAQLGMKTAIIERYPTLGGTCLNVGCIPSKALLDSSEHFNNAKHNFEKHGIITQKLELNWP

SEQ ID NO: 102237 - protein, 64 aa, Unknown
  Bacterial polypetide isolated from the Sargasso Sea
MTKFDTIVIGSGPGGYVAAIRCAQLGMKTAIIERYPTLGGTCLNVGCIPSKALLDSSEHFNNAK

SEQ ID NO: 102238 - protein, 244 aa, Unknown
  Bacterial polypetide isolated from the Sargasso Sea
KCKKIMKSSQVISASASDEGISVSFKKDGEEFSEMFQNVLVAVGRKSNGSLLGLNEIGVNVDERGIINVDKQFRTTMESIFAIGDVIGDPMLAHKASHEGKIAAEVAAGHKSTNDIRCIPSVAYTDPEVAWVGFSEEECKAKGIDYGKGIFPWSASGRSLTIGRSEGMTKLIFNNSTKKIVGGGIVGPNAGELISEIALAIEMDCDVSDIALTIHPHPTLSETVGMAAEVFEGTVTDLYVKPRN

SEQ ID NO: 102239 - protein, 268 aa, Unknown
  Bacterial polypetide isolated from the Sargasso Sea
MSYDVIVIGSGPGGYVAAIRCAQLGLKTACVEGRETLGGTCLNVGCIPSKALLHASHQLHEAQHNFSKMGLKSEKISVDWDQMQTYKKEVIEGNTKGIEFLFKKNKIDWIKGWATIPSVGNVKVNDKTYETKNIIIASGSEPSSLPGLEIDEKIIVSSTGALELRKIPKKMVIIGAGVIGLELGSVYSRLGSDVTVLEYLDNITPGLDSELQKSFQRILKRQGIKFVMGAAVKSAICKKNKAHVLYQKNSDESEHSIEADIVLVATGR

SEQ ID NO: 102240 - protein, 178 aa, Unknown
  Bacterial polypetide isolated from the Sargasso Sea
MDKFDVTVIGSGPGGYVAAIRCAQLGMKTAIIERFSTLGGTCLNVGCIPSKALLDSSEHYHNALKNFGKHGIETDGIRLNWPGMLGRKDDVVGQTCSGVEYLMKKNEIKVIHGHGSFETNQKMLVQGEDRSNISVETDKVIIATGSKPSSIPGVHIDKQRIITSTEALKLAEIPKKMV

SEQ ID NO: 102241 - protein, 239 aa, Unknown
  Bacterial polypetide isolated from the Sargasso Sea
MSAYDVVIIGSGPGGYVAAIKAAQLGLKTACIEGRETLGGTCLNVGCIPSKALLNASEKFSDSINKFSKMGIEISTPTLDWTKMLQYKQTMIDQNTQGISFLFKKNKIDWIKGWARIKNKTTIEVNKKIIEAENIILATGSEPSSFGKIKFDEKKIVSSTGILELKEIPQKLTIVGAGVIGIEMGSVFSRLGSEVTVIEYLDHIIPGFDKEISKTFQRILKRQGLKFIMNSAVKDIKDS

SEQ ID NO: 102242 - protein, 442 aa, Unknown
  Bacterial polypetide isolated from the Sargasso Sea
MSEIKTQLVVLGGGPGGYSAAFRAADLGIETVIVDSRDTLGGVCLNVGCIPSKALLHVAKVMKEAKHLASHGVSFGEPTIDLDKIREYKDGVVKQLTNGLSGMSKMRKTKHVQGFGKFTGANTLEVKNGDDVTTITFEKAIIAAGSEPVSLPFIPEDDRVIDSTGALEMKDIPEKMLVLGGGIIGLEMGTVYEALGSKIDVVEFLDQLIPAADKDIMKVFMKDYKDKFNIMLETKVTAVEAKDDGLYVTFEGKNAPAEPVRYDKVLVAVGRKPNGKLVGADAAGVNVDERGFINVDKQMRTNVDHIFAIGDLVGQPMLAHKAVHEGHVAAEVIAGQKHYFDPRAIPSVAYTEPEVAWVGLTEKEAKEQGVSYETATFPWAASGRAIASDATNGMTKMIFEKETGRVIGGAMVGTNAGEMLGEIGLAIEMGADAEDVALTIHA

SEQ ID NO: 102243 - protein, 472 aa, Unknown
  Bacterial polypetide isolated from the Sargasso Sea
MDYDVVVIGGGPGGYVAAIKSAQLGMKVACVEYDEDSNGKQKMGGTCLNVGCIPSKSLLDSSYKFKQISASLPEHGINVSKANYDLSKMMDRKNDIVKKLTSGVSQLLKHNKVESIFGKGKLISKNEIEISDSKGKKKTLKAKYIVLATGSRPIYLDSVPWNGTNIVGSAGALEFSKTPKKLAIIGAGVIGLELGSVWSRLGSEVEIFEAEKTFLPMLDDDISRLIEREFKNQNININLGAMVKSSKNNRSSVTLEIDFAGQVEKRKFDKVIVAVGRKPFSENLLAKGCGLDVDEKGFIEVNNFCQTKLENIYAIGDLVRGPMLAHKAMEEGVMAAERIAGKKMEVNYDLVPSVIYTHPEIAWVGKTEKQLKQENIEFKKGSFPFAASGRALAAGDSVGAVKILADKESDQVLGVQIFGNSASEILQQGLIGMEFSASSEDFGLTMFSHPTVSEALHEAALAVNKQAIHIGN

SEQ ID NO: 102244 - protein, 200 aa, Unknown
  Bacterial polypetide isolated from the Sargasso Sea
MSEKKYDLVVIGAGPGGYVASIVAAQKGMKVANIEKRETLGGTCLNVGCIPSKALLHASEQYENNVKNNANLSWGIKTSDVSIDVQQLMKKKSTIVDELTKGINFLFNKNKIDKYVGEATLVNKNEIQINGRGKTEKIFAEKIIIATGSEPSNLNNIKIDEQKIVTSTGALDLKSVPKKVIVIGAGVIGLELGTVWRRLG

SEQ ID NO: 102245 - protein, 466 aa, Unknown
  Bacterial polypetide isolated from the Sargasso Sea
MSEKFQAVVIGGGPGGYVCAIRLAQLGLKTACIESRGSLGGTCLNVGCIPSKSLLNLSEEFHKVKSLANKGIEVGEVKLNLDKMMKSKDKAVTVLTKGVEFLLKKNKVTYFKGHGSFKSKNEILIKDDKNKETIIQTEKTVIATGSVPVSLPGIEIDEKTIVSSTGALKLEKVPKKMVVVGGGYIGLEMGSVWSRLGAEVQVVEFLDHITPGMDKEISSEFMKILKKQGMKFNMQNKVETIKKNAAGVVVSTVDKDGNKNNFECDVVLISVGRKPNTDGLNLESVGVDLDERNRIKTDKIFKTNVENIYAIGDVIVGPMLAHKAEDEGIAVAENIVGQSGHVNYDTIPGVVYTTPEVASIGKTEEQLKELNKKYKVGKFSFMANSRAKAIDDAEGFVKILADEQTDKVLGAHIIGPHAGELIAEIGVAMEFGASAEDIARTCHAHPTFSEAVKEAALSVDKRAIHS

SEQ ID NO: 102246 - protein, 465 aa, Unknown
  Bacterial polypetide isolated from the Sargasso Sea
MEDFDLIVIGAGPGGYVAAIRAAQLGMKVACIEKESSLGGTCLNIGCIPSKALLNSSEKFVEISNHAAEHGIKTSKIDLDLNVLMDRKTKIVKKLTTGIGFLFKKNKITHIPGMASFIDKNTISITNGKNEITASAKNFIIATGSSSVEIPNISVDEKQIVSSTGALSLSKIPKSLLVIGGGYIGLEMGSVWSRLGSKVTVVEALDRIVPTMDGEIAKEFMKMLTKQGLEFKLSHKVSSAKSSKSGVDVEMETSDKKKIKENYEIVLMSVGRKPNTEGLGLEKVGIKLTDKKSIKIKDNFKTSVEGIYAIGDVAPGPMLAHKAEEEGVACVEFINGQKPHINYDAIPAIVYTNPEIASVGKTEEQLKQEKKDFKVGKFPFMANGRALTTSASEGFVKILVDKKTDEILGAHIIGHDAGQLIAEIVTTIEFGGSAEDIARVCHAHPTTSEAVKEAALSVDGRAIHI

SEQ ID NO: 102247 - protein, 466 aa, Unknown
  Bacterial polypetide isolated from the Sargasso Sea
MSQKFDAVVIGGGPGGYVCAIRLAQLGQKTACIESRGSLGGTCLNVGCIPSKSLLNLSENYHKAKNFEKIGIEIGSLKLNLPKMMKNKEKAVTVLTKGVEFLFKKNKVTYFKGTGSITGTNQITVKSNENKNETIESKNIIIATGSNAVSLPGIEFDEEKIVSSTGALSLKEVPKKLVVVGGGYIGLEMGSVWSRLGSEVQVIEFLDHITPGMDKEISIEFQKLLKKQGINFNLKMKVESISKSNDGITLNTVDEQGNQKKFNCDVVLVSVGRKPNTSNLNLDKIGVEKDKKGRIKVNNHFQTNVKNIYAIGDVIEGPMLAHKAEEEGIAVAEIIAGQSGHVNYDIIPGVIYTSPEVASIGKTEEQLKETKVDYKVGKFPFMANSRAKAIDEPEGFVKILADSKTDKVLGVHMIGPHAGELIAEMAIAMEFGASSEDIARTCHAHPTFSEAVKEAALSVEKRQIHS

SEQ ID NO: 102248 - protein, 475 aa, Unknown
  Bacterial polypetide isolated from the Sargasso Sea
MSNEIKTQVVVLGAGPAGYSAAFRAADLGLETVIVERFSTLGGVCLNVGCIPSKALLHVAKVIEEAKAVAAHGVVFGEPTIDLDKLRSFKQKVISQLTGGLGGMSKMRKVNVVNGFGKFTGPNSLEVTAQDGTVTVVKFDQAIIAAGSRPIKLPFIPHEDPRIWDSTDALELKEVPGKLLVMGGGIIGLEMGTVYSSLGSEIDVVEMFDQVIPAADKDVVRVFTKQIKKKFNLILETKVTAVEAREDGIYVSMEGKSAPTEPVRYDAVLVAIGRTPNGKLIDAEKAGVKIDERGFINVDKQLRTNVPHIYAIGDIVGQPMLAHKGVHEGHVAAEVIAGMKHYFDPKVIPSIAYTDPEVAWVGLTEKEAKEQGIAYETATFPWAASGRAIASDCSEGMTKLIFDKDTHRVIGGAIVGVNGGELLGEIGLAIEMGCDAEDLALTIHAHPTLHESVGLAAEIYEGSITDLPNPKAKKK

SEQ ID NO: 102249 - protein, 336 aa, Unknown
  Bacterial polypetide isolated from the Sargasso Sea
MHSDNGKPNFGGTCLNVGCIPSKALLDSSHRYYEANKKLSEHGIQIEGLKLDLKSMMKRKDDIVGKLTGGISGLFSANKVESMIGRGKIIDINTVEVTKPDGSTETIDAKNIIVATGSKPIEIPSAKFSKHIVDSTGALCFNSVPKKLGVVGAGIIGLELGSVWSRLGSEVTVIEALDEFLPMTDHDISKETLKEFKKQDLDIKLGSKVTSTKELKNSVKVKFESNDQENEMEFDKLIVAVGRAPNSTNVISDELNIEIEDGFIKVNDFCQTSVNNIWAIGDVVRGPMLAHKGSEEGIMVAERIAEKHTEVNYDLVPSVIYTHPEIAWVGQNEKDL

SEQ ID NO: 102250 - protein, 466 aa, Unknown
  Bacterial polypetide isolated from the Sargasso Sea
MSEKFQAVVIGGGPGGYVCAIRLAQLGIKTACIESRGTLGGTCLNVGCIPSKSLLNLSENYFRAKNFSNLGIEIQKIKLNLKKMMQNKDQAVNTLTKGIEFLFKKNKVTYYRGIASFKSVNQISIVDDKNKKTVIETDKTIISTGSEAVSLPGIKFDEKVIISSTGALSLNSVPKKMVVVGGGYIGLEMGSVWSRLGAEVHVIEFLDHIIPGMDKGISKEFIKILEKQGINFHLETKVNSIKKNNNTAKVLTTSKNGKEINFDCDVVLISVGRKPNTKNLNLEAVGVLLDNKKRIKVNNNFQTNVDNIYAIGDVIKGPMLAHKAEEEGIAIAELIAGQSGHVNYDIIPGVIYTFPEVASIGKTEEQLKDLNIKYKIGKFTFMANSRAKAINETEGFVKILADEKTDKVLGAHIIGPNAGEMIAEIAIAMEFGASSEDIARTCHAHPTFSEAIKEAALSVDKRPIHS

SEQ ID NO: 102251 - protein, 324 aa, Unknown
  Bacterial polypetide isolated from the Sargasso Sea
MSEKFQAVVIGGGPGGYVCAIRLAQLGLKTACIESRGSLGGTCLNVGCIPSKSLLNLSEEFHKVKNLSNKGIEIGEVKLNLEKMMKSKDKAVTILTKGVEFLLKKNKVTYFRGHGSFKSKNQISIKDDKNNETIIESEKTVIATGSVPVSLPGIDIDEKVIVSSTGALKLEKVPNKMVVVGGGYIGLEMGSVWSRLGSEVQVVEFLDHITPGMDKEISSEFMKILKKQGIKFNMQNKVETIQKNNNGAVVSTVDKDGTKNNFECDVVLISVGRKPNTDGLNLDKVGIDLDERKRIKTDKTFKTNVENIFAIGDVIVGPMLAHKA

SEQ ID NO: 102252 - protein, 467 aa, Unknown
  Bacterial polypetide isolated from the Sargasso Sea
MDKFDVTVIGSGPGGYVAAIRCAQLGMKTAIIERYSTLGGTCLNVGCIPSKALLDSSEHYHNALKNFRKHGIETDGVRLNWPGMLGRKDDVVGQTCSGVEYLMKKNEIKVIHGHGSFETNQKVLVQGEDGSNISVETENVIIATGSKPSSIPGVQIDKQRIITSTEALKLAEVPKKMVVIGGGIIGLELGSVYSRLGTEVQVVEYLDRLIPSMDGSLGKEMLRTLKKQGIQFFLTHAVQEAKNFGDKVVVKALNKKDQEVEFDADYCLVAVGRRPYTEGLNLNAAGLEIDEKGRVPVDENLKTQTPGIYAIGDVVRGAMLAHKAEEEGVFVAEVIAGEKPHINYRNIPSVLYTWPEAAGVGFTEEELISEERSYKSGSFPFRALGRARAAMETDGLVKILADPDTDEILGVHMMGARIADLIAEAVVALEYRASAEDLSRMSHAHPTFAEAVKEAALDATAKRPLHL

SEQ ID NO: 102253 - protein, 466 aa, Unknown
  Bacterial polypetide isolated from the Sargasso Sea
MSEKFQAVVIGGGPGGYVCAIRLSQLGLKTACIESRGSLGGTCLNVGCIPSKSLLNLSEEFHKVKGLANKGIEVGDVKLNLDKMMKSKDKAVTVLTKGVEFLFKKNKVTYFKGYGSFKSQNEILIKDNENKETIIQSEKTIIATGSVATSLPGIEIDEQKIVSSTGALKLEKVPNKMVVVGGGYIGLEMGSVWSRLGAEVEVVEFLDHITPGMDKEISSEFMKILKKQGIKFNMQNKVETIKKNKSGVVVSTVDKEGNKNNFESDVVLISVGRKANTEGLNLETIGVELDDRKRIKTDKSFKTNLENIYAIGDVISGPMLAHKAEDEGIAVAENIAGQSGHVNYDTIPGVVYTTPEVAAIGKTEEQLKDSKMKYKVGKFSFMANSRAKAIDDAEGFVKILADEKTDKVLGAHIIGPHAGELIAEIGVAMEFGASSEDIARTCHAHPTFSEAVKEAALSVDKRAIHS

SEQ ID NO: 102254 - protein, 465 aa, Unknown
  Bacterial polypetide isolated from the Sargasso Sea
MADFDLIVIGAGPGGYVAAIRASQLGLKVACVEKEKTLGGTCLNIGCIPSKALLNSSEKFAEISKHAAEHGISTGKVSLDLAKLMQRKNKIVKQLTSGIGFLFKKNKITHIQGAASFLDTKTIKVSSSDGDKNYSAKNYIIATGSTSIAIDAIPIDEKQIVTSTGALALESVPKSLLVIGGGYIGLEMGSVWNRLGSKVTVVEALDRIVPTMDEEIATEFMKSLKKQGLEFKLSHKVISTKASKSGVEVSMESSDKKQITEKYDVVLMSVGRKPNTEGLNLEGIGVKFNEKKSIEINSKFKTNINGIFAIGDVVPGPMLAHKAEEEGVACVEFINGQKPHLNYDIIPAIVYTNPEVASVGKTESQLKDAKIDYKIGKFPFMANGRALTTSSPEGFVKILADSKTDELLGAHIIGHDAGQLIAEIVTTMEFGGSSEDIARICHAHPTTSEAVKEAAMNIVGRAIHI

SEQ ID NO: 102255 - protein, 544 aa, Unknown
  Bacterial polypetide isolated from the Sargasso Sea
VLTLETEKAAMDVPSPFTGVVENISVGPGDSVSQGDLISIVSSESKPNEEDESITEEKETEQAIQESEDPSESSQSEHDYDLIVVGAGPGGYAAAFRASDLGLKVGLVERNSDLGGVCLNVGCIPSKAFLHAAKILDDSKEAEVSGIVFKEPEINLSKMKEWKNNIIGGLTGGLSGLAKQRGVDVIHGTAKFSSKNEIEVNHESDSRRISSNQFIIAVGSEPAELSFLPDDPRIIDSTGALEPDQIPNDILIIGGGIIGLEMATIYSALGSEVTIVELTKQLMPGTDPDLVRPLERILNKKCKKIMKSSQVISASASDEGISVSFKKDDEEFSEIFQNVLVAVGRKSNGSLLGLDEIGVNVDERGIINVDKQFRTTVESIFAIGDVIGDPMLAHKASHEGKIAAEVAAGHKSTNDIRCIPSVAYTDPEVAWVGFSEEECKAKGLDYGKGIFPWSASGRSLTIGRNEGMTKLIFNNSTKKIVGGGIVGPNAGDLISEIALAIEMDCDVSDIALTVHPHPTLSETVGMAAEVFEGTVTDLYVKPRN

SEQ ID NO: 102256 - protein, 574 aa, Unknown
  Bacterial polypetide isolated from the Sargasso Sea
MDKRSVQVPDIGDFQEVEVIDILVQSGDRIQEEDPLITLESDKASMDVPSPFSGTISSIHLKVGDKVSEGNLILELEEELINSEPTTQKSLEEKTPPSEENINPSKTTATPSSRQVSKADLNCEVLVLGAGPGGYTAAFRAADLGKKVILVERYESLGGVCLNVGCIPSKALLHAAKVIDDAHAMKDHGIDFGTPKIDPIRLSAWKNSVVGKLTNGLKSLAKQRKVECLTGKGTFLDSHHLQIESKSGKTTVRFENAIIAAGSEPVKLPFLPDDPRIMDSTGALNLQQIPETMLVIGGGIIGLEMATVYRAMGTKITVVEMLDGLMAGADRDLVKPFHRIVSRQYDNIWLETRVTQVEAQKKGLKVHFEGKNAPEKPVVFETILSAVGRIPNGLKIGAENAGVSVNEKGFIEVDSQMRTNVSNIYAIGDIVGQPMLAHKATHEGKVASEVICGMKSHFDARTIPSVAYTDPEVAWAGITEEEAKSQGINYGKGIFPWAASGRSLALGRDEGMTKIMFDEGTKKVIGMGIVGPNAGELIAEGMLAIEMGADATDIGSTIHPHPTLSETVGLAAEA

SEQ ID NO: 102257 - protein, 462 aa, Unknown
  Bacterial polypetide isolated from the Sargasso Sea
MSKYDVIVIGGGPGGYVASIRCAQMGLHTACVEGRDTLGGTCLNVGCIPSKALLHASHQLHEAEHNFKKMGLIAKPPSVDWSKMQNYKTETIDANTKGIEFLFKKNKIDHLKGWASISAPGKVRVDKTTYEAKSIIIASGSEPSTIPNVEIDEKIIVSSTGALSLSKIPKTMTVIGAGVIGLELGSVYARLGTKVTIIEYLDYITPGMDTEVQKTFQRILKKQGISFIMGAAVQSASKSKSVGKVKYKLNKDASLHELDGDIILVATGRKPNTHGLGLDKLNMELTERGQIKTDSGWQTNIPNIYAIGDVVEGPMLAHKAEDEGMAVAEQIAGKNGHVNYQVIPSVIYTAPEVASVGLTEQQAKESDRSVKIGKFMFMGNGRAKANFAADGFVKIIADKDSDRILGAHIVGPAAGDLIHELCIAMEFGASAQDVALTCHAHPTYSEAVREAALACGSGAIHA

SEQ ID NO: 102258 - protein, 353 aa, Unknown
  Bacterial polypetide isolated from the Sargasso Sea
MTDYDLIIIGAGPGGYVAAIKAAQLGMKVACVEKEKTLGGTCLNIGCIPSKALLYSSEKYYETSNKISEHGIKVGNINVDISKMMQRKNNIVKKLTTGISFLFKKNKITHIAGHASFIDTKTILVKDENEERRYSALNFIIATGSSSMERPGISVDEKQIVTSTGALSLPEIPKAMLVIGGGYIGLEMGSVWSRLGTKVTVIEKLDRILPAMDSEVASEFKKSLEKQGIEFKLSHKVIAAKPVSKYVEVTMESEKDKKQTIDKFNIVLMSIGRKPNTEGLNLEKIGIKLNDQRFIEVDKYFKTSIDNIYAIGDVAPGPMLAHKAEEEGVACVEIIKGQKAHLNYDNIPAIVYT

SEQ ID NO: 102259 - protein, 223 aa, Unknown
  Bacterial polypetide isolated from the Sargasso Sea
MEYDVVVIGGGPGGYVAAIKASQLGLKTACIEFDEDKSGKVKLGGTCLNVGCIPSKSLLDSSYKFKQISESFDDHGIKVSKPSYDLSKMMQRKDEIVQKLTGGVGHLFKHNKVESIHGKGKLVSANEVEVTNSKGKKQTVKGKNIILAAGSRPINIPSVPWNGSTVVGSSGALEFNETPKKLAIIGAGVIGLELGSVWSRLGSVVDIYEAEKTLLPMLDDDVS

SEQ ID NO: 102260 - protein, 394 aa, Unknown
  Bacterial polypetide isolated from the Sargasso Sea
MTKFDTIVIGSGPGGYVAAIRCAQLGMKTAIIERYPTLGGTCLNVGCIPSKALLDSSEHFNNAKHNFEKHGIITQKLELNWPRMLERKDDVVSQTCDGLQYLMKKNKITFFNGHGTFKDKNTIIVKKGNDEHTFKTEYTIVATGSKPSNITGVNCDKKRIITSTEALSLPKVPEKLVVIGGGIIGLELGSVFNRLGSKVQVVEYLDRLVAGMDISLGKEILRVLKKQGIEFFLSHAVQKAVVNGKNVEVIAKNKQDQEVKFSGDYCLVAVGRRPYTENLGLQDIGIPLDEQGRITVNENLETLVPGIYAIGDVIKGAMLAHKAEEEGVFVAETIVGQKPYINYKSIPEVLYTWPEAAGVGFTEDELKSENYNYSTGNFPFKALGRARVSMDTEG

SEQ ID NO: 102261 - protein, 467 aa, Unknown
  Bacterial polypetide isolated from the Sargasso Sea
MNDFDLTVIGAGPGGYVAAIRASQLGMKVAVIEERKSLGGTCLNIGCIPSKALLNSSEKYESINSAQLEDFGINLSSVKLNISKMMENKDNIVSDLTKGIEFLFKKNKISSFEGNGYISSPNEIIVSKNGKEEVIKSNKILIATGSVVAPLNNIKIDEKNIVSSTGALELKKVPKRLIVVGGGYIGLEMGTVWRRLGSQVTVIEYLDRILPGMDSEVAKKFKLILQKQGIDFKLNTAIKDARVDKGSVYLSANNNSTNENLSFEADVVLIATGRIPNTQNLGLDTLGIKLSQKGEILVNNNFETNVSNIYAIGDVIPGPMLAHKAEEDGIAAVEIMNGVAGHVNYDLVPGIVYTSPEVATLGKTEDELKESQINYNKGVFPFSANSRARAINHTDGFVKILSDKNSDKVLGVHIIGHEAGNLVHEVATAMSFGGSAEDIARTCHGHPTLNEAVKEAALAAGTGAIHI

SEQ ID NO: 102262 - protein, 388 aa, Unknown
  Bacterial polypetide isolated from the Sargasso Sea
MFDVVVIGSGPAGYVAAIRASQLGFKTLCIEESIDDDGKPNLGGTCLNVGCIPSKALLDSSHKYYQANKNLSDHGVQIDKLKLDLDAMMSRKDAIVSQLTGGVSGLFKANKVESITGRGKVISKNVIEITKPDGSKENLDAKNIIIATGSKPIEINAAPFSKNIVDSTGALSFKKVPKKLGVVGAGIIGLELGSVWSRLGSNVTVLEALDDFLPMSDPDISKDSFKEFKKQGLDILLGSMVTSTKDMKDSVKLSYTKEDNEIEMEFDKLIVAVGRSSNSENILNDDLGVSIKNGLIEVDEYCQTSVSNIWAVGDVVRGPMLAHKGSEEGIMVAERIAEKHTEVNYDLVPSVIYTHPEIAWVGKNENELKESGIDYNVGKFPFAANGRA

SEQ ID NO: 102263 - protein, 467 aa, Unknown
  Bacterial polypetide isolated from the Sargasso Sea
MSSFDVVIIGSGPGGYVSAIRCAQLGFKTAIIEKYSTLGGTCLNVGCIPSKALLASSHHYSEIAHFADYGIELSGEVKVNLEKMIARKQAVVDQTSGGVKFLMDKNNITVLEGLGSFVDETHVAVAKGDGTSETIEAKNIIIATGSKPSSLPFIKIDKERIITSTEALKLKEVPKHLVIIGGGVIGIELGQVYLRLGAQVSVVEYLDRIIPGMDASLSKELTKVLKKQGMKFYVSHKVQSVDRNGDAVVVQAESAKGETITLEGDYALVSVGRRPYTDGLNADKAGVKVTERGMVEVNDHLQTNVPNIYAIGDVVRGAMLAHKAEEEGVMVAEILAGQKPHIDYNLIPGVVYTWPEVAAVGQTEEQLKANGVAYKAGSFPFKALGRARAGGDTDGFVKILADSKTDEVLGVHMIGARCADLIAEAVTAMEFKASAEDISRMSHAHPTFAEAIKEAALAATDNRALHV

SEQ ID NO: 102264 - protein, 219 aa, Unknown
  Bacterial polypetide isolated from the Sargasso Sea
MPDYDLIVIGSGPGGYVAAIRAAQLGMKVACVEKEKALGGTCLNIGCIPSKALLASTEKFSEIENHIDEHGISADKINIDISKMMIRKNKIVTKLTTGIGFLFKKNKITQLIGQASFIDSKTIQVKNDKDERRHTASNFIIATGSSSKKIPSITIDEKKIVTSTGALSLDAVPESMLVIGGGYIGLEMGSVWSRLGTKVTVVEALDRIVPTMDGEIALE

SEQ ID NO: 102265 - protein, 403 aa, Unknown
  Bacterial polypetide isolated from the Sargasso Sea
MTDKFQAVVIGGGPGGYVCAIRLAQLGLKTACIESRGSLGGTCLNVGCIPSKSLLNLSEEFHKAQSLSNKGIEIGEVKLNLSKMMKNKDKAVTILTKGVEFLLKKNKVTYFKGTGSFKSKNDIVIKDNDNKETIIQTENTIIATGSVPVSLPGIEIDEKVIVSSTGALKLEQVPKKMVVVGGGYIGLEMGSVWSRLGAEVHVVEFLDHITPGMDKEISSEFMKILKKQGINFHMKHKVEKIKKNNDNAIVSTLNENGTKKDFECDVVLISVGRKPNTEGLNLQKIGVELDEKKRVKTDENFKTNQNNIYAIGDVISGPMLAHKAEDEGIAVAENIAGQSGHVNYDTIPGVIYTSPEVASIGKTEEQLKELKINYKIGKFSFMANSRAKAIDDTEGFVKILADE

SEQ ID NO: 102266 - protein, 465 aa, Unknown
  Bacterial polypetide isolated from the Sargasso Sea
MVDFDLIVIGAGPGGYVAAIRAAQLGMKVACVEKGQTLGGTCLNIGCIPSKALLNSSEKFAEISKHSEEHGISTGKVELDLSKLMQRKNKIVKQLTSGIGFLFKKNKVTHIQGLASFTDKNTIKISSSDSEKNYSAKNFIIATGSSSIAIDAIPIDEKQIVTSTGALALESVPKSLLVIGGGYIGLEMGSVWSRLGSKVTVVEALDRIVPTMDEEIAKEFMKSLKKQGLDFKLSQKVTSTKASKDGVDVIMESSDKKTVTEKYDVVLMSVGRKPNTEDLNLEAIGVKLNEKKSIEINSKFKTSVDGIYAIGDVVPGPMLAHKAEEEGVACVELISGQKPHINYEMIPAIVYTNPEVASVGKTETELKAKKIDYKIGKFPFMANGRALTTSSPEGFVKILADSKTDAILGAHIIGHDAGQLIAEIVTTMEFGGSSEDIARICHAHPTTSEAVKEAAMNIEGRAIHI

SEQ ID NO: 102267 - protein, 472 aa, Unknown
  Bacterial polypetide isolated from the Sargasso Sea
MEYDVIVIGGGPGGYVAAIKASQLGLKTACIEFDEDDQGKQKLGGTCLNVGCIPSKSLLDSSYKYHQISESFDEHGIKVSKPNYDLARMMERKNEIVKKLTGGVSHLFSHNKVEAIHGKGKLLNQNEVEVTDLKGKKKKYKGKNIVLATGSRPINIPSVPWNGTTVVGSAGALEFTETPKKLGIIGAGVIGLELGSVWSRLGSEVSIYEAEKDLLPMLDSDMTRTIEREFKKQNLNIHLGCFVKGSKKYRKGINLEVEIDGKIEKKYFDKVIVAVGRRPFTDNLLDEGCGLTLDEKGFIPVDGYCQTDLNNVYAVGDLVRGPMLAHKAMEEGVMVAERIAGKKMEVNYDLVPSVIYTHPEIAWVGKTEKQLKDEGIDFKKGNFPFAASGRALAAGDAVGSVKVLADKETDQVLGVQIFGNSASEILQQGLIGMEFSASSEDFGLTMFSHPTVSEALHEAALAVNKQAIHIGN

SEQ ID NO: 102268 - protein, 427 aa, Unknown
  Bacterial polypetide isolated from the Sargasso Sea
MSEKFDVTVIGGGPGGYVCAIRLSQLGLKTACIESRGSLGGTCLNVGCIPSKNLLNFSENFHKAKNFKNIGIEVGEVKLNLDKMMQNKEKAVTVLTKGIEFLFKKNKVSYFKGMGAFKKVNEISILANGKETIIQTNKTIICTGSGPVSLPGMEFDEKQILSSTGALSLREVPKKMVVVGGGYIGLEMGSVWSRLGTQVEVIEFLDRITPGMDNEISKEFEKILKKQGIKFKLNTKVEKITKSNNFVSIDTVDKEKNKNKIQADVVLISVGRKPNTKSLNLKNVGVQTDEKGRVKVNKKFETNIKNIYAIGDVIDGPMLAHKAEEEGIAVAELIAGQSGHVNYDIIPGVIYTSPEVASVGKTEEQLKTNKSNYKIGKFPFMANSRAKAIDESEGFVKILADAKTDKVLGVHIIGSHAGEMIAEMAVA

SEQ ID NO: 102269 - protein, 463 aa, Unknown
  Bacterial polypetide isolated from the Sargasso Sea
MKNEHTTLLIIGGGPGGYVAAIRAGQLGIPTVLVERDRLGGTCLNIGCIPSKALIHVADAFEQACGHAGEGAIGIRVRTPEIDIAKSVAWKDGIVDRLTRGVGALLKKNGVRVLHGDAHVVDGKTVDVVAGGHAARISCEHLLLATGSEPVALPSMPFGGHVVSSTEALSPATLPKRLVVVGAGYIGLELGIVYRKLGVDVSVVEAAERVLPAYDAELARPVADSLARLGVRLLLGHKVLGLAEHGAVRVQAADGAEQTLPADRVLVAVGRRPRVDGFGLESLPLDRNGRALWIDDECRTSMRNVWAIGDVAGEPMLAHRAMAQGEMVAELIAGKRRKFVPASIPAVCFTDPEIVTAGWSPDDARAADVDCVHAAFPFAANGRAMTLQATDGFVRVVARRDNHLIVGWQAVGRGVSELAAAFSQSLEMGARLEDIGGTIHAHPTLGEALQEAALRALGHALHV

SEQ ID NO: 102270 - protein, 436 aa, Unknown
  Bacterial polypetide isolated from the Sargasso Sea
MSEKFEAVVIGGGPGGYVCAIRLSQLGLKTACIESRGSLGGTCLNVGCIPSKSLLNLSEEFHKVKGLANKGIEVGNVKLNLDNMMKSKDKAVTVLTKGVEFLFKKNKVTYFKGYGSFKSPNEILIKDNENKETIIQSEKTIIATGSVATSLPGIEIDEQKIVSSTGALKLEKVPNKMVVVGGGYIGLEMGSVWSRLGAEVQVVEFLDHITPGMDKEISLEFMKILKKQGIKFNMQNKVETIEKNKSGVVVSTIDKEGNKNNFDCDVVLISVGRKANTEGLNLEAIGVELDDRKRIKTDKFFKTNLENIYAIGDVIVGPMLAHKAEDEGIAVAENIAGQSGHVNYDTIPGVIYTTPEVAAIGKTEEQLKDSKMKYKIGKFSFMANSRAKAIDDAEGFVKILADEKTDKVLGAHIIGPHAGELIAEIGVAMEFGASSE

SEQ ID NO: 102271 - protein, 462 aa, Unknown
  Bacterial polypetide isolated from the Sargasso Sea
MSDYDVIVVGSGPGGYVCAIRCAQLGLKTACIEGKDTLGGTCLNIGCIPSKALLHASELFEESNHNFSKLGIETGKMTVNWSKMLEYKNDIVNQNTKGIEFLFKKNKIDLINGWASIKEPGLLIVNNQNLKSKSIIIATGSEPSQLKGIQVDEKTIVSSTGALSLTKIPKKLIIVGAGVIGLELGSVYSRLGTDVTVLEYLEEITPGLDKETAKMFRRILSKQGIKFILGAGVQATKKLGDRLIVEYSLRNDKKREELDTDIILVATGRKPFTDGLNLKKVGIELNQFGQILTDENLKTNIDGIYAIGDVTSGPMLAHKAEDEGIALAEMLAGQSGHVNYDIIPSVIYTSPEVASVGKTEEQLKKENKSYNVGKFSFMGNGRAKACLSADGYAKILSDKTTDRILGGHIIGPSAGDLIHEICVAMEFGASAEDLARTCHAHPTFSEAVREAALACGDGAIHS

SEQ ID NO: 102272 - protein, 470 aa, Unknown
  Bacterial polypetide isolated from the Sargasso Sea
MSNEIKTQVVVLGAGPGGYSAAFRAADLGLEVTLVEARNTLGGVCLNVGCIPSKALLHVAKVIDDAKEMASHGVTFGAPQIDLDKIRAWKDKVVAQLTNGLAGMSKMRKVKVVTGYGKFTGPNTLVVGDTTITFESAIIAAGSEPVALPFIPKDDPRVIDSTGALELKDIPGEMLVLGGGIIGLEMGTVYRALGSKVSVVEFADQLVPAADADLVKVYTKYNKDNFNIMLSTKVTAVEAKADGLYVTFEGKNAPATPVRYDKILVAVGRRPNGSLLDAAKAGVNVDERGFINVDKQLRTNVPHIYAIGDVIGQPMLAHKAVHEGHVAAEVISGLKHFFDPRCIPSVAYTDPEMAWVGITEKEAKEKGVAVETATFPWAASGRAIASARTEGFTKLIFDKETHRILGGAIVGINAGEMLGEICLAVEMGADAEDIALTIHAHPTLNESIGLAAEMYEGSITDLPNPKAKKK

SEQ ID NO: 102273 - protein, 472 aa, Unknown
  Bacterial polypetide isolated from the Sargasso Sea
MFDVVVIGSGPAGYVAAIRASQLGLKTLCIEEALDKKGKPTFGGTCLNVGCIPSKALLDSSHRYHEAKKNLGSHGVKIEGIKLDLQSMMKRKNDIVSKLTGGIDGLFASNKVETISGKGMIVSSNKIRVEKIDGSYEEIDTKNIIIATGSTPIEIPSASFSENIVNSTGALSFETVPKTLGIVGAGIIGLELGSVWSRLGSDVTVLEAMNDFLPMTDPDISKDAFKEFNNQGLNIQLGAKVTGTKDLKNSVKVKYDLKDKEVEVDFEKLIVAVGRKPNSSEVFLNDLDIKINNGFIEVNEFCQTSIDNIWAVGDVVRGPMLAHKGSEEGIMVAERIANKFMQVNYDLVPSVIYSHPEIAWVGKNENELKSEGVNYKVGKFPFAASGRALAVDQSVGFVKVLSEERTDTILGVHVIGPAAAEIVQQALISMEFGSSAEDIALTMFSHPTVSEAFHEAALAANNQAIHIGNKRR

SEQ ID NO: 102274 - protein, 467 aa, Unknown
  Bacterial polypetide isolated from the Sargasso Sea
MTDSYDIAVIGSGPGGYVCAIRAAQLGLSVICIDKRGSHGGTCLNVGCIPSKALLHASELFIEKSKFSSMGIEADNISLNLSSMMTYKEEGVQGNVKGIDFLFKKNKIENIYGEAQIIENNKISINLNDGDNKEIEAKNIVIATGSIPTSIPGVEITGNKIISSTEALSLSEVPNRLVVVGGGYIGLELGSVWSRLGSEVTVIEYLDRITPGMDNEVSAALQKILAKQGLSFSLNSQVVSVTETGSNVSIAVKNRENNEEENIEADYVLVSTGRKPYIENLFSDGIDIEKTENGFIKTDSHLRTNLDGIWAIGDVVEGPMLAHKAEEEGIAVAELIAGKPGHVNYDIIPSVIYTNPEVASVGMTEEQLKEKSIDYSIGKFPFMANGRAKVNNTTEGFVKILSSTDTDQILGVHIIGDQAGNMIGEAAVAMEFEATSEDLARICHAHPTLSEAIKEAALSVDGRALHM

SEQ ID NO: 102275 - protein, 328 aa, Unknown
  Bacterial polypetide isolated from the Sargasso Sea
MSDKYDLVVIGAGPGGYVAAIRAAQLGLHVACIDKRDTLGGTCLNVGCIPSKALLSASGKYVEASKKFADIGIEVSGLQVNLTQMLSKKDSVVSELTKGIEFLFKKNKVEWLSGEAFIRSNTEVEVTFNSGKKTRIVADKIMIAVGSEPVCLPNLAFDEKQIVSSTGALSLERVPERLVVVGAGYIGLEMGSVWSRLGSSVTVVEFLDNIVPNVDLEVAKHFYRNLQKQGLNFMLGTKVIQADLNDKGVALLAESVNGGRQQKIDCDVLLVAVGRKPSTDNLGLDELGVKRDKNGFLCVNDKLETSVANILAIGDCIPGPMLAHKAEE

SEQ ID NO: 102276 - protein, 474 aa, Unknown
  Bacterial polypetide isolated from the Sargasso Sea
MSDHYDVAVIGSGPGGYSAAIRSGQLGKSVICIEKCGEDQTPILGGTCLNVGCIPSKALLDSSYEYHKAINQSSDHGIKINDISLDLNQMLTRKEKVVDDLTKGVSGLFKLNKVKSLKGFAKIKKDLSIEVTDKEGSLNLITADNIVLATGSKPAELDFSPTDQKYIITSKEALNLKQIPSQIIIIGSGAIGLEIGSIWSRLGSKVILLEELEQLLPQADTQVSTSAMKIFKNQGLDIRLGTKIESAEKKEEKVLIRFGEESLEADKLIVAAGRVSYFEDLLDEGIDLELDSNGSINVNQFCETNLKGLYAIGDVVRGPKLAHKASEEGIMVAENIAGLNSSLDYELIPFVIYTHPEIAWVGKNEDQAKKMGIDYESASFPFSLNGRSLANKEESGFVKMIVDKKNDAILGVHIIGSNASELIQQAIIAIKTELSAEKLGSLIFSHPTQSEAIKETASLINSKAIHISNRKRKK

SEQ ID NO: 102277 - protein, 467 aa, Unknown
  Bacterial polypetide isolated from the Sargasso Sea
MSENKFDVVVIGSGPGGYVCAIRLAQLGFKTAIIEKYKSLGGTCLNVGCIPSKSLLDSSHHYEDIIKHAENHGIEISGKINLNFKKMIERKDGVVQQTVKGVDYLMNKNKITVFEGKASFVNSNTLKIAEKKVNVMFDKCIIATGSKPISLPFINIDKKRVITSTEALSLNEIPKHLVIIGGGVIGLELGQVYKRLGSEVSVIEYSDKITPFMDSDISKELLKILKKQKINFYLSHEVFEVENKKNIISVKAKNKNDEIKTFECDYCLVSVGRKAYTEGLGLDNVGIEIDSAGKIVTDSKFKTNAENIYAIGDVINGPMLAHKAEEEGIAVAEILKGEKPHIDYNLVPNVIYTWPEVSSVGRTEQQLIDDNVDYKVGKFPMRALGRSRASSDLDGFVKIIADKKSDEILGIHIIGARAADLIVEGVTAMEFRASCEDISIMSHPHPTYSEAMKEAALAALDNRPLHI

SEQ ID NO: 102278 - protein, 466 aa, Unknown
  Bacterial polypetide isolated from the Sargasso Sea
MSEKFQAVVIGGGPGGYVCAIRLAQLGFKTACVESRGTLGGTCLNVGCIPSKSLLNLSENFHKAKSFDQLGIEVGQIKLNLEKMMKNKDKAVDVLTKGVEFLFKKNKVSYFKGTGSLTKNNQVKIIDLNNKEILLDTDKIIISTGSEASELPGAKFDEKIIVSSTGALSLKSVPKKMLIVGGGYIGLEMGSVWSRLGSEVHVVEFLDHITPGMDKEISKEFMKILKKQGINFHMETKVENIKKNSDSATVTIQGKDGKKTQMETDVVLVSVGRKPNTKNLNLDNVGVKLDSKMRVQVNKNFETSIKNIYAIGDVIDGPMLAHKAEEEGIAVAELIAGQAGHVNYDVIPGVIYTTPEVATVGETEEKLNEKKIKYKVGKFSFMANSRAKAINEAEGFVKILADEKTDKVLGVHLIGPHAGELIAEMAVAMEFGASSEDIARTCHAHPTFSEAVKEAALSVDKRAIHS

SEQ ID NO: 102279 - protein, 472 aa, Unknown
  Bacterial polypetide isolated from the Sargasso Sea
MYDVVVIGGGPAGYVAAIKASQLGLNTACVEFASDEKGNQKYGGTCLNVGCIPSKSLLDSSHKYYEAQNDFASHGIDLKDLSVNIPSMMKRKDEVVNKLTTGITGLFKANGVEAISGRGKVINENLVEVSNNGDITSLETKFIILATGSNPIEIPIAKWSENIVDSTGALNFDRVPERLGIIGAGVIGLELGSVWSRLGAEVTVIEAMDDFLPIVDKQISKECHREFKKQGLDIHLGSKLTSAKDNGKDVEISYESKGEELKASFDKLIVAVGRKPNTADISDESFPIELDELGRVQVDDFCKTNYENIYAVGDIVRGPMLAHKGSEEGVMVAERIAGKKARMNYDLVPNVIYTHPEVAWVGKTQQELEDHGVEFKIGSFPFAASGRALAAADSVGSVKVLADKKDDTILGVHVFGPSAADIVQQAVIAMEFGSSAEDIGLTVFSHPTVSEAFHEAALAANNSAIHIGNKRK

SEQ ID NO: 102280 - protein, 476 aa, Unknown
  Bacterial polypetide isolated from the Sargasso Sea
MSKEFDVVVIGAGPGGYIAAIRAAQLGKTVACIEKWKNPAGALKLGGTCLNVGCIPSKALLASSEEFENTSHHLADHGITVDGVKIDVAKMLGRKDAIVEKMTSGIEFLFKKNKITWLKGHGKFTGKTDAGVQIEVSGEGETEVVTAKNVIIATGSKARHLPGIPVDNKIVSDNEGALTFDSVPKKLAVIGAGVIGLELGSVWRRLGAEVTVLEALPAFLGAADEALAKEAAKLFKKQGLDIHLGVKIGEVKTTANGVSIAYTDKDGNAQTLDADRLIVSVGRVPNTDNLGLEAIGLKANERGFIDVDDHCRTAVPNVYAIGDVVRGPMLAHKAEDEGVLVAEVIDGQKPHIDYNCIPWVIYTYPEIAWVGKTEQQLKAEGREIKSGKFPFSINGRALGMNAPDGFVKMIADAKTDELLGVHVIAANASDLIAEAVVAMEFKAASEDIARICHPHPSMSEVMREAALAVDKRSLNS

SEQ ID NO: 102281 - protein, 468 aa, Unknown
  Bacterial polypetide isolated from the Sargasso Sea
MYDILIIGSGPAGYVAAIRAAQLGLKVGCVEQSSIGGTCLNIGCIPSKSLLDSSYKHYQLEDQYSKHGIEIKDVSIDLKKMMSRKDEVVKQLTNGVSALFKSNNIDLIEGKAKVTSHTSVEVSKVSESHIYETKNIIIATGSSPTELNNINFTSNIVDSEGALKFERIPKQLIVVGAGIIGLELGSVWARLGSEVTILEAQQEFLPMLDARMSRQILRELNRQGLDIRFGSNILDISDTTNGVEVKFQENGEDIDLKAEKMIVAIGRKPNTQDLFNNDLVSIDDKGFIEVDEHCQTKTKNIWAIGDAVRGPMLAHKASEEGIMVAERISGEDSLINYAHIPNVIYTHPEVAWVGKSEKELKKLKVDYKSGSFPFAASGRALASGDSIGSVTIHADNQTDQILGIQVFGPSATEIMQQGLIAMDNKVTSEKFSTTIFSHPTVSEALHEATLAMNQKAVHIQNRKKKISI

SEQ ID NO: 102282 - protein, 465 aa, Unknown
  Bacterial polypetide isolated from the Sargasso Sea
MEDFDLIVIGAGPGGYVAAIRAAQLGMKVACIEKEPSLGGTCLNIGCIPSKALLNSSEKFVEISNHAAEHGIKTSKIDLDLSILMDRKTKIVKKLTTGIGFLFKKNKITHIPGMASFVDKNTISITNGKNEITASAKNFIIATGSSSIEIPNIPVDEKQIVSSTGALSLSKIPKSLLVIGGGYIGLEMGSVWSRLGSKVTVVEALDRIVPTMDGEIAKEFMKMLTKQGLEFKLSHKVSSAKSGKSGVDVEMETSDKKKIKENYEIVLMSVGRKPNTEGLGLEKIGVKLTEKKSIEIKDNFQTSVEGIYAIGDVAPGPMLAHKAEEEGVACVEFINGQKPHINYDAIPAIVYTNPEIASVGKTEEQLQQEKKDFKVGKFPFMANGRALTTSASEGFVKILVDKQTDEILGAHIIGHDAGQLIAEIVTTIEFGGTAEDIARVCHAHPTTSEAVKEAALSVDGRAIHI

SEQ ID NO: 102283 - protein, 475 aa, Unknown
  Bacterial polypetide isolated from the Sargasso Sea
MSNEIKTQVVVLGAGPAGYSAAFRAADLGLETVIVERFSTLGGVCLNVGCIPSKALLHVAKVIEEAKAVAAHGVVFGEPTIDLDKLRSFKQKVISQLTGGLGGMSKMRKVNVVNGFGKFTGPNSLEVTAEDGTVTVVKFDQAIIAAGSRPIKLPFIPHEDPRIWDSTDALELKEVPGKLLVMGGGIIGLEMGTVYSSLGSEIDVVEMFDQVIPAADKDVVRVFTKQIKKKFNLILETKVTAVEAREDGIYVSMEGKSAPTEPVRYDAVLVAIGRTPNGKLIDAEKAGVKIDERGFINVDKQLRTNVPHIYAIGDIVGQPMLAHKGVHEGHVAAEVIAGMKHYFDPKVIPSIAYTDPEVAWVGLTEKEAKEQGIAYETATFPWAASGRAIASDCSEGMTKLIFDKDTHRVIGGAIVGVNGGELLGEIGLAIEMGCDAEDLALTIHAHPTLHESVGLAAEIYEGSITDLPNPKAKKK

SEQ ID NO: 102284 - protein, 459 aa, Unknown
  Bacterial polypetide isolated from the Sargasso Sea
MADFDVIVVGAGPGGYVAAIRAAQLGMKVACVEKESTLGGTCLNIGCIPSKALLNSSEKFMDISKHAEEHGIKATKIELDLAKLMQRKDKIVKQLTGGIGFLFKKNKIEHISGSASFIDSKTILVKSAKEEKKLSAKNFIIATGSSSIEIPSIPIDEKQIVTSTGALSLQSVPKSMLVIGGGYIGLEMGSVWSRLGTKVTVVEALDRIVPTMDGEIASNFMKALQKQGIEFKLSHKVNNAKINKDNVEVSIESSEKKELKEKYEIVLMSVGRKPNSEGLNLEKIGVNLDEKKAIKINQEFKTSVDGIYAIGDVAPGPMLAHKAEEEGVACIELIHGQKTHMNYDIIPAIVYTNPEVASVGKTEEQLKELKIEYKIGKFPFMANGRALTTSTTEGFVKILADKKTDSILGAHIIGHDAGQLIAEIVTTMEFGGSAEDIAHICHAHPTTSEAVKEAAMNVD

SEQ ID NO: 102285 - protein, 465 aa, Unknown
  Bacterial polypetide isolated from the Sargasso Sea
MEDFDLIVIGAGPGGYVAAIRAAQLGMKVACIEKEPSLGGTCLNIGCIPSKALLNSSEKFVEISNHAAEHGIKTSKIDLDLNVLMDRKTKIVKKLTTGIGFLFNKNKITHIPGMASFVDKNNISITNGKNEITASAKNFIIATGSSSIEIPNIPVDEKQIVSSTGALSLSKIPKSLLVIGGGYIGLEMGSVWSRLGSKVTVVEALDRIVPTMDGEIAREFMKMLTKQGLEFKLSHKVSSAKSSKSGVDVEMEKSDKKKIKENYEIVLMSVGRKPNTEGLGLEKIGIKLTEKKSIEIKDNFQTSVEGIYAIGDVAPGPMLAHKAEEEGVACVEFINGQKPHINYDAIPAIVYTNPEIASVGKTEEQLKQEKKDFKVGKFPFMANGRALTTSASEGFVKILVDKKTDEILGAHIIGHDAGQLIAEIVTTIEFGGSAEDIARVCHAHPTTSEAVKEAALSVDGRAIHI

SEQ ID NO: 102286 - protein, 466 aa, Unknown
  Bacterial polypetide isolated from the Sargasso Sea
MYDILIIGSGPAGYVAAIRAAQLGLKVGCVEQSSIGGTCLNIGCIPSKSLLDSSYKHYQLEDQYSKHGIEIKDVSIDLKKMMSRKDEVVGQLTNGVSALFKSNKIDLIEGKAKIISDISIEVFKDGESHIYETKNIIIASGSSPAELNNINFSSNIVDSEGALKFEKIPKQLVVIGAGIIGLELGSVWARLGSKVTILEAQQEFLPMLDARMSRQILREFNRQGLDIRFGSNILDISDTTSGVEVRFQENGEDINLKAEKMIIAIGRKPNTQDLFNTDLVSIDDKGFIEVDEYCQTKTKSIWAIGDAVRGPMLAHKASEEGIMVSERITGENCLINYAHIPNVIYTHPEVAWVGKNEKELKSLEVDYKSGSFPFAASGRALASGESTGSVTIHADNETDQILGIQVFGPSASDIMHQGLIAMDNEITSEKFSSTIFSHPTVSEALHEATLAMNQKAIHIQNRKKKK

SEQ ID NO: 102287 - protein, 162 aa, Unknown
  Bacterial polypetide isolated from the Sargasso Sea
MSDKKFDLVVIGAGPGGYVAAIVAAQKGMRVACIEKRKTLGGTCLNVGCIPSKALLHASEQYENSIKSNGNEEWGIRYKEVSLDLPKLLKKKLGIVDELTKGIDFLFKKNKVTKYIGAAKILSSSEIEIMNSEKTEVINADKIIIATGSESTNLPNINVDEK

SEQ ID NO: 102288 - protein, 588 aa, Unknown
  Bacterial polypetide isolated from the Sargasso Sea
MSLIEVKVPDIGDFSGVDVIEVNVKPGDVIEKEQTLITLESDKASMEVPSDVAGTVKEIKVKAGEKVSQGTVIAIVEASAGAAAPAKAPEAAKPAAAAPAPAAAAPAPAPQAGSYAGAADIECDMLVLGAGPGGYSAAFRAADLGMKTVLVERYSTLGGVCLNVGCIPSKALLHTSLVVEEAAALASHGITFGKPEVDLDKLRDFKGGVVKKLTTGLAGMAKARKVEVVTGVGAFVDPYHMEVQGENGKKVVKFKQAIIAAGSQAVKLPFMPEDPRVVDSTGALELRQLPKRMLVIGGGIIGLEMATVYSTLGAEIDVVEMMDGLMMGADRDLVKVWEKYNAKRFGNVMLKTKTVGAEAKEDGIYVKFEGEKAPAEAQRYDLVLVAVGRSPNGKKIGADKAGVAVTDRGFIDVDKQMRTNVPHIFAIGDIVGQPMLAHKAVHEGHVAAEAAHGEKAYFDALQIPSVAYTDPEVAWAGKTEDQCKAEGIKYGKAVFPWAASGRAIANGRDEGFTKLIFDEETHRVIGGAIVGLNAGDLISEVCLAVEMGADAEDIGKTIHPHPTLGESVGMAAELYEGVCTDLPPQRKK

SEQ ID NO: 102289 - protein, 242 aa, Unknown
  Bacterial polypetide isolated from the Sargasso Sea
EPDIVSLMVEEMTAAGVNFQTGSEVASITKEADGTKTLLLANNEVLKGYDEVLFAIGRKPVTDSLNLGAAGVETNARGEVIVEPNQKTTAEGTYAVGDIITGAVQLTPVAIAAGRLLSDRLFAGVPEEQTIMDYENVPTVVFSHPTIGVMGLTEKQAVERYGADAVTCHKSTWVNMMYSREFLVPGHGPMPPKTRAKIVCVGEEQTVVGLHMIGLAVDEILQGFGVAIKMGATKADFDSIVA

SEQ ID NO: 102290 - protein, 183 aa, Unknown
  Bacterial polypetide isolated from the Sargasso Sea
MGADLDLVVLGAGSGGLAAAKRAARHGARVAIVEGDRVGGTCVIRGCVPKKLLVYGAQARHQLADASAYGLEIGSVRSDVPDLLHRVRAEVDRLNALHLGFLEKAGVQLISGWGSFTAADRIGISDQRGGPVREELSAPRFLVAVGGRPARPEIPGVEHTWVSDDIFLLEDVPSAVVVVGARL

SEQ ID NO: 102291 - protein, 83 aa, Unknown
  Bacterial polypetide isolated from the Sargasso Sea
GEVYKSSFTAMYTAVTSHRQPCRMKLVCVGPEEKIVGIHGIGFGMDEMLQGFAVALKMGATKKDFDNTVAIHPTAAEEFVTMR

SEQ ID NO: 102292 - protein, 137 aa, Unknown
  Bacterial polypetide isolated from the Sargasso Sea
VYALGDVCGIQELTPVAIAAGRRLSDRLFGGPEYEKAKIQYEEVPTVVFSHPPIGTIGMTEAEAVDKFGEAEIKTYTSTFVNMYYSPWQMPPADKPKSYVKTGVRGRCRAGGGAARHRHGCRRDDPRIRRRHAHGRD

SEQ ID NO: 102293 - protein, 221 aa, Unknown
  Bacterial polypetide isolated from the Sargasso Sea
MAIDSTLDLLVLGAGSGGLAAAKRAARHGAKVAIVEGDRVGGTCVIRGCVPKKLLVYGAQARHQLKDAPAYGLTIGAVESSVTELFRRVRAEVDRLNHLHLNFLEEAGVERIDGWGRFLSDQTIGIAAERGGPIRRELSAAHVLVAVGGRPVRPDIPGIEHTWISDDMFNLETLPKEVVVVGAGFIACEFACILRGLGVEVTQVVRGSGLLRGLTGSWRTP

SEQ ID NO: 102294 - protein, 217 aa, Unknown
  Bacterial polypetide isolated from the Sargasso Sea
MGTDLDLIVLGAGSGGLAAAKRAASHGARVAIVEGDRVGGTCVIRGCVPKKLLVYGAQARHQLADASAYGLHIQSVRSDVPDLLRRVRAEVDRLNALHLGFLDKAGVQLISGWGHFTAVDRIGISDQRGGPVQTELSAPRFLVAVGGRPARPEIPGIEKTWVSDDMFQLEDVPPAVVVVGAGFIACEFACILRGLGVAVTQVVRGPRLLRGFDGELA

SEQ ID NO: 102295 - protein, 142 aa, Unknown
  Bacterial polypetide isolated from the Sargasso Sea
MRAHFLRGGGSGGVRASRMAAQRGAKVGLCELPFDPVSSDSTGGLGGTCVIRGCVPKKLLMYGSSFAADFSDAEGFGWTLPQEPNFSWQKLLQAKTHEITRLNGIYSRLLENSGVQVHIGAGKLLDKNTIQITSPEVSESNN

SEQ ID NO: 102296 - protein, 324 aa, Unknown
  Bacterial polypetide isolated from the Sargasso Sea
SGGVRASRISAGHGARVAVIEESRPGGTCVIRGCVPKKLLMYGSAFSADAADAAGYGWQVSVDGHDWPALIAAKNTELDRLEGIYRSLLTNAGVELIEGRGIVTGPNSVSVGDCELTAERILVATGGLPQIPDVPGLAEHAITSNEALELAEGPESVVVYGAGYIALEFASIFNGFGIDTHLVYRADLPLRGFDQDIRSQSAEALAGRGIILHPGCMVERVEDENGRKAATLSDGTVLVVSEIMAATGRVPNTAGLGLETAGVDLGRKGEVIVDAGSQSSVPSIYAVGDVTDRIALTPVAIAEGHALTDTLYGTRPRQVSHDNV

SEQ ID NO: 102297 - protein, 176 aa, Unknown
  Bacterial polypetide isolated from the Sargasso Sea
MYSWMLKGYVITDEQQNTTAKGVYCVGDIMAGGVELTPVAVKAGRLLSERLFGNMPNAKMDYSLIPTVVFSHPAIGTMGLTEPEAVEKYGKDNIKVYTSTFTSMYTAVTSHRQACKMKLVCAGDTEVVVGIHGIGFGMDEILQGFGVAMKMGATKADFDSVVAIHPTGAEEFVTMR

SEQ ID NO: 102298 - protein, 184 aa, Unknown
  Bacterial polypetide isolated from the Sargasso Sea
MDADFDLIVLGAGSGGLAAAKRAVRHGARVAIAEGDRVGGTCVIRGCVPKKLLVYGAQARHQLQDAPSYGLHVEAVRSDVSELLERVRSEVDRLNLRHRQMLSEAGVELLQGWGRFTAPDRIGLSATPGGPIERELGAARILIAVGGQPIRPSIPGAEHTWLSDDMFLQETYPDQVVVVGAGFI

SEQ ID NO: 102299 - protein, 455 aa, Unknown
  Bacterial polypetide isolated from the Sargasso Sea
MAIESTFDLIVLGAGSGGLAAAKRAARHGAKVAIVEGDRVGGTCVIRGCVPKKLLVYGAQARHQLNDAPAYGLTLGSVESSVAELFRRVRAEVDRLNHLHLGFLEKAGVARIDGWGRFLSDQCIGIATERGGPIQRELSAAHYLVAVGGRTVRPDIPGIEHTWISDDMFNLEQLPKEVVVVGAGFIACEFACILRGLGVEVTQVVRGSGLLRGFDRELADAVLEGLREQGIHVLLERTVSAVSGQPGDLTVQLSDGLALPCGGVLMATGRRPWLEGLGLDAAGVAVEQGRISVDADSRTSVAHIYAVGDVTDRVNLTPVAIDEGRAFADATFGSRPRQVNHDLVASAVFSDPELATVGLSEEAAIDRHGVDGVVIHRARFRSMSRALPATGSRCLLKLVVEISTDRVLGCHMVGEHAAEIIQMAAIAVGMGATKADFDRTMALHPSVSEEFVTMG

SEQ ID NO: 102300 - protein, 330 aa, Unknown
  Bacterial polypetide isolated from the Sargasso Sea
MAIESTFDLIVLGAGSGGLAAAKRATRHGAKVAIVEGDRVGGTCVIRGCVPKKLLVYGAQARHQLNDAQAFGLTLGSVESSVAELFRRVRAEVDRLNHLHLGFLEKAGVERIDGWARFLSDQCVGIATERGGPIQRELSAAHYLVAVGGRPVRPDIPGVEHTWISDDMFNLEQLPQQVVLVGAGFIACEFACILRGLGVEVTQVVRGSGLLRGFDRELADAVLEGLREQGIHVLLERTVSAVNGQPGDLTVQLSDGTALPCGGVLMATGRRPWLGGLGLDAAGVAVEQGRISVDADSRTSVPHIYAVGDVTDRINLTPVAIDEGRAFADS

SEQ ID NO: 102301 - protein, 95 aa, Unknown
  Bacterial polypetide isolated from the Sargasso Sea
MEFEFDLIVVGAGSGGLAAAKRAASYGAKVGIIEVNQIGGTCVIRGCVPKKLMVYAAKSKNNMDSSEGYGLKNEGINFESNILLKNVRDEVLRLS

SEQ ID NO: 102302 - protein, 192 aa, Unknown
  Bacterial polypetide isolated from the Sargasso Sea
MEFEFDLIVVGAGSGGLAAAKRAASYGAKVAIIEVNQIGGTCVIRGCVPKKLMVYAAKSKKNLDSSEGYGLKNGGINFESNILLKNVREEVSRLSNLHRNSLKKLNITIFEGLGRFITQNELEIICSKTKKIKNKISSKKILISVGGKPKKLNIPGVDLAWTSDDIFELEKFPKSILIVGGGYIACEFAFYF

SEQ ID NO: 102303 - protein, 189 aa, Unknown
  Bacterial polypetide isolated from the Sargasso Sea
IGRKPSTDKIDIENTDVELNDNGTVKVDKYQNTTAKNVYAVGDITGEAELTPVAVKAGRLLSERLFNGKKDAHMDYSMIPTVVFSHPPIGTIGLTEPEAIEEYGEDNVKVYTSSFASMYTAVTRHRQMTKMKLVCAGKDEKVVGLHGIGHGMDEILQGFAVAIKMGATKADFDACVAIHPTSAEEFVTM

SEQ ID NO: 102304 - protein, 63 aa, Unknown
  Bacterial polypetide isolated from the Sargasso Sea
MNFDYDLFVIGGGSGGVRAARVAASEAGAKVGLAEEDRYGGTCVIRGCVPKKLMVYASEFSRH

SEQ ID NO: 102305 - protein, 83 aa, Unknown
  Bacterial polypetide isolated from the Sargasso Sea
MIKKVLEFEFDLIVVGAGSGGLAAAKRAASYGAKVAIIEANQIGGTCVIRGCVPKKLMVYAAKSKKNMDSSEGYGLNNEGIKF

SEQ ID NO: 102306 - protein, 200 aa, Unknown
  Bacterial polypetide isolated from the Sargasso Sea
MAQSSQNFDYDLIVIGAGSGGVRAGRIAAGHGAKVAVIEGDRPGGTCVIRGCVPKKLLMYAASFSADVEDARGFGWQIDQLTHDWPSLIAAKDAEIGRLENIYRSLLKKAGAALIEGWGRVTGPNEVNVGADVYRAAKILIAVGGAPQFTNIPGMRDHAISSNEALDLPEMPKEIAIYGSGYIALEFAGIFNGLGARTHL

SEQ ID NO: 102307 - protein, 82 aa, Unknown
  Bacterial polypetide isolated from the Sargasso Sea
MEFEFDLIVVGAGSGGLAAAKRAASYGAKVGIIEVNQIGGTCVIRGCVPKKLMVYAAKSKNNMDSSEGYGLKNEGINFESNI

SEQ ID NO: 102308 - protein, 274 aa, Unknown
  Bacterial polypetide isolated from the Sargasso Sea
FAGLGARTTLVYRGDLFLRGFDDSVREFVKAEIEKKHINLLFNSNVAQIDEQADAQGRSRFALTMADGSQRTTDLVLYATGRKPKTAGLGLENAGVALGDNGEVLVDEYYQTNAENIYAIGDVTDRVQLTPVAIEEGMCIANNLFTDNPKKRLNYQNIATAVFCQPNIGTVGLTEAEAVAEHAGDLDIYESDFKPMKHTLSGRDERTYLKMIVRRSDDVVLGIHMVGPDAGEIIQGLGVALVAGATKAQFDATVGIHPTAAEEFVTMRSLSRTA

SEQ ID NO: 102309 - protein, 131 aa, Unknown
  Bacterial polypetide isolated from the Sargasso Sea
MLSERLFNGQKDAHMDYSLIPTVVFSHPPIGTIGLTEPEAIEKYGEDDIKVYTSSFASMYTAVTRHRQMTKMKLVCAGKDEKVVGLHGIGHGMDEILQGFAVAIKMGATKADFDACVAIHPTSAEEFVTMT

SEQ ID NO: 102310 - protein, 237 aa, Unknown
  Bacterial polypetide isolated from the Sargasso Sea
MEFKFDLIVVGAGSGGLAAAKRAASYGAKVAIIEANQIGGTCVIRGCVPKKLMVYAAKSKKNMDSSEGYGLKNEGITFESKILLKNVREEVSRLSNLHRNFLKKLNVTVFEGLGRFITQNELEIICPKTKKIKNKISSKKILISVGGKPKKLNIPGVDLAWTSDDIFELDKFPKSLLIVGGGYIACEFASIFRNLGIEVTQLIRGQHLLNGFDEDLSSCLEESPTFTEINIISNAQN

SEQ ID NO: 102311 - protein, 51 aa, Unknown
  Bacterial polypetide isolated from the Sargasso Sea
MDFDLLVIGAGSGGLASAKRAARHGAKVGIIEGDRVGGTCVIRGCVPKKLL

SEQ ID NO: 102312 - protein, 92 aa, Unknown
  Bacterial polypetide isolated from the Sargasso Sea
MAQTGASYDYDLIVIGAGSGGVRAGRIAAGHGARVAVIEGDRPGGTCVIRGCVPKKLLMYGSAFSSEIEDAHGFGWQINQMPPHDWPTLIAA

SEQ ID NO: 102313 - protein, 91 aa, Unknown
  Bacterial polypetide isolated from the Sargasso Sea
MEFEFDLIVVGAGSGGLAAAKRAASYGAKVGIIEVNQIGGTCVIRGCVPKKLMVYAAKSKNNMDSSEGYGIKNEGINFESNILLKNGRDEV

SEQ ID NO: 102314 - protein, 234 aa, Unknown
  Bacterial polypetide isolated from the Sargasso Sea
MIKKVLEFQFDLIVVGAGSGGLAAAKRAASYGAKVAIIEVDKVGGTCVIRGCVPKKLMVYAAKSKTNMTSSEGYGLKSESINFESNILLKNVREEVSRLSDLHKNSLKKLNVKVFEGLGRFITQNQLEIICPKTKKILNKLSSKKILISVGGKPKKLNIPGVDLAWTSDDIFELEKFPKSILIVGGGYIACEFASIFRNLGTEVTQLIRGQHLLNGFDEDLSSCLEESPTFTKS

SEQ ID NO: 102315 - protein, 272 aa, Unknown
  Bacterial polypetide isolated from the Sargasso Sea
MKRSFDLIVIGAGSGGLAAAKKAASYGASVAIVEGDLVGGTCVIRGCVPKKLLVCGSSLVESFLYAPSYGFDFDNLKIKSETLLANVRKEVQRLNELHENFLNKANVELFKGWGEFKNPNCIAIKNRINGDTLNELYGERILIAVGGRPKRPSIEGASLGWTSDDMFLLKSFPKKITIVGAGYIACEFACILHGLGVEVTQLVRGDRILRGFDFELSSALTEAMKNKGVNINFGENISSLKGTPGSLIIKTNTGKEFDSNGLLFATGREPFL

SEQ ID NO: 102316 - protein, 208 aa, Unknown
  Bacterial polypetide isolated from the Sargasso Sea
MEFQFDLIVVGAGSGGLAAAKRAASYGAKVAVIEVNKVGGTCVIRGCVPKKLMVYAAKSKKNMTSSEGYGLKSEGISFESNILLKNVREEVSRLSNLHKNSLKKLNVTVFEGLGRFTTQNKLEIICPKTKKILNKVSSKKILIAVGGKPKKLNIPGIDLAWTSDDIFELEKFPKSILIVGGGYIACEFASIFSNLGTEVTQLIRGESL

SEQ ID NO: 102317 - protein, 277 aa, Unknown
  Bacterial polypetide isolated from the Sargasso Sea
MIKKVLEFEFDLIVVGAGSGGLAAAKRAASYGAKVAIIEVNQIGGTCVIRGCVPKKLMVYAAKSKKNMDSSEGYGLKNEGINFESNILLKNVREEVSRLSNLHRNSLKKLNVTVFEGLGRFTTQNELEIICPKTAKIKNKISSKKILISVGGKPKKLNIPGVDLAWTSDDIFELEKFPKSILIVGGGYIACEFASIFRNLGTEVTQLIRGQHLLNGFDEDLSSCLEESPTFTEINIISNTQLKSIKRVNGNLESTLDSGDKLLTSNILIATGREPNL

SEQ ID NO: 102318 - protein, 163 aa, Unknown
  Bacterial polypetide isolated from the Sargasso Sea
MIKKVLEFEFDLIVVGAGSGGLAAAKRAASYGAKVAIIEANQIGGTCVIRGCVPKKLMVYAAKSKKNIDSSEGYGLKNEGINFESHILLKNVREEVSRLSNLHRNSLKKLNITIFEGLGRFITQNELEIICSNTKKIKNKISSKKILISVGGKPKKLNIPGVD

SEQ ID NO: 102319 - protein, 62 aa, Unknown
  Bacterial polypetide isolated from the Sargasso Sea
MQFDYDCFIIGGGSGGVRAAKLASQAGKKVGLAEEFRFGGTCVIRGCVPKKLMLFASDFSQS

SEQ ID NO: 102320 - protein, 264 aa, Unknown
  Bacterial polypetide isolated from the Sargasso Sea
MEFEFDLIVVGAGSGGLAAAKRAASYGAKVAIIEADQIGGTCVIRGCVPKKLMVYAAKSKKNMDFSEGYGLKNEGINFESNILLKNVREEVSRLSNLHRNSLKKLNITIFEGLGRFITENELEIICSNTKKIKNKISSKKILISVGGKPKKLNIPGVDLAWTSDDIFELEKFPKSILIVGGGYIACEFASIFRNLGTEVTQLIRGQHLLNGFDEDLSSCLEESPTFTEINIISNTQLNSIRKINGNLESTLDSGDKLLTNNILN

SEQ ID NO: 102321 - protein, 262 aa, Unknown
  Bacterial polypetide isolated from the Sargasso Sea
MKNTNTDFDLFVIGAGSGGVRAARLASQSGAKVCIAERDRIGGTCVIRGCVPKKFFSYSSKFSKHNTVAKSYGWSHEETTFSWDKLIENKNKQIEKLSNIYRSNLEKAGVKIFESEASIIGSNIVRLSNGDEYCAKKILIATGAKPNFPNIKGANYGISSDDFFELETLPQKIIVVGGGYIALEFSSIISGLGSKCDLLYRGDKLLKGFDKDISRIITQELQSEKCNVKLNTDVIEITKNKNQFEVLTNDSERLKADLVLFA

SEQ ID NO: 102322 - protein, 253 aa, Unknown
  Bacterial polypetide isolated from the Sargasso Sea
RGFDDDVRYHLADEMRKQELDLRFYANIARIEKEGEVLVAVLEDGTQMRTDVILYATGRLPNSANIGLENSGVKLGKGGAVLVDEGFKTSVPSIYAIGDVIDRVQLTPVALEEGMVVANALFNEKAGAVDYKNIPTAVFSQPSIGTVGLTEGEARDKYGKVDIYKSDFKALKHTLTGRDERTLMKLIVHPETDMVLGVHMVGPEAGEIIQGIGIALKAGATKATFDATIGIHPTSAEEFVTMREKVPDRKEDN

SEQ ID NO: 102323 - protein, 205 aa, Unknown
  Bacterial polypetide isolated from the Sargasso Sea
MYDLFVIGAGSGGVRSARLAAAQGFSVGIAESSRVGGTCVIRGCVPKKLMVHAAEFSQYFSDSEGYGWTIKGAHFDWQRMVIARNKEVDRLEAAYKMNLKNSGVEIYENFAKLRGVNEVELDNQKVIKAKHILLATGGKPKKPEFPGVQFTKSSDDIFMMSSLPEKVVIYGAGYIACEFATIFNGLGVDVTLVYRGENLLRGFDY

SEQ ID NO: 102324 - protein, 454 aa, Unknown
  Bacterial polypetide isolated from the Sargasso Sea
MEFQFDLIVVGAGSGGLAAAKRAASYGAKVAIIEVHKVGGTCVIRGCVPKKLMVYAAKSKTNMTSSEGYGLKSESITFESNILLKNVREEVSRLSDLHKNSLKKLNVKVFEGLGRFITQNQLEIICPKTKKILNKLSSKKILISVGGKPKKLNIPGINLAWTSDDIFELDSFPDSILIVGGGYIACEFASIFRNLGTKVIQLIRGQHLLNGFDEDLSSCLEESTTFGGINIISRNQLKSIERVNGNLESTLDSGDKILTNNILIATGREPNLLPLNLDFLNLKMDGAYLDVDEFNQTSNANIFAVGDIINKPNLTPVAIEQGRVFSDNFFNDQKRKVNYEYIPKAVFTIPEISTVGLNEKRAKEIYSEKNIKIFKCKFTPMSNTFKENKSKCMLKIIVNKLTDKVIGCHMFGETSSEIIQMVSISLNAGITKKDFDITMALHPTISEEFVTMYG

SEQ ID NO: 102325 - protein, 452 aa, Unknown
  Bacterial polypetide isolated from the Sargasso Sea
MDFDYDLFVIGAGSGGVRLARMSASYGARVGIAEEEQIGGTCVLRGCIPKKLLVYASHYPHEVEDAKGFGWTFGAGTLDWPALIAAKDREINRLSDIYINLLRQSGVEMHAGRATLVDAHTVAIGERTIRARHIAIATGSRPSLPPRPGIEHAITSREALSLAACPKRIAVVGGGYIAVEFAGIFNGFGSHVDLFYRGEKILRGFDDDVRQFLTDEMTKQGVTIHARSVVESIERADDGTLSVRAGDARHGPYDQVLYATGRVPNVDGLGLEQAGVMLDARGAIAVDAYSATSVPSIHAIGDVTSRPQLTPVATRDGGLLARTLFGGSRIAADHEWVPSAVFSQPEVATVGFTEAAARDLYEGDVDIYRTSFKALRHTLSGRDERTLMKLVVARDSQRVVGAHMVGRDAGEIIQGIAIAIRAGATKAQFDDTIGIHPTAAEEFVTMRQKVAD

SEQ ID NO: 102326 - protein, 239 aa, Unknown
  Bacterial polypetide isolated from the Sargasso Sea
HFSRTDAQRWSSATPSYPEVSSVSKNADGSLTVQLSTGSSLTVDCLIWAIGREPANDQLQLEKAGVKLDAEGFIPTDEYQNTNVPGIYAVGDNTGRLALTPVAVAAGRRLSERLFNNKPDSKLDYSTVPTVVFSHPPIGTIGLTEDEARQQFGDDQIKVYRSEFAAMYTALTQHRQLTRMKLVCAGPTEKVVGLHVIGFGADEMLQGFGVAIKMGATKADFDNCVAIHPTSAEEFVTLR

SEQ ID NO: 102327 - protein, 277 aa, Unknown
  Bacterial polypetide isolated from the Sargasso Sea
FKGLGSDVTLMFRQDLPLRGFDEDLRKTIHENLEQRGITVHHNCSPLEITREEDGTLITRTSIGNVQSDAVMFATGRRPNTSRPDLGLEDVGVDLDDAGAVVVDDFSRTTVSNIWAVGDVTNRVNLTPVALMEGMAFVRSVIDRTLTKPNYANIPCAIFSQPPAATVGLSEDQAVTEGYDCDIYCSKFTPMRSTLAGRQEKTFMKLVVDTSSDRVLGVHMVGPDAPEILQGFATALQCGATKTHFDTTVGIHPSSAEEFVTMRTKTRSVKHASGRDV

SEQ ID NO: 102328 - protein, 397 aa, Unknown
  Bacterial polypetide isolated from the Sargasso Sea
MGFDYDLFVIGGGSGGVRAARVAASEAGAKVGLAEEDRYGGTCVIRGCVPKKLMVYASEFSRHLDDAFAFGWSVENSGFDWQKFRKKLHLELDRLEAVYRNLLRNAGVDTYDQRAKLLDQNTVVIGKKKLTARTILIATGGRPFRPDIPGIENALVSDDIFNLEKLPKSIAIIGGGYIACEMASIMNGFGVNTKLIYRGDQILRGFDKEIRDHVAEEMAKNGISISLNEDVTKINVTAEGLELVNSEGKKENFDKILTATGRTPNSDDLGLDNSGVQLGEKGEILVDNLSKSSRESVYAIGDVTNRSNLTPIAIREAMSFIETVFRDRPEKLDYSFIPTAVFTTPEVGTVGLTEEEASQFAPLEIYTTKFKSMREAFAGREDRVFMKLIVEEKNQKV

SEQ ID NO: 102329 - protein, 407 aa, Unknown
  Bacterial polypetide isolated from the Sargasso Sea
MEFEFDLIVLGAGSGGLAAAKRAASYGAKVAIIEANQIGGTCVIRGCVPKKLMVYAAKSKKNMDSSEGYGLKNDGINFESNILLKNVRKEVSRLSNLHRNSLKKLNVTVFEGLGRFTTQNELEIICPKTKKIKNKISSKKILISVGGKPKKLNIPGVDLAWTSDDIFELEKFPKSILIVGGGYIACEFASIFSNLGTEVTQLIRGQHLLNGFDEDLSLCLEESPTFTEINIISNTQLKSIKRVNGNLESILDSGDKLLTNNILIATGREPNLLPLNLNFLNLKMNGKYLDVDELNQTSNPNIFAVGDIINKPNLTPVAIEQGRVFSDNFFNGQKRKVNYENIPKAVFTIPEISTVGLSEKKALEIYSEKNIKIFKCKFTPMSYTFKENKSKCMLKIVVHKLTDKVLG

SEQ ID NO: 102330 - protein, 454 aa, Unknown
  Bacterial polypetide isolated from the Sargasso Sea
MEFEFDLIVVGAGSGGLAAAKRAASYGAKVAIIEANQIGGTCVIRGCVPKKLMVYAAKSKKNMDSSEGYGLKNEGINFESNILLKNVREEVSRLSNLHRNSLKKLNITIFEGLGRFITQNELEIICSKTKKIKNKISSKKILISVGGKPKKLNIPGVDLAWTSDDIFELEKFPKSILIVGGGYIACEFASIFRNLGTEVTQLIRGQHLLNGFDEDLSSCLEESPTFTEINIIPNTQLNSIKKLNGNLESTLDSGDKLLTNNILIATGREPNLLPLNLDFLNLKMDGQYLDVDELNQTSNANIFAVGDIINKPNLTPVAIEQGRVFSDNFFNDQKRKVNYEYIPKAVFTIPEISTVGLSEKRAKEIYSEKNIKIFKCKFTPMSNTFKKNKSKCMLKIVVHKLTDKVLGCHMFGETSSEIIQMVSISLNAGITKKDFDITMALHPTISEEFVTMYG

SEQ ID NO: 102331 - protein, 82 aa, Unknown
  Bacterial polypetide isolated from the Sargasso Sea
MAEYDFDLFIIGAGSGGVRAARLASKLGKKVAIAEEYRFGGTCVIRGCVPKKLMVFASSYSKIFKEGKGYGLGSKKCLIFME

SEQ ID NO: 102332 - protein, 260 aa, Unknown
  Bacterial polypetide isolated from the Sargasso Sea
SETHLLVRKDKPLRSFDPMLSDTLVELMAKDGPKLHTHTEVSSVSKNADASLTVQLSTGSSLTVDCLIWAIGREPANDQLQLEKAGVKLDSEGFIPTDEYQNTNVSGIYAVGDNTGRLALTPVAVAAGRRLSERLFNNKPDSKLDYNTVPTVVFSHPPIGTIGLTEDEARQQFGDDQVKVYRSEFAAMYTALTQHRQLTRMKLVCASPTEKVVGLHVIGFGADEMLQGFGVAIKMGATKADFDNCVAIHPTSSEEFVTLR

SEQ ID NO: 102333 - protein, 451 aa, Unknown
  Bacterial polypetide isolated from the Sargasso Sea
MAQHFDYICLGAGSGGIASANRAAMRGAKVLLIEAKHVGGTCVNVGCVPKKVMWYGAHIAEAMNLYAKDYGFDVSVNKFDWNTLVNSREAYIGRIHEAYGRGFTNNKVTLLNGYGRFVNGNTIEVNGEHYTADHILIATGGAPTIPNIPGAEYGIDSDGFFALREQPKRVAVVGAGYIAVEVAGVLHALGSETHLFVRKHAPLRNFDPMLIDALVDAMKTEGPTLHTNSVPQSVVKNADDSLTLNLENGESVTVDCLIWAIGRSPATGNIGLENTDVQLDSKGYVITDAQQNTTHKGIYCVGDIMAGGVELTPVAVKAGRLLSERLFNGMSDAKMDYSQIPTVVFSHPPIGTMGLTEPEARAQYGDDNVKVYTSGFTSMYTAVTSHRQACKMKLVCAGKEEKVVGIHGIGFGMDEILQGFGVAMKMGATKADFDAVVAIHPTGAEEFVTMR

SEQ ID NO: 102334 - protein, 451 aa, Unknown
  Bacterial polypetide isolated from the Sargasso Sea
MAQHFDYICLGAGSGGIASANRAAMRGAKVLLIEAKHVGGTCVNVGCVPKKVMWYGAHIAEAMNLYAKDYGFDVSVNKFDWNTLVNSREAYIGRIHEAYGRGFTNNKVTLLNGYGRFVNGNTIEVNGEHYTADHILIATGGAPTIPNIPGAEYGIDSDGFFALREQPKRVAVVGAGYIAVEVAGVLHALGSETHLFVRKHAPLRNFDPMLIDALVDAMKTEGPTLHTNSVPQSVVKNADDSLTLNLENGESVTVDCLIWAIGRSPATGNIGLENTDVQLDSKGYVITDAQQNTTHKGIYCVGDIMAGGVELTPVAVKAGRLLSERLFNGMSDAKMDYSQIPTVVFSHPPIGTMGLTEPEARAQYGDDNVKVYTSSFTSMYTAVTSHRQACKMKLVCAGKEEKVVGIHGIGFGMDEILQGFGVAIKMGATKADFDAVVAIHPTGAEEFVTMR

SEQ ID NO: 102335 - protein, 451 aa, Unknown; identical to SEQ ID NO: 102333
  Bacterial polypetide isolated from the Sargasso Sea

SEQ ID NO: 102336 - protein, 449 aa, Unknown
  Bacterial polypetide isolated from the Sargasso Sea
MTHFDYICIGGGSGGIASANRAAKHGKKAAIIEAKDIGGTCVNVGCVPKKAMWYGAQMAEAIHRYAPEYGFDLSVNHFSWDSLIASRQAYVERIHASYDRALTANDVTLIRGFAKFINNNTVEVNGEKYTADHITIAVGGRPIIPDIEGAQYGIDSDGFFALKEQPKRAVVVGAGYIGVELAGVLHALGTESHLVVRKHAPLRNFDPIIHETLVDMIHAEGCKLHNHASVEKVEKAKDGELSVHLTNGEVLKADCLIWAIGRKPSTDKIDIENTDVELNDNGTVKVDKYQNTTAKNVYAVGDITGEAELTPVAVKAGRLLSERLFNGQKDAHMDYSLIPTVVFSHPPIGTIGLTEPEAIEEYGEDNVKVYTSSFASMYTAVTRHRQMTKMKLVCAGKDEKVVGLHGIGHGMDEILQGFAVAIKMGATKADFDACVAIHPTSAEEFVTMT

SEQ ID NO: 102337 - protein, 449 aa, Unknown
  Bacterial polypetide isolated from the Sargasso Sea
MAQHFDYIAIGGGSGGIASANRAAMYGKKVALIEAKELGGTCVNVGCVPKKAMWYAGQIADALKYGADYGFDTTLNHFNWAKLVESRQAYIGRIHQSYQNVLGKNQITVIKGFARFVSSNTIEVNGEQYSADHILIATGGRPEVPAIPGAELGIDSDGFFELQSQPKRVAVVGAGYIAVEIAGVMQALGSETHLVVRKHAPLRNFDPMIHETLVEIMAQEGPKLHTHAIPKAVVKNADESLTLQLEDGRHLTVDCLIWAIGRVPATDNLNLAAAGIELDEKGFIPTDKFQNTAVANVYAVGDNTGRIQLTPVAVAAGRRLSERLFNNKPNEHLNYDLVPTVVFSHPPIGTIGLTEPEAIAEYGEGQVKVYRSQFTAMYSALTLHRQPTRMKLVCVGPEEKVVGLHGIGFAMDEILQGFGVAMKMGATKADFDNCVAIHPTSAEEFVTMR

SEQ ID NO: 102338 - protein, 329 aa, Unknown
  Bacterial polypetide isolated from the Sargasso Sea
EFLSPDEAFVMSHEVVNDKHIKINWTIHPGYYLYMGMFEFESLDKDNLIQKVEMPDGKKKTDEFFGEVDIYYFSTSADIYLKNNLSEYLDLKIKYQGCADAGLCYPPIFKTITVKKKLRTSSLQKTSIFDSQTAMSESLNINSLIYNTFIFYLAGLLLAFTPCVLPMVPILTGIIAGRGNVSQRKSLALSMIYVLSMSLTYAVAGIIVATSGTNIQASLQNPYVISFLSFLFFIFALAMFKFFSIQMPKLIQNIATKISNKQKSGDIKDVATMGVLSALIVGPCVTAPLIGALIYIASTGDILIGGLALFFLGLGMGTPLIALGSTTTK

SEQ ID NO: 102339 - protein, 322 aa, Unknown
  Bacterial polypetide isolated from the Sargasso Sea
TFSLSSIFLFFLFISNVHSDGLFSSSKNTFLNVDEAFKISLKTNEKESLSIKFDIANGYYLYKDKIKISVDNEEITKIFFPKSKIKEDEFFGKSEIYDKNISLIVEKNNKRGTLLEVLYQGCANKGLCYPPIKKTFFLGDDARGEYIKTQKISESEYIYDKLLSNNYLTNIILFLGFGLLLSFTPCVLPMVPILSGLIIKSNNVSSRKPFLLSMYYVLGLCLLYLLVGLFIGYSTNIYNIQSAFQEPLYLVIFSFILILLSFSMFGFYEIKISNSFQKFITDISNKINIGGYRGSFIMGFLSALIVGPCVAPPLAGIFIYIT

SEQ ID NO: 102340 - protein, 162 aa, Unknown
  Bacterial polypetide isolated from the Sargasso Sea
MGSAGLTYQAGINTGLWGEHAEIVHSSHPEFVVARDLTDLRHKIAAANGEGKTVMVDLYADWCVACKEFEKYTFPDEKVVSALSNTVWMQMDLTDNTPERQEIFDTFNVLGLPTILFFDANGYELTKARVTGFMKADAFARHVNEWLNDAPVTRDSKHEPGN

SEQ ID NO: 102341 - protein, 219 aa, Unknown
  Bacterial polypetide isolated from the Sargasso Sea
MLAVAIVFIERLYNSPATGFLWGLLGFGLFGYYWVLNRASKNSLMKLVRAVVVAIGIMGSAGLTYQAGLNTGLWGEHSDGVHAGHPDFVVARDLADLRNKIAAANTKGKTVMVDLYADWCVACKEFEKYTFPDEKVVSALSNTVWMQMDLTDNTPERQEIFDTFTVLGLPTILFFDENGDELTNARVTGFMKADAFAGHVNEWLNNGSNTNDGQSGRLD

SEQ ID NO: 102342 - protein, 400 aa, Unknown
  Bacterial polypetide isolated from the Sargasso Sea
MSRLLLCLLLLLTLPADAGIFDLSRAQSALFGTSLNNSQDFLPVDQAFRLDLVEADKDNLRLRFVNADGYYLYKHRFAFTSDHPDVSIGTPKWPAAEPKTDEFFGDVEVFYGITDLLLPIDNPRDIPFTLQVSYQGCADLGLCYPPEIRNIQIGNTPATAAQQQVGTVDWGSLALFFLAGLGLTFTPCVLPMLPILSGVVLRGQFGGLRGLSLSLAYVVPMAACFALLGALMGVFGAGLNLQARLQSPWVLVPFAIFFMVFALAMFGAFEMRMPRFIAERLDHLASRVRGGSLLGAATLGVLSSLLVSPCVTAPLVGALLYISATGDALGGGLKLFFLGLGMGAPLVLFATGGGALLPKSGTWMLGVRKAFGVMLLAVSVWLLERVLPAPVTLALWGLLA

SEQ ID NO: 102343 - protein, 513 aa, Unknown
  Bacterial polypetide isolated from the Sargasso Sea
MIEDGYYLYKHRFKVTPITKEVRVEELNILPGLRKVDEWFGEVEVYYSTAQLGFRLDGLQSSESVEFELSYQGCAEAGLCYPPVSQRYVLSNGEFLEASKEVRGQANVELEKREEQKLADALLKESVGWSLFLFFIGGIALAFTPCVFPMIPILSSIIVGQGSDLPRYRAFALSGSYVAGMAITYAIIGTLVGVFGAQLNLQAALQTTPILLFSASLFVILSLAMFGFYELQLPVSWQNKLNELSSLQSGGKYVSVFIMGALSSLVISPCISAPLVGGLLYISQTQDALLGGLALLSLGFGMGVPLMVVGVVGGVWFPRAGAWMDQVKGLFGFLLIGVAIWLIERLVEDSVAMVLWGLLLIGAAIYFGAFELRARKPVEKVVQFVGVVVAIWGGAILVGSSLGSSSIFDPLEGLRVSSAPQNASELEEKGWQTVKTLEEVQNFLEQNDRPVILDVYADWCISCKIMEKNVFTESRVREGLREFGLLRVDVTANDELDRELLSHFGLFGPPTLA

SEQ ID NO: 102344 - protein, 407 aa, Unknown
  Bacterial polypetide isolated from the Sargasso Sea
LIYNTLIFYLAGCLLAFTPCVLPMVPILTGIIAGRGNVSQKKSLTLSIVYVLSMSLTYAFAGIIVATSGTNIQASLQNPYVISFLSFLFFIFALAMFKFFSIQMPKSIQNLATKISNKQKSGDIKDVATMGVLSALIVGPCVTAPLIGALVYIASTGDILVGGLALFFLGIGMGTPLIALGSTTTKLISKIGPYLELVNYFFGILFIIVSVWLLERILSLETAAYLWTISAALLILVLFKSSKLINNLSSKIIVSMLSVLSIFYIGLQTYGIINNNYYEPITSFIQKEQNIKFITVKTTERLFEEINKSNEPVMVDLYADWCVACKELEKYTFSDERVSEKLNKLKLIKFDITETTEEHSKYLQSMMVFGPPALFFFNEDGNEIIDARIVGFMGSEDFLKVLKLVKN

SEQ ID NO: 102345 - protein, 322 aa, Unknown
  Bacterial polypetide isolated from the Sargasso Sea
MCGLVIGAASTPLGAQDSEDLLEPDQAFAFSAQAISPEKIAVTWNIAPGYYMYLDKFSFDSDPADITISDISYPPARTKQDEFFGDVQILEHSAKIVLNLSRGAPDSGLLQLTARGQGCNEPVGVCYAPIAHTVALTLPKTTAANSSAINSVTDLQQLLGVAASGPEFLAADEAFRLEARSDGRDTLIAQFLVAPGYYLYQDKLRFEMLAGATLKEHALPPGVHKQDPYFGQVNIFPADFTAELPIVADAGANEVRLIAHFQGCAEQGICYPPAKKTLSISLPNIISDAAASENPNLSASGEVAEDTGPTKKETVSTQVLVG

SEQ ID NO: 102346 - protein, 420 aa, Unknown
  Bacterial polypetide isolated from the Sargasso Sea
YINIIFLKESIPNQFFLEYQGCAKKGLCYPPNNFEINLKNKLIDTSSQNSFKSQQMEIAEQILSKNILITSILFLGFGILLAFTPCVLPMVPILSGILLKDRKRGSKESIKISLQYVSGLCLVYLLIGILLSVYKQSINIQFIFQDPVILIVFSIILVLLSLSMFGVFNFQMPSMVQNWSNKISSKLNTENSFGIFMMGALSALIVGPCIGPPLAGIFIYITTTNINPWSPPILLLMLSIGMSIPLVIYSAFIGRIIPKAGNWMKYINYFFGILLILAALILLDRVYNFYPSKISSELDFQKVENLNELKAEIHNPNVNFIMVDVYADWCLECKRMEATTFKNKQVIEALNKIHLIKIDVTENNKNDQEILNYLKIIGPPSYMFGTSDFGVMHEFNVQGYMGTEDFLNHLKIFNEFNSDN

SEQ ID NO: 102347 - protein, 297 aa, Unknown
  Bacterial polypetide isolated from the Sargasso Sea
MAQRIITLILLLCSTSAFAGLFDAPGRSDFVPADQAFAFDFQQSQRDLNLTWQIKEGYYLYRQQIKLTPANATLAAPTLPPGTWHEDEFYGKSEIYRQRLTIPVTLSQAEKGATLTVTYQGCADAGFCYPPETKVVPLRTVLAASGSESVPAHPALPASGQPKFNPPLPVEKRPELASQPEQSVRQEKSDAGDNAPASLPFSALWALLIGIGIAFTPCVLPMYPLISGIVLGGKQRLSTGRALLLAFIYVQGMALTYTALGLVVAAAGLQFQAALQHPYVLIALSAVFILLALSMFG

SEQ ID NO: 102348 - protein, 41 aa, Unknown
  Bacterial polypetide isolated from the Sargasso Sea
MSQNPTKHTKVLIIGSGPAGYTAAVYAARAMLNPILVYGSE

SEQ ID NO: 102349 - protein, 63 aa, Unknown
  Bacterial polypetide isolated from the Sargasso Sea
MSKIENNVLIIGSGPAGYTAAIYAARANLKPHLVSGLEPGGQLTITTDVENILDLEMLYKGPW

SEQ ID NO: 102350 - protein, 37 aa, Unknown
  Bacterial polypetide isolated from the Sargasso Sea
MSEKPTKHTKVLIIGSGPAGYTAAVYAARAMLKPMLV

SEQ ID NO: 102351 - protein, 83 aa, Unknown
  Bacterial polypetide isolated from the Sargasso Sea
MENNSKKHSKVLIIGSGPAGYTAAIYTARAMLKPILVHGSEPGGQMTTTTDVQNYPGYSDVIQGPWLMNQMKDQAKAVGTNMI

SEQ ID NO: 102352 - protein, 130 aa, Unknown
  Bacterial polypetide isolated from the Sargasso Sea
MSSLHSPLIILGSGPAGYTAALYASRANLKPTLITGLEIGGQLTTTTDVENWPGDHDNLQGPILMDRMKAHVEKFNTNVIIDHIKDVKLDVRPFVLIGDDTEYTCDSLIIATGASAKYLGLESEKQYLAK

SEQ ID NO: 102353 - protein, 270 aa, Unknown
  Bacterial polypetide isolated from the Sargasso Sea
NAHSAPYAEFAVAAGEITLSEEPAIKTDPDEWWLLGNSTPRIEVPLKVNGSAHFAIDTQIDGMVYAAVKSCPVPWGRLVSFDFDQVSDRPGVIAVVELKAVPGKTAYSDMQNGVAIVADTWYRAKTALDLMPIEWDFGSDAQVSNDTQAETAQRLWEETGDVSNEVGGDTLGMIADSDAVVSSEYHRPYETHARMEPINATVSITDERIDVWSPTQNQATPIMLVADQLGRDPRDIYVNTVFLGGAFGGNGGGNTAVTRQAAEIARQVGR

SEQ ID NO: 102354 - protein, 58 aa, Unknown
  Bacterial polypetide isolated from the Sargasso Sea
MHNVAIIGSGPAGYTAGIYASRASLEPVLFEGLESGGQLMLTTDVENYPGFDSWSNGT

SEQ ID NO: 102355 - protein, 44 aa, Unknown
  Bacterial polypetide isolated from the Sargasso Sea
MNTIIIGSGPAGYTAAIYAARADLKPIIYTGLEPRWPIKLLQLK

SEQ ID NO: 102356 - protein, 85 aa, Unknown
  Bacterial polypetide isolated from the Sargasso Sea
MNRKVIIIGSGPAGLTAALYTARANLKPLVFEGSQPGGQLTITTDVENFPGFPEGIMGPELMNLFRKQAERFGAECYFEHVTKVD

SEQ ID NO: 102357 - protein, 153 aa, Unknown
  Bacterial polypetide isolated from the Sargasso Sea
MEDALYLTKFAKEVVIIHRRDELRASKIMAERAMESEKITFAWNTVVTEVLGDDVITGLQLKDVHSGDQRELEVGGLFVAIGHSPNTGFLKGVVELKDNGYVDTPIPWRTQTSVPGIFAAGDVMDDYYRQAVTAAGTGCMAALEAERWLAHGG

SEQ ID NO: 102358 - protein, 126 aa, Unknown
  Bacterial polypetide isolated from the Sargasso Sea
MSITQHAKVLILGSGPAGYTAAVYAARANLNPVLITGMAQGGQLMTTTEVDNWPADVHGVQGPDLMQRFLEHAERFNTQIIFDHINKVDFSKRPFTLTGDSGTYTCDSLIIATGASAKYLGLPSEE

SEQ ID NO: 102359 - protein, 153 aa, Unknown
  Bacterial polypetide isolated from the Sargasso Sea
MSANKENILIIGSGSAGLTAAIYASRAGFKPLVLTGIQPGGQLTITTDVENYPGYEDVIQGPWLMEQMQKQAENVGARIEFDLMTNIDTENWPFNVITDSGKEIEAETIIIATGAQARWLGLGSEENIMERVYQLVQHVMVSFFKIKTLLLLV

SEQ ID NO: 102360 - protein, 52 aa, Unknown
  Bacterial polypetide isolated from the Sargasso Sea
MGDTHYKVIIIGSGPAGHAAAIYTSRAQLNPIMFEGEMAGGVAAGGQLTTTT

SEQ ID NO: 102361 - protein, 197 aa, Unknown
  Bacterial polypetide isolated from the Sargasso Sea
RWLGIKSEEKFKGYGISFCATCDGFFFKDQKVAVIGGGNSAVEEALYLTNFASKVTLIHRRDELRAEKILQDRLFKHPKINIIWNKTVEEFIGNEEKPSLETLVLKDTKDSSESKLSVNGAFVAIGHDPSTSLFVNKVKMDKDNYIITKPDSTETSISGVYAAGDVKDKIYRQAVTAAGMGCMAALEAEKFIANKKN

SEQ ID NO: 102362 - protein, 85 aa, Unknown
  Bacterial polypetide isolated from the Sargasso Sea
ELEVAGIFYAIGHTPNTGIFNGQLDLDNSGYIKIKPGTQETSIEGVFAAGDVHDHKYRQAITAAGTGCAAALEAERWLAEKGLCE

SEQ ID NO: 102363 - protein, 249 aa, Unknown
  Bacterial polypetide isolated from the Sargasso Sea
MDQLRKQALKFGARVENAYVDKVEFGDSVNTLFAGERMFEAKTVIIATGAAPRLLGIPGEMEMFGGKGVTTCATCDGAFYRDMEVVVVGGGDSACEEALFLTRFCSKVTLVHRRDELRASKIMAERTLAHEKITPLWNSAVKEVLPDEDGKARAICVENLKSGESAEVPCKGVFIAIGHVPNTSAFEGIIPLDENGYFLPEQGSMVRTSVPGVFVAGDCADHVYRQAITAAGMGCQAAIEAERWLAESK

SEQ ID NO: 102364 - protein, 217 aa, Unknown
  Bacterial polypetide isolated from the Sargasso Sea
MVHRRDFIAGSGAAFGTALLCPEAVLEAEELGRARTVSVFHTTDLHGHIEPTRTYEGLDDVGGLARCMSCIREWRRMSPYSLTVDVGDLVQGTAVSAWSDGQLMMKLLNRIGYDAWTLGNHDFDWGLESLENILQLSQPPVLTANLDRSSLPVGSLEGAWKNVSPWAIREVGGFRIGLIGLITPGLQSWLPPEVLGGVLPTDPVGAISAALQELKNE

SEQ ID NO: 102365 - protein, 40 aa, Unknown
  Bacterial polypetide isolated from the Sargasso Sea
MSQNPTKHTKVLIIGSGPAGYTAAVYAARAMLNPILVYGS

SEQ ID NO: 102366 - protein, 157 aa, Unknown
  Bacterial polypetide isolated from the Sargasso Sea
VCCCRGSYVFTKFATKVKLIHRRDKLRAEKMLQEKLKANKKIEVIWDSVVEDVLGTIEPKGVNAIKIKNVKDNKIKELKVDGLFIAIGHDPATQLFKDQLKMDKEGYLITKPDSTITNIPGVFAAGDVKDKIFRQAVTAAGMGCMAALEAEKHLSDK

SEQ ID NO: 102367 - protein, 192 aa, Unknown
  Bacterial polypetide isolated from the Sargasso Sea
LNIKSEQEFRGFGVSACATCDGFFFKNKEVAVVGGGNAAVEEAMFLTKFASKVKLIHRRDSLRAEKMLQKKLMENKKIEIIWDSVVEDVLGDKDPKNVKGIKIKNVKTNKIQELKLDGVFIAIGHDPATQLFKDQLKMDNEGYLITKPDSTETNVPGVYAAGDVKDKTFRQAVTAAGMGCMAALEAEKFLSH

SEQ ID NO: 102368 - protein, 41 aa, Unknown
  Bacterial polypetide isolated from the Sargasso Sea
MNNKSSKHTKVLILGSGPAGYTAAIYASRAMLKPILVYGSQ

SEQ ID NO: 102369 - protein, 51 aa, Unknown
  Bacterial polypetide isolated from the Sargasso Sea
MKKNIETDLLIIGSGPAGYTAAIYAARANLKPHLVTGLDAGGQLTITTDVE

SEQ ID NO: 102370 - protein, 304 aa, Unknown
  Bacterial polypetide isolated from the Sargasso Sea
ANKQDCNLCLVQIENTDASLRCVKACETPAEQGLKVITQSAYLTKQRQAALSTILSDHFADCEAPCQQACPAGVDVQSYLYHIAQGDHTQAIKVIKDTLPLPLSIGRVCPAFCESECRRGLVDDPIAIRQLKRHAADLDLADDEQGNSYQPPRLADTGKKIAIIGAGPAGLSAGYYLSNQGHNVEIFEAMPKAGGWLRYGIPEYRLPKAILDKEIELLCRNGLTIHTDTRLGHEIHLAQLVTDFDAVCLAIGAQKAVPMNYKGSALAGCYLGVDFLKDHCLDKQLKLGKKVAVIGGGNTAIDCA

SEQ ID NO: 102371 - protein, 263 aa, Unknown
  Bacterial polypetide isolated from the Sargasso Sea
DSACEEAFISPNTAVTFTRSCAPSNSGPAPPWPTGFGPTPPITLHWNSEVVDVSGNGWMENLTLRDRSTGDQASLAAKGLFYAIGHTPNTDLLKEQLSLDAKGYVITEPGRPETSIEGVFAAGDVADAEWRQGITAAGSGCKAALAAERWLTHHDLAQRVQRRSVDPAKAEMPVNVAVTTEETYAPDAPWQKGSYALRKLYHDSSRPLLVIYTSPSCGPCHVLKPQLKRVITELEGRAQAVVIDIEADQDIAEQAGVNGTPTV

SEQ ID NO: 102372 - protein, 203 aa, Unknown
  Bacterial polypetide isolated from the Sargasso Sea
ISTGAQARWLGLESEKKFQGYGVSACATCDGFFFKEKKVAVIGGGNSAVEEALYLTNFASTVYLIHRRDELRAEKILQDRLFNNEKIKCIWDHQLQDILGDENPLNVKGIKVKNVKTNEIQDIELDGVFIAIGHDPATQIFRDQVEMDNEGYIITKPDSTLTNVNGVYAAGDVKDKTYRQAVTAAGMGCMAALEAEKFLAEKS

SEQ ID NO: 102373 - protein, 151 aa, Unknown
  Bacterial polypetide isolated from the Sargasso Sea
LYLANMCKSVTLIHRRDELRGSKIMQKRTLDHEKISILWDTIVEEVLGNSEEGMTSLKVRNVKTDEVSEHPFTGLFVAIGHTPNTSLFKEQLELDVNGYIQVTPGTTFTSVEGVFASGDVQDHVYRQAITAAGTGCMAAIDAERWLAEHFG

SEQ ID NO: 102374 - protein, 221 aa, Unknown
  Bacterial polypetide isolated from the Sargasso Sea
EINIKGLFYAIGHTPNTNFLGNKVDLDNKGYIACKSGRPETSIEGIFAAGDVVDSEWRQGVTAAGTGCMAALATERWLAEKNLAKTIVRETPEPEKKLNSSDFNEEEVNEDTFDSNSEWQKGSYALRRLYHESKKPILVIFSSPSCGPCHVLKPQLKRVIKELDGAVLGVEIDIDKDQDIAKQAGINGTPTVQLFKEKLLKKQWQGVKQRSEFKEAIKNII

SEQ ID NO: 102375 - protein, 37 aa, Unknown
  Bacterial polypetide isolated from the Sargasso Sea
MKNNSKKHSKVLIIGSGPAGYTAAIYTARAMLKPILV

SEQ ID NO: 102376 - protein, 199 aa, Unknown
  Bacterial polypetide isolated from the Sargasso Sea
MTTTFVENYPGFPDGVLGPELMDLMKAQAERWGTNLYESDVVSINTDSHPFELKTLEGTIKSNSIIIATGASANRLGVINEDKFWSKGISACAICDGATPQFRGEELAVIGGGDSACEEAAYLTKYGSKVHLIVRSEKLRASAAMVDRVKANPKIEIHWNTKVNKADGSEWLEKIETIHPLEGKGEINIKGLFYAIGHT

SEQ ID NO: 102377 - protein, 42 aa, Unknown
  Bacterial polypetide isolated from the Sargasso Sea
MSQNPTKHTKVLIIGSGPAGYTAAVYAARAMLNPILVYGSEP

SEQ ID NO: 102378 - protein, 77 aa, Unknown
  Bacterial polypetide isolated from the Sargasso Sea
MKRKVIIIGSGPAGLTAAIYAARANLEPLVFEGVQPGGQLTITTDVENYPGFPDGIMGPELMDNFRKTAQRFGAETH

SEQ ID NO: 102379 - protein, 199 aa, Unknown
  Bacterial polypetide isolated from the Sargasso Sea
MGASARLLGLESETRLMGHGVSACATCDGFFFKDKKVLVVGGGDSAMEEATFLTKFASEVVIIHRRKEFRASKIMVERAVSNPKISFRYNQTIDEIIGTKDTGVQSVNLKDTLTNEITNEVCDGIFMAIGHVPNTSLFKDMINLDGSGYIITNPDSTHTNLDGVFACGDVQDHVYRQAVTAAGSGCMAAIDAERWLEQQ

SEQ ID NO: 102380 - protein, 50 aa, Unknown
  Bacterial polypetide isolated from the Sargasso Sea
MKNNSKKHSKVLIIGSGPAGYTAAIYTARAMLKPILVYGAEPRWTNDNNN

SEQ ID NO: 102381 - protein, 123 aa, Unknown
  Bacterial polypetide isolated from the Sargasso Sea
MNNKSTKHTKVLILGSGPAGYTAAIYAARAMLKPILVFGSEPGGQLTTTTDVENFPGYSKVIQGPWLMEEMKGQAKAVGTEMIQDHISKVDLSKKPFEAVGDSGQRYTADSFIISNRGSGTVV

SEQ ID NO: 102382 - protein, 42 aa, Unknown
  Bacterial polypetide isolated from the Sargasso Sea
MSQNPTKHTKVLIIGSGPAGYTAAVYAARAMLSPILVYGSAP

SEQ ID NO: 102383 - protein, 106 aa, Unknown
  Bacterial polypetide isolated from the Sargasso Sea
MSKHSKVLILGSGPAGYTAAIYAARAMLKPILVFGSEPGGQLTTTTDVENFPGYSKVIQGPWLMEEMKGQAKAVGTEMIQDHIKKVDLSKKPFEAVGDSGQMYTAD

SEQ ID NO: 102384 - protein, 234 aa, Unknown
  Bacterial polypetide isolated from the Sargasso Sea
ENIETRHSQEGKGEINIKGLFYAIGHTPNTNFLGNKIDLDNKGYIACKSGRPETSIEGIFAAGDVVDSEWRQGVTAAGTGCMAALATERWLAEKNLAKTIARETPEPEKKLNSSDFNEDEVNEATFDSNSEWQKGSYALRKLYHESKKPLLVIFSSPSCGPCHVLKPQLKRVIKELDGAVLGVEIDIDKDQDIAKQAGINGTPTVQLFKEKLLKKQWQGVKQRSVFKEAIKNII

SEQ ID NO: 102385 - protein, 234 aa, Unknown
  Bacterial polypetide isolated from the Sargasso Sea
MIDTDVLIVGAGPTGLFCAHQLGIIGLKCEIVDNLDKLGGQCIELYPDKPIYDIPAIPECTGEELTNNLIEQIKPFKFKSHLSDRVQEIKNENNKWVVKTLKGKEFLTPNIVIAGGVGSFEPRKFPTKNCEKYEGKTVLYSIKDKNIFKDKKVVIFGGGDSALDWAIELSKNSSVTLVHRRDEFRGAPSSVEKIKELEKDKMIEVLTQYSIKDVLGNENLETVEIKNEQGEIKK

SEQ ID NO: 102386 - protein, 65 aa, Unknown
  Bacterial polypetide isolated from the Sargasso Sea
MEQQLIILGSGPAGYTAAVYAARANLKPLLITGLEVGGQLTTTTEVENWPGDFEDLQGPDLYGSH

SEQ ID NO: 102387 - protein, 203 aa, Unknown
  Bacterial polypetide isolated from the Sargasso Sea
EEFMHNGVEYAVRDPEMFRGRKVMIVGGGDTALDFVIMLKDVADSLTLVHRRDGWRAHEATVALVEKAAEAEEIDLRTFYEVRAIHGANSVERVTIFDNRTDKDTTLECDAVLSCVGFKPDLGPIKSWGLKVEKNRILVDALMATSVSGVFAAGDVVDYEGKLDLIATGFAEAAVAVNNAVHHVDPTARVNPGHSTNMKVFKE

SEQ ID NO: 102388 - protein, 86 aa, Unknown
  Bacterial polypetide isolated from the Sargasso Sea
MTDNGTPQHEKVVIIGSGPAGWTAAIYAARAEMNPFVIEGNISRTMIPGGQLMFTTEVENYPGFKDGVDGQSLMLEMKAQALRSTP

SEQ ID NO: 102389 - protein, 197 aa, Unknown
  Bacterial polypetide isolated from the Sargasso Sea
AQARWLNLKSEQEFRGFGVSACATCDGFFFKDKEVAVVGGGNAAVEEAMFLTKFASKVKLIHRRDSLRAEKMLQKKLMENKKIEIIWDSVVEDVIGDKDPKNVKGLKIKNVKTNNVEELKLDGVFIAIGHDPATKLFKDQLEMDNEGYLVTKPDSTETNVPGVYAAGDVKDKTFRQAVTAAGMGCMAALEAEKFLSH

SEQ ID NO: 102390 - protein, 57 aa, Unknown
  Bacterial polypetide isolated from the Sargasso Sea
MTQNPTKHTKVLIIGSGPAGYTAAVYAARAMLKPILVHGIQPRWTINNYNRCGKLPR

SEQ ID NO: 102391 - protein, 91 aa, Unknown
  Bacterial polypetide isolated from the Sargasso Sea
MNNLHSSLIILGSGPAGYTAALYASRANLKPTLITGLEIGGQLTTTTDVENWPGDYDNLQGPILMDRMKAHVEKFNTKIIMDHIKDVKLDV

SEQ ID NO: 102392 - protein, 244 aa, Unknown
  Bacterial polypetide isolated from the Sargasso Sea
EQASKVGTTIHSDIVTFVDFSTSPLISKTDSGITFESKTIIISTGAQARWLEIDSEKKFKGYGISACATCDGFFFKNKEVAVIGGGNSAVEEALYLTNFASKVTLIHRRDSLRAEKILQDRLFKNKKINILWNKTVKEFKGSINPLGLEQIIIVDTKNKSESSLKVNGAFIAIGHDPSTSLFINKIKMDDENYIITKPDSTETNIPGVYAAGDVKDKIYRQAVTAAGMGCMAALEAEKFIAENF

SEQ ID NO: 102393 - protein, 38 aa, Unknown
  Bacterial polypetide isolated from the Sargasso Sea
MSQNPTKHTKVLIIGSGPAGYTAAVYAARAMLSPILVY

SEQ ID NO: 102394 - protein, 69 aa, Unknown
  Bacterial polypetide isolated from the Sargasso Sea
MQVIQSAIYAARANLQPLLVTGFNSGGIPGGQLMTTTFVENYPGFPDGVLGHELMDLMKAQAERWGANL

SEQ ID NO: 102395 - protein, 125 aa, Unknown
  Bacterial polypetide isolated from the Sargasso Sea
METIKRKLVILGSGPAGYTAAVYAARAGLEPCLVTGMEQGGQLTTTTDVENWPGDSDGLQGPELMDRMLKHVESLEVEVIFDHIESANLSGPFALMGNVNNYDAESLIIATGASAQYLGLESEQN

SEQ ID NO: 102396 - protein, 210 aa, Unknown
  Bacterial polypetide isolated from the Sargasso Sea
YTADSVIISTGAQARWFGLESEKKFQGYGVSACATCDGFFFKEKKVAVIGGGNSAVEEALYLTNFASTVYLIHRRDELRAEKILQDRLFNNEKIKCIWDHQLQDILGDEDPLNVKGIKVKNVKTNEVQDIELDGVFIAIGHDPATQIFRNQVEMDNEGYIITKPDSTLTNVNGVYAAGDVKDKTYRQAVTAAGMGCMAALEAEKFLAEKS

SEQ ID NO: 102397 - protein, 45 aa, Unknown
  Bacterial polypetide isolated from the Sargasso Sea
MTKNNHSKLLILGSGPAGYTAAIYASRAMLEPTLLTGIEPGGQMT

SEQ ID NO: 102398 - protein, 47 aa, Unknown
  Bacterial polypetide isolated from the Sargasso Sea
GMATQTSIPGVFAAGDVADHVYRQAVTSAGFGCMAALDAEKFLDQQD

SEQ ID NO: 102399 - protein, 123 aa, Unknown
  Bacterial polypetide isolated from the Sargasso Sea
MLTKSPYSFFTSVNSLQSCSLPANNYGDLMGATKHSKLLILGSGPAGYTAAVYAARANLQPVLITGMEKGGQLTTTTEVENWPGDPHDLTGPLLMERMHEHASKFDTEIIFDHISKVDLQNRP

SEQ ID NO: 102400 - protein, 99 aa, Unknown
  Bacterial polypetide isolated from the Sargasso Sea
PKSVKAIKIKNVKTNKVTELKVDGLFVAIGHDPATSLFKGQLNMDKEGYIVTKPDSTVTNVPGVFAAGDVKDKVFRQAVTAAGMGCMAALEVEKFLSSK

SEQ ID NO: 102401 - protein, 82 aa, Unknown
  Bacterial polypetide isolated from the Sargasso Sea
ILDLKVDGLFVAIGHDPATSLFQNQIEMDKEGYLITKSDSTTTNIPGVFAAGDVKDKIFRQAVTAAGMGCMAALEAEKYLSQ

SEQ ID NO: 102402 - protein, 129 aa, Unknown
  Bacterial polypetide isolated from the Sargasso Sea
MTEKIHHKLIVLGSGPAGYTAALYAARSNLQPALITGVEVGGQLTTTTEVENWPGGHAELQGPELMMQMAEHVERFEAGIVNDHIHTAKLSKDALILVGDKAEYSCDALIIATGASAKYLGLDSEDISK

SEQ ID NO: 102403 - protein, 137 aa, Unknown
  Bacterial polypetide isolated from the Sargasso Sea
MNNKSTKHTKVLILGSGPAGYTAAIYAARAMLKPILVFGSEPGGQLTTTTDVENFPGYSKVIQGPWLMEEMKGQAKAVGTEMIQDHISKVDLSKKPFEATGNSGQVYTADSFIISTGAQARWLNLKSEQEFMGFGVS

SEQ ID NO: 102404 - protein, 55 aa, Unknown
  Bacterial polypetide isolated from the Sargasso Sea
MYDVIIIGAGPAGLTAAYELMHSNKNILVLEKKMNVGGLAETKVYGNHRYDIGPP

SEQ ID NO: 102405 - protein, 237 aa, Unknown
  Bacterial polypetide isolated from the Sargasso Sea
AVIGGGDSACEEAAYLTKYGSKVHLIVRSEKLRASAAMVDRVKANPKIEIHWNTKVDKADGSEWLEKIETMHSKEGKGEINIKGLFYAIGHTPNTKFLGNKIDLDNKGYIACKSGRPETSIEGIFAAGDVVDSEWRQGVTAAGTGCMAALATERWLAEKNLAKTIVRETPEPEKKLNSSDFNEDEVNEDTFDSNSEWQKGSYALRKLYHESKKPILVIFSSPSCGPCHVLKPQLKRV

SEQ ID NO: 102406 - protein, 31 aa, Unknown
  Bacterial polypetide isolated from the Sargasso Sea
MSQNPTKHTKVLIIGSGPAGYTAAVYAARAM

SEQ ID NO: 102407 - protein, 132 aa, Unknown
  Bacterial polypetide isolated from the Sargasso Sea
MSTIKHSRLLILGSGPAGYTAAVYAARANLNPVLLTGMQAGGQLTTTTEVENWPGDPHGLTGPALMDRMKAHAETFNTEILFDHIHTVNLQQRPFVLTGDNGQYSCDALIIATGASAKYLGLPSEQTYNGRG

SEQ ID NO: 102408 - protein, 49 aa, Unknown
  Bacterial polypetide isolated from the Sargasso Sea
MNNKSTKHTKVLILGSGPAGYTAAIYAARAMLKPILVHGSQPGGQLTTT

SEQ ID NO: 102409 - protein, 206 aa, Unknown
  Bacterial polypetide isolated from the Sargasso Sea
NSLIIATGASARWLGLDSEKKYNGRGVSACATCDGFFFRNQNVAVVGGGDTAMEEALYLANLCEKVTVIHRRDELRASKIMQDRALNHPKIAFLWDSAVEEVLGDEQGMNGLSIKNLKNGELTKHPFDGMFVAIGHTPNTQLFEGQLDMDENGYLKVRSGSTYTSYEGIFACGDVQDHIYRQAVTAAGTGCMAAIDAERWLAEQSI

SEQ ID NO: 102410 - protein, 48 aa, Unknown
  Bacterial polypetide isolated from the Sargasso Sea
MTKDIKTDVLIIGSGPAGYTAAIYAARANLKPHIVSGLEPRGSTYYNY

SEQ ID NO: 102411 - protein, 197 aa, Unknown; identical to SEQ ID NO: 102389
  Bacterial polypetide isolated from the Sargasso Sea

SEQ ID NO: 102412 - protein, 214 aa, Unknown
  Bacterial polypetide isolated from the Sargasso Sea
GDTGQKYTADSIIISTGAQARWLNIKSEQEFRGFGVSACATCDGFFFKDKEVAVVGGGNAAVEEAMFLTKFASKVKLIHRRDSLRAEKMLQKKLMENKKIEIIWDTVVEDVIGDKDPKNVKGIKVKNVKTNKINEIKLDGVFIAIGHDPATKLFKDQLSMDNEGYLITKPDSTETNVPGVYAAGDVKDKTFRQAVTAAGMGCMAALEAEKFLSH

SEQ ID NO: 102413 - protein, 40 aa, Unknown; identical to SEQ ID NO: 102365
  Bacterial polypetide isolated from the Sargasso Sea

SEQ ID NO: 102414 - protein, 38 aa, Unknown
  Bacterial polypetide isolated from the Sargasso Sea
MSQNPTKHTKVLIIGSGPAGYTAAVYAARAMLNPILVY

SEQ ID NO: 102415 - protein, 127 aa, Unknown
  Bacterial polypetide isolated from the Sargasso Sea
MSENRERVLIIGSGAAGLTAAIYTARANIDPLLVKGLQPGGQMTITTDVENYPGFADVIQGPWLMEQMEAQARQVGTRMVEDIITSIDTSKRPFHLKGDTGDDYYADAVIVATGAQARWLGLESEAR

SEQ ID NO: 102416 - protein, 105 aa, Unknown
  Bacterial polypetide isolated from the Sargasso Sea
MAKNRHIRLLILGSGPAGYTAALYAARANLSPVLISGMQPGGQLTTTTDVDNWPGDVQGLQGQDLMDRMLSHVQRFDTEVISDHINTANLSTNKLELIGDEGTYT

SEQ ID NO: 102417 - protein, 80 aa, Unknown
  Bacterial polypetide isolated from the Sargasso Sea
MSQNPTKHTKVLIIGSGPAGYTAAVYAARAMLNPILVYGSEPRGQLTTTTDVEIIQDFLKLSGGMVNGSMKDKQSSWTEM

SEQ ID NO: 102418 - protein, 265 aa, Unknown
  Bacterial polypetide isolated from the Sargasso Sea
PFTFFRDEELAVIGGGDSACEEAAYLTKYGSKVHLIVRSEKLRASAAMVDRVKANPKIEIHWNTKVDKADGSEWLEKIETMHSKEGKGEINIKGLFYAIGHTPNTKFLGNKIDLDNKGYIACKSGRPETSIEGIFAAGDVVDSEWRQGVTAAGTGCMAALATERWLAEKNLAKTIVRETPEPEKKLNSSDFNEDEVNEDTFDSNSEWQKGSYALRKLYHESKKPILVIFSSPSCGPCHVLKPQLKRVIKELDGAVLGVEIDMIKI

SEQ ID NO: 102419 - protein, 430 aa, Unknown
  Bacterial polypetide isolated from the Sargasso Sea
MIELKIDNHSVTAEPNDNLLQAARKAGIAIPSLCDPTDATRQLGAAPNANKQDCNLCLVQIENTDASLRCVKACETPAEQGLKVITQSAYLTKQRQAALSTILSDHFADCEAPCQQACPAGVDVQSYLYHIAQGDHTQAIKVIKDTLPLPLSIGRVCPAFCESECRRGLVDDPIAIRQLKRHAADLDLADDEQGNSYQPPRLADTGKKIAIIGAGPAGLSAGYYLSNQGHNVEIFEAMPKAGGWLRYGIPEYRLPKAILDKEIELLCRNGLTIHTDTRLGHEIHLAQLVTDFDAVCLAIGAQKAVPMNYKGSALAGCYLGVDFLKDHCLDKQLKLGKKVAVIGGGNTAIDCARTAVREGCDVTLIYRRTRAEMPAEAYEVHEAEVEGVKFHFLTNPIENHSDANGQVEAVTFSKMALGEADASGRRAPGT

SEQ ID NO: 102420 - protein, 244 aa, Unknown
  Bacterial polypetide isolated from the Sargasso Sea
MKEQAKAVGTEMIEDHISSVDLKKTPFEAIGDTGQKYTADSIIISTGAQARWLNLKSEQEFRGFGVSACATCDGFFFKDKEVAVVGGGNAAVEEAMFLTKFASKVKLIHRRDNLRAEKMLQKKLMENKKIEIIWDSVVEDVIGDKDPKNVKGIKIKNVKTNKIDEIKLDGVFIAIGHDPATQLFKNQLSMDKEGYLITKPDSTETNVPGVYAAGDVKDKTFRQAVTAAGMGCMAALEAEKFLSH

SEQ ID NO: 102421 - protein, 282 aa, Unknown
  Bacterial polypetide isolated from the Sargasso Sea
KYGSKVHLIVRSEKLRASAAMVDRVKANPKIEIHWNTKVDKADGSEWLEKIETIHSQKGKGEINIKGLFYAIGHTPNTKFLGNKIDLDNKGYIACKSGRPETSIEGIFAAGDVVDSEWRQGVTAAGTGCMAALATERWLAEKNLAKTIVRETPEPEKKLNSSDFNEEEVNEDTFDSNSEWQKGSYALRKLYHESKKPILVIFSSPSCGPCHVLKPQLKRVIRELDGAVLGVEIDIDKDQDIAKQAGINGTPTVQLFKEKLLKKQWQGVKQRSEFKEAIENII

SEQ ID NO: 102422 - protein, 191 aa, Unknown
  Bacterial polypetide isolated from the Sargasso Sea
NIKSEQEFRGFGVSACATCDGFFFKDKEVAVVGGGNAAVEEAMFLTKFASKVKLIHRRDSLRAEKMLQKKLMENKKIEIIWDSVVEDVIGDNEPKNVKGIKIKNVKTNNIEEIKLDGVFIAIGHDPATQLFKNQLEMDKEGYLITKSDSTETNVPGVYAAGDVKDKTFRQAVTAAGMGCMAALEAEKFLSH

SEQ ID NO: 102423 - protein, 97 aa, Unknown
  Bacterial polypetide isolated from the Sargasso Sea
VTSIKLENKGSEISKEVMGVFIAIGHKPNTEIFDGQLDMDNGYIIIKSGLNGSVTSSSVEGVFAAGDVSDQIYRQAVTSAGFGCMAALDAEKYLSES

SEQ ID NO: 102424 - protein, 122 aa, Unknown
  Bacterial polypetide isolated from the Sargasso Sea
MLDLAIIGSGPAGYTAGIYASRASLKPVLFEGLESGGQLMLTTDVENYPGFDSGIMGPDLMQIFKKQAERFGTEIKTETINSIKKIDGGFSLESAQGSYEFKSVIISSGASAKWLDVKGEKE

SEQ ID NO: 102425 - protein, 208 aa, Unknown
  Bacterial polypetide isolated from the Sargasso Sea
VFRRSDYNFTGATARLLGLEAETKLMGHGVSACATCDGFFFKEKKVLVVGGGDSAMEEATFLTKFASEVVIVHRREEFRASKIMIERALSNPKIKVEYNTTVEDIKGSQETGVQSVILKDTQTGELRDYACDGIFMAIGHVPNTKLFQDALELDAAGYIITQSDSTYTNVEGVFACGDVQDTVYRQAVTAAGSGCMAAIDSERWLEEQ

SEQ ID NO: 102426 - protein, 1432 aa, Unknown
  Bacterial polypetide isolated from the Sargasso Sea
MIELKIDNHSVTAEPSDNLLQAARKAGIAIPSLCDPTDATRQLGTAPNADKQDCNLCLVQIENTDASLRCVKACETPAEAGLKVITQSAYLTKQRQAALSTILSDHFADCEAPCQQACPAGVDVQSYLYHIAQGDHTQAIKVIKDTLPLPLSIGRVCPAFCESECRRSLVDDPIAIRQLKRHAADLDLADDEQGGSYQPARLADTGKKIAIIGAGPAGLSAGYYLSNQGHSVEIFEAMPQAGGWLRYGIPEYRLPKAILDKEIELLCRNGLIIHTDTRLGHEVHLAQLVADFDAVCLAIGAQKAVPMNYKGSELADCYLGVDFLKDHCLDKQLKLGKKVAVIGGGNTAIDCARTAVREGCDVTLIYRRTRAEMPAEAYEVHEAEVEGVKFHFLTNPIENHGDANGQVEAVTFSKMALGEADASGRRAPVDTGETFTEAFDTVIAAVSQAPDLSFMQDPMGQLSQGELALSRWNTLIGCEQTMSSGVEKLFVMGDARRGPATAVAAIGDGRKAAIAIDKMLKIGLSCDLHAHEFNSIKTIPSALIPSALKQTETSSKAGSRLYPHTPRQPRLKMPELTALQRLLNYSEVELGFPADAAMQEAARCLECACQANTDCKLRDYATDYGVEAKSLATENARHFSVDKSAPFIQFDANRCISCGKCVDVCQQQSGHCAIQFSQDSYQALPQEISQTLERRAPRVGFSASMADSHCVQCGNCVQVCPTGALVDARDKRQGDSTELKTASTICTYCGVGCRLDLKIDPNANRIRHIEGNKDSVVNQGMLCVKGRFGFDFIHSDKRLTTPLIRKNGELQPSSWPEAIAYVAKRLTEIKQKDGSNALASLASAKATNEDNFVLQKFVRSVLGTNNIDHCARLCHSSTVTGLQQSIGSGAMTNDIPSIKDSDVIFILGSDTTCAHPIIASKIQQAVMQHGARLLVADPKRVGIAEKAELYVAHRPGTDVMVLNAIMAEIIRHDWQDKAYIAQRTEGIEALYAELAKDDYSLENAALITGVKAEDIARLARTIGTAEKTAVYYAMGITQHTTGHDNVTAISNLQLLCGNIGVSGAGINPLRGQSNVQGACDMGALPNYFTGYQKVTDLHARMRFENHWRTPLSGEIGVTATHMMHDIAKGKIKALYVMGENPVLSDPDQAHVLNALSQIEFLVVQDIFLTETAELAHVVLPAAAFVEKRGHFTNTERRVQRLEQALASPGEALPDWQIVQAVANAMGACWDYANEEAIWREINELTPQYRGIRWDRLSANAEGQISQGIQWPCPDETHPGTPIMHQSQFTRGLGLFTPVSYRLPAEMPCNEYPLTLSTGRLLEQFHTGTLTRKTPGLDLLGAPKVMISVYDAEQLGINNGDKLRLTTRRGEIEIDAFVTKRAQAGVLFLPFHFVEAAANKLTINALDPVAYIPEYKVCAVRAEKVTAKVSEPA

SEQ ID NO: 102427 - protein, 59 aa, Unknown
  Bacterial polypetide isolated from the Sargasso Sea
MDNGYILFKSGLSGSITSTSVDGVFAAGDVSDQIYRQAVTSAGFGCMAALDAEKYLSEK

SEQ ID NO: 102428 - protein, 1427 aa, Unknown
  Bacterial polypetide isolated from the Sargasso Sea
MIELRIDNQIVSAEPSDNLLHAARKAGIAIPSLCDPTDASRQLDTQAHAEKQDCNLCLVQIENSDASLRCVKACETPAQTGMKVITQSAFLTKQRQAALNTILSDHFADCEAPCQQACPAGVDVQSYLYHIAQGDHTQAIKVIKDTLPLPLSIGRVCPAFCETECRRGLVDDPIAIRQLKRHAADLDLADDEHGNSYQPPRLADTGKKIAIIGAGPAGLSAGYYLSNQGHNVEIFEAMPKAGGWLRYGIPEYRLPKAILDKEIELLCRNGLIIHTNTRLGHEIHLAQLVTDFDAVCLAIGAQKAVPMNYKGSELAGCYLGVDFLKDHCLDKQLKLGKKVAVIGGGNTAIDCARTAVREGCDVTLIYRRTRAEMPAEAYEVHEAEVEGVKFHFLTNPIENHSDANGHVQSVTFSKMALGEADASGRRAPVDTGETFTEAFDTVIAAVSQAPDLSFMQDPMGQLSHGELALSRWNTLIGCEQTMSSGVEKLFVMGDARRGPATAVAAIGDGRKAAKAIDKMLQIGLSCDLHAHDFNSVKTIPSGLKQAKATSEAAPTLYPHTPRQPRLKMPELTALQRLLNYSEVELGFPADAAMQEAARCLECACQANTDCKLRDYATDYGVESKSLLTENARHFSVDKSSPFIQFDANRCISCGKCVDVCQQQSGHCAIQFTEDSYQALPQEISQSQVRRAPRVGFSASMADSRCVQCGNCVQVCPTGALVDARDKRQGDKTALKTASTICTYCGVGCRLDLKIDPNTNRIRHIEGNKDSVVNQGMLCVKGRFGFDFIHSDKRLTTPLIRKKGELQPCSWPEAIAYVAKRLTEIKQQDGSNAIASLASAKATNEDNFVLQKFVRSVLGTNNIDHCARLCHSSTVTGLQQSIGSGAMTNDIPSIKDSDVIFIIGSDTTCAHPIIASKIQQAVMQHGARLIVADPKRVGIAEKAELYVAHRPGTDVMLLNAIMAEIIRHDWQDKAYIAERTEGIEGLYAELAKEDYSLENAALITGVKAEDIARIARTIGTAQKTAVYYAMGITQHTTGHDNVTAISNLQLLCGNIGVSGAGINPLRGQSNVQGACDMGALPNYFTGYQKVTDIHARMRFENHWQTPLSGEIGVTATHMMHDIAKGKIKALYVMGENPVLSDPDQAHVLNALSQIEFLVVQDIFLTETAELAHVVLPAAAFVEKRGHFTNTERRVQRLEQALASPGEALSDWQIVQALANAMGANWDYKDEEAIWAEINVLTPQYRGIRWERLTTSAEGKVPQGIQWPCPDENHPGTPIMHQSQFTRGLGLFTPVSYRLPAEMPCNEYPLTLSTGRLLEQFHTGTLTRKTPGLDLLGAPKVMISVYDAEQLGINNGDRISLITRRGEIEIDAFVTKRAQAGVLFLPFHFVEAAANKLTINALDPVAYIPEYKVCAVRVEKVTKRVIEPA

SEQ ID NO: 102429 - protein, 236 aa, Unknown
  Bacterial polypetide isolated from the Sargasso Sea
DVRNGHISKVEFSSQNGGIHKAWVDDKTELRAETVIISTGASAKYLGIESEQRLRGGGVSACAVCDGFFYKDQNVAIVGGGDTAAEEATYLANICKKVTMLVRKGEMRASKAMQHRVTKTKNIDLRYFSEIEEVIGDQVVEGLRIVNNKTGKKEEIKITGLFIAIGHKPNTEIFLNQLEMDEGGYIITDGKTTKTNKPGVFASGDVQDKEYRQAVTAAGTGCMAALDAERYINSLR

SEQ ID NO: 102430 - protein, 49 aa, Unknown
  Bacterial polypetide isolated from the Sargasso Sea
MIKSNHSKLLILGSGPAGYTAAIYASRAMLEPTLLTGIEPGGQMTITTD

SEQ ID NO: 102431 - protein, 193 aa, Unknown
  Bacterial polypetide isolated from the Sargasso Sea
GLDSEKKFQGYGVSACATCDGFFFKEKKVAVIGGGNSAVEEALYLTNFASTVYLIHRRDELRAEKILQDRLFNNEKVKCIWDHQLQDILGDEDPLNVKGIKVKNVKTNEIQDIELDGVFIAIGHDPATQIFKNQVEMDNEGYIITKPDSTLTNVNGVYAAGDVKDKTYRQAVTAAGMGCMAALEAEKFLAEKS

SEQ ID NO: 102432 - protein, 138 aa, Unknown
  Bacterial polypetide isolated from the Sargasso Sea
HRRDELRAEKILQERIFKEEKAGKIEILWDSQLKEVLGDDMGVNGMVIDTKGSEVKKDVMGIFIAIGHKPNTDIFNNQLDMDNGYILIKSGLKGSITSTSVEGVFAAGDVSDQIYRQAVTSAGFGCMAALDAEKYLSE

SEQ ID NO: 102433 - protein, 113 aa, Unknown
  Bacterial polypetide isolated from the Sargasso Sea
MRFFGDESGVNGLKIKNVINSKETTIELYGVFIAIGHKPNTELFKNQLDMKNDYIKIKSGLAGDATATSIKGVFAVGDVSDQIYRQAITSAGAGCMGALDAEKYLDSLNISKS

SEQ ID NO: 102434 - protein, 42 aa, Unknown
  Bacterial polypetide isolated from the Sargasso Sea
MSENPTKHTKVLIIGSGPAGYTAAVYAARAMLKPILVHGMEP

SEQ ID NO: 102435 - protein, 218 aa, Unknown
  Bacterial polypetide isolated from the Sargasso Sea
FEAIGDSGQKYTADSIIISTGAQARWLNIKSEQEFRGFGVSACATCDGFFFKNKEVAVVGGGNAAVEEAMFLTKFASKVKLIHRRDSLRAEKMLQKKLMENKKIEIIWDSVVEDVLGDKDPKNVKGIKIKNVKTNKIQELKLDGVFIAIGHDPATQLFKDQLKMDNEGYLITKPDSTETNVPGVYAAGDVKDKTFRQAVTAAGMGCMAALEAEKFLSH

SEQ ID NO: 102436 - protein, 1848 aa, Unknown
  Bacterial polypetide isolated from the Sargasso Sea
MQQRDADTYVLAYTGRSADGFIQTFDINANGSTITKKRSWEHDGCQGNYNSLVKVSDDVFALAYAGSSSDGYIRTFKVDASGKISSKKVKEHNTNYGIYNALTHLVGTTYVLAYTGASNKGKMSTFTIPADGSSITIKKTINMDASFAAYNAIHKMTDSTVVVVYQGSGPKFLMKTFQISSDGKTITEKKSETIYEGKAHWNAIAQVDANTYVIATQGKDDDGYLYTYDVAPDGSSIAKVAELEFDDEKSLHHTLYNAGSNSFVLAHTGTANSRTYGKMFTIPADGSKINQIYSTKLNDYGQGQSALSRIDADTYAFAFSGSGVDGIMSTLTVRAGDTVLPVISFIAINDDNSSVQVTFNEEVYNSAGASGSLEVSDFSLTITGGTAKLPSATPTSISANGKIYTLGFDLTGTANGQEVFKVSPVEKAIFDGGGNTAATNQTNGSANLKDKTGPAISKTVLANDNSTATITFNEKSYSTGSGSGALEKSDFVLSIDGGLAKLAGTTPTSISVSGNDYTLGFGLTGSPDGNEVLKINPASKSIFDASGNISTTLQTNNTANLKDIVPAVIDSIELAGDNSIVQVFFNEPVFSKEDGSGALDSADFVYSLTGGIATLAKKYPSSVSGSGTKTLSLGVLLTGRPNGKEVLTVTPVSKSVFDKPGNITSTTQSKNKANLNDKFVPQYSASALAPDNSVIAVTFNEPVFAKSNATGKIDTSDFEFTLNGGSAKLLKAYPDSVGQVGNTYSLGIKLDGLADGTETFTFKPKSGAIFDSTGNKASTTQSFSSLKLNDKAPPEIKSLSLAADNSKLSIDFTESVYSKGNGTGDLEKSDFVFSVTGETIVLTSPFPTSIAKSGNTFTLGIGSRGDPNGTEVLSVLIVDNAVFDGSGNPATMEQNKNKVTFNDKNAPLITKLDLATDNSTLTVTMNEPTFSASDGTGSLDSTAFILKINNGTSTLSQQHPKTLKTIDSTFTYILGLPLTGIADGSEELIISFADDGLYDASGTEAAQTQVINKVTLFDLSAPVISESKLDSDNKKVMVRFSVPVFSSAKATGTLERDDFRLSLVGGSATLKNTTPSSIDSSDNGRRYKLGIEIAGIPDGRETLTINPVDNNVFDASANPANKVQSNNSMNLFDKQPPIIKSVTLSSTNDSLFVTFDESVYAKEDGTDSLKADDFLLSLSGGIAGLKNSNPATASGSGKNYILTFGLSGTPDGNEKIIVNANNRSIFDAAGNPGVNQDRDNSVFLNDKSAPRSPQGLVGIPGNNQATLSWKTTGETDISKYYIYGGTSTNPTQKIDSTQSGGNVKVISGLTNEITYYFKVSGLDKTGYEGALSDTVSVKPTTTQSFTVKADGTGDFSNAQAAIDAAVSGDSVYIEAGSYDSLRVDGKSIQIIAGDGPTKSFIDAQGKTTAVILSGYPNQTTISGFTIMNGVGDNNDNGQGGGIVVEPGVNATIDNCVLTNNEDGAIYFGDSSEVKISNTLAYGNDKSFVFGSGTANFINCTFVREKENSAMGSGAKINFINTIFMNEVVASDTVTDISLWANYSLFLLGEDTFNPNLIKEYNWGKGNIEGDPMFVDTLNLDYHLQKESPAIGVGIQSINVAGLTYEAPEKDLDGYNRPSPSGSAPDMGIYESPYSSAAPSANQISDGLSDSVEVDFSSSNSTLSAHWKRFGGSNVVYEYAIGTSPDKRTDIKNWTVVGFDTTITVTGLSLVNSTTYYTSIRGKNNLGETSTVTSDGVTIDFESPKINSVTELKEDVDWFGPNMPGHIFVDATDNTGIEKYEFSIGTNKGGDDVIAWTESDSNSIAFDVKDLTENVTYYSNAIVTDYVGYSTSASSDSFMMDFSSPEQGY

SEQ ID NO: 102437 - protein, 309 aa, Unknown
  Bacterial polypetide isolated from the Sargasso Sea
MGEDVRSVIIVGSGPAGYTAGLYTARALLDPLMFAGYMSGGQLMLTSDVENFPGYPKGIGGPEMMIDMREQAERFGLEVHDKNVERVDLSERPFRVWVEGEEFRAHSLIICTGAEAIWLGAEGEEEQKGRGISTCATCDGAFFRDEEIIVVGGGDSAMEEATFLTRFASKVTVIHRRDVFKASKVMYERAEKHPKIEIKTFRQVKKWIAGEQGLTGAVLEDPRDGSEEEISCAGAFIAIGHKPITQFLGEQIETDSEGYIVHKENTMTEVPGVFAAGDVVDKRYRQAITAAGMGCQAAIDAEKWLEEQD

SEQ ID NO: 102438 - protein, 132 aa, Unknown
  Bacterial polypetide isolated from the Sargasso Sea
RDKFRASQIMQDRVLNHEKIEVVWNSTVEKIIGDGAVSSVVLKNTLDGSESELNLEGVFVAIGHDPNVEFLNNFVELDEKGYIKTGFTTDTSTSIPGIFAAGDVADSIYRQAITAAGTGCQAAIDSERWLDH

SEQ ID NO: 102439 - protein, 39 aa, Unknown
  Bacterial polypetide isolated from the Sargasso Sea
VEGVFAAGDVSDQIYRQAVTSAGFGCMAALDAEKYLSEK

SEQ ID NO: 102440 - protein, 119 aa, Unknown
  Bacterial polypetide isolated from the Sargasso Sea
MKEKINTEVLIIGSGPAGYTAAIYAARANLKPHLVSGLEPGGQLTITTDVENYPGYGDTIQGPWLMEEMKKQSLNVGTIIHNDLVTEVDFNSYPFISKTDSGLIFESKTVIISTGAQAR

SEQ ID NO: 102441 - protein, 192 aa, Unknown
  Bacterial polypetide isolated from the Sargasso Sea
NLKSEQEFRGFGVSACATCDGFFFKEKEVAVVGGGNAAVEEAMFLTKFASKVKLIHRRNELRAEKMLQAKLKANKKIEIIWDSIVEDVIGDTNPKSVKAIKIKNVKTNKTSELKVNGLFIAIGHDPATSLFKGQLNMDKEGYIVTNPDSTITNVPGVFAAGDVKDKIFRQAVTAAGMGCMAALEAEKHLSSK

SEQ ID NO: 102442 - protein, 94 aa, Unknown
  Bacterial polypetide isolated from the Sargasso Sea
MSQNPTKHTKVLIIGSGPAGYTAAVYAARAMLSPILVYGAEPGGQLTTTTDVENFPGFADVIQGPWLMDQMKAQAKAVGTEMIDDHISSVNLKT

SEQ ID NO: 102443 - protein, 183 aa, Unknown
  Bacterial polypetide isolated from the Sargasso Sea
MENKEKISNVENVVIIGSGPAGYTAAIYAARANLQPLLVTGFNSGGIPGGQLMTTTFVENYPGFPDGVLGPELMDLMKAQAERWGTNLYESDVVSINTDSHPFELKTLEGTIKSNSIIIATGASANRLGVINEDKFWSKGISACAICDGATPQFRDEELAVIGGGDSACEEAAYLTKYGSKVH

SEQ ID NO: 102444 - protein, 151 aa, Unknown
  Bacterial polypetide isolated from the Sargasso Sea
MENKEKISNVENVVIIGSGPAGYTAAIYAARANLQPLLVTGFNSGGIPGGQLMTTTFVENYPGFPDGVLGPELMDLMKAQAERWGTNLYESDVVSINTDSHPFELKTLEGTIKSNSIIIATGASANRLGVINEDKFWSKGISACAICDGAT

SEQ ID NO: 102445 - protein, 125 aa, Unknown
  Bacterial polypetide isolated from the Sargasso Sea
MKQNPTKHTKVLIIGSGPAGYTAAVYAARAMLKPIMVTGMEPGGQLTTTTDVENYPGFAEVIQGPWLMEQMRDQAKAVGTEMIEDHIASVNLKSKPFEAIGDGGQKYTADSIIISTGAQARWLNI

SEQ ID NO: 102446 - protein, 281 aa, Unknown
  Bacterial polypetide isolated from the Sargasso Sea
LVQGLQPGGQLIITTDVENYPGYEDVIQGPWLMEQMQEQAKNVGTNIINDIIKSVDFKSKPFKAISESGTEYTADSVIISTGAQARWLGLDSEKKFQGYGVSACATCDGFFFKEKKVAVIGGGNSAVEEALYLTNFASKVYLIHRRDELRAEKILQNRLFKNEKVECVWNSELKEIVGDEDPLNVKSINIKNTKTNETSSIELDGVFVAIGHDPATQIFRDQVEMDEDGYIITKPDSTLTNVEGVYAAGDVKDKIYRQAVTAAGMGCMAALEAEKYLAELS

SEQ ID NO: 102447 - protein, 244 aa, Unknown
  Bacterial polypetide isolated from the Sargasso Sea
MNRKVIIIGSGPAGLTAALYTARANLKPLVFEGNQPGGQLTITTDVENYPGFPDGIMGPDLMESFRKQAVRFGAECHFKNVTKIDLNKKPYKIWVGDENFNTESLIIATGASAKMLGLDSERVLMGYGVSACATCDGFFFKDKKVLVVGGGDSAMEEATYLTKFASEVVIIHRRDKFRASKIMIDRTMSNPKISVLWNKTINEILGSQEKGVNGVLLKDTISGESNEEACDGVFMAIGHKPNTD

SEQ ID NO: 102448 - protein, 135 aa, Unknown
  Bacterial polypetide isolated from the Sargasso Sea
KMLQEKLFEKTGDNGNINILWDHVLDEVLGDESGVNGIVCSNVNEPSDQTQLDVQGVFIAIGHDPNTSFFGDGLKLDDSNYIILDESNARFSTQTSIEGVFAAGDVADPVYRQAVTSAGSGCMAALDAEKFLEQS

SEQ ID NO: 102449 - protein, 105 aa, Unknown
  Bacterial polypetide isolated from the Sargasso Sea
MPNTYHTKVLIIGSGPAGYTAAIYAARANLKPILVQGLEPGGQLTITTDVENYPGFSDVIQGPWLMEQMREQAEKVGTRLISDLIQKVDFTKKPFHCLADSGDLF

SEQ ID NO: 102450 - protein, 59 aa, Unknown
  Bacterial polypetide isolated from the Sargasso Sea
MSENPTKHTKVLIIGSGPAGYTAAIYAARAMLKPILVHGMEPGGQLTTTTDVENFPGFK

SEQ ID NO: 102451 - protein, 319 aa, Unknown
  Bacterial polypetide isolated from the Sargasso Sea
VENYPGFPDGVLGPELMDLMKAQAERWGTNLYESDVVSINTDSHPFELKTLEGTIKSNSIIIATGASANRLGVINEDKFWSKGISACAICDGATPQFRGEELAVIGGGDSACEEAAYLTKYGSKVHLIVRSEKLRASAAMVDRVKANPKIEIHWNTKVNKADGSEWLEKIETIHSLEGKGEINIKGLFYAIGHTPNTKFLGNKIDLDNKGYIACKSGRPETSIEGIFAAGDVVDSEWRQGVTAAGTGCMAALATERWLAEKNLAKTIVRETPEPEKKLNSSDFIEEEVNEDTFDSNSEWQKGSYALRKLYHESKKPILV

SEQ ID NO: 102452 - protein, 78 aa, Unknown
  Bacterial polypetide isolated from the Sargasso Sea
MNQNPTKHTKVLIIGSGPAGYTAAVYAARAMLKPIMVSGMEPGGQLTTTTDVENYPGFAEIIQGPWLMEQMRDQAKAV

SEQ ID NO: 102453 - protein, 108 aa, Unknown
  Bacterial polypetide isolated from the Sargasso Sea
MNQNPSKHTKVLIIGSGPAGYTAAVYAARAMLKPIMISGMEPGGQLTTTTDVENYPGFAKVIQGPWLMEEMRDQAKAVGTVIIEDHISCVNLKSKPLKLLRKAAKNIR

SEQ ID NO: 102454 - protein, 207 aa, Unknown
  Bacterial polypetide isolated from the Sargasso Sea
SKSIIIATGAQARWLNLESEKKFKGFGISACATCDGFFFKDQQVAVIGGGNSAVEEAMFLTKFASKVLLIHRRDSLRAEKILQERLFNNKKIEVIWNSKVSEFVGEENPNTLKKVILENTLDGAKTTIDVNGAFIAIGHDPATSLFIDKLKMDEENYIITKPDSTETSIRGVFAAGDVKDKIYRQAVTAAGMGCMAALEAEKYIAEN

SEQ ID NO: 102455 - protein, 263 aa, Unknown
  Bacterial polypetide isolated from the Sargasso Sea
NYPGYSKVIQGPWLMEEMKGQAESVGTEMIQDHINKVDLSAKPFKANGDSGQVYTADSIIISTGAQARWLNLKSEEKYRGFGVSACATCDGFFFKDKEVAVVGGGNAAVEEAIFLTKFASKVKLIHRRNELRAEKMLQEKLKSNKKIEIVWDSVVEEVVGKNEPKSVSAIKIKNVKDNKVKELKIDGLFIAIGHDPATSLFKDQLKMDKEGYLITKPDSTETNIPGVFAAGDVKDKIFRQAVTAAGMGCMSALEAEKYLSDSN

SEQ ID NO: 102456 - protein, 112 aa, Unknown
  Bacterial polypetide isolated from the Sargasso Sea
MNKEKVLIIGSGPAGYTAAIYAARAGLNPLLISGLEPGGQLTITTDVENFPGFEDPIQGPWLMEQMKKQAVAYGTRIMNDYVLEVDFNKKIHCVKTEKDKFSSHTVIIATGA

SEQ ID NO: 102457 - protein, 122 aa, Unknown
  Bacterial polypetide isolated from the Sargasso Sea
MSQNPTKHTKVLIIGSGPAGYTAAVYAARAMLKPILVHGMQPGGQLTTTTDVENFPGFAEVIQGPWLMEQMKEQAQAVGTEMIEDHIASVNLKSKPFEAVGDGGQKYTADTIIISTGAQARW

SEQ ID NO: 102458 - protein, 75 aa, Unknown
  Bacterial polypetide isolated from the Sargasso Sea
MEDKDTNNDANTPDFPKKSKSAYDVIIIGAGPAGYTAGIYCSRARHDTLIISGLLPGGQLMNTTDVENYPGFEER

SEQ ID NO: 102459 - protein, 219 aa, Unknown
  Bacterial polypetide isolated from the Sargasso Sea
EALGESGQKYTADSIIISTGAQARWLNIESEQEYKGFGVSACATCDGFFFKDKTVAVVGGGNAAVEEAMFLTKFASKVKLIHRRNELRAEKMLQKKLMENKKIEIVWDTVVEDVLGDKDPKNVTGLKVKNLKTNKSEVMKIDGLFIAIGHDPATQLFKDQLKMDKEGYLITKPDSTETNVPGVFAAGDVKDKIFRQAVTAAGMGCMAALEAEKHLSHNK

SEQ ID NO: 102460 - protein, 82 aa, Unknown
  Bacterial polypetide isolated from the Sargasso Sea
MKNKIETDVLIIGSGPAGYTAAIYAARANLKPHLVSGLEPGGQLTITTDVENYPGFGDVIQGPWLMEQMKEQALKVGTEFHN

SEQ ID NO: 102461 - protein, 129 aa, Unknown
  Bacterial polypetide isolated from the Sargasso Sea
MTQNPTKHTKVLIIGSGPAGYTAAVYAARAMLKPILVHGIEPGGQLTTTTDVENYPGFAQVIQGPWLMDQMKEQAQAVGTEMIQDHIKSVDLKKTPFQAVGESGQMYTADSIIISTGAQARWLNIESEQ

SEQ ID NO: 102462 - protein, 250 aa, Unknown
  Bacterial polypetide isolated from the Sargasso Sea
TFVENYPGFPDGVLGPELMDLMKAQAERWGTNLYESDVVSINTDSHPFELKTLEGTIKTNSIIIATGASANRLGVINEDKFWSKGISACAICDGATPQFRDEELAVIGGGDSACEEAAYLTKYGSKVHLIVRSEKLRASAAMVDRIKANPKIKIHWNTKVNKADGSEWLEKIETIHSKEGKGEINIKGLFYAIGHTPNTKFLGNKIDLDNKGYIACKSGRPETSIEGIFAAGDVVDSEWRQGVTAAGTGC

SEQ ID NO: 102463 - protein, 238 aa, Unknown
  Bacterial polypetide isolated from the Sargasso Sea
SVGTNIVFDTIIDVDLSSKPFSLQSDSGKNYTCDALIISTGAQAKWLGLESENKFKGYGVSACATCDGFFYKDKTVVVVGGGNTAAEEAIFLTNFASEVKLIHRRDSLRAEKILQKRLMDNKKIEIIWNSEITEIIGDENPLSVKQVVLRNNKDDSTKKINTDGIFVAIGHSPASMIFKNQLNMDDKGYIFTEADSTKTNVEGVFAAGDVTDDKYRQAVTAAGMGCMAALEVEEFLSE

SEQ ID NO: 102464 - protein, 95 aa, Unknown
  Bacterial polypetide isolated from the Sargasso Sea
MNNKSTKHTKVLILGSGPAGYTAAIYAARAMLSPILVHGSQPGGQLTTTTDVENYPGYSKVIQGPWLMDEMKGQAEAVGTQMIQDHINKVDLSSK

SEQ ID NO: 102465 - protein, 223 aa, Unknown
  Bacterial polypetide isolated from the Sargasso Sea
GSGPAGYTAAIYAARADLKPIIYTGLEPGGQLTTTTEVDNFPGYPQGIDGPTMMNELREQAERFGTKVEVDFISRVEFSKEKGGVHKIYTQNGDEIQSKTIIICTGASAKYLGLPSEQKLIGGGVSACAVCDGFFYKDQDVAVVGGGDSAIEEATYLAKICENVTMLVRKDHFRASKAMQHRISNFKNINVLFNSEIDEVLGDNVVEGIKIKNNITNDFSELN

SEQ ID NO: 102466 - protein, 125 aa, Unknown
  Bacterial polypetide isolated from the Sargasso Sea
MNQNPTKHTKVLIIGSGPAGYTAAVYAARAMLKPIMVSGMEPGGQLTTTTDVENYPGFAEVIQGPWLMEQMREQAKAVGTEMIEDHISSVNLKSKPFEAIGDGGQKYTADTIIVSTGAQAKVAKY

SEQ ID NO: 102467 - protein, 133 aa, Unknown
  Bacterial polypetide isolated from the Sargasso Sea
MSQNPTKHTKVLIIGSGPAGYTAAVYAARAMLKPMLVAGMQPGGQLTITTDVENYPGFSDVIQGPWLMDQMREQAKAVGTELIDDHIKSVNLKSTPFEAIGDGGQKYTADSIIISTGAQARWLNIESEEKFKG

SEQ ID NO: 102468 - protein, 193 aa, Unknown
  Bacterial polypetide isolated from the Sargasso Sea
MKRKVIIIGSGPAGLTSAIYAARASLKPLVFEGIQPGGQLTITTDVENYPGFPKGILGPELMDLFRKQAQRFGAECRFSAVDHVDLSERPFKIISQDEQFFTESVIISTGATAKLLGLKSEKKMMGHGVSACATCDGFFFKEKKVLVIGGGDSAMEEASFLTKFAKEVVIVHRRNEFRASKIMVERSIIKSLK

SEQ ID NO: 102469 - protein, 204 aa, Unknown
  Bacterial polypetide isolated from the Sargasso Sea
AVIVSTGARSVMLDLPNEFELVGHGVSTCATCDGFFFRDQEIAVVGGGDSAMEEATFLSRFASKVTIIHRREELRASKIMQERAFSNPKIDFLWNHEVIGYVGESKLEGITVRDVNSGNEKNIDLSGLFIAIGHKPNTDIFINQLDLLDNGYVATKPDSSLTNISGVFACGDVQDFTYRQAITAAGSGCMAAIDAERWLEEQGD

SEQ ID NO: 102470 - protein, 290 aa, Unknown
  Bacterial polypetide isolated from the Sargasso Sea
GPAGYTAAIYAARANLKPHLVSGLEPGGQLTITTDVENYPGFGDVIQGPWLMEQMKQQAVKVGTEFHNDIVNNVEFDKNPFHAQTDLGIEFKSKSIIIATGAQARWLNLESENKFKGFGISACATCDGFFFKDQNIIVVGGGNSAVEEALYLTNFASKVTLVHRRNKLRAEKILQERLFKHPKIEVIWDHVVEEFIGSDQPLTLKKIKLKNVNNNSEKIINSTGAFIAIGHDPATSLFKNKIKMDNDNYIITKPDSTETNIEGVYAAGDVKDKIFRQAVTAAGMGCMAAL

SEQ ID NO: 102471 - protein, 262 aa, Unknown
  Bacterial polypetide isolated from the Sargasso Sea
MNNQREKVIIIGSGAAGLTAAIYAARANLNPIVIEGIQPGGQLTITTDVENYPGYADVVQGPWMMEQMRSQAIKVGARIINDIVVKIDLKKNEKMVVLDSSKSLTADTLIIATGAQAKWLGLESENKYNGRGVSACATCDGFFYRNKEVAVVGGGNTAVEEALYLSNICSKVNLIHRRDALRSEKILQDRLFSKKNINIIWNNEVSEILGDENGVNALKLISTKQNKTEIIRVDGVFIAIGHSPSTKPFEDVLEMDNEGYII

SEQ ID NO: 102472 - protein, 258 aa, Unknown
  Bacterial polypetide isolated from the Sargasso Sea
FAEVIQGPWLMDQMKEQAKAVGTEMIEDHIGSVNLKSTPFEAIGDSGQKYTADSIIISTGAQARWLNLNSEQEFRGFGVSACATCDGFFFKDKEVAVVGGGNAAVEEAMFLTKFASKVKLIHRRDSLRAEKMLQKKLIENKKIEIIWDSVVEDVLGDKNPKNVKGIKIKNIKTNKTQELKLDGVFIAIGHDPATQLFKDQLEMDKEGYLITKADSTETNIPGVFAAGDVKDKIFRQAVTAAGMGCMAALEAEKHLSHN

SEQ ID NO: 102473 - protein, 127 aa, Unknown
  Bacterial polypetide isolated from the Sargasso Sea
MSQNPTKHTKVLIIGSGPAGYTAAVYAARAMLKPIMISGMEPGGQLTTTTDVENYPGFAEVIQGPWLMEQMRDQAKAVGTEMIEDHIASVNLKSKPFEAIGDNGQKYTADSIIISTGAQARWLNIES

SEQ ID NO: 102474 - protein, 170 aa, Unknown
  Bacterial polypetide isolated from the Sargasso Sea
MEYQHHKLIILGSGPAGYAAGIYAARAGLEPLLITGAEQGGQLTTTTDVENWPGDHEGLQGPELMERMKKHAEMFDVQIVNDHIDSTELTEKPFKLTGSQNWSCDSLIISTGASAKYLGLPSEKEFLGKGVSACATCDGFFYRDQEVAVVGGSNTAAEEALYLSRICSKV

SEQ ID NO: 102475 - protein, 189 aa, Unknown
  Bacterial polypetide isolated from the Sargasso Sea
KYRGFGVSAGATCDGFFYKNKNVAVVGGGNTAAEEALFLSIFCKKVTLIHRRDKLRAENILQKRLFEKKNIEFIWNSNVEKVLGDAKKKTITSLAINNCQNNLKKTIPVDGFFVAIGHSPTTEIFKKKLQMDDEGYIFTDADSTKTSVDGVFAAGDVTDKVFRQAVTAAGMGCMGALEAESFLTKKNVI

SEQ ID NO: 102476 - protein, 205 aa, Unknown
  Bacterial polypetide isolated from the Sargasso Sea
MNNKSTKHTKVLILGSGPAGYTAAIYAARAMLKPILVFGSEPGGQLTTTTDVENFPGYSKVIQGPWLMEEMKGQAKAVGTEMIQDHISKVDLSKKPFIARGDSGQVYTADSFIISTGAQARWLNLKSEQEFRGFGVSACATCDGFFFKDKEVAVVGGGNAAVEEAMFLTKFASKVKLIHRRNELRAEKMLQAKLKANKKIEIIWD

SEQ ID NO: 102477 - protein, 56 aa, Unknown
  Bacterial polypetide isolated from the Sargasso Sea
MDESGYIITEPKSTITNIPGVFAAGDVQDKEYRQAVTAAGTGCMAALDAERYLQEI

SEQ ID NO: 102478 - protein, 86 aa, Unknown
  Bacterial polypetide isolated from the Sargasso Sea
MHSKVLIIGSGPAGYTAAIYAARAMLEPTLVQGIQPGGQLTITTDVENYPGYGDVIQGPWLMEQMEAQAKNVGTKIISDIIETVDF

SEQ ID NO: 102479 - protein, 269 aa, Unknown
  Bacterial polypetide isolated from the Sargasso Sea
PKKTKTSYDVIIIGAGPAGYTAGIYCSRARHDTLIISGLLPGGQLMNTTDVENYPGFDEGIMGPDLMLTMRKQAERMNTTIIDDVVVNVDFRAKPFKVLTGSEEYEAKAVIVCTGATPRKIGIEGEQTFSGKGVSYCATCDGAFFRNQDIAVVGGGDTCMEEATFLTKFASKVHIIHRRDTFRASKIMQDRALNNENIEVHWNSVIEDIKGDQKVQQIILKDTKTGENKTLEMGGVFVAIGHEPNTELFKNQLEMDENGYIIQKQNTET

SEQ ID NO: 102480 - protein, 227 aa, Unknown
  Bacterial polypetide isolated from the Sargasso Sea
MENKEKNLNVENVVIIGSGPAGYTAAIYAARANLQPLLVTGFNSGGIPGGQLMTTTFVENYPGFPDGVLGPELMDLMKAQAERWGTNLYESDVLSINVDSHPFELKTLEGTIKAKSIIIATGASANRLGVINEDKFWSKGISACAICDGATPQFRDEELAVIGGGDSACEEAAYLTKYGSKVHLIVRSEKLRASAAMVDRVKANPKIEIHWNTKVDKADGYEWLEKI

SEQ ID NO: 102481 - protein, 107 aa, Unknown
  Bacterial polypetide isolated from the Sargasso Sea
GDESGVTGMRVESKSGEVKSISVSGIFIAIGHTPNTTIFANQLAMSDGYIEIKSGSEGNATSTSVAGVFAAGDVADHIYRQAITSAGFGCMAALDAEKYLDNKQNQS

SEQ ID NO: 102482 - protein, 221 aa, Unknown
  Bacterial polypetide isolated from the Sargasso Sea
PFKAIGDSGQEYTADSIIISTGAQARWLNLESEQKYRGFGVSGCATCDGFFFKDKEVAVIGGGNAAVEEAIFLTKFATNVKLIHRRNELRAEKMLQKKLKENKKIEIIWDSVLEEVLGNEDPKGVTGIKIKNIKTNKTTQLNVHGLFIAIGHDPATSLFKGQLDMDKEGYLITKPDSTETNKPGVFAAGDVKDKIFRQAVTAAGMGCMSALEAEKFLSSKN

SEQ ID NO: 102483 - protein, 123 aa, Unknown
  Bacterial polypetide isolated from the Sargasso Sea
MKKHSKVLILGSGPAGYTAAIYAARAMLKPILVHGSEPGGQLTTTTDVENYPGYSKVVQGPWLMEEMKGQAKAVGTEMIQDHIKKVDLSKKPFEAVGDSGQVYTADSFIISTGAQARWLNLKS

SEQ ID NO: 102484 - protein, 68 aa, Unknown
  Bacterial polypetide isolated from the Sargasso Sea
MENKEKNSNVENVVIIGSGPAGYTAAIYAARANLQPLLVTGFNSGGIPGGQFMTTTFVENYPGFPDGV

SEQ ID NO: 102485 - protein, 138 aa, Unknown
  Bacterial polypetide isolated from the Sargasso Sea
MENKEKISNVENVVIIGSGPAGYTAAIYAARANLQPLLVTGFNSGGIPGGQLMTTTFVENYPGFPDGVLGPELMDLMKAQAERWGTNLYESDVVSINTDSHPFELKTLEGTIKSNSIIIATGASANRLGVINEDKFWE

SEQ ID NO: 102486 - protein, 228 aa, Unknown
  Bacterial polypetide isolated from the Sargasso Sea
MTESIHHKLIILGSGPAGYSAAVYAARANLKPVIITGSEPGGQLMTTTDVENWPGDPEGLLGPALMDRMLEHAKRFDTEVIYDHIESAELGSRPFTLNGGNAKYTADALIIATGSTARYLGLESEEKYKGKGVSACATCDGFFYKDQDVIVVGGGNVAVEEAIYLSNIAKNVTLIHRRDELRAEKMLQEKLFEKTGENGNIKILWDHVLDEVLGDESSVNGIVCSNGQ

SEQ ID NO: 102487 - protein, 95 aa, Unknown
  Bacterial polypetide isolated from the Sargasso Sea
MSQNPTKHTKVLIIGSGPAGYTAAVYAARAMLKPILVHGMEPGGQLTTTTDVENYPGFAEVIQGPWLMEQMKEQAQAVGTEMIEDHIASVNLKIK

SEQ ID NO: 102488 - protein, 51 aa, Unknown
  Bacterial polypetide isolated from the Sargasso Sea
MSQNPTKHTKVLIIGSGPAGYTAAVYAARAMLNPILVYGSEPGGQLTTTTD

SEQ ID NO: 102489 - protein, 50 aa, Unknown
  Bacterial polypetide isolated from the Sargasso Sea
MSQNPTKHTKVLIIGSGPAGYTAAVYAARAMLNPILVYGSEPGGQLTTTT

SEQ ID NO: 102490 - protein, 131 aa, Unknown
  Bacterial polypetide isolated from the Sargasso Sea
MNQNPTKHTKVLIIGSGPAGYTAAVYAARAMLNPILVYGSEPGGQLTTTTDVENYPGFSEVIQGPWLMDQMKEQAKAVGTEMIEDHIGSINLKLKPFEAIGDSGQKYTAESIIIFTGGSARWLNIKSEQEI

SEQ ID NO: 102491 - protein, 250 aa, Unknown
  Bacterial polypetide isolated from the Sargasso Sea
MNTIIIGSGPAGYTAAIYAARADLKPIIYTGLEPGGQLTTTTEVDNFPGYPQGVDGPTMMNELKEQAERFGTKVEVDFISRVEFSKEKGGVHKIYTQNGDEIQSKAIIICTGASAKYLGLPSEQKLIGGGVSACAVCDGFFYKNQDVAVVGGGDSAIEEATYLAKICNNVTMLVRKDHFRASKAMQHRLSNFKNINVLFNSEIDEVLGDNVVEGIKIKNNITNEFSQVNITGLFIAIGHTPNTDIFKRYC

SEQ ID NO: 102492 - protein, 254 aa, Unknown
  Bacterial polypetide isolated from the Sargasso Sea
IQGPWLMEEMKGQANAVGTEMIQDHIKKVDLSKKPFEAIGDSGQVYSADSFIISTGAQARWLNLKSEQEFRGFGVSACATCDGFFFKEKEVAVVGGGNAAVEEAMFLTKFASKVKLIHRRNELRAEKMLQAKLKANKKIEIIWDSVVEDVIGDTNPKSVKAIKIKNVKTNKTSELKVDGLFIAIGHDPATSLFKGQLNMDKEGYILTNPDSTITNVPGVFAAGDVKDKIFRQAVTAAGMGCMAALEAEKHLSSK

SEQ ID NO: 102493 - protein, 136 aa, Unknown
  Bacterial polypetide isolated from the Sargasso Sea
MNQNPTKHTKVLIIGSGPAGYTAAVYAARAMLKPIMVSGMEPGGQLTTTTDVENYPGFAEVIQGPWLMEQMRDQAKAVGTEMIEDHISSVNLKSKPFEAIGDGGQKYTADSIIISTGAQARWLNIESEQKFRGFGV

SEQ ID NO: 102494 - protein, 265 aa, Unknown
  Bacterial polypetide isolated from the Sargasso Sea
TDVENFPGFAEVIQGPWLMDQMKEQAKTVGTEMIEDHIGSVNLKSTPFEAIGDSGQKYTADSIIISTGAQARWLNIKSEQEFRGFGVSACATCDGFFFKNKEVAVVGGGNAAVEEAMFLTKFASKVKLIHRRDSLRAEKMLQKKLMENKKIEIIWDSVVEDVLGDKDPKNVKGIKIKNVKTNKIQELKLDGVFIAIGHDPATQLFKDQLKMDNEGYLITKPDSTETNIPGVYAAGDVKDKTFRQAVTAAGMGCMAALEAEKFLSH

SEQ ID NO: 102495 - protein, 122 aa, Unknown
  Bacterial polypetide isolated from the Sargasso Sea
MENKEKISNVENVVIIGSGPAGYTAAIYAARANLQPLLVTGFNSGGIPGGQLMTTTFVENYPGFPDGVLGPELMDLMKAQAERWGTNLYESDVISINTDLHPFELKTLEGTIKANSIIIATG

SEQ ID NO: 102496 - protein, 70 aa, Unknown
  Bacterial polypetide isolated from the Sargasso Sea
MTEKIENDVLIIGSGPAGYTAAIYAARANLKPHLVSGLEPGGQLTITTDVENYPGFENVIQGPWLMEQMK

SEQ ID NO: 102497 - protein, 131 aa, Unknown
  Bacterial polypetide isolated from the Sargasso Sea
MNQNPTKHTKVLIIGSGPAGYTAAVYAARAMLKPIMVTGMEPGGQLTTTTDVENYPGFAEVIQGPWLMEQMKEQAQAVGTEMIQDHISSVNFKSKPFEAIGDGGQKYTADTIIISTGAQARWLNIESEQKF

SEQ ID NO: 102498 - protein, 278 aa, Unknown
  Bacterial polypetide isolated from the Sargasso Sea
VCSLGGQLTITTDVENYPGYGDVIQGPWLMEQMQEQAKNVGTNIINDIIKSVDFKTKPFKAISESGTEYTADSVIISTGAQARWLGLESEKKFQGYGVSACATCDGFFYKEKKVAVIGGGNSAVEEALYLTNFASKVYLVHRRNELRAEKILQDRLFKNEKVECVWDSELKEIVGDEDPLNVKSINITNTKTNENSNIELDGVFVAIGHDPATQIFRDQVEMDEDGYIMTRPDSTLTNVEGVYAAGDVKDKIYRQAVTAAGMGCMAALEAEKYLAELS

SEQ ID NO: 102499 - protein, 35 aa, Unknown
  Bacterial polypetide isolated from the Sargasso Sea
MSDTIEKVKCLIIGSGPAGYTAAIYASRANMHPSF

SEQ ID NO: 102500 - protein, 150 aa, Unknown
  Bacterial polypetide isolated from the Sargasso Sea
FLTNFASKVTLIHRRDELRAEKILQERLLNHPKIETLWFHELKEVIGTNDPKGVEAVRVENVHTSQIKEIKCKGVFIAIGHSPASELVIEQLETHSGGYVQVQAGSTRTSINGVFAAGDLTDHIYRQAITSAGMGCMAALDAEKFLAEKG

SEQ ID NO: 102501 - protein, 149 aa, Unknown
  Bacterial polypetide isolated from the Sargasso Sea
MTESIHHKLIILGSGPAGYSAAVYAARANLKPVIITGSEPGGQLMTTTDVENWPGDPEGLLGPALMDRMLEHAKRFDTEVIYDHIESAELGSRPFTLNGGNAKYTADALIIATGSTARYLGLESEEKYKGKGVSACATCDGFFYKDQDV

SEQ ID NO: 102502 - protein, 81 aa, Unknown
  Bacterial polypetide isolated from the Sargasso Sea
MSENPTKHTKVLIIGSGPAGYTAAIYAARAMLKPILVHGMEPGGQLTTTTDVENFPGFKDVIQGPWLMDQMKGQAEVMELK

SEQ ID NO: 102503 - protein, 193 aa, Unknown
  Bacterial polypetide isolated from the Sargasso Sea
KFGSEKKYKGFGISACATCDGFFFKDQNIVVIGGGNSAVEEALFLTNFASKVTLVHRRDELRAEKILQQRLFNHKKIDVIWSHVVKEFIGSNEPLSLNEIKIKNVNDESEKIIKATGAFIAIGHDPATSLFKNKIKMDHENYIITKSDSTETSIKGVYAAGDVKDKTYRQAVTAAGMGCMAALEAEKYIAENY

SEQ ID NO: 102504 - protein, 171 aa, Unknown
  Bacterial polypetide isolated from the Sargasso Sea
MAKHSKVLILGSGPAGYTAAIYAARAMLKPILVFGSEPGGQLTTTTDVENFPGYSKVIQGPWLMEEMKGQAKAVGTEMIQDHIKKVDLSKKPFEAIGDSGQVYSADSFIISTGAQARWLNLKSEQEFRGFGVSACATCDGFFFKEKEVAVVGGGNAAVEEAMFLTKFASKV

SEQ ID NO: 102505 - protein, 117 aa, Unknown
  Bacterial polypetide isolated from the Sargasso Sea
MENKEKNSNVENVVIIGSGPAGYTAAIYAARANLQPLLVTGFNSGGIPGGQLMTTTFVENYPGFPDGVLGPELMDLMKAQAERWGTNLYESDVVSINTDLHPFELKKLDGDIKTNSI

SEQ ID NO: 102506 - protein, 136 aa, Unknown
  Bacterial polypetide isolated from the Sargasso Sea
MLKPIMVSGMEPGGQLTTTTDVENYPGFAKAIQGPWLMEQMRDQAKAVGTEMIEDHISSVNLKSKPFEAIGDGGQKYTADSIIISTGAQARWLNIESEQKFRGFGVSACATCDGFFFKDKTVAVVGGGNAAVEEAM

SEQ ID NO: 102507 - protein, 238 aa, Unknown
  Bacterial polypetide isolated from the Sargasso Sea
RFGADCRFKEVTKVEFNANPFKIWVGEELFESKSVIISTGASARLLGLESESELMGNGVSACATCDGFFFKNKDVIVVGGGDSAMEEATFLTKFANKVTVVHRRDQLRASKIMQDRAENNSKIGFVWNTSIDKIYGNTESGVNGVRMKDTLSGETRDFACEGVFLAIGHTPNTSLLVGQLDTDEKGYIVTLDGSSKTSIEGVFASGDVQDRIYRQAVTAAGSGCMAAIDAERFLESQH

SEQ ID NO: 102508 - protein, 120 aa, Unknown
  Bacterial polypetide isolated from the Sargasso Sea
MENKETISNVENVVIIGSGPAGYTAAIYAARANLQPLLVTGFNSGGIPGGQLMTTTFVENYPGFPDGVLGPELMDLMKAQAERWGTNLYESDVVSINTDTHPFELKTLEGTIKSNSIIML

SEQ ID NO: 102509 - protein, 306 aa, Unknown
  Bacterial polypetide isolated from the Sargasso Sea
VKCLIVGSGPAGFTAALYASRANMKPVLYQGMQPGGQLTTTTEVDNFPGYANGVDGTQMMIDLKAQAKRFGTDVRTGMITKVDFTGPVHKVWVDNKTEIHSDTIVISTGASAKYLGLESEQHYLANGGGVSACAVCDGFFYKGQDTIIVGAGDSACEEASYLANICTKVTMLVRRDEFRASKIMAERVRNIDNIEILHNTELDEVLGDGNVVTGVRVVNNKTNDKHEIPCTGAFIAIGHTPNTQVFQPWLDMDETGYIVNQPGTSKTNIEGVFVSGDAADHVYRQAVTAAGTGCMAALDAERYLAS

SEQ ID NO: 102510 - protein, 255 aa, Unknown
  Bacterial polypetide isolated from the Sargasso Sea
GIPGGQLMTTTFVENYPGFPDGVLGPELMDLMKAQAERWGTNLYESDVVSINTDSHPFELKTLEGTIKSNSIIIATGASANRLGVINEDKFWSKGISACAICDGATPQFRDEELAVIGGGDSACEEAAYLTKYGSKVHLIVRSEKLRASAAMVDRVKANPKIEIHWNTKVDKADGSEWLERIETIHSQEGKGEINIKGLFYAIGHTPNTKFLGNKIDLDQKGYIACKSGRPETSIEGIFAAGDVVDSEGDKELPR

SEQ ID NO: 102511 - protein, 203 aa, Unknown
  Bacterial polypetide isolated from the Sargasso Sea
MENKENTSNVENVVIIGSGPAGYTAAIYAARANLQPLLVTGFNSGGIPGGQLMTTTFVENYPGFPDGVLGPELMDLMKAQAERWGTNLYESDVVSINTDSHPFELKTLEGTIKSNSIIIATGASANRLGVINEDKFWSKGISACAICDGATPQFRDEELAVIGGGDSACEEAAYLTKYGSKVHLIVRSEKLRASAAMVDRVKA

SEQ ID NO: 102512 - protein, 150 aa, Unknown
  Bacterial polypetide isolated from the Sargasso Sea
MPATSTKHAKVLILGSGPAGYTAAVYAARANLSPVLVTGLAQGGQLMTTTDVENWPADAHGVQGPELMGRFLEHAERFNTEIIFDHIHTAKLDEKPIRLIGDAGEYTCDSLIISTGASAQYLGLPSEEAFMGKGVSACATCDGFFYKQPS

SEQ ID NO: 102513 - protein, 118 aa, Unknown
  Bacterial polypetide isolated from the Sargasso Sea
MNQNPTKHTKVLIIGSGPAGYTAAVYAARAMLKPIMVSGMEPGGQLTTTTDVENYPGFAEVIHGPWLMEQMREQAKAVGTEMIEDHISSVNLKSKPFEATGDGGQKYTADSIIISTGA

SEQ ID NO: 102514 - protein, 88 aa, Unknown
  Bacterial polypetide isolated from the Sargasso Sea
MNNKSTKHTKVLILGSGPAGYTAAIYAARAMLKPILVHGSQPGGQLTTTTDVENYPGYSKVIQGPWLMDEMKGQAEAVGTEMIQDHIS

SEQ ID NO: 102515 - protein, 265 aa, Unknown
  Bacterial polypetide isolated from the Sargasso Sea
VENWPGVKEILGPDLMTNLESHAKSAGTKIINETIIKLNLKKYPFIAISDCGNQYEAESVILATGAQAKWLGLKSEEKYKGFGVSACATCDGFFFRNEIITVIGGGNTAVEEALFLTNFAKKVILIHRRDTLRAEKILQERLFKNQKVEVIWNSQLKEIIGTDNPLSVAGIKIENLLDKKELDISCKGVFIAIGHAPSNELIMNQLETHNGGYVVTQPNSTETSIPGVFAAGDITDFKYRQAVTAAGMGCMAALEAEKFLAEKIN

SEQ ID NO: 102516 - protein, 240 aa, Unknown
  Bacterial polypetide isolated from the Sargasso Sea
NAVGTEMIEDHISSVNFKTKPFEAVGDNGQKYTADSIIISTGAQARWLNIKSEQEFRGFGVSACATCDGFFFKDKEVAVVGGGNAAVEEAMFLTKFASKVKLIHRRDKLRAEKLLQTKLMENKKIEIIWDSVVEEVIGDDNPKNVKGIKIKNVKTNEVIEMNLDGVFIAIGHDPATQLFKDQLEMDNEGYLVTKSDSTETNVPGVFAAGDVKDKVFRQAVTAAGMGCMAALEAEKHLSHT

SEQ ID NO: 102517 - protein, 133 aa, Unknown
  Bacterial polypetide isolated from the Sargasso Sea
MSQNPTKHTKVLIIGSGPAGYTAAVYAARAMLNPILVYGSEPGGQLSTTTDVENFPGFAEVIQGPWLMDQMKEQAKAVGTELIEDHISSVNLKSSPFEAIGDSGQKYTADSIIISTGAQARWLNIKSEQEYRG

SEQ ID NO: 102518 - protein, 242 aa, Unknown
  Bacterial polypetide isolated from the Sargasso Sea
EDPIQGPWLMEQMKKQAAHVGTEIINSQVTEVFLNEDIKKLNLDNGITLNAKTVIISTGAQARWLGLENESKFQGHGLSACATCDGFFFKNKEVAVIGGGNSAAEEALFLTKFATKVYLIHRRDKLRAEKILQDRLNENSKIEFIWNSEVTKFNGNDDLESIDLLNKKDNKTSNLKIDGVFIAIGHDPATQLFKGQLNMDDGGYIITDPDSTKTSIEGVFAAGDVKDKIYRQAVTAAGMGCM

SEQ ID NO: 102519 - protein, 141 aa, Unknown
  Bacterial polypetide isolated from the Sargasso Sea
MENNHKKLIILGSGPAGYAASIYAARAGLNPIIIAGMQEGGQLTTTTDVENWPGDSDGLQGPELMQRMKKHAEQFDVQIINDHINEVILSNEPFKLMGSSEYSCDSLIIATGASAMYLGLPSEKKYLGKGVSACATCDGFF

SEQ ID NO: 102520 - protein, 213 aa, Unknown
  Bacterial polypetide isolated from the Sargasso Sea
MGVKNILADSIIISTGAQARWLNIESEQKFRGFGVSACATCDGFFFKDKTVAVVGGGNAAVEEAMFLTKFASKVQLIHRRDSLRAEKMLQSKLMANKKIEIIWDSVVEEVVGDNDPKNVKGLKIKNVKTNKIDELRIDGLFIAIGHDPATQLFKDQLDMDKEGYLTTKPDSTETNIPGVFAAGDVKDKIFRQAVTAAGMGCMAALEAEKFLSK

SEQ ID NO: 102521 - protein, 171 aa, Unknown
  Bacterial polypetide isolated from the Sargasso Sea
MSKKIIHHRLVILGSGPAGLTAAIYAARAILNPVVISGREAGGQLMITTDVENYPGFPEGIEGPKMMDLLKAQALRFGTKFVSGDVIDVDFRKRPFKLNLENKDTLMCDSLIISSGASARWLGLESEKEYSGKGVSACATCDGFFFRDHDVGVVGGGDTALEEALYLANMC

SEQ ID NO: 102522 - protein, 71 aa, Unknown
  Bacterial polypetide isolated from the Sargasso Sea
KPNTDIFRGSLDMDDTGYLNIKGGSSGNATQCSIEGVFAAGDVSDSIYRQAITSAGAGCMAALDAEKYLDK

SEQ ID NO: 102523 - protein, 82 aa, Unknown
  Bacterial polypetide isolated from the Sargasso Sea
MKEKINTEVLIIGSGPAGYTAAIYAARANLKPHLIAGLEPGGQLTITTDVENYPGYGDTIQGPWLMEHMKKQSLNVGTIIHN

SEQ ID NO: 102524 - protein, 139 aa, Unknown
  Bacterial polypetide isolated from the Sargasso Sea
MSQNPTKHTKVLIIGSGPAGYTAAVYAARAMLNPILVYGSEPGGQLTTTTDVENYPGFADVIQGPWLMDQMKEQAKAVGTEMIEDHIGSVNLKSTPFEAIGDSGQKFTADSIIISTGAQARWLNIKSEQEFRGFGVSAC

SEQ ID NO: 102525 - protein, 157 aa, Unknown
  Bacterial polypetide isolated from the Sargasso Sea
MENKEKSSNVENVVIIGSGPAGYTAAIYAARANLQPLLVTGFNSGGIPGGQLMTTTFVENYPGFPDGVLGPELMDLMKAQAERWGTNLYESDVVSINTDSHPFELKTLEGTIKSNSIIIATGASANRLGVINEDKFWSKGISACAICDGATPQFRDA

SEQ ID NO: 102526 - protein, 234 aa, Unknown
  Bacterial polypetide isolated from the Sargasso Sea
MKNQKEKVIIIGSGAAGLTAAIYAARANLNPLVIEGIQPGGQLTITTDVENYPGYADVVQGPWMMEQMRSQAVKVGARIINDIVVKIDFKKNEKMVVLDSNKSLTTDTIIVATGAQAKWLGLESENKYNGKGVSACATCDGFFYRNKEVAVVGGGNTAVEEALYLSNICSKVNLIHRRDELRSEKILQDRLFSKKNINIIWNNVVGEILGDENGVSSLKLTSTKQNKTEVIKVE

SEQ ID NO: 102527 - protein, 271 aa, Unknown
  Bacterial polypetide isolated from the Sargasso Sea
QLTTTTDVENFLGYSKVIQGPWLMDEMKGQAKAVGTEMIQDHIKKVDLSKKPFEAVGDSGQVYTADSFIISTGAQARWLNLKSEQEFRGFGVSACATCDGFFFKEKEVAVVGGGNAAVEEAMFLTKFASKVKLIHRRNELRAEKMLQAKLKANKKIEIIWDSVVEDVIGDTNPKSVKAIKIKNVKTNKNTELKVDGLFIAIGHDPATSLFKGQLNMDKEGYILTNPDSTITNVPGVFAAGDVKDKIFRQAVTAAGMGCMAALEAEKHLSSK

SEQ ID NO: 102528 - protein, 166 aa, Unknown
  Bacterial polypetide isolated from the Sargasso Sea
MSEYRERVLIIGSGAAGLTAAIYTARANIDPLLVKGLQPGGQMTITTDVENYPGFADVIQGPWLMEQMEAQARQVGTRMVEDIITSIDTSQRPFHLKGDTGDDYYADAVIVATGAQARWLGLESEARLNGKGVSACATCDGFFFRGQEVAVVGGGTQQLKKPYTYP

SEQ ID NO: 102529 - protein, 154 aa, Unknown
  Bacterial polypetide isolated from the Sargasso Sea
MAKHSKVLILGSGPAGYTAAIYAARAMLKPILVFGSEPGGQLTTTTDVENFPGYSKVIQGPWLMEEMKGQAEAVGTEMIQDHIKKVDLSKKPFEAIGDSGQVYTADSFIISTGAQARWLNLKSEQEFRGFGVSACATCDGFFFKKKKLLLLEVE

SEQ ID NO: 102530 - protein, 259 aa, Unknown
  Bacterial polypetide isolated from the Sargasso Sea
MKKHSKVLILGSGPAGYTAAIYAARAMLKPILVFGSEPGGQLTTTTDVENFPGYSKVIQGPWLMDEMKGQAKAVGTEMIQDHISKVDLSKKPFTATGDSGQTYTADSFIISTGAQARWLNLKSEQEFRGFGVSACATCDGFFFKEKEVAVVGGGNAAVEEAMFLTKFASKVTLIHRRNELRAEKMLQAKLKANKKIEIIWDSVVEDVIGEKNPKSVKGIKIKNVKTNKTTELKVDGLFIAIGHDPATSLFKGQLKMDKE

SEQ ID NO: 102531 - protein, 91 aa, Unknown
  Bacterial polypetide isolated from the Sargasso Sea
MNQNPTKHTKVLIIGSGPAGYTAAVYAARAMLKPIMVSGMEPGGQLTTTTDVENYPGFAEVIQGPWLMEQMRDQAKAVGTEMIEDHISSVN

SEQ ID NO: 102532 - protein, 71 aa, Unknown
  Bacterial polypetide isolated from the Sargasso Sea
MRKTIETDVLIIGSGPAGYTAAIYAARANLKPHLVSGLEPGGQLTITTDVENYPGFGEVIQGPWLMEQMKE

SEQ ID NO: 102533 - protein, 107 aa, Unknown
  Bacterial polypetide isolated from the Sargasso Sea
QWSEVLGDEKGVHSMKIVTNEEKKNLQLNGVFIAIGHHPNTEIFKGQLEMKNDYITIKSGTDGMATATSVPGVYAAGDVSDQIYRQAITSAGFGCMAALDAEKFLSE

SEQ ID NO: 102534 - protein, 152 aa, Unknown
  Bacterial polypetide isolated from the Sargasso Sea
MHGRGAVLTKFASKVYVIHRRDQFRASQIMQDRVLNHEQIEVVWNKTVEKINGDGSVSSIELKDVENETTSELELDGVFVAIGHDPNVKFLDELVELDEKGYIKTGFTTETSTSVPGVFAAGDVADSLYRQAITAAGTGCQAAMDVERWLDH

SEQ ID NO: 102535 - protein, 253 aa, Unknown
  Bacterial polypetide isolated from the Sargasso Sea
GPWLMDQMKEQSKAVGTDMIQDHINKVDLSKKPFKAIGDSGQEYTADSIIISTGAQARWLNLESEQKYRGFGVSGCATCDGFFFKDKEVAVIGGGNAAVEEAIFLTKFATKVKLIHRRNELRAEKMLQKKLKENKKIEIIWDTILEEVLGNEKPKGVTGIKIKNVKTNKTTQLNVHGLFIAIGHDPATSLFKGQLDMDKEGYLITKPDSTQTNKPGVFAAGDVKDKIFRQAVTAAGMGCMSALEAEKFLSSKN

SEQ ID NO: 102536 - protein, 72 aa, Unknown
  Bacterial polypetide isolated from the Sargasso Sea
MSQNKEHKSKVLIIGSGPAGYSAAVYTSRAMLNPIMVTGMEQGGQLTTTTDVENYPGFSKAVQGPWLMEEMK

SEQ ID NO: 102537 - protein, 218 aa, Unknown
  Bacterial polypetide isolated from the Sargasso Sea
LNPILVYGSEPGGQLTTTTDVENFPGFADVIQGPWLMDQMKEQAKTVGTEMIEDHISSVDLKKTPFEAVGDTGQKYTADSIIISTGAQARWLNLKSEQEFRGFGVSACATCDGFFFKDKEVAVVGGGNAAVEEALFLTKFASKVKLIHRRDNLRAEKMLQKKLMENKKIEIIWDSVVEDVIGDKDPKNVKGIKIKNVKTNKIEEIKLDGVFIAIGHDP

SEQ ID NO: 102538 - protein, 133 aa, Unknown
  Bacterial polypetide isolated from the Sargasso Sea
RRDQFRASQIMQDRVLNHEQIEVVWNKTVEKINGDGSVSSIELKDVESEETSELDLDGVFVAIGHDPNVKFLDELVELDEKGYIKTGFTTETSTSVPGVFAAGDVADSLYRQAITAAGTGCQAAMDVERWLDH

SEQ ID NO: 102539 - protein, 303 aa, Unknown
  Bacterial polypetide isolated from the Sargasso Sea
PAGLTAAIYSARAELNPLVIEGEPSSTGDQPGGQLMLTTEVENFPGFPDGILGPQLMADMKAQAERFGAKFSTRKVTKVDLTKNPFEIWIGDPNEDSPTHTAEALIISTGAQSVMLEVEGEKRLLGHGLSTCATCDGFFFKDKKIAVVGGGDSAIEEATFLTKFASEVTVIHRRDELRASKIMQKRAHENPKINFLWDSEVTEILGSSSVEAVKIRNTKTLEETQLDLEGIFIAIGHTPNTSLFIDKLSIDDLGYIETEPHSSKTNIDGVFACGDVQDHKYRQAVTAAGSGCMAAIDAEHWLE

SEQ ID NO: 102540 - protein, 123 aa, Unknown
  Bacterial polypetide isolated from the Sargasso Sea
MSQNPTKHTKVLIIGSGPAGYTAAVYAARAMLKPILVQGMEPGGQLTITTDVENYPGFAEVIQGPWLMEQMKEQAKAVGTEMIEDHIQSVNLKSKPFEVVGDGGQKYTADSVIISTGAQARWL

SEQ ID NO: 102541 - protein, 255 aa, Unknown
  Bacterial polypetide isolated from the Sargasso Sea
MGSGPAGYSAGIYAARAGLDPILITGLEIGGQLTTTTDVENWPGDHDDLQGPDLMERMKDHAEKFDVKIINDHIEQVNVKDKPIELKGNDTYLAESLIIATGASAQYLGIESEEKFLGRGVSACATCDGFFYKDKEVAVIGGGNTAAEEALYLSNICSKVHLIHRRDSLRAEKILQDRIFNKEKEKKIEIHWNSQLQEVVGDELVNKIILDSGKELNLEGVFIAIGHKPNTDMFIDQLDMKNGYISINSGLSGNV

SEQ ID NO: 102542 - protein, 138 aa, Unknown
  Bacterial polypetide isolated from the Sargasso Sea
MTEKIKNDVLIIGSGPAGYTAAIYAARANLKPHLVSGLEPGGQLTITTDVENYPGFENVIQGPWLMQQMKEQAVKVGTIFHNDIVTSVDFEKNPFTSITDSGKEFKSKSIIIATGAQARWLNLESEKKFKGFGISACA

SEQ ID NO: 102543 - protein, 221 aa, Unknown
  Bacterial polypetide isolated from the Sargasso Sea
MENKEKISNVENVVIIGSGPAGYTAAIYAARANLQPLLVTGFNSGGIPGGQLMTTTFVENYPGFPDGVLGPELMDLMKAQAERWGTNLYESDVVSINTDLHPFELKTLEGTIKTNSIIIATGASANRLGVINEDKFWSKGISACAICDGATPQFRDEELAVIGGGDSACEEAAYLTKYGSKVHLIVRSEKLRASAAMVDRVKANPKIEIHWNTKVEKANGS

SEQ ID NO: 102544 - protein, 127 aa, Unknown
  Bacterial polypetide isolated from the Sargasso Sea
MNNKSTKHTKVLILGSGPAGYTAAIYAARAMLKPILVHGSQPGGQLTTTTDVENYPGYSKVIQGPWLMDEMKGQAEAVGTEMIQDHISKVDLTKKPFTATGDSGQVYTADSFIISTRGTSKMVKFKI

SEQ ID NO: 102545 - protein, 143 aa, Unknown
  Bacterial polypetide isolated from the Sargasso Sea
MNQNPTKHTKVLIIGSGPAGYTAAVYAARAMLKPIMVSGMEPGGQLTTTTDVENYPGFAEVIQGPWLMEQMRDQAKAVGTEMIEDHISSVNLKSKPFEAIGDGGQKYTADSIIISTGAQARWLNIESEQKFRGFGVSACATCD

SEQ ID NO: 102546 - protein, 240 aa, Unknown
  Bacterial polypetide isolated from the Sargasso Sea
MAKHTKVLILGSGPAGYTAAIYAARAMLKPILVFGSEPGGQLTTTTDVENFPGYSKVIQGPWLMEEMKGQAKAVGTEMIQDHISKVDLSKKPFEAVGDSGQVYTADSVIISTGAQARWLNLKSEQEFRGFGVSACATCDGFFFKEKEVAVVGGGNAAVEEAMFLTKFASKVKLVHRRNELRAEKMLQAKLKANKKIEIIWDSVIEDVIGEKNPKSVKSIKIKNVKANKTSELKVDGLFVL

SEQ ID NO: 102547 - protein, 156 aa, Unknown
  Bacterial polypetide isolated from the Sargasso Sea
MAAGSASETVENLVIVGSGPAGYTAAIYAARANLQPLLITGFQRGGIPGGQLMTTTDVENFPGFPDGVLGPDLMDLMRAQAVRWGTHLLEADADEIDLSQRPFRIKADGRTLLTHALVIATGASANRLGLPSEERFWSSGISACAICDEATPQFRN

SEQ ID NO: 102548 - protein, 54 aa, Unknown
  Bacterial polypetide isolated from the Sargasso Sea
MSQNPTKHTKVLIIGSGPAGYTAAVYAARAMLNPILVYGAEPGGQLTTTTDVEK

SEQ ID NO: 102549 - protein, 148 aa, Unknown
  Bacterial polypetide isolated from the Sargasso Sea
MSDNHNKLIILGSGPAGYAASIYAARAGLDPIIIAGMQEGGQLTTTTDVENWPGDSDGLQGPELMERMKRHAQQFDVEVINDHINEVDLLNKPFTLKGTSEYSCDSLIISTGASAMYLGLPSEKEFLGKGVSACATCDGFFYRDQEVA

SEQ ID NO: 102550 - protein, 275 aa, Unknown
  Bacterial polypetide isolated from the Sargasso Sea
GQLTITTEVENWPGEKEILGPDLMKNMEDHARNLGCKIISEHVSKVNLTVRPFFVETDSGSQYLTESVILATGAQANWLGLYNEEKYKGFGVSACATCDGFFYRDKIVAVIGGGNMAVEEAIFLTKFASKVYLVHRRDELRAEKILQKRLFENEKIEIIWNKQVTDILGEDHPLGVTGIQIRDTLNKKLSEITCSGVFVAIGHSPASNLIKDQLKTFDSGYVSTVPGTTKTSIPGVFAAGDLVDNVYRQAVTSAAMGCMAALDAEKYLSEINNGN

SEQ ID NO: 102551 - protein, 144 aa, Unknown
  Bacterial polypetide isolated from the Sargasso Sea
MNQNPSKHTKVLIIGSGPAGYTAAVYAARAMLKPIMISGMEPGGQLTTTTDVENYPGFAKVIQGPWLMEEMRDQAKAVGTEIIEDHISSVNLKSKPFEAIAESGQKYTADSIIISTGAQARWLNIESEQKYRGFGVSACATCDG

SEQ ID NO: 102552 - protein, 352 aa, Unknown
  Bacterial polypetide isolated from the Sargasso Sea
MSEDSLENVVIIGSGPAGWCAATYAARAQLKPLVFEGAITEENRMAGTLPLGQLALTSEVENYAGFPAGDLATFLESALPEDRRMMMAPHAGEGVTGPELMELMRQQAVNFGTRVITDDIQKVDFSKRPFTLTRAGGGEIRARSVIVATGASANWLGLESEERFKNRGVSACAVCDGALPRFRDKELVVVGGGDSAVEEATYLTKFASRVHLIHRRDELRASKIMAKRAYDSEKIEIHYHSKLVEVLGDDTDGVTGVRLQSTTESGEETTVTAAGVFLAIGHTPNTAFLDGQLELNPKKYVVWQNHFRTSTNVEGVFAAGDVADDYYRQAISAAGTGCMAALDAERWLAENE

SEQ ID NO: 102553 - protein, 324 aa, Unknown
  Bacterial polypetide isolated from the Sargasso Sea
MTASTPESGVKGDHAYEYDVVVVGGGSGGLAAAKEAAKQGAKTACLDFVKPSPAGTTWGLGGTCVNVGCIPKKLMHQAGILGEQFSDAREYGWKLATEGHDWSKMVEAVQNHIGSLNFGYRTALRQKGVTYINAYGRFKDAHTIIATKKNGQEQEITADKIVVAVGGRPAYPDAPGAKECCISSDDIFSLSEAPGKTLCVGASYISLETAGFLTALGFETSVAIRSIPLRGFDQEIAEMIVKYMGEHGTRFLRDSQPTAFEKQEDGKIKVTFENTMFGNTFEETFDTVVCAVGRDAATEGLDLKAAGVEFNAKNGKIPCVDEQS

SEQ ID NO: 102554 - protein, 261 aa, Unknown
  Bacterial polypetide isolated from the Sargasso Sea
VYAARALLNPILVYGAEPGGQLTTTTDVENYPGFADVIQGPWLMDQMKDQAKAVGTEMIEDHIASVNLKSQPFEAIGDSGQKYSADSIIISTGAQARWLNIKSEQEFRGFGVSACATCDGFFFKDKEVAVVGGGNAAVEEAMFLTKFASKVKLIHRRDSLRAEKMLQKKLMENKKVEIIWDSVVEDVLGDKDPKNVKGIKIKNVKTNKAQELKLDGVFIAIGHDPATQLFKDQLEMDKEGYLITNPTRLKQMFLVFMLLEM

SEQ ID NO: 102555 - protein, 193 aa, Unknown
  Bacterial polypetide isolated from the Sargasso Sea
MNRKVIIIGSGPAGLTAALYTARANLKPLVFEGEQPGGQLTITTDVENYPGFPKGIMGPALMDDFREQAKRFGAECHFAHVTKVDFNSNPYRIWVEDKTYSSDSIIIATGASAKMLGLDSEKELMGYGVSACATCDGFFYKNKKVLVVGGGDSAMEEANYLTKFASEVVIIHRRDEFRASKIMIDRALNNSKI

SEQ ID NO: 102556 - protein, 314 aa, Unknown
  Bacterial polypetide isolated from the Sargasso Sea
MTELESPLNVLILGSGPAGLTAAIYAARANLNPVLVYGREKGGQLMITSDVENYPGFPKGIKGPEMMDLLTEQAARFETRFFQGDVVEADLSTRPFSLKLENGEALKTNSLIIATGASARWLGLDSEKKYNGRGVSACATCDGFFFRNQNVAVVGGGDTAMEEALYLANLCEKVTVIHRRDELRASKIMQDRALNHPKISFLWNSAVEEVLGDEQGMNGLSIKNLKNGELTKHPFDGMFVAIGHTPNTQLFEGQLEMDENGYLKVQSGSTYTSREGIFACGDVQDHIYRQAVTAAGTGCMAAIDAERWLAEQSI

SEQ ID NO: 102557 - protein, 254 aa, Unknown
  Bacterial polypetide isolated from the Sargasso Sea
MTTNSKKHSKVLIIGSGPAGYTAAIYTARAMLKPILVHGAEPGGQMTTTTDVQNYPGYSDVIQGPWLMDQMKEQAKAVGTDMIQDHINKVDLSKKPFKAIGDSGQEYTADSIIISTGAQARWLNLESEQKYRGFGVSGCATCDGFFFKDKEVAVIGGGNAAVEEAIFLTKFATNVKLIHRRNELRAEKMLQKKLKENKKIEIIWDSVLEEVLGNEDPKGVTGIKIKNIKTNKTTQLNVHGLFIAIGHDPATSLI

SEQ ID NO: 102558 - protein, 138 aa, Unknown
  Bacterial polypetide isolated from the Sargasso Sea
MKNVAIIGSGPAGYTAGIYAGRANLEPVLFEGLESGGQLMLTTDVENYPGFVDGIMGPELMQVFKGQAERFGTEIKTEIIDSIENIDGGFKLTSSKGEYEFKSVIIASGASARWLGVEGEKELQGYGVSACATCDGFF

SEQ ID NO: 102559 - protein, 288 aa, Unknown
  Bacterial polypetide isolated from the Sargasso Sea
YAARAMLNPILVYGAAPGGQLTTTTDVENFPGFADVIQGPWLMDQMKEQAKAVGTEMIEDHIASVNLKSQPFEAMGDSGQKYTADSIIISTGAQARWLNIKSEQEFRGFGVSACATCDGFFFKNKEVAVVGGGNAAVEEAMFLTKFASKVKLIHRRDSLRAEKMLQKKLMENKKIEIIWDSVVEDVIGDKEPKNVKGIKIKNVKTNNVEEIKLDGVFIAIGHDPATSLFKEQLDMDKEGYLVTKPDSTETNIPGVYAAGDVKDKTFRQAVTAAGMGCMAALEAEKHLS

SEQ ID NO: 102560 - protein, 202 aa, Unknown
  Bacterial polypetide isolated from the Sargasso Sea
MEDRGSNDEPKTPDFPKKVKTSYDVIIIGAGPAGYTAGIYCSRARHDTLIISGLLPGGQLMNTTDVENYPGFEEGVMGPDLMLTMRKQAERMNTTIIDDVVVNVDFRAKPFKVLTGSEEYDAKAVIVCTGATPRKIGIEGEQTFSGKGVSYCATCDGAFFRNQEIAVVGGGDTCMEEATFLTKFASKVHIIHRRDEFRASKI

SEQ ID NO: 102561 - protein, 250 aa, Unknown
  Bacterial polypetide isolated from the Sargasso Sea
WLMEQMKEQAVKVGTIFHNDIVTSVDFEKNPFTSKTESGKEFVSKSIIIATGAQARWLNLESEKKFKGFGISACATCDGFFFKDQQVAVIGGGNSAVEEAMFLTKFASKVLLIHRRDSLRAEKILQERLFNNKKIEVIWNSKVSEFVGEENPNTLKKIILENTLDSTKTTIDVNGAFIAIGHDPATSLFIDKLKMDEENYIITKPDSTETSIKGVFAAGDVKDKIYRQAVTAAGMGCMAALEAEKYIAEN

SEQ ID NO: 102562 - protein, 58 aa, Unknown
  Bacterial polypetide isolated from the Sargasso Sea
MTEKIENDVLIIGSGPAGYTAAIYAARANLKPHLVSGLEPGGQLTITTDVENYPGLKM

SEQ ID NO: 102563 - protein, 141 aa, Unknown
  Bacterial polypetide isolated from the Sargasso Sea
MENTEKLIILGSGPAGYSASIYAARAGLNPTLITGFEVGGQLTTTTDVENWPGDYEDLQGPDLMIRMQNHAKKYGVNIVNDQIEKVDLGGEIKTLEGMNKYTCKSLIITTGASAKYLGLSSEEKYLGKGVSACATCDGFFL

SEQ ID NO: 102564 - protein, 315 aa, Unknown
  Bacterial polypetide isolated from the Sargasso Sea
MSKKNMHHRLIILGSGPAGLTAAIYAARAILNPVVISGREAGGQLMITTDVENYPGFPEGIKGPKMMELLKAQALRFGTKFISGDVIEVDFRKRPFKLNLENKETLMCDSLIVSSGASARWLGLESEKKYSGKGVSACATCDGFFFRDQDVGVVGGGDTALEEALYLANMCNSVTLIHRRDELRGSKIMQKRAVDHEKISFFWDTVVEEVLGNPEGGMTSIKVRNVKTDQVSEHPFTGLFIAIGHTPNTSLFKDKLELDENGYIQVTPGTTYTSVEGVFASGDVQDHVYRQAVTAAGTGCMAAIDAERWLAEHFG

SEQ ID NO: 102565 - protein, 81 aa, Unknown
  Bacterial polypetide isolated from the Sargasso Sea
MNQNPTKHTKVLIIGSGPAGYTAAVYAARAMLKPIMVSGMEPGGQLTTTTDVENYPGFAKVIQGPWLMEQMKEQAEAVELR

SEQ ID NO: 102566 - protein, 325 aa, Unknown
  Bacterial polypetide isolated from the Sargasso Sea
MEDRGSNDEPKTPDFPKKTKTSYDVIIIGAGPAGYTAGIYCSRARHDTLIISGLLPGGQLMNTTDVENYPGFDEGIMGPDLMLTMRKQAERMNTTIIDDVVVNVDFRAKPFKVLTGSEEYEAKAVIVCTGATPRKIGIEGEQTFSGKGVSYCATCDGAFFRNQDIAVVGGGDTCMEEATFLTKFASKVHIIHRRDTFRASKIMQDRALNNENIEVHWNSVIEDIKGDQKVQQIILKDTKTGENKTLEMGGVFVAIGHEPNTELFKNQLEMDENGYIIQKQNTETSVKGVFTAGDVHDHRYRQAVTAAGFGCMSAIDVDKYLSEQK

SEQ ID NO: 102567 - protein, 204 aa, Unknown
  Bacterial polypetide isolated from the Sargasso Sea
MSDASGHVENLVIVGSGPAGYTAAIYAARANLQPLLITGFQRGGIPGGQLMTTTHVENFPGFPDGILGPDLMDLMKAQAVRWGTHLIEADADRIDLNQRPFRIEADGETIQAHAVVIATGASANRLGLPTEERYWSSGISACAICDGATPQFRNEELAVVGGGDSACEEAVYLTKYGSHVHLIVRSDQFRASAAMADRVMANPA

SEQ ID NO: 102568 - protein, 117 aa, Unknown
  Bacterial polypetide isolated from the Sargasso Sea
GKIEILWDTQLKEVIGDENGVTGIKLDNKGSEIIKEVMGVFIAIGHKPNTEMFSDQLEMDNGYIVIKSGLKGLVTSTSVEGVFAAGDVSDQIYRQAITSAGFGCMAALDAEKYLSEK

SEQ ID NO: 102569 - protein, 310 aa, Unknown
  Bacterial polypetide isolated from the Sargasso Sea
MNRKVIIIGSGPAGLTAATYAARANLEPLVFEGVQPGGQLTITTDVENYPGFPDGIMGPDLMDKFRDQAKRFGAECYFKHVTKVDLESNPFKVWVADETFTSDSIIIATGATAKLLGLESEKNLMGHGVSACATCDGFFFKDKKVFVIGGGDSAMEEASFLTKFASEVQIIHRRNELRASKIMQDRVLNNPKIHIQWNTTLEDIKGNVDDGVSAVILKDIISGDIRSEECDGVFLAIGHTPNTELFDNFLNLDEKKYICTDDNSTKTSVPGIFACGDVQDSIYRQAVTAAGSGCMAAIDAERYLESIESS

SEQ ID NO: 102570 - protein, 240 aa, Unknown
  Bacterial polypetide isolated from the Sargasso Sea
ARQVGTRMVEDIITSIDTSQRPFHLKGDTGDDYYADAVIVATGAQARWLGLESEARLNGKGVSACATCDGFFFRGQEVAVVGGGNTAVEEALYLSNIASKVTLIHRREQLRAEKILQDRLFRKENIDIIWNSEVTEICGDEAVKSVKLFNSQTNEVKELLAEGCFVAIGHDPATSVFRGQVEMDEDGYIIVERGTTRTDKPGLFAAGDCVDRVYRQAVTAAGLGCMSALEVEKYLADLEI

SEQ ID NO: 102571 - protein, 312 aa, Unknown
  Bacterial polypetide isolated from the Sargasso Sea
MTDKTIHKTIIIGSGPAGLTSAIYAGRANLKPIVFEGNQPGGQLTITTDVENYPGFPNGVMGPEMMDLFRDQAKKFGAECFFKHVTKVDFSSKPYKVFVGDDEFLSETIIISTGASARMLGLKEEDELMGYGISTCATCDGYFFKDKNIVVVGGGDSAMEEASFLTKFAKKVTIIHRREVFKASKIMLDRAKNNPLIDIIVNKSIESINGSQKDGVSSVILRDTITEQKSTFNCEGVFYGIGHNPNTELFKGIIDLNDNGYIITKPDSTLTNIPGVFACGDVQDDHYRQAITAAGSGCMSAIDAEKYLEDVE

SEQ ID NO: 102572 - protein, 298 aa, Unknown
  Bacterial polypetide isolated from the Sargasso Sea
PAGYTAAVYAARAMLKPMLVAGMQPGGQLTITTDVENYPGFADVIQGPWLMEQMREQAKAVGTDLVEDHIQSVNLKSKPFEAIGDGGQKYTADSIIISTGAQARWLNIESEQKFKGFGVSACATCDGFFFKDKTVAVVGGGNAAVEEAMFLTKFASKVQLIHRRDKLRAEKLLQKKLMENKKIEIIWDSVVEEVVGDDEPKNVKGLKIKNVKTNETSDLKIDGLFIAIGHDPATSLFKDQLEMDSTGYLITKSDSTETNIPGVYAAGDVKDKIYRQAVTAAGMGCMAALEAEKYLAAN

SEQ ID NO: 102573 - protein, 124 aa, Unknown
  Bacterial polypetide isolated from the Sargasso Sea
MSQNPTKHTKVLIIGSGPAGYTAAVYAARAMLNPILVYGSEPGGQLTTTTDVENYPGFSEVIQGPWLMDQMKEQAKAVGTEMIEDHIGSVNLKSSPFEAIGDSGQKYPADSIIISTGAPARWLN

SEQ ID NO: 102574 - protein, 316 aa, Unknown
  Bacterial polypetide isolated from the Sargasso Sea
MNKNHHKLIILGSGPAGCTAAIYAARAGLKPILIRGLEPGGQLTITTDVDNYPGYENTIQGPWLMDQMEKQALSVGTKLVNGTVIKCDLTTKPIKLELDNGESYFSDACIIATGASARWLNLPSEKKYRGFGVSACATCDGFFYKNKEVIVVGGGNTAVEEALFLTNFASKVTLVHRRSELRAEKILQERLFKNNKISIIWDHVLKEVKGSDSPLIVNQAVLESIKDNKLMKIDVSGIFIAIGHDPNTKLFINQLNMDDENYILTANDSTKTNIEGVYAAGDVQDKIYRQAVTAAGHGCMAALEAEKYLSIIEKSL

SEQ ID NO: 102575 - protein, 312 aa, Unknown
  Bacterial polypetide isolated from the Sargasso Sea
MTDKTIHNTIIIGSGPAGLTAAIYAGRANLKPIVFEGNQPGGQLTITTDVENFPGFPNGVMGPKMMDLFRDQAKRFGAECFFKHVTKVDFSSKPYKVYVGDEEFLSETVIISTGASARMLGLKEEEELMGYGISTCATCDGYFFKDKNIVVVGGGDSAMEEASFLTKFAKKVTIIHRREVFKASKIMLDRVKNNPLIDIMVNKSIDSIIGSQKEGVSSIVLNDTVSGEKTTFKCEGVFYGIGHNPNTDLFDGVIDLDDNGYIITKPDSSLTNIPGVFACGDVQDDHYRQAITAAGSGCMAAIDTEKYLEDIE

SEQ ID NO: 102576 - protein, 64 aa, Unknown
  Bacterial polypetide isolated from the Sargasso Sea
MENKENTSNIENVVIIGSGPAGYTAAIYAARANLQPLLVTGFDSGGIPGGQLMTTTFVKIIQVS

SEQ ID NO: 102577 - protein, 101 aa, Unknown
  Bacterial polypetide isolated from the Sargasso Sea
MTQNPTKHTKVLIIGSGPAGYTAAVYAARALLKPIMVTGMEPGGQLTTTTDVENYPGFAEVVQGPWLMEQMRDQAKAVGTEMIEDHISSVNLKSKPFEAIW

SEQ ID NO: 102578 - protein, 96 aa, Unknown
  Bacterial polypetide isolated from the Sargasso Sea
IEIKNKLSEEIASIELKGVFIAIGHEPNTKLFKGQLEMENGYIKTRSGLNGQVTSTNIPGVFAAGDVSDHIYRQAITSAGFGCMAALDAEAYLDEK

SEQ ID NO: 102579 - protein, 183 aa, Unknown
  Bacterial polypetide isolated from the Sargasso Sea
MDTLIIGSGPAGYTAAIYAARADLKPVIYTGLEPGGQLTTTTDVDNFPGYPKGIDGPKMMDELKEQAERFGTEVKIDFISKVEFSKNKGSLHKVFSQDGTEIEAKTIIICTGASAKYLGLPSEKKLIGGGVSACAVCDGFFYKNQEVAVVGGGDTAVEEATYLAKICSKVTMIVRKDHLRASK

SEQ ID NO: 102580 - protein, 231 aa, Unknown
  Bacterial polypetide isolated from the Sargasso Sea
HINKVDLSKKPFTATGDSGQVYTADSFIISTGAQARWLNLKSEQEFRGFGVSACATCDGFFFKEKEVAVVGGGNAAVEEAMFLTKFASKVYLIHRRNELRAEKMLQTKLKANKKIEIIWDSVVEDVLGTKEPKTVNALKIKNIKDNKVKDLKVDGLFIAIGHDPATSLFKDQLKMDKEGYLITKPDSTETNIPGVFAAGDVKDKIFRQAVTAAGMGCMSALEAEKYLAAKD

SEQ ID NO: 102581 - protein, 148 aa, Unknown
  Bacterial polypetide isolated from the Sargasso Sea
MGQSSHHKLIILGSGPAGYTAAVYAARANLEPVVITGLTQGGQLTTTTDVDNWPGDVEGLQGPDLMERMKKHAERFDSKVIFDHICKVNLQEKPFVLLGQDTSYTCDALIIATGASAQYLGLESETAFMGKGVSACATCDGFFYRNQA

SEQ ID NO: 102582 - protein, 292 aa, Unknown
  Bacterial polypetide isolated from the Sargasso Sea
MSDAVRNVIIIGSGPAGYTAGLYNARAMLDPLMFAGYMSGGQLMLTSDIENFPGYPEGIAGPEMMMQLREQAERFGLEVQDKNVERIDASTRPFKVWVEGEEFQSHTLIICTGAEAIWLGAEGEDEQKGRGISTCATCDGAFFRDQEIMVIGGGDSAMEEATFLTRFASKVTVVHRRDTFRASKVMYDRAAAHPKIEIKTFRQVTKWLSDESGLTGALLEDPRDGSTEELAVTGAFIAIGHKPITAFLENQIETDEEGYIVPKGFSMTSVPGIFAAGDVVDTRYRQAITAAG

SEQ ID NO: 102583 - protein, 107 aa, Unknown
  Bacterial polypetide isolated from the Sargasso Sea
MSIIENNVLIIGSGPAGYTAAIYAARANLEPHLISGLEPGGQLTITTDVENYPGFGDVIQGPWLMEEMKKQALNVGTKFHNDIVTSVNFENKPFRSKTESGKEFLSK

SEQ ID NO: 102584 - protein, 226 aa, Unknown
  Bacterial polypetide isolated from the Sargasso Sea
MAKTCDVAVLGGGAAGLSAALYSTRAMLKTVVLENLGVGGQLLITDEIENYPGFPEGETGQQLAINMQQQAERFGAEIDFSSIEGVSDLDKETKIIHTDDGDLHAKAVIIATGGSHKTLGIPGEDALSGKGVSYCAVCDGNFFKGQDVVVIGGGDAAMDESNYLTGIVNSVTIVHRRDELRATKILQERAFANPKYKWLWSHVVEEFVGDNLLTAARVKDLKTGEV

SEQ ID NO: 102585 - protein, 144 aa, Unknown
  Bacterial polypetide isolated from the Sargasso Sea
KVYLVHRRDELRAEKILQDRIFKEEKAGKIEILWDSQLKEVLGDDMGVNGMMIDTKGSEVKKDVMGIFIAIGHKPNTDIFNNQLDMENGYILIKSGLKGSITSTSVEGVFAAGDVSDQIYRQAVTSAGFGCMAALDAEKYLSEK

SEQ ID NO: 102586 - protein, 298 aa, Unknown
  Bacterial polypetide isolated from the Sargasso Sea
MKRKVIIIGSGPAGLTAAIYSARANLEPLVFEGAQPGGQLTITTDVENYPGFPDGIMGPEMMDEFRKQAQRFGAECMFKTVDKVDLSSRPFSVWANDEEYSAEAIIISTGATARLLGLDAETELMGHGVSACATCDGFFFKDKKVLVVGGGDSAMEEATFLTKFASEVVIIHRREEFRASKIMIERALSNSKISVEYNSTVEDIKGSKEEGVRSVVLKDTNTGELRDYPCDGIFMAIGHVPNTQLFQGNIDLDDSGYIITKSDSTYTNIDGVFACGDVQDHVYRQAVTAAGSGCMAAI

SEQ ID NO: 102587 - protein, 96 aa, Unknown
  Bacterial polypetide isolated from the Sargasso Sea
MNQKPTKHTKVLIIGSGPAGYTAAVYAARAMLKPVMVAGMEPGGQLTTTTDVENYPGFAEVIQGPWLMEHMKEQAEAVGTEMIQDHISSVNLKSKP

SEQ ID NO: 102588 - protein, 210 aa, Unknown
  Bacterial polypetide isolated from the Sargasso Sea
YTADSFIISTGAQARWLNLKSEQEFRGFGVSACATCDGFFFKEKEVAVVGGGNAAVEEAMFLTKFASKVYLIHRRNELRAEKMLQTKLKSNKKIEIIWDTVVEDVIGTKEPKTVNALKIKNVKDNKIKDLKVDGLFIAIGHDPATSLFKEQLKMDKEGYLITKPDSTETNIPGVFAAGDVKDKIFRQAVTAAGMGCMSALEAEKYLSESN

SEQ ID NO: 102589 - protein, 82 aa, Unknown
  Bacterial polypetide isolated from the Sargasso Sea
MSQNPTKHTKVLIIGSGPAGYTAAVYAARAMLKPIMVSGMEPGGQLTTTTDVENYPGFAEVIQGPWLMEQMRDQAKAVGTEM

SEQ ID NO: 102590 - protein, 111 aa, Unknown
  Bacterial polypetide isolated from the Sargasso Sea
MNNNSKKHSKVLIIGSGPAGYTAAVYAARAMLKPMLVHGMEPGGQLSTTTDVENYPGFSKVIQGPWLMDQMKDQAKAVGTEMIEDHIASVNLKSKPFEAVGDGGQKIYGRL

SEQ ID NO: 102591 - protein, 263 aa, Unknown
  Bacterial polypetide isolated from the Sargasso Sea
MNRKVIIIGSGPAGLTAALYTARANLNPLVFEGSQPGGQLTITTDVENFPGFPDGIMGPELMDLFRKQAERFGAECHFEHVTKVDFSKKPYNVWVGDKNYQAESIIIATGATAKMLGLDSEKELMGFGVSACATCDGFFFKDKKVLVVGGGDSAMEEATYLTKFASEVVIVHRREEFRASKIMIDRAMNNPKIRVLWNSTIDEIMGSQEKGVHAVKINKTDSGESFEEECDGVFMAIGHKPNTELFTDVLKTDQNGYLVTVNG

SEQ ID NO: 102592 - protein, 120 aa, Unknown
  Bacterial polypetide isolated from the Sargasso Sea
MSQNPTKHTKVLIIGSGPAGYTAAVYAARAMLNPILVYGSEPGGQLTTTTDVENYPGFSEVIQGPWLMDQMKEQAKAVGTEMIEDHIGSVNLKSSPFEAIGDSGQKYTADSIIISTGAQA

SEQ ID NO: 102593 - protein, 314 aa, Unknown
  Bacterial polypetide isolated from the Sargasso Sea
MTDKTIHKTIIIGSGPAGLTAAIYAGRANLKPIVFEGNQPGGQLTITTDVENFPGFPDGVMGPDMMDLFRDQAKKFGAECHFKHVTKVDFSSTPYKVFVGEEEFLSETVIISTGASARMLGLKEEEQLMGYGISTCATCDGYFFKEKNIVVVGGGDSAMEEASFLTKFAKKVTIIHRREVFKASKIMLDRVRNNPLIDIVVNKSIESIKGTQQDGISSIVLKDTVSGESSTFECEGVFYGIGHTPNTDLFKGMIDLNDNGYIITQSDSSLTNIPGVFACGDVQDDHYRQAITAAGSGCMAAIDAEKYLEENIIE

SEQ ID NO: 102594 - protein, 91 aa, Unknown
  Bacterial polypetide isolated from the Sargasso Sea
MNQNPTKHTKVLIIGSGPAGYTAAVYAARAMLKPIMVSGMEPGGQLTTTTDVENYPGFAEVIQGPWLMEQMRDQAKAVGTEMIEDHISSVI

SEQ ID NO: 102595 - protein, 168 aa, Unknown
  Bacterial polypetide isolated from the Sargasso Sea
MNRKVIIIGSGPAGLTAATYAARANLKPLVFEGSQPGGQLTITTDVENYPGFPDGIMGPDLMDKFREQAKRFGAECYFKHVTKVDIESHPFKIWVGDETFTTDSIIIATGATAKLLGLESEKELMGHGVSACATCDGFFFKDKKVFVVGGGDSAMEEANFLTKFANEV

SEQ ID NO: 102596 - protein, 243 aa, Unknown
  Bacterial polypetide isolated from the Sargasso Sea
GQAKAVGTEMIQDHISKVDLSKKPFEATGNSGQVYTADSFIISTGAQARWLNLKSEQEFRGFGVSACATCDGFFFKEKEVAVVGGGNAAVEEAMFLTKFASKVKLIHRRNELRAEKMLQAKLKANKKIEIIWDSVVEDVYGDKNPKSVKAIKIKNIKSNKTTELKVDGLFIAIGHDPATSLFKGQLNMDKEGYIVTNPDSTITNVPGVFAAGDVKDKIFRQAVTAAGMGCMAALEAEKHLSSK

SEQ ID NO: 102597 - protein, 257 aa, Unknown
  Bacterial polypetide isolated from the Sargasso Sea
LMEQMQKQAEHVGTRMIYDVITEVDFSSRPFRATGDSGDTYSGDTVIISTGAQARWLGLAAEEKFMGFGLSACATCDGFFFREKEVAVIGGGNTAVEEALYLTNHASKVTLIHRRDQLRSEKILQDRLFANPKIEILWDHVMEDIIGDENPASVTGAKLRNVKTDEVSELAVDGIFVAIGHDPATAIFKGHIELDDEGYVITKPDSTETAIPGVFAAGDVKDKVYRQAVTAAGMGCMAALEAEKFVAEHEVQSAAAE

SEQ ID NO: 102598 - protein, 188 aa, Unknown
  Bacterial polypetide isolated from the Sargasso Sea
MSVHKKLIILGSGPAGYAASIYAARAGLNPIIIAGSQEGGQLTTTTDVENWPGDSDGLQGPELMDRMKKHAQQFDVEVLNDHINSVDLKQKPFLLKGSNEYTCDALVISTGASAMYLGLDSEKKFLGKGVSACATCDGFFYRDQEVIVVGGGNTAVEEALYLSRICSKVTLIHRRDSLRAEKILQDRL

SEQ ID NO: 102599 - protein, 259 aa, Unknown
  Bacterial polypetide isolated from the Sargasso Sea
FRDGVWGPNLMDLLRLQAQKFGAKCIMKQVDKVDLSVRPFKIESDNQTTEADSIIISTGASAKLLGIKGEEKYVGRGLSTCATCDGFFYKDKSIHVIGGGDSAMEEAIFLTKFASKVTIIHRRDTLRASKIMAERAISNPKIDFIWNAEPIEFLGNDEKGIYGLAYKDNIANKEVKINTDGVFIAIGHNPNTALFEGMLDMDSNGYLVTDSKSSRTNVLGVFASGDVQDSVYRQAITAAGSGCMAAIDAERFLEEENEL

SEQ ID NO: 102600 - protein, 176 aa, Unknown
  Bacterial polypetide isolated from the Sargasso Sea
CATCDGFFFKEKEVAVVGGGNAAVEEAMFLTKFASKVKLIHRRDKLRAEKMLQKKLMENKKIEIIWDTVVEDVIGDSEPKNVKGIKIKNLKTNKIEEIKVDGLFIAIGHDPATSLFKEQLKMDKEGYLITKPDSTETNIPGVYAAGDVKDKTFRQAVTAAGMGCMAALEAEKFLSH

SEQ ID NO: 102601 - protein, 259 aa, Unknown
  Bacterial polypetide isolated from the Sargasso Sea
ENYPGFVDGIMGPDLMQVFKGQAERFGTQIKTETIDSIEKLDNGFKLTSSKGEYLFKSVIIASGASARWLGVEGEEELQGYGVSACATCDGFFFKEKTVAVVGGGDSAMEEALFLTKFASKVYVIHRRDQFRASQIMQDRVLNHEQIEVIWNKTVEKINGDGSVSSIELKDVKNESINELELDGVFVAIGHDPNVKFLDGLLELDEKGYIKTGFTTETSTSVPGIFAAGDVADSLYRQAITAAGTGCQAAMDVERWLDH

SEQ ID NO: 102602 - protein, 283 aa, Unknown
  Bacterial polypetide isolated from the Sargasso Sea
SPILVYGAEPGGQLTTTTDVENFPGFADVIQGPWLMDQMKEQAKAVGTEMIEDHIASVNLKSQPFEAVGDSGQKYTADSIIISTGAQARWLNIKSEQEFRGYGVSACATCDGFFFKDKEVAVVGGGNAAVEEAMFLTKFASKVKLIHRRDSLRAEKMLQKKLMENKKIEIIWDSVVEDVIGDNEPKNVKGIKIKNVKTNNVEEIKLDGVFIAIGHDPATSLFKKQLDMDNEGYLITKPDSTETNVPGVYAAGDVKDKTFRQAVTAAGMGCMAALEAEKHLSHN

SEQ ID NO: 102603 - protein, 219 aa, Unknown
  Bacterial polypetide isolated from the Sargasso Sea
METAQHCRLLILGSGPAGYTAAVYAARANLSPVLVTGIAQGGQLMTTTDVDNWPGDTHGLTGPDLMARMLAHSERFGTEIIFDHIHTAKLDKRPFTLEGDAGTYTCDALIIATGASAQYLGLESEEAYKGKGVSACATCDGFFYRDKPVAVIGGGNTAVEEALYLSDICSSVTLVHRRDSLRAEAILQDQLFSRSGQDGNVSLAWNHTLSEVLGDDHGV

SEQ ID NO: 102604 - protein, 190 aa, Unknown
  Bacterial polypetide isolated from the Sargasso Sea
GKGVSACATCDGFFYKDQDVIVVGGGNVAVEEAIYLSNIAKNVTLIHRRDELRAEKMLQEKLFEKTGENGNIKILWDHVLDEVLGDESGVNGIVCSNVNEPSDQTQLDVQGVFIAIGHDPNTSFFGDGLKLDDSNYIILDESNARFSTQTSIEGVFAAGDVADPVYRQAVTSAGSGCMAALDAEKFLEQS

SEQ ID NO: 102605 - protein, 301 aa, Unknown
  Bacterial polypetide isolated from the Sargasso Sea
KVLIIGSGPAGYTAAVYAARAMLNPILVYGSEPGGQLTTTTDVENFPGFADVIQGPWLMDQMKEQAKTVGTEMIEDHISSVNLKSQPFEAVGDSGQKYTADSIIISTGAQARWLNLKSEQEFRGFGVSACATCDGFFFKDKEVAVVGGGNAAVEEAMFLTKFASKVKLIHRRDSLRAEKLLQKKLMENKKIQIIWDSIVEDVIGDKEPKNVKGIKVKNVKTNKIDEIKLDGLFIAIGHDPATQLFKDQLNMDKEGYLITKPDSTETNIPGVYAAGDVKDKTFRQAVTAAGMGCMAALEAEK

SEQ ID NO: 102606 - protein, 215 aa, Unknown
  Bacterial polypetide isolated from the Sargasso Sea
MSEKPTKHTKVLIIGSGPAGYTAAVYAARAMLKPMLVAGMQPGGQLTITTDVENYPGFADVIQGPWLMEQMREQAKAVGTDLVEDHIQSVNLKSKPFEAIGDGGQKYTADSIIISTGAQARWLNIESEEKFKGFGVSACATCDGFFFKDKTVAVVGGGNAAVEEAMFLTKFASKVKLIHRRNELRAEKLLQKKLMENKKIEIIWDSVVEEITGDS

SEQ ID NO: 102607 - protein, 153 aa, Unknown
  Bacterial polypetide isolated from the Sargasso Sea
MSEKPTKHTKVLIIGSGPAGYTAAVYAARAMLKPMLVAGMQPGGQLTITTDVENYPGFADVIQGPWLMEQMREQAKAVGTDLVEDHIQSVNLKSKPFEAIGDGGQKYTADSIIISTGAQARWLNIDSEEKFKGFGVSACATCDGFFFKIKQLL

SEQ ID NO: 102608 - protein, 199 aa, Unknown
  Bacterial polypetide isolated from the Sargasso Sea
MSENPTKHTKVLIIGSGPAGYTAAIYAARAMLKPILVHGMEPGGQLTTTTDVENFPGFKDVIQGPWLMDQMKGQAEVVGTEMIQDHIASVDLKSKPFKAVGDSGQIYEADSIIISTGAQARWLNIESEQNFRGFGVSACATCDGFFFKDKTVAVVGGGNAAVEEAMFLTKFASKVQLIHRRDSLRAEKLLQKKLMKIKK

SEQ ID NO: 102609 - protein, 194 aa, Unknown
  Bacterial polypetide isolated from the Sargasso Sea
MSENHNKLIILGSGPAGYAAAIYAARAGLNPLMITGVQEGGQLTTTTDVENWPGDSEGLQGPELMERMKKHALQFDVEIINDHINSVELSKKPFKLFGNSEYKCDSLIISTGASAMYLGLPSEKEYLGKGVSACATCDGFFYRDQEVSVIGGGNTAAEEALYLANICSKVYLVHRRDELRAEKILQDRIFKQEQ

SEQ ID NO: 102610 - protein, 179 aa, Unknown
  Bacterial polypetide isolated from the Sargasso Sea
LCTCDGFFYKGQEVAVIGGGNTAAEEALYLANICSKVHLVHRRDELRAEKILQDRIFKKADEGVIEIHWDSELEEVLGDASGVTGIKLKNKDSSMSSINLHGVFIAIGHNPNTEIFDGQLDMKDGYIVIKSGLDGSVTQTSVPGVFAAGDVADKVYRQAITSAGFGCMAALDAEKFLSD

SEQ ID NO: 102611 - protein, 323 aa, Unknown
  Bacterial polypetide isolated from the Sargasso Sea
SKHSKVLILGSGPAGYTAAIYAARAMLKPILVFGAEPGGQLTTTTDVENFPGYSKVIQGPWLMEEMKGQAKAVGTEMIQDHIKKVDLSKKPFEAIGDSGQVYTADSFIISTGAQARWLNLKSEQEFRGFGVSACATCDGFFFKEKEVAVVGGGNAAVEEAMFLTKFASKVKLIHRRNELRAEKMLQAKLKANKKIEIIWDSVVEDVVGEKDPKSVKAIKIKNVKTNKVTELKLDGLFIAIGHDPATSLFKGQLSMDKQGYIVTKPDSTITNVPGVFAAGDVKDKIFRQAVTAAGMGCMAALEAENIYHQNEQQSIINRNKCLD

SEQ ID NO: 102612 - protein, 179 aa, Unknown
  Bacterial polypetide isolated from the Sargasso Sea
MCTCDGFFYKGQEVAVIGGGNTAAEEALYLANICSKVHLVHRRDELRAEKILQERIFKKADEGIIKIHWNSELEEVLGDASGVTGIKIKNKDTSMSSIDLHGVFIAIGHNPNTEIFDGQLDMKDGYILIKSGLDGSVTQTSMPGVFAAGDVADKVYRQAITSAGFGCMAALDAEKFLSD

SEQ ID NO: 102613 - protein, 213 aa, Unknown
  Bacterial polypetide isolated from the Sargasso Sea
DSYQADTLIIATGASAKYLGLPSEQEFLGRGVSACATCDGFFYKGQEVAVIGGGNTAAEEALYLANICSKVHLVHRRDELRAEKILQDRIFKKADEGVIKIHWNSELEEVLGDASGVTGIKLKNKDSSMSSINLHGVFIAIGHNPNTEIFDGQLSMKDGYIVIKSGLDGSVTQTSVPGVFAAGDVADKVYRQAITSAGFGCMAALDAEKFLSD

SEQ ID NO: 102614 - protein, 139 aa, Unknown
  Bacterial polypetide isolated from the Sargasso Sea
HRRDELRAEKILQDRIFKKADEGVIEIHWDSELEEVLGDASGVTGIKLKNKDNSMSSIDLHGVFIAIGHNPNTEIFDGQLDMKDGYIVIKSGLDGSVTQTSVPGVFAAGDVADKVYRQAITSAGFGCMAALDAEKFLSD

SEQ ID NO: 102615 - protein, 175 aa, Unknown
  Bacterial polypetide isolated from the Sargasso Sea
MNQNPTKHTKVLIIGSGPAGYTAAVYAARAMLKPILVYGIEPGGQLSTTTDVENYPGFADVIQGPWLMEQMKDQAKMVGTELIEDHIASVNLKSSPFEAIGDSGQKYTADSIIISTGAQARWLNIESEQKFRGFGVSACATCDGFFFKDKTVAVVGGGNAAVEEAMFLTKFASKV

SEQ ID NO: 102616 - protein, 250 aa, Unknown
  Bacterial polypetide isolated from the Sargasso Sea
MNKKIETDVLIIGSGPAGYTAAIYAARANLKPHLVSGIQPGGQLTITTDVENYPGYGDVIQGPWLMEQMRIQAEKVGTLIHNDIISAVNFETKPFIANADSGSEFIAKTIIISTGAQARWLNINGEEKFKGYGISACATCDGFFFKDKEVAVIGGGNTAAEEALFLTNFANKVNIIHRRDSLRSEKILQERLFNNSKINILWNKKVIEFIGKNDPIELNKLLLEDTKNNQKTELSVAGAFVAIGHNPSTD

SEQ ID NO: 102617 - protein, 217 aa, Unknown
  Bacterial polypetide isolated from the Sargasso Sea
MEQQLIILGSGPAGYTAAVYAARANLKPLLITGLEVGGQLTTTTEVENWPGDFEDLQGPDLMVRMQKHAEKYDVDIRTDYVKSVDLSNQPLILQGEKDTYKTKSLIIATGASAKYLGLESEKAFLGKGVSACATCDGFFYKDQEVAVIGGGNTALEEALYLSNICSKVHLIHRRDEFRGEKILQDRVFKKVKEGKISLILDSTLKEVIGDDAVSGIV

SEQ ID NO: 102618 - protein, 202 aa, Unknown
  Bacterial polypetide isolated from the Sargasso Sea
MSEVKHSRLIILGSGPAGYTAAVYAARANLKPLMITGIQPGGQLTTTTEVDNWPGDVEGLTGPDLMVRMQKHAERFDTEIVFDHIHTAELQQRPFTLRGDSGVYTCDALIIATGASAQYLGLPSEEAFAGRGVSACATCDGFFYRNQVVAVIGGGNTAVEEALYLSNIAKEVHLIHRRDKLRSEKILQDKIMDKAANGNIRL

SEQ ID NO: 102619 - protein, 170 aa, Unknown
  Bacterial polypetide isolated from the Sargasso Sea
MNNKSTKHTKVLILGSGPAGYTAAIYAARAMLKPILVHGSQPGGQLTTTTDVENYPGYSKVIQGPWLMDEMKGQAEAVGTEMIQDHISKVDLTKKPFTATGDSGQIYTADSFIISTGAQARWLNLKSEQEFRGFGVSACATCDGFFFKEKEVAVVGGGNAAVEEAMFLTK

SEQ ID NO: 102620 - protein, 304 aa, Unknown
  Bacterial polypetide isolated from the Sargasso Sea
MSQNPTKHTKVLIIGSGPAGYTAAVYAARAMLNPILVYGSEPGGQLTTTTDVENYPGFADVIQGPWLMDQMKDQAKAVGTEMIEDHIRSVNLKLTPFEAIGDSGQKYTADSIIISTGAQARWLNIKSEQEFRGFGVSACATCDGFFFKEKEVAVVGGGNAAVEEAMFLTKFASKVKLIHRRDSLRAEKMLQKKLMDNKKIEIIWDTVVEDVIGEKEPKNVKGIKVKNVKTNKTEEIKVDGLFVAIGHDPATQLFKDQLKMDQEGYLITKPDSTETNVPGVYAAGDVKDKTFRQAVTAAGMGCMA

SEQ ID NO: 102621 - protein, 163 aa, Unknown
  Bacterial polypetide isolated from the Sargasso Sea
MSQNPTKHTKVLIIGSGPAGYTAAVYAARAMLNPILVYGSAPGGQLTTTTDVENYPGFADVIQGPWLMDQMKDQAKAVGTEMIEDHIASVNLKSKPFEATGDSGQKYTADSIIISTGAQARWLNLKSEQEFRGFGVSACATCDGFFFKNKEVAVVGGGNAAVE

SEQ ID NO: 102622 - protein, 270 aa, Unknown
  Bacterial polypetide isolated from the Sargasso Sea
MSQNPTKHTKVLIIGSGPAGYTAAVYAARAMLNPILVYGSEPGGQLTTTTDVENFPGFADVIQGPWLMDQMKEQAKAVGTEMIEDHISSVDLKKTPFEAIGDTGQKYTADSIIISTGAQARWLNLKSEQEFRGFGVSACATCDGFFFKDKEVAVVGGGNAAVEEAMFLTKFASKVKLIHRRDNLRAEKMLQKKLMENKKIEIIWDSVVEDVIGDKDPKNVKGIKIKNVKTNKIDEIKLDGVFIAIGHDPATQLFKNQLSMDKEGVFNNKT

SEQ ID NO: 102623 - protein, 174 aa, Unknown
  Bacterial polypetide isolated from the Sargasso Sea
MSQNPTKHTKVLIIGSGPAGYTAAVYAARAMLNPILVYGSEPGGQLTTTTDVENFPGFADVIQGPWLMDQMKEQAKAVGTEMIEDHISSVNLKITPFEAVGDTGQKYTADSIIISTGAQARWLNIKSEQEFRGFGVSACATCDGFFFKDKEVAVVGGGNAAVKRQCFSQNLRQK

SEQ ID NO: 102624 - protein, 157 aa, Unknown
  Bacterial polypetide isolated from the Sargasso Sea
AAEEALYLANICSKVHLVHRRDELRAEKILQDRIFKKADEGVIEIHWDSELEEVLGDASGVTGIKLKNKDNSMSSINLHGVFIAIGHNPNTEIFDGQLDMKDGYIVIKSGLDGSVTQTSVPGVFAAGDVADKVYRQAITSAGFGCMAALDAEKFLSD

SEQ ID NO: 102625 - protein, 291 aa, Unknown
  Bacterial polypetide isolated from the Sargasso Sea
YAARAMLKPILVYGSQPGGQLTTTTDVENYPGYSKVIQGPWLMEEMKGQAEAVGTEMIQDHINKVDLSKQPFEAVGDSGQVYTADSFIISTGAQARWLNLKSEQEFRGFGVSACATCDGFFFKDKEVAVVGGGNAAVEEAIFLTKFASKVKLIHRRNELRAEKMLQEKLKANKKIEIIWDSVVDEVLGDNEPKGVTAIKIKNVKDNKITELKVHGLFIAIGHDPATSLFKDQLKMDKEGYLITKPDSTETNVPGVFAAGDVKDKIFRQAVTAAGMGCMSALEAEKYLAAKA

SEQ ID NO: 102626 - protein, 185 aa, Unknown
  Bacterial polypetide isolated from the Sargasso Sea
MTNNKLIILGSGPAGYAASIYAARAGLNPIIIAGAEPGGQLTTTTEVENWPGDSDDLQGPDLMERMKKHAEKFGVEIINDHISKVNLDQSPFLLKGTDSYQADTLIIATGASAKYLGLPSEQEFLGRGVSACATCDGFFYKGQEVAVIGGGNTAAEEALYLANICSKVHLVHRRDELRAEKILQD

SEQ ID NO: 102627 - protein, 168 aa, Unknown
  Bacterial polypetide isolated from the Sargasso Sea
MNQNPTKHTKVLIIGSGPAGYTAAVYSARAMLKPILVHGMQPGGQLTITTDVENYPGFAEVIQGPWLMDQMKDQAKAVGTEMIEDHIASVNLKSKPFEAIGESGQKYTADSIIISTGAQARWLNIKSEQEYKGFGVSACATCDGFFFKDKTVAVVGGGNAAVEEAMFL

SEQ ID NO: 102628 - protein, 144 aa, Unknown
  Bacterial polypetide isolated from the Sargasso Sea
MSEIIKTDVLIIGSGPAGYTAAIYAARANLKPHIISGIEQGGQLTITTDVENYPGFADTIQGPWLMDQMLVQAEKVGSVIHNDIVSEVNFEKKPFISITDSKKKFESKTIIICTGAQARWLDLESENKFKGFGISACATCDGFF

SEQ ID NO: 102629 - protein, 175 aa, Unknown
  Bacterial polypetide isolated from the Sargasso Sea
MSQNPTKHTKVLIIGSGPAGYTAAVYAARAMLNPILVYGSAPGGQLTTTTDVENYPGFADVIQGPWLMDQMRDQAKAVGTEMIEDHISSVNLKSKPFEAMGDSGQKYTADSIIISTGAQARWLNLKSEQEFRGFGVSACATCDGFFFKNKEVAVVGGGNAAVEEAMFLTKFASKV

SEQ ID NO: 102630 - protein, 245 aa, Unknown
  Bacterial polypetide isolated from the Sargasso Sea
MTQNPTKHTKLLIIGSGPAGYTAAVYAARALLKPIMVTGMEPGGQLTTTTDVENYPGFAEVIQGPWLMEQMRDQAKAVGTEMVEDHISSVNLKSRPFEAIGDDGQKYTADSIIISTGAQARWLNLDSEQKFRGFGVSACATCDGFFFKDKTVAVVGGGNAAVEEAMFLTKFASKVKLIHRRNELRAEKMLQKKLMENKKIEIIWDSVVEEVIGDDDPKNVKGLKIKNVKTNKVDDLKLDGLFVAI

SEQ ID NO: 102631 - protein, 287 aa, Unknown
  Bacterial polypetide isolated from the Sargasso Sea
RAVLDPIIIAGMQEGGQLTTTTDVENWPGDSDGLQGPELMERMKKHAQEFDVEIINDHINEVSLTQKPFTLKGVNEYSCDSLIIATGASAMYLGLPSEKRYLGKGVSACATCDGFFYKDQDVAVIGGGNTAAEEALYLANICSKVYLVHRRDELRAEKILQDRIFKQEEAGKIEILWDTQLKEVCGDDMGVTSIKLDNKGSEISKEVMGVFIAIGHKPNTEIFDGQLDMDNGYIIIKSGLNGSVTSSSVEGVFAAGDVSDQIYRQAVTSAGFGCMAALDAEKYLSES

SEQ ID NO: 102632 - protein, 147 aa, Unknown
  Bacterial polypetide isolated from the Sargasso Sea
MTQNPTKHTKVLIIGSGPAGYTAAVYAARAMLKPILVHGMEPGGQLTTTTDVENYPGFAEVIQGPWLMEQMKEQAEAVGTEMIEDHIASVNLKSKPFEAVGDGGQKYTADSIIISTGAQARWLNIDSEQKFRGFGVSACATCDGFFF

SEQ ID NO: 102633 - protein, 175 aa, Unknown
  Bacterial polypetide isolated from the Sargasso Sea
YRNKPVVVVGGGNTAVEEALYLSNLCSHVTLIHRRDALRAEKMLSDKIIEKSKTGNVTILWNHTLDEVLGDDSGVTGVRVAHTSNESKQELEVDGVFIAIGHDPNTNIFKNDLNMDESGYLIVNSGSAGNSTQTSIPGVFAAGDVSDPIYRQAITSAGSGCMAALDAEKFLDDAH

SEQ ID NO: 102634 - protein, 211 aa, Unknown
  Bacterial polypetide isolated from the Sargasso Sea
MKQNPTKHTKVLIIGSGPAGYTAAVYAARAMLNPILVYGSAPGGQLTTTTDVENYPGFADVIQGPWLMDQMKDQAKAVGTEMIEDHIASVNLKSKPFEAIGDSGQKYTADSIIISTGAQARWLNLNSEQEFRGFGVSACATCDGFFFKNKEVAVVGGGNAAVEEAMFLTKFASKVKLIHRRDSLRAEKMLQKKLMENKKIEIIWDSVVEDV

SEQ ID NO: 102635 - protein, 179 aa, Unknown
  Bacterial polypetide isolated from the Sargasso Sea
MTQNPTKHTKVLIIGSGPAGYTAAIYAARAMLNPILVHGIEPGGQLTTTTDVENYPGYSEVIQGPWLMDQMKGQAEAVGTSMIQDHIKSVDLKKTPFKAVGDSGQVYTAESIIISTGAQARWLKLDSEQNFRGFGVSACATCDGFFFKDKTVAVVGGGNAAVEEAMFLTKFASKVQLIH

SEQ ID NO: 102636 - protein, 197 aa, Unknown
  Bacterial polypetide isolated from the Sargasso Sea
MSNVTHEKVVIIGAGAAGLTAAIYTARANLSPVIIAGLQPGGQMTITTDVENYPGFAEVIQGPWLMTEMQSQAENVGARVIYDIVTGLDVSSRPFRMTLDAGDEMTADVVIVATGASAKWLGLESEQTFNGRGVSACATCDGFFYRDRDVAVIGGGNTAVEEALYLANICKSVTLVHRRDTLRAEQIMQDRLLRQDK

SEQ ID NO: 102637 - protein, 220 aa, Unknown
  Bacterial polypetide isolated from the Sargasso Sea
MTQNPTKHTKVLIIGSGPAGYTAAVYAARAMLKPIMVSGMEPGGQLTTTTDVENYPGFAEVIQGPWLMEQMRDQAKAVGTEMIEDHISSVNLKSKPFEAIGDGGQKYTADSIIISTGAQARWLNIESEQKFRGFGVSACATCDGFFFKDKTVAVVGGGNAAVEEAMFLTKFASKVQLIHRRDSLRAEKMLQSKLMANKKIEIIWDSIVEEVIGDNDPKNV

SEQ ID NO: 102638 - protein, 173 aa, Unknown
  Bacterial polypetide isolated from the Sargasso Sea
MSQNPTKHTKVLIIGSGPAGYTAAVYAARAMLNPILVYGAEPGGQLTTTTDVENYPGFADVIQGPWLMDQMKDQAKAVGTEMIEDHIASVNLKSQPFEAIGDSGQKYSADSIIISTGAQARWLNIKSEQEFRGFGVSACATCDGFFFKNKEVAVVGGGNAAVEEAMFLTKFAS

SEQ ID NO: 102639 - protein, 176 aa, Unknown
  Bacterial polypetide isolated from the Sargasso Sea
MNNKSAKHTKVLILGSGPAGYTAAIYAARALLKPILVFGSEPGGQLTTTTDVENFPGFAKVIQGPWLMEEMKGQAKAVGTEMIQDHISKVDLSNKPFTAHGDSGQIYTADSIIISTGAQARWLNLESEQKFRGFGVSACATCDGFFFKDKEVAVVGGGNAAVEEAMFLTKLHQKLN

SEQ ID NO: 102640 - protein, 231 aa, Unknown
  Bacterial polypetide isolated from the Sargasso Sea
METIKRKLVILGSGPAGYTAAVYAARAGLEPCLVTGMEQGGQLTTTTDVENWPGDSDGLQGPELMDRMLKHVESLDVEVIFDHIESANLSGPFVLVGNVNNYDAESLIIATGASAQYLGLESEQNYMGKGVSACATCDGFFYKDKDVAVVGGGNTAVEEALYLSNLCSSVTLIHRRDSLRAEKILQERLFKKEKEGNVKIIWNHELIEVLGDDSVVNGIKIKSTKDEKETK

SEQ ID NO: 102641 - protein, 147 aa, Unknown
  Bacterial polypetide isolated from the Sargasso Sea
MNNKPTKHTKVLILGSGPAGYTAAIYAARAMLKPILVHGSQPGGQLTTTTDVENYPGYSKVIQGPWLMDEMKGQAEAVGTEMIQDHISKVDLTKKPFTATGDSGQIYTADSFIISTGAQARWLNLKSEQEFRGFGVSACATCDGFFL

SEQ ID NO: 102642 - protein, 287 aa, Unknown
  Bacterial polypetide isolated from the Sargasso Sea
MSDNHNKLIILGSGPAGYAASIYAARAGLNPIIIAGMQEGGQLTTTTDVENWPGDSDGLQGPELMERMKKHAQDFDVEIINDHINEVSLTQKPFILKGVNEYSCDSLIIATGASAMYLGLPSEKKYLGKGVSACATCDGFFYKDQDVAVIGGGNTAAEEALYLANICSKVYLIHRRDELRAEKILQDRIFKQEEAGKIEILWDTQLKEICGDDMGVTSIKLDNKGSEISRKVMGVFIAIGHKPNTEIFNGQLDMDNGYIIIKSGLNGSVTSSSVEGVFAAGDVSEQI

SEQ ID NO: 102643 - protein, 220 aa, Unknown
  Bacterial polypetide isolated from the Sargasso Sea
MNQNPTKHTKVLIIGSGPAGYTAAVYAARAMLKPIMVSGMEPGGQLTTTTDVENYPGFAEVIQGPWLMEQMRDQAKAVGTEMIEDHIASVNLQSKPFEAIGDGGQKYTADSIIISTGAQARWLNIESEQKYRGFGVSACATCDGFFFKDKTVAVVGGGNAAVEEAMFLTKFASKVQLIHRRDSLRAEKMLQSKLMANKKIEIIWDSVVQEVIGDNDPKNV

SEQ ID NO: 102644 - protein, 285 aa, Unknown
  Bacterial polypetide isolated from the Sargasso Sea
YAARAGLAPLMISGLEQGGQLMITTDVENYPGFEKPVQGPWLMEQMKNQAESFGTRILLDFVKDVDLETLPFKLKTEKQVIKSNSIVIATGAKANWLNIKGEQEFMGFGVSACATCDGFFFKGKNVAVVGGGNTAVEEALFLSNLCKKVFVIHRRETLRAEKILQERLFQKKNVDFIWNSNVTEINGNLEKKELQSITIKNKKNEINKLSIDGFFVAIGHSPATTLFKNKLQMDSDGYIFTEPNSTKTDIEGVFAAGDVTDRLYRQASNCRRNGVYERNRSRKFP

SEQ ID NO: 102645 - protein, 174 aa, Unknown
  Bacterial polypetide isolated from the Sargasso Sea
MNNKSTKHTKVLILGSGPAGYTAAIYAARAMLKPILVHGSQPGGQLTTTTDVENYPGYSKVIQGPWLMEEMKGQAQAVGTEMIQDHISKVDLTKKPFTATGDSGQVYTADSFIISTGAQARWLNLKSEQEFRGFGVSACATCDGFFFKEKEVAVVGGGNAAVEEAMFLTKFASK

SEQ ID NO: 102646 - protein, 308 aa, Unknown
  Bacterial polypetide isolated from the Sargasso Sea
MSQNPTKHTKVLIIGSGPAGYTAAVYAARAMLNPILVYGSEPGGQLTTTTDVENFPGFADVIQGPWLMDQMRDQAKAVGTEMIEDHIGSVNLKSTPFEAVGDSGQKYTADSIIISTGAQARWLNIKSEQEFRGFGVSACATCDGFFFKDKEVAVVGGGNAAVEEAMFLTKFASKVKLIHRRDSLRAEKMLQKKLMENKKIEIVWDSVVEDVLGDSEPKNVKGIKIKNLKTEKTEEIKLDGLFIAIGHDPATQLFKDQLEMDKEGYLITKPDSTETNIPGVYAAGDVKDKTFRQAVTAAGMGCMAALEA

SEQ ID NO: 102647 - protein, 284 aa, Unknown
  Bacterial polypetide isolated from the Sargasso Sea
KPPSCFCPEPGGQLTITTDVENYPGFGDVIQGPWLMEQMKEQALKVGTEFHNDIISNVSFEKKPFSAQTESGLEFKSKSVIIATGAQARWLNIESENKFKGFGISACATCDGFFFKDQKIIVVGGGNSAVEEALYLTNFASKVILVHRRDKLRAEKILQERLFKNPKIEVIWNHIVHEFIGSDEPLSLKKILLKNVNNKNEKIIEATGAFIAIGHDPSTALFKNKIDMDNENYIITKSDSTETNIKGIFAAGDVKDKIYRQAVTAAGMGCMAALEAEKFIAESY

SEQ ID NO: 102648 - protein, 209 aa, Unknown
  Bacterial polypetide isolated from the Sargasso Sea
MNNKSTKHTKVLILGSGPAGYTAAIYAARAMLKPILVHGSQPGGQLTTTTDVENYPGYAKVIQGPWLMDEMKGQAEAVGTEMIQDHISKVDLTKKPFTATGDSGQIYTADSFIISTGAQARWLNLKSEQEFRGFGVSACATCDGFFFKEKEVAVVGGGNAAVEEAMFLTKFASKVYLIHRRNELRAEKMLQAKLKANKKIEIIWDSVVE

SEQ ID NO: 102649 - protein, 281 aa, Unknown
  Bacterial polypetide isolated from the Sargasso Sea
LGSGPAGYTAAIYAARALLKPILVFGSEPGGQLTTTTDVENFPGFAKVIQGPWLMEEMKGQAQSVGTEMIQDHIKKVDLSKKPFSAHGDSGQVYTADSIIISTGAQARWLNLESEQKFRGFGVSACATCDGFFFKEKEVAVVGGGNAAVEEAMFLTKFASKVYLIHRRNELRAEKLLQEKLKANKKIQIIWDSVVEEVTGTDEPKGVSGVKIKNIKTNKTSDLKVDGLFIAIGHDPATSLFKDQLKMDKEGYLITKPDSTVTNIPGVFAAGDVRDKILGQQ

SEQ ID NO: 102650 - protein, 220 aa, Unknown
  Bacterial polypetide isolated from the Sargasso Sea
MSENPTKHTKVLIIGSGPAGYTAAIYAARAMLKPILVHGMEPGGQLTTTTDVENFPGFKDVIQGPWLMDQMKGQAEVVGTEMIQDHIASVDLKSKPFKAVGDSGQIYEADSIIISTGAQARWLNIDSEQSFRGFGVSACATCDGFFFKDKTVAVVGGGNAAVEEAMFLTKFASKVQLIHRRDSLRAEKLLQKKLMENKKIEIIWDSVVDEVIGDNDPKNV

SEQ ID NO: 102651 - protein, 152 aa, Unknown
  Bacterial polypetide isolated from the Sargasso Sea
MSQNPTKHTKVLIIGSGPAGYTAAVYAARAMLNPILVYGSAPGGQLTTTTDVENYPGFADVIQGPWLMDQMKDQAKAVGTEMIEDHIASVNLKSKPFEANGDSGQKYTADSIIISTGAQARWLNLDSEQEFRGFGVSACATCDGFFFKNKEV

SEQ ID NO: 102652 - protein, 242 aa, Unknown
  Bacterial polypetide isolated from the Sargasso Sea
MTKKIETDVLIIGSGPAGYTAAIYAARANLKPHLVSGLEPGGQLTITTDVENYPGFGEVIQGPWLMEQMKEQAVKVGTKFHHDIVNKVEFDINPFHAQTDSGIEFITKSIIIATGAQARWLNLDSENKFKGFGISACATCDGFFFKDQNIIVVGGGNSAVEEALYLTNFASKVTLVHRRDKLRAEKILQERLFKHPKIDVIWNHVVDEFIGVDEPISLKEVKLRNVNDNAEKIVNATGSIHC

SEQ ID NO: 102653 - protein, 209 aa, Unknown
  Bacterial polypetide isolated from the Sargasso Sea
MDNLHSPLIILGSGPAGYTAALYASRANLNPVLITGLEIGGQLTTTTDVENWPGDYDNLQGPILMDRMKAHVEKFNTKIIMDHIKDVKLDVRPFVLIGDDTEYTCDSLIIATGASAKYLGLESEKQYLGKGVSACATCDGFFYKNQEVIVIGGGNTAVEEALYLSNIASKVTLIHRRDKLRAEAMLVDKLNQKIKEGKIDVIWNAVLAS

SEQ ID NO: 102654 - protein, 189 aa, Unknown
  Bacterial polypetide isolated from the Sargasso Sea
MANIKEVTIIGSGPAGYTAAIYSARANLKPILISGLQPGGQLTITTDVENYPGYENPIQGPWLMEQMQKQAQLVGTEILNTQVTKVEFNNSLKKIFLDDGSIIESKTVIISTGAQARWLGLENEEKFQGHGLSACATCDGFFFKDRKVAVIGGGNSAAEEALFLTKFASEVFLIHRRDQLRAEKFLQIA

SEQ ID NO: 102655 - protein, 148 aa, Unknown
  Bacterial polypetide isolated from the Sargasso Sea
MSENPTKHTKVLIIGSGPAGYTAAIYAARAMLKPILVHGMEPGGQLTTTTDVENFPGFKDVIQGPWLMDQMKGQAEVVGTEMIQDHIASVDLKSKPFKAVGDSGQIYEADSIIISTGAQARWLNIDSEQSFRGFGVSACATCDGFFFK

SEQ ID NO: 102656 - protein, 164 aa, Unknown
  Bacterial polypetide isolated from the Sargasso Sea
MNNKSTKHTKVLILGSGPAGYTAAIYAARAMLKPILVHGSQPGGQLTTTTDVENYPGYSKVIQGPWLMEEMKGQAKAVGTEMIQDHINKVELSKKPFSVVGDSGQVYTADSIIISTGAQARWLNLKSEQNYRGFGVSACATCDGFFFKDKEVAVVGGGNAAVKK

SEQ ID NO: 102657 - protein, 217 aa, Unknown
  Bacterial polypetide isolated from the Sargasso Sea
MNNKSTKHTKVLILGSGPAGYTAAIYAARAMLKPILVHGSQPGGQLTTTTDVENYPGYAKAIQGPWLMEEMKGQAEAVGTIMIQDHINKVDLSKKPFAAVGDSGQIYTADSIIISTGAQARWLNLKSEQNFRGFGVSACATCDGFFFKDKEVAVVGGGNAAVEEAMFLTKFASKVKLIHRRNELRAEKMLQEKLKSNNKIEIIWDSIIEEVIGKNEP

SEQ ID NO: 102658 - protein, 257 aa, Unknown
  Bacterial polypetide isolated from the Sargasso Sea
IYAARANLEPVLFEGLESGGQLMLTTDVENYPGFDQGIMGPEMMQVFKNQAERFGTKILTETVDSIEKIENGFKLTTSKNTYEFKTVIISSGASANWLDVKGEKELQGHGVSACATCDGFFFKDKNVIVVGGGDSAMEEALFLTKFAKNVTVVHRRDSFRASKIMQDRVLGHDQIDVSWNKEVVEIKGEGQVSSVLLKDSQTSEIEEKEIDGVFIAIGHTPNVSFLNGFLELDEKGYIKTGSTTATSTSVPGVFAAG

SEQ ID NO: 102659 - protein, 170 aa, Unknown
  Bacterial polypetide isolated from the Sargasso Sea
MSQNPTKHTKVLIIGSGPAGYTAAVYAARAMLNPILVYGSEPGGQLTTTTDVENYPGFSEVIQGPWLMDQMKEQAKAVGTEMIEDHIGSVNLKSSPFEAIGDSGQKYTADSIIISTGAQARWLNLDSEQEFRGFGVSACATCDGFFFKNKEVAVVGGGNAAVEEAMFLTK

SEQ ID NO: 102660 - protein, 238 aa, Unknown
  Bacterial polypetide isolated from the Sargasso Sea
IVNDTIQSYDLDEEIIVLKGDQGEYFAKTLVVATGASARYLGLESEAKFLGRGVSACATCDGFFYKDKNVAVVGGGNTAVEEALYLANIASHVDIIHRRDSFRAEKILVSRVLERVQEGKITILWNHVLAEVLGDGGGVTGVKALNKIDNTINNINLDGVFIAIGHTPNTSIFQGQLEMDGGYILTGKKGALATQTSTPNIFAAGDVADPIYRQAITSAGSGCMAALDVEKYLESSNA

SEQ ID NO: 102661 - protein, 173 aa, Unknown
  Bacterial polypetide isolated from the Sargasso Sea
MSKIKNNVLIIGSGPAGYTAAIYAARANLEPHIVSGLEPGGQLTITTDVENYPGFGDVIQGPWLMEEMKKQALNVGTIFHNDIVTSVKFDNYPFISNTESGKEFISKAVIIATGAQARWLNIESENKFKGFGISACATCDGFFFKDQIVIVVGGGNSAVEEALFLTKFASKSN

SEQ ID NO: 102662 - protein, 282 aa, Unknown
  Bacterial polypetide isolated from the Sargasso Sea
MKEKINTEVLIIGSGPAGYTAAIYAARANLKPHLVSGLEPGGQLTITTDVENYPGYGDTIQGPWLMEEMKKQSLNVGTIIHNDMVTEVDFNSYPFISKTDSGLIFESKTVIISTGAQARWLGIKSEEKFKGYGISACATCDGFFFKDQKVAVIGGGNSAVEEALYLTNFASKVTLIHRRDELRAEKILQDRLFKNPKINVIWNKTVEEFIGNDEKPSLESLVLKDTKDNSESKLSVNGAFVAIGHDPSTSLFINKVQMDEDNYIITKPDSTETSVEGIYAAG

SEQ ID NO: 102663 - protein, 185 aa, Unknown
  Bacterial polypetide isolated from the Sargasso Sea
LGRGVSACATCDGFFYRDQEVAVIGGGNTAAEEALYLSRICSKVHLVHRRDKLRAEKILRDRVAEAESEGKIEMHWNSQLDEVLGDDKGVHSIQIVTDEESKKLDLTGVFIAIGHHPNTEIFKGQLEMKNDYITIKSGTDGMATATSVPGVYAAGDVSDQIYRQAITSAGFGCMAALDAEKFLSE

SEQ ID NO: 102664 - protein, 277 aa, Unknown
  Bacterial polypetide isolated from the Sargasso Sea
TGAEQGGQLTTTTDVENWPGDYDGLQGPELMERMKKHAEMFNVLIVNDHIGQTELSEKPFKLKGSKNWSCDSLIISTGASAKYLGLPSEKEFLGKGVSACATCDGFFYRDQEVAVVGGGNTAAEEALYLSRICSKVHLIHRRDKLRAEKILRDRVADEVEKGKIEMHWNSQLNEVLGDERGVNAIKILTDDDKKKLDLNGVFIAIGHHPNTEIFKGQLEMKNDYITIKSGTDGMATSTSVPGVYAAGDVSDQVYRQAITSAGFGCMAALDAEKFLSE

SEQ ID NO: 102665 - protein, 230 aa, Unknown
  Bacterial polypetide isolated from the Sargasso Sea
VTLTERPFRLKGDNGEYTCDALIIATGASARYLGLESEEAFKGRGVSACATCDGFFYRNQKVAVIGGGNTAVEEALYLSNIAAEVHLIHRRDTFRSEKILIDRLMDKVANGNIILHLDQTMEEVVGDAMGVTGLKMKSTKDGAITDLAVAGVFVAIGHSPNTGIFEGQLEMNNGYLKVQSGLQGNATQTSIEGVFAAGDVMDQHYRQAITSAGTGCMAALDAERYLDAKK

SEQ ID NO: 102666 - protein, 197 aa, Unknown
  Bacterial polypetide isolated from the Sargasso Sea
MSTSSHHRLMILGSGPAGYTAAVYAARANLNPVVITGLQQGGQLTTTTEVENWPGGTHDLQGPQLMQQMQEHVERLEASVVFDHIESVDLSARPFTVKGTAEYTSDALIIATGASAQYLGLPSESAFMGKGVSACATCDGFFYRNQEVAVVGGGNTAVEEALYLSNLCSKVHLIHRRDSLRAEKILQDRLMQRAKEG

SEQ ID NO: 102667 - protein, 273 aa, Unknown
  Bacterial polypetide isolated from the Sargasso Sea
MSQNPTKHTKVLIIGSGPAGYTAAVYAARAMLNPILVYGSEPGGQLTTTTDVENYPGFSEVIQGPWLMDQMKEQAKAVGTEMIEDHIGSVTLKSSPFEAIGDSGQKYTADSIIISTGAQARWLNIKSEQEFRGFGVSACATCDGFFFKNKEVAVVGGGNAAVEEAMFLTKFASKVKLIHRRDSLRAEKMLQKKLMENKKIEIIWDSVVEDVLGDKDPKNVKGIKIKNVKTNKIQELKLDGVFIAIGHDPATSLFKDQLKMDNEGYLITKPRFY

SEQ ID NO: 102668 - protein, 223 aa, Unknown
  Bacterial polypetide isolated from the Sargasso Sea
MNEKIENDVLIIGSGPAGYTAAIYAARANLKPHLVSGLEPGGQLTITTDVENYPGFENVIQGPWLMEQMKEQAVKVGTIFHNDIVTSVDFEKNPFTSKTESGKEFISKSIIIATGAQARWLNLESEKKFKGFGISACATCDGFFFKDQQVAVIGGGNSAVEEAMFLTKFASKVLLIHRRDSLRAEKILQERVFNNKKIEVIWNNKVSEFVGEENPNELKKLIL

SEQ ID NO: 102669 - protein, 185 aa, Unknown
  Bacterial polypetide isolated from the Sargasso Sea
MKTYKSDTIIVGSGAAGYTAAIYAARANMKPILVNGQQPGGQMTITTDVENYPGFKDVIQGPWLMDQMKAQAEGVGTKIINDTITECNFKLKPFKLIGDSKSIYYGKTTIIATGATARWLGIKSEEKFKGYGVSACATCDGFFFKNKIVAVVGGGNTAVEEALYLTLHAKKVFLIHRRDKLRAEK

SEQ ID NO: 102670 - protein, 185 aa, Unknown
  Bacterial polypetide isolated from the Sargasso Sea
MNQNPSKHTKVLIIGSGPAGYTAAVYAARAMLKPIMISGMEPGGQLTTTTDVENYPGFAKVIQGPWLMEEMRDQAKAVGTEMIEDHISSVNLKSKPFEAIGESGQKYTADSIIISTGAQARWLNIESEQKYRGFGVSACATCDGFFFKEKTVAVVGGGNAAVEEAMFLTKFASKVKLIHRRNSLR

SEQ ID NO: 102671 - protein, 192 aa, Unknown
  Bacterial polypetide isolated from the Sargasso Sea
MSQNPTKHTKVLIIGSGPAGYTAAVYAARAMLNPILVHGSEPGGQLTTTTDVENFPGFAEVIQGPWLMDQMKEQAKAVGTEMIEDHISNVNLKSSPFEATGDSGQKYTADSIIISTGAQARWLNLDSEQEFRGFGVSACATCDGFFFKNKEVAVVGGGNAAVEEAMFLTKFASKVKLIHRRDSLRAEKMLQK

SEQ ID NO: 102672 - protein, 166 aa, Unknown
  Bacterial polypetide isolated from the Sargasso Sea
MNQNPTKHTKVLIIGSGPAGYTAAVYAARAMLKPIMVSGIEPGGQLTTTTDVENYPGFAEVIQGPWLMEQMRDQAKAVGTEMIEDHISSVNLKSKPFEAIGDGGQKYTADSIIISTGAQARWLNIESEKKFRGFGVSACATCDGFFFKGKTVAVVGGGNAAVEEAM

SEQ ID NO: 102673 - protein, 176 aa, Unknown
  Bacterial polypetide isolated from the Sargasso Sea
MNQNPTKHTKVLIIGSGPAGYTAAVYAARAMLNPVLVHGMEPGGQLTTTTDVENYPGFAEVIQGPWLMDQMKEQAKAVGTEMIEDHISSVNLKSKPFEATGESGQKYTADSIIISTGAQARWLNLKSEQEYRGFGVSACATCDGFFFKEKTVAVVGGGNAAVEEAMFLTKFASKVK

SEQ ID NO: 102674 - protein, 204 aa, Unknown
  Bacterial polypetide isolated from the Sargasso Sea
MSKIENNVLIIGSGPAGYTAAIYAARANLKPHLVSGLEPGGQLTITTDVENYPGFGDVIQGPWLMEEMKKQALNVGTIFHNDIVTSVNFDNNPFISNTESGKEFISKAVIIATGAQARWLNLESENKFKGFGISACATCDGFFFKDQIVIVVGGGNSAVEEALFLTKFASKVILIHRRDSLRAEKILQDRLFKNNKIEIIGKVK

SEQ ID NO: 102675 - protein, 166 aa, Unknown
  Bacterial polypetide isolated from the Sargasso Sea
MSQNPTKHTKVLIIGSGPAGYTAAVYAARAMLKPIMVSGMEPGGQLTTTTDVENYPGFAEVIQGPWLMEQMRDQAKAVGTEMIEDHIASVNLKSKPFEAVGDGGQIYTADSIIISTGAQARWLNIDSEQKFRGFGVSACATCDGFFFKDKTVAVVGGGNAAVEEAM

SEQ ID NO: 102676 - protein, 214 aa, Unknown
  Bacterial polypetide isolated from the Sargasso Sea
MKEKINTEVLIIGSGPAGYTAAIYAARANLKPHLVSGLEPGGQLTITTDVENYPGYGDTIQGPWLMEEMKKQSLNVGTIIHNDLVTEVDFNSYPFISKTDSGLIFESKTVIISTGAQARWLGIKSEEKFKGYGISACATCDGFFFKDQKVAVIGGGNSAVEEALYLTNFASKVTLIHRRDELRAEKILQDRLFKNPKINVIWNKTVEEFIGNDK

SEQ ID NO: 102677 - protein, 299 aa, Unknown
  Bacterial polypetide isolated from the Sargasso Sea
RGPAGYAAGIYAARAGLEPLLITGAEQGGQLTTTTDVENWPGDHDGLQGPELMERMKKHAEMFDVLIVNDHIDQTELSKKPFKLKGSQNWSCDSLIISTGASAKYLGLPSEKEFLGKGVSACATCDGFFYRDQEVAVVGGGNTAAEEALYLSRICSKVHLIHRRDKLRAEKILRDRVADEVDKGKIEMHWNSQLNEVLGDDRGVNAIEILTDDDNKKLDLNGVFIAIGHHPNTEIFKGQLEMKNDYITIKSGTDGMATSTSVPGVYAAGDVSDQVYRQAITSAGFGCMAALDAEKFLSE

SEQ ID NO: 102678 - protein, 55 aa, Unknown
  Bacterial polypetide isolated from the Sargasso Sea
GYIIIKSGLDGSVTQTSVPGVFAAGDVADKVYRQAITSAGFGCMAALDAEKFLSD

SEQ ID NO: 102679 - protein, 163 aa, Unknown
  Bacterial polypetide isolated from the Sargasso Sea
MSQNPTKHTKVLIIGSGPAGYTAAVYAARAMLKPILVHGMEPGGQLTTTTDVENYPGFAEVIQGPWLMEQMKEQAQAVGTEMIEDHIDSVNLKSKPFEAIGDGGQKYTADSIIISTGAQARWLNIDSEQKFRGFGVSACATCDGFFFKEKTVAVVGGGKCGQL

SEQ ID NO: 102680 - protein, 180 aa, Unknown
  Bacterial polypetide isolated from the Sargasso Sea
MSQNPTKHTKVLIIGSGPAGYTAAVYAARAMLDPILVHGSEPGGQLTTTTDVENFPGFAEVIQGPWLMDQMKEQAKAVGTEMLEDHIGSVNLKSTPFEAVGESGQKFTADSIIISTGAQARWLNLKSEQEFRGFGVSACATCDGFFFKEKEVAVVGGGNAAVEEAMFLTKFASKVKLIHR

SEQ ID NO: 102681 - protein, 264 aa, Unknown
  Bacterial polypetide isolated from the Sargasso Sea
MNQNPTKHTKVLIIGSGPAGYTAAVYAARAMLNPILVHGSEPGGQLTTTTDVENYPGFANVIQGPWLMDQMKDQAKAVGTEMIEDHIGSVNLKSSPFEAIGDSGQKYTADSIIISTGAQARWLNIKSEQEFRGFGVSACATCDGFFFKNKEVAVVGGGNAAVEEAMFLTKFASKVKLIHRRDSLRAEKMLQKKLMENKKIEIIWDSVVEDVLGDKDPKNVKGIKIKNVKTNKIQELKLDGVFIAIGHDPATQLFKDQLKMDNEG

SEQ ID NO: 102682 - protein, 208 aa, Unknown
  Bacterial polypetide isolated from the Sargasso Sea
MSQNPTKHTKVLIIGSGPAGYTAAVYAARAMLNPILVYGSAPGGQLTTTTDVENYPGFADAIQGPWLMDQMRDQAKAVGTEMIEDHIASVNLKSKPFEAIGDSGQKYSADSIIISTGAQARWLNLKSEQEFRGFGVSACATCDGFFFKNKKVAVVGGGNAAVEEAMFLTKFASKVKLIHRRDSLRAEKMLQKKLMENKKIEIIWGLCS

SEQ ID NO: 102683 - protein, 256 aa, Unknown
  Bacterial polypetide isolated from the Sargasso Sea
PELMETLKAHAERLKVPLIFDHIKSCDLSQQPLSLSGEYHDYTCDSLIIATGASARYLGLPSEKAFMGKGVSACATCDGFFYRGKAVAVVGGGNTAVEEALYLSNLASHVTLIHRRDELRAEKMLQKRLFEKIDEGKISMAWCSTLDEVLGNESGVTGARLKSTQSDETHDIAVDGVFIAIGHDPNTGIFKGQLDMNGEGYLHIQSGITGNATATSKAGVFAAGDVADSVYRQAITSAGSGCMAALDAEKFLDHAQ

SEQ ID NO: 102684 - protein, 215 aa, Unknown
  Bacterial polypetide isolated from the Sargasso Sea
MSQNPTKHTKVLIIGSGPAGYTAAVYAARAMLKPIMVSGMEPGGQLTTTTDVENYPGFAEVIQGPWLMEQMRDQAKAVGTEMIEDHISSVNLKSKPFEAIGDGGEKYTADSIIISTGAQARWLNIESEQKFRGFGVSACATCDGFFFKEKTVAVVGGGNAAVEEAMFLTKFASKVQLIHRRDELRAEKLLQKKLMENKKIEIIWDSVVEEVIGDE

SEQ ID NO: 102685 - protein, 290 aa, Unknown
  Bacterial polypetide isolated from the Sargasso Sea
MTEKIENDVLIIGSGPAGYTAAIYAARANLKPHLVSGLEPGGQLTITTDVENYPGFENVIQGPWLMEQMKEQAVKVGTIFHNDIVTSVDFEKNPFTSKTESGKEFVSKSIIIATGAQARWLNLESEKKFKGFGISACATCDGFFFKDQQVAVIGGGNSAVEEAMFLTKFASKVLLIHRRDSLRAEKILQERLFNNKKIEVIWNSKVSEFVGEENPNTLKKIILENTLDSTKTTIDVNGAFIAIGHDPATSLFIDKLKMDEENYIITKPDSTETSIKGVFAAGDVKDKITD

SEQ ID NO: 102686 - protein, 261 aa, Unknown
  Bacterial polypetide isolated from the Sargasso Sea
MNNKSTKHTKVLIIGSGPAGYTAAIYAARAMLKPILVFGSEPGGQLTTTTDVENFPGYSKVIQGPWLMEEMKGQAKAVGTEMIQDHISEVDISTKPFKAIGDSGQVYTADSFIISTGAQARWLNLKSEKEFRGFGVSACATCDGFFFKEKEVAVVGGGNAAVEEALFLTKFASKVKLIHRRNELRAEKMLQAKLKANKKIEIIWDSVVEDILGEKNPKSVKGIKIKNVKTKKVSEIKIDGLFIAIGHDPATSLFKGQLNMD

SEQ ID NO: 102687 - protein, 248 aa, Unknown
  Bacterial polypetide isolated from the Sargasso Sea
MKEHVKKFKTEIIMDQIKLVNLKNKPFELTGDDAIYTCDSLIIATGASAKYLGLESEKKYLGKGVSACATCDGFFYRDQEVIVVGGGNTAVEEALYLSNIASKVTLIHRRDTLRAEAILVDRIKEKEKDGKVVFEWKHTLDEVLGDEEKVTAVKVKHVETGETKKINCSGAFIAIGHKPNTDIFRNSLDMDQTGYLTIQGGSTGNATQCSVTGVFAAGDVSDSVYRQAITSAGAGCMAALDAEKYLDK

SEQ ID NO: 102688 - protein, 191 aa, Unknown
  Bacterial polypetide isolated from the Sargasso Sea
MSDTRHSRVIILGSGPAGYSAAVYAARANLKPLLITGMQAGGQLTTTTEVDNWPGDVHGLTGPVLMERMKEHAERFETEIVFDHINQVDFSKKPYSLTGDSGVYTCDALIIATGASARYLGLPSEEAFMGKGVSACATCDGFFYRNKPVAVVGGGNTAVEEALYLANIASTVTLVHRRETFRAEKILIDKL

SEQ ID NO: 102689 - protein, 248 aa, Unknown
  Bacterial polypetide isolated from the Sargasso Sea
MNELKEQAERFGTKVEIDFISKVDFSNDKGGMHKLYTQNGDEIKSKTVIISTGASAKYLGLPSEKRLIGGGVSACAVCDGFFYKNQDVAIVGGGDTAIEEATYLAKICNTVTMLVRKDHFRASKAMQNRLSNYNNIKVLFNHEVIEVMGENVVDGLKIKNNLTNDLSELEITGLFIAIGHSPNTDIFKGIVDMDDSGYILTDKISTKTNIPGVFAAGDVQDKDYRQAITAAGTGCMAALDAERYLQEV

SEQ ID NO: 102690 - protein, 280 aa, Unknown
  Bacterial polypetide isolated from the Sargasso Sea
IVHGSQPGGQLTTTTDVENYPGYAKAIQGPWLMEEMKGQAAAVGTEMIQDHIKKVDLSKKPFTAEGDSGQVYTADSIIISTGAQARWLNLKSEQNFRGFGVSACATCDGFFFKDKEVAVVGGGNAAVEEAIFLTKFATKVKLIHRRDKLRAEKMLQEKLKANEKIEVVWDSVVEDVLGTNEPKGVNAIKIKNVKDNKIKELKVDGLFIAIGHDPATQLFKDQLKMDEEGYLITKPDSTITNIPGVFAAGDVKDKIFRQAVTAAGMGCMAALEAEKHLSDK

SEQ ID NO: 102691 - protein, 302 aa, Unknown
  Bacterial polypetide isolated from the Sargasso Sea
MSENHNKLIILGSGPSGYAAGIYAARAGLNPIIIAGMQEGGQLTTTTDVENWPGDSDGLQGPELMERMKKHALQFDVQVINDHIDSVDLSNQPFKLYGNSEYECESLIISTGASAMYLGLPSEKEYLGKGVSACATCDGFFYRDQKVAVIGGGNTAAEEALYLSNICSKVYLVHRRDELRAEKILQDRIFKQEQEGKIEILWDTQLTEVIGDDKGVTSIKLDTKGEESTKDVMGVFIAIGHKPNTEMFSDQLEMDNGYIIIKSGLNGSVTSTSVKGVFAAGDVSDQVYRQAITSAGFGCMAA

SEQ ID NO: 102692 - protein, 195 aa, Unknown
  Bacterial polypetide isolated from the Sargasso Sea
WLNIDSENKYKGFGISACATCDGFFFKDQNIIVVGGGNSAVEEALYLTNFASKVTLVHRRDKLRAEQILQQRLLNHPKIDVIWSHVVQEFIGSEEPLSLNKIKLKNINDNSERIVEATGAFIAIGHDPSTSLFKNKIQMDDENYIITKSDSTETSIKGVFAAGDVKDKIFRQAVTAAGMGCMAALEAEKFIAENY

SEQ ID NO: 102693 - protein, 157 aa, Unknown
  Bacterial polypetide isolated from the Sargasso Sea
MKPKTIENVTIIGSGPAGYTAAIYAARSGLNPLMISGLEPGGQLMITTDVENFPGFEKPIQGPWLMEQMQKQALSVGARVELGMVTSVNFKNFPFEISTEKKKIFSYSTIISTGAQARWLDVDGEKKYRGHGVSACATCDGFFFKNKTVAVIGGGNT

SEQ ID NO: 102694 - protein, 296 aa, Unknown
  Bacterial polypetide isolated from the Sargasso Sea
MNQNPTKHTKVLIIGSGPAGYTAAVYAARAMLNPILVHGMEPGGQLTTTTDVENYPGFAKVIQGPWLMDQMKDQAKAVGTEMIEDHISSVNFKSKPFEAIGESGKKYTADSIIISTGAQARWLNLESEKKFRGFGVSACATCDGFFFKEKTVAVVGGGNAAVEEAMFLTKFASKVKLIHRRDKLRAEKMLQKKLMDNKKIEIIWDSVVEEIVGDENPKNVKGLKIKNVKNNNMSDLKIDGLFIAIGHDPATQLFKDQLKMDKEGYLITKPDSTETNVPGIFAAGDVKDKIFKTAVT

SEQ ID NO: 102695 - protein, 306 aa, Unknown
  Bacterial polypetide isolated from the Sargasso Sea
MSQNKEHQTKVLIIGSGPAGYTAAVYAARAMLKPIMVAGFEPGGQLTTTTDVENYPGFSKVIQGPWLMDEMKKQAEAVGTIFINDVVKKVDTSNKPFVSETENGKVFKSDSIIIATGAQARWLKIPNEEKFRGFGISACATCDGFFYKDKKVAVVGGGNAAVEEALFLTKFASNVTLIHRRDNLRAEKMLQEKLKSNKKINIIWDTIVEKANGEDNPKSLNSITIKNKKSGEVKDLKIDGLFVAIGHDPATKIFKDKINMDNEGYILTKPDSTSTNVPGVFAAGDVKDKYTDKQLQLLVWVVWLRS

SEQ ID NO: 102696 - protein, 160 aa, Unknown
  Bacterial polypetide isolated from the Sargasso Sea
MSENPTKHTKVLIIGSGPAGYTAAIYAARAMLKPILVHGMEPGGQLTTTTDVENFPGFKDVIQGPWLMDQMKGQAEVVGTEMIQDHIASVDLKSKPFKAVGDSGQIYEADSIIISTGAQARWLNIDSEQSFRGFGVSACATCDGFFFKDKTVAVVGGGNA

SEQ ID NO: 102697 - protein, 317 aa, Unknown
  Bacterial polypetide isolated from the Sargasso Sea
GSGPAGYTAAIYAARANLQPLLVTGFNSGGIPGGQLMTTTFVENYPGFPDGVLGPELMDLMKAQAERWGTNLYESDVVSINTDSHPFELKTLEGTIKSNSIIIATGASANRLGVINEDKFWSKGISACAICDGATPQFRGEELAVIGGGDSACEEAAYLTKYGSKVHLIVRSEKLRASAAMVDRVKANPKIEIHWNTKVNKADGSEWLEKIETIHPLEGKGEINIKGLFYAIGHTPNTKFLANKIDLDNKGYIACKSGRPETSIEGIFAAGDVVDSEWRQGVTAAGTGCMAALATERWLAEKNLAKTIVRETPEPEK

SEQ ID NO: 102698 - protein, 292 aa, Unknown
  Bacterial polypetide isolated from the Sargasso Sea
GPAGYTAAIYAARALLKPILVFGSEPGGQLTTTTDVENFPGFAKVIQGPWLMEEMKGQAQAVGTEMIQDHIKKVDLSKKPFSAHGDSGQVYTADSIIISTGAQARWLNLKSEQKFRGFGVSACATCDGFFFKEKEVAVVGGGNAAVEEAMFLTKFASKVHLIHRRNELRAEKLLQEKLKANKKIQIIWDSVVEEVMGKNEPKGVDGIKIKNVKTNKTTELKVDGLFIAIGHDPATALFKDQLKMDKEGYLITKPDSTITNIPGVFAAGDVKDKIFRQAVTAAGMGCMAALEA

SEQ ID NO: 102699 - protein, 304 aa, Unknown
  Bacterial polypetide isolated from the Sargasso Sea
ILGSGPAGYTAAIYAARAMLKPILVHGSQPEGQLTTTTDVENYPGYSKVIQGPWLMDEMKGQAEAVGTEMIQDHISKVDLRKKPFTATGDSGQVYTADSFIISTGAQARWLNLKSEQEFRGFGVSACATCDGFFFKEKEVAVVGGGNAAVEEAMFLTKFASKVYLIHRRNELRAEKMLQAKLKSNKKIEIIWDTVVEDVIGTKEPKTVNALKIKNVKDNKVKELKVDGLFIAIGHDPATSLFKDQLNMDKEGYLITKPDSTETNIPGVFAAGDVKDKIFRQAVTAAGMGCMSALEAEKYLSETS

SEQ ID NO: 102700 - protein, 221 aa, Unknown
  Bacterial polypetide isolated from the Sargasso Sea
KPFNLSGTSNYTCDALLISTGASAMYLGLPSEKEFLGKGVSACATCDGFFYKDQEVAVIGGGNTAVEEALYLSRICSKVYLIHRRDELRAEKILQDRVFDQEKAGKIEILWDTQLKEVVGDDMGVTGVKLDNKGNEITKDVMGVFIAIGHKPNTEIFENQLEMDNGYIIIKSGLNGSVTSASIEGVFAAGDVSDQIYRQAVTSAGFGCMAALDAEKYLSEK

SEQ ID NO: 102701 - protein, 150 aa, Unknown
  Bacterial polypetide isolated from the Sargasso Sea
MSENPTKHTKVLIIGSGPAGYTAAIYAARAMLKPILVHGMEPGGQLTTTTDVENFPGFKDVIQGPWLMDQMKGQAEVVGTEMIQDHIASVDLKSKPFKAVGDSGQIYEADSIIISTGAQARWLNIDSEQSFRGFGVSACATCDGFFFKDK

SEQ ID NO: 102702 - protein, 223 aa, Unknown
  Bacterial polypetide isolated from the Sargasso Sea
LNPVIIAGAEPGGQLTTTTEVENWPGDSDDLQGPDLMERMKKHAEKFGVKIINDHISKVNLEQSPFLLNGTNSYEADTLIIATGASAKYLGLPSEQEFLGKGVSACATCDGFFYKDQEVAVIGGGNTAAEEALYLANICSKVHLVHRRDELRAEKILQDRVFKKADEGVIKIYWDNELEEVLGDASGVTGIKLKNKDSSMSSIDLHGVFIAIGHNPNTEIFDG

SEQ ID NO: 102703 - protein, 154 aa, Unknown
  Bacterial polypetide isolated from the Sargasso Sea
MSQNPTKHTKVLIIGSGPAGYTAAVYAARAMLSPILVYGSEPGGQLTTTTDVENYPGFSEVIQGPWLMDQMKEQAKAVGTEMIEDHIGSVNLKSSPFEAIGDSGQKYTADSIIISTGAQARWLNIKSEQEFRGFGVSACATCDGFFFKDKEVAV

SEQ ID NO: 102704 - protein, 159 aa, Unknown
  Bacterial polypetide isolated from the Sargasso Sea
MSQNPTKHTKVLIIGSGPAGYTAAVYAARAMLNPILVYGSEPGGQLTTTTDVENYPGFSEVIQGPWLMDQMKEQAKAVGTEMIEDHIGSVNLKSSPFEAIGDSGQKYTADSIIISTGAQARWLNIKSEQEFRGFGVSACATCDGFFFKNKEVAVVGGGN

SEQ ID NO: 102705 - protein, 246 aa, Unknown
  Bacterial polypetide isolated from the Sargasso Sea
MNKIENNILIIGSGPAGYTAAIYAARANLKPHLVSGLEPGGQLTITTDVENYPGFGDVIQGPWLMEEMKKQALNVGTIFHNDIVTSINFNNNPFVSKTESGKEFVSKAVIIATGAQARWLNIESESKFKGFGISACATCDGFFFKDQKVIVVGGGNSAVEEALFLTKFASKVILVHRRNSLRAEKILQDRLFKNNKIEILWDNKVIEFLGDNNPLTLKQVVLENTKNGERSNIDISGAFIAIGHDP

SEQ ID NO: 102706 - protein, 194 aa, Unknown
  Bacterial polypetide isolated from the Sargasso Sea
MSQNPTKHTKVLIIGSGPAGYTAAVYAARAMLNPILVYGAEPGGQLTTTTDVENYPGFADVIQGPWLMDQMKDQAKAVGTEMIEDHIASVNLKSQPFEAIGDSGQKYSADSIIISTGAQARWLNIKSEQEFRGFGVSACATCDGFFFKDKEVAVVGGGNAAVEEAMFLTKFASKVKLIHRRDSLRAEKMLQKKL

SEQ ID NO: 102707 - protein, 295 aa, Unknown
  Bacterial polypetide isolated from the Sargasso Sea
LTAATYAARANLEPLVFEGSQPGGQLTITTDVENYPGFPEGILGPELMDKFRDQAKRFGAECHFKHVTKVDLSDRPFKVWVADETYTSDTIIIATGATARLLGLESETRLMGHGVSACATCDGFFFKDKKVFVIGGGDSAMEEANFLTKFASEVQIVHRRDALRASKIMQDRIMNNPKITIQWNTALEDIEGNEANGVSGVSLRDTCTDEVRQEPCDGVFLAIGHVPNTELFDAVLDLDDQKYIRTIDASSRTSIAGVFACGDVQDHVYRQAITAAGTGCMAAMDAEKYLESLAA

SEQ ID NO: 102708 - protein, 171 aa, Unknown
  Bacterial polypetide isolated from the Sargasso Sea
MLGVSAEQKPKQRHFDLLVIGGGSGGLAASKAAAELGKQVAVCNFVKPSPQGTTWGLGGTCVNVGCIPKKLMHHAAQLGESRKDSIWYGWEVPIDEGEDRNRDQFLVPEAKHSWETLVKNVQGYIKSTNFAYKAQCRSNNVEYLDAFASFTSPTSVEALYKTGETTTITAD

SEQ ID NO: 102709 - protein, 85 aa, Unknown
  Bacterial polypetide isolated from the Sargasso Sea
TFNYLGLFIAIGHKPNTDLFSGQLDMNNGYIKIHSGLDGNSTATSIPGVFAAGDVSDHIYRQAITSAGSGCMAALDAEKYLAELK

SEQ ID NO: 102710 - protein, 197 aa, Unknown
  Bacterial polypetide isolated from the Sargasso Sea
MSTSSHHRLIILGSGPAGYTAAVYAARANLNPVVITGLQQGGQLTTTTEVENWPGGTHDLQGPQLMQQMQEHVERLEASVVFDHIESVDLSARPVTLKGTAAYTCDALIIATGASAQYLGLPSESAFMGKGVSACATCDGFFYRNQEVAVVGGGNTAVEEALYLSNLCSKVHLIHRRDSLRAEKILQDRLMQRAEEG

SEQ ID NO: 102711 - protein, 205 aa, Unknown
  Bacterial polypetide isolated from the Sargasso Sea
MRQNPTKHTKVLIIGSGPAGYTAAVYAARAMLNPILVYGAEPGGQLTTTTDVENFPGFADVIQGPWLMDQMKEQAKAVGTEMIEDHIASVNLKSQPFEAIGDSGQKYTADSIIISTGAQARWLNIKSEQEFRGYGVSACATCDGFFFKDKEVAVIGGGNAAVEEAMFLTKFASKVKLIHRRDSLRAEKMLQKKLMENKKIEIIWD

SEQ ID NO: 102712 - protein, 230 aa, Unknown
  Bacterial polypetide isolated from the Sargasso Sea
MSQNPTKHTKVLIIGSGPAGYTAAVYAARAMLKPIMVSGMEPGGQLTTTTDVENYPGFAEVIQGPWLMEQMRDQAKAVGTEMIEDHISSVNLKSKPFEAVGDGGEKYTADSIIISTGAQARWLNIESEQKFRGFGVSACATCDGFFFKEKTVAVVGGGNAAVEEAMFLTKFASKVQLIHRRDQLRAEKLLQKKLMENKKIEIIWDSVVEEVIGDENPKNVKGLKIKNVKT

SEQ ID NO: 102713 - protein, 197 aa, Unknown
  Bacterial polypetide isolated from the Sargasso Sea
MSNNHNKLIILGSGPAGYSASIYAARASLNPIIIAGSQEGGQLTTTTDVENWPGDSDGLQGPELMDRMKKHSQQFGVEIVNDHINEVDLSSRPFVLKGTNSYTCDSLIISTGASAMYLGLPSEKEYLGRGVSACATCDGFFYKDQEVVVIGGGNTAVEEALYLSRICSKVYLVHRRDELRAEKILQERVFKEESNGK

SEQ ID NO: 102714 - protein, 203 aa, Unknown
  Bacterial polypetide isolated from the Sargasso Sea
MENIKRKLIILGSGPAGYTAAVYAARAGLEPCLITGMEQGGQLTTTTDVENWPGDSDGLQGPELMDRMLKHVESLEVEVIFDHIEDADLSSKPFSLTGNVSSYDTDSMIIATGASAQYLGLETEQQYMGKGVSACATCDGFFYKDKDVAVIGGGNTAVEEALYLSNLCSSVTLIHRRDTLRAEKILQERLFKKQQEGNIKIIL

SEQ ID NO: 102715 - protein, 207 aa, Unknown
  Bacterial polypetide isolated from the Sargasso Sea
HTKVLILGSGPAGYTAAIYAARAMLKPILVHGSQPGGQLTTTTDVENYPGYSKVIQGPWLMDEMKGQAEAVGTEMIQDHISKVDLTKKPFTATGDSGQVYTADSFIISTGAQARWLNLKSEQEFRGFGVSACATCDGFFFKEKEVAVVGGGNAAVEEAMFLTKFASKVYLIHRRNELRAEKMLQAKLKANKKIEIIWDSVVEDVLGT

SEQ ID NO: 102716 - protein, 223 aa, Unknown
  Bacterial polypetide isolated from the Sargasso Sea
LSERPFKLMGSQNWSCDSLIISTGASAKYLGLPSEKEFLGRGVSACATCDGFFYRDQEVAVIGGGNTAAEEALYLSRICSKVHLVHRRDKLRAEKILRDRVAKAESEGKIEMHWNSQLNEVLGDEKGVHSIKIVADKDSKKLELTGVFIAIGHHPNTEIFKGQLEMKNDYITIKSGTDGMATATSVPGVYAAGDVSDQIYRQAITSAGFGCMAALDAEKFLSE

SEQ ID NO: 102717 - protein, 160 aa, Unknown
  Bacterial polypetide isolated from the Sargasso Sea
MNQNPTKHTKVLIIGSGPAGYTAAVYAARAMLKPIMVSGMEPGGQLTTTTDVENYPGFAEVIQGPWLMEQMRDQAKAVGTEMIEDHISSVNLKSKPFEAIGDGGQKYTADSIIISTGAQARWLNIESEQKFRGFGVSACATCDGFFFKDKTVAVVGGGNA

SEQ ID NO: 102718 - protein, 208 aa, Unknown
  Bacterial polypetide isolated from the Sargasso Sea
MNNKSTKHTKVLILGSGPAGYTAAIYAARAMLKPILVHGSQPGGQLTTTTDVENYPGYSKVIQGPWLMDEMKGQAEAVGTEMIQDHISEVDLTKKPFTAKGDSGQVYTADSFIISTGAQARWLNLKSEQEFRGFGVSACATCDGFFFKEKEVAVVGGGNAAVEEAMFLTKFASKVYLIHRRNELRAEKMLQAKLKSNKKIEIILGYSS

SEQ ID NO: 102719 - protein, 294 aa, Unknown
  Bacterial polypetide isolated from the Sargasso Sea
MKEKINTEVLIIGSGPAGYTAAIYAARANLKPHLVSGLEPGGQLTITTDVENYPGYGDTIQGPWLMEEMKKQSLNVGTIIHNDLVTEVDFNSYPFISKTDSGLIFESKTVIISTGAQARWLGIKSEEKFKGYGISACATCDGFFFKNQKVAVIGGGNSAVEEALYLTNFASKVTLIHRRDELRAEKILQDRLFQNPKINVIWNKTVEEFIGNDIKPSLESLALKDTKDNSESKLSVNGAFVAIGHDPSTSLFMNKVKMDEDNYIITKPDSTETSIPGIYAAGDVKDKIYRQAVT

SEQ ID NO: 102720 - protein, 151 aa, Unknown
  Bacterial polypetide isolated from the Sargasso Sea
MNQNPTKHTKVLIIGSGPAGYTAAVYAARAMLKPIMVSGMEPGGQLTTTTDVENYPGFAEVIQGPWLMEQMRDQAKAVGTEMIEDHISSVNLKSKPFEAIGDGGQKYTADSIIISTGAQARWLNIESEQKFRGFGVSALCTCDGFFFKDKT

SEQ ID NO: 102721 - protein, 301 aa, Unknown
  Bacterial polypetide isolated from the Sargasso Sea
GSGPAGYTAAVYAARAMLKPILVHGIQPGGQLTTTTDVENYPGFANVIQGPWLMDQMKEQAQVVGTEMIEDHIASVNLKNKPFEAFGESGQKYTADSIIISTGAQARWLNLKSEQDLRGFGVSACATCDGFFFKEKTVAVVGGGNAAVEEAMFLTKFASKVKLIHRRDKLRAEKMLQKKLMENKKIEIIWDSVVEDVLGDKDPKNVTGIKIKNVKTNNFQELKVDGLFIAIGHDPATQLFKDQLKMDKEGYLITKPDSTETNISGVFAAGDVKDKIFRQAVTAAGMGCMAALEAEKHLSHT

SEQ ID NO: 102722 - protein, 266 aa, Unknown
  Bacterial polypetide isolated from the Sargasso Sea
MSQNPTKHTKVLIIGSGPAGYTAAVYAARAMLNPILVYGSEPGGQLTTTTDVENFPGFADVIQGPWLMDQMKEQAKAVGTEMIEDHISSVDLKKTPFEAVGDTGQKYTADSIIISTGAQARWLNLKSEQEFRGFGVSACATCDGFFFKDKEVAVVGGGNAAVEEAMFLTKFASKVKLIHRRDNLRAEKMLQKKLMENKKIEIIWDSVVEDVIGDKDPKNVKGIKIKNVKTNKIDEIKLDGVFIAIGHDPATQLFKNQLNMDNEGYL

SEQ ID NO: 102723 - protein, 303 aa, Unknown
  Bacterial polypetide isolated from the Sargasso Sea
GPAGYTAAIYAARANLQPHLVSGLEPGGQLTITTDVENYPGFGNVIQGPWLMEEMKKQALNVGTIFHNDIVTSVNFDNNPFISITESGKEFISKSIIIATGAQARWLNIDSENKFKGFGISACATCDGFFFKDQKVIVVGGGNSAVEEALYLTKFASKVILVHRRDSLRAEKILQDRLFKNEKIELLWDSKVIEFVGKENPQTLKQVILENTKNGKQSKIDIDGAFIAIGHDPATSLFKGKVDMDNENYIITKNDSTETSIKGVFAAGDVKDKIYRQAVTAAGMGCMAALEAEKFIQKVISLT

SEQ ID NO: 102724 - protein, 310 aa, Unknown
  Bacterial polypetide isolated from the Sargasso Sea
MNNKSTKHTKVLILGSGPAGYTAAIYAARAMLKPILVHGSQPGGQLTTTTDVENYPGYSKVIQGPWLMDEMKGQAEAVGTEMIQDHISEVDLTKKPFTAKGDSGQVYTADSFIISTGAQARWLNLKSEQEFRGFGVSACATCDGFFFKEKEVAVVGGGNAAVEEAMFLTKFASKVYLIHRRNELRAEKMLQAKLKSNKKIEIIWDTVVEDVIGTKEPKTVNALKIKNVKDNKVKELKVDGLFIAIGHDPATSLFKDQLKMDKEGYLITKPDSTETNIPGVFAAGDVKIKFLDKLLLLLEWVVCRHLRLKI
